United States Patent Application Publication US 2011/0014706 A2 - sequence listing, part 55

SEQ ID NO: 170567 - DNA, 802 bp, Arabidopsis thaliana landsberg
caacgactctaaaacctgatatatctttgagggagatcaatgtgaatttgatgttgatgttctggttgctccatccctgactaaatgggaagtcgtgtcctttaatcagacaatccttgatcccaagttctcgtggtctcgcaagaaatttaaagagttaaaagaggagttatacaactcagacaagtttttagtaggaggaaggcaatggtgaggagtctaaaaaaaacttgttttgctttttcatattacatatgctatgttaacaagtgcaaaattgttctgtaggtttctaaaggtgcatcctaagggtgttaaagcacgagacaactcgttatccatttatgtgtatttaagtgaaagtgaaacactcaatgcagaggagaaaatctacacgcgagtacatcttagagttttagatccgtttggatccattcaccaagccgggcaatgtaagtttccaaaacaataagtatatcatatcatcttatagttgttttacttcactggttgatgaaacataatgtttcatttggtgctctttttcgtccctcgtttactattttaaattataagttgtaattatatttgacttataatcaatatgcatgcttatatttcttcctctgttgttgcaggcaacttctggcgcacaaatacaaataaaaaccaaggctatggttggcctacttttgcgtctttagataaagtgcgagagaagtacttggacaatgagggttctttgaacatagagattgaatttgcagttgtttctagcaccaaatactctcctgttaactaa

SEQ ID NO: 170568 - DNA, 1967 bp, Arabidopsis thaliana landsberg
cttatcttttaatgcagaacaggctcgaagatctttacaggcttctatgtttcctgcatgttgaaccatgtttcaattgggcttggtatgatcagacttcatctaaaatcgtgctattcttcggtgtataattctattttatttaacttttactcatgtgttgtgtatgtatatataggtggagtaagttgatacagaagccttatgaaaatggtgatccacgaggactgaagctgatcaaggcgattttgaggccattgatgctgagaagaacaaaggaaacaagggacaaagaaggaaggttagtttttttctctgtttcagtcccctttttctcttttcatttgcttgtcttatgcttaactttccactaccttttctgcaaattttcagtctaattcttgaacttcctccaaccgatgtccaagtcattgaatgtgaacaatctgaagcagaacgtgacttctatacagcccttttcaagagatccaaagtaagtgttatcaatttatagttataggcttcaagctcaataaagtccgttataagattgattatgatctgttgtaatggttcttgatgctttggtaaatgcataacagtctcctttattctggaacaggtccaatttgaccagtttgttgcacaaggaaaagttcttcacaactatgcaaacatcctcgagctcctcctccgtctacgccaatgttgtaaccacccttttctagttatgaggtacaaagcaaaagttcattcaataaactcttttatttccattgaaatggattcttatacctggaaataaattgcagccgggcagattcacaacagtacgctgacttagatagccttgcaaggaggtttcttgataacaaccctgactctgtttcccaaaacgctccttctcgggcatatatcgaggaagttatacaggatttacgcgatggcaatagcaaagaatgtccaatatgtctggagtctgcagatgatcccgttctcacaccttgtgctcacagaatgtgccgtgaatgtctccttactagctggcggtctccatcttgtggtctatgcccaatctgcaggacaatcctgaagagaaccgaacttatctcatgcccgacagatagtatattccgtgttgacgtggtaaagaactggaaggagtcttcaaaggtttcagagctgctcaagtgcttagagaagatcaaggaatctggttcgggcgagaagagcattgtctttagccagtggacttcatttttggatcttttggagattccattgcgaagaagaggattcgagtttcttagattcgatgggaagctggctcagaagggaagagaaaaggtcttgaaagagttcaatgacaccaaagagaaaacagtaagtcattgtctaaatatctaactaactcttgtctaaatcaaacaagagcttaagatctttatgcttctgtgatgtattacagattttgcttatgtctctgaaagctggaggagtcggtcttaatcttactgcagcttcaagtgtcttcttaatggtaccatctctcttcaagctttgtttttttaagtcttcttgatgatgatgaattgatcatttggttatgtttcttgaaatacgtaggatccatggtggaatccggcggtggaagagcaagcgatcatgagaattcatcgaatagggcagacacgaacggtattcgtcagaagattcattgtcaaggtaacactatataaactgcaactttctctgagtttctagcatcgtaagcaagatctcgtaagtaagtaacattgtgtttgttttggatgattgtgtgcaggatacagtggaggaacggatgcagcaagttcaggcaaggaagcagaggatgattgccggagctttgacagatgaagaagtccggtctgcaagacttgaggagctcaaaatgttgttccgatgagagagacttggagaaagtc

SEQ ID NO: 170569 - DNA, 2143 bp, Arabidopsis thaliana landsberg
gtttctttatatgaattgtaagctttaaccaatcacagattttttcatctgattttatgataaaccaccaagaagatgcacacgagtttctacaatcatttctggataagttagaaagatgttgtttagatcctaagaatcagcttggctctgtctcatctcaagatttgaacattgttgacaatgtctttggtggcggtctcatgagtacggtaagatatcgttaattcattaccgtactattaatctagtgttgaagcagtttccatttatgcataatgactcttggaaatatgtttgatctattcctttttcagctttgttgttgcaattgtaattctgtttccaacacgtttgaaccttctcttggatggagtctggaaatagaagatgttaataccctctggaaagctctagaatcctttacatgtgtcgaaaaacttgaggaccagttaacatgtgataactgtaaggagaaagtcacaaaggagaagcaacttaggttcgataagttgccgccggttgctacattccatcttaagaggtttactaatgatggagttactatggagaagatcttcgatcatattgagttccctttggagttggatttgtcccctttcatgagcagtaaccatgatcctgaggtatgtcaaaatttcagacttttttgttttgtaaaacttgagatttttgagtcttaacacccaattttgtatattcaggtttccacaagatatcatctttatgcctttgtggagcatattgggattagagcaacctttggtcattattcctcttatgtgagatcagctcctgagacatggcataattttgatgactccaaggtaatattattatatagtgctttcatatcatttgtgtggcttagtcctctctgatttcaataaatttaactttcttgatgttttttttttttaactatggcaggtcacgagaatcagtgaagagagagttctatcccgtcctgcgtatatattgttttatgcaagagaaggaactccttggttttccagtacttttgaacagttgaagacagtgtttgaagctactccgttacatttttcaccagtatcagtgcttgataacagttacgagagtgttgataattccagtaaagtctgcaacgattcggtgggagtatcgatccctgatgtaaaatggccagattcttgctgtcaagagccaaaagaggaagtgttccattcagccgagtctagcaacaatgaagattcttcagccatgattgatgttctcgggtcacctcaatctgagaaaccattcgctgaaacctcccaacagacagaacctgagtcatgtccaactgaaaacaaagcttacatcgatgaatctgagaagccatttgctgagacctctcaaccgaaagaacctaagccaagtccagctgctgacagagctagcatcgattcccctctgctcaaggttcagaatcaagaaatatttccaaaacgcaaaggtactatctcttactaagtacttttgacagcttaccttggagaatactaagaaagataggagaatctgataaattcagataaatgattgtgtaatacgtaaatcatctgttgcaagaagtatcaatctgaactagaacctagaacaaactggagagtgttgatctgtcaacaaagttcttatacagtgtatgtgtaactctatgtacagctggtgagagagctacgctcggtggacctaagctcaagtatcaaaaaccaaattcccatccgaaacgcccaggtactatgtgttttgatagatttaatctcaattatagtaaaactgtggaagagttttatgtatttaagtggtgaaaaaaagaaagatccttagtctgagtgtgtgtgattctgtaacaggaacctttcagattcaacgtgcgcatttgcaaactaagaagcaagaagaatctcgtaaaacaaagcggccgttgtttagaagcaatgttgctgcttctgctccagatcctaagtacaaaaatcatgctctttcatatctcaacagggcccagacacctcgcgctcgaaagctcgctaatgctttgagtgattctccgaccaagaaaaagaaaagctctaacatgagaagatctattaaactttga

SEQ ID NO: 170570 - DNA, 608 bp, Arabidopsis thaliana landsberg
cagtggatatcaatgggtttgtggttgtttctccaaaggtaagaaggcgggtttcatcttcaattgttattgtaatatatggtatagtagagtatgttctctctgtttccaaaccccacaaagaatgctctctctctctttctcatatatttggaatcgcaggcggaatctgtgagacgtatactcgaaagacacccagacatatcagtggagtttcgtggaaagaaccaacaactgaggaacgcatgtatgaatttcctgctcagcttaatcgaaacgatgtgccagtcactggaggagctctcgaatgaagatcttgtggaagcagacgtagcgttgacatacttgagagatgcagggtttaaggttgattggttggagaagaagctggaccaactaaaggaaaagaaggaggaagagatgtctggtttggccaggctccatgagatagaggaaaatctagtgatattgaagcaaaagtggtcagacctgggtgctcttgcggagaaggagaaggcagacttgtcggccaccagaagtgctctgtctttcgatgattttgtttgctgactttgagttgttaggcattttggtcttctgatatctta

SEQ ID NO: 170571 - DNA, 1014 bp, Arabidopsis thaliana landsberg
agaagatgggtggtgaaaagtttggatttttgatttggattttatcgattctttgcttaatcttcctctgctatggatacgtaccagtggataattacctcatcaactgtggatcatcaaccaacgtcactgtcactagtcgagtgtttatctctgataaccttgcttcaaactttctaacctctcctaatgaaatcctcgccgccagtaatcgcaattcaaattcagatatttaccagacggcgagaatcttcaccggaatctctaagtatagattctccgttactaaaggtcgccactggattcgtctccatttcaatccttttcagtaccaaaacttccaaatggtctcagctaaattctctgtttcttcagaaacacatgttcttttgagtgatttcactgtgagttccagagttatgaaggaatactctctgaatgtagctacggatcatctggagctcacgtttactccctcgggtgattcgtttgcgtttctgaacgcgctcgaggttgtttcggttcctgatacgttgttcagtggtgatccttcctttgcaggcagtcctgggaagtttcagggcttgtcatggcaagctcttgaaacggtctatagagtgaacatgggcggtccgcgtgttacgcctagtaacgatactctttcgagaatttgggagcctgattctgagtttctagttgagaagaatctagttaagagtgtgtctaagattgcatctgttgattatgttcctggttttgctacagaggagactgctcctagaactgtctatggtacttgcaccgagatgaattctgcggataacccgtctagcaacttcaatgtgacttgggatttcgatgttgacccgggttttcagtactttctacggtttcatttctgcgatatcgtgagtaaagctataaaccagaattacttcaatctttatgtcgactctatggatgttgttgagaatcttgatctgagctcttatttatccaacccattgagtggtg

SEQ ID NO: 170572 - DNA, 1220 bp, Arabidopsis thaliana landsberg
  unsure (1)..(1220): unsure at all n locations
tgtatttaaagctcgatagtacctcttgtaattgaccatgtgtgatagtgtcttgaaggtctgttggaacttggatactcttggggattntgtggtaatgagaagtaatggccaacccgtttacaacttntgtgttacggtagatgatgctaccatggctatatcacatgttataaggtagtgtcttcttttggaatttgagtttcttctcttaacatgtttgaatgttatcttgatcaaatctattaactttcatttcagggctgaagaacacttgcctaatactttgaggcaggctctaatttacaaggtaagcactagcttatgtttgtttattccaattgtaagttatgtgatccagaatataggaggaagaatttgatttattgctgtctgtatcaatcaatggcaggctcttaagttcccgatgcctcaatttgcacatgtttctttaattttagctccggatagaagtaaattatcaaagcgacatggggcaacttctgtaggccaggtgattatagctgttatttcctttactgctcgtagatcatagattactccattgctgattcttcatctaatttctgctttatgtccctttcgaaaaaacagtacagagagatgggatatctacctcagggaatggttaactatttggcactcttaggttggggagacgggactgaaaatgaattcttcacactcgaggatcttggtaggtcgtttttgttgactgtagttactttgttgtcatccctagcttttctgatttcttcattgaatgtttgttcttgatttgcagttgaaaaattctcgattgaacgtgtcaacaaaagtggcgcgatttttgattcaacaaagttaaggtgattatagattttacttagctgtttgaattatccaatcttattctctcttgtttttcgtatctctgtttgttctctacctttttcttataagtagcttcaatgtggcatatttataaactcaaagatggatgaatggtcaacatctgagggcacttccaaatgagaaactaacaaaacttgttggtgagcgatggaagagcgctggtatcttaacagaatccgaggggagttttgtaaatgtatggtttctaatcatgactccgcactttcttctgatcctaacataaagctttggaattaggaacaacagattttttctgtatagacttacccagtttgagcttgttg

SEQ ID NO: 170573 - DNA, 1807 bp, Arabidopsis thaliana landsberg; identical to SEQ ID NO: 26273
  unsure (1)..(1807): unsure at all n locations

SEQ ID NO: 170574 - DNA, 774 bp, Arabidopsis thaliana landsberg
atgagcctccgaaacgtggccatcatagcgcacgtggatcatggcaagaccaccctggtccatcagctgtttcgccaatcgggcaccttccgcgacaaccagcgcgtcaaagagcgcgcgatggattcgaacgatctcgagaaggagcgcggtatcacgagcctcgcgaagcctacctggatcgagtgggacgaccacatgggccacaagacgcggatcaacatcatcgacacccccggccacgccgacttcggcggtgaggtcgagcgcggcctgtcgatggtggacgccgtggtgctgctggtggacgcctccgagggtccgctgccgcagacccggttcgtgctgcgcaaggcgctgtcggcccggctgccggtgatcctgtgcatcaacaagaccgaccgcccggactccaggatcgacgaggtcgtcaacgagacctacgacctcttcctggacctggacgccgacgaggaccagatcgagttcccgatcgtctacgcctgcgcccgggacggcgtcgcgtcgctgaccaagccggagaacggcacggtccctgcggacagcgacagcctggagccgttcttctccaccatcctgtccaccgtcccggcgccggtcttcgacgaggaggccccgctgcaggcgcatgtcaccaacctggacgcggacaacttcctcggccgtatcgcgctgctgcgggtcgagcagggccacctgaagaagggtcagaccgtcgcctggatcaagcgcgacggcaccatctccagcgta

SEQ ID NO: 170575 - DNA, 1083 bp, Arabidopsis thaliana landsberg
tcggatttcccaacttactatttttggaagaaaacaaaatgttgtggcatacatatatagttaatcctatattctcactgtcagacttccttgtttgtatatgttatgcatagactgtatatttctctttggtaactttctttaaacaaactactcggatgcaccaatctgtttaataatcatgtggtcttgttttctatgattgatcggtattagggagatcaagcttcgatcatcggaggagtgatagagttcatcaaagagttgcagcaattggttcaagttcttgagtccaagaaacgtcgaaagaccctaaaccgaccatctttcccttatgatcaccagacaatcgagccatccagtttaggagccgccactacccgagtaccgtttagtcgaatcgaaaatgtgatgaccacaagtactttcaaggaagtaggagcatgctgtaactcccctcatgctaacgtagaagcaaagatttcaggttctaatgttgtattgagagttgtctctaggcgaatcgtggggcagctcgtaaagatcatctctgtcttagagaagctatcttttcaagttcttcacctcaatattagtagcatggaggagactgtcttatactttttcgttgttaaggtacatatcttcatctacatacaaattaaatacattgttagtcaatatattgaacaaccgataaaactcattatatctatcatgaaattagatggaatttggtgttatagaactattacaaagtaaaatgctcctaatgaatgatcaaacaccaattattgctaaaccgatgtcttgcatcgatttagttacttaaccaaattatgactatttaacttgatttgtacttctttaatttacaccaaaagatatatcagtattattagttaagctcaatgtatatatatatggatcagataatatttgtatgagtcttttgttttgaattcgacggaattaaatttacatgtgcagataggattggagtgtcacttaagcttggaggagctaactcttgaagttcagaaaagctttgtgtctgatgaagtgatcgtctctaccaattaa

SEQ ID NO: 170576 - DNA, 396 bp, Arabidopsis thaliana landsberg
tatgccgctaaaaagatctcgtggtagggagtctgtggaggaggagggacggtccttggatctgccgtgcagcgatatgaccttcgtgagagagtcgggggtaggtgggtgaggaaggatgtggtcgagtgttcctgaattatgtcggagactggatcaagcggtatggttgctgattttggtcttgcagggatagctgctatgccagagcggattatccgggaggatgtgcagataagggatgggatgatgatcgattcggattgtgaggatgattttgtgatcacgggagtgaggacggtggagcagaagctggcttcggagggacatgaaatcgtgatggtccatactatgtgagtgtttctcgaaaaggtctgcgtcgcatcctttgcactt

SEQ ID NO: 170577 - DNA, 886 bp, Arabidopsis thaliana landsberg
gactattatcatcttcctgttatttttcttacgaattagtatcatttattatccattccatttaagggaaaggcaaagttatgggccaagaaaagtcaaaactaacaaaaacattaaatataagttcatgaatcctaagcgcgactgcttcatatagatcactagaatggctttttctgtataattttttgaacacgaaatataacaatagattaatcatcataatgagcatttgtcatctactaaagttacaaactaataaagtacacctaatgcatgttgacaaacaaaaacaaagatacaagttgatattcttagattaatacaatatatttagggattggttttagactttcagtacttaataaatattttagttaaacaattggacataaagaaactcaatatttcttttaaatactaactgtgatcgttattcaggattttaaaatgctttttcaattattggatttacagatttttggtagtcaacattccggttaggcagtttccaaaccggggagccttcacaagcgcgtacccgtctaaaccgatgtctctatacgtcaccgtttgggacggttcagagtgggccactaaaggtggtaagtaccccgtcaactacaagtacgcccctttcgtggtttccgttgctgacgtggagttaagtggctgttccgttaacaacggatcctctaccgggtccgggccatgtaccaagtcgggcgggtcgatttcgagtctggaccctgttgatggtcaggattttgccacgttgtcgaagaatcagatcaatgccatggattgggctaggagaaagctgatgttctattcttattgcagtgataagccaagatacaaagtcatgcctgctgagtgcaactga

SEQ ID NO: 170578 - DNA, 1532 bp, Arabidopsis thaliana landsberg
ttatttaaaccagttttgaattcctcacttataattctctccgggttgtctcctcaggatgtaaaattgttgatcgaagaccttgctgagcttaaaccaactattttttgtgctgtacctcgtgtcctggatagagtatactcaggtaagatgtttgaaatatcatatgtccaagtagagcaagtacttttcaattcgccctctatattgaattatgttctcgtatcatctgttttttccaaataactgaatctgaggttttacatttgtaccacgttacacaccttcatgaaactattactagctgatgatgggatataccaaatgtgaaaaatattctcaattctactagaatattcttatgataagctttcattctttcttctttggtgattgttacattttcccattatttatattcctaattatcaattcgatttcgtatcattgatatacatggtttattcacttggacaagttacccgtgtctcattaggttgacctattatattaaacaggtcttcagaagaagctttctgatggtggattcttaaaaaagttcatatttgattctgcattttcctagtaagtcaaacttctctttgcttatctatgtcactaatctttaagctatatgatctaacacactcaaaacgttctcagtaaatttggttatatgaagaagggacagtctcatgtggaggcctctccactttttgacaaacttgtgttcagcaaggtaagtagtctctaaaaataactatctgaaactcttttgagacttcaacactttttcataatcattctctcaaggttaaacaaggacttggaggcaatgtgaggattattctgtctggagcggctcctctcgctagtcacatagaatcttttctaagagttgttgcatgttgtaatgttctacaaggatatggtaaacctttagacctggaagagattcaattagctaataatctcttgatcttatgattgttttttttttgtaggtctaactgagagttgtgctggaacttttgcaacgttcccagacgaactagacatgctagggactgttggtccacccgtgccaaacgtcgatatacgccttgaatctgtcccggaaatgaattatgatgctcttggaagtactccgcgaggcgaaatatgcatacgaggaaaaactttgttttcagggtactacaaacgtgaagacctcacaaaagaggttcttattgatggatggttgcacacaggttactaaaaaccacaacattttgatcattttgctttgctatataccattttcgatatcagttcttctttactttattttactatgtatatctcaccaggtgatgttggtgagtggcaaccaaatggaagcatgaagataattgaccggaaaaagaacatcttcaaactcgcgcaaggagagtatgtcgctgttgagaatttagaaaatgtctacagtcaagtagaagttattgaatcggtaatttgaactctaccccattgatttataattgttatgtttc

SEQ ID NO: 170579 - DNA, 1493 bp, Arabidopsis thaliana landsberg
atgtcatcttcatctcaagctatgcttcaaaagtcggattccatcgctgagaaaatgcctgatgcattgaaacaaagccggtaccacatgaagagatgttttgccaggttcttttaactcttaggattagtttttttttttttttttggctacattttgatgctatttggattccttagttagttaaatgtttgtgcgtaaaaaaatgttgtagctttgttggaggaggaaagaagctgatgaagcgtgagcatttgatgaatgagatagagaaatgtatagaagatagccgtgaacgcagtaagatccttgaggggctgtttggttacattctcacttgtactcaggtaatataatatatcttcattaccatttgcaattaaaaacggtttagttgcgtgttcatgcgaaatcacggtttatttttctctgttttaactacttatcaggaagcagcagtggttccaccgtttgttgcactagccgcaaggccaaatcctggtttctgggaatatgttaaggtcaactctggagatttaacagttgatgaaatcacagccactgattacttaaagctcaaggaatctgttttcgatgagtcatggttagtaaacaatcttacatacggcgttttggcaataacctgagctatattcatcatctggtgtaacctttttttgaaatgttatgtaggtctaaagatgaaaatgcactggagatagactttggagcgattgatttcacatctcctcgtcttagtctttcttcttcgattggaaaaggagctgattacatctctaagtttatatcttctaagcttggaggcaaatccgataaactagaacctttgttgaactatctgcttcgccttaaccatcacggagaggtcatgattgaatcatttcttgtttccattttcatccaccttcttgaaagtcttataactcattaaaaatgctttgtctcttgcagaatctcatgatcaatgacgatctcaacacggttgcaaagctccagaaatctctcatgcttgctgtgattgttgtctcgacttactcaaaacacacaccttatgaaacttttgcacaaaggtaaagaaaaacaactgatcaagttccttgaggaaccggaacaaggatctgattgaaaagttactttcttaggttgaaggagatgggattcgagaaaggttggggagatacagcagagagagtgaaagaaacaatgattatcctttcagaagttcttgaagcaccagacaatgggaagttagatttgctctttagcagacttcccacagtgttcaacgttgtgatattctctgtccacggctattttggtcagcaagacgtactcggattacccgataccggaggccaggtcatttacttatacaactcttcagttttatattacctgcaaaatttgatatctaacttacaagaagaaactttttggtttataatgatcatacaggttgtttacattctgga

SEQ ID NO: 170580 - DNA, 1985 bp, Arabidopsis thaliana landsberg
tattattttggtggccggtataatatagtgaagtttatcaagattgttcaacaagctggaatgcatatgattctacgaattggtccttttgttgccgccgagtggaattacgggtaatgagctttctatacaatccttcctttctcaaatattgttgccccctttgtagtttttctaattgaatcttgtggttataggggagtcccggtttggctgcattacgtgccaggaacagtcttcagagcggataatgagccatggaaggttagacaggaaaatattgcggaatttgtttttttttctctgttactgaaaattcatttgctgtgtgaattttcttgtttcagcattacatggagagtttcacgacgtatatagtaaacctgttgaaacaagagaagctttttgcaccacagggcggtccaataatcttgtctcaggcaagacaagacaaacgacaacatataatatttcagcatcgttttgtttcctttagaatgtttttttcttgatattgtgattcattaggtggaaaacgagtacgggtattacgaaaaggattacggagaaggagggaaaaggtatgctcaatggtctgcttctatggctgtttcacagaatattggtgttccatggatgatgtgccagcaatgggatgctcctcccactgcggtaagtctatatcgaatccgaaacacaagatctatacacaccttcatctttttgattcattgcatgctttcttgtatcgagatgttagcagatgctttctgatataaacaagtgaaaatctttcaactagttccagtttatgatggatttctcttatttccttttgcagattagtacctgcaatggcttttactgtgaccaattcacacctaatacaccagataaacccaagatttggactgagaactggcctggatggtaagtagattggttccgctaacatttcctgttacaagtttcatacaaagttggagtcttttggagcttcttgttcattagcaagtgaatctgactttcgcggactaaaaagagtttttcttttcttccaggtttaaaacttttggaggcagagaccctcacagaccagcagaggatgtagcctactctgttgctcggtttttcgggaaaggtggaagtgttcacaactactacatggtaatatttggtagtttcttcaagacgaggaagttagttagctctgtatcagtttgtaatctaaatggattttggttgtatgttttgtctgaaatttggtgtagtatcatggaggaactaactttggaagaacagccggaggtccatttgtcaccaccagctatgattatgatgctccgatcgacgaatatggtaaggacaagcagcgaacaaaactttctacacattcattgaaatataagatgatgcaatgcttaatgcactaagagagtcggctgttaaatgttaaacaggtttaatcagacaccctaaatatggccacctaaaggaactccacagagctatcaagatgtgtgagaaggctctggtttcagctgatcccgttgttacatcaataggaaacaagcaacaagtatggatttattatgagagatttgttttggtttacttgtagaaactttctgtagcttttactaaattatatcctcttttctactttattttcccaggctcatgtatactctgcagaatcaggagattgttcggctttcctagctaactatgatacagaatcggcagcaagagttttgtttaacaacgttcattataacttacctccttggtcaatcagtattcttccagactgtagaaatgcagtcttcaatactgcaaaggtaagtgtatatggttgaaactcagaattatggttcctcaaattctctgtgttttttctgattcttgtggatttctcttgtttaatttaaggctggagttcaaacatcccagatggaaatgttgcctacagaggcaaaggcttt

SEQ ID NO: 170581 - DNA, 1267 bp, Arabidopsis thaliana landsberg
aatttggttcttatggaatgaatgtttattttaccttcttcttgtattgcaggtatgatattagagtcgaatgtggaatgccaattaatcgtcacaaatccaacgctccagatgcatgttttttctttgcggataatgttgtcgccattgatcatcaacttgatgacgtttatgtattatcgctttacgaagagggaacaacagaaacctctttcctgaatgatactgaagagaagctcattagcctgatgggttcgtccacaagaaaattcatggatcaaactcttccagttatagattcatctcaatccaaagcaagttttgttcctgacaaatccagagagcagtatatcaacgatgttcagagctgtatgaagtatatcaaagacggggagagctacgagctttgcctcactactcagaacagaaggaaaataggaaatgctgatcctttgggactttatctccacctgagagagaggaatccagcaccatatgcagcatttctcaacttctctaatgcaaatttgtctttatgctcgtcgtcccctgaaaggtttcttaagctggacagaaatggaatgctagaagcaaagccgattaagggtactatagctcgtggctccacgcctgaagaagatgaatttcttaaattgcaattgaaactcaggtacaccaaacacgttgttctagaatcatcgaatgtttcttaatatttcacatcaatgctactttatcattgtttttttcccccatgtcttataacagtgagaagaatcaagccgagaatctgatgattgttgaccttctaaggaatgatctcggtcgtgtctgtgagcctggctcagtccatgtacctaacctcatggatgtagaatcatacacaacagtacatacaatggtgagcacgatccgtcggctgaaaaaaacagatattagtccagtggaatgtgtaagggcagctttccctgtcggttcaatgaccggtgccccaaaactaagatccgttgagatactcgattctctgtagaactgttcgagaggcctttactctggctcaatcgggtatttctcatataacggtacgtttgatctgaatattgtgataagaacagtagtgatacatgaagatgaagctaccattggagcaggaggagcaatagttgcattatcaagtccagaagatgagtttgaggaaatgattcttaagactagagctcctgctaatgcagtcatggagttttgtagtgatcagaggagacaatag

SEQ ID NO: 170582 - DNA, 1765 bp, Arabidopsis thaliana landsberg
atggatcatgaaaagagtcatgttaatggtactgatgatttaggtttgtgtgaagatctctatcgtatgaatatcaaggaggatgttgaagaagatcaaatacgttacgcacgaaccgagactcttaaagatcctcttcctaagtctgatcacactgacttcactccagatccactctacaacttttcacctaaacactatgaacctagcaatggtggatttgtctctggaggctttccatatggattctttcgtccaccaaaggagtctagtattaaccagtcatgtgcctcgtggtctggattcgatcaaagcaaaaatgacgacaagagaaacatgtttgggaacaatcctcaacaatttggatggcctagctactcaagcagtaatagtggtactagtccttacaacaatggtcaggagattttcgaaaatcgaggcggaatgagagagtactcagcttactcgcccccacatcaacccgaagtttcttataagcatcaaaagtacagaacaacaacatcagacatgttaccattgttctgccaacgaactcaagtccctatggtttcaaaatgctctgagccatttagctctgatgagagtttcttcatgaatggtaaaagcattgatcatcagagaagcaatactcgagcattgatgtctaataatggaaatcctacggagatatgtcatccaagtctgcctaacatgtgtgacattcaaggatatgtttacttaatggctaaagatcaacacggatgtcgattcttgcagaggattttcgatgaaggaacttccgttgacgcgatgattatattcaatgaagttattgctcatgttgttgagcttatgatggatccttttgggaattacctgatgcagaaactcttagatgtttgtactgaagaacagaggacacagatcgtgctcgtggcaactgaggagcctggtcaacttatccggatatctctcaatgcatacgggtaaaatattacattctaagatatcattttggtatcttatgcttattaaacattttttgtttatctttgttttgtagtactcgagttgtccaaagattagtggaaacaatcagaagcggaaaacagatttctctggtgaaattggctttgagacccggttttcttgatttgatcaaagatttaaatggaaaccatgtgattcaacgttgcttgcaatgccttagcactgaagataacaaggtcaaataactaaagtcacttccttttaactctctcaatcatcagattatattatagctaaatcttgttctgttctttcaacagtttatctttgacgcggcgacaaagttctgcactgaaatcgcaacacatcgacatggatgttgtgtgctacaaaaatgcattgcttattcaatgagacaacaacgagagaaactgatcgctgagatctctagaaacagtctccttcttgctcaagacccctttgggtaaatttatcaaacaaaacaaacatttatacggaagaacctaataacaaactttttttggatgatcaatattttgcaggaactacgcagtccaatttgttatagaactaaggattccttctgcggtggcgatgatgctggctcaattaaaagggcattacgttcagctttcgatgcagaaattcagtagccacatggtggaacgatgtatcatgcattgtccagagagtcgtccacaaatcgtgcgtgagctcgtctctgttcctcactttgatcagcttcaacaaggcc

SEQ ID NO: 170583 - DNA, 878 bp, Arabidopsis thaliana landsberg; identical to SEQ ID NO: 17466

SEQ ID NO: 170584 - DNA, 476 bp, Arabidopsis thaliana landsberg; identical to SEQ ID NO: 22419

SEQ ID NO: 170585 - DNA, 331 bp, Arabidopsis thaliana landsberg
ttgttttgcatacttaggcatttaggatcatcttgcattcgcattgcatgttttagtgtgttttcaggtgcaaaaggagcttaaaaggactctactcgatccattcactcgatccaggcagctacagaagaggcatcattctactcgacctctttactcgatccaggatgccacggaggaggctgcagtttactcgaccctcctactcgatcaaggcaacctcagatgaagcagcagattgatctactcgcccctcctactcgatccactactcgatccatttactcgaacagggtgacacccctacaagacttgttgagctatcgaagcg

SEQ ID NO: 170586 - DNA, 489 bp, Arabidopsis thaliana landsberg
ttgtgttctgtggatgcctcgctagtgggctgcagcttctgtggtgcagatctccgcactgcacacttgtcttgtgccttaagtagttagtctgtgtagaattagaattttagcttagacttttcaccatgacaattaatggttatgaattgccggtttaatccccacctttcaatcccacgtatccagtaggtgtttatgagcatagcgtgattcggcgataatgtttgattctctttcttacctaacagaatgcagaccttacgaatgccaacttagaaggagcaaatctagaaggtgcaaatttgaaggtaagcaattccttttattgacaatttatattcagccttatttgatttgtgctaataagtgtagtcttaaatgagtagtgtttagttacggttttaactggatcttatatgtatagggtgcaaagttgagtaatgccaacttcaaaggagcaaaccttcaacgagcttacttgaggca

SEQ ID NO: 170587 - DNA, 1051 bp, Arabidopsis thaliana landsberg
acaccaccagttattatagataataataaacagtttcaagattttttgggcatatgaagaaagaaacttctcggctttgtgttgaggtgaaggagaaagtaaacgttcaaaccacaaaggaaggacttgatggtttcgttgattgcactttgacaagttctttacgaccaagtaatatagtccatgaggtagagggagaaatcgatttatccagtgaaaacatggaagaagctggtgttaataatatttatgtggatggtgaagatgatgaaagtagatttgattactgcgacgattcttacagaaccgatttcgatgatgagaactttagcatgtacggaattccacatgaagaagaagaaaaacctaagttaccactcaaaaaaagaaatttaggtatattcatcgaagaagaaaaagaagaagctacttctgctactctagatgtgtcttcattggagcttgaggttggacaaagttttgaaacaaaggagcacttggagaaacgtttgaagatacttaccgtattacagaattttgattttgatgttcataaatcgactccaaaaagtatatcgtcaagtattgggttaaaggttttaagtggagggttcgagcaacaccagttggtgactctacgaagtttcatgtgagagtatttaagtcggaacatacatgttctgttagaaagcgttcatcgtgttcccgacaagcaacccaccaaatacttggactgttgtacaaggattacgttggtgggattggacccaaggttgtaccaatccatgttgctgaagcgttgaataaacgctttcaaatcaaggtatgatttactatttcttttctatttttaatcgcatttttatagtattgctaatactcactgtaaaataataatgtgtagatggattattggaaggcatatcggacattaaggtatgcacgacaattctttagggatagtccagaaagtggatatgagcagcttccgacatacttgtatatgctaaaaagagacaatcctggaacttttactcgattgtaaatagaa

SEQ ID NO: 170588 - DNA, 528 bp, Arabidopsis thaliana landsberg; identical to SEQ ID NO: 32790

SEQ ID NO: 170589 - DNA, 1776 bp, Arabidopsis thaliana landsberg
  unsure (1)..(1776): unsure at all n locations
ctattcatttgtttaacggactagggatgagagaatgcaagttacattgtggggatcatacgctcaacaggttttcagggtatgttaggaatctgaaggaaagaatgtgatttttctcattcgttttgccaaaattaaggcatacaagggtaaattctatcaatggtacattaaagtgcttacttttataatatgtgatctatggtaacttaaccgtttataaaattgctggtgtgaaaagtttatccaactcttttgatgcatctcaagtacatgtcaatcctgacttcctcgaagttgtggctttcagtcaatcgtaaatgcatctactctcaacacatgatacttttgttttgatttttattatgtgctattgacctacggtttggcatttgcagactaccagctgatggtaatatttgcattttctgtgcaagagtcccaccgtttgagatggttgcagtgaaaatgattgattacagtgagtttgcaaggaataccatctcagatctgctcaactcgactgaggattgtttttaatcagatactttgtaaagataaagacattaagactataatctaatatggtatcaactttatatttgttggcaaagttagagttctgtgcacaatctatgtaatagatacggattaggcttggtcttacatcagctgtagtcatgtaataagaaggttaatcatatacatgttggtgttaatggtgttaacaacaaggggaagaagcctagattatgatgtgccacatgcaagtctattgttacaaatgtggcctctaggtaaatatgattttaacactaaatttacagagtatttaatacattcatctctttcttgagaatatgtttttcatttataatctaagtggttttgcaaaaaaaattatatgtaaggtacatgatttatgcaaaggttatggataacaatggtggagccaaattgctactgtttgattcaatttgctttgagatcattggcgagtctgcaacctctgttcttaatggatctgttaatgaggtatgtttttgttattagttaggtacttgttgtaaagtgagatatagctaacggtaaatctatattatattaccctgttgcagattgaggatccacataaccttcctaatcctgtaaagaatctgattggaaagacatttctttttttggtgtgggtcgagaaagagaatatcttcgatggaaaagaaatctacaaggtttcaaaggtgcttttgaatgatggactactcgaagaacaattattagaggattctgctgaacatgtgaactcgtcatcaattgttagtggcgatcaggtaatgtactcatctatatgcacaattctatttcagaatctaatttttaaatataatggtttgtaattttttatattttgcaggttctacttatgctagagaatggtaatggatcgccagactctactactccatcttcaaagcgtgtttacggtagagaaacgagtggctctgaaggttcttcaagttcaaagaaggtgtgtgttgtaccattagacttggagaagtctttatctgaggatgctgaacatggagtnnnnnnnnnnnnnnnnnnnnnnnnnnnnnaagaagttactgttccaactgaagtcaaaacatcaaatgttactgttgcaacagagaatgaccaagcacctgtcccagctgctgtcgttgtgaaacaggaagtcaagaaagagatggctaggaacatggcttctgtaagggtcaaagtggagaagaacaa

SEQ ID NO: 170590 - DNA, 1399 bp, Arabidopsis thaliana landsberg
tctcacaatagtcaaaagagacaccatagacgtgctagagaaggtagagatcgtttgcaagacaatctcgttggttttaagcttaaaattccaccattccatggaaagaatgatccagatgcttatttggaatgggaaaagaagattgaattggttttcaaccttacatagctagtaaaatttaatttaatatcatttatactagaatataaagtttcaattattgtctcgtttattgctttattaacatatgattgatatatggaagtaattttgattataagatcccattaagggagtaactgataagcaatgaatagtaaatcagaagttttcaaaaaaaaaaaaaaactagaagtttcaagagtatatttggcttaaccggattgcgaattacataagagctacgaattacattcggcttaaccggattgcaaaaaaaaacgagcaggaatactgcgaattacataagagctacggccatcatacttccagatgttatagcctcggggcaaagttggcagctaaattcctagccggagaaatcggtggaggcctaaccatcgaggatttagaagcggagaaagccaaaaccgagcaggtcaatgttgtggcaaatcctgaacagacagcccccgcgacgaacctcgaatgatccaggagaggcagaggcaatcgcgaggcagatgacgacgaaccagaagctgctcggggaagaatcttcacaattttaggagattcagctttctgtcaagacacagcggcatcaatcaaagcttatcagaggaaggccgactcaaatcgcaactggacgcgactgtttaacggacaagatgacgaagtgacttttcacgagagcgacactaacggcttggaccgtccgcttaatgattccttggacattacactaactattggggattttaacgtcgaaagagttctggtcgacacggggagcacactagacatcatttttctaacgaccctacgagaaatgaaggtcgagatgacgcaaattgtaccgactccgcgacctatgctcgagttctctgaggaaaccaccatgaccctcggtaccatcaagttactagtccgacccaaggggataacgaaaatcattgatttctccgttactgaccagccgaccgtttataacacaattattggcacgccatggttaaatcagtttcgagccgtcgcctcgactgatcatctctgcctgaagtttcccacaagcaacggcgtgaagaccatcaggggaaatcagaaaaatgcccgaatttgctttatggcagcgcacaagcttaacaacttcgtcaccgagtcgacagccgacgcaaatcacaagaaggctaagctgggccgagccgaagagaaagcaatcttcgagcagttatag

SEQ ID NO: 170591 - DNA, 863 bp, Arabidopsis thaliana landsberg
gtgcacagagacataaagtctagtaacattctgattgatgacaaattcaattgtaaaatttctgttttttttcttgctaaactacttggtgctgataagagttttataactactagagttatgggtaccttcgggtaagtacttgcatctctctctttatatcatttgacataatacttttgaagactaaaatattgttggtcttggaaaataactaaccttttttgtttttggcagttacgtagctccagagtatgcgaattccggtcttctgaatgagaaaagcgatgtctacagcttcggggttgtactcttggaagctataactggtagatatccggtagactatgctcgtccaccacccgaggtaaaaattttcgtaagaacctgcacaaacacataaactctgctgcctcaagagagtcttctgacatttcttctttttcattttgtaggtacatttggtggagtggctgaagatgatggtccaacaaagacgatcagaagaagtggttgatccaaaccttgaaacaaaaccatctacaagtgctttgaaaagaacactattgactgctttgagatgtgttgatccaatgtctgagaaaagcccgaggatgagccaggtggcacgtatgcttgaatccgaagaatacccaatctgctagagaggtatgaataagataaaagatcaccactttggaaactgcttcttatgtctttaaaccaaatatactttttgttgagtttggtgctgaagcttttttaccaattttgaggagttcaggataggagaagacgaaggagtcagaacgggacaacaagagattcagatcctccgaggaacagcacagacactgacaaga

SEQ ID NO: 170592 - DNA, 840 bp, Arabidopsis thaliana landsberg
atggtcattggactgcctatactgaaagctaccaaggagatttgtgctatttgtttgaccggaaaacagcatagagagtcaatgtcgaagaaaacttcatggaaatcatcgacacagcttcaattggtgcattcagacatatgtgggcctatcacaccaatttcacacagtggcaagaggtacattttaagcttcatcgatgattttactcggaaaacatgggtctattttcttcatgaaaagtctgaagcgtttgccacattcaagatcttcaaagctagtgtagaaaaggagattggtgcgtttataacttgcttaaggacagatcgaggtggagagtttacttcgaatgaatttggagaattttgtcgatctcatggcatctctaggcagttgacagcagcgtttacaccacaacaaaacggagtggccgagagaaagaataggacgattatgaacgcagttcgatctatgctaagcgagaggcaagttcccaagatgttttggtctgaagcgaccaaatggagtgtgcacattcagaaccggtctcccacggcggcagtagaaggaatgacacccgaagaggcttggagcggtagaaaaccagtggtagagtattttcgcgtgtttgggtgcataggatatgtgcacataccagatcagaaaaggagtaagttggatgataaaagcaagaaatgtgtttttttgggagttagtgaggagtcaaaagcatggaggctttatgatccagtgatgaagaaaattgtgataagtaaagatgtagtcttcgatgaagacaaaagttgggactgggatcaagctgatgtagaagcaaaggaa

SEQ ID NO: 170593 - DNA, 1101 bp, Arabidopsis thaliana landsberg; identical to SEQ ID NO: 48932

SEQ ID NO: 170594 - DNA, 461 bp, Arabidopsis thaliana landsberg
atgtcaaatattgatcaaaagataaaagtggcgatcgtgggcgtggaacactgcgccagctcgctcgtgcagggcgtcgaatactacacacgctattctgaaaaaacatctggcctgatggccgataatatcggtggttaccgtgcggcgaacatcgaattcgtgtgcgggtttgaggtcgatgaacgtaaaatcgggctggcactgaaagacgccattttcacaaagcccaactgcgcgatcgagctttataccgacattacgagcaaagcgccggtttaccgctcgccggtactcgatggcgtttcgccacaaatgctcgcctaccctgccgacaaccgcttcgtcgtaaaggaagacctgaaagaaactgatttgcttaccagcgacgaaaggtataacgaagcattgaccgccaccatccgccaggaaatcatcgcacgcctgcaagcgcacaaagc

SEQ ID NO: 170595 - DNA, 1062 bp, Arabidopsis thaliana landsberg
tcttacgaagaacttgaagaagccactaataacttcgacccatctaaagaactcggtgatggaggctttggtactgtctattacggtaagcttaaagatggacgaagcgtaccgttaaacggttatacgataacaacttcaaaagagcagagcaattcaggaatgaagttgagatcttaacgggtttacgccatccaaacctcgtggctctctttggatgctcctcaaaacagagccgggacttactgctagtgtatgagtatgttgcaaacggcacgttagctgatcatctacatggtccacaggcaaaccctagctcacttccttggtctattcggctcaaaatcgctgttgaaactgcctctgccttgaagtatctccacgcctccaagatcatccaccgtgatgttaaatccaacaacatccttctcgaccaaaacttcaatgtcaaggtcagtaactcacactggttattactcaatctggtgggattttatcggatcataatcttaacttctttctgtgttttttttttactgttttcgacattttaggttgcggattttggactctctagactgtttcctatggataaaacgcacgtatctaccgctccacaaggaactccgggatatgtcgacccggattaccacttatgctatcaactctcaaacaaaagcgacgtgtacagctttgcggtagtgttaatggagcttatctcttcacttccagcagtcgacatcacaagaccgcgccaagagatcaacctctcgaacatggcagtcgttaaaatccagaaccacgagctccgcgacatggtggatccgtcacttgggtttgacacggatacaagagtgagacagacggtgatcgctgtcgctgagctggcgttccaatgcttgcagtcggataaagatcttaggccatgtatgtcgcacgtgcaggatacgttgacgaggatacagaacaatggatttggttcggaaatggatgttgtagatgtgaacaagagtggaccgttggttgcacagtctccagatagtgtcattgtgaaatgggaca

SEQ ID NO: 170596 - DNA, 1929 bp, Arabidopsis thaliana landsberg; identical to SEQ ID NO: 38476

SEQ ID NO: 170597 - DNA, 384 bp, Arabidopsis thaliana landsberg
atgagactaccactcgtcatgctggaaatattcgacgccatcgtgcaggcgggcagcctgcgcggcgcggccaacaccctgcagctcaaggcctctacggtcagtcaccagctcaagtcgctggaagcccgcgtgggcgcgccgctgttcctgcgcaccacccggtcgctcaccctgaccgacgcggggcgcgcactcagccagggtaccgcgcccgcgttcgaacaactggtccaggccatgcagaacgcccgcgacacgggcggcagcacgcgcgggcaactgcgcatcaccatgcccgaatacgcctaccacacggtgctcgccccatacgtcgcatcgttccgcgcggcctggccggacatcgagctcgagctcatcatt

SEQ ID NO: 170598 - DNA, 1651 bp, Arabidopsis thaliana landsberg
acacatataatggtgtgtttaatctttttatgcccattggagttttggatagaaaacaaaaagagagtaattaccatgcatgcttaagttgtagtggcaaaaaatgactaaaatgaattttttttatagtttgatttagatagcacaattactagtctatagtagttactaattaataattatacacttccatcattttttttgttcttaaaacagtaccatcatagtatattggcaatacgtccataactagttgataatttatcaatgtgtttttcttttcttacttttttgaatcaaatgaaaaagcaacaatttttcttaacaaacaaaaaaaaaaaataaagcaacaattttttaaaatttaattttccttttttttgactaaaacatgtgagttttctttcatggctcccgccgtaaatcctggtgagattttaggcttttttcatttgactacgatcgcttcgcttctccgatcaatcaccgtccaaactccgacgaaacaaaaacccaaaaccaaaatgtcgttaattccaaaacccgtatcaaaagtctccacctttaccttctttctcctcttactcctcagtttcacaatcatcatcgcttactcatcatccgattccaatgtcgaatcaaacgaacccggatccgattccgatctagaacagcttctagcagtagacgagcaactacaagaagatcgacctgagcaacaatcagaagccgaaacagtaagcaaagctcagagaatcgtactagagctcaacggcgataacacgaagcgagtgatcgatggaaacgagttcgtgatggttttagggtacgcaccttggtgtgcgagaagtgctgagcttatgccgagattcgcggaagctgcgacggctttgaaagagattgggagttcggttttgatggctaagattgacggtgataggtattcgaagattgcatcggagcttgagattaaaggtttccctacgcttcttctctttgttaatggcacttctcttacttacaatggtggatcttctgcgtaagttccctaatttggcttctctagtgataaagttttgattttgattgaatcgtttgtgagatatgttttggtcaatgtctcagggaggatatagtcatttgggtgcaaaagaagactggtgcaccgattattactgttgttacagttgatgaagctcagagatttctgaacaactatcatacttttgttcttggcttgtttgagaagtttgaggtattttcggatatcattagtgtaatgttggttttgaatgtaaagtgttgatatgtgtgtgttgtttgtttgcttagggttctgaacataacgaattcgttgaagctgctaaatcagacgacgaaatccagtttgtagaaacaagtaacagcgatgttgcgaaacttctttttcctagtcttagaaccaataatgtgtttattgggttggttaaaactgaggcagaaaggtacactgtatatgggaagcttgctggctgctgattttgaagaactctcttgatattatcatatcttttttcctgttgcctgtattgcgagaaggggtaataccggtctgcaatgcaaaatggatcttacaaaatggagaagatattggagtttcttaggagcaaca

SEQ ID NO: 170599 - DNA, 107 bp, Arabidopsis thaliana landsberg
ggacaaaacgacacaaacctttaaaaggaaacaatgctgcaggcgtgcttcctcttcaacgacttgtacgagatgggcttcttgcgtatgggcctgaagttttctaa

SEQ ID NO: 170600 - DNA, 659 bp, Arabidopsis thaliana landsberg
gatgacaatggatctcactacttttaccaatgctatatccaaggcaatgtagatttcatctttggcaatgcgaaatcactttaccaggcaaaaccccttccatttgatcttcttaaatcctttgtatcgaaatccatttgtaaagatattgatcgaagttttggtgtttggtaaccacaggactgtgatatccactcaaccgcaaagagatatggcgcgatcgcggctcatcatagagactcggagactgaagataccgggttctcctttgtgaactgtgatatcagtggtactgggcagatttacttaggaagggcttggggaaactactcaagaactgtttattcaaactgtttcatagctgatattatcactcctgtgggctggagtgactggaaacaccctgagaggcaaaggtaaaaaaaggatcttgaaaattgaaaactcatctctgaaactacagcatttctctctcaaaacaacatcaagcgaatttcttttgcaggaaagtgatgttcggggagtacaattgcaggggaagaggagcagagagaggaggccgagtaccgtggtcgaaaactcttaccagagatgaagtgaagccttttctgggaagagagttcatatatggagatcaatggctgagactctaaatcctt

SEQ ID NO: 170601 - DNA, 1091 bp, Arabidopsis thaliana landsberg
gagtcattgacagactttatctggagaagaattgcatgaccttgttgttgtgcaacaatctcgatgaaatggatgatgatgagaagacggttccagtggaaaaggtgttgatctctcctcactttgattgaatatacaaagctcatcttctttcttgttctgacatatggagcacgatgtggttttgtaggtggaggttgacttatcactttctgcgcatggtaatgctaggcgctggtatgaaatgaagaagaagcaagaaaccaaacaggagaagactgtttctgcccatgaaaaggcttttagagcagctgagaaaaagacccgccaccaactttctcaggtaagcttccaacctcgtcgctgttaatcttgtttaatgtttcttcctcgcagtcaactaatcatttgcatttttctggctgaaaggaaaaagtggttgcaacgatttcacacatgagaaaagtccactggtttgagaaatttaattggttcattagcagtgaaaactacttggtcatcagtggtcgtgatgctcagcaaaatgagatgatagttaaacgttacatgtcaaaaggagatctgtaagttttaatatatagaattatttatctagtctttgtgttagtattaaatattcaaagatgatgataagtttttaaccatgctttcttagatatgtacacgcagagcttcatggagcatctagtactgtgataaagaatcataaacctgaacaaaatgtaccgcctctcactttaaaccaagctggatgttttacggtaagcaatttcatctactattttggttgtttgaattatgtgaatatggtgcaatgtcttgatggcagacttttggatataatatgatgcaggtttgtcatagtcaggcctgggattccaagattgttactagtgcatggtgggtttatcctcatcaggtcactaaaacagctcctactggggaataccttacagttggaagtttcatgatacgaggtaagaaaaactttcttccaccacacccactcatcatgggttttggattattgtttcgtttggatgagagcttcttgggagctcatttgaatg

SEQ ID NO: 170602 - DNA, 2446 bp, Arabidopsis thaliana landsberg
gaaatattcgttaattctgttttctgtgaatttgtaggtgagatatcagttttgctatggttgtggatctgtgtgaaatcttctcatgtatgccgaattcgtcgtacctaaaatgccaatcgatgcgttattcgtttgatttatgtattaagaatgttttctttatattcaacctaatgttgttggcgtatgaatatcataacgagttattggtttatttatttgcatgagtagcttgaggcccatgagtttattgaagtccgataagcccgatacatgaatttacaattttactctttcgaaattttctcccatggaatggattcggaaaaacaaaacaaaaattaagattttaaaagtcgttggtatggttcgacattgattcaaaactaaaagcaaaagcgataaagaagagtgattagagaaaaggtccattctatgtcctctttttagagagcttctctactcattactagacttcctccatagtcaataattggttttaactttaaattcttatagatagttatatattttgtaagaaaaaatatatagcagaaaataacaaaaacacgtgaacacaacacattgcttggaaaaacaaaaaaaaaaacactgcttggtctctatcaagggtttatcaaaaggcattagaatgtagtcatgtactgtatataggtaaaataacaatggttcaataatacaataaacatcgacctactcaggtggattttctttggaacatggacacatcgtacgtaactcgtatttattatgctttcaaaggtcgaatataatgtaaccatatgaattctagacttttaaggaaataaaaacataaaaaatatatatatactttttaatttgtaatttttaataagcccttcaaatcgtacgataaactaattaatacttataaattagtttggtcaaaacattttacaaaagttatcataagattgattctactttgaacgactggaacacatgacgaacaaggaaatgacccatcaatcagttttaggcttcgctttaccaaatccaaacaacgtgaaaatccttacttttgtctgaagctaaacaaatatggaatcaaaacattgtattaataataaattaataataatcgacaaatgtcccattggatttgaaagaaaacgagatacgtgatatcatatattaccttataatacattcaatcatatactatgttaatgtaacatttttgccgtacaatacattcaatcataaatatatatatttatgtatctagagatacgaaaaggcatttgactacgattcaattgcttaacatttcatattccaatgctatcttcatttgaactaattaatcttatgcatttaactaaggaaacccttcgaattcaacatccaacgccccagtatttaacgtgaatgcacctaagactcataggcactaaacactacaacaagactttacgatgaatgatggttcatcatcatcgtcaagcacaaagacggacaccgatgcgttggtagatgaaacatacctctctgctttattcgattacgatgaaattttcccaatcgccggcgaaagctataatacggagatccatctccaagaagctatgttttcttcttttggcgcttctactgttggtgttaatcatcatcctcaagtccataggaatctagtcacgctggttaagcaggaaccggagataaaaaccgagaaggaacccaccgaaccatcaagaaggttctgtatgatctgtttggacgaaaaaccttcctccgacatcttccgaggaaccactgactgtgttcacttctactgcaccgactgcaccgtacgttacgtggcgacgaagataaaagaaaacgcagcgaggatcaaatgccctgacgaggagtgtacgcacctgattgagccgtacacgtgtcgagatctaatccctaaggacgtgttacaaattctttgatctcctcgtgggacaaattctactgtccgttcaaagactgttcggcgatgatggtgaacgatgaaggcggtgatgcaaacgtgacgcagacggagtgtccgtcttgtcaccgactgttctgtgtgctgtgtaaggtactaaggtgacgttgcacgctggtattgactgtgatgagttccagagatttgggaatacgaagaagaagagtagtgatgaagacgatgctttggtgatcgagctggcaaaaattaaacagtggagaaggtgtcctagttgcaaattctacgttgataaagtcgagggttgtctacatataaaatgcaggtttgtgtttagatttaaatttaaaccattaccttttgtttagtaatattcgtttattttgttttctgtgaatttgtaggtgtggatatcagttttgctatggttgtggatctgtgtggaaatcttctcatgtatgccgaattcgtcgtacctaa

SEQ ID NO: 170603 - DNA, 4413 bp, Arabidopsis thaliana landsberg; identical to SEQ ID NO: 30828
  unsure (1)..(4413): unsure at all n locations

SEQ ID NO: 170604 - DNA, 864 bp, Arabidopsis thaliana landsberg
attggtggcaaaggagttccatgcttctcatgttcgtttcccgatgcaccgattagagagacgtatcaacctcgctgggatgcgtgggaaaggtgaaacttactatgtgggttaacaagttaggagttgaagaactctgcgttggtccagatcagcttaggagtaattaatgttttatttgtgtgcaggttcatggagccactgacttccaaggtcccaacgatggtcattgaaggcaaccatgagattgagcctcaagcttcagggatcacctttaagtcatattctgaaaggtttgctgttcctgcaagtgagagtggctccaacagcaacttctactattcttttgatgccggaggagtgcattttgttatgttgggtgcatatgttgattacaatcacactggtaaatccatggatacactcgcagtcccttgtgctcctactacaatatatctcatttctatgatgattatgtgtttgttttagggctgcaatatgcatggctaaaggaagacttgtctaaagttgatcgtgcagtgacaccatggctggttgcaacaatgcatccgccttggtacaacagctactcctcgcattaccaggagtttgaatgcatgaggcaggaaatggaagagcttctttaccaataccgtgttgacatagtttttgcaggacatgtaagttctcaaattatcttggtgaaaaagagttttgatactctttgatcttttttttccttgttttcttttatgcaatgtatgactaaaagtggtgtttattgttactgaaggtacatgcatacgagagaatgaaccgacatatactaggggatcctcatacgagtcgacctgcatggcatgc

SEQ ID NO: 170605 - DNA, 326 bp, Arabidopsis thaliana landsberg
atggagagttacaagtgcagggtttgctttaagagcttcgttaacggaaaagctttaggtggtcacatgagatctcacatgagtaattcacatgaggaagaacaaaggccgagtcaactcagttatgagactgagtccgatgtttcttcgtctgatccgaagtttgcttttacgagctctgttcttcttgaagacggtgaaagcgagagcgagtcgtcgaggaatgttattaacctgactcggaaacgatccaagcgaactcggaaactcgattcgtttgtaaccaagaaggtgaaaacgagtcaactcggatacaagcctgagtc

SEQ ID NO: 170606 - DNA, 918 bp, Arabidopsis thaliana landsberg
  unsure (1)..(918): unsure at all n locations
atgcctgcaatcgccggacctagttcttcccctcagagacatgtcgcgggttctagatcggagagagtcggaggtgttagatccaaaaaaaacaacgcttctcggaaacggaagttgagatccgattcggctgcggaggtttcagttactgtggtgttgcctgtgaattcgatatggacacggatgaaatggaaatcgcctcgtcgatgtgctgtttcaatccctaagacctctgatgaggtaagctccttgttcttagtttaattgtttggcttagtttattcgagtgagagtatcaatgtgattgtagttctgattgcaggagattaaggaagattctaatgaaaaattggaaaatccagtgatatctgtttgtttagaggttaaatcaaagtggaaccctaaaggtatgtatatatgatgagctttttgattctaatgctcttagttagtttgattgtatgattgatgtatcttgaatggatacagatgatgaacaaatgaaagctgtgaaggaggcattacatgtatctaaggcaccgtcaactgttgtttgtcgtgaggatgagcaaagacgggttttcgagtttgttaaaggttgtatggagcagaagaaggctggtagtttgtatatatgtgggtgtcctggaactggaaagtcactatccatggagaaagtaagactacaagctgaagaatgggcaaagcaggtaaccaatctttgtgcatgtttcataaattgtgattagtttgaatctttcaatagaaggattgatctttcatgaattcttacaggcaggtttgcattgtcctgaaacagtgtctgttaattgcacatcnctgacaaaaaatncagataaattctccaaggtaagaccttatccagtcgaaaattactggaagttatggtatcatcat

SEQ ID NO: 170607 - DNA, 731 bp, Arabidopsis thaliana landsberg
  unsure (1)..(731): unsure at all n locations
tgctcgcaaatttgtgctcgaaaacancggtggtgctcttatcggcttccatggaagagttggtgctggcatagatgccctcggagcttatttctcttcgtttattccttctccgcctcctccttcccccgaaaaactacaaccagaaggtggtgaggcagtaggagatccatgggacgatggtattttcaatggtgtgagagagatacatctagaagacggtgagggtatcgccctcaagtttgtgtacgataaggacgtccaggtgactgaactgaaagttcatggggaaccatcaggaataggattcaatgaggtgattatatattcattcacgtatttactttaaatttgtattaccaaatgcttttccttgacctagagtaacatatgtatcggctaaagattcagagcttccttgttacaattgttctttatgatcaaccactttacttattctccatgttttgcagttcaagctagattatccgagtgaatacatcactacggtggaaggtttttgggacaaaacaagtggaaatgaacgcggagttataaccaggcttcggttcacgaccaacaaacaaacctttcgaccggttggattggagtcgacaacaagcttcagtctcgggaaggaaggttacaagattgtagggttccacggaaattctagtactgacaagcttcaccagcttggggtctatgtcgtgcccatcacgcgcgagtga

SEQ ID NO: 170608 - DNA, 513 bp, Arabidopsis thaliana landsberg
  unsure (1)..(513): unsure at all n locations
gcatcctgctgaccaccggtggttccgcccgcaagctcaacatggagggtgccgacgccgccaacgtgcattacttgcgcacccgggacgatgccacccggatggcgacggacctcagggacggcgcccggatcgtcatcatcggcatgggtgtgatcggggctgaagtcgcggccagcgcggtcaagctggggtgccgagtgaccgcgatcgaaccgcttgccgcgcctatgattcgcgcgctcgggccgcagttcgggcaatggctgnnnnnnnnnnnnnnnnnnnnnnnnnnnnnnnnnnnnnncggacgcggcgtgaacgcgatgaaggtgcttgacgggcgggtgacgcaggtcgaactcgatgacggatcactggtggattgcgatgccgtggtagtcggggtcgggatagtgccagaaatcagcctagcccgggacgcaggcatcgtcaccaataacggcattatcgtcgataggcagtgccgcaccagcaatgagaatatctttg

SEQ ID NO: 170609 - DNA, 584 bp, Arabidopsis thaliana landsberg
atggtgaaagcaaatctagacatttccgagatagtcgccgaccgccagtttcagcgcggcgcgctccatacgaggtatctgaacgagcagctcgtccgggttctcaaaaccattggttaccacgtcgggttccagcgcgggcagggacaatatctcttcgatcgcgacaatgtgcgttacctcgatctgctcagcggcttcggggtgttcgcgctcggcagtaaccatcccgtgattcgcgatgccctgaaaagcgtgctcgacagcgagttcgccaatctcgtccagctcgatatttccacgctcgccggtgttctggccgagcgtctgatcgcgcacgtgccttatcttgataaggtgtttttcgcgaattcagggacggaatgtgtcgaagctgcgatcaaatttgcgcgcggtgcgaccgggcgcacgggcatcgtctattgcgaccacggctatcacggcctgacctacggctcgctgtcgctgaccgatgatgcgaatttccgcggcggcttcggaccgctgctgcccgattgctcggtgatcccgttcaacgatctcgaggcgctggaaaaggcgct

SEQ ID NO: 170610 - DNA, 555 bp, Arabidopsis thaliana landsberg
  unsure (1)..(555): unsure at all n locations
atgtccggtcacatcaagggcgcgatcttcaacaacacgctgtgtcgatcccgttcttcatgttcagggccagcatcttgagcaagtgcggcatcgccgacaacttctatcgcgcgatccacatgctgttcgggccactgcgcggcggcctggccgtcggcacggtgctcgcctgcacgctgatcgcggccatgagcggcgtcagcgccgtgggagtgatggcgatgggcacgctggcgctgccggcgatgctcagccgcggctacgacaggaannnnnnnnnnnnnnnnnnnnncgccggcggcgcgctcggccagctgatcccgcccagcgtgctgggcatcgtctacagcggcctggccaacgtgtcgatcggccagatcttcctggccggcatcatgcccggcctgctgctggcgctgctgttctgcatctacgtgctggtgcgctgctggttcgaccgcgacgccggtccggcgctgtcgcaacaggagcgcgaagcgatcggctggcgcgacaaggtgtccagcgtcttgggcgtcatgccgacgatcc

SEQ ID NO: 170611 - DNA, 1592 bp, Arabidopsis thaliana landsberg
tatttctcaaattaaacttctgtcttctccatttcattagtgtatatatagagagcttcaataactttttagagaatatgtgttattgaaagcaaaaccagaaaataacaaaaacaaatgggcaggtgacgtggatagagcatgtggtagtgaatgataatagagtgcggccacataagctttacagagacctcttatacggcggctttggctacggagctcgacgatggaccgttactcttgagaggacgtgtgagaggctgattttctccacctccgtccctgccttgcccaacaatgacaatcccggaggtacttaattacatctacacctacctatattatatcgtacattaatatacaaagtaactttttttttgtgcaacttaaaatgtgttaaaaatgcggatttaatattgacaacaagtgatagtttcaaaacttttggtatatatgaataatttaaaatgttgtgatttttttttgtagttgtgcaaacaatacgaggcagaaatagcgtaatgcatttgggagaaagaatgttgaggaactttgcatggatgatgaaaatggttaacaaactcgacttctcgccacagtctgaaactaacaacagcggaattaggattggggtgcggataaacaatgaggcgggtcaaccgcccggtctcattgtctgcgctggttcatctttatccctccctctccctcctgtccaagtgtacgatttccttaagaatctggaggttcgtcaccaggtaagaataaatggcttcattcactgcacaagtccaacttattaatcagcttcttttttactttttggtaattaacaagatttttaatgtttgtatgcaaaaaagtgggacgttctgtgccatgggaatccagcgactgaggctgctcgtttcgtcaccggatcaaacccaaggaacactgtgtcttttctcgaggtatatatattactcttactgaaaaaactaatgatttttataggatagaaaactttatatttagcatagctagcatttaaatagggatgtgataaaagagcaaaagttccatagaaccggtcaactttgttcgtttttgttttatagatccggtcatcaaatcttgaataaatcggaaagttattcacatctatattaataaattctattacaatttcaataactttggcattaactatatgattggtttttttttttgttttcttatatagccttcaattagggatattaatactaagctaatgatactccaagatagcttcaaagatgcattgggaggaatggtggcctacgctccaatggatctaaacaccgcctgcgctgccatgttcaggcgatatcgatcctaccaccattccaatcctcccttccggttttatgatctcccgtgacggccgtccttccgagggcgaagccgagggtggcagctatacactcctcaccgtggctttccagatccttgtctccggtccgagttactctcctgataccaacctggaagtttctgccaccacagtcaataccttgattagctccaccgttcaaaggatcaaagccatgcttaagtgcgaatgatgg

SEQ ID NO: 170612 - DNA, 1263 bp, Arabidopsis thaliana landsberg
gctgcacgttatgtgaagagagcaggtggtcttggcgtaatcatcgcaagacacccgggttacgctatccagccatgtctagatgatttcccttgtgttgctgttgactgggagctcgggactgatatacttctctacacacggtccagtgggtatgaaaatatatcttcaccactcagaattagaagaaaatgtatctgagactatgtttcattcttgtggtttgcagatcgcctgtggtgaagatacaaccttctaaaacacttgtaggacaaccagtgggtacaaaagtggcaacgttctcatcaagagggcctaattcgatcgcccctgcgattctcaaagtacagaatccttgcttgttcatttcttttcagacccattaaatgatcttgcctaaggttttatcaatcatatgaatgcagccggatatagcagcaccgggagtgagcatattggcagctacaaccaacaccactttcagcgaccaagggttcattatgttgtctggaacatcaatggcagctcctgcaatttcaggagttgctgcacttctcaaagctctgcaccgtgattggtctcctgctgccattagatcagccattgtcaccacaggttcttatcttctttatacaatgctaaaaaaaaacaaaaacatactgatcttaattgttttatttactctatgtagcttggagaacagatccatttggagagcagatatttgcagaagggtcacctccgaagctagctgatccgtttgactatggtggaggccttgtgaatccagagaaagctgcaaaacctggtcttgtatataacttgggacttgaagactatgttctctacatgtgctctgttggttacaacgagacattaatctctcaacttgtcggaaaaggaacagtttgttcgaatcccaaaccatctgttcttgatttcaacttgccttccatcacaatcccaaacctcaaagatgaagtcactctcaccagaacacttactaacgttggacaacttgagtcggtctataaagttgtgatcgagccaccgataggcattcaagtgactgtgacaccagagacgcttgtgtttaactctacaaccaaaagggtctcttttaaagtaaatgtttcgaccacacacaaaatcaacacaggttacttctttggaagcttgacttggagtgactctctacataatgtcaccattcccctctctgtgagaactcaacttttgcagaactactacgatgaaaactga

SEQ ID NO: 170613 - DNA, 514 bp, Arabidopsis thaliana landsberg
agggcctacttgcagaacaacaggtccggtgaatgcgacatggtatcatttgttcgaaggccctaaagaagcagagcgatggggctgctccattctttgatcttcctttccttctctcaaaatatttttgtctctacttcttccagaagagtgagtttgtgtttttacgttcccgcggcagtgaatttgatgtaattggcaaaaaaaaaaattgattcatttgtgcagtaaaaaatctattgatcttgatgtgtctcttaatttaagaagaccacagtgccaaattcacgccaccacaagaaaatctagcacagtggccgtcggtgatccccacaccaatgcatctcagatccagattgtcttggaaaagttctcgattctcgatggtttacatgtcgtgttcgggcaagttgttgaaggactcgacgtgctcaggagcattgacgacgaggttggaactttgaacaagattccttccaagccggtggttatcgcagactgtggtgagctctga

SEQ ID NO: 170614 - DNA, 683 bp, Arabidopsis thaliana landsberg
  unsure (1)..(683): unsure at all n locations
gtttatatatatacatatatatatatatatatatatatatatatgagtataattctaagtataatcatcatgcatgcacctcttaaattgatactaacatgaaaagttaaacagtatcaagttgtttttctttcttcttttgctcagatttnttcttttctatgtgaacataattatgttaaagttctttacgttaatgcaagattttgaacatttccttactaaatgaatccgcaagtgtgaaagctaacaacactcaaaagatgctttgcatttctgggaaacttttttttgaaaaaaatgtttataattacattatttcctccaccaatttttttcactttttgttggatttgagatttcttgtactaacttatgttccgttaacaactattgtaaacaggactcatccaaaaacggcgttttagcggttcaaacgctaaggaacaacataatggcatcaactctattagcatcaaccgcgataatgttgtgttcactaatcgcggtactaatgacaagcgcaacaggagagcgatctgtctggtttgtgtttggagacaaaagcgaccgagccttctcgctcaagttcttcgcaatcctcgtgtgtttcctagtcgcgtttcttctcaatgtgcaatcaattcgatattacagccatgcaagcatcctcatcaatgtcc

SEQ ID NO: 170615 - DNA, 1953 bp, Arabidopsis thaliana landsberg; identical to SEQ ID NO: 3854
  unsure (1)..(1953): unsure at all n locations

SEQ ID NO: 170616 - DNA, 609 bp, Arabidopsis thaliana landsberg; identical to SEQ ID NO: 80155
  unsure (1)..(609): unsure at all n locations

SEQ ID NO: 170617 - DNA, 579 bp, Arabidopsis thaliana landsberg; identical to SEQ ID NO: 9069
  unsure (1)..(579): unsure at all n locations

SEQ ID NO: 170618 - DNA, 839 bp, Arabidopsis thaliana landsberg
  unsure (1)..(839): unsure at all n locations
gttttgcatgagcttatgatggttgccaaagatatgctgcgtaatgcggagattgcagttcggtcttttatgatgctacagccaagatttcctcattggaaacaaggaggaggagttgttagtgttggttctcaaccatctcaggggcaaggaactaatccagctccagcttcttctggtcaacaacaagctgttactacaacagttcaagtttctgatttttaccgtgggattccgaagaaaccaacagcttttctactgcagacagttgtaaggtttgagaagtatcttaacgagtgtcgtcaatgggttgaagagctggagcaattgctcgccttggattctgacaagtatagtcgacatgcttctcttttagaatctcttccgaaagtcatgtctaatgttcatgacttctttgttcatgtggctgctaaggtataccgcataatgattctttctactagcattcaatgtggaaaccctttttgaactctgtgtaaccttatattggtttcaatttgttttgttcaggtagagagtattcaccaatatattgaatcaatgagaacatcgtatcttgctgaccagcgccgaagaggagaatgccatgatccgtttcttgaggctgatcgaagggagacagcaaagcaggaagcagctgctaaaagggtcnnnnnnnnnnnnnnnnnnnnnnnnnnnactacaagtacacaaccctcaacacaggttgctgggttgattgccagctcagctactcctgggggttcaaatcctcctcagacatctgttccaacatcaaacccttcttcagcacctggttattcgtttctcaacacacc

SEQ ID NO: 170619 - DNA, 2052 bp, Arabidopsis thaliana landsberg
atggtcctccaaatgttccagactcacggagagaattaccataggatagggagtttgaaaccagacaatgatatacctccaaagttcatgcaatcatatattgtagacacaaagaatgaagttgataacaaatcggaagtactcaggtgatatttttttaatattggttactgttctaaacttgacttatttgattcttaatagtaatggtgttaatgctaacaagtataaaaacaaagagttgagaaagaaaattattgatgttgtgaccaaattgctgaatagtatcaacccttatgtatcacacttacggactgctagggacatgttcattgttaatccagaagagactttgcatatgagaatagttagtaaacgggaaaatgatggcagggtgtataatgtaccaacatcatcagaggtagccatgttgattccaggagatttcactatagatatgccaagcagagatatagttgtgcaagataaatcaaggaaactacaaagaattagtgaaatcctttcgtgttatcttcctttacaatatcctcttttgttcccttatggtgaagatggattcataacaggcattgagaaacatcaaacatagtctggtaaaaaacccaagaacaagtgcatatctataaggccatggtttgctttcagaattcacgaaagaaaacatgagaagcatattttaattaggtcgagaaggctgtggcagcaattcttggtggattcttatagagcaatagaatctaaccggcttggttacatcaaacttaactagagtagtatgagggtagataattacaattctgtgcaaaaggcttcagaggaaggaaatagtgatttgaaagaacaaggattagcatgttatttgcgagctacttttacaggcgctcctagatatatgaggaacatgtatttggatgtgatgacattgtgtaaacattttgggtttccaaattattttatcacattcacgtgcaatccaaagtggccagaggtgattaggttttgtggtgagcgaaacttgagagttgatgatagacctgggattatttgcaagatcttcaaaatgaagcttgattgaactaaaaaaaacctatttggaaagacaagtacatgtaagcagattttaattcgttttatttactctgaaatattatgtctatattttttgatacctataataattactatgttttctgtgtaattgcagctatgtatactatagagtttcaaaaaagaagactccctcatgctcatatactaatttggctggattcaaagtgtaagttgaccaaagcagagcacattgataaagttatatcagcagagattcctgacaaattgaaagaccctgagctatttgaagtgataaaggaatcgatggttcatggtccttgtggtgtggtgaacccgaaatgtccatgtatggaaaacggaaagtgttcaaagttttatccgaaagatcatgtttaaaagaacattattgataaagaaggatttccaatatacagaaggcgaagaacagatgactttgttgagaagaaagactttaaatgcgataaccgttatgtcattccttataatagatccctatcactgagatacagagctcacatcaacgtggagtggtgtaaccaatcaggttctgtgaaatacatattcaagtatattcataaaggaccagatcgtgttactgttgttgttgaatcgtctttaaattcgaaaaataaagaaaatggtaaacagaaggacaatgctgatacagatggatcagagacaaagaagaagaatgaagtcgaagactatttcaattgcaggtatgtttaatgaaaacgttaatagtattattactataaaatacatatatttgtgttctttatgattgtataattttgaatttcagatatgtttctgcttgcgaagcatcctagagagtattaaaatatcctatacattatagatctatggctgtgatgaagctttcgttccaaatgaaaggggaacaatttatttatttcaaagttgataagaagtaga

SEQ ID NO: 170620 - DNA, 1038 bp, Arabidopsis thaliana landsberg
tcaatggcagattttatcatcaatctactgtgtgccgcaaatgaaacaacctcaaaaacaatgctgtttgcggtttatttcctcactcattgtcctaaggccatgacccaactcctggtacatataaggcctcttgaatgataagtaaattagttcctctagcttctctgatgtgtttatcttctgaaacgttctgcaaatgagcaggaggaacatgataggctcgcgggtggaatgttaacatggcaagattacaagacaatggacttcactcaatgcgtaagtaaattaagaagctcaagaaactactctgcttctgatcttagatgataaaccttcactaaatgctttcttgatttctcaacaggtaatagatgaaacactcaggcttggtggaattgcgatatggcttatgagagaggccaaagaagatgtctcatatcaaggtacgttattgcgtctttgattattggtacatatattgaggcagatacatggtctaaaaatcaacttttttcggttcttatgcagattatgtcattcccaagggatgcttcgtagttccgtttctctcggcagtgcacttagacgagagctattacaaagaaagtctctccttcaatccatggcgatggcttgaccctgaaactcaggttttacttttcgtttgacattgtaacataatttcctaaaccttgtatcaatctagaggttaacattcattgatgtgaatgcagcaaaagaggaattggagaacgagccctttttattgcccatttggtggaggaactcggttttgcccaggagcagaactggctcgccttcaaattgctctctttctgcattacttcatcaccacatataagtcagtacatgttatgcttctgaagtatgtttgtctaagactctaaattaactaaaatctgattcattcttattgcctgttttaggtggacacaacttaaggaagatcgtatctccttcttcccttcggctcgtctagtgaatggcttcaaaatccagttgaacagacgagac

SEQ ID NO: 170621 - DNA, 1350 bp, Arabidopsis thaliana landsberg
tatcatcatcttcatcttccccaatcatttgactcacaaattctctttccactacttcgtcaaagttccaagatgccaaactcaacgacggaggactccgtcgccgttccactactcccctccctccgccgcgctactaactctacttctcaagtagcaatcgtcggtgccaacgtctgtccaatagaaagtctcgattacgagtacgaaaactctcaccgttgcttctccttccttcaatcatattcttcttaacttcaatttcgttgtttacgctttcgattcagaatcgcggagaatgatttcttcaagcaggattggagaggtcgtagtaaggtagagattttccaatacgtgtttatgaagtggctgctttgtttttgtatcggcattattgttagtctcattggattcgctaataatctcgccgttgagaatctcgccggtgttaagttcgttgttacttctaacatgatgattaccggaaggtgagtctttcgcattttccgattttcttgattgtaatgttgatgattggattttgaatagagtgttgatattgtttctcaggtttgctatgggttttgttgttttctctgttacaaatttgattcttactctctttgcgtcggtgattaccgcttttgttgctcctgctgcggcaggttccggtataccggaagttaaggcttatttgaatggtgttgatgctccagagatattctcacttcgcactttgatcattaaggtaacgattttcgaggatttaggagcgatagagctcggaaattacgcaagtttatgttagaaatttgtatttgatttctctttgattggggtacagatcattgggaacatatctgcagtatcagcgtctcttctcattggaaaggcagggcctatggtgcatactggtgcttgtgttgcatctatacttggtcagggtggctccaaaagatatagactgacctggagatggctcaggtttttcaaaaatgatagagacagaagagatcttgtaacttgtggggcagctgctggtatcgctgcttcgtttcgtgctccggttggtggtgtcctgttcgcgcttgaggagatgtcatcttggtacgtttagttgtgtcaagttattctcacgttcattaggctatttggtcattttgtgaatgattcgttaatctagtctgaggggtttttctttgtaggtggaggagtgcacttttatggagaatcttcttttcaacagctgttgtggcaatagttctcagagctctaatcgatgtctgtttaagtggaaagtgtgggttgtttggtaaaggaggcttaataatgtctgatgtctattcagaa

SEQ ID NO: 170622 - DNA, 792 bp, Arabidopsis thaliana landsberg
caacagaaatattctagggtaagttacatagatctttgctagagtgtaattgtaggatcaagttataagccattcgttcactctttttaatctttatactttaggtgaatggatgcagtggtaaaatggggaaagctgtcatcaaagcggcagattctgctggagtgaatattgttcctacatcatttgggtctgttgaagaggctggccagactgttgaggtctgtggaaaggagattcttgtgcatggtcctactgaaagagaaaaggtgctgtcttcagtgtttgagaagtatcctgaactaattgttgtggactacacaattccctctgcagtaaatggtaagtctagcaactcctattcctgtaatctgaagaaatttcatttaatgacatcattatgattagatgtgtgttgaaatttgatttttttcactattataaatgatcctgatttatgtgaatgtgacaacaccacatctttagaatctttccaatgtgtgttgttttgcaaaatgtagataatgcagagctgtatggcaaagtaggagttccgttcgtaatgggaacaactggaggagacaggacaagattgtataaaactgtcgaggaatcaaagatttatgctgtgatttctccacagatgggtaaacaggtacttaccagtgtgtcatacaagctagaaattatgtctgtaaactctcatccttgtgacccataatatcttttctttgtccactaggttgttgcgtttcttgcagcaatggagatcatgtctagcagtgtcctggt

SEQ ID NO: 170623 - DNA, 973 bp, Arabidopsis thaliana landsberg
ctttgtaaaaatggtggggcttattttcgtgattactgagaaatttctgtacctaacagaggcaaaaggaggagcttcatgagaaaatcataagactagaaagacagagagatcagaaacaagcgattgagctagaagttgagcagttgaaaggacagctcaatgtgatgaagcacatggcatcagatggcgatgctgaagttgtgaaagaggtggacatcatcttcaaagatttaggtgagaaggaagcacaactcgcagatctcgataaatttaaccaaactcttatccttagagagcgcaggaccaacgatgagcttcaagaagctcataaagaattggtaaacgtatgtatcattcaaagtgttgttcttttcaatcacatcgaaaagctatgagaaagcttgacattttactaaaatcttggttttgtttgtttcatgtgccttcatagattatgaaagaatggaacacaaatatcggtgttaagagaatgggagagctcgtgacgaaaccattcgtggatgcaatgcagcagaagtattgtcagcaagatgtggaggaccgagcagttgaagttctccaactttgggaacactatctcaaagattcagattggcatccattcaagcgggtcaagctcgaaaatgaagatagagaagtggtaagaccgccttcttgactctgtttgttatgttgaatctctctgaaagattaaaaagcttttttggtgttgttgttaattgtgtttaggaagtgatagatgatagagacgaaaagctgagggagctaaaggcagatttgggagatggtccttacaatgcggtcacgaaagctttgttggagataaacgagtataacccgagtggaaggtatattacaacagagctatggaacttcaaagcagataagaaggctacacttaagaaggtgtcacttgtttcttgatcaatggaaaagaaaaacgcagcgc

SEQ ID NO: 170624 - DNA, 409 bp, Arabidopsis thaliana landsberg
atgcagtaccgcactctcggccagaccgggatcaaggtcagcccctacgcgctcggtgcgatgatgttcggagcgggcgggaaccccgaccacgatgactgcgtccggatcatccacaaggcgctcgacgccgggatcaacttcgtcgacaccgccgaccggtactcagccggggagtccgaggagatcgtcggcaaggcgctcaagggacaccgcgacggcatcgtcctcgcgaccaaggtgaacggcccgatgggtgatgacccgaaccagcgcggcaactcacgtcgctggatcatgaccgaggtcgagaactcgctccgccgcctgcaggccgaacacatcaacctgtatcagatccaccggcctgatccggacacgcacagcgaggagacgctaacggcgcagt

SEQ ID NO: 170625 - DNA, 2475 bp, Arabidopsis thaliana landsberg
atgcagatatgtgctagtgataaggagaagtctgcagaattcaaaggtttagtaaaggaagtgaccaaatccattgttgaggcggctccatatagtcgaggtttctcggtggctaaaatgggaatccgggatttaacggtttacgggttgggagtatgctggcgaacgctaaatgatgagttgtgcaaattatgcttagcagatggagctttatcggttacgagctgcttaccatccaaagaaggttttgccttgaatgcaggatgctacttgcgttactctaactataccttctataatgaacgtggattgcttgctatgagtatttctctgtctctgtctcataacacttgtgttatttgtaaaaattgtgatccgtttgtattatgatcataacatttcttgtatgtttttcttgtaggcttcactaaagaaaaccttacgtatatatttgttatttccatggtgggtgtgttggctattgcagctggattttggtgtggaaaatgcttctatatgcgaactagtccaaagaagaagattaaaggtaagttccacaagactatattgtgctcataaaggaactaagactaaaaagtttcatttgtttggacatctaaggatagagaaagagtcagagtcaatatgtactgagtcacacttgatgagctttgagtattcaactcttaaaaaagcaaccaacaacttcaatgagagttgcaagcttggtgttggtggatatggtgaagtcttcaaggtttctctcttctctgtataactatctttctttacactttaccactatgttgattgattaaaaatccttattgtctttttgacagggaactctgtctgacggtagagaaattgcgattaaacgactacatgtatcaggaaagaagccacgggatgagatccataatgaaatagatgtgattagtagatgccaacacaagaacttggttaggctcttaggttgctgcttcactaacatgaatagtttcattgtttatgagttcctcgccaatacaagccttgatcatatcttgtttagtaagacactcttctctaatcacgcacatatcttcttacttgtttgaaaagtttctaaacattttttccttgacatggaaatgaagacccggagaagaagaaagagcttgactggaagaagaggcgaaccataatcttaggaacagctgaagggttagagtatcttcacgaaacgtgcaagatcattcacagagatatcaaagcaagcaacattctgttagacttaaagtacaaacctaaaatatcagattttggattagccaagttttatccagaaggtggcaaagacatccctgcttcttctctttctccttcttcaattgcgggcactctgtaagtcctttcaacacaaagaacttcgtagaggtccttactattggtctgatttagaatgtgaatgttgcattgtttacagaggatatatggctcctgaatacattagcaagggaagactaagcaataaaatcgatgcttatagcttcggagtccttgttctcgaaataaccagcggttttcgaaacaataagttccggtctgataactcccttgaaaccttagttactcaagtgagtctccatcttcatcacatcaatctttaactctccgagtgacccttcatatataacccattttctaaccttttaatttcttgaacaggtttggaaatgttttgcttcaaacaagatggaagagatgatagacaaagatatgggagaagatacagataagcaagaagtgaagagagtgatgcagatcggtttgttgtgcacacaagagtccccacaacttcgtccaacaatgtctaaggttatacaaatggttagttccacagatattgtattgcccactcctactaaaccacctttccttcatgattccatgtaaaaattcatgtagaatttatatagattcctcacttccttattgttaataacacattactagaaaacatacaaataatcattgtgtatttcgtacgaataactattaaaaattatgtttatttttcttctaagttatgtagatagattaaaaatatatatttttgagattcatgcatcccaatattaacacctatatatatgtttatatatgattaatcttaaaatataatacaatgtgataaaataaatgaatgagataaagactggtctgacgaatgtgtatcattgtctgataagttagttagtgccttgtgttgttatttgtggaaggcttgtactgttccaaccgtccattactttatttgagaaaatttgttgagagggcaattttcaagtttgtaaatttgccacttcaataacttctttgatttgatttgtcaattaggtagttcttacttcttactacattgatgtcatgcactttcatttagctgtcattttagagaagaaattacaaaaacgttattattttaactaa

SEQ ID NO: 170626 - DNA, 679 bp, Arabidopsis thaliana landsberg
tcggtttgctaaggatttgggggtctttgttcggtttcagtgtcactaaaagaaacttcttttatgactgagactattgtggagcatgagatggaagaagaagctgcaatgagcttggttttgttttcagaaaaagtatggctttgaattgtctcctcatgatgatgattccatggatttagatggtgttgagttgttactagacttgagggaaatggtttctcaatcgggtttcgaaaagtctactacttgcagtggtgttattgctctgagaagtaatctgcagagtaaatcaagtcacaaatgcaaaatatgtggcaagagttttgagtgttatcaagctctaggtggtcaccaaagaattcacagatcgattaaagagaaactagtgcgtaaaagggagtatactaaagttgataattcattgtttgagtccttagatgctatttcaaaaccatcaaaatttgaagtctcccaagaggagaagatgttagattgtgtttgagtcgaaacaagagttcagtgaagtatatcctcggaagagtaagttgcagaaaagacctgagagtagtagctcctgctatgaatgcaaagtatgtggcaagatttttgggtgttatcgaggtctaggtggccacacgaaacttcacagatcgactaagagggaattagcgagtac

SEQ ID NO: 170627 - DNA, 465 bp, Arabidopsis thaliana landsberg
gcagctgtagaacatcgtcggcgctgtgctcgcggtgcggcacggcgcgctgtccgccgatcacctcgaactctttaatgccgccgccgtgcaggcgatggcggcgccctggacggtcgccgttctactgcccggcgcctactacttcatgcgcgagacggtgccgccgccgctcgccctgctgcgcgagcacggcgtgccgatcgccatcgccgccgactgcaacccgggcacctcgccgctggcctagccgctgctgacgatgaatctccaggcgacgctgttccggctgacggtcgacgagtgcctggccggcgtcacgcgcgcgacggcgcgcgcaatcggtcgcgcggcgtcgatcggcaccctcgcccccggcaagcactgcgatctggcgatctgcaacatcgagcgaccgaccgagctggtcaaccgcatcggcgcgcatccggtgcatgcgcgcaa

SEQ ID NO: 170628 - DNA, 2361 bp, Arabidopsis thaliana landsberg
  unsure (1)..(2361): unsure at all n locations
ccgttggcaaaatagagcttcccctctccttcggtgtagcacccaatgcccgaagtgagcaagtaaccttcgacattgtcgacatggtatatccgtacaacgccatcatgggccggggctccatcaataagttcgaagctgccatccacggactgtacctatgtatgaagataccaggtccgctaggcgctatcacgatctacggcaaccagcagacggcgcgcaacatagagcgggacttcgtgcctggacaaaggaacgtacactgtctcacgacccagtgcgaggtccctgcgcccgccagcccaaccgataagaagcacgagaaggcacagttgcagagccaagatggaaccaagactgttccccttgatcaggccacccccaagcagacagtcactatcagcgaagaccttacgtcacatgaagaagagaagcttctctgctgcctggccaagaataaagatgtcttcgcctggtccgccctagacctggtcggagtcagccgatccataattgagcacagcttgggaattgacccttcggtgcgaccaaaaaagcaaaggctccgcaaaatgtccgacgaaaagacagaggccgccaaggcggaagtgcaccgcctcctagaagctaaattcatcgagccagtggcttaccccacgtggctctccaatgtcgtaatggtgcagaaaaaagcgggaaatggcgaatgtgcatagacttcaccagtctcaataaggcctgcccgaaggacaatttcccgttgccgcggatcgacaaaatagtcgatagcgcggccggatgcgaggtcatgtcactcctcgactgcttctccggctatcaccagatatacatgaaggaggaaaacaaggctagcaccagctttataacacccttcggcacttattgcttcatcaggatgccggaggactcaagaatgccgggtccaccttctccagactcaccaaaacagtactcgaagggcaggtcgacagaaatatatttacatatgtggacgacatcgtcgtcgccagcaagaataaggaggaccatctcgccgacctggccgagacattcgcgaacatgcgagatgcacgactccgcctaaacccggaaaagtgcgtcttcggtgttcgccagggcaagatattgggctacctggtgtcacaccgcggcatcgaggccaacccaaccaagatccaggccatcgtcgacatgtcgcctccgcagtccgccagggacgtccagcgtctgacaggcagattggccgctctcaacagattcatctccaggtccgccgagcgaagtctccccttcctcaaaacactccgcagtgcgagagacttcgcctgggaccggagcaagcagcggccttcgcctcactaaaacagtacctgtcggagctggccatcctcacaagccccgactcctcgctccccctattgctctaaatngtcgtcgccgcacgcgttcagcgcgccactagtgcaggagcagacagttgagggcgcggtcagacagtgccctgtttactatgtctccgaagtcctgacaccgtccaaatgcaacatgacagagctggagaagatcgcctaggcagttgttatgnnnnnnnnnnnnnnnnnnnnnnnnnnnnnnnnnntcaaggtccgagtcacctcagacagggggctcggcgaactattcagaaacccggaggcatcggtgaggattgccaagtgggcagccgaactctccggctaccacatcagcttcgagcccaggacagccatcaagtcacatgtcctggcagacttcgtcgtcgactggactgggccaataacacagccggacccgtccacagagaaggtttggaccatccattgcgacggcgcatggtgccatgcgggggcaggcgtcgctgcagtcgtcacctcaccagccggagtcaaacacagatatgcagcacgcctcacgttcgctctagaatccgacagatgtacaaacaatatagcagagtatgaagcagtcatcctcggtctccgcaagctaagggccctcggagtcaccacatgcatcatcaaaacagactccaagatagtcgccggtcaggtcgaaaaagactatgcnnnnnnnnnnnnnnnnnnnnnnnnnnnnnnnncggctatccgaagtctcgagaggcagttcaagggattcaccctacagcatgtggacagggccaagaatgaggaggccgatgcattagccaaggccgccgccagggcgagcccctgccctccgacgtattctttcacaccatcggcacgccagccggtccgagccccgaagggctccaaataaccaatgatagcgagggccaccgtatagtccacctaatca

SEQ ID NO: 170629 - DNA, 1404 bp, Arabidopsis thaliana landsberg
atgataatcaaacgaaagttgaaaactttgaaacgatgtaattcgactaatgaagaagatgatatagttcggaagaagagaaaggtcaacctcaatggtggtggtagtggtggtgattactattaccctcttaatcttcttggagagattggtgctgggattgttcctggtaagaatggattctctgtttctttgtgtaagcaagtttcgtgttctcctaaagttgaggtggtggaggaagaagaggaggaggaggagataaagtcaacgagattagtttcacggccaccgcttgtgaagacatctagaggaagagttcaggtgcttccttcacggtttaatgactcggttatcgagaattggaggaaagataataaaagtagtggcgaagaacgcgaggaagagattgaagaagaagcatgcaggaaggagaaagtcaaagttagtagtaatcatagtttgaagattaagcaacaggaaactaaatttactcctaggaactataagtatagtagtagtagtgcattgtgtggagagatagatgatgaggataaatgtgaagagattgttagatatggtaatagctttgagatgaagaagcagcgttatgtagatgatgagcctcgtcctaagaaagaaggtgtttatgggccagaggatttttattcgggtgatttggtttggggtaaatccgggaggaatgagccgttttggccggctattgttattgatccaatgacgcaagcgcctgagcttgttttgcgttcttgtatacctgatgcagcttgtgttatgttctttggtcactctgggacagagaatgaaagggtatgtttgtaaaattgtgttcttgtgtgattctgaaagctgtttgttggagtattgactgtagctaacttgattatgtaagcaggattatgcatgggttaggagagggatgattttcccatttgtggattatgtagagaggtgagtcgatcgtagaatcttacggaataattgtttttgatttatatgtggatgttttgcttaatggtttgttgttatttaggttacaagaacagtctgaactgcgtggatgcaaccctagggattttcagatggcacttgaagaagctcttttggcagaccaagggtttacagaaaagctgatgcaggatattcacatggccgctggtaaccagacttttgatgattctgtctacagatgggttgaagaagctgcaggctcgagccaataccttgatcacgttgctccaagccaggcaagtttctctttgcttggggttccttttcgagcatgtgtataattatagaatcttaagtttatatattttcaggacatgaagaaatcagaaatccaagacgctgtgtaggatgtggaatggtcatttctattaagat

SEQ ID NO: 170630 - DNA, 1098 bp, Arabidopsis thaliana landsberg; identical to SEQ ID NO: 2275

SEQ ID NO: 170631 - DNA, 1290 bp, Arabidopsis thaliana landsberg
atgcaaacagtgaaagctttgaggagagtgagtgaacccttacaatgggttcggtctgtttcttatggaagacgcttttctgctctcccaaactattccgcatcagatgcagatttcgaagaccaggtttttcgtcttcttttgtttcggatcttccctaaatgtgcttaatttgatagtctgtttgtggaactctttaacattgttatctaaattgatcgtaaatgggattctaatcacttgattttctgggagtgtaaatgaaatctgtacttcctttttatcaatttgagattttgctgtaattgaaggttctggtggaaggaaaagctaaatcaagagctgccattctcaataacccatcttctctcaatgctctttctgcgcctatggtattgtgttcaccagagtagtctttttggattaagaagtctcgtttcttgagctcgtttagtttttttagttatgcttcaaaaacttttgccttggtaggttggtcggttaaagaggctatacgaatcatgggaagagaacccagctatttcctttgttttgatgaaggtatggtacttatattcattgctgctgcttgtgtccttctgatgcctggtttttaccaaaatctcactcaattaagctactgttcttatttttcctgaagggtagcggtaaaactttctgctctggtgcagatgtcttgtctctttatcactcgatcaatgaaggtccatctcttgtattagtttccagttgttaaatacttgtaaaggttttgtgagcctgaagtccctttcaccagagttaatttggtgaagttactgagaagctttgctgatgtattgtcacttttttgtttgcacaggaaatactgaagaatctaaactctttttcgagaacttgtacaagtttgtatacctccaaggaacgtatttaaaaccaaatgtaagattcctagccatttttttcgatgctatttgttaataccagatgggattggttcgtatgaccttgtgtgactagaaagagctaacctacttatttgtgtccactcgataatctatgaaactgattttgtagataaaaggcaagtgtttgaaatattttgaactttaattcttgctcttaagcctcttatacatcaagagttttgtttaactgcagatagcaataatggatggtgtgaccatgggttgtggtggtggaatttcacttccagggatgtttcgtgtggctacagataaaactgtatgtggctcgctttattattacaaatcactgattttttacttc

SEQ ID NO: 170632 - DNA, 692 bp, Arabidopsis thaliana landsberg; identical to SEQ ID NO: 70984

SEQ ID NO: 170633 - DNA, 802 bp, Arabidopsis thaliana landsberg; identical to SEQ ID NO: 11561

SEQ ID NO: 170634 - DNA, 1300 bp, Arabidopsis thaliana landsberg
aggagggttttgtctttcttgatcttcgttttcgcagttcttggattggttcaagctcaagaccaatcaggttatttactctgttttcatgaaatcttgatgttttgtttccttttcagatcaacaaaacctcttaaaagtttgttttcttttatcataaacaggattcataagcttagattgtggtttggtgcctacggaaattacttatgtggagaagtcgacgaatataacatacagatcagacgcaacttacatcgacagtggagttcccgggaagatcaatgaagtgtacagaacccagtttcagcaacagatttgggccttgagaagcttccctgagggtcaaagaaattgttacaacttcagtctcaccgcgaaacgcaagtatctgatcagaggaacctttatctatgggaattatgatggtttgaatcaactcccgagctttgatctttacatcggtccaaacaaatggacctctgtttcgatccccggagtgagaaatggttcagtctccgagatgatccatgtcttaacacaagaccatcttcaaatttgtcttgtgaaaacaggagaaactacaccgtttatttcttcattggaacttcgtcctttgaacaataatacatacgtcacaaaaagtggatcgcttattgtggtcgcaagactttacttttcacccactccaccatttctcaggtacagaaatgagccaaaaaggttttattttcatactagttgttttgttgtttgtgttaaattatcaaaatgagcctttctctctaggtatgatgaggacgtccatgaccgaatttggattccattcttagataacaaaacttccttgttaagcacggaactctctgttgatacaagtaacttctacaatgtgcctcaaactgtagcgaaaactgctgctgtccctttaaatgctactcagcctctgaaaataaattggagtctcgacgacatcacttcacagtcatatatatacatgcatttcgctgaaatcgagaatcttgaagctaatgagaccagagaattcaatattacttacaatggtggcgaaaattggttctcctattttagacctccaaagtttcgtataacaactgtatacaatccagcagctgtgagttctctagatgggaatttcaatttcactttctcgatgaccggtaactctactcatcctcctcttatcaacggcctcgagatttatcaagtcttagagcttccacagcttgatacataccaagatgaaggtaagttaagcatgttctttaaccaattcttt

SEQ ID NO: 170635 - DNA, 568 bp, Arabidopsis thaliana landsberg
aaactaaatttaaaatagctatttcatttctctacaaatatatgcaaatattaattattgcatagtaaacgactaaacttctaaatgagcctattggttttgtatttaaactgagggcccaaggacgttgcttcattaagctaccataggaccggtcttgggctgttatatattataaatgttatatttcctttcagcaataagtaaaccaagccaccactaaaagagacagaaattgtatggagagtgtttttcagcatgtttttatccaaaaaaatatcaatgtcattgtatctattatcactattagatggtcatttcgatgtatacgcgtttatctaattcattttgatcatatcagaaaacggttgtgacgacgagaagtgtgcagtttatgccattttggttgtcatttttcctctttctgaacggcgcgatttggggtgtctacgctttactcctacacgatatgtttctactagtaagtatcattttggtataaaatgttttttaaaagaaagcgagatttttttttttttttatcataatatttaacgaatttgtattt

SEQ ID NO: 170636 - DNA, 510 bp, Arabidopsis thaliana landsberg
atgaccaacggtggtggtggtatgagttccggcgaaggtttccggcgacggagctccggcgagggttttccggcaagggagttccggtggtgggtttccggcgatggaattccggcaaaaattccggcgagagttttccggcaaagaagttcaggtggtgattttccgacgacgtagttccggcgagggagtgccggcggtgatttttccggtgagggagttccggcggtggtttccggcgagggagttccggcggtggtttccggcgagggagttccagcggtgatttttccggtgagggagttctggcggtggtttccggcgagggagttccggcggtggtttccggcgagggagttccggcggtggtttccggcgagggaattccggcggtaattttccggcgaggcggatccggcagtaattttccggcgagtgagttccagcggtggtggcagaggttccggtggtggtggtggtggtggttctggactggggtggtggtgtgaa

SEQ ID NO: 170637 - DNA, 893 bp, Arabidopsis thaliana landsberg
atgaatgatgcagtggagtttccaagtcaccgacaccctttaaacctggtagaagaagaaggtgaagatgaagaagaagaagaaaatgacgatgaagaagaaagtcgagtatgtggtttatgcggggaaaggtaaaggggtcccgttatgaatgttcagaatgtaatttcactgtgcatcttggttgtgcgaagaatccaccatcgccggtaatcgagaagagcaagatccacgagcatacactcaccctcttaccgacacatgtctccttcacttgtaatgcttgtggactctctggagacaaatctccgtatgtatgtcttaagtgttctttcatggtacacggagactgcataggctttccacgcgttataaagatcaatcgtcacgaacacagtctttatcatacttgctttcttggtaccggtgaatggatgtgtggagtttgtcgaaagagcatcaatgggaaatacggtgcttatcgttgctgcttctgcaaagattatgctgtacattctagatgtgcaacgagaaaagacgtgtgggacggactggatctcgagggggtgtccgaagaagaggacattgagactgaggattttgtccgcatagacgatagcttaattcttcatttcagtcataaacatcgtctaagaatggaagagaaaaaggaagatggagattttgtttgctctggatgtgctcatcccatcatatctgagaccttttacaggtgtgatagtctatgcgatttcattcttcatgaacgatgcgctaatcttccgaggacgagagctacggttctacatgtacacctccctactctttgcaccgacgacaggtcacataacaacgacctttctcgctgtcatgccggtgacttatagttcaat

SEQ ID NO: 170638 - DNA, 2103 bp, Arabidopsis thaliana landsberg
aattatatatgaaaatgcattcgacaatcgtgattctgccctcagatatttggctgccaaagactatgacaacgtaaacactatggtcagtgcaaagttgatagatatgtttacgtgtaccacaattttttatgatggaaagtaatgttgttaaagatttgtctaacattatcttagtgattctcgaatgtttcataagagaaaataaaatattaagattatgtaattctcgcgatctataataataataacattaatatgattattgtcattatcttttttttaatatataaaaagtaataaaatataaaaaattctccactccctctgcttacaaatctttcatttaaagctacactttttctgtcatccaagctaaattcttctctaaatcgttttaatcgactcgttgactcgtgagttgcctcttgagctatttagctaattgcttatagaaattttatacgatgatggaagaaactagagggaactggcaaaggataaagaacccatttcttctacgtagattggtggttgtttggtagcatttatgctctatgttatgctaaggttataaattctcatattgtttttgcttacgctttgggattaatagttgaaataaatgattgatcgcatcacttttggatttaggaccgaggccttacattctattgtattcattcagaggtatgatatcagaaatggatttttgtttcatttgtgtgatggaccttaacatgatggaccttaaaattgctacatataacaaaaacaaaattttatttatatgatgatttatatatccatcattctgtgaacggattagattttctttgccttgtagatcaattgtgtgtctagtatagtatagacaagttcaaacttgcttggctttgcttaaccaatcattaattcgtattttaatttcaatctcacttatcaaaatcactgatacttaacttagctcatggacagtctctacggccaacaagacgtaaatactaaaaagacccatatctagagctctctaatagacacaatcaaaaagcatttacgtaatcaaacataatctcaatttttcttatgttgtcaacctctaatgacccatatttttcctcctctctgccctcacctccttcctaaccctataaaactttctctttgttcctttgtctcttccattttcccaagaaacaaacggatcgttatcttttcttatcaaatcttcaatcaaacccacttagagatcaattgcttacaccaaattctcaaattaagaaccgatgatttcctcaattaaaccggttttaccttccttaactgcaatcgtcggcgtaagtcaatcaattcaagcaaagcttcaatttttgccttacccattatcggaaacttccaaaagcctaatcctttacctcataaacatcttttatcatttcagaatttgtcgaatttcgctttagtggcggcggcggcgcagaggagtgatgtttttagggttggagcttacgaagcttcaatagtgagtatgtctaaagtagtagtgtccttcacacacacatcatcaaaagcagtgaggcagcctttagcgtccttgtctcaagcctcttcttgggcgagtcattccctctacatgtttacctctccctcttacccattatttgaggatgtgctcttgctgctgttacggagctcaacttcaatatgataggtacttaacaacatcctattgataccttaagaagctaatgcaattcaatgaaatgttttgagatgttgatatacgggtgtttcttgggggttttcagggtttatgggggcaatgatatcgaatttggcgtttgtgtttcgtaacatattctcaaagaagggaatgaaggggaagtcagtgagtgtgatgaattactatgcttgcttatctatgatgtctcttctcattgttactcctttcgccaattctgtggaaggtccccaaatgtgggctgatggttggcaaaacgatgtctctaaatcggaccaaactttgtctagtaagtttatattgatgttgtacaatacaaaagagacaaaaaaaattcgaaccagttgatttaaaaccttgta

SEQ ID NO: 170639 - DNA, 959 bp, Arabidopsis thaliana landsberg
catctctttcttcacctaacgacgatggatctccgattcttggcgtccttgacccttcttctcggtctattcttcgtcaatacaaatccaataggtcacttaatacctctttatttcattatgtatatagaaaatataacatgtgtgattatattataatatcaccctgacatagagtaatcaaaccatgtcaatatcttgaacttttgagacctttttaactattatttttagctttaaaaccaaaattatttaaatattgaaattttaatttgtcacttatattgatgtttcaaatccttgaaaataaaagttaaaaacaaatattcaaatgattagatatgttttatgattaacaacaatgaaaaaaataatagagtcactaaattttagtaacacattaattctcttttttatttttgctaagaatgtaaataattcattagatatgatcaatattaggatttacatgaagtaaagtctaaggtttttagtcctatgacaaaagaaggaacatattaattctctcatgaaatatttagtaacaaattaattctgtcatgaattatgccacatgtgataaatgtattaaatattggattaatatttaacagttggacaagtcggcgtttgctatggaagaaacggcaacaacctcccttcaccggcagaaaccattgcgctcttcaaacagaaaaacatccaacgagttaggctatacagtccggaccacgacgttctagccgccctacgtggctccaacatcgaggtaacgctgggtcttcccaactcttacctacagagcgtggcctcgagccaatcacaagctaacgcgtgggtacaaacctacgtcatgaactacgcgtatgaggtcagagtaccattacataactgttgggaatgaagttcgatcacagactcttaagcacagttcacagtccctgccatgagacacattg

SEQ ID NO: 170640 - DNA, 506 bp, Arabidopsis thaliana landsberg
cgcatgtccgggcggcaagagcaaccggaacatcatgaatgccacagccatcgcggcaatgaagcagggctcgattctcatcaatgcatctccggggaccgtagtcgacatcaatgcgttgcgcgacgccctggaaaccgtgcacctgtccggtgcggcgctgaacgtgttcgccgtcgaacccaagagcgtcgccgaaccgctggccagcccgctcatcggcatgcacaacgtgattctcacgccgcatatcggcggcagcacgcaggaatcccaggagaacatcggccgcaaggtcgccgagaagctcgtgcgcttcgccctgggcggcgcaaccaagggcgcggtgaatttcccggaaatcccctatgtcgaaacatcgggcgcggcgcgcatcctgcacgtgcaccgcaacgcgccgggcgcgcccggctccctcagcagcctgcttgccgagcatgggaagaacatagtgacccagccgttgcagacccgcggccagggcg

SEQ ID NO: 170641 - DNA, 535 bp, Arabidopsis thaliana landsberg
atggtattggaagatgagatgaagaaaggtgaagcgtcaggagagacatcagagaaaatggggttaagcagaaagaacagtgggagctctttgtctccgacagaggatgatgaagaagatgaagacaagaagctcgaactcggtcccatgatcgctctcaaagaacaactcgagagagacaaggtcttttactttatttattatacgaaatatgtaaactataccagattatgaatgggggaaaaatgttagtagtttactatattcttggcatattaaagtatgaacttggtgaaactaaaattataatagatgttataacgtcaagaataacaatctgatttttcttgtttaaaatggaaaattaaggctttatataatttaaaaatttttcttcgatatttcttattttcgacgaaaatttgataggatgatgaaagcctgaggagatggaaggaacagcttcttggcgtcgtggatttggaggatgtcggaggtaaaccgaattcattacttgatttagattccatggttc

SEQ ID NO: 170642 - DNA, 564 bp, Arabidopsis thaliana landsberg; identical to SEQ ID NO: 3556

SEQ ID NO: 170643 - DNA, 516 bp, Arabidopsis thaliana landsberg; identical to SEQ ID NO: 65392
  unsure (1)..(516): unsure at all n locations

SEQ ID NO: 170644 - DNA, 1373 bp, Arabidopsis thaliana landsberg
gactctagaggatcccctaatgtcttcatcatcacattatacatgcaaccttcgaatttaaaatatatgatcacgttctctttcattgtaacctgccaaaacaatacacatactcagtcaatattactagtattaccgattctactacattttaagtaatactagtactcatttcgaaatactatgtgttagtaatactattacatatatgaaatactacgttctaagtaatactggtgctattaaaacataccatctacataaaaatcaattgtttcgttaaaactgtaactagttcgaccagtattattttcacgacaagaacaacgtttggtttcgagttcaattcattacgaatcaacattcaaaatcaatttctgacccagttataggccaaatcgaccctaaaactatatttaaacttctaatgtaggtactaaaacacaataacccaaatctaattagattgaatctaaaaatcctcaaaatatgtaattcaaaccttttgaagctctcttcatacctagacttagtagattgatgcagcttgcaggaggagaaaaacgacaatgcggctcgtcggagcttgccggagctcgccggaggaagaatcccgaagaagaagtcgagctcgtgctcgagcttttttttttctttttccgtttttttttttttcaaaatgttttctattaattattctaattattcattcaaaataaattatagggataaattcgtcttaacacaaattattaattcaaaggggatatgaaaactctaaaatggttttgcagattagttgtcccacaaaaaggacacaagagatatgatcattcgtcacgtacgcttatgtgttgacttgtgtgattaaggcgcatgggggcagtgtggatagaccgattcggtttatttatgctgctgattttagaaaccggttagatccaccggttcctttaacatattttgggaattgtgttttaccaattgattttaatggatatgaagcgacgacctttttgggagaagatggattcgtcaacggtgttgagattttaagtgattcggtcaaaggtttgggttcacgaagtcttgagtcagtttgggaggtgtacgaggaaggaactaaaaacatgaaggttggtacaaaagtattgactgttaccgggtcgaaccagtttgggatatatgggacagattttgggtggggaagaccagttaatcctgatgttatgtctctttacaagaacaatagcttttctatgtcagcgaggagggatgagattggtggtgtggagattggtgtctctttgaagagatgtgagatgattgttttcctttctttatttagtaatggatttgacaattgaaagtta

SEQ ID NO: 170645 - DNA, 1442 bp, Arabidopsis thaliana landsberg
tctttgctagctggcttcgcctcataattggagtaggtgtacgtaacctgcaggctcactttgactcacaactctttgctagtcagtattcttgagattaggaggcaaaagataatcgcatggaaacttacatggatctggtccgcgacctgcccgacaaatttgaaaggttcgagttaatcaaagtccctcgtgcagaaaattcagctgctgatgccctagccgctttggcttctacgtccgaagtaactataacaaggataatccccgttgaaacaatagctcaacccagtatttgacttgaggaagtgaattttgttactcgggcaatacgtaggcagctcgaagcacaagcaaacaatcccgaccagcagtagctcgatgacgaaaacgacgttccaaaggttgtcccgcctccaattaccgaagaatcgtctggtccaaatagtcccgaagtccctgataatcagacacctcacgactggggggcagactggagagaactgatccgagactacatcctcaacggggtactccctaccgacaagtgggaggctcgaaagctgaaggccacttgtgctcgtttatgtgtagcatatggcattttttacaaacgattaatttcggctccggatgttgtttgcatctttgtggagcatacccgtactatgcggaaatcactcaaagtaaacaaaatatggttatttttggcaaacaatgattgaagactgcgaagcatacgcacgtaaatgtgagcaatccctgaggcatgcaccattcatcttgcagcccgctgaacttcttagtttggtgtccgcaccttatccgtttatgaagtggtccatggacatcatcagactacacctcgctatccgcagagaaaaggtcagggtaaagcgatgaacaaaataatcatttctaatctcaaaaagaagttgaacgagtacaagggcgcttagttgggagaattacaaaatgttttatgggcaatccgtacgattctgagaagagctaccggtgaaacacctttccttagtttacggaatggagatagtcatcccgaccgaaatcaaagtcccaagtgcgagaggaatcagaaatccacagagtgaagctacgaaccacaaaatgatggttgatgtcattgatactattgatgagcgtcgcgatcaagccttagtccgcatgcaaaactaccacaacgttgcagcccgctattacaattgaacgtctaaaacagatcatttgaggtgggaactctagttctacgtaggtttcaacagaacacgacaaagaaaggagcaggcaagttagggatcagctgggaaagtccttacagaatcacacacgtagtttggaatggagtctatcgcctcgtgaacatggaaggcaaagcagtttgcagggcatggaattccatccacttgaaatgtttttacatt

SEQ ID NO: 170646 - DNA, 558 bp, Arabidopsis thaliana landsberg; identical to SEQ ID NO: 81130

SEQ ID NO: 170647 - DNA, 1068 bp, Arabidopsis thaliana landsberg
agtttgttgttgactatccatatgaagttatcacgtccattgtggggaccatgaatgatagttatgttacgtcatttgttttcaaaacatcaaaagggagaacctctaggatatttgttagagaacttctgattcagttgaatttgtcattgagagcaaaggttgtgccgttgtcggatttcatggatggtatgcacctcttggggctgggtatattacggctcttggtgcacatttttatccgatgcctcttcctcctgctgcggaaaagctagaagcaaaaggtggtgctggaggagttccatgggacgatggtagtaattttgaacgtgttagaaagatatacattggaacatgtgaggttggtatcgtttccgtcaggtttttgtatgaaaatgacattgaagagatagtagtgggagatcatcatgggaacaagaaactacttcgacatgaagaggtgattactactacttcacttttattacctacttatccaattatacaaggttatttatatttgatctctgatgttcttcttttgaatacaattgtagttcgacctggacaatgcttgcgaatacctcacatcagtggaaggtagttatgacgtaatacctggaagtgaagatgttgaagttatcctcatgctcaagttcaccaccaacaagcgaacttctccatgttatgggctcgatgatgacccaaccttcgtgctccacaaggcaggtcacagaatcattgggttccatggaaaatcaagtaacatgcttcataaacttgggatccatgtgctccccatcaccgacccatgatcatattatatgacttaaacgaaatagtatcctcctctgttttcaataactttgatttgtttctcctctgtttttttttctctcaagatcttatgaacttttgaatgattcctctgtttaataaagtgtatgtatggagttgatgtgacgctagttcctaacttctctgtgttcaataggccgcttccagaagcgagattcatttttccagattccacgaaaaagaaaaatatgttctatgaatcagagatga

SEQ ID NO: 170648 - DNA, 2181 bp, Arabidopsis thaliana landsberg
  unsure (1)..(2181): unsure at all n locations
ctgctgaatgtgtgtaagtatgaactggacaatatactatctgcgtttatgtacttttatatggaacttttctatgtagacgagagcaatgttntgcattcatcaatctaagcttcttttcttgtctcagtacagaatttcttatttactggttgcaaaccatcaccctcctgcaatctgctgttctttttttttgtgcagatacaactttctggataaatcagtcggggtatcaaccttatttgatattactagtgactctccagcggatgatgcctctcaacttgttgaaacttcccggccgttgcatattccaggtctcgaaggtttagttattcccagtaatactcgtgggcgaattctgagagtaatcagtgaaaatactgtccttgtacggtgggaggtaagtgatctcatcattctttgaaaaccttattcatagactcctccaatgttatattttttatggtcttactgattcatgaaatacattttcctttccaagtattcgctatccggcataattgtgttgatcatccgtttggccaatgaactctacattggtaacaatcgtgaagcttttgtgactctggagctacttcgtcggatggtgacatttaacaaggtaactgcattgctccattttcatttttatccaggttatgaagtagggattgctttagtatttgtacaccatgaagtagtctatggcttttctgtctttgaatcaattcttctctgaccgttctcaaaatttgaatgaaggctatgcatccgtatttttacttctctgaccaggttctgtaatttgatttcaggccgtatgtttctccttactgaatatcagccacttcttttatgttcaagaatcttatgtgaatgggaagatggaaagtgatgtgaggtgaagtatttgcatttttatttctttcttacattctctcttccggagtacttgaacagggatttttttttttttccagggtggttgatataatttgtaattcagtcagaagcctgacttttgactctggcggtgccgctgtgatggcaatggctattgatatcttagctaaactactgcgatggtaatttttgttgtaatgcttattcttttgctgtcttggttatcaatttttttcacagtatttcttttctagcaaatgcatgtcataatattatatgtcatgtgcaatgtcttgttatatggtatagtttggaagtcggtatcacttctctctggaacattgatagctaattttattttactctttgagcagttccccgtcaagtgttgctcccatggtcttaaagtcaaatatatttgacatgacttcatgttcagacgtccctgacagtggctataatatttcattgaggttggctcttttttaagtttgttcattttcaaatatatcctacccataattatataatatactcattgaagtttaccacgcctagaacatttagtttttcttcttatttagaatcatcggttatccataaggaagtaatctataacacattgccaacacttgatatgcttctcccaaaaagacaaactctcacaagaatgcttcgtagatcaccgacaaatcctattaattactaggaaccattctattgtttgtaatgaggcacattgtcgaaagtactgttttagtgttttcttagcttttattttgaggaatatctctttttagtaacaaggctttaacaaggcttcttaaaattctcatttattttacttcatcgttttgtgcattctctggctgcatctgactttttttttactctttccgctgtttttttttaaaaagcggttcttggtctctctctgggaaacttgcaaagatgatcttgattgactgcgagaagaatgataccagctgcccattggtcatatcaggcaagtctgcggcagaattctgtttagtgcgaaatctaaatcgactgtgggctcacagttcttggatatgtcttgactctctatatattgtataatgtgattttgttttatcccttgcagttctggaatttaccatgcaacttgtggaggggggactagagaatgatgtaatttttgctctagctgttttctcgttgcagtatattcttgctagccatgagtattggaaatacaatcatggaaatatgcgttggaaagtgacactaaaa

SEQ ID NO: 170649 - DNA, 407 bp, Arabidopsis thaliana landsberg
ctgctaaattgtatgaaattcgttctcaggttgtccatgattacctgcttcggtataaacaattctacatgataaacggccggcgatatgataataggaattgatttgggaggtacgcatgtgcgcggcgcccgggtagataaacaccggctgtccggcgtattgtctgacgatattaccgcttcacaggcagaataagcggtgttgcagcagttgtaccgcctgacggaccaattgatgaccgattcagtcaaagccatcggcatcggcgtacccagcgtagtagacgtggaaaaaggtattgtgtatgacgtgcaaaatatcccgtcctggaaagaagtgccccttaaaaagaagatggaagcgcggtatcatgttcccgtgctggtaaataacgatgccaattg

SEQ ID NO: 170650 - DNA, 264 bp, Arabidopsis thaliana landsberg
gtgaaaagagatttggggtcattcaacaaatacatttgggggtttatgaaacacaaaccggtcaccacaaaatacacatcatgccaaaagataccggttaagacatcgaaatcggagactataagcaaagacatggttcgtcgtgggtttagattcgttggtccgacggttatacattcgttaatgcaagccgccggtttaaccaacgaccacttgatcacatgtccgaggcatctcgagtgtacggccatggcggctttatag

SEQ ID NO: 170651 - DNA, 1168 bp, Arabidopsis thaliana landsberg
aaagatacgatcctgccaacctttgacaggtggcgtcctgcaattcgcgagcgctttttactcctcgcgcattattcatctcgggttagtcttgttttcatttctcccaatctcgtcgtttaaaacgcaccttaacttacttctttgggtatattcaggcgaacaacgaacttaacgatatgattgagcactatgagggactactgcttagtagggagcaagatatcaacgcttggaagggcaagctttcttcccttgaggccgatctccgctctacttctgatttaaagcagaaactagaagactgagttgaccatctctcttccgagcttttgaagtcgaacaacgagttgcaggatcaatatcaaaggtaccacaagcttcaggatgagctctcgactactaaaggccggctctttgaatctgaatcagccgcttatgatttgaacaattagttctccgaactcaaggcgaagtacaatgcaattgttaagctctgagatgctgagttggccaaattggcgtctaaggccagaagagaggtgaaaggtcgtgggatggaattgattcaaggggatatccttttcattcagaccgagaaaactaggacggagctggaatcagacatcaaagagtatgaaagcaacttactccttctggatcaaactcacgacgaggatttttccgagaagcaagaaaggtccgaattggaagccgttttaacagagaagcgaagtcgtctggccgctctcccatcttcatcattcaaccatcaacagtttgaggagttctttaccgagtcgcctgctttgagcgagtccggtttagattgggctggtaagttttaaaacttcaaactttgacaccaaaccaaaataagttatacttgcgttttcctgattcgagatgattatctcaagtcccagtgatcccatggaacctgaggtatctatcatgccggtggacactcctaacggtagccatcgcgccagaaattcctccatccacgaataccgaaacagtggtcatcgaggataatgatggttcgaactctaggattcccaccgaatagcctgtcgctgacgtaacagatgagactgagacggctgtcgtggacccagtcgatcccgagccaactcaaactgaattcgaggtggctgaggattta

SEQ ID NO: 170652 - DNA, 608 bp, Arabidopsis thaliana landsberg
atggcaggtgaagaagattggatagaactaaagtttagactagcagatggtacagacataggtccaagcaagtataatcaatctatgactgtttcttctcttaaagagaaactcatttctcaatggcctaaaggtattttatacttatagttatgcttttgcttctttctacagcttttcacggttttgatggttgagtctcatttgattcattgcttcatgtatttctttttactctccattgggtttgattgtattaaatttgtcttctttctgcaatgatttgaatgtatgatgaacttttttgggctagtctaggtgttgaactttgtaaagtatgaggctttaatagataattatagttttatagtgtgaaaggtttagttgttgttgtgttaagatcactctagttactgattttggctaaaactagtataagattgatgtctcaaattgtattgtttttgcctggatttttttggtttaggtgtttggtgtttcttggccttattgaatcttatgttgcatttactttctctacttaaggttgttttataattgcattttcaatgtttctctgtttcacagataaagaaaatactccaaaa

SEQ ID NO: 170653 - DNA, 1477 bp, Arabidopsis thaliana landsberg
actatatctcttgctcttgaccaaccagtattcaccagagttgccgtgatttgtattgttctcggtttcatcactctcatatgcatgatattcattgcggtttacaagtcaaagcagcagaaaccagtcttgaaaggctcttcaaaacaacctgaaggtcttggtctcatagtttatgatctcttctctttcgttcattaagattcacaacagcattatgatatatcttgtatggatccttcagggtcaacgaagctggtgattcttcacatggacatggctattcacacgtttgatgatatcatgagagttacagaaaacctcaatgagaaatacatcattggatacggtgcttctagcacagtttacaagtgcacctccaaaacttcccgacctattgccattaagcgaatctacaatcagtatcccagcaacttccgcgagtttgaaacagagctcgagaccattgggagcatcagacacagaaacatagtaagcttgcacggatacgccttatctccctttggcaacctcctcttctacgactacatggaaaatggctctctttgggatcttctccatggtttgctattcttcttctcttggaccagttacgttcttttcagccagttttctacttttggaagacttaaacgtagtgattgtatgatgcagggcctgggaagaaggtgaagcttgactgggaaacaaggctgaagatagctgttggagctgcgcaaggacttgcatatcttcaccatgactgcacacctaggataatccatcgagacatcaagtcatcaaacatactccttgatgggaatttcgaagcgcgtttgtcagattttgggattgccaagagcataccagccaccaaaacttatgcttcaacctatgttcttggaaccattggatatattgacccagagtatgctcgaacttcgcgtctgaacgagaagtctgatatctacagtttcggtattgtccttcttgagcttctaaccggcaagaaggctgtggataacgaggccaacttgcatcaaatggtatgaatttgagtataaagtgtttcacaagtttattcttggaaagaatttgatatcattaacttttttgttgcagattctatcaaaggcggatgataacacagtaatggaagctgttgatgcagaggtctcagtgacttgcatggactcaggacacatcaagaaaacatttcagctagctctcttgtgcaccaagcgaaatcctttggagagacccaccatgcaggaggtctctagggttctgctctcacttgtcccgtctccacctccaaagaagttaccgtcgcctgcaaaagtacaggaaggggaagaacggcgtgagagccactcttcagatacaacaaccccacagtggtttgttcagttccgtgaagatatctccaaaagtagcttataagataataacttttagggttcccttttctgttttg

SEQ ID NO: 170654 - DNA, 1536 bp, Arabidopsis thaliana landsberg
caagtcgctaatatgttatcaaggaccagtcaagaaagttgaagaatacttctcaagtctcgggatcgttgtccctgaacgtgtgaatccgcctgattactacattgacatattggaaggtatactaaagccaagcacaagttcaggagttacttataagcagcttccagttagatggatgcttcataatgggtatccagttcctatggacatgcttaaaagcattgaagggatggcttcttctgcttccggtgagaactctgctcatggaggaagcgctcacgggagcgttgtaggagatgacggaacatctttcgctggagagttctggcaagatgtcaaggcaaatgttgaaatcaagaaagataacttgcagaataacttcagtagttcaggtgacttatccgaaagagaagttcctggtgtgtatcagcaatacagatacttcttaggaaggtagatcccttccaaatacttgcaaaatcaatcgattcacagagaatccttttcttaacctcgatgtgtttgctttgcaggttaggtaaacaaagactacgagaagcaaggacactagctgtagattacctaatacttttacttgctggtatctgcttaggaacgcttgctaaagtgagcgatgaaacgtttggtgccatgggatatacatatacagttattgctgtttgtaagtagaaactttcaagctattttgacaacaactttgcttctttcatctattctggcaacaattttttgtttttttcagctctcttgtgtaagattactgcattaagatctttctctctggataaactacactattggagagaaagccgagccggaatgagcagcctggcttacttcctagcgaaagacacagttgatcacttcaacaccatcgttaagccgcttgtttatctatccatgttctacttcttcaacaatccaagatcaacagttacagacaattatgttgtcctcatctgtcttgtatactgtgtgactggcatagcttataccctggccatacttttcgaacctggtccagctcaactagtaagtgtctcatcaatgctgttgatagaaccaaagactcggactagaaagctctgtttcacttcttgacccaaaaaaacatctcttcctcattttctttgtgcagtggtcagtgttacttccagtggttctgactctaattgccaccagtacaaacgacaacaaaatcgtagattcaatctcagagttgtgctacacaagatgggctctagaagcatttgtggtatcaaacgctcaaaggttgcaaacttgatctctccctgttataaaactgcattgcaacgcatatatctgcagtctttagagtttagaccatcttgcttactcttccgtatatatttcagatataaaggagtttggcttatcactcggtgtggatcactgatggagaatggatataacatcaagcacttccctcgttgcctcgtcttcctgacattaaccggtatcttgagccgctgtgcagctttcttttgtatg

SEQ ID NO: 170655 - DNA, 465 bp, Arabidopsis thaliana landsberg
gaggcgcaatgagcagctccggcgggcccgcgagcacctggcccgggtccggcagcagcagctggtgagcgcgcaacggcaccggatcgcccgtgacttgcacgacagcgtggctcagtgcctggttggcatcggcatgcacctggagtggtgctaccggcacgcggatccgggttccccggagtatgagcgtctggtcgcgggcaaagagctggcccgggcggggctgggctgggtgcggtccgcggtgcaggagctttcggggtttgagcatccggggacgggcctggggcaggcgctgcgggatctgccccggcatttccggtccgcggcgcggctgagggtgtcggtccgggtgtcgggcagccagcggcagctgtcgcccccggtggagcacgcgctgtttcaggtagcgcaggagggattgtggaatgtggtgcgccatgccggggccagccaggcgtg

SEQ ID NO: 170656 - DNA, 2195 bp, Arabidopsis thaliana landsberg
  unsure (1)..(2195): unsure at all n locations
tctgtcgacgatcagatcgctatccactacgccatcaatggccttcgggctggcgtcctctacagccattgtatcagagatccacccaagagcttgcaggagctatatcagctcttcgaaaaatatgccaaatccgaagagctccaccagcgcaaggtcgagtcacaacggaaacccaaagatgccccgcagtccagccgcacgtggacaaggactccgcagccagactccggtcgagatggccgcagtcagcagcaagtgcacaacatcgtcaaccaacagcctgctgctgatccccctcgccgccaggaatatcccccccagggccgcagaaacggaactcgcggcaggggtcgagggcgggcgcaacagccgccgcgccgattctattgccttttccacggcgaagactgcgcccaccagaccaaagactgccccgagacgaaggccaccagagacagaatggcgcgggccgcaatcagcctgacaatcccagaattgtcgcgcataattaccagccaccccctccaccatatattcacgctcccgctccgcatccaccgcaccacgcttaccaacaccatcaggaagtacaaatcgtacctcctccacccccaccaccacaccagcaacatcagaacatcccccatgccccaaagcaggaagacttcgtcgatcaaccatatcgcggagtcattcacatgataacaggggggtccagcgtcaactttgagacgaagcgacaaaagagggatcattaccggagtgtcaaccatgtcgccctcatcggcccagtggtacaaacgaggtggtcacatgtgccactaactttcgatgccagagatgtttgatctgcgccgcgcaccccacgtcaacgccatggtgatcaactgcagcgtagcaggctgggacctgcacaaagtcctagttgacaacgacaaccaagcggacatcatcttcctgcacgccttcgaccgcacgggcattagccacaacttactcaagcctttggacaaccccctatatggcttcgacggcaagggcactttccctgtgggcaagatagaactacctctatcattcggcgtagcacccaatgcgtgaagtgagcaggtcaccttcgacatcgtcgacatggtttatccctacaacgctataatgggtcagggctccannnnnnnnnnnnnnnnnnccattcacggactttacttgtgcacgaaaatctcgggtctgcaaggcgccatcacagtctatggcaaccagcagaccgcacgcaacattgaaagagacttcgttccagggcaaagaaacgtacactgtcttacgacgcagcgcgaagtccccaagctacccgcccaaccgtcaacgagcatgaaaaggcacaactgcagagcaatgatgggaccaagacagttccccttgaccaagcaacacccaagcaaacggtcatcataagcgaagacctcactccgcacgacgaggaaagactcctctgctgtctgtccaagaataaagacgtcttcgcctggtccgccctcgacctggtcggagtcagtcgctccatcatcgagcacagcttgggaattgacccttaagtaaggctgaagaaacagcggttgcgcaagatgtcccatgagaagacagaggccgccaagcgtgaggtacatcgcctgcttgaggccaaatttatcgagccaattgcctaccctacatggctcaccaacgtagtgatggtgcagaagaagagcggcaagtggcgaatgtgcatcgacttcaccagtctcaacaaggcctgcccaaaggacaacttcccgttgccgcggatcgacaaaatagtcgatagcgcggccggatgcgaagtcatgtcactcctcgactgcttctccgttaccaccagatatacatgaaggaggaagacaaggctagcaccagctttataacacccttcggcacatattgcttcatcagaatgccggagggactcaagaacgccgggtccaccttctccaggcttaccaaaacagtgcttgaagggcaagttggcagaaatatattcacatatgtggacgacatcgtcgtcgccagcaagagcaaggaggaccatctcgctgacctcgccgagacattcgcgaacatgcgagacgcacgactccgcctaaacccggaaaagtgcgtctatcgcgttcgccaaggca

SEQ ID NO: 170657 - DNA, 293 bp, Arabidopsis thaliana landsberg
agagggtcttcccacaaataaaattgaagacgaagagtttaagactctatcagatcagaaggtctctattttctcgaaacgtcggctttagagaaccaaaacgtcgaggaagcgtttctaagcatgatcggacggatacatgaggttttgactcagaagatctttagaatcaacggtgacggtaataatgaaaggaacgatgcagtcattcccgccggcaaagagattgtgaatattcatgaagttaccgcactcgaccgttgagtacttctttgtccacttgttgctacaag

SEQ ID NO: 170658 - DNA, 311 bp, Arabidopsis thaliana landsberg
cgcgcggcgacaaggtctatgccatcaccaatttctcgcgcgagatatgggcggagtgcctgatccgcttccggttggtgcagtccttcgacggcgtcgtcgtctcggctcatgaacggctcctcaagcccgacccggcgatcttcagcgtgctgctgaaccgctacggcctcgccgccgaggactgcatcttcatcgacgacagcgcgaagaacatcgcggcggccgaggatgtcggcatgcaagccgtgcatttcgtcgagccgatcgacctgcgttccgcattgcgggagcgcggcctggcgctctga

SEQ ID NO: 170659 - DNA, 1639 bp, Arabidopsis thaliana landsberg; identical to SEQ ID NO: 7078
  unsure (1)..(1639): unsure at all n locations

SEQ ID NO: 170660 - DNA, 404 bp, Arabidopsis thaliana landsberg
ttacagaaaatatttgccatcctggcactggcattgttttgtcttgttcgagcggtttccgctctaccgaccgagcgcaggtactcgcgcatagaatacgtggaacgttggatagatgagtccgttttgcagatgtaacatgcgggtattccggcctgcattaccctggcccaggccattctctagatcggtgtcggcaacagcccgttagcacgttatgccatcaatcatttggggattcagatgtctcttcgtctggaaaggcgaagcttttttccaggacgatgtccgctccagcgagtgtttcaggaaatacgagaatgcagaggattcttttcgcggtcgctctatttttttgacaacacgttccaattacggtaagttgtttgcgctggccactaccg

SEQ ID NO: 170661 - DNA, 405 bp, Arabidopsis thaliana landsberg
ggcaggtggtgcggaggtttttctttgaatatagggagatgttcggcaccaatggcggaattatggggagtttattacggactccatttcgcatgggagaggaaagcaccgcaggtagtgttggaggtggattctgcgatagttgtggagttcttgaggacagggataagtgatcatcacccgttgtctttcctggtacgattgtgccatggctttttatcgaaagactggatagtccgaattgttcacgtgtatagggaggctaatcgtcttgcggatagattagcaaactatgctttttctttagcttttggtttgcactttttttactctgttccgaatgttgttgagttactttggcgagaggatgaccttgggatagtttgcccaaggcagatcccagaa

SEQ ID NO: 170662 - DNA, 924 bp, Arabidopsis thaliana landsberg; identical to SEQ ID NO: 25623

SEQ ID NO: 170663 - DNA, 1673 bp, Arabidopsis thaliana landsberg; identical to SEQ ID NO: 7880

SEQ ID NO: 170664 - DNA, 2811 bp, Arabidopsis thaliana landsberg
  unsure (1)..(2811): unsure at all n locations
atggcagacaaggcgattttacctccgattcgagaggtttcgtcatcggaggaacaatcagacatgtttggtgatatttatgagaagataggaacaatggcgctacaaatcaaagacgttggtgagagaaaacgtttaccagacaaaaagttggatgttgcgacaacaaatatcgaagctttgatgtctcgtttcaacacatctgacgcccggatgcaagagcttcaccgtcaactcgacatgctcatccactcttttccaagccgcgacagtggcaaggaacatggcggatctagtgcatccccccagtctcaggactcgcgtttccacccaccagcaacgttcgcagagccaatgcgacgagatctgggttttaacaaccgcgacaagcttcttaagaacgtggatatgccactgtttgacggcgtagacacttacagctggattgcccgcgtcgagcgttctttccggatggggggtttctcgagctggtctccgtgagcttaacaggggatgctttaagttggtataactgggcggtgaaccgttaagggtttacaagctggcccgagttcaaggctcggatgttactgcgttttggtaaccttaagagtcgtggaccaagtcaaagtctgttatgcatcaaacaaacaggctttgtggtggcgtacatccaccagtttgaggatctctcgtctcatgtctcaggccttgacgacatcaaacttgaatggatacttcttatatggtctttccttgcaaatgcaggagatagtacacatgtggaacctgcataatctaccagaaatgattggggtagctagagatatggagtccagtctgattcatctagtggtactgaaagaaccccacagtggcaaaggagggtccaaaatccattccgatatcacatctttggtaccctaccatcctttggtatgtaaatctaggcctgtcatcacagagccatcgggaaccaaggagagagcaacacctattatatcaagaccgcgaaaacatttcacggatgtagaacttgatgagaaacgtcgcaaagggttatgctttaagtgtgatgatcactatttcaaaggccatgtttgtgctaataaggacctacaagttctggctgtggttcatgggtatgaagaagaagagccacaactcataaatatgtctttatcttacacgtactttgttggtcttccatctgagcacacaatgatgatgcgtggcactatcggtaacacatatggtggngatgtagaatgggggggctacacacaacttcatcacaccaatattgattgagaaaacaaagtccggcactcagcgggcgaggggctttaacattaagctgggtacgagtatcatggttcagggttctggtgtctgcaaagatgtccatttcactgttcagggtcacgaatttgtcagtgatttcatcactttggagttgggaaatgttgatctcattttaggcatcgcatggcacaagacactgggagacagtaatgctaattgggataaggagaagctgttttttctggcaccagggtagatagataacattgtcgggtgaaccaactttttctcatacaaagttgtctctcaaatcattaaggcctgttccaatatcagttcacaagcgttgcgagccaagtggggagacacaagagtcacacattctggcacaactgtcctcagtgttcgaatcttatgcagaggtctgtacaacaccaacggcactttcaccagttagaggcagggaacttgcaatcaaactcttaccacaagcaggccccattagcatcagaccgtacaggtacccccatgctcacaaagacgctatggagactctagtacgtgacatgcttcaatgtggtatattcgccccagtaagagccctttctccagtcttgtcttgctggtgaaaaagaaagatggctcgtggaggttttgtgttgactacagagccctcaacagagtcaccgttcttgacaaatttcccattcccatgatcgatgaacttttggatgaattacatggcacaacaatcttctaagttggatctttgtttgggttaccatcaaataaggatgcgggaagatgacatcgagaagacagcttttcgtactcatgacggccattttgagttcctcgtgatgccttttggcctcacaaatgcaccagcttcgtttcaggcactcatgaatgagctttttgggccttttcttaggaaattcgtgctggttttctttgatgatatattaatctacagcaacaacctcactaaccatgttaaacatctcacattggtcatggaagtgcttgccaaacatcagctatttgccaaccgcaagaagtgcctatttggacagtctcagattgattatttgggacatgtgatctcggctcacggggtagccatggatccgtctaaaacagaggcaatgattcactggccaactcctaaatcagtcgaggaattgtttggattttcggtctgacaggatactatcgtcattttgtcaaagggtatggggtgttagccaaaccattaatggaactcttgcgcaaggatcagttccaatggtcacatgcggctcagttggcttttgatacccttaagactgcaatggtttctgctctggtgcttgcatcaccaatgtttgacaataccgtgttgttgtggaatctgatgcatcaggttttggtctgggggcagtgctaatgcaagatcatcgacctatcgcacactttagttatgggctcgccgcaagggatcaacttgaaacaatctatgaaagc

SEQ ID NO: 170665 - DNA, 112 bp, Arabidopsis thaliana landsberg
atggcgtcgatagtgatgctccttagagcactgatgagttgccgtcttacgcctaaagacgagccggagacatcggatttttctttggtggctgcgaaccttacagaatttt

SEQ ID NO: 170666 - DNA, 3410 bp, Arabidopsis thaliana landsberg
atgtttaggatagttttacatgcatgttgcatatttgtgttgttttgagctgatttagagctgatatgctatcatatgtctggtcaagatcatctccctgcaaacagaacacaccatgagaaggcaaggacataacatcttaagacgaacctatcaacatgattctggccaagcattcaatcatgatttgccattgcagaaacaatagcacactgcttaaaaaacaaactcagttaaaaagacaactagttctcacactatatgcaataaaagaacagtacatgtcacaagagaacatatcaacaagttctatttatccaactatagaacacaaacccacataagaccaaagcatgagagactatatcaatgtgagcttaaattaaaaaaaaagtaaagaacttggcgagataagccaaacagttcttaagacacaatcatcattttcgcaacttaatatctccggacctcacaattaagaacttgaatagctacactatcataagaaacatatgtaaatttcttggtcagacaatataggcaacttggtttttaaaagatcagttcaattgatctcagctgttaaatactttatcactctatagctaatacattaagaatgtttagagaaagataaacacagatttgactttgtagtgatcactaacctgaattggtcccttttttttatgttttctctatgaaacaaggtttgacaaaaattaacagcccattatttttttagaaaaacaaacttcgacaatatccaatcacaatgatagctttgaaaccagaaattatagacatatcaagctaaaatgatcagctttgctaattatattcaaagagaagtggatcaacatgagaagaagccattatcaaagttcagaaatcaaactcgtaaaagacaagacaccattgattatcagatctctaaatttaaagcaaaaaccatgacccattactttgtccaaagtctaagtacgttcaaactatgagagcaagtaaactcgtaccttaaacccaactgaaagtgttggaacttttttaaaacatttcttaggctgcgctggaagaggtccatccctagtctacaagagaaatcgagacaaagtaagcaaatatcaaaacttaccaatccaagcagtagcaacagatgctaaagaagttccaactgcatacacgaccatgtgcctctcgaacaagtcctaagtgattaaatatattagcgagatatgcgggcagtttggaacaagaagttgttaagattgttccacaagtttttgatagttgtagatttgattttttcggatcctcttagagattcttttgtaatctatttaaagcattgtaaacacttctcttgaatatatcagaaaactgaacatattttcccagtcacaatctctgaattcacatagtaacagagcctttctcttaaaattttcgatttgaaaatagagaagtgattctctacgacgatggcagcgatgaacccatcaacgaacccgacgaccactgacgtccgacgaaccatatccccctacgacaaccctggtgctgtgatttcccacccgttgctgcaagcaacaaactacgatgagtgggcctgtagcatgaaaactgcattgtgctctcgaaagaaatttggatttctcgacggctcaattgcacgacctgcagaaaactctcccgatttggaggattggtggaccattcaagcgttacttgtctcttggataaagatgtctattgatccaagtctccgatctaacgtctcacaccgtgatgttgcgaaggatctgtgggaccatctaaagaaacgattctctgtcactaatggaccgagaattcaatagatcaaagccgagctagcatgctgcaaacaaaggggtctagccattgagacctactttggaaagctaactcgcatttgggacagtatggcgaactatcgtcctttgagagtttgcaagtgtcgtaagtgtgagtgtgatcttggcacacttcaagagaaggacagagaagaagacaaggtacatcaattcctttttgggctggacgatacacatttccgaacagtgaggtcaagcttggttttgagagttccgatccaatctatggaggaagaatataatatggtacgacaagaggaagatatggtaagaaatggaatcaaaggcgttgaatagagcttagaagtaaacgcatttgctgtccaaaccactacaccatttcgaagagatgagagagataagtcagtgttttgcaaactctgcaaccgagcgggtcattctagcgacagctgctatggcgtgataggctatccagagtggtggggagatagaccgagatctcgctctacgtctagctgtggtcgtggacgtggaggctcaaacagagggactggaaagagtcgtggcagcacctcgtacgtcaacgccgtcggagttaatgaaccaacaggttatgcagccgctaactacgtcatcaccgacaatgacagagacggagtgaccggtttctccgattcacagtggaaggtgattaagaatctgctcaatgctaacactagcaaagtctatgaatccgaaaatctgacaggtacgtactcttttccctcttggataatggatacaggggctacacatcacttgacgggttagttagaaatcttaacggatgttaaagatattcaaccagttggaattgtgttagctgatgggagacaacgagtgttagttaaagaacgatcagtgaggcttgggccgaattggacactaaaatcagtttattatgttgatgggtttcaatcgaatttgatttctctttgtcaattgatggatgaaaatcgttgcgtagtgcagttagctgatcatttccttgttgttcaggaccgcactacaaggacggtgattggagttagtagacgtacaggagggactttccgctttaaaagtatggagtcagcagcatctgtggaagtaagagatgataaatcttttgagctttggcataagaggatgggatatcattcagacaaagtagttggtcttctccctgttgtttcaaatgttgtttctgatattttgaataaagcgtgtgatgtttgtctccgcgctaagcaaacaagattatcttttccattaagtgagaataaaacgaaagggattttcgatctattgtgatttatggggaccttatagaactccaactcattcgggtgctcgttacttcttaaccattgtagacgattactctcgtggagtatggctctatttgatgtctgaaaaatctgaagcttctaatcatctcaagaatttcttggccatgactactggtcagttagatactccagtaaccttggagtacttattccaggttaggggatcctctagagtcgacctgca

SEQ ID NO: 170667 - DNA, 596 bp, Arabidopsis thaliana landsberg
tgtgtggccggctttctggacttccggacagcaaaactggccaaatgatggtaagattgatatcttcgagaataatcagcgaggccaagcagaatgccgtcaccctgcacacagggactacggactgcaccctttccaaggctgctcagggagcaagcttggttacttcgcactgctccaactactacgcagaccatgtaactcagtgggagaaccaaggttgctctgttgacagtaccgactccaccaacaactatggcgacggcttcaactccgttggtggtgggatctacgcgctggtaagtacggacggacattggttcccgattcctactgacagttattataggaatggaccggaacgactatcaaggtctggaacttccctcgcctcagtgccgatggtatcgacgctttgagcgcaaacccagacccgaccaaatggcgcaaggccaccatcaccaccgttggaggctcttgcgatgttgcgaaacagttcaagaaccacaacctgatcatcgacacgaccttctgtggtgattatgctggccaggatgtcttctggaaggcgactacttgctacaagtccaacccaa

SEQ ID NO: 170668 - DNA, 351 bp, Arabidopsis thaliana landsberg
atgtcgcggtttggagaaaacaatggcaagggcattaagcccctgccaagaacaattcgagttcgcatgtttgacaactcggaattaatcagaaggttaaagaggacgacacttatcggaaagattatgaatcctgacgttcagagtgttggatcactagttttgatgatgcctagaatctggaaactagagggtcaagtggttgggagggacttgggattgggaacgttcaggttagatttcgagagagaggaagatattcttgaggtgatgaaaacggagactttcaattataatcattggatgcaatctattgtaagagtgggaaccgattatacacaaggactaccc

SEQ ID NO: 170669 - DNA, 1944 bp, Arabidopsis thaliana landsberg
atggtcaatgatggtgagacagaggcagctcgaaagttgaaaggagccatgttgcttcaaggtgtttgctcaaagaagcgcaacatgcttattctctcgtctcccctgaagagaagtgtcctgaagggagagcacgtgaataaaggaaatgtcttgacacaccgtggtacggtcaagggagtaaatagtggaaataaggcaccaaaaccaacatttgataaatgaaagtatcaagctgcacatgtcaaggtctagggaataaagcaactatcggttatcttcgggacttattgaaacttcatcggccggattttttatttctttccgaaactaaaaaatcttctttatttatggaaaaatttgttggtcattttggttataaaaaatttaaaaacggttgaccccattggttgtagtggtggtctagctcttttttataataatgattttaatgtttcaataaattttgcaagcaatcgtttaattgatttagatgcggtttataaaggcaaaaaaattcatctctcgtttgtttacggtgatccggttccgaaaaaaagagatcaagtttgggaacgtttaacaaggttaggtgtgtctcgtaatgcaccatggtttttaattggcgattttaatgagctaaccggaaatcatgagaaaagaggtggaaatttaagacatgcgtcttctttcatcccttttaatacaatgatcaacgattgcggtctattggaatttccatatttaggtgactggttatcatggcgaggatggcgggataagaaaccgatccggtgtcgtttggatcgggctttagctaatgaggattggcatgagattttttgcaattctttcattgaatatttaacaatgatggcctctgatcattcaccggtcattgcaactttaacggataagataccacgcggaaaacaaagttttaggtttgacaaaagatggattggtaaagaaggtttattagaggcaattgcagatgggtggaatttagaaaatggattaagggagagtaattttgtggacaaattgacgagttgtagacggtctatttcccaatggcggaagaaattatccccttatggacgaaaaacaatagaggatttgaagtcagagttagttgtagctcagagtgatgatctcagaacaccggaagaaataacggatttaaacatgcggttaaaagaggcgtatcgggatgaagagttatatttgtattaaaagagtcggagtctgtggatgaaagaaggtgatcaaaattcgaaatactttcacgctctaacaaagcagagacgtgctaggaaccgaataaccggcctccatgatgaaaatggagtttggtctgcagaggaaaaagatattcaaaagatagcggtgtcttattttgagaatttgttcacaacgacagatcctcaagtgatggaggattttttggcagaaattcagatttcaataacggatcagataaatgtatttctaacaaaacccgcgacagaaattgaggttagaacggctctatttatgatgcatccggaaaaagcaccaggcccagacggtatgactgctttgttttttcaaaaagcatggggtaccgttaaagaggatctggtgtttttggtaaactcatttcttgaagatggagtgtttgataaacggttaaatacgacaaatatttgtcttattccaaaaacgggacgaccgactcgaatgaccgaattacggcctattagtctttgtaatgttggttataaagttatttcaaaaatcctttgtcaaagattaaaaacggttttgccaaaccttatttcggaaacacaatctgcttttgtggaagggcgcctaatctcggataatattcttatagctcaggagatgtttcatgggcttagaactaacacatcttgcaaaggaaacattatggccattaaa

SEQ ID NO: 170670 - DNA, 609 bp, Arabidopsis thaliana landsberg; identical to SEQ ID NO: 14060

SEQ ID NO: 170671 - DNA, 1680 bp, Arabidopsis thaliana landsberg
gtagcgttgagctctcatagaaattcgaatttggatctgcttccactcccaacggttacttaccctaatctttttgtgttcttcaaattctctctcaaacttgaaaagaagtctctctttcgatctccaggattcggctctgtttactgtaagtgaatcttatttagaattcgaatctctgggattctgatccaacctttctcaattgattagggaatttgaatttgatttcacagaaatcgaagatgtcgtttacgccagaggtggtatcaaggaaaagtggagtaggagtgattccatcacctgcaccgtttctaactcctcgtctcgagagaagacgacctgattctttctctaaccgtctcgatagagataataaagaagtcaatgttcaagtgattctacgatgcaaaccattaagtgaagaagagcagaaatctaatgttcctagagtcatctcttgtaatgaaatgagaagagaagtcaatgttcttcatactgttgctaataaacaagtagaccgtcttttcaattttgacaaggttggttggtctctttctctacttgatggttttgtattcaagtttggtctctgaatatggtgttgttttgtataggtttttggtcctaagtcacaacaacggtctatatatgatcaagctattgcacctattgttcatgaagtcttggaaggttttagctgtactgtgtttgcgtatggacaaacaggaactggaaagacttacactatggaaggtggaatgaggaaaaaggggaggggatttacctgcggaggctggggtgattcctagagctgttagacatattttcgatactcttgaggcgcaaaatgctgattacagtatgaaagtaacattcttggagctttacaatgaggaagttacggatttgttagctcaagatgattcctcaagatcttccgaggataagcagaggaagcctatttctttgatgaaggatgggaagggttctgtggttttaaggggtcttgaagaagaagttgtgtatagtgctaatgatatatatgctcttcttgaacgaggttcatctaaaaggcgtacagctgatacattgttgaataagagaagtagtcgatctcattcagtgtttactatcactgttcatataaaggaagagtctatgggagatgaagagttaatcaaatgtgggaagcttaaccttgtggatctagcaggatctgagaatatcttacggtcaggagctcgagatggccgtgcacgagaagcaggagagattaacaagagtttgcttacactaggccgtgtgattaatgcccttgtggaacattcttctcatgtaccttacaggtacttgccttgtcctacaactatatatgtctactgtggtaatatttgtgttttttgaaagcatacttgtggttgcagggatagtaagctgacaaggcttttacgggactctctaggaggaaagacaaaaacttgtatcattgctacaatctctccatctgctcattccctagaggaaactttaagtactttggattatgcctatcgtgccaagaacatcaagaacaaacctgaggttttgtttatgctaccatatctcatctttatttatcaatgtaccattaaaatctatccttctaactagacgtgtctctgcaggcaaaccagaggt

SEQ ID NO: 170672 - DNA, 2160 bp, Arabidopsis thaliana landsberg; identical to SEQ ID NO: 30672
  unsure (1)..(2160): unsure at all n locations

SEQ ID NO: 170673 - DNA, 1078 bp, Arabidopsis thaliana landsberg
atgtcgggagatcacgccaagagggagatggagaccggcgacaagcccaccggcgacaagcccactataagtcacgggaaggcttcatcggaagagtcccgcaataaaaagaaagggaaggaaaagaaatcctcttcccacaagtcgcatcggaaaggcgacaagcacaagaggatgaggaaggtggtctactacgagaccgacacttcatcaacatccacctccgactccgatgcaccgtccgtaacttctaagcgccaagagcgcaagaagtttagtaagatccccttacactatccccgtacatctagacatactccattactttccgttccattaggcaaaccgccaacttttgatggtgaagattatgctaggtggagtgatttaatgaaatttcatctaacctcactccacaaaagtatatggaatgttgttgagtttggagcacaggtaccttctgtaggggatgaggattatgatacggacgaagtggcccaaatcgagcacttcaactcccaagccacaaccatactggtagtgtgtgtaagttgagaggagtataataaggtgcaagggttgaagagtgcgaaagagatttggcatgtgctcaaaaccgcgcacgagggagacgagctcactaagatcaccaagcgggaaacgatcgagggggagctcggtcggttccggcttcgcaaaggggaggagccacaacacatgtacaaccggctcaagaccttagtgaatcaagtgcgcaacctcggcagcgtaaagtggcatgaccacgagatggttaaggttattctaagatgtcttattttccttaaccctactcaagttcaattgatccgtggtaatcctagatatactccaatgacccccgaggaagtgataggaaaatttgtgagctttgaattgatgatcaaaggctccaagaaaatcatcgagtaaggcgccccctccacacccgaggtgtaaccggtcgcattcaaggcgacgcagcagaaaaaggaagaatgtacatcaagtagacttcccatagacccctccaagctcgacaacaaggaaatggcgctaa

SEQ ID NO: 170674 - DNA, 1589 bp, Arabidopsis thaliana landsberg; identical to SEQ ID NO: 35981
  unsure (1)..(1589): unsure at all n locations

SEQ ID NO: 170675 - DNA, 643 bp, Arabidopsis thaliana landsberg; identical to SEQ ID NO: 10858
  unsure (1)..(643): unsure at all n locations

SEQ ID NO: 170676 - DNA, 1404 bp, Arabidopsis thaliana landsberg
aacaaaccgatttcgatatcagtggacgtaagaagtaagaacgacgtctagttaaattatttgtgaaacaagtccactccaaagtctccaataacataattaattagtcctcgtgtgtccgtgttagtgtggaacaaatatgtggtcggtactcgatacataaacgcaagacttgcacaattgccgagtcaagctagtatgattggcccgtaccattgttataaatcattaagcgcagtatttgtagtttttataattatatgatatatatgaaaaaacaaatttatttttccggcgccagaactatcttagtgagcctcttgaaaatgtaaactattctccaacctctaagcttttaagtttaaacatggccaataaccttttgagtcatcgaatcctagaacctattccaaagttagccaacctcatacatctcaatttatcttttcagaccacaacctacacaactcaacttcgatttcttgcagttcaagtctctagactatttagatctttccggaaatagtgtgtcaatggttggtaccggttcagaaaaatttgacacatctacttttgtcgagctgcaacatcaccgagttccccatgtatatcaaggacttacaagtattatggtggttagacatttccaagaatagaattaaaggaagagtgcccgagttgtaatgtaatctgtcttctatggtccatgtaaatctctctcacaactccatcgtttccttggaaggtacgccaaaaataatctttaattcgttaatttcagagttagatatgagttcaaacgcctttcaaggatattttcctattattctacctaacacccacataatagctgcatcaaataataacttcactagcatccctcttacattctacaaagcagtttgactgactctccttgatctatcaaacaacaacttcaatggttcaattccaagatgcttgtaatatgctacaacgttgaaaacattgtaacaacaacctcaccaggatactttccgacatggaaaatggcttagtactacttgatgttggcaacaaccaaataagtgggaagcttccaagatctctagtaaactgcacaagcctaaagtttcttaatgtagaaggaaatcacatgaacaacactttccctttctagctgaaggctttgcagcgtcttaaaatcattgctttgagatcaaacagattccatggtcccatcaacaccacaaacacaagagcaagaacaagtgttgcactagaaagcacctgcactatgctatggacccttgctcgatgctctataacttgcttcactcacctttgagatatttcttttggtgttgaatcaaatgttaaaataatccttagctttttgggctttaataaactaaacaacaacac

SEQ ID NO: 170677 - DNA, 841 bp, Arabidopsis thaliana landsberg
  unsure (1)..(841): unsure at all n locations
atgcaaaacgaatatgtcagatttggccctatagctaatgatacgcgtagtgtaagctaagagattttcgcatatcccgcatttaatgagacgacaaaaactgcaagaaaatacgccgccgagacttaaagagagagagaatcgtaatgatgatgagagatataattcagtttgcttgtttatgtatttattacgcctctatctatgttgcttcaccaaaaaaactgtaaacacctaacttcaaatatctgcatttactaaggcgacgataacaagattagagtaattgaaggctcaggtacgaatttaattctcaagttactttgttcatcatgtgtatatgagtaaaaagtgagcgctaagtaagggttttaaaactttgtctcatacgacctctaactttgcaattatgggtgattatcgacaggtgcaatggcgatggttgttcggctggttcgaggagagtggaaaaacatgaatccnnnnnnnnnnnnnnnnnagccgagttagatgggttatgcttggcggtaaagctccgtgagagagacacgttcgctaaagtggttgaagctgtgaaggaaagactgacgctaagaccggaagatgaagtggaactatcctatcagtggccgcagtggatgatggggccagattggcagcgggcaaacccaatccatattctcgatgacgaggatatgacgttgtttattgcaattcattctgatctaaaggaggttcagctgaaggcccaaaccatacggaagattgtggggaccccaacagttaattcataccaaagcgtcttagatataggatgtatgactttagaaacgatatctga

SEQ ID NO: 170678 - DNA, 580 bp, Arabidopsis thaliana landsberg
cattgctaagcatgggaaaagagcaactagagatcaagagtatatgcaacgagctcgggattcgtttaatctcttatagtcctcttgggctaggaatgctaactgggaaatactcctcttcaaaacttcccactggtccacggtaaagtactaatagattgctcaaagatcgacaaaactagccgttgtttcttgttcttaactatgcttgaacactgattaacagatcattgctgttccgacaaattcttcctggattagaacctcttcttttagcactgagcgagattgcaaagaaacgaggaaagactatgcctcaggtattatttcaatttcataagattcttgggaagaagaagtgttgaaacttgtaagaacgagttatcatttgttacaggttgcaataaactggtgcatatgcaaagggacagtaccgataccgggaatcaagtcggtaagacatgttgaagataatttgggtgctctgggatggaaacttacaaatgatgaacagcttcagttagaatatgcagctaaagaatcaccaaagtcaatgattcagaatatttttcagacaaga

SEQ ID NO: 170679 - DNA, 508 bp, Arabidopsis thaliana landsberg
atggccatgtggatgcttgttcttcgcaccgcttgtgttgataagaagaaggaatgttggtttgttgtcaacggtgttccaatccgctattctcttcaagaacttgcactcatctctggtttatactgccattcttatccaaaaaactataaagcatttggcagcttagggttctctggtaagcattttggtgttggtgcaacagtaacatatgcgaaagtgaagacaaaactactctcaatgaagaaatcttcgagagagcgtttgaaaatggcggtcctattcttcttatgcagcgtcatcattgggaagagaaaaacaggggaaaaagcagaggctgtggaagatttctttcttaaatccgtggaagatctagaatggtgtaaaacattcccatggggtcgattagcatttgataagaatatgaaagacatatttcatctcatggaccactttgatgaagaattgggcgcagcatgggtgtttcctagcttagtgatgccttgga

SEQ ID NO: 170680 - DNA, 616 bp, Arabidopsis thaliana landsberg
atgtcggcagctatggacaactttgatggagatgtctttggatgacaaagacgaacctttcgagatgccggatttgccagatcttatgtcgtgtgagaggaataagctcagtttaataggaagggttctcaaccccagttgccaaccgatgaaacatctaattcgtaatatgccaaagaagtggcagaaggaagggaaagttaaaggagtagctctctctgatgaaagattttagtttattttcgactccaaacatgatctagaagatgttcttgcgaaaggagtgcattcttttaatgaatggtccattattgtggatagatggtatgagcatcccccggatgattacttgcggtttatgccgttgtgggttcaaatttggaacattcccgtgaattactatactgagaaagctatcatgaagcttggagatctgataggcgaggtcaaagaggtggtgttcaaccccgattttgcatcatgctcaaggagttcgctaggggttaaggggcctcttcgattgtcttttagacctttaaagggagaatcccaaaggttctttcaaattttccaaaaaattggggagaaatacaagcaaaacgtggtggaaaaattt

SEQ ID NO: 170681 - DNA, 243 bp, Arabidopsis thaliana landsberg
tgtcatttaagccgtagagctcctcttgtggtcggcagtgttgttggaaatgatcatgatcctttccccaggttggtctctcttaaggtcacttatggccatagacaggttactaatggcttggcttcaacgccttctcaagttcctatcaatccaatagtggaagttggaggagtcgacttcacaaatttctacaccttggtgatcttctctccttcattcctcttatcttcattgatttag

SEQ ID NO: 170682 - DNA, 1639 bp, Arabidopsis thaliana landsberg
ccatgcttgcaccaagaatagattttcagtgaacataataacttcccataaagatgatgctggaacgatttttagaggggatagagatataggacgtcatgcacaaaacttctttacaaatatctatgaaagcaatggccgtcttgtttctactatcgattttgcaggtttcaaatcaactgtgaccaaggcaatgaatgatgatctcacaaaggaattcagtgattgtgagattttcaatgcaataagtcaaattggagatgacaaagcacctggacctgatggccttacagctaggttttataaatcttattgggatatagtaggacaagatgtaattaaagaggtaaaaaattattttaggacatcatacatgaaacaatcaatgaaccacacaaatctctgtatgattccaaagataacaaaccttgtaacactctctgattaccgtcctatagctttatgcaatttcctatacaaaataatctcaaaatgcctagtagaacgactaaaacggcatctcgatgcgattgtgtctgatcctcaagccgccttcataccgggaagattggtcaatgataatgtgatgatagcgcatgaaatgatgcattcattaaaagtaagaaaaagggtttctcaatcctatatggcggtgaaaacagatgtgagcaaagattacgatcgagttgagtggaacttccttgagacaacgatgaggctatttggttttagcgagcaatggataaattggataatgggcactgtgagatcagttaattactcagttttaataaatggcataccacacggcactattaaaccacaacgaggaataagacaaggagatcctttatctccctatcttttcatattatgtgctgacatcttaatccatcttattaattctagggtatcacatggagataatgacgggctacgtatagggaatggagttcctggagttactcatttacagtttacggatgattccttattcttttgccaagctaatgctcgtaattgtcaagctttaaaggatgtctttgacatatacgaatactactcatgtcaaaaaataaatatggtcaagtctatgataacttttggatcaaaggtgcatggggtcattcaaaatcggctaaaaagcatactacaaattcaaagccatgaaggtggagggaaatatcttgctttaccggaacaatttggtcagaaaaaaaagaaatgttcaattacattattgaaagagtgaagaaaagaacatcgagctggagtgcgaaacatttatcaccagcaggaaaggaaattatgctaaaattggtagctatggcaatgccggtctatgccatgtcctgtttcaaactaccgattggtatcatctcagaaatcgaaactcgactcatgaacttctggtgggaaaagaatgcaaaaaagaggaattccatagatagcttggaagaggttacaatattctaaatcggaaggtggtttaggttttagagatttggctaaatgcaatgatgctttacttgcaaaacaagtatggagaatcattcaaaatccaaattctttgttggctcgagtgatgaaggaaaaataaattagagatgacaacatcctacatgcgaaagctcgccag

SEQ ID NO: 170683 - DNA, 1745 bp, Arabidopsis thaliana landsberg
aaaaaacttcgtacagtttggtgttgttgggcatgcctgggaattggtaaaagcactctagttaagaaagttatacgagaaatctaagaacgggttcttgagtcatgtgttaatacaagatatccatgaaatttcaaaggaatacggcttgagttacttggttacaatactcttgaaagatctactaaatgtcaagaatcccaagtttgagaccgtccaggctgctcatgaaggttacaaggatcaactactggaaaccaaatcacttgttatacttgacaatgtcagtaacaaggaacaaattgtcgctattctcggccaacgtgattggattaaaccaggaagcaagattgtcattgcaacaagcgataagtcgttggtacatgatacggccgattacatttatgaagtccctcatttgagttatcaagacagcttgcaacactttacccattatgcctttggtgatcaaagcaatgcttcgagtttcttgcagctgtcgaaagatttcgtgcactacaccaaaggaaatccattagctctcaaggtattgggtgctgagcttctagggaaagacgagtctcactggtgttcaaagctggatgctttgagtcagcaccataaagatcatgcacgaagctctaagaagatgcgagcacaaagctccagcgagatccttcaaagtgtttggaaagggagctatgatggacttaatcagcaacaacaagatacgcttcttgatttaacatgcttcaggtcgatggacaaaaattatgtagcaagtttactggaatgtgcaaattccactaacgctgagactgaaatagaagaactcgtgaacaagttcctgattactatatcttccggcaaaatagagatgcatgatacactgcatatgttttctaaggaacttggtcgagaagcaactgctcctgatgggaaagggcgacgaagattatgggaccatcataccataattgatgttttagagaacaataaggtaaaatattaacttcttgttctcgataaggtaattctttcgtcacttttactgttgtgattagctcatgtccttttcgttactgattaacagggagcttctagcgtaagatctatctttcttgatttggctgatgtaaacatgaaaaggagtttccacaatcaagcgtttgtttttatgagcaatatgcggtacctaaaaatcagcaccactttctgccctcaagaatgtgaggccgccattacgctgagcttcccaaaaaaactaaaactcccattggatgaggtgcgatgtcttcactggctgaaattccccctgaaagaacttccaccagatttcaacccaaaaaatcttgttgaccttaagcttcaatacagcgagattgaacgagtttgggagggtaataaggtgtgtaatcagttgattctttttcacttctcttagatgatatggtcgtgttaatgggttgctgactctctttttcattcatgacaggatgcatcgaaacttaaatggatagacttcaaccactcaagaaagttgtgtaccttgttaggattagctgaggctcgaaatcttcaagaattgaaccttgaaggctgcatagcattggccatattaccccatgatatggaaaatatgaagtgtcttgttttcttgaccctcagaggctgcacaagtcttaaaaacctaaaaagatataaacttgatatctctggaaacactcatcctcagcgactgttaa

SEQ ID NO: 170684 - DNA, 476 bp, Arabidopsis thaliana landsberg
atggccgatgaactaatgaacggtttctcaatgaagaatcagctattacagcgcgccttatatttagaattgttaacactgaaagaaggtgtattcctttttaaagacgctaccacagcggatttgatgtttgttgccaatgagattcgaaaaatacaagagccggatggtaaggttacttggcagattgaccgaaatgtaaatacaacaaacgtatgtactgcgatctgcaagttctgcaatttcttccgcattccgggccacaaagaggcatacagttgcagatattgaaacatatagacagaaaattgacgtaacgtttaaatacgggggagaccagctattaatgcaaggcggtcatcatccggatgtgggtttgtcattttatgtaaacatgttcacaaaattgacagccctgttccgtgatttaagacttcacaaaatcgggcctcttgtagtagcacacattcaaagct

SEQ ID NO: 170685 - DNA, 1069 bp, Arabidopsis thaliana landsberg
  unsure (1)..(1069): unsure at all n locations
gagacttgagtcgtctgaccacgatccgaggaccgattcaacccggctcggggaaacctttggcccgagccaaagacatattcttccgaggagaagactggtgaattctgtaaatggtcgatatatcatttccgggaatctccgaggatattatcaaatctgaaagtttttccgaagaataaggaaaacttccatcctctatcgccgactttgagataaatggaaattttccgagaatatcgcgagaggcggtttatctaagtcttatataaagcacttcagggaactaacaaaggacacacaaaagaaggctctcaacttcaggctatcagaactctctgactttgaaagctaaaacacttatctttgagagtctcgcaaagaccggttctttgaagaaaccctaaatacaattttgattatgtgagttttgactctcacaatttggtgctagaaggaggggaaagaaatttctcttactccaacaaccatattcccgctaccaccgttgacgcgaagggaaaaccgatccctccaatccagacgaacgctcctgagaccaccactcccacagtcctagcagaactgagaaacatgatggcacactccaaaaaaaggtggacgatcaagaacaggcgaacaagtctttggcccagcagctcgaggcggctacctcccaagggcaggtaaggacttcccgctttgacgcacgtcattttcatgatcgacgagcagcggcagacctcaatccaacgaggcttgtgttcaacacgcctggtaacacaacgaggcatttccgccgggccgcgccagcaatcggaggaatctgagcaaaaccggtagttttgggagaccagaacgcgacaaaccaagtggaggaaaccgacccgcattttcctattccccgagctgaagctaccgaggccgaccagatcgaagtctctgacggtgaggattaaaacaaaacgttcgatgggccgaggaatacgctagggagcaagaaataaacgcgatcaagctctccttgccaatgcaganaccgagatgacctcgtgagattcagatgcat

SEQ ID NO: 170686 - DNA, 2540 bp, Arabidopsis thaliana landsberg
atgacgttaagaaaaaaaagtcaatgccaacaccattttgttttggtcgacggattagataatgcatattgtgcagacgtattacttctttgttgttacggtaccaatgactcgatagtggtcaaccagaatggtgaaaaagcccgaccgaacataaacgagactgattttgtcgtacatgggcttccggtcagcccttcaagtcactcggtttctctagttgagatccactgtttatagatatgagctgcctttgtggaacagcacagcagaggccgctcagccctaggatttatcagtggaggatcgtcatgcatgcctatgcaatatgcgaccaaggacctcacttaatggtggataaattggcgacgacatgggaaagctccacacacagttttttggatcatcgagtggattaacaaacaaatccgaaaccgttttccacaatccgacttgtaggcgataaacgctatgataacggattacaagtttggtttgaaacacggctctaagtgtaaaagtttctaattttctgctgaaattttttactattcgatgcactagatgtacaaacgctatgtttttctttgaatataatttaacattattttcaaaaaaaaaaaaaatctatagcgagatgttatcaaagctatgggcttccatacttggccatccctattttaccgtgatgttcttgaccagatctttggctcgcccacagctcttgtttgcctgcaaaaacatttatgaagtatttttcttctcctcacctcagcctcataatccggatgagaagtcgtctcatgtagccgccactagtcacatgaaaattccgtatgactttgtatttgaaagattcagtcttatcagaggtctggtctttcttagaaatcataagatatcttaaatggaaagaagcagaagttgtcggtgatatgtaatcagaggtctggtctttcttagaaatcataggatcttatatcgaccattgtccatggaattgattatttatcaaggcacgatgagttgtctcaggagcatacatttttcattagtaactggagaaccttcatggacactgatcgaatgttgcataccccactatcctagatatagtgatataaaggtgttatcttaatattggaattatacgaataatatgattgtcaactaagtaaaaaaaaagaaaaaaaatgattgtcaactaagttgactcaacttgtaaggcaaatgaaaaatctagtatcacatagatatttattggttatatgataattcattcttctattttccgtgaaactacaaaacaaggaataaaaacgtgactaaacaaaaatacaaaaaaaaaaaaaaaaaattgggcaagaaaattatggccacgttttgttgatagcatacgaacgcgccagaaaattagcaaatttaattaatttcactgaaaaaattatttttgtgtgtgtatgatcataatgattccagtaaatgatttttgtagttccgtcaagtgcaaggtaccatgacaagcgtattaggaatgatgaaccctaatctgatcaacggaagaaatctccacaaaggatcttcaatttttgtacaagatgaagaaactaaaaaacgagtccaatggagattatcaatcaaggagggatctctaagaacgcatcaagccactgcttcttctgcaacagaaccaaaggttagtagtaacaacaatctttgagcttttttttctgttaactctctggttttgtgtttttgaatcattaatcttgaaaacacaggcgacagagttcaatacgacgacgtatgaagacaaaatgttgaccaactatgttcctgtctacgtcatgcttcagcttggagtcatcacgaacgataacgttcttgaaaacgaagagagtctcaagaaacagctcaagaaactgaaacaaagtcaagtagatggagtgatggttgacgtatggtggggaatcgttgaatcaaaaggtccaaagcaatatcaatggagtgcttatagaaacttgtttgcgatcgtacaaagctttggactaaagttacaagctataatgtcgtttcatagatgtggaggcaacataggagacgatgtcaacatcccgataccgaaatgggtactcgaaatcggggattcgaatccggatatcttctatacgaacaagagtggtaatagaaacaaagagtgtttgtctctctctgtagataacttgtctctcttcagaggacgaacagctgttgaggtatgaaaaactcttgatcttagaacgtaactcggaaaaaattgcgtttatatattgatataatcgttgctctgtttctagatgtatagagactacatgaagagctttagagagaacatggaagatttcataagctctggagttataatagacattgaagtagggcttggtcctgctggagagcttagatatccttcttacagtgagactcaaggatgggtttttccaggaattggggaatttcaagtaagaaaaaggaaataagactcttaatttcttaggctt

SEQ ID NO: 170687 - DNA, 2122 bp, Arabidopsis thaliana landsberg; identical to SEQ ID NO: 37229

SEQ ID NO: 170688 - DNA, 875 bp, Arabidopsis thaliana landsberg
atggagtccgatagaaaagaaccccgtctggactttacaggaagcaacagctataagaactcctctggctctcctcattcgattgagtcacacacagatctacataaagggatagctattctcaagaaaagtgttgcgagcttgactgggtattgttacaattcactttgccttgaagtacctcccgaggcgtcaacttttgaagcatttgccaagttactggctacactttcgtcatcaaaggaggggcggtctgttttctccttgaaaatggcttcttcaaggtaaagcaaactttatgttcaactcacatttatctccatatcttcggggaatccttttcacacgatgttgcttttttccgactttcgtatttggtatcttatatacctgtttagattcctggtaagtttatgtgtacttctgtgttctgatgatgcagatcaggcaagcaggctcaacaactcaacaaatccatatggaacgctcactcagtcatctcgagctccttactcgaaagtgctcatcttccggtacatgctaattcctccttttctcattaaattttccaaaggaaaacccaaacatgattaagaaccatattagtcgcttaagaacccatcaaactgtttgaaaattcatatagcttccacacattatatctctcgtccaaatcctttgaaaatggctacattttgtagatgttgatggttcatttggtggttactttatgaattgagcaattaaatgttgtgtttgtacacgatttctgaagcagttcatatgttttgtttctacatgattactttataacgatacctctaatatctttttgagcaaaggaacacaagtttcaaccaggacccggacttacc

SEQ ID NO: 170689 - DNA, 1831 bp, Arabidopsis thaliana landsberg
atggcgggaaactataattatccgagtagcggtggttttaatcgagattggatgtacaagaggttcgatgaaatgacggggaatttgtcagcagaatacgtcgcaggagtggaggagttcttgacatttgctaatagccagcctatagtacaaagttgtcgaggtaaattccattgtccttgtgctgtgtgcaagaataaaaaacatatcgtctcgggtagaaaagttagtagtcatttgtttagtcatcatttatgcctcattattatgtttggtatgggctttgggtaggtttccccatgaatgtaggaatgagtgtttatgttgatagtacgtatcttagagaattatgtaagtgtgggtaatgttgtagaagatccatatgtggatgtgggtcatgttgtagaagacccatatgtggatgtgggtcatgttgtagaagatccatatgtggatatggcgaacgatgcatttcgttataacgtggggtttgatgataactatcatcaagacggtactaatcagaatgtggaggaaccggtacgtaaccattctaaaaaaatttacgacttgatagaaggtgctcaaaatccattgtacgatggttgtcgtgaaggccagtctcaattatcgttagcagctcgagtcatgcagaacaaggcggatcataatatgagtcaaagatgtgtggattcggtatgttaaatgttgacaaattttttaccagaaggaaaccaagctactgatttccattacaagacagaaaaatttatgcgcaatttaggccttccttattatacaatcgatgtttgtattaacaattgtatgcttttctggaaagaagacgaaaaggaagataaatgtcggttttgtagtgctcaaagatggaagcctatggatgaccgtcgatgaaacacagacgagtacagtagctgcaacaagcaccaacagtgagaggtgactcaagatctgtgcctaagaagagtattttgaggctttaccaatctgtataaaattggccgcacaggggttcagggatcaccacacagaggcagagagtattaaccctaatatcaaaatcttaagaggccactcatcgtactcactaagtttatattgtttatgaatataaattgctagagttcacagaataaaggaaagcaaaacccagtagtatatctccaaataaaagcagattaagaggataataccacaagcatgaatgacaaggaagagagtttatatgaaaaatatcctgagaacatcataaaaagaaacacttacgtctttaggccattcataaacaagagagaaaaagttgaaatcatgggttgtgtcagttccatctactatatcaccaatagcagcagtatagaggataaactgagatagataagtagaggttttgttgcttaatgggccaaatgacttctttcccttgtcttctgtttcatgtgaaacaggatttccatccacggctctatttgctgaaccaggactttgctttgtatattttagcccaagaccaagaactccatccttctcaacggccatgtctgatccgtcccctttgagtacgtcaacttctggtttttcatcagcgagtgctctcgctaagttatgaagcttacctattgtttgtttgaaaaacagttagaactacatgaaaggtctaaaatacataattagcaagagcagataagttaattgtatactacagcaagaacaaatacagacgtagagaaagacaaaataaataccactcaggaactgacgcttgcaactataagcatcctcaatcatttgatgtagcattgcaagagcacgatct

SEQ ID NO: 170690 - DNA, 535 bp, Arabidopsis thaliana landsberg; identical to SEQ ID NO: 77053

SEQ ID NO: 170691 - DNA, 436 bp, Arabidopsis thaliana landsberg; identical to SEQ ID NO: 9784
  unsure (1)..(436): unsure at all n locations

SEQ ID NO: 170692 - DNA, 472 bp, Arabidopsis thaliana landsberg
aaactctacaagtggcgactatccggacccttaatgacttgtgtcgaaatagaagctgctcgcaaagtcatgaaagaagttcacggaggctcgtgtggaaatcattccgggggaagagccttagccatcaagataaaatgccacggtttcttctagccgacgatgatcaaagattgcaaaaaattctctaaacgatgcgaaaaatgtcaaaggcacgcgccaacgatccatcaaccggccgagctcttgtcatcaatcgcctcgccatatccattcatgtgttggtcgatggacataatcagacctatgcatgcctcgaagcagaaaaagttagttctcgtcttaaccaattatttctctaagtcgatagaggccgaatcttatgccagcatcaaggacactcaagtcgagagcttcgtgtggaaacatatcttatgtggccacgggataccttacgagattgttatagata

SEQ ID NO: 170693 - DNA, 544 bp, Arabidopsis thaliana landsberg
tgcgttcctcgagcgcggtgagatcgtctcgacgcgcggccgcaacgcgagggaaacccagcgccgcgtcgcgcgggcgggcgacctcaccaagggcaagaagctgatcgtgctgatcaacggcggctcggcctcggcgtcggaaatcgtcgccggcgcgttgcaggaccacaagcgcgcgacgctgatcggcacccgctcgttcggcaagggctcggtgcagaccatcattccgctcggctccggcaacggcgcgctgcggctgaccacggcgcgttacttcaccccgtcgggcaagtcgatccaggccaagggcatcaccccggacatcgaggtgttgcaggacgtgccggacgacctgaagtcgcgaaccgacaccaagggcgaagcctcgctgcgcggccacctcaagggtgacgccggcaaggagcagaccggctcgcaatcctacgtcccgccggacgccaagaacgacaaggcgctgaagatggccgacgacctgctgcatggcgtcaaggtcgaggcccaggcgcccggcgacaag

SEQ ID NO: 170694 - DNA, 587 bp, Arabidopsis thaliana landsberg
atggataaagcttgggtctggttaccaaggtaagacgttgctctcgttctctttactcttctttaatctcgttatcggtctgaaaaactttaagttttctaaaagaattttgattttgattgcttacaggaattgccttgagtatgaggaaggagcgactaagtttgtatttgattcagcaagctgtttgggtaatgtatcagatatgttttgcccttgtgttgattgccgcaatatggttcatcagtcaaatgagacagtgttagagcatctagtgattagagggatggatattaagtataagagaagtaagtgttggagtaaacatggggatagaagtaacaatacagcagaacagacgtctgagtatgaggcttatgatttgtttaggatagcttttatggcaagtgaggagaagctacgatcgcagcaacataatgttgaagagtcagaaataatggacagtaaagaagaagttgagttcagaaagaagttagaggatgcagaaactccattgtattcgacttgtctgaactacacaaaggttagcgcaatcatgggactttataggataaaggtcaagagtg

SEQ ID NO: 170695 - DNA, 697 bp, Arabidopsis thaliana landsberg
  unsure (1)..(697): unsure at all n locations
attttttttttttttgaaccgggaaacattgcgagaaagaatgttagacgatgatttaatttgataatttcatggggaatcgaagcattaaatttcttcacgaggtaaccagtgtttatcaaagtagtattgttgtattaaaaccnnnnnnnnnnnnnnnnnnnnnnnnnnnnaatggatgatttgtttttattttattgttgttttcttgggctgggcacatatgtgaacattaaaaatttaaaagcaatcactggaaaatcttagacaatcatttaatatgatcgaattaattgagaatccaaacaatcaatgttcaatctctatctctctagcagaacttcgaggagtttattatgggttgtatcttacttgggaaaagaagattatgcgtttagaagtggaggtggattcggaggtagtagttgggtttttaacgacagggattgaggaaattgaggaaactaatccgctgtccatccttgtacgcttgtgtcatggctttcttagaaaggactcgatagtccgagtgtctcatgtgtatcggaaggctaaccggcttacagatgggttgactaaccatgcattctctttgcttttgggctttcacgcgtttgcttcagtacctgtagaagtagtttcgattttgcgggaagacgtcgatggagttttacgctcacgactagtccctttgtaa

SEQ ID NO: 170696 - DNA, 363 bp, Arabidopsis thaliana landsberg
gcgggtgtgcatgcccgccagcagttggtgcacttcgacacagacgtagttcgcccgatgtccgcttgggtgaaaggcgtcaaccacgcgctaccgaacaccatcacagtgaccggcgccaagcgtgttggttctgaatttcacgcccgtttttctgcctttgcaagaacttatcggtatagtttttactcgtcaccggtgcaagacccgtttcggcccttcatgacctgggtgcactatccccttgatttggatgctatgaggcgagccagccagtgtttgcttggaacccacgatttcagcgcatttcgggcctctcagtaccaagccaagtcacccgtgaaaacgctggagcgccttgat

SEQ ID NO: 170697 - DNA, 195 bp, Arabidopsis thaliana landsberg
  unsure (1)..(195): unsure at all n locations
tcgattctctttgatgttatgatggctgcgaatatcctcaatatncaaagccttcttgatctcacatttcaaactgtcgctgatttgctctcaggcaaaactccaggcgagattcgctcatacttcaatataaagaacgatttcacagcagagggagaagctgagatccgcaaggtgaatcaatgggcttttgaa

SEQ ID NO: 170698 - DNA, 464 bp, Arabidopsis thaliana landsberg
tggtgtttgaattgactgtgactttgttaagcttttccatgacaatggtgtatccatcaaagatgtcgaagatcttttacgtttagcccacaaaaaccttgattcagaaaaatggggccgtgcctcgctaactgagacacttgattgcaaagaggtacccattatccaccttatcttgttgatttcaaagcttgtttttttctttccatttagaactttgggaatgtggttatatttcgctttaaaaactgttactttacagctcctgaagccaaacagaattaggcttgaattgggaggtcaaaggagcataaacaacaacggatgcttatgcttcatggcatctttaccaggtaacatcaaagaaaaccatttctcacattcaacgaccttgaagcaaaagtctcacatcgttctaattataatacatttaactagttcaaaaaactggagcttatctttgg

SEQ ID NO: 170699 - DNA, 243 bp, Arabidopsis thaliana landsberg
caaatctatctgattatgtccaaaaacctaccaatattaacctaggttaggcgacaagattcatcgatcacttgggagggtcggtcaaatgactttccctattccatttacaaaaccgtatacgagcgctagagatatagctccaagcctacaagtgtaacgagagatgggcgtttcagatcctatttagctcgtgggggtcctggggtggtccacacaccaattgaagatgaaaagaggaga

SEQ ID NO: 170700 - DNA, 1864 bp, Arabidopsis thaliana landsberg
  unsure (1)..(1864): unsure at all n locations
taaagtattttttggttgtctttcaagtgccaaatagtttggggtggaaagctgagattataactactatagggctgaaatttcaggcaacctgtcttcatttgaagtatgcttggagaacctttgcaaggttctggctagatgtgaagagaagaatttggttcttaattgggagaagtgtcatttcatggtaggtatagttcttggtcacaaagtttcagctgctggtattgaggttgataaagccaagatagaggttatgacaagtttacatgcacaaaatagcgtgaaatctgtgaagagatttcttggacatgttggattttacaggaggtttgtcaaggatttcagtaagattgtcgagccactaacagctttgcttcgtaaggatgtgaagtttgacttcaactctgagtttcatgctgcttttaataagattaaggaagccttggtgagtgctccaatagttcaagctccggactagaatttaccttttgtgatgattcaagcgattctgcagttggagctgttttgggacagaggaaaggcaataaacttcacgttatccactatgcaagtagaacacttgatgatgcactgcggaattatgcgaaaacagagaaagaattttagttgtggtttttgccttagagaagtttcgctcttatctggttggttcaaaggtaattgtgcatacagatcattcagcactcaagtaccttatgaagaaaagggatgctaagcctnnnnnnnnnnnnnnnnnnnnnnnnnnnnnnnnnnnnnnnnagtacgagataagaaagggattaagaatggagttgctgatcatttgtcaaggatcaaggttgaagatgacattcctatcaattattttctacctgaagaaagtatgtacttggttgagacaagtttgcaggaaaatcctagcagtgtcaattcacgcgttgatgagagctgtagagaatcagtgtcgctcgacaccacaccccctgtcgatcgataccatcacgtttcatagacagatgcttttgcacttccttcacagcccacaactatttcagttccctatgataggtactcctccatctcttctcctacttatccttcgattatttctttatattcttcgaagtgtgcttcaccggtaaacgagcatcgagtttcgcgaaagctagttttttctgttgatcttgcaggaaacggagagagtatcgaatcgacacaaacaactgtgtcgattaacaccaactgctgcacaaggccgatctgtttacataccgccttggaaggcgcgaatgcaacacaagtcctccacccctccatccaagtcctgaactcctccaagtgaacctattgactctaattaagcgcttagtgagagggaacccattggtatgatttttttttctttttatttcttttatttttggtttatgttttcttctctcttcggatttgaatgccattggggacaatgatatttaagtctgggagaggcgcttattaactatgcttttatttttgattcttattattttttgtgtttagagttatgagtcattttattttgttttctaaaaaaacatttttgtttagtctaattagaaatcatgatctatatttctttagattattttctggttgatgaatgcagaagggtcaactcaatccgactattggaaaatccagatagcaaaccgacaaagttgaggatatcctggtttccaacacaatccattacgggtggatctaatcacactgctcttccatttacctcatcataacggttagtattcatagaacttgacgttttgttcatacctgttattgagacctatgtaaaaaggaaagtattcctggcccc

SEQ ID NO: 170701 - DNA, 596 bp, Arabidopsis thaliana landsberg
gactcctgggatgtggtggtttcctacaaatcctgagcatcgttgcatctaccgagtccctgaccgtctacgtcgtgtaaatccagaagcttacacgcctcaattactcctcattggacctcttcaccattctttaaaatttcaagctctcaactctcgtggagatatcacaaacacaaagttaatgggctacttaaacatggaggagcataagaagatttaccttgcgagattctcagaaaggcttgcaggtcaaaaaacgattgatgaactcagaagaataatcaaagaagaagaagatataataagggcaagctactctgagtcaactgcctggattgaatctccaaagttcgtggacatgatcctacacgactctgttttcataatagagttccttttaaggagtaaagattacaccttacttgaggaccaaggatcatgcatcaagaaaacatgggatcctatatttgaggagccttgtcttcaaactactgtggatgaagacctcattttgctcgagaatcaacttccttacttcatcctcgagaaactcttcgatccaatcgttacaatacaccgcccaaaccaaacac

SEQ ID NO: 170702 - DNA, 1782 bp, Arabidopsis thaliana landsberg
  unsure (1)..(1782): unsure at all n locations
gcccctcgcccgaaccacccggtccgcgagctttcagccgagccatacgacgggcgccgttcccgacccagttccgaaccccgactaccatcaccaagtactcgggggagtcaaagccggagctgtggctcgcggactaccggctggcctaccagctgggtgggacggacgatgacaacctcatcatccgcaaccttcccctgttcctctccgacgctgcccgagcctggctggagcatctgcctcctgcgcagatctccaactgggacgacctggtcaaagccttcgccagcaacttcttgggcacatacgtgcgccctgggaactactgggatctccgaagctgccgccagcagccgagagaatccctccgggactacatccggtgattttcgaagcagcgcaccgagctgcgcaacatcatcgattcggatgtcatcggcgcgttcctcgccggcaccacctgccgcgacctggtgagcaagctgggtcgcaagaccacaccagggcgagcgagctgatggacatcgccaccaagttcgcctctggcaaggagcnggttgaggctatcttccagaaggacaagcagccccagggccggcaccaggagatgcccccgaggcgtcaactcagcgcggcccaagaagaagggcaagaagaagtcgcaagcgaaacgcgacgccgccgacgcggaccttgtcgccgccgccgagtacaagaaccctcggaaaccccccggaggtgccaacctcgttcgacaagatgctcaaggggccgtgctangtcaccaggggcccgtcaagcacacccttgaggagtgtgtcatgcttcggcgccactttcacaaagccgggcacccgcggaggtgcagggcccacaacaacgacaagaaggaggatcacaaggcagatgagttccccgaggtccacgactgcttcatgatctatggtgggcaaatggcgaacgcctcagctcggcaccgcaagcaagagcgtcgggaggtctgctcgataaaggtgcagcgccagtctacctagactggtccgacaagcccatcaccttcgaccagggcgaccaccccgaccgcgtgccgagcccgggaaatatccgctcgttgtcgaccccgtcatcggcaatgtcaggctcaccaaggtcctcatggacggaggcagcagcctcaacatcatctacgccgagaccctcgggctcctgcagatcgatctgtcctcgatctgggccggcgcggcgccttttcacgggatcatccctgggaagcgcgttcaacccctcggacaacttgacctacccgtctgcttcggacaccctccaactgtcgaaaggagaccctcacgttcgaagtggtcgggtttcgagaacctaccacgcagtgctggggaggccatcgtacgccaagttcatggccgtccccaactacacctacctcaagctcaagatgccgggccccaacggggtcatcaccgtcgggcccacgtaccgacacgcatacgaatgcgatgtggagtgcgtggaatacgccgaggccctcgctgaatccgaggccctcatcgctgacctggagagcctctctagggaggcgcccgacgtgaagcgccacgccggcaacttcgaaccagcggagacggtcaagtccgtccctcttgacccctgcaacgacgcctccaagcagatccggatcggctccgagctcgaccccaaataggaagcagtgctcgtcgactttctccgcgcgaacgccaacgttttcgcgtggagtccctcgga

SEQ ID NO: 170703 - DNA, 419 bp, Arabidopsis thaliana landsberg
atgattgggctgataaagccattcgtgaatccgaacttcaatctgaagatggtagaaatcttttgacaatattgtgttgtttggtgtgattctatttgttactaagtttcactctttttggtgtcttgcattgcaggtgaagtaaaagatactaagaggcctaaaacacacaaagctgagccgtgtaacttagatggtaaaagagcagtgacgatatggtttagtatgcttaaaatgactatgcctttatcgagttatttggtgatatctttccttgcttgtcaccaagcgggagcaccggttccacccacatatattgtgagataggcacaagaaggaaagcttctatatttgtcttgttttctcaatattagagagcaaataggagagtgatcagctgcgtgtccggtgaaagcaat

SEQ ID NO: 170704 - DNA, 726 bp, Arabidopsis thaliana landsberg
cattaatgatgatttgaatgctaaactagaagtagctaataaatctaagtcttgtgtagaacatgttgagatttgcactaggtgtaaagatttcgatgttgatgcttgtagtaatcatttagtttcaatttccaaattaactgaggatttggctagtcttaatgcccaacttaagactagcaagaatgaatttgagaaactaaaatttgctagggatgcctacacggttggtagacacccctcaattaaggatgggcttggcttcaagagggaagccaagaacttaacaagccataaggctcccattcccactaaggagaaagggaaggcccctatggctactagtgctaaaaggaaccatgcctttttatatcatgatagaagacaaactagatatgcgtataggagttataatgcatatgatgattttaactctcatgccatgtttgcttctagttcttcctatatgcatggtagaaatatgtctaggaaaaatgctatgcctagaaagaatgttatttatgctcctaggaaagtagtgaatgaccttctacaatttattgtgctctaaatgcttcctttgctatttgtagaaaggataagaaaattgttgctaggaagttaggggcaagatgcaagggagataaaacttgcatttgggtccctaagaatatttgtgctaaccttgtaggacccaacatgagttgggtacctaagtcccaagcc

SEQ ID NO: 170705 - DNA, 806 bp, Arabidopsis thaliana landsberg
  unsure (1)..(806): unsure at all n locations
aggaataaggcagccattactagaggaaagaagcccgtggggaggaggttggaactggtagatgaagattctgaagaagaaatggcttcatcgggggaagctgatcaaatagagaaagaaggtggtgatgatttagaataagagaattgcgcaattcgaaacgagtannnnnnnnnnnnnnnnngcaacgagtgtttaggaactcgatgccctcatcctgagaccatggaaagattcgacatctatgatgatgtagactacatgtttaagcaatgcagcctgaatattcacatgtttcggccaatggaggggtatgaggaagagaccacccagtttctttcatccgtggaattgttcttatatggagagtcagaggacgatgaaatcaggccagacggaagtttgggatacttggagttctgtgtgtatgacgtagagtatcgacttccaatcgagcatctcgagctgatgtatggatatccaagcggaaaaggcacgagtcattgttttgataagagagagcttcagtcattctgggccacgcttgggtctaaacatgggttttcgtcctctaggacaaagagcaacgaaataaagagtccggtggttagatattttcataggtctttagccagtgcactatttgcaagagagagaaatgggacctttgtcaatggagagctagaattaatggagacggcgttgcaagagcagcttgggttagcatcatatggtacagttctagctaaagattcgacagacgtttaagtctcattctacctaatcgaacatcggctgagctacag

SEQ ID NO: 170706 - DNA, 412 bp, Arabidopsis thaliana landsberg
aataattgagctggtatcagttttggatagaggcggacacacacaaaattgtgggatagaatttctgcaaatacttcaaatagaccaaacacacacaagctaagtaagatgcaaaaatctctaaatacttgcaagtataacatatatataataatataatccacatgatattttgatctatctacaaattcggccttgacgcaaattcatatgtttgttttcagatatgtgtttcagctctttagaaagagagaaatggaagaaggcatggcgagtcacccattccagccctctctcttgccaaaatggtcgataaaaatatgcgggttgagtattttagtttattttagttacttcaagttcacctatctacgaaggcggactacgatattagtttagcacttgttgtcgt

SEQ ID NO: 170707 - DNA, 1649 bp, Arabidopsis thaliana landsberg
tatttaatgattatatactgatggttgaagctgaaggagaaagactgttggtagtactcaacgatgaaccatgggatttcaaggaggcaaataaattcagagaatggcgagatgcttgtgaggaggagattatgtcaataatcaagaacaaaacttggagtctagttgatctccctgctggaactaaaccaatcggtttaatttgggttttcaagatcaaacgcaagtcagatggaaccataaccaaatacaaagcaaggcttgtggcaaagggatatgtacagaagcatgggatagatttcgatgaagtgtttgctccagtggctcgaatagaaacagtgcgttttatcattgctttggcagcaactaatggttgggaagtacaccatttggacgtgaagactgcatttttgcatggagaactaaaggagaacgtatatgtcactcaaccagaaggttttgtaaccaagggaagtgaagagaaggtatacaaactacacacggctttatatggactgcgacaagctcctcgagcatggaacattaaactgaatgagattttgaagaaattatcttttgagaaatgttctaaggaaccctcgatgtatcggaaacaagagggaaagcacctgcttcttgttgcagtttatgtagatgatttgttggttacaggctctaatcaagacatgataaacgactttaaaagggggatgtcaagtaactttgagatgagtgatctaggaaaactcacctattatcttggcattgaagtacttcaagaagaagaaggaatcagtcttaaacaagagaggtatgcaaagaagatactagaagaagcaggaatggatgagtgcaaggctgtcttgactcccatgatttcaggtctggaactttcaaaggcacccaacgagaagagcattgatggtcaggagtatcgaaaagtgatcgggtgtctcagatacttgcttcacactaggccggatctctcttatgctgttggagtacttagcaggtatatgcacgatcccaaagagtctcatgaagctgccttgaaacaagtcttgaggtatcttcagggaactactagtcatggtatttactttgggaaaggaaacaagtcaggattggtgggttttagtgacgctagtcacagcgtggatgaagacgatggtaagagcacgggaggtcatgttttctacttaaatgagtgtttgatcacttggtgttcacagaagctacaagttgttgcattatcttcttgtgaagctgagttcatggcagctactgaggcagccaaacaagccatttggctacaagatctctttgctgaagtcattggaacaacatgtgagagagttacaatacgtgtcgataacaagtctgccatcgcactcactaaaaaatcctgtttccatggaagaagtaagcacattcaccggaagtaccatttcataagggagtgtgtagaaaatggtcaaatcttggtagaacatgttcccggagttaatcaaagagcagacattctaaccaaggcactcgcaaagatcaagttcaaggagatgagagatctcattggagttcgagacttgtcaaatgaagacttcaagtttaaaggggagattgttggagtaaacttgaagataatgact

SEQ ID NO: 170708 - DNA, 983 bp, Arabidopsis thaliana landsberg
gcaaaggcggctgcctacagatgtcgagaaaagtgtttgatcagtttccacaaaaaaatgttattacttggaatgggattataatggcttacgggatgcatggaaacggtcaagaagccatagatctgctaagaatgatgatggttcagggagtaaaaccaaacgaggttacattcatctcagtatttgcagcttgtagccactcaggcatggtggacgaaggattaaggatattctatgttatgaaacccgactacggggttgaaccaagctcagatcattatgcttgtgttgtagatttgcttggaagggctggtagaattaaagaagcatatcaactcatgaatatgatgcctcgtgatttcaacaaagctggagcatggagtagcctccttggtgccagtcggattcacaataacctagaaattggagaaattgctgctcaaaatctcattcaactggaaccaaatgtagctagtcactatgtgttacttgccaatatttattcatcagcaggcctctgggataaagcaacagaggtaagaagaaatatgaaagagcaaggcgtgagaaaagaacctggatgtagctggattgagcatggcgatgaagtacataaatttgtagccggtgactcatctcacccgcaaagcgaaaagctcagtggatatctcgagacattgtgggagagaatgagaaaagaaggatatgtacctgacacatcttgtgtactccacaatgtagaggaagatgaaaaagagattctgctttgtggacacagtgagaagctagcaattgcgtttgggatacttaacacatcacccggtacaattattagggtggctaaaaacctcagggtttgtaatgattgtcatcttgcaaccaagtttatctcaaagattgttgatagagaaatcatcttgagagatgttaggaggtttcatcgtttcaagaatggaacttgctcctgtggagactattgg

SEQ ID NO: 170709 - DNA, 557 bp, Arabidopsis thaliana landsberg
tcatatgattccgtatcttcatctagctaacaaattagctgaaaaaggtcatagggtactttcttggctcccaagaaagctcagaaacaactcgaacctctcaacttgttcccaaacagcattcacttcgagaatgttactcttcctcatgttgatggtctccctgttggcgcagagacaaccgcggatctcccgaactcatctaagagagtcctcgctgatgccatggatcttctacgcgaacagattgaagttaagattcgttctttgaaacctgacctaattttcttcgattttgttgactggattccacaaatggcaaaagaattaggaatcaaaagtgtaagttaccagatcatatcggcagcttttatagctatgtttttcgctcctcgtgctgaattaggttctcctccacctgggtatccttcatcaaaagtagcattacgtggacatgacgctaacatctattcactcttcgcaaacacccgcaaatttctctttgatcgagtcaccacaggccttaagaactgcgacgtcattgccataaggacatg

SEQ ID NO: 170710 - DNA, 466 bp, Arabidopsis thaliana landsberg
ctagacgaactgcgagctaggaaagctacagacgaacagggagctaggaaagctgcagacgagctattagctaggcgaagtgcagacgagctgctagctaggaaagctacagacgaactgggagctagaaaggctgcagacgagctgttagctaggcgaagtgcagacgagttgctagctagacgaactgcgggctaggaaagctacagacgaactgggagctaggaaggatgcagacgaggtgctagctagacgaacttcgagctaggaaagcgacagacgacagggagctaggaaagctgcagacgagctgctagctaggcgaagtgcagacgagctgctagctaagaaagctacagacgaactgggagctagaaaggctgcagacgagctgttagctaggcgaaatgcagacaagctgctagctagacgaactgcgagctaggaaagttacagacgaactggg

SEQ ID NO: 170711 - DNA, 514 bp, Arabidopsis thaliana landsberg; identical to SEQ ID NO: 2260
  unsure (1)..(514): unsure at all n locations

SEQ ID NO: 170712 - DNA, 439 bp, Arabidopsis thaliana landsberg
tcgtcttcgtcaacggtggagcaaccatcacgtggcggaagtccgggaatcaacgccgtgtcctccgatgttttacggtctaacatcctaacccgcctcgacggttcctctctcgccgccctaagctgcacgtgctccaacctaaactctttttgctccgacgagtccctctggaggcaacaatgttccgctacatggccttctaccttggacagacgtgtacagagcatcatctcaacgttcccagacggtcaccggacgtttttctccgattcctttccgtttcttgaacatgatgttgtgatcaatctcccaccgtcctgtgatacctcggagttaatctcagccgttgatatattctacaaagatgatgtgattttctcaagggttcatgtgacagagacagtctctggttggttcctttgctcacctgagagca

SEQ ID NO: 170713 - DNA, 2214 bp, Arabidopsis thaliana landsberg
tttcagtgaactcaagcggtatttgtcaactcccccggtgttatcgaaacccgaagaaggcgagcccttatacctatacattgcagtatcaagttccgcagtcagtggagtaattgttagggaagaccgaggagagcagaagccaatcttctacgttagtaaaacgttagaaggggccgagctaaaatacccaacgttggaaaaaattgcctacgcagtccttatctccgcacgaaagcttcgaccttattttcaatcccactcgatcatagtccagacgaaccaaccattacgtcaaattctccacagcccaggacagtcgggacgcatggctaagtgggccgtagaactatcagaatatgacattgaatatcaaaaccgaacgagcatgaagtcccaagtgttagcagatttcatcgtcgagctcccgccgagcttagcggacggcctcccggttagcgagaaatggagtcttcacgtggatggagcgtcttcccagctcggttcaggcgtcggtatacgtctaacctctccaacaggggaaatcctcgaacaatctttccggctcggtttcgaagtatcaaataatgaggctgagtatgaagccctgatcgccggccttcgtttggccaaaagcctcgacataaaccagcttcaagcttattgtgattcccagctcgtcgcaagccagtacaacggagagtatgaagcaaaaaacgaacggatggacgcctatctacaaattgtccaaggactggcgaaaaccttcgacgtttttgcactcgataaaattcctcgaagtgcgaacgctccagccgacgcacttgcaatattagcttcaacatctgatccggacctcaggcgtgttattccagttgagtgcattgacaagccgagcatccagaagggacttttcgtgtgcatgatcaccgagccgataacagacgacgaacctcctgacgttgtgtcacctaaggactggagacaggaatttatcgactatatcgctgacggagtcgttcccgaagaaaagtgggaggctcgtcgcctgaaagcaaaagcagctaaatatacaatgatgaaggagcacttgctaaggtggacggcatcaggcgtaatgttgatgtttttaagtaaagaagaagccgagctagtcatgaaagaaacacacgaaggtgccggaggcaaccattccggaggacgaagtttggcggccaaaataaagaagcacggccaatactggccaacaatgatcacagattgtatccgtttcgtggccaaatgcgaaccctatcaaaggcatgcttcgattattcactctccaactgaagctcttacaacgtctacggcaccgtatcctttcatgcgctgggcaatggacattgtcggcccattaccatcttcgaacggcaagcgcttcatgctaataatgacagactatttcactaagtgggtagaagccgaagcttataataagatccaggctggagaagtacagcgctttgtatggaagaatatcatatgtcgacacgggctcccatacgagataattacagacaacgggtctcaattcatctctaggcaattcgaagacttctgcgccaaatggagaattcgcctcagcaaatcaacaccgcgttacccacaaggaaatggacaagccgaggcaacaaacaagataatcttggacgcacttaagaagcgactcgaggcaaaaaagggagcctgggcagacgagcttgatggagtcctttggtcacacagaacaactcctcgacgttcaacgggcgcaacacccttttctttgacatacggaattgaagccatggcacccgcagaagtaagcgtcggcagtttacacagaactatgctcgtcaataacccacaactcaataaccgaatgctcttaagtaacattgacgacgcagaagaatttcgcgatagctccctcctgagaatccaaaattaccagcaagccgccgctcggcattataacaccaaagtaaagcctcgatccttcacagtcggcgatttggtcttcccaaagtctatgaaaacacagccgagcttaatgcaggaaaactcggcgctaaatgggaagacccttaactagtatccaaagtggtacgcagtggcgtttacgaactactcaccatggccggcgaaaacattcctcgatcttggaacgcccacaatctgaagaaatatcactcc

SEQ ID NO: 170714 - DNA, 431 bp, Arabidopsis thaliana landsberg; identical to SEQ ID NO: 18915
  unsure (1)..(431): unsure at all n locations

SEQ ID NO: 170715 - DNA, 387 bp, Arabidopsis thaliana landsberg
atggcgttaatacatggttcgattcctggtacgtctgcggttcgattgggtttttcaacctcagtgtcaccgagaatatttctcaatgttccggtggtgaagcagggttggagggattcgtgtcggagagaggttttaagagcaatggtgcaggagacagttcgggttgtttgttttttctgttgaaggggagagagatgatgtgtaccgtatatgggacttgtgcaagatcacaaagagaagaacaatgaaggattttgacatggtcaaactcgacatggtccgcccctacttatgtgtgtgacttgagttctccatatttgcaattaagaaccgttggtgacaaatggattagaggcactcagttttggcaccacaagtagtata

SEQ ID NO: 170716 - DNA, 467 bp, Arabidopsis thaliana landsberg
cgaaaagatcttcaccgccacggcattgcaggacacgcgggtaccgcgcaccttgtcgattgacgaaatccaggccaccacgcagtatttcgtccacgccgccgaacgcgccatcgaagccggcgccgacggcgtgaaaatccatggcgccaacggctacctgatccaccagtttctgggcgccaattccaacacgcgcaccgacgcttacggcggcaccatcgacaagcgcgcgcgcttcgcactgaaagtggccgcgaccgtgaccgaacgcatcgggccggagcgcaccggcatccgcctgtcgccggggaatggtctgggtggcgtcgacgaaggcccggagttgcccgaactgtatcgtcacctggtggccggactggccgaacgggatctggcctatctgcacgtcatgcacgtcgaaaaaaaagacctgctgcgcgacatccgccatctggacccaacgc

SEQ ID NO: 170717 - DNA, 1217 bp, Arabidopsis thaliana landsberg; identical to SEQ ID NO: 21732

SEQ ID NO: 170718 - DNA, 595 bp, Arabidopsis thaliana landsberg
gtggaagtatcaagcagtcagatctaggctatactcacaagagttgttggtgtctcaagaagggattggtcagctaaacttgatgagactttatgggcctatagaaccgcatgcaaaacgcccattggaagaaccccattccagatgttatatgggaaatcttgtcatctaccagtcgaagtggaatatagagccatttgggcaaccaaacttttgaacttgaaaatcaagggagctcaagaaaaaagagtagttaacttgcatgagctggaagagattaggttagaagcatatgaaagttcgaaaatctacaaagaaagaacaaaagcctttcatgacaaaaagttcgcaccaaaagatttcaacattggagaccaagttctgctattcaactccaggcttaagttgtttccaggaaagctaaaatgcaggtggtccggacctttcaccatcaaggaagtattgccatatggggcaattactattacccggaagggaagttatgaatttagtgtgaattggcagagggtcaagagtggcagattgccctattcctgaaggaactactgttcacctccaggagtccatgagtgcc

SEQ ID NO: 170719 - DNA, 678 bp, Arabidopsis thaliana landsberg; identical to SEQ ID NO: 6075
  unsure (1)..(678): unsure at all n locations

SEQ ID NO: 170720 - DNA, 536 bp, Arabidopsis thaliana landsberg
  unsure (1)..(536): unsure at all n locations
nnnnnnnnnnnnnnnnnnnnnnnnnnnnnnnnnnnnnnnnnnnnnnnnnnnnnnnnnnnnnnnnnnnnnnnnnnnnnnnnnnnnnnnnnnnnnnnnnnnnnnnnnnnnnnnnnnnnnnnnnnnnnnnnnnnnnnnnnnnnnnnnnnnnnnnnnnnnnnnnnnnnnnnnnnnnnnnnnnnnnnnnnnnnnnnnnnnnnnnnnnnnnnnnnnnnnnnnnnnnnnnnnnnnnnnnnnnnnnnnnnnnnnnnnnnnnnnnnnnnnnnnnnnnnnnnnnnnnnnnnnnnnnnnnnnnnnnnnnnnnnnnnnnnnnnnnnnnnnnnnnnnnnnnnnnnnnnnnnnnnnnnnnnnnnnnagtataggcttgtaccggagacgttgtatttgactgtgaactatatagataggtatttatctgggaatgtgattagtagacagaaacttcagttgcttggtgtggcttgtatgatgatagctgcgaaatatgaagagatatgtgctccacaagttgaggagttctgttcatactgatacttaac

SEQ ID NO: 170721 - DNA, 1713 bp, Arabidopsis thaliana landsberg; identical to SEQ ID NO: 35307

SEQ ID NO: 170722 - DNA, 714 bp, Arabidopsis thaliana landsberg
ggaactacaagatggaacgtaacaaactgctggcaaatttcgacgacagtgtcgaacgacaccattagggtgtcgatcgacacaatttgcagaatagacagctaccataggcgacttcaacagagctgatcttttctactccaatcgatcagagatccagctacctccttttgtaagagaagactttgctattcaccctgcatattataatcttgtttcacaaggaaagtttcgaggtgcttctaatgaatcaccactagatcatctagaagtcttcgaagacatagtgtcctcaatcaaaatagatggtttttcaagcagataatcttctttgcaaacttgatagcactgtattttactcattttaggtgtatatttatcatcatttagctttgcatttgatcattgtatcatatcattttgcaccattttagcttgttttgcatacttaggcatctaggatcattttgcattcgcattgcatgttttggtgtgttttcaggtgcaaaaggagcttaaaaggactctactcgatccattcactcgatccaggcagctacagaagaggcatcattctactcgacctctttactcgatccaagatgctacaaaggaggctgcagtttactcgaccctcctactcgatcaaaaaaacctcagatgaagcaacaaattgatctactcgcccctcctactcgatgcactactcgatcc

SEQ ID NO: 170723 - DNA, 740 bp, Arabidopsis thaliana landsberg
  unsure (1)..(740): unsure at all n locations
cgggtttgcgaacacctctgtggtgggaggccaaaattttaaagctttctttgcaatcaatcaggtatataagtatatataacanctaagtttttgagttaaactaaatttttggtttgatattgatttattcaaaacaaaattttgatttaaaattaaatttctcaaatattattaaaacagttctttagtttcaatccgttagtattattctttaaccgataaactcgaagaaaattttcactagataaaactagtgaatttcttcacaaactttagtataatttaccaaaaacaaatataaccttacacttctttttttatgggatctacacaaataataggatccaaaaacaaacaatttgctgctgacagtggggaagatttacttagggtattggccagaggaacttctaccttttttcactgacggagcggagtcagttatatatggtggattgacgaatgctccatctgataacattcaactctttgaaatagttagcccacctatgggtaacgggaacaaaccgctggatgaggaagtggatctaaaacatacttgttatatgcactctcttaagtatgtgacaccagattacaagagtgtcgatgttgattccaacaaggtcgctgaagttgcggacgcaggtatatgttacgacgcgatttattttgataaacttggggggtatggacaaacgtttaccttcggtggaccaggtggttattgtgatgtt

SEQ ID NO: 170724 - DNA, 1732 bp, Arabidopsis thaliana landsberg
atgaagattttaagttggaattgtcaaaggtttggggaataaggcatccattggttatttaagggatttatggaaaaaacatcgaccagattttttatttctctcggaaacaaaacaatccacagagtatatggaaaaatttgttggtcattttggttataaaaacttaaaaacggtggaccctattggttttagcggcgggttagctcttttttataacaatgattttaacgtttcaatcatttatcaaagtaaccggttaattgatattgaagccatttataaaagtaaaataattaatcttacctttgtatatggagatccagtaccaaaaaatagagatcaagtctgggaacggttaacacggattggtacaactcgggataccccttgggtttttgataggcgattttaatgaattaaccgaaaatcatgaaaaaagagagggataaattaagacatgcatcttcgtttataccttttaagttaatgatagaagattgtggactcttggaatttcctcatctcggggattggttatcttagcggggatggagggataaaaaaccaataaggtgtcggttggatagagctttagctaatgaagattggcatgaattattctgcaacttgttcattgaatatttaccgatgttagcttcagatcatacatcagtgatagctactattgtggataagataccacgtgggaagcacaactttcggtttgataagagatggattggtaaagaaggtttactagaggctatttccaatggttggaaccttgataatggttcaggagagggtaatattattgaaaaaataattagttgtagacgggctatttccaaatggcggaaagacttacctccttacgggagaaaaacaatcgaggaattgaaatctgagttagatgcggcacagaaagatgattcgagaacaagtgaggagataacggatttaacaatacggttgaaagaggcctatatagatgaagaacaatattggtactagaaaagtaggagtttatggatgaaggttggggataataactcaaaatatttccatgctctaacaaaacagagacgggctaggaatcggatcacgggacttcatgatgaaaatggaaaatggtctacagaggataaagatatacaaaagatagcggtgtcgtattttgagaatttgttcacaccaacaaatcctcaagtggtggaggattctttggcagaaattcaaatttcaataacagatcagataaatgtatttctaacaaaacccgcgacagagattgaggttagaacgactctatttatgatgcatctggcaaagcacctggcccagacggtatgacagctttgttttttcaaaaagcatggggtaccattaaagaggatccgatgtttttggtaaactcatttctcaaagacggagtgtttgataaacggttgaatacgacaaatatatgtcttattccaaaaacggagcgaccgactctgatgaccgaattacggcttattagtctttgtaatgttggttataaagttatttcaaaaatcctttgtcaaagattaaaaacggttttgccaaaccttattttggaaacacaatctgcttttgtggaaggacgcctaatctcagataatattcttatagctcaggagatgtttcatgggcttaggactaacccatcatgtaaaggaaaatttaggccattaaactgttatag

SEQ ID NO: 170725 - DNA, 1391 bp, Arabidopsis thaliana landsberg
gattccaatggctttcttggagtgagtttaaaaagatttcaataagagatatggtgatggaatggaaaggaatggctacacctacttaactctacagtttgaacaaagaatttgggtacttttttggctctaccgtcagaatacgaaataccaaagaaaataacatcgtgttttaactgtctgtggatatggtttttaactaatttagttgtttctcaggtcttaactactgtgtagatcaccccgaggagatcagcaacttgccaaggttaaggctcaagcctcaagtgaccgaagtcaaaggtgtttttatggagaacattgagaaggtcaagagttatatatccatatatccatgtcaatcatagacaaagtaactttgcacacatacccagctcgatgtcttgaagaaatggaaagatttgttggttgattgttgcagtctcagggtatatgggacaaagattgttctgataatctattctggcgagtcttatgaaatcatcgaaatagttcagctcaaggatatggaacttgacgaaggatatatacttagctctcactcttcacttttcaggcgaccaaaagggatagtacagatatgtcctcgtgacgcttatcaactgacaaaaaaactagaggggatcataaagagcatccatatgattgtcagagacagaggaagatttatcatggtactcttctctttttttcttttttttttctttagagattaaccagagaatgaagaagaagaggtaaaagatatatgagaaataggtgaatggtttttgtctaagtctttcttttgtgtatatgaatctttattttcaaagggaaatctcttttgaattaggtgggttaaactttagtttaaagatttctttctactttgttgttatgattttttttttcttttctgtaggaactttacttgaaaaagtcaggtaaagtagaaaaggggataaaaatagactaatgaagaaaatctctaaaggggttaaaaatcgactaatgaaggaaaaaaatcctaaagaaagaagaaagacatgacagtaactgtgccttccttcgctttccactttctttgtcagcttcagacaaatgtgaacgcaccaaaaggtacgtgcaaagaatataaagtggaacaagtcaaagactttttagtatttaccatggaaactgaacgatgttgatgatgatgacaggttcaatggtaaggaagacttccgttccctaaaatgacttgatggaaattgtgtgtgccaagttgttggagacagatcaagactttttagacctctcactaggagtaaggtatgtattaacactgctaataaacaacagagaaagattgaaaagaaatgaaaattgtgacgtggtgcatgtgt

SEQ ID NO: 170726 - DNA, 349 bp, Arabidopsis thaliana landsberg
taagtcatacggcatactatcagtgttgcttcattcgtattatgatacagagtacctgtttaccgggcaggagcatgtgtttaatcctccacctaaagtaaaatcgggcgtggtgcgcatccgcaggaatagcaggacaaccctggaatgcgatgaatcattgtataaggacattatcaaaacgggctttaaccagcgccgtaaaacgctcaggaacagtttacgcaaatttaatttgcccgacgaccttctgaaccagaccgaatttgctaaattgcgccccgaagaactgaatgttcaggactttataaatttaaccctctgggtacaacaacacaaataatccaat

SEQ ID NO: 170727 - DNA, 1718 bp, Arabidopsis thaliana landsberg
aagatagtattaagttggaattgtcaaggtttagggaataaagtaacaatcggttatttacgggatttatggaaaaaacatcggccagattttttatttttatcggaaacaaaacaatctacttcttatatggaaaattttgttggtcattttgggtataaaaacttaacaacagttgaccctattggttgcagtggtggtttagctctttcctataataatgattttaatgacacaatcatttatcaaagtaattggttaattgacattgaagccgtttataaaggtattacaataaatcttacctttgtttatggagacccggttccaaaaaacagagaacaagtttgggtacggttaacacgaatcggtatatctcggggtactccttggtttttagtaggagattttaatgaattaaaaggaaatcatgaaaaaagagggggtaaattaccacatgcatcttcgtttatacctttcaatttaatgatacaagattgcagacttttggagttccctcatcttggagattggttatctttggcgggattagcgagatataaaaccaaatacgatgtaggttggatagtgctttaggtaatgaagattggcattatttatttaataattccttcattgaatatttacaaatggtagcttcagatcgtgcaccggtgataactacgattgcggataagagccatgccgtaagcgaaagtttcggtttgataaaagatggatcggcaaagaggggttactagaggcaatttctaacagctggaatctcgacactagtttaggagagaaattttttggaaaaattgaccaattgcatgcgggctatttctcaatggcggaaagaattaaatccttacggacggaaaacaattgaggatcttatatctgaattaagtgcggctcagagggatgactcgagaacacgagaggaggttacatatctaacactacggttaaaagaggcttatcgagatgaagaacaatattggtataaaaaaagtcggagtctttggatgactttaggggataataactcaaaatattttcataatctgactaaacagagacaagctaggaatcggataactggattaaatgatgagaattgtaagtggtctgtagaggataaagagattcaacatataacggtgtcttattttgagaagttgttcacttcgactaatcctcaggatgtcgaggattccttggtagaagttccgactttaataaccgatcaaacgaatgattttcttacgggacccgcgacagagaatgaggtgcgtgtggcattatttataatgcatccggagaagtcaccaggtcctgatggtatgacagcttacttttcaaaaagcctcgaataccataaaagcggacttattacttcttgtaaactccttttttcaaaatgaagttcttgataaacggataaatacaactaatatatgtttgattccgaaaatggagcaaccaaatcggatgacggagttacgtcctatcaatctgtataatgttaggtataaaattatttcaaaatttttatgcaaaagaattaagatggttttaccaaatcttatttcggaaaagcaatcagcatttgtagaaggacgtctaatttcggataacttccttattgcacaggagatgttttatgggttaaggtctaacacatcatgggggatcctctagagtcgacctgc

SEQ ID NO: 170728 - DNA, 480 bp, Arabidopsis thaliana landsberg
gcgtccactatctgccgaatttcgccgagatcgcgcccgcgccgccggtaccgcgcgccacgctcgacacgcccgccgatgcgccgctcgccatcgcgctcggccggctgcatccgaataagggcttcgacacgctgcttgccgcggtggcgaaagtgccggggctttatctgtggctcgcgggcgagggcgcgttgggcgcggcgttgcggcggcaggcggtatcgcttggcatcgaggatcgcgtgcgcttcctcggctggcgccaggatgtcggcgccctgctcgcggcggccgatatgctggtgtgctcgtcgcggcgcgagccgctgggcaacacgatcatcgaggcctgggccgcacgcaagccggtggttgcctgcgctgccgctgggcctgtcgagttgatcgaacccgacaaaacggggctgctggtgccggtggacgattcggcggcccttggcgaagccatgagggcgc

SEQ ID NO: 170729 - DNA, 1082 bp, Arabidopsis thaliana landsberg
tggggtttttatagggtttggttataatcatattgttgcagatggatcttcgttttggagtttcttcaatacttggtcggagatttgctttagcgggtttgatgccgatcatcggagaaagtttcctcctttgcttctccgtggatggtttctcgacggtattgagtatccgattcgaattccgttaccggagacggagacaccgaaccgggttgttgttacttcatcgttattacaagagaagatttttcgagtcacgagtagaaacatctctgagcttaaagcgaaagctaacggcgaggttgactccgatgatcggaaaatatcgtcgcttcaagcggtttcagcgtatatgtggcgatcgataatcagaaacagtggtctgaatccggaagaagtgattcattgcaagttactggtggatatgagaggaagactaaaccctccgcttgagaaagagtgtttcggtaacgtggtcggattcgcgacggtgacgactactgtggcggagatgcttcacaatgggcttggttgggctgcattgcaaataaacaaaactgttgggatcacaaacgaatgaagagtttagagagtttgctgagaattgggtgaagaaacttagtacattgtatgctaaggcttttagtcagtgtataacaattgctagctctcctcggttcaatgtgtatggaaacaatttcggttggggtaatccaatagcggttcgagctagaccaggaaataccaccgatggtaaactcattgcttatcctgggatcgaagaaggaaacatcgagtttcaaacgtgttcatcgtctagtgttttggaaaaattatcgactgatgaagagtttttgaagcatgtatgtgttgtataagtaaaatcaaccaaatcaaatgtacatttttgtgtgtgtcttgaataaagttgaaaatgtgaaaacaatcttcgtcaacagaaatctatttagatagttttccttctttactctttgtcttttaatgaataaattaacctataagtaatttgacaaaataacttcttcttgcataaacacattgaacacgaaaagtcgttacgt

SEQ ID NO: 170730 - DNA, 913 bp, Arabidopsis thaliana landsberg; identical to SEQ ID NO: 26563
  unsure (1)..(913): unsure at all n locations

SEQ ID NO: 170731 - DNA, 205 bp, Arabidopsis thaliana landsberg
  unsure (1)..(205): unsure at all n locations
agnnnnnnnnnnnnnnnnnnnnnnnnnnnnnnnnnnnnnnnnnnnnnnnnnnnnnnnnnnnnnccgatttggctcgggctgtaccagcggccacggagtctgcggcctgtcacgcctttcaccccggtcattggtcgccaccctggccttcatgggatggggcttcatcactgtatatgtcgtacgccacattctggcctgatca

SEQ ID NO: 170732 - DNA, 554 bp, Arabidopsis thaliana landsberg
gtcaatagcgcttgtactagtgagttgtggtttggtattttctcttatcactttgtaaaaggaggaccatcgtcagttttagcagcagtagcaaagtcaggcttcacacaagccttctcactcatatttgtttctgagattggagacaaggtatatatctatctaatcatgtcggcgctattttgtagcataccacctttagatttcttttatgttacccaaattctgtgatctcacttatgtcgttttcggttggccagacatttttcattgctgctttgttggccatgcagtatgagaaaacactggtacgttttcttctaatatttctctctcactctctttgatccttttgtacttatttattcggtgaacgctgatgttattgaccttgaatttcttgacaaggtccttttaggttcaatgggggctttatctttgatgactatcttatcagttgttattgggaagatatttcaatccgtgcctgctcagttccaaacgagtaagctacctaaggcttctttatcttcaagctgttactttgctcatac

SEQ ID NO: 170733 - DNA, 696 bp, Arabidopsis thaliana landsberg
cgttatggtgtaacgaaaaccctaatgaatttataagttacgtagtgcagtagcatatgtcgttttaatgtttctggttcatctaaataattagataatttattttgcatttatcgaccaaaactttaagctcatagatttgattcaaacaagtaattcatttactaaattagacggatcataggattttttgttgattcgattagccttttcagttatgcaatgttcttgagggaaacacaaacacagatagcatatttggcgacagcgtctgccttttgaattggaaagacgagaaatataactaaaggagatagaacggaaacaaccttgaagctgtcgaatttcttgaagaattccatgaatgtcattgatagagttgtctagacttttatctcataaatcaaacgaaccttagaccgtcaatgtttttctttccaataatgagagtcttcctaaaaccaaagtctagactaattcttgaacttaaatactaatagaagtgtggtagaatgtgtcaatggaaaaacccgaagttttgagttacacaacttgataagggaaatccaatattggcagaagaaatttcttgaagctgaagtcacatgggtgcctagaacgagtaataaagttgctgattgcttggcgaaatttccatttccaaataatacttctttttctttcttctctttggtc

SEQ ID NO: 170734 - DNA, 298 bp, Arabidopsis thaliana landsberg
ccagcaagcaccaacagttgttcttcctcccgccgctctcccacaagtcgttcctggcgccggcccacccctggtctggcagcatctgggcgcgcacgggctacgccggcgccggcgcgcagctccactgcgccacggggactgcggcgggcggctccagtgcggcgggctcggcgacgcggtgcccacgacgctggcgtgggtgaacctccaccacgacaacgacaagacctcgtacggcgtgaggtcggtggacgacttcaatgtgggcctgtccgtgacccgcacgagggccgcg

SEQ ID NO: 170735 - DNA, 301 bp, Arabidopsis thaliana landsberg
aggccgctggaccacctgaccgagccggtcaccgtcgaagactgctctttttcgtgcgcacctgactccccgctgggtggggggtcattttcgccagcggatcgctaccaacccgctcagctggctgcacgagcagaggctgcgccgcgcgcaggaactgctggaacgcaccgaccacggcattaacctcatcgcgcaggaatgctgattcgccaccggcgaaacactgcggaggcatatccgccaggccctgggaaccaccctggattcctaccggcgcaccttaaccgggcagatctcg

SEQ ID NO: 170736 - DNA, 576 bp, Arabidopsis thaliana landsberg
  unsure (1)..(576): unsure at all n locations
gaaagacctgatcgccgacgagtcggtgtcgaaaatcatggtcaacagctacgatgaaattttcatcgagcgcggcggccaactgcagaaatccgatatcaccttcaccagcaaccaggcggtggtgagcgcgatcgagcgcatcgtcacgccgatcggccgccgcattgatgagagctcgccgatggtggacgcgcgcctgaaagacggctcacgcgtcaacgcggtgatcccgccgctggcgctgaagggcgcgaacatcacgatccgtaaattctcgaaaaagaaactggtcggcgaagacctgatccgcttcggttcgatgacgccggtgatgctggaattcctgaagacggtggtcgagcagaaagccaacatcatcatctccggcggcaccggctcaggcaagacgacgctgctgaacgtgatgtcgagctacatcccgcagnnnnnnnnnnnnnnnnnnnnngaagacgcggccgaattgcagctcggtcacccgcatctggtcggcctcgaatcgcgccagaacaaagcggaaggcaagggtctggtcagcatccgcgacctggtcaa

SEQ ID NO: 170737 - DNA, 465 bp, Arabidopsis thaliana landsberg
atgagattcagaagaggaagtagagttgaggtgtttagcatcaaagaagcctcttatggtgtgtggcgatcagcggagattatatctggtaatggtcacacttacaatgttagatattactcttttgaaattgctaacaatgaggttgttgaggatagagttccaaggaagataattaggccgtgtcctccccaagtagatgttgatagatgggaagctggtgaattggttgaggttcttgataataatatttcatggaaaactgctactgtcttggaggtgttatctggaagatattatgttgttcggttacttggtgctaaagcagaactcacggttcacaaagtttacctcagggctagacaatcttggcaagatgaaagatgggttatgattggaaaggtaagtttttttacttatttatttaatggtactgtgttttaaagtgatgtttgaacaatgatg

SEQ ID NO: 170738 - DNA, 160 bp, Arabidopsis thaliana landsberg
atgtcttacagcaatcattgctcttgcatttgttacgatccacacattctcgatggtcattgctttcgaagggtatgcaaaagggaacaaagtagatcaaataatagttccagtcatacaccttactgctggaatgttgtaagatccagactttgaatcc

SEQ ID NO: 170739 - DNA, 508 bp, Arabidopsis thaliana landsberg
  unsure (1)..(508): unsure at all n locations
gctattgggaacaatttagctactcctcgagctagtgacattactgcaattaatggtcttattgttccggtttatacaatgacttcgatattgttgtntgtgatgtgggcacttgtggcagcgattccttgtcaagacagaggtttgcaagtgcatttcaatgttcctaggaattaccaatggggaggttcgttgatgtcgttgcacgataggatcattgaggaatcgaagaagagagagaggaagaatacatgtgggttgttgaaagagattcatcagtttgagaagagttcaagattgatgaatgagttggttgattctgttcagtttcctttgtctgaagagaaagagatggaagtgagagagagagttgaggaattggggaagcttcaagaggctttgaagaatggtttggatccgtttgagaggaaagtgagggaagtgtttcatcggattgtaagaagcagaacagagggtcttgatactgttggaaagcatcatggttctg

SEQ ID NO: 170740 - DNA, 538 bp, Arabidopsis thaliana landsberg
tgtatcaagcctcaaggatctttgcttccaacttgaaagtcattcaagttcaacggttttatagctatgttttgcttccgcgagtgagagaggatattagaaagcacaagaagctgcactttgctctgtaccaggctctgaaaaagtcactatataagcctagtgctttcaatcaagggatactattcccgctttgtaaggtatatattcctcctcctgaacttaccacagtaactatttcagaatgtgactagttttcttactagttccttgggtttttctttattcagtcggggacatgcaatctcagagaagctgtaattatagggagcattcttgaaaagtgttcgatccctatgcttcactcatggtatgcgatacaaagattgcataaatagaacatcttctacaattttcagattattcgtttcaaattattaatttctttacatgaactgcagtgttgccttgaacagactggctgagatggattattgtggcacaacaaggtaacgtgtactattctcttgacttttat

SEQ ID NO: 170741 - DNA, 992 bp, Arabidopsis thaliana landsberg
ccatttttgtttgatttttatgccttttcattttgtggtatttattattatttaatttattgtcaaaatacattttatttgatatttttaaatggtttacaatataatggactgagaccgcctaacaagatggttgtagatatttaaaacaaataaaacaaaaaggccgcaaggcccacaacccaacaaagaaatcgaggcccaaaatggttgtagaaatttggtttagctatcaaaaggttcaagcggctgacaatagaatttgttgtctgtccaaaacaaactaccataagcttatattgccacgagtactcattcggtattttttttaatattcctattaagatttaagctgtaaataaaaataaattaatacaattcagatcaaatgaaatattaaacttgaccacaaaaaacaaagttatgacattacttactaggcctatcaaatttaagcaaagtctgatggccccgcttgatagctctactacttactacaaaaagataactatgtatgtgtagtaagcaaaccttttttttttgtcggcttgtttaaattattttgagcttgaaaaagaaaatttatgtttttacttaatttaaataattttaacttttcatatttaaaaataggcaaaatattaataaataaaaactaaagaacaattttaattatcatgttagaaagttcacattttttatatttttgaatgttgtagaattttaacccttattctttttcctttatttttttgtaaataatattagtgtgataaatgatttgaaaaaatcgcctgctttcgagcaggacaaacggattaccgaattagctatttaatccgggctaaccaacatattgctgatagcaagctatggtctagactaaagatttctgactgctgacaattttggacttatatacaagaactgtctattatccgcgtgaatcagacactactagcctatggcctatgctcattttggttccattc

SEQ ID NO: 170742 - DNA, 398 bp, Arabidopsis thaliana landsberg
tcttctaaacggcgatctaactcattttagcaaacgtcacaaatccaagcaagaaaagtagtgtggagtttagctatgtgacattcgagcttactattacaacacactcatagcaactcaatacattgaacctttcaaggttcctaagaaaacgtcaatgtttgcgaatgttcatcttgtgagcagtcaggtccagcttcaggcaacagcagagccgggagctgcagcgtcagattgaaacaggtccggttttgttgaacctgagaggaacgtttcatgcacgttcgcatataggaccattgtttaggtactcttataagttgcatactcattgcagcgtttcattgaatggtcctcctttaggagctatgcgagctagaagatgcaataccaaacgc

SEQ ID NO: 170743 - DNA, 442 bp, Arabidopsis thaliana landsberg; identical to SEQ ID NO: 69361

SEQ ID NO: 170744 - DNA, 415 bp, Arabidopsis thaliana landsberg
aagaagaagatgagtagtgaaaaggtgtcgttgaagaagatgaataagaatgatggtttagggtggattcagtggatgagaggatggtttaatgttgtgcaagagattcttttgcagagaataatggcttctcacttacaaattccatttcatcttcctcctttaaaccacttaacttgtattgtcactggctcaactagtggcattggctccgagaccgctaggtcccaaatcgaaaacataaactttcctttagcgtcttattttgtttttgtttttctgttgttgtgattgtcctgtgaatcttataatgcataatttgttgtgtgaactttgttttaggcaacttgcaaaagctggtgctcatgttgttatggcggttaggaacataaaagcagctcatgaaaatattcac

SEQ ID NO: 170745 - DNA, 522 bp, Arabidopsis thaliana landsberg
atgtccgatcttccaagagatttgttggaggagagactctctagggttccggtgaaatcattgagagaagcgcgatttacctgcaaaaattggaaaacattatccaaaaagcggagctttacaaagaagcaccttgctcaggaagcaacatcaagggaaagtgagtttaaggttgtcatggtcttgcattgtaaggtttatctaacgagcatcaacctccgtggaattcacaacggctttgacccgtctataaaccgtcaagctaaacttgttagcctaaacggtacagatctgatcgatatatctgaagtatatcactgcgacggtttactgttatgtatctcgaaagactacactagggtcgtggtttggaatccgtataggagccaaactttgtagctcaaacccagtagtcctgaccatagaatggactggtatatctgtgctataggatacgagaagcgtaaatcaaacctacgctacaaagttttgccattcgttgattttccgaagaagaatttg

SEQ ID NO: 170746 - DNA, 196 bp, Arabidopsis thaliana landsberg
atgggtttcttctcttttcttggaagagttctcttcgcttctttattcatcctctccgcttggcaaatgtgagtcttttcttctttattccctccatctcttctctcgtttctccggttattggattagggttcgacatcttcttcgatgaacttctatcttgctagatccgatttgattgagaatcttccgctaa

SEQ ID NO: 170747 - DNA, 356 bp, Arabidopsis thaliana landsberg
atagctcactctctaatcgcttatcagctgggaatgcgcctgatgtctctttagataactctgttactgacgaacaggttagagattcttcggattctgtagcggctaagctatgtactaagcctctgaagcttgtctcggggtcgtgttatctaccgcatcctgataaagaggccactgggggagaggatgcacattttatctgtgctgaagagcaagcattaggtgtggcagatggtgtggggggttgggcagagcttggtattgatgcaggttactattctcgggagcttatgtctaactcagtgaatgcaatccaagatgagcctaaaggttcgattgatccagccagagtt

SEQ ID NO: 170748 - DNA, 450 bp, Arabidopsis thaliana landsberg
  unsure (1)..(450): unsure at all n locations
ttccatccaagcaaaactcaaacggcgtcgtttctagctagataccgagagacccttctcaccgcattgctgattgctttaccttactgtgacactgtcgcaacgattgacgaaaccataattgtcagtttcaacttccttcccacaaaaaacctctgactttggttgttcggaagttatcaatactcaatcatcgagtgatttcgagggtcccaagtaagattccccatttcttgtcctgagtattattctgttgcagtttctgctttgatttttctccagcaattttgcttttgtgtatagtatcaagcaaacttcagatgcttgaaaaagttgcttcacccaaatgcaagatccaagttatttccgataacaccagcttctcatcttctatgcattctnnnnnnnnnnnnnnnnnncttcatttcttgaaaaacacttgtccgattt

SEQ ID NO: 170749 - DNA, 634 bp, Arabidopsis thaliana landsberg; identical to SEQ ID NO: 11881
  unsure (1)..(634): unsure at all n locations

SEQ ID NO: 170750 - DNA, 229 bp, Arabidopsis thaliana landsberg
gcccgacacgtcagccgtctacatcgacatcggcctgggcttctacctggagtgtccgctggccgatgcgccgcgggtcattgccattcgcaaagatgcgcttcaggccaaaattgaccgcgctgttgacgccatagccagcatcaaagcaaacatcaaagtggttcaagaaggcgtgcatgagttgctgcacatgacctgatagtgtggatgtgggccgctgcgtcac

SEQ ID NO: 170751 - DNA, 731 bp, Arabidopsis thaliana landsberg
tatcagttgtggaaaatgctccggtgaatcgatcagacatgcagattccatcgtctccgtcaattaaaccgattagcggtgactccgacccgattatcataatcccaggcggatccaatcaaactcgagactactacactggacctccgtcgtcacggagacggaagagcctcgacagatccaattctactagaaaaattgtgacggagctagacgatgtcaaatcggtatctccggcgacaacaacaatagactcaatttccatggaaacagcggtgaacaaagggaatcaaaacggcgataagaaatcgagacggtggggaaaatggagcattttagggtttatatacagaaaaggtaaggacgatgaagaagaagataggtacagcagatccaacagcgccggaatgattgagaggtctttatcggaatcatggccggagatgaggaatggagaaggaggaggaccgaagatgaggaggagtaacagcaatgtgagctggcgaagctccggtggaggatcggcgaggaataagagttcgaggtattcgtccaaagatggagagaacggaatgttgaggttttatttgactccgatgaggagaagctggaggaccggcggtggtagtggtggaggcggaggcggtggtggtggtggtgggtgggagaagacggcggctaaggcgaatagtcacggccactctatagcgaggagggttatgaggctgtat

SEQ ID NO: 170752 - DNA, 527 bp, Arabidopsis thaliana landsberg
ttgagtccattcaatagaaaaactacgaaaaacaaaaatatggtaaattaacatatacggatgaactgtttagcccgcctctcgaggttgtactacccaactctctccttagcttccaagatattctgctctctcctcgcctccacggatctttacgataccccgtacccggagactattaggaagcaccgagagttgtccttatctctgtttaatgttccatggtaactctaagccacgttggtttactctgagccgtggaccaactcgaatccccagccctagttcaagatggttcacttcccgttttagtctatgtaagagtcgcacaacaaggaatctaatggtgtcggtacaagtcatagttttccgcctcagtctcgttggcttcctacgtatgggaaagttgagtggtgtgatattttgctcacagtccccaagtcaagttcttttgaggaatttgttgttgccactctttgagtcattgcttgtacatggtaatacattaataatgagcattcatggaa

SEQ ID NO: 170753 - DNA, 73 bp, Arabidopsis thaliana landsberg
tggaaaaaacgtggcagcaatacaaatcgagcattatctggatgtccgaacttcgaagcattgcaggcatagt

SEQ ID NO: 170754 - DNA, 1858 bp, Arabidopsis thaliana landsberg
  unsure (1)..(1858): unsure at all n locations
tggctgaagttcttgcaagatcctctgccaaacatgtttctgtgtaaattgttgcgaaacacagacccatgcgaatccatcaaagtgacgccggactaaatcatgatgaaagacttgtctagccagagtggttttaccaataccgcccatcccagatatagaaaccacttgatagatatcattctccaccaaatgaccaaccaattcttcaacactctgctccaccccgacaagnnnnnnnnnnnnnnnnnnnnnnnncgtttgtcggatctccctctgcaccctttgtctttcctgaagagacagcgaacgaccaccatcaatgatttgttgtatcccaaaactctgcatctcaccaatcacttcagagatcctcttagtgataccctcgatatctgaagcaactttgtggcgatccgttaagaagcgagcaagtcgtctcacatgcttcttgaccccttttccttctcctctaagtttgttcagaacataggattcaatgatatcttctgtgtcataaacaaggtctttgacatcttccaagaagttactcaccattgcactttgatgtttcttggcatctgcatcttctaaaaagcaccttaacttatttaaatcacttctcaattcattaaattgctttttaactccttgaaatcgatcagattctcggacaaggaggtcccaaagcttttcgactccaaatgacaaaagtgtctcagccataagtctcctgctcaaccatgaaactagtagtcaattatcacttaagaagtgtctgtgagttcataaatatgataattgtttttgcaaagtttacggcaactattttgtgcagagactgcgaatatattgagataaccaaaattgaaaactacaaaggatcgaagcacctacttccacagaaaccaattaaagaaacaaaagataaaaatgatcaatacaataatctcaccttccctggaaatcgatgttcctccaaatgatctgtatagagaagtttgtgatgtgttttttttttttagtgtttcgtcagaagaactctgctaaagatccattattattagagttgactccaggtcaacaccttccgacaatctttggccaaaaagtcttcaaaaggcaacaacactatccgcttatccagtggccacccagcaacttcgtacttgccacgtgttattttacatttcatctaaattcctttagcttggtggaaatcattacaatggattttgtcttctaatgatatttaaaaaagtattcctcttctttagaaatttttacacagaaaaatgattatatagaagaagagccagagattgataccaccagaaccaacaaaactcacttgatcacaggctgctgaaacaatgcagctagccagccagctaccataatggtcaaatggtcattgtaaatctaatcaaacatgtgtaccaacaagatttaacagatgcactatgcaacattggtaactctcagctcatttggagccttacctcttattctaaccaaatccattacatgtaccaaagtaaaatgcatgcaacactgataacattgtccttctcggcagtttacacttacgaatcaacgaatttgaacgagaatgtttccaattacgaatcaaaagatgcagattacacgggactagatcttgccattttagggttttcgggctgtcattatctttcagggggcggcagaactttaccaaacttacaatgtagggatatcttgtgatgatcatgtttgggatctggagtttgcctcaagactaccaccacttcatacatttagcgatcctctcatgaccaatacatgcccaacgatgagcagcgacatgatttgggga

SEQ ID NO: 170755 - DNA, 670 bp, Arabidopsis thaliana landsberg
gttctgtgtgtatgacgtagagtatcgacagaaaatcgagcatctcgagctgatgtatggatatccaagcggaaaaggcacgagtcattgttttgataagagagagcttcagtcattctgggccacgcttgggtctaaacatgggttttcgtcctctaggacaaagagcaacgaaataaagagtccggtggttagatattttcataggtctttagccagtgcactatttgcaagagagagaaatgggacctttgttaatagagaactagagttgatggagatagtactgcaagagttgcttggtttagcatcagacggtacagttctagctagagatcagacagacacttcggtctcattctacctaatcgagcacctgctgagttacagaggatgggctaagggacttaagaaaccaggaaaaagggttgtgggaggagttgtgacaccaattctgagagcttgcaatgtacctctacattcaacaccgattcctccgagatggattgatatgcaacaccttatcaattccaagagtttttggtcgcagtagaataatggtctatataagtataggttcgatcaccccacatcaggacaatccatttttctcctcccaaaccttgcttccacttcgatcagagatggtgacaacattgagttttgccca

SEQ ID NO: 170756 - DNA, 953 bp, Arabidopsis thaliana landsberg
  unsure (1)..(953): unsure at all n locations
gacatttggaaacatcaattcgtggatgcaataacggtaaaaatcttcaacttaccaagtgttttctagattcttctatatcctattttgggcttttgatcattatcaacacatctttcttaacttgtttctcttcatattcgtaatcaaacagttggaaacatcagaatcaaagaaagtggatagcatttatcttcgaatcgcgaaatctttctggcatttgctcctcgccccttggaaactgctttttgcatttgtgcccccctgcaacattgctcacggttggatcgctttcatctgctctctcctcttcatcagtggagtagcctttgttgtcacaagatnnnnnnnnnnnnnnnnnnnnnnnnnnnnnnnnnnnnnnnnnnnnnntcaaaaactgaagttataagattaaacatttgagctctaaaacattagaaactcttttcatcttgcaggaataaacccatatgtgatagcattcacagcactcgcaagtggaacttcatggccagacttagtagcaagtaaaatcgcttgagagcgacaactaaccgcagattcagctattgcaaacatcacctgcaggtaaaaatctcaaaaccctttacaaacattgaagatcttttcatgatctttttggtgataaattatgcagtaactcggagaacatctatgaggggattggagttccgaggctgataaacacagtctacaactactttgcatacagagagcctttatacatagaaaacgctaaaggattaagcttttcgcttctgatattctttgcgacatcagtgggatgtatcgtggtgcttgtgttgagaaggttgattataggagctgagcttggaggtccaaggctatgggcttggcttacttctgcctatttcatgatgctttgggtcgtcttcgttgttctttcttctttgaaagtttcaggcgtcata

SEQ ID NO: 170757 - DNA, 1328 bp, Arabidopsis thaliana landsberg
  unsure (1)..(1328): unsure at all n locations
cgattatctcatctccctctccgtcggctcctcctcctcagccgtctccttgtacttggacaccggaagcgacctcgtttggttcccttgccgtcctttcacttgcatcctctgtgaatccaaaccactccctccttctcctccttcatctctctcctcctccgccaccaccgtctcctgctcctccccttcttgctccgccgctcactcttcccttccctcctccgacctctgcgctatctccaactgtcctcttgatttcatcgaaaccggagattgcaacacttcttcttacccttgtcctcctttctactacgcttacggtgacggctctctcgtcgcaaaactctactccgactcactctctctcccttccgtctccgtctctaacttcaccttcggctgcgctcacaccactctcgctgaacctatcggcgtcgctggattcggccgtggacgtctctctcttcccgctcagctcgctgttcactctcctcatctcggtaatagcttctcttattgtctcgtctctcactcttttgactcggaccgagtccgccgtccgagtccgctcatcctcggtcgcttcgtcgataaaaaagagaaacgnnnnnnnnnnnnnnnnnnnnnnnnnnnnnntgatgatgagaagaagaagaaaaatgagttcgtcttcacagagatgcttgaaaaccaaagcatcctacttctactctgtttcactcaaggaatctaatcggggaacggaatattctggtcggcgatgccagaagaattgacaaaaacggtggcggaggagttgttgttttctcaaggacaacgttcacgatgcttccggcgaaattctacgattcggtggttgaagaattcgatagtcgggtcgggcgggttcacgaacgggctgatcgggtcgatccgagttcgggtatgagtccttgttactatttaaaccagacggttaaagttccagctctggttttgcattttgccgggaacagatccagtgtgacgctccccaggagaaattatttttacgaatttatggacggtggagatggtaaagaagagaagaggaaaattggatgtttgatgttgatgaacggtggagatgaatcagaacttcgaggtggtactggggctattctggggaattaccagcaacaagggtttgaggtggtttatgatctgttgaacagaagagttgggtttgctaagaggaagtgcgcatctttatgggattcgcttaaataagcctaacatgcgctgaagccaataaatctttaaaataagcctaacatgagcctctccggtttgaccggtggaccgga

SEQ ID NO: 170758 - DNA, 671 bp, Arabidopsis thaliana landsberg
gatcggaaatagtcacactcagagtgtaaaagaggaggtgaagaagcaattttggctctctgctccactcatcggcgttagcctcctccaatactctctccaagttatctccgtcatgttcgtcggtcatctcggctcacttcctctctccgccgcctccatcgccacctctttcgcctccgtcactggtttcactttcctggttcgtgacctctcctctctccctctctctcttctcaatttcagtgtaattgaattgattaccagaaactgaatcgatttttcctaacagatgggtacagcgagtgcgttggaaacactttgtggtcaatcttacggagcaaagatgtatgggaagctagggattttcatgcagagagctatgtttgttctgctgatactctcggttcctctctcgatagtttggttttacacagaggacattcttgtcttggttcaccaaaacaagtccatcgccagacttgcaggttcatacgctagatacatgattccaagcatctacgcctacgctcttcttcaatgcctaaacaggtttttgcaaacgcaaaacaatgtgttccctgtatttgtgtcctctggaatcactacttgtcttcacctgcttctttgttgggtcttcgtgttgaagtctggtttaggacacaggggag

SEQ ID NO: 170759 - DNA, 446 bp, Arabidopsis thaliana landsberg
cccaattccctcgttgatgcttgaccttgaagtctacacaggagctatagatgattttgattttgaggataacttgaatggtaattgttttacagctctttctcatactttttagactgttttaccccaaaaaaaaaaaaaacacctatatatttgtctgcttctacaatggtcattgctcaaatagtgactatcatatactacttgcagtgtgtaaaccaagcatccttgtcttgcagaaagttgaactctttgagtatataagagaaaaactgtttagacttgtttcttttcttagtttcaccattttatgggttgttctgataagtagtatctactccgcagatcctcgagaatccaagatgctcaaaccagttgacttccaccaccacgtcatggaagttggggttagtctctccaaaggcccagcttaaccaagttccttg

SEQ ID NO: 170760 - DNA, 650 bp, Arabidopsis thaliana landsberg
gtctattatcgagaggacatttggagtttggaaaaaattatggaggactctttgtgattttccaaaatatagtattcatgttcaaaagagaatggtaatggcgacaatgagattacacaatttcatcaagatttcaaatttttctgatgcagattttgcagaagtaataatagagcctgaaataaacaacactgattgggagcatgatttagatgacatggaagtagctgaagaagcagacggagaacatatgacataaataacagataatactgcagatatcttgtgggaaaatcaatatttacgatagtactattttgcattgtattattttgatgttgttatatgtattatttaaccagattttaataatattttaaatctaaaataatatacgaaaggctttttaatcaatataaaataaaatataacaattttaatttttagttacattatattagttttatttataaaatatttatacagaactgcttacaatattttcaccattcaaacatttgtattgaaccgcatgttgtttttcactattctaaattatctgcattagtagatccgcttgatccgcacatgttccgcatattgcgttttttcttaataaaccgtagttaaaccgcaccgcactagtatat

SEQ ID NO: 170761 - DNA, 418 bp, Arabidopsis thaliana landsberg
tggcagactggccggcaaggtcgcgaagctggagcagcgcctgccggtacaggtcgaggccggttaaccactgaccgtgcaggccgacgcggaccagctcgaacaggcgctcatcaacctgttgcacaacgcggtggaagccgccttgggcacgggcggcggcgtgcgcctgcgctggcgccgcgaagccgggcgtgcactggtcgaagtggaagacgacggccccggtccgcccgccagcgacaacctgttcgtgccgttcttcaccaccaagccgggcggttccggcatcggcctggcgctggcgcggcagatcgccgaagcgcatgaaggcggcgtcagcctgggtgtgcgtgatggcgccgaaggggcgctggccacgctgtggctgcccttgccgtaggcgacaacccagtgc

SEQ ID NO: 170762 - DNA, 641 bp, Arabidopsis thaliana landsberg
aggcggctccggtatatctatcggaagtagcaccaccgcgatggcgtggagcattcaacatcggcttttcatgcttcatcagtatgggagtagtagcagccaatctaataaattacggtaccgatagtcaccgtaacggctggcgtatctcgctaggtctagctgctgtaccagccgcgatcatgaccgtgggatgtctattcatttccgacacaccttctagcctcttggcgcgtgggaaacacgatgaagctcacacgtcgctgcttaagctacgtggcgtcgaaaacatagctgacgtggaaaccgagctagcagagttggttaggtcaagccagctagccattgaggctagagccgaactgtttatgaagacgatattgcagagacggtataggcctcatcttgtggttgctgtggtgataccatgttttcaacagttaactggaataacggtgaacgcgttctatgcgccggttctgtttcgatcggttgggtttggttctggtccggctcttattgcgacgttcatactcgggttggttaatcttggttcgcttcttctctcaacaatggttattgaccggtttggtagacggtttttgttcattgctggcggtattctgatgcttctctgtcag

SEQ ID NO: 170763 - DNA, 641 bp, Arabidopsis thaliana landsberg; identical to SEQ ID NO: 26004

SEQ ID NO: 170764 - DNA, 198 bp, Arabidopsis thaliana landsberg
caaatatgggtgtcttttaaggttcagtaccagcgggattattaaccgtaccctttttgggaaaatgttaataagtttcaaaatccatttcgtcgtccagtagcgacaaccgtctttttgattggcaccgcggcggccctgtggttaggtattggagcaacattaccgattgataaatctctaactttaggtcttttt

SEQ ID NO: 170765 - DNA, 497 bp, Arabidopsis thaliana landsberg
atgactcacgttccgcaactaatcatagacctgtcgctcattcttacgatggccggtattattaccgtaatcttcaagaaattgaagcagccaatcgtgctgggctacattctggccgggttacttgttggacccaatttccacctgtttcccaccattaccgacattaaaacgattgaaatctgggccgaaatcggggtaatcttcctactcttcaacctgggtctggagtttagtttcaaaaagttggtcaaagtcggcaacacggctgctatcaccggactttttgaagtattcatgatgctcgtaacgggtttcattaccggccagctgctcggttggagcaaaaccgacagcctatttctcggcggtattatcgctatttcctccaccaccatcattttccgtgcattcgatgaactgaggcctcaaaacccagaaatttacgcgggtcgtaatgggcattctcgtgatcgaggaccttacggccgtagtat

SEQ ID NO: 170766 - DNA, 442 bp, Arabidopsis thaliana landsberg
atgtctcatgaaatcaaagatcttaacaactatcactacacttcatcgtataatcattacaatatcaacaaccaaaatatgattaatctcccttacgtttctggtccatctgcttataatgcaaacatgatctcatcatcacaagtaggttttgatctaccctcgaagaacttgagtcctcaaggagccttcgagttgggtttcgagctttctccatcttcttctgacttttttaatccttccctcgatcaagagaacggtttgtataatgcttataattataatagtagtcaaaagagtcatgaagttgtcggtgatggttgtgcaaccattaagagtgaagttagggtttcagcatctccttcttcaagtgaggccgatcatcatccaggcgaagattccggcaagatccggaagaaaagagaagttggcgatggaggac

SEQ ID NO: 170767 - DNA, 642 bp, Arabidopsis thaliana landsberg
ctaagcgatcgaatccggatactcggatacaatacccgagatcatgaagaacagatggttcaagaaaggattcaaacatgttaaattctacatcgaagatgataaactgtgtagggaagatgaagatgaggaggaagaggcatcatcatcaggccgctcttcgacagtttcagagagcgatgcagagttcgatgtaaaacggatgggaataggttcaatgccaagaccctcgagcttaaacgcgtttgacattatatctttctcttcagggtttgatctgtctggtttgtttgaggaagaaggaggagaagggacgaggtttgtgtcaggtgctcctgtttcaaagatcatatcgaagctggaagagattgcgaaaatcgtgagctttactgtgaggaagaaagaatggagtttgagattagaaggttgtagagaaggagcaaaaggaccgttgacaattgcggctgagatatttgagctgactccatctctagtggtggtggaggtgcacaagcaaggaggagtcatacagtagtatgcagagttttgcatcaaggaagtcaggccagagctggaggatcatatctccatgaagatgttgtagtagaagtagcgttgtatttgccatctgactactgcata

SEQ ID NO: 170768 - DNA, 629 bp, Arabidopsis thaliana landsberg
aagggcgataaggaaaccccggaaacatcttattccagtcaaagtgtctcagtaaacactttggcagatcaagtatcttcaactttgtcttttgctccaagcagcgacagtaaaactggaggtgaagttaaatttaatgaaaagtctgatcagagcgggaagagtaacacatgtagaccaagcacaagcagtgatatcagtgatgagagcacatgtagcagctttagtggtaacaacaagcctcacaaggcgaatgacgtgagatgggaagcaattcaagctgtccgaacgaaacatggcgtattggggttgaaccattttaggctcttgaagaggttagggtgtggggatatcggaactgtccaccttgctgagttgcacggaacaaggtgtttttttgcaatgaaggttatggacaaaggggctttggctagccgtaaaaagcttcttagagctcagaccgagagggagatattgcagtgtcttgaccacccttttctcccaactttgtatagtcacttcgagactgagaagttctcatgtttggttatggagttctgtcctggaggtgacttgcatacccttcgacaaagacagcccgggaagcgattttcagaacaagcagcaaa

SEQ ID NO: 170769 - DNA, 531 bp, Arabidopsis thaliana landsberg
cgatccgtatggcacccgagtatggagcgggacaatggtctatctgtcggcaaaaaatcgcgccctcaacgaagtcacggttgaacgggtcgagaagaaaactgaacatgctcttgtcatgatccacggatacggcgccggtgtgggcttcttctacaagaactttgagcccctttctcgtatgaggggactgaagctgtatgcgctgtacatgctgagcatgggtaactcgactcggccgccgttcaagattcacgccaagaagaagtaggaccaggttcttgaagctgagagctggttcatcaacgcgctggaggaatggcgaaaggccaggaagctggagcagttcaccctgctcggacattccctgggcggctatcttgctgtttcctacgccatcaagtatcctgggcgcctcaagaagcttattctgccctcgccggtcggtgtgccggagaacccataagctgaaaacgcctccatgcctgaccccgactcctcgttgcaggcggacgaatgttcctaggccca

SEQ ID NO: 170770 - DNA, 455 bp, Arabidopsis thaliana landsberg
  unsure (1)..(455): unsure at all n locations
caagtcgacctcctgtcggtcgttacggccgccaagcccaagatcgccgattatcctttcaccacgctggtgccgaacctcggcgtcgtcgatatgggtgagcagaccttcgtcatggccgacatccccggcctgatcgaaggggcgagcgaaggccacggcctcggcgaccgcttcctcggccatgtcgagcgcacggcggcgctgctgcatctggtcgacggcacgcaggacgatgtggtggcggcctacaagaccatccgcgccgagcttaaggcctacggcgcgcnnnnnnnnnnnnnnnnnnnnnnnnnnnnngagatcctggtcatgaccaaggccgatgcgatgaccgaaaaggaaatcgagaaaaagcgcaagctgctcgagaccgcctcaagcaagaaggtcgccgtcatttcctcggccgccgggcagaacctcaaggcggtcct

SEQ ID NO: 170771 - DNA, 850 bp, Arabidopsis thaliana landsberg
atacatatgacatcgaagaacttgctgacaaattgcaaatcggtccaaagttccatgtcctatgaatgtcactcggggcttatccagtttacggctgtctcaagtacattcctcataggtatatcaatctcttacaagtagaatctaagaataacatttttggtcagatttaattgtgattatcacttagattaaaagctatatatcaaatatactatttatttacacatggatttacgtacatatcatattggcctagtaattatatcttttgaacttataagattaatttgaatatatttcgcatatataaattaaagttcatataatctttacctatgtgaattaatgtctctaacaatatgtatagactaagtggagcaacgttggtggttccgatactgaatttttggtggagttgtctgcctctaaacttgtcgacttcagcgttcaagaaattgccaattcaaaatcagtggacacttggagtcgcacactactttccatggttattatattggtggatgactcagaaatggttttccccatttagtcagaatcctagagaaactatgaccgagcgtgatatagaactcgcggataagcatacaaaacacgcatatattaaggtacctttatagagattggttttaaaagtttatggagtttaatttagactaaccttgggttgttttagaccatttttcttatataatgaacttgatgatactttttaatgataaaagcacttacgaaagtgattgatttatgcggctcaggaatccgcactacgacaaggtgaatatgaaagcatgcaacgagacatcattgcgggttacgagaattggga

SEQ ID NO: 170772 - DNA, 532 bp, Arabidopsis thaliana landsberg
taaactacaagggcaaattagctatgatttattgggaggatttttctttatttatgagattaatcatatgggggggaggaatcttgataagtatttggaggaaaatctcgatgttgatgccactaacgagttgcatgtgtgggttctagaggatgttgagaatcaggaatggtctaaatatgcctacacttggaccgatgatacattcttccgtcgtcacctttccattgctggagccactgtttcgggtgaaatagtgttttcgatacgcaagtacacatctaaacaaccgttttatgttttctacttcaatcccgaatcgaacactctccaacgtgtagaaatccaaggttttggtgaagcgtttaaggcagaaacttgtagtgttcgcacctttgtaaaccacatagaggatcttgatgttaacgatttagaacaactcaactacattgggacaagaagataaaagcccaagcgtagagtccatcagcaatccacagaagatgacaaaacctgttgtacctgcaaaaga

SEQ ID NO: 170773 - DNA, 303 bp, Arabidopsis thaliana landsberg
  unsure (1)..(303): unsure at all n locations
tgccagggcccgaacatgcttcgctcacggcaaagtgccattccgctctacacgcagatcgccgcgacgctgcgcgccgaaatggaggcaggtgcctgggcggtcggtgcgaagctgccggcgatcgaagtgcttgcggacaggttcgacgtagctccgctgacgatacgtcaggcgttgacgactctggaaagcgaaggattggtccggtgccgccagggcgtctgcaccattgtgcataaggaaggccttgagcagcgatggttgcggcnnnnnnnnnnnnnnnnnnnnnnnnnnnnnnng

SEQ ID NO: 170774 - DNA, 322 bp, Arabidopsis thaliana landsberg
ggggagggtaaccagttggaagaagtagctacatcaacaacaaccagggtggctacaaaggatacaacaacttcaaaaccaacaatcccaacctctcctaccgcagcacaaacgttgctaatcctcaggatcaggtgtatcctccacaacaacaacaaagtcagaacaaaccttttgttccctacaaccaaggtttcgttcctaagcagcaattccaggggaactaccagcaaccaccactacctgggtttgcacctcagcaaaacaaatgctacaacagctgcttcacaggcaagcctctagctccatggagatggcaaag

SEQ ID NO: 170775 - DNA, 389 bp, Arabidopsis thaliana landsberg; identical to SEQ ID NO: 63655

SEQ ID NO: 170776 - DNA, 444 bp, Arabidopsis thaliana landsberg
ggaacatgtggatccttgataccctgtgtgaaaagttgcgtcaaggtccaagtttgcgagtggctcgctatttcatagttgtgagattaattgatgcatgaaatgatttacgtgtttaaagggtgcgaagagatcaaaccggaagtgtttgacacaagacacaaactttggaagtggcgccacaatcccactatatttatctctgtctcaatagagagaaagatcttatattctaggagttatggacaagtgaagtgatagtttatgatccaagagatggtacatgcatgtgagcactattgcaataaagatgttcgatgtgtgtgtgatagattatgtgatttatgtatataactctagctcctcttgggtttatgtggtatgactttaaggagaaggattggagacttgttaatggtttgaagcttgacaagtatttgtgct

SEQ ID NO: 170777 - DNA, 338 bp, Arabidopsis thaliana landsberg
ggtatatatggtcattgacaaacaacatctcaagcggaacaagtgtgttttattccttatccatacacgaaaaaatcaaagcgggagtggctcaatgttttaaaagtaaatctaatgggaaacatattaggagaatatgaaaataaagaccaaatgttgcaaacagaaaatgatgattttgttttaatgactacaattgaagatcttgtactcgacaatttgacagaaaatcgcaaccccataaacctcaatctagatgtcggagatgcccagaagatggattccgatgtaatttatcgtcttctgaagatgaagaacaagaagacgaagaaaaatat

SEQ ID NO: 170778 - DNA, 1802 bp, Arabidopsis thaliana landsberg
gatctatcgtagcatcttgcgaatggatgatgcttctgatatttggcgtgatctctgcggtcgatttcatcttactaacttacctcgcacctacaaccttactcaggagattcaggatcttcgtcagggttctatgactttatctgaatactatactcgtttgaagacattgtggaaccatctggacagctcagaagaacctgatgatccttgtgtttgtggaaaatctgctcgtctgcaactgaaggcagagagagctaagactgtgaagtttttagctggcttgaatgaatcttatgcgattgttcgtcgtcagatcattgctaagaaagttttgccatcactggttgaagtctataatattctggatcaagatgacagtcagaaagtattcactgttgctactccaccctcaggttttctgatctctcaagcaacacctactcatgatgattctgtggttcctgatgtaatgtatgtccaaaatggtccaaacaagggaaggccaatttgttcctactgcaacagggttggtcatattgctgaaaggtgttacaagaaacatggattccctccgggcttcacacctaaagggaaacccactaataaagctcagaaaccgtctccagtggctgctcaagttaccctgtctgcttcacctgctcctcaaggcaacagtgcacgtttacagggaactttatctaatgatcagctccagaatatcattgctcacttcacatctcaactgacaactcaatctcctcttggtgctagcacttctcagtcagctctggatcatactggtatctctttctataactccacttattcttttgttggcattctggcagtctctcaacacacactgtcaagtaacacatgggtgattgattctggtgctactcaccatgtgtgccatgacagaaatctgtttgtttctctggactcttctgtggtgaattttgtgaacttgcctactggtcctaaagtgagaattagtggagttggattggttcggttaaataaagatattcttcttcagaatgtcttatttatacctgagtttcgactaaatctcatcagtatcagttcattgacttctgatattggttcacgagtggtttttgatccatcttgttgtgaaatacaggatcctatcagggggttgatgattggtaagggtcaccgtattatgaatctctatgtgttagatacagaatctccatccgtttctgtgaatgcagtggtggacattggtatgtggcacaagagactcggtcatccatctttctcaagactggatgttatatcagaagttcttggaactactcgtcataagaataagaagaatgctttttgtcatacttgtcacttagctaaacagaagaagctgtctttcccttctgaaaacaacatttgtaattcaactcttgagttattacatatagacatttgggggccattttcagtggaaactgttgaaggttttaagtacttcttgactttagttgatgatcactccagagcaacttggatttatctgctaaagaacaaaaatgatgtttttagtacttccctgcgttcatcactcaagttgagaaacaatacgcgtcaaaggttaaaggtgttagatcagataatgctaaggagttacagttcactcagtttaacaaagatcatggaattgtttcttatcactcatgccgtgaaactccagagcaactctcagtggtacgcgtaagcatctaaccattctaaagtgataaactttattctttgagtcaatatgccattgtctcatt

SEQ ID NO: 170779 - DNA, 1420 bp, Arabidopsis thaliana landsberg
tcttccaaagtagaggagaagccatcttcagtggatggtttacttagtcaatgggtggtaaataaacctaaaacatgggagaaaagggtaaaggtagaaggtgaagtatataacaagaagaaagctgtgggaaacggggcaagtagaggtgtagtaaaggatgacaagaagaagtcagttttgaagcaatctaaggtacctactctcaagggcttcaaaaaaccaaggaagacaacatctaatgatgatgttcaagatgttactgaccaagttgttgcagagaacttgaagatggtttcaagttctgaagatacattctccgatcctcaacagcagcgcaatagtaaggcactttctgcaacattgactgctttcgtagataagataaatcagatagatggagatggaattacaactgtgggtagacgcgtgctacaactagcgggttcttagaagtaccttttgttggtaactcaacagtgaagcgcatcattacagaagaagtccctcctccattgatacctgatcatcaacaacctgttacaaatgagaaactgaatgcactcatggattatcttgcacttgatgagttcgatttgcaactattcttttatacttcatttagcaacattttacttcggctatttaatcattctgattcaattgatttgtagggaagatccactagaaaccacttacgacgacatgaagttctattggcatattatgactccaagaaaatattggccggatgaaaaatagggatggttaaaagactatgtaagtgacacatcaatgttttttaataatttcatcttattacactcagactttaagattttgtaaccatcttaaatgtttttttttattgaaatgtagcatatagctgttgcgttgactatgttccgcaaaaggatgatgtgtgatccttcaatgtaccctaaccaacagataactttcttggatcaagatatgatcattcctttgtctaatagttacagtaggtttaaaggaggcagaaatgatttcaagttcagagactactttgtgatatagacttgctaatgaggaggattaatatctatgatagtagtccacacatgaccactgataaagaaatggttgaacaatccatgtttttgatgcttatgatccctgctatgttgagtgctgtcattccaattcagatacgcaagaagagctttgctaagttggaagtgaaaaggattacaaagaaggtccttgagaataaagatctaggtgattgtgctgtttagcactgaaatacatagagtgtctggcgcttggaagatcatttgatggcctttgcgataaaaacatgttggctctacggattaaacttgctacagagatatttgatgaagccaaagatttagccggaccggggaagtcagatcct

SEQ ID NO: 170780 - DNA, 557 bp, Arabidopsis thaliana landsberg
  unsure (1)..(557): unsure at all n locations
atggagccaaagtttcatgcttttatgtttccatggtttgcttttggtcatatgattccctttctacatcttgcaaacaaactagctgagaaaggtcaccgggtcactttcttgctacctaagaannnnnnnnnnnnnnnnnnnnnnnnnnnnnnnnnnnnnnnnnnnnnnnnnnnnnnnnnnnnnnnnnnnnnnnnnnnnnntggcctccctgctggtgccgagacaacctcggatatccccatctcgttggacaacctcttgtccaaagccttggatctcactcgcgatcaggttgaagctgcggttcgtgctttgagacctgacttgatctttttcgattttgctcaatggattccagatatggctaaagaacatatgatcaagagtgtgagttacatcattgtatctgcgacaacaatagctcatacacatgtccctggaggtaaattaggtgtcgcccaccgggttaccgtcatcaaaggtgatgttccgtgaaacgatgctcatgcattagcaacttatcgatatttactagagactgtatcacagatact

SEQ ID NO: 170781 - DNA, 366 bp, Arabidopsis thaliana landsberg
gatgcagcccactgagagggattcgagaggcgttccttatggagtaggaagcctaaagagtctcttgtcaatggcaagcggaagcaagcaggtgactcaacttcttttgtggctttgcaagaacaattacttgaagctcaacgcaagatagaagagcaggtctcttacaatcagaggcgtgaagctgagatttcccgagctgcagatgagcagaagaagaagcttgagcacttgtccttagtggagaagtttttgcgcgaaaatgttcctcagttcctcaatttcctcgaatctcattcagctaaggagataaccacagatcctatctcaccctctccagctgcctctccctcttcatctgcttca

SEQ ID NO: 170782 - DNA, 203 bp, Arabidopsis thaliana landsberg
atgtcgcttattccaagcttcttcggcaacaacaggcgaagcaacagcatcttcgacccgttctcactcgacgtttgggatccattcaaggaactgcaattcccgtcgtcgctctccggagaaacatcggcgataacgaacgcacgtgtggactggaaagagactgcggaggcgcacgtgttcaaggccgatctgccgggatg

SEQ ID NO: 170783 - DNA, 438 bp, Arabidopsis thaliana landsberg
gatcaggccaagtcaggtgtgcatggggcgcaggagatcgaagccttccgcagcctgccggagttcccggccgacgtcgcggccatgttgtgccgtcgcgtgctgatgcaggcgttgccggcgctggctgagcaggatctgcggactttcggcgcggcgatccgcgagttgcaggagcacaccggcgatcatttcgccccagcgcaaggcggacgatatgccagtcctgcggtcgcacgcgtgctggcctggatggccgggcagggcgtctgttgctatggccagagctcctgggggccgaccggtttcgccgtggtcgaggacgaggctactgccaaggcgctcatggccgggctctcacagacattcccggacgaaccgtcgctgaccttcatgctctgcaaggggcggaacgaaggcggtctggttcgcgatatc

SEQ ID NO: 170784 - DNA, 1309 bp, Arabidopsis thaliana landsberg; identical to SEQ ID NO: 7119

SEQ ID NO: 170785 - DNA, 411 bp, Arabidopsis thaliana landsberg
atggggacgagatctctagaaataaatgtgacatcagcaaaagggcttaagaaagtgtcgaagatggatgtttttgtggccgtgaagttatccggtgatccaaaatgctctgaccaccgtgagcagcggacacaagcggcaagagacggtggaaccagccccaaatggagcaatgatgtcatgaagttcatcatcgaccaaaacttagcagaggctaaccgccttgtgatcactttcaagatcaagtgcgagcaacgtggaggagtagataaagacatcggcgaggttcatgttcaggtgaaagaacttctggatcatcttggaaacgataagaccggtcaaagatacgtcacatatcaaatcgggaaatccaaagccgatattagtttcacttattcgttcactggtccg

SEQ ID NO: 170786 - DNA, 688 bp, Arabidopsis thaliana landsberg
cctttcttgttttttttttcttttctgtttttcatgtgtatatataggctcacaagaatcacgaaagataaggacctcgtcaatctgtcaacacttgatttgcgtacacaagaacgcaccaaccgaaaaactcagagattagtaccagtggttaacagataagttagagctaatggataaggagtttgaagagatgacgatgggcatgcctaaatgagactggacaaagattggatgatcattgaatcatcaaagctgagaatcagatagatgaataggcgcgactcaacgcgcagcttgctgctcgcaacgaagcagggcttggtgtcgagtgaaaccagctaggtatcgaacgacaccagctaggtgtctatcgacacccacgaattccagacgcaagtaattagccagctacaaaacctcgtcgaactcttggggatttaaacacgccaaatttgttatatgttaatcaattagcgattgtaccgccccctttaagaacgattattagctcaagaaaggatacttagctttagttggcaagcaccctttccatggcttatgtcatgaaaagtatattgaccatatcaagcgcttggaaggtgtagttctgaccatcaaaggtaaccgatcttctgaagtctacctgctatgcaagcttaacccatactcgcttgttggggaatcc

SEQ ID NO: 170787 - DNA, 564 bp, Arabidopsis thaliana landsberg
cggggcgcatcccccggcggcgggtaaagaggtgctcggcatgtcgggctggaacggcgacaaaccgccgggcgggcacgttctccctgggcatggcacagcgcttcggcatcgcggcggcgttgctcggcgacccaggcgttctgctgctcgacgagccgcagggcggcctcgatcccgagggcgtccgctggctccgggggctcatccggtcccaggccgccgcgggccgcaccgtcctggtctccagtcacctcatcggcgagatggcgcagaccgccgaccgggtgatcgtcatcggtcacggcaggctcctggcggacacatcccttgaccagctcacgtcgcaggggggcgggtctttggaggacgcgttcttcggcctgacggaaggcagtcaccatggctcgtgatggatacgggttcaggcaagccgcggcggcggagtggataaagctccgcaccttgcggtccaccacctgggtcgcgggcgacgggctggccgcgagcgtggccctcggcaccgtcgcgggtctcaacacgaagaccgcggggggcgacccg

SEQ ID NO: 170788 - DNA, 568 bp, Arabidopsis thaliana landsberg
  unsure (1)..(568): unsure at all n locations
ataagtataaagttgccagacaagacactagagctcacagcggccaccgcagcctcatggaccaaagtttcaaaaaaagctcataaacatcaaccaatcttcttgcataaccaccacatacccagccttatgcgtccaatcactttccgtctacgcaaatgacatccaaacatttttcaattcaaaaacaaagacaataaattcaacagatctaacaaaaataaatttaaagtgaaggataaaatcataaaattaagaacccataacaaaaaaaaaagtttaaagatttacaatctaaagcctaagctaggatcaacgaatcacatgtaccgttggcctttatgattcaaaaccaaagaaacctattaccaaaaaaaaaaaaaccgaaaccagaaaccgtaagtaagacaagagagaagaacatggaaccagaaaaagagggagattaagggaagagggaattcggnnnnnnnnnnnnnnnnnnnnnnnnntcttcgtctcgaaaaggagaaatcgatgattttactttttttgttggtcacagtcgttcattgatggaggttgcaga

SEQ ID NO: 170789 - DNA, 334 bp, Arabidopsis thaliana landsberg
acgcgatgaaaggtctcaccgcgctgatggacaccatcggcaagatcaagcgcgtgatcaaccaccgactgaaagtagaggggctgctgcgcacgatgttcgatccgcgaaacaatcttgccaacgacgtctccgcgcagctgctggaacatttcaaggacaaggtttaccgcaccatcatcccgcgcaacgtgcgtctggccgaagcgccgagccacggtttgccggtgatgacgtatgacggccagtcgtcgggcgccaaggcctatctcgcgctggcgggagaagtgctgcgccgtcatgacggcggccagatgcgcctgagcgcctgacg

SEQ ID NO: 170790 - DNA, 428 bp, Arabidopsis thaliana landsberg
ctactggttaatttcggcggcgacttgcgagtgcgcggccccttgcggaacaacagcagctggcacattggcatcgaaaacccagaactaggaaaatctcctgcagccgcgctatcgcttaataacggcgctatggccaccagcggcgatgcgcggcgcttcctgctaaaagatggtatccgttatagtcacatacttaaccccatcaccggctggccagtgacaggcgcccctcggtcagccaccgtactcgcaactgactgcgtacgcgctggcatgctggcaactctctcactgttggccggcccagaagcggaacaatttctgcaacaacagacagacattcgctactggttaatttggcaataacacggcattgcaacaccgtggctcacaacaacaaacgtcgctcagacaccacataccaa

SEQ ID NO: 170791 - DNA, 855 bp, Arabidopsis thaliana landsberg; identical to SEQ ID NO: 25967

SEQ ID NO: 170792 - DNA, 492 bp, Arabidopsis thaliana landsberg; identical to SEQ ID NO: 22523

SEQ ID NO: 170793 - DNA, 220 bp, Arabidopsis thaliana landsberg
atatcccacatctagtgatatggtaaacattttgatgaatgagtcattgttttgggattcttaaatttgcagggaaatcgctaagcatcttaggttgccaccggtaaagctacattgcagtatgcttgcagaggacgctatcaagtccgcggtcagagactacaaggagaagcaagcaaagactaatgctgctgctgcagaagaaaccgtcaaggcctga

SEQ ID NO: 170794 - DNA, 548 bp, Arabidopsis thaliana landsberg
gggcgcagttgcgcaccgccagcttcgatcttgttcgttacgccaaggcgtcgtgctcggcgctgctgctggtggggcatgtgaccaagaacggccagatcgcgggcccgaaagccatcgagcatctggtcaatgccgtgctctatttcaagggcgagcgcggccatcattttcgtgtgctgcgggcggtgaagaaccgcttcggcgccaccgacgagatcggcgtcttcgagatgacgggcgcggggctggcgaaagtcaccaatccttcggcgctgttcctaggggatcgcacctccgccgcgccgggcacgtcggtgttcgcggggctggaaggcacgcggcccctgctgtgcgagatccaggcgctggtctcggcctcgtcctatggcacgccacgccgggcggtggtgggctgggacaccgaacgcctggccatgattctccccgtgctggatgcgcgggcggaaatcgcccacggcgccgccgacgtctatctcaacgtgaaaacggcaaaaagatggcgagcccgccgccgacctgaccgc

SEQ ID NO: 170795 - DNA, 669 bp, Arabidopsis thaliana landsberg
atgacaacaggtaaagaaaaattatatcttcattatttatacatactttcttgtctcgcaagaaagccatggacttttgttcatgctctgttctttgtcgatctcacagcttggtcgatgaatgcttctcaatctggctatgcatcaaccgagtttgcttatggagctggtcatgtagacccaatagctgctactaatcctggactcgtctatgagataaccaaaacagactactttgccttcctctgtggcatgaactataataagactaccgtgaaactcatctctggtgaagccgtcacttgcagtgaaaaaatctcacctagaaacctcaactatccatcaatgtcggctaaattatccggatctaatatctccttcatcgtcactttcaacagaaccgtcaccaacgttggtaccccaaactctacatacaaatcaaaagttgtcttaaatcacggatctaagctcaacgtcaaggtctcacctagtgttctatctatgaagtcgatgaacgagaagcagtctttcactgtgactgtttcgggcagtgagctccattcagaactgccttcgtctgcaaatctaatttggtctgatggaactcataatgtgagaagccccattgttgtttatactggtgacttctcacaaccatcttcatcataa

SEQ ID NO: 170796 - DNA, 689 bp, Arabidopsis thaliana landsberg
tggtggggctacctccaacgggcatcggcctgagcctgatcccgggccagctgggcaagctgctgggctaccacaccgagaccagcggcttcctcgccggcctgctggcgctgctgcgcaacctcggcagcacccactggccgaccctcgccctgggcgcggccaccctgctgctgatgatcctgctgccgcggcgctatccgaagatccccggcgccctggtcggcgtgctgttcgccaccctggccagcgtggcgctgggcctggaccgctacggcgtcgccctgctcggcgccgtgccccagggcctgccggagctgagctggccgcgcaccagcgtgcaggagatgggcaacctgttccgcgacgccctgggcatcaccatcgtcagcttctgcagcgccatgctcaccgcccgcagcttcgccgcgcgccacggctacagcatcgacgccagccgcgagatggtcgccctgggcgtggccaacatcggcgccggggtgtcccaaggcttcgtcatcagcggcgccgactcgcgcaccgcggtcaacgacatggtcggcggccagacgcagatggtcggcatagtcgcggccctggtcatcggcctggcgctggtgctgttcagcgcaacgctgggctggattcccatgccggccctgggcgcggtgctgctgatggccggctgg

SEQ ID NO: 170797 - DNA, 521 bp, Arabidopsis thaliana landsberg
ttatctccgactcccaaatcaaatgatctcatcatggagatattgtcgagattacctttaaagtcattagcgaggtttcattgtgtgtcgaagctatgggcatcaatgtttggtagtccatatttcaagaacttgttcttgaccaggtcatcggctaagccgcgcctcttattcgccttagttgagaaaggcgacgttaaagagtaatcatgtggtgtgtggagctttttcttgtcgcttcagcttgagaatttatatgaggaatcgtcgtccactcttgtagcagctgccgaatttcatggaaaattctctccaaacaatcattatgttaacctaaaaaaaagtcacgtggctacgcctctggtttagtttatttccatggtagttaataccagggtggacttctgatatgtaaccccatcacaagacatcatgcagttttaccgaagctctatagttatagactggcatatagctttttcggattcgaaggggacgtgtcatggttgctgtttacaacc

SEQ ID NO: 170798 - DNA, 1763 bp, Arabidopsis thaliana landsberg
ggttttgatctttcttgctggtttttggttctttataggccattgagtgaggatgaagctagaattcatattccggtggtgatttcttgtaatgagaaccgtagagaagttgctgccactcagagtattgctggaaagcatattgatagacattttgctttcgataaggttataaagttgataaagttgccttgaagcttgtttcttgactatgcttgtccctcaattttctcattttctctttgaccttctcaggtctttggtccagcatctcaacagaaggacttatatgaccaagccatttgtccaattgtgtttgaagtacttgagggttacaactgtaccatatttgcgtatggtcagaccggaactggaaagacgtatacgatggaaggaggtgcaaggaaaaaggttggctcctctaaaacgaacctaacatgattctgtatgattcagatgtatttgtcatggtttttaataaatagctacggttgctatttgtagaatggtgagttcccgagtgacgcaggtgttattccaagagctgttaagcaaattttcgacatattagaagctcagggggctgaatatagcatgaaggtcaccttcctagaactatataatgaggaaatctcagatcttttagcaccagaggagactataaaatttgttgatgagaagtctaaaaaatcgattgccctcatggaagacgggaaaggaagtgtctttgtccgtgggttagaagaagagatagtaagtacagcgaatgagatatacaagatcttagaaaaaggttccgcgaaaaggcgtacagctgaaactcttttgaataagcaaagtcgtcgctctcattcaatattttccataaccattcacatcaaggaaaatactccacagggagaagagatgatcaaatgtgggaaactaaatcttgttgaccttgctggctcctagaatatctcacgttctggtgcacgagaggtatactttattttattatcatcgtctctgaggtcagggtcttccaggcagtcatggaagctagtgctaagcattttgacaactgttattgcagggacgagccagagaagctggagagatcaacaagagtttacttactcttggccgtgtcattaacgcgcttgtggagcactctggtcatattccttacaggtacaagtgatcacttgatagaaaacgataataagtaatctccttgttcttggtgtcttcagtattggtttgacattagagtatactcagctattgcttttgaattttcagagatagcaaattgacgaggctcttgagagaatcattgggaggaaagacgaaaacttgtgtaatcgccacaatttcaccttccatccactgtttagaagagactctaagcactttggattatgcacatcgcgccaagaatatcaagaacaaaccagaggtgagtcttagcgacattcttctgcaatattatctcttgaataaaacaacagctctaacagcttcctctttgattccagatcaaccagaagatgatgaaatctgctgtcatgaaagatctgtactctgagattgacagtctgaagcaaggtatcagtatgatcattttatccattagtttcaaggcattccttaataactttcctctattttcttagaggtatctgcgcaagagagaagaatggcaccctatattccaaaagaccgctacattcaaaaataggctgagaaaaaggtttaacttttctctgaatgaatggttc

SEQ ID NO: 170799 - DNA, 1890 bp, Arabidopsis thaliana landsberg
  unsure (1)..(1890): unsure at all n locations
atgcaggttgctggcgagcgatatggttctcttggtaaccttgttgagtctgtcgcatctcaaagagcagctccatctcgtgcccatttgaatgccataaataatagaagaagaggggaaaatgaaaagaatgattcagaaaaaaaaacaaaagaaagaatttctgagaaggtacatgaaccgctaatgtactgtttcatactggttagtactgtttcatactgggaattatgacagcttatattctaacttcgtgacgtattttatttgaagggtaataatcgggagtatttgaaaggtgagtcgttgaaccatcgtgtattgagagcccccaaaaccgacccttctttatcctggggaaagagaaagagccaaactcatagaaacgaagactcgaagctgatatctgaagctgcagctcacatgaataagttttccaatgacggaaatttcatgaaggaaatgctttctaagcagaagaatgtatcagtgtctcccgtagagactcgtggagatcacagaagtgatgtggagcaggaagcattaccgtcagagaccaataaggatgacgaagggactcttccgagtatggaaaatttaagtgtgaataaactggctgctaaagccttacagctccgtatgaaggggaaacatgaagaagcccagaaaattatggtgagacaataactttgaaattcccaatcattcacttgccttgtgcctgagtcttttttctaacagtttttcctgagtctgattagttgagctgtttttcctgcttacttctgaagtgaattctcttaatatttacaggaagaagcggaaaggctgaaagcaaaacaagctgttggagacgattcatccaaagaccaccactccatcagaaccgcagtgaggtaagtttagtttacttttatttctgagctgtttagggcgtttcttttttttttgccaaatcgttctcattttacaatgcctctttttcttactcattagatatcctgtcaaagatatgtcgggtagaaggaagaatgaagatgatacggatatgcatctagccaagagcataatgcagaacaaacagtacaaaacatcgaatcaagctgctgatgatgagtatgaatatggagacgctccaagcaaaaagtcccggaagcgggaatcgtcaagtaacattcctgaaaaggacaaccgtgtgaaacgtattatgacccagcaagaacgctgtctcttctgttttgagaacccaaagcggccgaaacatttagttgtgtccattgccaacttcacctatctgatgttaccacaacatcagccccttgtccaaggccattgctgtatcttgccaatgcagcacgaggcagccagcagaagtgttgacgacaatgtttgggacgagattcgtaatttcaaaaagtgtcttataatgatgtatgcaaaagaaggaaaagacgcagtgtttctggagacagtgattggtttgtctcagcaacgtcgccactgtttgatcgagtgtatcccaatcccccaagagatagcaaagaaggtctttatacttaagaaggcgatcgataagcggaaagtgaatggagtcagcacaatgcgaagaagctcatagacactagcgtgaaaggtctgaggaactctataccgaagaatttcccttacttccacgttgagtttggtttagacaaagggtttgttcacgtgattgatgatgaacaacagttcaatagcaatcttggactaaatgtaatcagaggaatgctcgagttaccagaagaagatatgtatagacgtagaaggcaggagtcggtggagagccagaagaaggcggttgcgacctnnnnnnnnnnnnnnnnnnnnnnnnnnnnnnnnaaacagcttgat

SEQ ID NO: 170800 - DNA, 551 bp, Arabidopsis thaliana landsberg; identical to SEQ ID NO: 32307
  unsure (1)..(551): unsure at all n locations

SEQ ID NO: 170801 - DNA, 559 bp, Arabidopsis thaliana landsberg
tgctatcccccctgtccggaccctgagcgggcgctaggcctgccgccgcattcagactatagttgcatcaccctccttctacagaacttggacggtctcaagatcttcgatccaatggctcacggtggatctggccgttgggttggtgtcccacaagtcacaggtgtacttaaggtgcgtttcaactgtaccggtttagacgtaaacagaaataattgaaacgtttagatccaaaacaaaaaatgtaatcaccatgcatcttcgctcttttttctttatttaggtccatattggtgaccatgtggaagttctaagcaatggattatacaagagcatcgttcataaagtcactttgaatgaagagaagacgagaatctctctcgcgagcttgcatagcttgggtatggacgataagatgagtgtaccgcgcgaattggttaacgatgaaaatccggttcggtataaagagagcagctttaacgattttcttgattttcttgtcaaaaatgacatttctcaaggggataggtttattgacactctcagaatcaaggactga

SEQ ID NO: 170802 - DNA, 644 bp, Arabidopsis thaliana landsberg
atgtgaggtgttcatccaaacacacactaagtcggatggcacttatgttgatcggaaggcggagaagattgctctaacttatgagcagaatgtgagagataagctgtttaaactggaggcttcagcttctgatgtctctgatggcacttcacgacctctggatctcacaatagatgagtatacagccatctttctcgaggtaagatgttgtagtctaattcagagtcttgtccattgttttaaattcagtcactaattttcttcctctctttttcttgcagcccactgatagggatgcaagaggcaatccttatggacttggatgtctgaaagacactctaggcagtgccaaccgccaactccccggagactcagcatcctttcaagatttagaagaacggctgcaagaagctcaacagaaaattgaagagcaggctgcgtataatgagaagcgggatgctgagattgcagcccgagaagctgagtcagcccgactcacatctgagcaaaaggacaagctcgaacacttgtccttagtcgagaagtatctccgccaaaccgatccacaattcttggacttcatggccactcactcttccacatccactgagcgtctcccaaatactccacctactgctccatag

SEQ ID NO: 170803 - DNA, 561 bp, Arabidopsis thaliana landsberg; identical to SEQ ID NO: 79686

SEQ ID NO: 170804 - DNA, 1230 bp, Arabidopsis thaliana landsberg
  unsure (1)..(1230): unsure at all n locations
ttgctcaggaagccagaaacattgaagactttctggagaacttcaaagatgaccccacagtcaaaattcctggagtatacaagaatctttgtggtccgcgggttctggtaatggagtggattgatggtattcggtgcactgacccacaggtatgactttcaaaaagggggacaactcaaaataaattcccctataccctcctaaaaagtcaaaattaaagtacattctgatactgactcttactaaatgtactcaggccatcaaggatgcagggattgatttaaatggattcttgactgttggcgtaagtgctgctctaaggcagctgttggaatttggattgttccatggagatccacatcctggaaatatctttgcaatgcaagatgggcgtatcgcttatgtggacttcggtaatgttgctgtactgagtcaggtaatttgagtttaatggttccaaggtatctagtatagctagcttatgtcccttcctatagtgattttcacatctatatatagagacttgttattcatagtccaaactaaatctttttttttctcagcaaaacaagcaaattttgattgatgctgttgttcatgcggttaatgaggactatggggagatggcaaatgatttcactaggcttgggttcttggccaaggataccgatgtttctcctatcgttccagctttagaagccatctggcagaactctgcagggaaaggacttgcagatttcaatttccgaagtgttacaggtacttgatatattgcattcctcaagcaagtttgttttgtttactgagcaccccatgcacatttgaagaaacggtgtcacgtttttggtgcaggacaattcaacaagcttgtgtacgnnnnnnnnnnnnnnnnnnnnnnnnnnnnnnnnnnnnnnattcgttctctgcttacgcaggagggtatatgtttcacactgaagcctgattttaaatttctagaggtgaagtctcgtttagtattttgattctttcttttcaaagttaggattagctgacatataaatcctgaagtgagcagatactagctatatgttcacttatatttcccttcccacactaaaagtgaacattttatctagggtgcttatccatatgtagcaaaacggctcctaacggatccaaatcctgcacttcgggaacgctcgatacaggttaaattgataattctgatttagtttcataaatgctatg

SEQ ID NO: 170805 - DNA, 583 bp, Arabidopsis thaliana landsberg
atcgacttcgacgggcatctctaccgccaggatattgccgctcaaaggcccatgccgacatgctggccaagcaaggcatcattgcggcgatcgatgcaaaaaagatcgctcacggtctagacacgatcctgtcagaaatcgaaggcggcaaatttaccttcaagcggtcgctcgaagacattcacatgaatgtcgaaagccggctcgccgacatgatcggcgcgccagccggccgcctgcataccgcgcgctcgcgcaatgaccaggtggcgaccgatttcaaactgtgggtgcgcgacaccatcgacacgctcgatgccgcactcaaaggctatcagatcgcgcttgccgaaaaggcgctcgatcaagccgcgacggtcatgccgggcttcacgcatctgcagaccgcgcagcccgtgaccttcggccatcatctgcttgcttacgtcgagatggcgggccgcgaccgcggccgctttgccgacgcgcgcaagcgtctcaatgaatcgccgatcggctccgagcgcgctagcgggcacctcgttcgatctcgaccgcgatatgacgacggcctcgctcggct

SEQ ID NO: 170806 - DNA, 1156 bp, Arabidopsis thaliana landsberg; identical to SEQ ID NO: 10023

SEQ ID NO: 170807 - DNA, 654 bp, Arabidopsis thaliana landsberg
agttctggacccgcctgccggtgatactgaatctcgcgctgcagaccgtcttcaagtacgctggcttcgtcgcgggcatgattccctttgtgccgaccgactgggtgcgtgcgctcaaggacatccccctgccgatcgagcatctccttctacaccttccacggcatcagcatgatcgtggacgtcgcccggggcgaggtgacccgcgagggcgatgcgatgctctcccgcggcagccgctttgcgaagggcgtgcgggacatcggcttctacctgctcttcttcccgcagctcgtcgccggcccgatcgtgaaggcgaagcagttctggccgcaaatcgccgccaagcgcttcgcggacatcccctggcagcaggccatccgcaccctgatcctcggctatttcctgaaggtttacgtggcggacaacctgtcggagcagaccggcttgctcaccatcggcaccgagcagctcgccacctccagccccttcttcctggtcccgctgctctatgcctacagcctgcaaatcttcgcggacttcggcggctattcgctgatcgccctcggcctcgcgtcgatgttcggctaccgcttcccggagaacttcaatttcccctacctctccgtcagcatcaccgagttctggcggcgc

SEQ ID NO: 170808 - DNA, 309 bp, Arabidopsis thaliana landsberg; identical to SEQ ID NO: 39812

SEQ ID NO: 170809 - DNA, 472 bp, Arabidopsis thaliana landsberg
  unsure (1)..(472): unsure at all n locations
tgacacgcgctacaccaatctcagctacggttttccgacccagccctgtccggagggcatcctgacgacgatcccgttcccgccgtgctgggacggcaagaacctggacagcccggaccacatgagccacgtcgcgtacccgcagggagactacagcaagggcgcggcctgcccgccgagccaccccgtgaatatcccgcaggtcctgnnnnnnnnnnnnnnnnnnnnnnnnncgttcaacgaccccgacctgtggccgacggacgggtcccagccgtttgtgtggagcttcggggatcgcgtgggttacggccaccacggggattatttgttcggttggcggggcgacgcgctgcagaggacctttgacagccggaattgtggcggggatcagatctgcggtctgccgctgcagagtattccccaggcgaataaatgcatgctggagcctataggagaaggaggacgttga

SEQ ID NO: 170810 - DNA, 395 bp, Arabidopsis thaliana landsberg
atggcagtatttactccggtcagtttgcatgaccttgatcaatggatgccgcaattcccgcttggtaaagcactcgccatcaagggcatttcatccggcattgaaaacagcaacttctttgtgacgaccgaagcaggcgaattcgtgctgacgctgttcgagaacctgacgtttgagcagttgccgttttacctgcaattgatgcgccacctggccgaccgaggcgtacttgtgccggcaccgattgccaatgatcgtggcgagatactgcatacactgaacggcaaacctgccgcgctggtgaccaagctggaaggcggccatcaaatggcccctgcccccgtgcattgcgccgctgtcggtgcgatgctcgccaagatgcatttgaccgcaca

SEQ ID NO: 170811 - DNA, 748 bp, Arabidopsis thaliana landsberg
atggatattcccgtatttactatggtcggtgagtgaaaatgcaaagaaggagaatggaaatttgaacctgaggaaggcatgtttggtcgttgtgtacgcgttcaggaaaacatgctgtacacggactttgtccgtacactccgagagtctttcagtttgaagtccaccgagatcaatcccataattagctactggatgccgggagaaatgtcagtgctgatagatactaaacgccctcctgtatacattgacagtcagatgggtctcgaaacgttttttttggttcgtggtgggtatctttctctcaacttgttcgtctctttcaataatacagtgaaggcgttcgggaatactgtctctaggtctcatggtgaagtttctgaaagtgaccgtgtgtttgatagtgctacaaatgttgatgaaaataatgaggatgtagaggagcaagccgatgttgaagacgatacaacagaagaggatgaaatggaggagggcaacgaagatgatgatgggtgtgatgattatctttgtgtggatggatctattgggggaagtaccttgtatcctaccacagacggtagtgaaggtattagcgaagaatacgattacaacaagtggaacgatgtaatagtagaacaatatgtacaaggaaatcttgaggaagacgtcagtctcactcaacagactgctcaacatccaggggaattcagtcgtttattggaaacgtgtacgtacacgggtcttagtg

SEQ ID NO: 170812 - DNA, 999 bp, Arabidopsis thaliana landsberg; identical to SEQ ID NO: 33283

SEQ ID NO: 170813 - DNA, 459 bp, Arabidopsis thaliana landsberg
ttgccgcgcagcgcggcgattaccgcgtcggcgttgctcatgacttctccctgcgtcgtgatccagcggtcatggcccgactataggccgtgcggtcggcgcgtgccgtgcgccggagaacaacggcggcggaggacaataggggatgtgccgcttatcgccgtcaatgacattcagctgtattacgaaacgcacgggaccggggctccgctgctgatcatcggcggcctcggcctcgatgtgtcggagatgacgaacttcaccgtcccgctcgcggaacgcttgcaggtcatcgcgatcgacaaccgcggcaccggccgcaccgacaagcccgaggtgccgtactccatcgagcagatggcggacgacgccgccgcggcactgggcaagctcgggatcgcccgcgcgcacgtgctggggatctcgatgggcgggcggatcgcgatgaccctggcgctg

SEQ ID NO: 170814 - DNA, 623 bp, Arabidopsis thaliana landsberg
gaggcagagagtgaatatgagcttgtggaagtgagtactggtgggaaacttgggaggcacaatgttcatgtgcagcagcttgggcctgatacgctcacagagctaaccacgtttcatatgtgtgtcaacgagcagactcttgatctccatagcaaaattatcttagaccatccacgaggcgcttcacgacagcttcacaagtgtattgttgctcattcctctggtcaagctgttttcgatggcaatgtccgagttaacaggtaaacttttcagtttggtttggtgtgcttagcatcggtttaacttctgtgtggtaatatgcagattcgctcaacagaccaacgcgggacaactaacacggagcctccttctgaaaccccgagccaccgtgaacataaaaccgaatcttcagatcattgcagatgatgtcaaatgctctcatggagctgctatcagtgatcttgaagaagaccagctcttctatttccaagctcgtgggatcgacttggagactgcaagaagagctctcatatcgtcttttggatcagaggttatcgagaagtttccaaatcgggaaatcagagaccaagccaggaatcacgtcaaaggcttgctctgatgtg

SEQ ID NO: 170815 - DNA, 889 bp, Arabidopsis thaliana landsberg; identical to SEQ ID NO: 17032

SEQ ID NO: 170816 - DNA, 971 bp, Arabidopsis thaliana landsberg
  unsure (1)..(971): unsure at all n locations
atgaaagagaacgtgatcatatattttaaattccaaggtcgcatgtataatgtgannnnnnnnnnnnnnnnnnnnnnnnnnnnnnnntcagtgttagaagataggataatgacgaagcttggattagatgcaaataaggtaaaattgcatatgaggtacaatccacggttgttcggagtagaggaagaaatgaacgtttgtgatgatgaggatgtctttgtttatgtaacatccgcaaaaaataactggagaagtgttttggttgtggaggagatctctaaaccgcccgaggaggagcaattgagcgagcaattgtatagagttggtaaaagttgtgttggtaagaactatacggagttgaattcagaggaggatgaaatgagagtggatgatggtgcactcatcttcttattagaagaggaacaaggaactcaacatcaacttgaggcaatagtggaggaggatcacgagactcaagaagatgaaacacgctatgatgagtctatggataattctgataggggggaacagtatgttgagtcgccacctgctgtagaaccgggtatgtttaaaaaaaaatgggaagacggaattgggttgaccttacgtcaagaatttccaaacaaggcagcattgcacgaggtggtggatagagctgcatttgctaacagttttggttatgtggttaagaagtcggataaggagcgctatgtcctaaagtgtgccaaagagagttgttcttggcgtttacgagcgtccaatatcagtaatactgatatattctcgattagaaggtacaataagatgcatagttgcactcggctaagtaaatgtagttgtaggctcaggaaaaggaaaggcaacccacaattagtcgcaactctccttcatgatcatttttgagaaactaaaaacggttgtacccgatatttcagaattggtcttcatgacggacagaaatgcaagcctca

SEQ ID NO: 170817 - DNA, 451 bp, Arabidopsis thaliana landsberg; identical to SEQ ID NO: 74275

SEQ ID NO: 170818 - DNA, 402 bp, Arabidopsis thaliana landsberg
aatcgccagctggatgccaccttgcagtcctcgggcctgggccaggcggccatccgcgacctggcggcgacattgccagtggtattcgtgccaatcccagccgatgtggtggaaaagatcggcaacagcgcctaccaaccggccgttcttccagccaagacctatgacgggcaggatcaggatgtccccaccgcggccatcaccaatatcctggtcacccgttcggatatcagcgacgaactggcctaccagatgactcaactgatcttcgacaacctccctcgcctggccaccgcccatgctgcagccaaggatatcgacccacagcaggcggcgaagaacctgccgattcccctgcacccaggtgccgaacgctacttcaaggaaaagcagttgcttccg

SEQ ID NO: 170819 - DNA, 1237 bp, Arabidopsis thaliana landsberg
ttcatctatataaccagagttttacacgcttgagttatgattgcatctcactaggctatcgtatcagatctgcagatattcgctgaatttgaccctgttccaattgcaagtgcttccattgctcaagttcatgctgctcgcactcatgatggaagcaaggttgctgtcaaggtactcgtttactttacatgttgcggataattaaagatcttggacttgttaagagtaagtttgtatttattctattatgttcttaaatcttttttctgcaggttcaacatgcgcacatgacagacactgcagctgcggacactgcagctgttggagttttagtgaataccttgcaccgaatattcccatcatttgactataggtgcagccactttctctttttctgtagacaattcatattgtgtgagcctctagcaaatagcttataccggctcatgtatgcaggtggttgctcgacgaaatgagtgaaagcttaccaaaggttggtgtctttagttgattcataagtcataacatatgaagattttctttaataggtttatacagtcttcagtcttgtatatgtttatctgaatattaaggtttctgttctgaagcatttttgtatggtcgccattgagcttttgctgtcactggtttgatattttcattgctcttgtttttattaatgtaattttcatcaggaactagattttttggttgaggcgaaaaacaatgagaaatgtctggataattttaggaagctgtctccccatattgcagagtatgtttatgcgccaacaatctattggaatttgagtacctctaagttgttgacaatggagttcatggatggtgctcaagtgaacgatgttgataagatcagaaagcttgggattcagccctatgaagtatcaaagctcgtaagctctttcatctatgttccttaaaatatcatgcatttcttgaatttagctaaatagtagttgccgttcaagtaagagtttggtaatttcaaagacttatctttataataccttgtagactactatgaagaaacaaactttgatatgctttaaactcttttgttgcaggtgagtcaaacatttgcagaaatgatgtttaaacatgggtttgtgcactgtgacccacacgctgccaatttgaatgttcgtacagatccttctggtaagaggaacatatatggcaagagaaaaccgcaattagtgattcttgaccgatggct

SEQ ID NO: 170820 - DNA, 566 bp, Arabidopsis thaliana landsberg
  unsure (1)..(566): unsure at all n locations
ttcctgtcaacacgcttcacgctgcgggttatgtttcaatcggatgtgagccatgcacgagagcggttttgcgggtncagcatgagagagaagggagatggtggtgggaagatgctaaggctaaagagtgtggccnnnnnnnnnnnnnnnnnnnnnnnnnnnnnnnnnnnnnnnnaaccgctaatgtcaacgggacagcctcagtcgcggatatcttcaatagcgagaatgttgtgaacttgagcaggcaagggattgagaatttgatgaagttagagaaccggaaagaggcttggatcgttgtgctttatgcaccgtggtgcccgttttgtcaggcaatggaagcttcattcgatgaattggcggataagctgggaggaagtggtgtgaaggttgctaagtttagagctgatggtgaccagaaggactttgccaaaaaggagttgcagcttggaagctttccaccaatacttgtgttccctaagaactcatcgagaccgatcaagtatccatctgagaagagagatgtcgagtctttgacttcgttcttgaatcttgtccgataa

SEQ ID NO: 170821 - DNA, 808 bp, Arabidopsis thaliana landsberg
aacccatcaacattttttagtctatatatatataaaaagaaaagtattgttttgtgaatttacgtggtcttgattgttttaaaatggtcaatttcttgtgggtcacgagaaaggacttggaagaagtaactggaggattagggttcgaaaagagagtgaaagagcatgggatgattgtgagagattgggtagaccaatgggagatattgtcacataaaagtgtcaaagggtttttgagtcattgtggatggaactcggcgcaagagagtatttgcgctggggttccactactcgcttggccaatgatggcagagcagccactcaatgcgaagttggtagtggaggagctaaagatcggagtaagaatcgaaacagaagatggaagtgtgaaaggattcgtgacaagagaagaacttagtcgaaaggtaccgtatatataccctttcatgtttccatcttttgttttaattggtgtcatgcatatattagaataaaatgttttgaatatggtaatcatggctttgctttttgactaacaaattaacaagaaggaagcctctttttccgtttgactgtagagtaccccttgattgtatttattatttgtactatttaggttaaacaattgatggagggagagatggggaagacaacgatgaagaatgtaaaagagtatgcgaaaatggcgaaaaaagctatggctcaagggactggttcgtcttggaagagtttggattcgcttctggaagagctttgtaagagtagagaacccgacggtgttaataagttgtcaagttctgatgcttag

SEQ ID NO: 170822 - DNA, 1309 bp, Arabidopsis thaliana landsberg; identical to SEQ ID NO: 34626

SEQ ID NO: 170823 - DNA, 1232 bp, Arabidopsis thaliana landsberg
tgtgggaagagttgtaggctgcgatggacaaactatctgcgtccggatttgaaacatggccagttctcggaggctgaagaacatatcattgtcaagtttcactctgttcttggtaaccggtatgatcactactcactagatctaattaactacggttttatgattttcttgaaaagatttaatctaggtgtataaattacagatggactcataaatatcgggtttctttactaagtttttgaaattttgatgctgacttactgatgaattgtttttatgagttttttgacaagtttcttgggacacaagaaactgaataagacataagttttgttctatataccataataccaaatctaagtatagggttttaaacttttgggaacttttaattttctataaatttgttttcgactcataaatagagtttgatgatgtattgctgatgaatagtctgggatttttcatgagaaacaacagttaacatctttcttgggaaacatttaataatcttttgacatatatggttcaggtggtcgttgattgcggcgcaacttcctggtcggacagacaacgatgtgaaaaattattggaacacgaagctgaagaagaagttgtcaggaatgggaatagatccggtgacccacaagcctttctcgcatctaatggcagagatcaccactacacttaatcctcctcaggtttctcacctagccgaagctgccctcggctgtttcaaggacgagatgcttcacttgctcaccaagaaacgtgttgacctaaaccaaatcaacttttcaaaccataaccctaacccaaacaactttcacgagattgctgataatgaagctggtaagataaagatggatggtttggaccatgggaatgggataatgaagttatgggacatgggtaatggattctcatatggatcctcttcgtcttcgtttgggaatgaagaaagaaatgatggatcagcgtctcctgccgttgcagcttggaggggtcacggaggaatacgtaccgcggtagctgaaaccgcggcagcggaggaggaggagagaaggaagctgaagggagaagtggttgatcaagaggagattggatctgaaggaggaagaggagatggaatgacgatgatgaggaaccatcatcatcatcaacatgtgtttaatgtggataatgtcttgtgggatttacaagctgatgatctcatcaatcatatggtttga

SEQ ID NO: 170824 - DNA, 468 bp, Arabidopsis thaliana landsberg
tagaatactgatgctgcatcttattctacaggctgtcccaacatcaaaaggacaagctcttgctgatgagtatggaatcaaattctttgagacggtgagtgcgaaaatatacaatatgtgtgtcacctcattcattgtttgtttgaagattttcattttcttaaatatgattggaaaatgttgcagagtgcaaaaacaaaccagaatgttgagcaggttttcctttctatcgctaaagacataaaacaaagactcccagaaagcgatacaaaagccgaggtaaagaagcacatggaatctactattcgcttgatactcggattatgaaactgtagatattgctgaggaaaatcaaatactgtctttgttgatttacagccccaagggatcaagatcactaaacaagatgcaaacaaagcctcatcgtcttctacaaatgagaaatcagcttgctgcagttatgtttga

SEQ ID NO: 170825 - DNA, 1577 bp, Arabidopsis thaliana landsberg
gaatacaggtgagttcatgatgtctaggtatagagaagttgccgaaattgtcctcagataccttgaacatcgtgatcgccttgttcgccttagcatcacctcgttactgcctcgcattgctcactttctccgtgaccggtttgtgacaaactatttaacggtaagtgactgagagattcttaaaaccaaaaaatttctggaaacgtgacacgaattactttcttgcagatatgcatgaatcatattcttactgtgttaagaataccggctgaaagagccagtgggttcatcgcccttggggaaatggctggtgctttggatggtgagcttatccattatttgccgacaattatgtctcatctgcgggatgcggtgggtcaaattttatttatttattttgtaattacgttttactacttttgtgtcaaagtattatattgggttttagttttgaaaactgaactagacaagtggctttgttcgactatgttgtccctgtagattgctccacgtaaaggcagacctttgcttgaagctgtggcttgtgttggtaacatcgcaaaggcaatgggatccacagtggaaactcatgttcgagatcttttagatgttatgttttcatctagtctctcttccacacttgttgacgctcttgaccagataaccatcaggtaaagttgaacgaaagaagtttgttattacatacattgatgtgtatacgtttaatgctgacaattctttgtatctcagcattccttctttgctgccaacagtacaagatcggcttctagattgcatttcgttggttctttcaaaatcccattattctcaagcaaagcctcctgttaccattgtccgaggtagtacagtgggcatggcaccacagtcttctgaccctagttgttcagctcaagttcaactagccctgcagactcttgctcgtttcaatttcaaggttggcgctctttgcggataacattttctaaagaatatgaaatttctgtctttgagcttctgatttctggcagggacatgatcttcttgaatttgctcgggagtcagttgttgtttatttggatgatgaggatgcagccacaagaaaagatgctgctttgtgttgttgcagactaattgcaaattctctttctggcatcacacaatttggctcgagcaggtcaacacgagcaggggggagacgcaggcgccttgtggaagaggttttatatcatactgaaagcccattacatttttttcttattatgtcttttaatttcactgtttctcattacaaaaggtttctttttattattttccaaatctgaacttaagtatgttaaacatgcttcgtgatggcatttataattgcaataccagtggcggttccaattttctgcttgctgagaaatgatgtttgggttctgcagattgtggaaaagcttctcaggacagccgttgcagatgctgatgtaactgttcgcaaatctatattcgttgctttatttggcaaccaatgtttcgatgattatctagcacaggctgatagtttgactgccatttttgcttccttaaatgatgag

SEQ ID NO: 170826 - DNA, 476 bp, Arabidopsis thaliana landsberg
ttaaaatgcctttgccctgcacgaaccgcaggacggttctgacgcagcctcgatcaaaacccatcacgtgcgtgatggcagcgactatatcatccgtggtcagaagtggttcatcacgtcagcgcatgtcgccgagtatctcgtgctggtggtcaagaccgatccggcggcccagccggcgcatgatgggttcagcctgtttctggtcgatgccaaggcacccggtgtttccattcgcccgatcgaaaccatgggacgccatacgacgcacaccaaccatattttcttcgacgaggtgcgcgtcccggcgcgcaatctcattggcgagaagaacaaaggctggcgtatcctgatgcgcgggctgaatctggaacggatggcgattgccgcatacggcccgcccaatgcgcagaaggccatcgatattgagcaagaatatgcgacgcagcgcattcagttcgatcggccgatcagca

SEQ ID NO: 170827 - DNA, 1155 bp, Arabidopsis thaliana landsberg; identical to SEQ ID NO: 29857

SEQ ID NO: 170828 - DNA, 1015 bp, Arabidopsis thaliana landsberg
agactcgaccagttggagggtagtatcattagaaggtgcaagaagactcagggaatttttgaaccagggtaatgtcatcgagctctttgtatcacaattatatttctgtttgtgaattgtcttataattgacttgaggtcataaaactctttgtaatgttttttactttagaaactagtttcagtcaagttaagtgcttgtgacttaatcgtttaacttaaatgaacttgtttagctaacgtcgttaactaaatgaaaaaatcaaaccttttgtactatctagaatctttgaagttagtatttaaaaaaaaaaacctagaagctttggcgactttagcataatttgcttgacacaaaactgatcacatcaacgactcaaagtctcagcctctcaaactctccatgtctgaagaatttcaaaccaaaatctcaaagtctctgagatatagattcgtaatggtaagttgatttattgattatgaatcaattttgtactttgattggaaaattatcgaaagttattcattgttttgtactttattaattattataggattctgaagattttcctgagtttggatcaattgacttagagtctcaaagagacatcgaggctgaaatccaccgtaatagatttgatgaaaacaaacaaagaagatttgatggagcagaaacatctaaatctcgtaaaagacaaagaattgatatttcggatgaggatgtcaatgataatgatatcaaaggcgacaacgacgaaaaaagacatcaacaccagaagatccggaaccgaagaagagaaagcagtatgcagattgttgggaacattttactgtgatttggaagaaagataagactgggaaagcagtagaaagagcgcaatgcaagcactgcaagaatgattatgcatatgatccacacaaaaacggtactaaatcttacaattgccactaggaaaagtgtaagatttggcttaggaatgctgatattgttacaatgatggtcaatgcagaggcaa

SEQ ID NO: 170829 - DNA, 270 bp, Arabidopsis thaliana landsberg
atggatctttgtcgaagctcgattttgcttttgatcattgcgttgttatctcctaggacactatcaatgcgttacgaactaaagtcttcgaaaacgaaatgtatcggagaggagattcacgaaaacgccatgtccattggtaaatacttcatcgtaaaccctaacgaagataatcatcctcttcctgattctcacaagatcatcgtcaaggtatagatttcatcgcaaatctcacaattgatagatttttttaaaaacattatttgttat

SEQ ID NO: 170830 - DNA, 1696 bp, Arabidopsis thaliana landsberg
  unsure (1)..(1696): unsure at all n locations
cagcgcctatatacattctcaagcatacttctatacactaatgggagagcgtcttacttctcgggttcgcttatccttgttctcaggtaaacacaattgtattgaaacatctctgtcttggattgattcgattcttgaatacttataaatgtatacaacaactgcagcgattctttcaaatgagattggatggtttgatctggatgagaacaacactggctcactcacttcaatcttagctgctgatgcaaccttggtgaggagtgctatagcggatcgtctatcgacaatagtccaaaacttgtctcttacaatcacagccttagcacttgcctttttctacagttggcgtgttgcagctgtcgtaacagcttgttttcctcttctcattgccgcttcacttaccgaggtaactcaaaatcaaatttcctctcaaaccaaattttgaatcttgaaactgaataagcttgaatgttatattttacagcaattatttctaaaaggctttggaggagattacacaagggcttactctagggcaacttcattggcgcgtgaagcgatttcgaatataagaaccgtcgctgcatttagtgctgaaaagcaaatctcagatcagtttacttgtgatctaagcaaacccaccaagagtgccttactcagaggtcatatctcgggatttggatacggtttgtcacagtgtctcgcgttctgttcctacgcacttggtctgtggtatatctcagnnnnnnnnnnnnnnnnnnnnnnnnnctttgaggatagtatcaaatctttcatggtattgctcgtcactgcttactccgtagcggaaacgcttgcgttaaccccagatatcgtgaagggcacacaagcactcgggtccgtatttagggttttacatagagagactgaaatacctccagaccagcctaactcaagattggtcactcatatcaaaggagatatagagtttagaaacgtgagctttgcgtatcccactagacccgaaatcgccattttcaaaaatctaaatctccgagtttcagccgggaagagtcttgcggtcgtgggacctagtggttcgggaaagagcacagtgatcggactaatcatgagattctacgatccgagcaacggaaatctctgtatcgatgggcatgatataaaatctgtaaacctacgtagcttgcgcaagaagctagcgttagttcagcaagaaccggctctgttttcaacatccatacacgagaacatcaagtatgggaacgagaacgcgtcagaggcagagatcattgaagccgcaaaagccgcgaacgcgcacgagttcataagcaggatggaagaagggtacatgactcacgtgggtgataagggagtgcagttatcaggtgggcaaaaacagagagtggctatcgcacgggcagttctaaaagatccttcagtgcttctccttgatgaggcaacaagtgctttggatacgagcgcagagaaacaggtccaagaggcgctagacaagttgatgaagggacgaaccacgattctggtggctcacaggctctcgaccataagaaaagcagacacaatcgttgtattgcataaaggaaaagttgtggagaaaggaagtcacagagaacttgtatctaaatccgatgggttttataagaaattgacgagtcttcaagaagcggtgtgactg

SEQ ID NO: 170831 - DNA, 1629 bp, Arabidopsis thaliana landsberg
tttgattgaatatgcagagaatgtgttcgacgaaatgtctgtgagaggagtagttccggattctagttcttataagcttatggttattggttgttttagagatggtaagattcaggaagctgatagatggttaactggaatgattcaaagaggatttattcctgataacgctacatgtaccttgattctcactgcattgtgtgagaatggtttagtgaatagagcgatttggtatttccgtaagatgattgatctagggtttaagccaaacttgataaattttacgtctttgattgatgggttatgcaagaagggtagtatcaagcaggcttttgaaatgttagaggaaatggttagaaatgggtggaagccaaatgtgtatacacacacggctttaattgatgggctatgtaaaagaggatggactgagaaagcgtttaggctgttcctggaactcgttcgtagtgatacttacaaacccaatgtgcatacttatacttcgatgattggtgggtattgcaagggagataagttgaaccgtgcacagatgttgcttgagtagaatgaaagaacagggtttgtttccgaacgtgaacacgtatgcaacgctcatcaatggtctctgtaaagcaggaagcttcggtagagcgtacgagttgatgaatttgatgggtgatgaaggttttatgccgaatatttatacgtataatgcagctattgacagtctctgtaagaaatcaagggcacctgaggcatatgagttgctgaataaagcattttcttgtggattagaagctgatggagttacttacactattcttattcaagaacagtgtaagcaaaatgacattaaccaagctcttgcttttttctgtcggatgaataagactggttttgaagccgatatgcgcctgaacaacatactgatagctgcattttgtaggcaaaagaaaatgaaggaaagtgagaggctttttcagttggtggtgagtcttggattgattccaacgaaggagacttatacgtctatgataagctgttattgtaaagaaggcgacattgatctggctttgaaatattttcacaacatgaagaggcatggttgtgttcctgatagcttcacttatggttcactaataagcggtctctgcaagaagtccatggtagatgaagcttgtaagctttcctaagcgatgattgacagaggtttatctcctcctgaggtaactcgagtcacattagcatatgagtattgtaagaggaatgattcagccaatgcaatgattctgcttgaacctttagataagaagctgtggattagaacggttaggacacttgttagaaagttatgtagcgagaagaaagttggagtggcagctctgttctttcagaaattgttggagaaggacagtagtgctgatcgtgttaccttagctgctttcactacagcttgttctgagtctggcaaaaacaaccttgttactgatttgactgagagaatctccagaggagtaggctagtagtgattacatctcccacagttgctttgtactctctgtttgaatagcaaatccacattgtggtggatcaagaaaccgtggaatgtagccgcgttgaggcaatgacatg

SEQ ID NO: 170832 - DNA, 1842 bp, Arabidopsis thaliana landsberg
aaatacgagaaacagagaaggatttgaacggtatcaatggtggattgcttgaagaagaggtaaagacaagtatagaaacagagatctcacatgattgggacaatgctagtagttattcgaccaaagagattgtgtcggtgcacgaaaatgatgaagaacaaacagtaaactctgtttctgttcctgttgttgtaatcaatgattcttcagacgatgatgagtcttttcattccgttggtggtggctctcagtattcaaatccaagattgtcaaatgcttcctctgcttctggtagtgttaacgttggttcctctcaacgcttctcagaacacaaattggatattcctgaatgttctagaagcgacttcggaatctctgtatctgctccaccaccaccacctccaccgcctccaccgcttccgcagttctctaacaaacgtattcacaccctgtcttcgccagaaaccgctaatcttcagacgctttcgtcgcaattatgtgaaaaactttgtgcttcttcctcgaagacaagctttccgatcaatgtaccaaattctcaaccgcgtccaccgccaccaccgcccccgccacaacagcttcaagtagctggaattaataaaacgcctccaccgccattgtctcttgatttttctgagcgtagaccattaggcaaagacggagctccattgcctaaactgaagccacttcactgggataaagtcagggctacaccagaccggactatggtttgggataagctcagaacaagctctttcgagtaagtttttaactagccacaatcaacaaaatgtttttcatgaatgtgtgattatgtggtcttgtggttattcagattagacgaagagatgattgagtcactgtttggatatacgatgcaaagctcaacgaagaatgaggaagggaagagcaaaactccatcaccagggaaacaccttcttgaacctaaaagacttcagaattttaccattctcttgaaagctctcaacgcaaccgcggaccaaatctgctctgccttggggaaaggtaaactaatatcaaccaaaatcaatccattgaggagctgatctgatgttaaaatgtttatctgtaggggaaggcttgtgtttacagcaactagaagcgttggtgaagatggtgccgactaaagaagaagagttgaagctgcgtagctacaaaggagccgtggatgagcttggctcagctgagaagtttctcagagctcttgttggagttccatttgcgtttcagagagctgaagcaatgctttatagagaaacgtttgaagatgaagtggttcatctcagaaactccttctccatgcttgaggtattacagtgtttactttatattcgtttattgatttcttgcacttcaagttacggtgattaacacttaaaagtactttactaggaagcttgcaaggagcttaaatcaagcaggttattcttgaagcttctagaagctgtcctaaagactggaaacaggatgaatgtaggaaccatacgcggtggtgcaaaagcattcaagctcgatgctctgcttaaactctctgatgttaaaggcacagatggaaagactactctgcttcattttgttgtacaagagatctctaggtctgaaggaatcagggtttcagacagcatcatgggacggatcatgaaccagagatcaaacaagaaccgaacacctgaggagaaagaggaggattacagaaggatggggctcgatctcgtctcgggtctaaacacagagctacgaaacgtgaagaagacggcaacgattgatctggaaggtcttgttacctcggtgtccaatctgaga

SEQ ID NO: 170833 - DNA, 527 bp, Arabidopsis thaliana landsberg
  unsure (1)..(527): unsure at all n locations
tgcatcagcccgtggaacttcacgctggccatcttcaccgnccagatcagcgccgcgctggtggcgggcaacgccgtgtcgccaagccggccgaacagaccacgctgatcgcctacgcgatggtcaagctgctgcacgcctcgggcattcccgaaagcgtcctgcagctggtgccgggcgacggtgcccagatcggcccggtgctgacatccgacaaccgcgtgtccggcgtcgccttcaccggctcgaccgacaccgcgcgcgccatcaaccgcgcgctggccaaccgcgacgcgccgatcgccgcgctgatcgccgaaaccggcggccagaacgccatgatcgccgactcctcggcgctgcccgagcagctggtcaaggatgtcgtcggctccgcgttcgactccgccggccagcgctgctcggccagccgcgtgctgttcgtgcaggccgtcgtcgccgacaaggtcatcaccatgctaggcggcgccatggacgaactgaccgtcggcgacccggcgctgctt

SEQ ID NO: 170834 - DNA, 1069 bp, Arabidopsis thaliana landsberg
cggaggttgtggggcaggaaggtaatttgttttgactttttgttattaccatcacgatcctttatttactgtcttggacacattcactttctttgtaacttgtttatttgatgttcaatagtggtgtaaaaatggtcaatcaattgcttgcgggagttcatatcgcatcagctgccgaggcaatggcatttggagctcggttaggtctgaatactcgaaagctattcaatgttatttccaacagcggtggaacatcttggtaagcattacgtagatttttatggaatatgtttttttttcttttatctttggaaaattctgtgttacatttctgagcatcaacgtcttaacatttctgatgaaaagtgaatcactctgatgctctgaaaaatgttaactatcttatgcataaagccttgtcttaatgaaaccctgtgctcttgtttgttgatatttacttttacaatttaatgagaaacgcgtttattagcctttaatggctcctatttttcatcttgcaggatgtttgaaaatcgtgttccgcacatgctggataatgattacacaccatactctgctcttgatatttttgtcaaggatttggtaagataagcaacattaatcaatttgtaaatttgttttgttttcttaactttatgcatgagttttgactgtagggaattgttacccgagaaggttcatcccgtaaagttccactccatatatcaacagtggcacaccagctattcttagccggtatcctccagtcttttaactgttctcaattcatcttgcatgtgcatcatttttgtcctaccttcttaacaatacaaattattatttaagagctcattatttgggttgaatacagagttttatgagttgcaaatttcgtgaaaaatattctttgcagtgcttctttctagaatgttgtggagaaccagaaaaactttctacttttactgaactatactactaaaggtgcagcctaatatgtttagagatattttcatttacaggatctgctgcgggctggggacggatagatgatgctggagtggtgagggta

SEQ ID NO: 170835 - DNA, 1238 bp, Arabidopsis thaliana landsberg
atggaatacggagctccgggaatgaaggctggtcgccgggttctaactccacttttcgttctagttttccttcttcaaggtgttcattctcaaacatcacggtatgtgctcttaacttctatgtattttcactgaatcgagctttacaaaatttgtgtaaaagattgttgaaacttaaaagaaataaaatctatttttttttcctcgcaatatttgtgtttattgaattggtcctatgccacgatcctgtacgtattattttaaaattttaaattttaaaatgtaaatgttaaacatattagatttatttccagtttgtatctatcacacagatgaatatctacacataggtcaattcaagtgaacattttttttttttctctctctcttaatttggaattcttcttattacagaaacaaattcaacatcgcaaaagcgggacataaacttgcatctcccccggttacgcttaagaaagttggtgataaccaagtacggttcaaatgtctatacgtataacgttatattcttttatatattaaaatattccggtccaagaatattgttaacttatatatgagatatgcatgcttgtgttgttgttgttaatttaaggtggtcgttgataacggtatcatcgatgttaccttctcgagtccacaaggattaataactagaatcaagtacaatggcttaaacaatgtgttgaacgaccaaattgaaaatcgggggtacagtacttataccttaacttatatagcatgtgatgagaaaagtatcataaacatgagtttcgtcatataaaattatcattatacataggtactgggacgtagtatggtacaaaccaggacaagtatcgtcaactgattagtgagttttcaaatctctctttgtatcttttcgttcatatatatatatatatatatatatatatatatttcataatcatacctactaaatatttatttttatttttttatattaattttatgttctaacagtttagtaggaacaaaattcgatattgtaaatcaaacaagtgaacaaattgaaatttcattttcgagaacgttctctcaacggggctcaggaatcccattaaacgtagacaaacggtacgtcaatttgccgaaaaaaaagagtagtcactacttattttcttttcttttttattggagaagtttaatcatatagattatcatataatcgagaatgtttctttaaagatatatta

SEQ ID NO: 170836 - DNA, 703 bp, Arabidopsis thaliana landsberg
ttggcgatggataagaaaagtggtggaactaaagcaatagaagaagcaaccgttccactgttggaatgtcataatgcggcagaggaaggcggaggaatgaagagagaaatatggatagagactaagaagatatggtatattgttggaccgtcgatatttactggactcgctacttactcgatcctcatcattactcaagccttcgctggccaccttggtgatcttgaactcgctgccatctccattatcaacaacttcacactcggcttcaactacggtttactcgtatgtgcacacttaattaaaaatattttcgagattgtattataatgtttatgcatgttacatattctgaagtttaatctatgagaaaaatgcttgtgcagcttgggatggcgagtgcgttagaaacgttatgcggtcaagcgttcggggcaagggaatattacatgttgggagtgtatatgcaacgatattggatcattctattcttatgttgcatcttgcttcttcctatgtacttattcgcgacgccaattcttaagtttattggtcagagtgacgacattgccgagcttacagggaccattgccctttgggtcatccccgtccacttcgcctttgccttctttttccctctcaaccgattcctacaatgtcagctcccgaacaaggtctactccttggtcgtagattgttaaaa

SEQ ID NO: 170837 - DNA, 641 bp, Arabidopsis thaliana landsberg
  unsure (1)..(641): unsure at all n locations
tgatcgtcgccggagaaagcgacgagacggtgagagatatggtaataagtatcataatggcggggagggacaccacgtcgncggtagccacacggctgttttggttgatcaccggtcacgaggaaaccgagcacgatctggttagtgaaatccgatcggtcaaggaggagataacggggggttttgattacgaatcattgaagaaactgagtttgttgaaagcgtgtttgtgtgaagtgatgcgattgtatcctccggtgccgtgggactccaaacacgccttaaccgatgaccggttaccagacggtacgttggtgcgtgccggagaccgggtaacatattttccatatggtatggggagaatggaagagctatggggggaagattgggatgagtttaaaccaaaccggtgggctgagtcttatgataaaacctgctgcagagttttgaaaaaggtgaatccgttcaagtttccggttttccaagccggcccaagggtttgtcttggggaagagatggcgtacgtgcagatgaagtatattgtggcttccatacttgaccggtttgagattcaacccctccctacggataaaccggattttgagcaaaatccggctcacatggctggtggatgcaagtcc

SEQ ID NO: 170838 - DNA, 310 bp, Arabidopsis thaliana landsberg
  unsure (1)..(310): unsure at all n locations
gagagtcatgagaaatcatcaacttgtgatgagtattcttggtatgaggcttgtgagactcatgaggagtatgcggagtatgatatagataacggtgaaagcaaatgggtagatgaaagtgaaattgatggcattgttgagataatagaaccatgggaagtagtttacagtgaaggtaatggaaattatgagatgatgaagatagagatagagagggtgagagaggagaataaggtttaaagtgaaacggtgagcgagaatgatgtagtgtagagngaaacaataaggaaaatgagtgtagcaatccaaa

SEQ ID NO: 170839 - DNA, 1332 bp, Arabidopsis thaliana landsberg
tagtaaacaaagttgtcacaagtagtaagatattttcaaccagtgttataaataaatcgtaataaactatacaagagagctgtcaaaaaaaaaaaaaactatacaagagaaaaataaataaattgtgtggtgtataattgtttcaccgtgtaacagatgatgtacgaagacatgaagagtagagtagaacatgtggtggagagtggaaaagttgagactgcatttatcacatgcgatcaatttcgtggggtattcgatttgtggaccgacaaattcactcgtcatgaccatcccacaattattcaggtaatttaaagaaaaaaaaagttcaaatattgttttctcactactatatatcataagaaaattgcattttgaatatatttactagacaattataccttgccatatgttaattcttttgtcttgacaaaatctcaactaacatttatttaaggacaggtgctacaaaatagtgagaatgatatggacgataccaaaaaatatataatgccaaacctaatctacgtttcaagagagaagagtaaagtttcatcacatcatttcaaagccggtgctcttaataccttggtatcaactaaaaaacctatctataattagtttttggtttcgtttaattttagttaattccgtattttctttttattatagctacgagtgtctggagtgatgacgaattcaccgatcattctaacactagactgtgatatgtattccaacgatccagcaacaccagttcgtgccctgtgctatttaacagaccctaaaatcaaaactggtttagggtttgtgcagtttcctcaaacatttcaaggaataagcaagaacgatatatatgcatgcgcgtataagcgtctctttgagatcaatatgattgggtttgatggtttaatgggcccgaatcatgtgggaactggttgtttcttcaatcgacgagttttttatggagctccatctaatttaattttgcctgagatagatgaacttaagcccaatcgtattgtagataagcctatcaatgctcaagatgttttagcattggctcaccgtgtagcaggatgtatctacgagcttaacaccaattggggatcaaaggtaagatataaccaaccctagctcgtacctttatctagtattgatttccatttgttatattttttcatgaaaactatatctaaaggaaaatggacctaactaatatatataagtgacatacacaaatccactaccgataggttatcgatagaaaatccataaaagataaatatagtaccagtgatatagaagtgacatgatctagatccgcgcatt

SEQ ID NO: 170840 - DNA, 1070 bp, Arabidopsis thaliana landsberg
atatagtgttcaagagatcgagtaaggtacagcaaacttcgcagagtcaagaaaagttggaaaaggagggaatgggcctgtgtttagaggtcatcttgatcacacaagtgttgctgttaaggttttacgccctgatgctgctcaagtaagatcacagtttcacaaataggtgacaaaatcactttctttacaaattttctccatttactctgttttcactaatgtttacttgtattacaagaaaaaggttgttgaatgaaatgatttgtaacttgatgagttttgacgatcaggttgaagtactaagctgcataaggcatccaaacatggtgcttctcttaggagcttgtccagaatacggtattctcgtctacgaatacatggccagaggaagcttagatgatcgtcttttcagacgcggaaacacgccgccgatttcatggcaattgcgtttcagaatcgctgctgagatcgctacgggactcttgtttctccaccagaccaaaccagagccaattgtccacagagacttgaagccaggaaacgttcttctcgaccacaattacgtcagcaagattagcgatgtcgggcttgcaagactcgtccccgcggtagctgaaaacgtgacccagtacagagtaacatcagctgcaggaacgttttgttacatagacccagagtatcaacaaaccggaatgttgggtgtgaaatcagatgtttattcactgggaatcatgcttttgcagcttttgacggcaaaacagccgatgggtttggcttattatgtggaacaagcgatagaagaagggacattgaaagatatgcttgatcctgcagtaccagattggccattagaggaagctttgtctcttgccaagttatcgctacaatgtgctgagttgagaagaaaagataggcctgatcttggtaaagaagtgatgcctgagcttagtagacttagagagattggtgaagagagtcttgattctgtgtattatgctggacaaggacgatcttcgcatcctagtcaagtctcttatacatcggtaagagtttttaatggcaagaca

SEQ ID NO: 170841 - DNA, 1047 bp, Arabidopsis thaliana landsberg
agatcataaaggttaaatgtagtatgacacattcagtagtagtttcgctagacgtgctgtaaaagaaggacgtggtctagtcgttatcgttaacaaaatggatcgtctaagaggtagagagaactctgagatgtacaagaagatcaaagaagctgttcccattgaaattcagacagttattcctcaggtaataataaaaattgcatcttttattaattctcatttcttcttttgccattcttcgtatttcccggtgatggaaacataatatttgcttgcagataactggaataccagttgtgtttatctctgcattagagggaagaggacgtatggaagtaatgaaagaagtcactgatacatacaagagatggtgttcaagactttccacaggccggctcaatcgctggttgcgtaaggtttgtactttaaatgttacagactatagtatatacaacaaaacatatgacatcattatttgcttaatcgttttttgtgtgtgttggcgtaggttatgagccggcattcatggaaagacacggcttcacagccaaagatcaagttctttactcaagtgaaagctcgaccgccgacttttgtagcgtttgtgagcggtaaaacgcagttattggaaagcgacataaggtttctgactagatcattgaaggaagattttgatttaggtgggactcctattcgaatcatacagcgggttattcctcgtgcaccaccctccggtacaggtggtggtggaagcggaaacagctcgagtcgagtagtgcaaagaaccacctcagacaaacggactctctcggcctaagaacccattacaagtgaagaaattgtccctacattaactattttttgtcccgttttgtatgatcatacttaaatacatctttttcacctatacacattcgaaaatctaaaatagttggatggagtttaaccttaaacttcattagtgtccattgggtacaattaatggcagtaatataaagaatctataatatcgtatagtacaccaaaaatatgtcatcctatgca

SEQ ID NO: 170842 - DNA, 669 bp, Arabidopsis thaliana landsberg
atgactcacaaccattctaatgaagaaggctccattggaacctccttgcatggagttacagcacgagaacaagtcttctctttctccgtcgatgcttcgtctcaaacagtccaatcagacgatccaacagctaaattcgcccttccgggtgattccgaacatcgagccaaagtgttcaacccactctcttttgctaaacctcacatgagagccttccacttacgatggctctcattcttcacatgcttcatctccaccttcgcggcagcaccattagtccccatcatccgcgacaacctcgacctcactaaaaccgacattggaaacgccggagtcgcatccgtctctggtgccattttctcaaggttagccatgggagcggtttgtgatctcctcggtgcacgatatgggactgccttctccctcatgctaaccgccccaaccgtcttctcaatgtcgtttgtgggtggccctagcggatacttaggcgtccggttcatgatcggattctgtctcgccacgtttgtatcatgccagtattggaccagcgttatgttcaacggtaagatcataggactagtgaacggctgtgcaggcgggccgggtgatatgggcggtggagtgactcaactacaaatgccgatggtcttccacgtcatcaaacttgcc

SEQ ID NO: 170843 - DNA, 388 bp, Arabidopsis thaliana landsberg
cggcgcgccgatctcgcccaaggccccgcgcgacctggcgcagcacagctgcatcaacctgcgcatgaaaagttgcggtcgcctttattcctgggaattcgagaaatccggccgggcacaaaatgtgaaagtggacggccagctgaccttcaacaatctgcgcctgtgcgtgcgcgccgccgaagccgggctcggcctggccttcgtgcccgacgattgcgtcgagggcgcgattgccgatggccgcctggtcaaggtgctgtccgactggtgtccgccttttccgggctatcacctctattatcccagccgccgccagcaatcgccggccttcgctttgctggtggaaacgctgcgctggcgcggcaaaaagaaagacaagccatga

SEQ ID NO: 170844 - DNA, 414 bp, Arabidopsis thaliana landsberg; identical to SEQ ID NO: 79519

SEQ ID NO: 170845 - DNA, 2619 bp, Arabidopsis thaliana landsberg; identical to SEQ ID NO: 19265
  unsure (1)..(2619): unsure at all n locations

SEQ ID NO: 170846 - DNA, 1774 bp, Arabidopsis thaliana landsberg; identical to SEQ ID NO: 60593

SEQ ID NO: 170847 - DNA, 1203 bp, Arabidopsis thaliana landsberg
atgcagttacatagagatgtgtgtgcaagaaattatctgcactttattacaaggtgtggtcgatcttcctgtcgttggaaattgcaagacctcggagtaaacccgggattcaagccttgtgttcgttacataattcacttgaggaagcaaagaacattcttcaccactgttttgagtgtagcaaacattacctggtgaatttctctttatctcactttctttgcataggtatcccccactctgttgtggtctgttgaattcccccattttgttttggtccttgtaaacaggccatcactggggatgctataccgtagaaattgagaaaccaaaatatgcatgtatgaaaagtcttagacgcatggaggacattgttcctagatcaagtgggtttcaggtgatgtctgttttagtgcacaacacatttcctttttcacattagggcttatgtatctcttgctagctacttgcttgtcttttgtttttttgattacacaagcataccctcgtgtttatttgtttcttgaaattagagttcggattggtaaaacttggtatctgctagttcctagttgcgaattctaattttgatttgtgatttcttcagattcagtgttggtgatcgggtaattgaactatttgacaactcctgtgacagctctggtggaacgtagtagaacttcttctagatcagctatggtggaggcgacatgctttaaagaaactcattgactgggaaagtgtggaagaagacaaggggaaggattccattgtggcttacatcttgcatctcatgaaaaagtactccaagctattcagaagtgaaattgtggatgacaaatgactctggttaaggttgtaatgaacatcgtgttcatgcgtttgggcgccaactatcgaagtttggttctatcaactataagcttatgaacagtaggaaatcaggacagattttcattccaccagaagaacagatatctttgcagcttatgcgtgatcctgtcattgttgcttctggacagacttatgaacgggtctgtgtcgagaaatggttctgtgatggaccactccagccccaatactcagaagcagctcccacatctttccctgactcgcaactactgtgttacaagtctgattgcgagttggtatcagcagaatgggatcactgcatcattttctgtccaaagtatttctgaataa

SEQ ID NO: 170848 - DNA, 992 bp, Arabidopsis thaliana landsberg
  unsure (1)..(992): unsure at all n locations
ccgccgntaaatatctaatcccagccaggggcaaaactaaacaagatttgaactgcaaagccgaaacccctcctcccgccgaacaggaggaggaacaagctccctagtgaaagaaacgggaccgaacaccagaaggaggtgactctcccccacctgcccggaaagaaacgggatctagtctttgcggaactcaatctaggaagcatgacagaaaagtcagtcactacacctcctcccgccgcgcaaaagaaaaacacgaggttcccattacgcctcccaaatttctgcagaaacgtaaccaagcacctctccccgaaacgcatcgatttcatcatgggaagatctcagctctgcaacgacccgatcaactcgatcaaaactcatcaaaagaaagcagattcctgcacaaaaggcaaaagcccgatgatgggatcacattttgggaaagtgaaatcactgacctcgataaacctcacgatgacgctctcgttatccgaatcgatgtaggcaactacgaactctcctgtataatgatcgacacgggaagctcagttgacgtatttttctacgaagccttcaaaaaaagggggcacctcgattccgagttacaaggcagaaaaacgccacttatcgggtttgctggagatacgaccttttccctaagaaccatccagctcccaaccgtcgcacgaggagtgagacaactcacgaactttctcgtggtcgataagaaagctcctttcaacgcaatattgggaagaccatggctacacgtcatgaaagccgtccgatcaacctaccaccaatgcattaaattcccttctgacaaagggatagcagttgtatacggcagccaacgcagctcccgaaaatgctatatgggtagctacgagcatatcaaaaaagccgaccctgtagtactaatgatagaggacaaactcgtagaaatgaaaccagtcagatcctatgacccttctcaatgcgaaccttaa

SEQ ID NO: 170849 - DNA, 1211 bp, Arabidopsis thaliana landsberg
  unsure (1)..(1211): unsure at all n locations
atgattgatgattttacagttttaatcttctatatttctatttcttcgtgtggaaaaaaattctcaaaccaatctgcatttgtattgccttatcgttgttccccagcggaaaaggatatgctcactgcatcagtttcagcaaaagagataaggggagccttattctcaatgccaaatgataaatctccgggtccggacggttacacttctgaattctacaagcggtcatgggatataattggtgcagaatttgttttggcagtcaaatcgttttttgaaaagggttttctaccaaagggtgttaatactaccattctagctctcatcccaaagaaactggaggcaaaagaaatgaaagactatcgaccgatatcgtgctgcaacgtcatttataaagtcatctcaaaaatcattgcaaatagattgaaacatgttctcccgaatttcatcgcgggaaaccaatctgcatttgtaaaagacaggctcctaattgagaatctgctattagccacagagttagtaaaggactatcacaaggacacaatttcgggtcgatgtgctattaaaatcgacatttcgaaggcttttgattctgttcagtggtcatttcttaaaaacgttttgtcggctttggactttccaccggagtttgttcattgggttatgctttgtgttactacggcttctttttcggtgcaagtcaatggagaattggcaggctattttcaaagttcaagaggtctacgtcagggttgctctctttccccttatctatttgttataagcatggatgttctatcaaaaatgcttgatcaagcaacagaagcaaagcaaattggctaccacccgcagtgtaaaagtattggtctgtcccacttgagctttgctgatgatctcatgatcctttcggacggaaaagttcgatctatagagggtattgtgaaagtttttgacctttttgctaaaagttcaggtttaaaaattagtatggagaagacacccatatatctagcgggaacttcagaagtgtctcaccaatggatcaaagaccggttcagttttgatgtagggactctaccggtgaggtatttgggactccctctagtaaccaaatgcctannnnnnnnnnnnnnnnnnnctcttatagaacagcttaaaaagaagattgggtcatggacagctagatttctttcctacgccggtcgcttaaa

SEQ ID NO: 170850 - DNA, 2078 bp, Arabidopsis thaliana landsberg; identical to SEQ ID NO: 15253
  unsure (1)..(2078): unsure at all n locations

SEQ ID NO: 170851 - DNA, 989 bp, Arabidopsis thaliana landsberg
attgaagcttcacttgagaccttagtcggagagattgtgtacaccttaagtctttgaaaatagtgatttattctttcccttttttggtatcctcttagagactgcctaagacagtgacatctttttttcagattacgtgtgtggttggactgtatatatggtgtgcggcttcagatcctgcagaccgtggagttttccggtctaagaagtaccttaaaattcctgaaaatgggaaatttcctctagcaaaggatataaaagatggatgtggatcagctacaggtggtgctaaatctcatgatggcacgtgtgtagaggatacagaaaatggaagtaacaagaaattggagtcatcagaaagatcttctctcctgcgtttgctctgctctccttgtgcattgctatgtagttgttgcagtggaaaagatgaatcttctgagcagatgagtgaggatgggatgttttattgcagtctgtgtgaagttgaggtgcggggaacatttataaacacagacatgtcttttcattggctttagagttttcttgtgacaagaaagcttcacatattctcaggagtagtcaacaattattgtcttccttttgcaggtcttcaaatacagcaagcattgcagagtttgtgacaaatgtgtggaccgttttgatcatcactgcagggtattcaaaggatttgcttaaaaatttcatggtttatcttaaatggttaaacccttccttctgttttaattattttatctttgtttttgtatgacttttgtagtggctaaacaactgcattggcaagcggaattaccgaaaattcttcagccttatggtatcagctatttttttggtaaggttgtgttgatctttcatgatgtcctgaaagaatatcttccgcctatctttctgtcatgaaatgttctcaataataattccttggtgggtgaaatgaagagttagttctcataaagttagatggatttttcccg

SEQ ID NO: 170852 - DNA, 533 bp, Arabidopsis thaliana landsberg; identical to SEQ ID NO: 66244
  unsure (1)..(533): unsure at all n locations

SEQ ID NO: 170853 - DNA, 501 bp, Arabidopsis thaliana landsberg
gtaaagcgctgataaagaaggtatattattggtttttaataaactacgctccgttttgcaggcgaagggactgaagcccatggagagcatccatacagattttgacgtggaaaagcacgaagccatcaccgagatcccggcacccaccgcggccctgaaaggtaaagtgattgatgaagtggtgaaaggttactacctcaacgataaactcatccgtttcgccaaggtagtggtaggtaaataaatgatatatatgattgactatcagctgttggattttggcttttgactttttgacttttcacttttgacttttcacttttgacttaaactaccatgtctaccaagagagattattacgaaacactgggtgtgggcaaatctgccggtgcggatgagatcaagaaggcttaccggaaagtggccatgcaataccatcccgaccggaaccccggtgataaggctgcagaggaaaaattcaaggaagcggccgaggcataa

SEQ ID NO: 170854 - DNA, 1705 bp, Arabidopsis thaliana landsberg
  unsure (1)..(1705): unsure at all n locations
gtcctagtggagttggaaaaacttcgctgctaatagcaatggctggtctttggaggtcagggaaaggagcaatcacgttctacctcgatcttgaggtagatttctcgcagcagaattctgatactcagtaaaattcagggaaaagagcagacgtattgttccttccacaannnnnnnnnnnnnnnnnnnnnnnnnnnnnnnnnnnattgctttatcctccgtggagtgcagctgtgaaggacacgacacctggtggcagtaatattgacggtactcagtttaaatttgtgtctagtaacaaccatttctttcaactccatttaagtttatgcaagcagattatagaacccaaaagcaaatcgactgaagaaaaaatgcgttgattttgttaggttcaccacctctgctgattagagaggacggaaatgaaaagccgacaacagatgatctgatgcggactctagagaaggtttgtcttggacatatagcggatcgctttggtggtcttgattcgatacacgagtggtccagtgttctctcacttggtgagcagcagcgccttgcctttgcacggttattgctgtctcagccaaagctggcgctcctggatgaatccaccagtgcgttggatgaagctaatgaggtacttgttggttctcctctcatctatcatttagaataatatcatgtacatgtagcgttgagccattaaaattcctcttgatgcccaggcgttcctgtaccagcaaatccagtcggctggcattacatatataagcattggccaccgccggactttaacgaaattccataacaagatcttacaaatctcaacggcagacccgaagagcaatgaacgtaactggcgaatagaggacgtggatgcccaagattctttgtacggtagattgaatcaaaaggaggtgccaagtgaaagctgatcaaaacctgattgattacataagagacagaagcagcaggtaaatctgcaaacgggtgtcatgaaacatataagaaacatgtttggtgtccattttgtatataatctaccagacttgacgttgactgaagatgcaagtaaatagagagattgatacagatacgagtgcaacgaagttctgattaaaaataacacgcgagatgagctaaaaattcaaaaccggctgagtatttatcataagcccaataaatctaacgatgggcccatttgagaaacaatgaccaccactccttttgaaatttcactcgacctctcaaacctaagcggaactcgacctcgccgaaaccactcgaccgcctcctgaaagaattactctgccgcctcagtcgagtttcacgactcacccgatcaccgattctggttcactatgaatcactcgaccacgtatcgccatctctcaccaaagagttactcgactcaatttcactcgagttcctcgctatactcgaccgtttcacttcgtcgttcgcgatcactttgttttcaccacactcgaccttttctgcgccgctagaattgagttccccacctcgttcactgtcgaagtctcaggaactactcgattacaaacgcaagactcgaccgccaaattgtggttccatccccaccaattccgactcgccaaagaagtactcgagcacaaattttcactcgaccataaattttcactcgacctcctgcaacagagccactcaacttcactga

SEQ ID NO: 170855 - DNA, 965 bp, Arabidopsis thaliana landsberg
  unsure (1)..(965): unsure at all n locations
tgccagtttttctgagaagaatcagaacgagttaaaggctcatgtgactgtgtaggagtcatacactatcatgcggcttctgtcactaacatcaaatccaaaccttcnnnnnnnnnnnnnnnnnnnnnnnnnnnatacatgggtgtatcttttcattgtatgaatcaaactcaatcttttaaataacaaaacaagattttttctcttttatgatatcttgtttttgctaatcatctcttcttctttctttcttgggagagacagattttggaaaaagtttagattttcaggtaggagttttgaggctaagatttctttagtcttgatagagaatagtgttactaagttgttttgtttttgtttaaacaagtatgctaatactccatgggctatggaagttgtgctggagtatataaagcagagctatggcaatcctcctgtctacattcttgagaatggtatgatcactgtctttctctatatattctgatctatgtctcttgttttttgtataagtcttctcatttcttttgccattgcaaacgaataggtacaccgatgaagccagatttggagctgcaacagaaggacacacgtaggattgagtacttacaagcttacattggtgctgtactcaaagccgttaggtaagtaaagtgtttcttactgcatcttctcttctctactcttggctgtgtaataaataaacaaaagacattactacgtgtaggaatggatcagacacgagaggctacttcgcatgatcatttatggatttgatcgagttactaagtggatacgagcttagttatggattgtaccctgacaacttcagcgatccttatcgcaagagatctcccaaactctctgctcactgggactctgatattctcaaggggaaaatcacctttttttggttcccaagggcatcaaaccaattgcattagcaacctttttctttattt

SEQ ID NO: 170856 - DNA, 712 bp, Arabidopsis thaliana landsberg
gttcctgatcggccccgggcccttgttcccgctggccgtgcagttccatccgcaacttggcgaactcggcatggccatcgtctgcggctttctggccggactgctggccaccctgctgtcggcgatgatctacaaggccgaggacctgttccacaagctgcccgtccactggatgtggtggccggccatcggtgcgctggcggtcggcattggcggcttgctggaaccgaaggcgctgggcgtcggctacgaggtgatcgacgaactgctgaccggcaagatggtcggcatggccatcgtggtgttcatgatcgtcaagtcgctgatgtggatcatctacctcgcctcgggaacctccggcggcatcctcgcgccattgctggcgctgggtgccggcctgggcgggctggaagcgatgtgcttccccggcaccgacccgctgctgtggcccctgctcggcatgagcgcgctgatggccggcgtcatgcgcatgccgttcatgccgatcctgttcgcgctggaactcacccacgacgccagcgcgctgcccgccctgctggtggcctgcaccgtcgcctacggcgtcagcgtgttcctgatgaagcgttccatcctcaccgagaagatcgcccggcgcggcttcgacatcttccgcgaatactcggtggaccgcctggagcacatggcggtgaaggacgtgatgaccaccgag

SEQ ID NO: 170857 - DNA, 520 bp, Arabidopsis thaliana landsberg
agggatgaacactcaaggctcccccatttgcttgtcacataccccgcgtgcccatgaaaggagaagtgattgagactaagagtttggatgaagcgtttaagctgttgattaaacaaccggtgggtgcaagactccatgtgttcagtccagaccttgataatgttggagaggtaaagtgttgtgagataaatttcgaaattttcaaagatcaatgacaaagttttgatctaatcttattcaaccttttttttttgtgtggtagggagtttacgagggcctgtctagcctgtctagtaaggaatcacgctatgttggacttagggatgtcatcatagttgcagtgaataagtccgagggaaaaactgttgctactgtgaagatatgttacaagaagaagacttcatttgtcaaagtgtgtttgagccgtatgtttgtccagcttggtggtggcgaggagtctcaggtgaaagagccaacaggtctgcttgttgacttctgtatcccacgcttatctatcaac

SEQ ID NO: 170858 - DNA, 662 bp, Arabidopsis thaliana landsberg
cggatatatgtgtattcttctgctgttcatttcgtgacataggaggcagccaagaggaaactgatatatatattaccgaaaaagaagaattggtggttggttcatgccaccgcaggagccaccgccggtggattggcagttgctctgacttggccgcttggtattgtagctatgacgctttctcagccgacgggcccttctaaggtgattgacccacatctgaacatttcattggaggattatttaaggaaaacacacacacgcacgctcacaatgtaaaagcaaaaacaaaagtagacaatcaaggcataaatataaacaaaatgattttaagatgtgtgtaactaactaatcgaccaggccagacatagcctatgatcttcttcttcttcttcttcttcttcttataacttatctggtcatgtgcagcatgtcactagggtttcattgagccatgtgttcgtatcctttgtgaaatatgaagggtttatgcctccccagaatgttcatccatgcatcagcaacagccatatgttggtccacttacgaggcggccaaatctttctttcaggacctcaacggcgattcagaacggtctgataaagatcaaacggatgggacagcgaatcgatatcacaacaactaccgagtttttaaattaa

SEQ ID NO: 170859 - DNA, 1424 bp, Arabidopsis thaliana landsberg
  unsure (1)..(1424): unsure at all n locations
ttctgatgttgatcaggtttctcacgagactttgatcgtccaagattctcaagaccggacgtgtcttgaaggggccgacaatgctcaagctcaactgattgtcggtggcgatcagaaccaaactatctctactcaggtcgttgaacttgaggttcaagttatcactggcaatcagcctgccgcaattcagaccgccacatctgaaggcgtgagggtcgatgttgacctgaccatccttgattcaaacaaggatggaactgctgcggatcatgagacttcgaggcagtcccgtgaagagaaagggaaaggggtggccagtcaatccaagaagagatcggccactgaagccggcctaactgatggagctcccgtgccaaagactttctgtctgtctacggggtgaagctcttaatcccgaccagtttacattcaagtatactggtgataaatttctcgtaagtgatcgtgaggctatcagtcatctctggacgtcacttgaagcgttctaaggcaggagagtatcgctacccggaaggatttggtcctgtaattagagttaccacaggtttgtcagatgttctttatagttatctgtcgaatacacaagtattctagttttttattctctgtgcggagctctggatgaaagcggataattcagctagaccgcctgctctggccaatgatctgatcgcttcgtactatcgcaaactgaggatgaatgctcgcatgacagggacatcttcgagaacctgaagagacatgttgaccaagcaaagatcatctatgcaagggatatgaaggagatggccgcttttaaggatgccgatgagacccacaaggcggagatcaactcgctgaatgacgaggtcaccagacttaatggtcacgaggctgatcttttgaaagagattggtgaagttcaggtcgcacttgtcgcggtaaaagagcacgaggagagagaatgtattaggcttcagaccgaccgagctgcgaaggtctcccatactactaggaaggctcaaaaccgtctcgacaagatgaaggcctatctcaccgagcaggaagagatcgttaagcctaaggtgaacgctctgaaccaagcccaaggcgtagaggaagtggttggcatcttgataggaagaggnnnnnnnnnnnnnnnnnnnnnnnnnnnnnnnnnnnnggtcttaacccaaaaggtgaacgatgaggtcaatgccttgaatgtcattgagttcggagagggcgatctgaacatgtctccagatcaacttggttttcaaggcaatcttctcaagtcgctcccgtggccgatcagcatggttccatcgtcgacctcttcaaccgaagtgatattcgccatctcagcgttgaggaaggcgaacagaatccaacgacctgatgatgtcgttttgtacttgtaa

SEQ ID NO: 170860 - DNA, 656 bp, Arabidopsis thaliana landsberg; identical to SEQ ID NO: 8166

SEQ ID NO: 170861 - DNA, 640 bp, Arabidopsis thaliana landsberg
  unsure (1)..(640): unsure at all n locations
atggctaatcttcgcttaatgatcactttaatcacggttttaatgatcaccaaatcatcaaacggtatgaaaattgatttacctaaatcccttaacctcaccctctctaccgatccttccatcatctccgcagcttctcatgacttcggaaacataaccaccgtgaccnccggcggcgtaatctgcccctcctccaccgctgatatctctcgtctcctccaatacgccgcaaacggaaaaagtacattccaagtagcggctcgtggccaaggccactccttaaacggccaagcctcggtctccggcggagtaatcgtcaacatgacgtgtatcactgacgtggtggtttcaaaagacaagaagtacgctgacgtggcggccgggacgttatgggtggatgtgcttaagaagacggcggagaaaggggtgtcgccggtttcttggacggattatttgcatataaccgtcggaggaacgttgtcgaatggtggaattggtggtcaagtgtttcgaaacggtcctcttgttagtaacgtccttgaattggacgttattactggcccgccccttctaaactttgatgtacatacaacaaagaaactgtttttgttttatagtatttttcattttttgcaccata

SEQ ID NO: 170862 - DNA, 1390 bp, Arabidopsis thaliana landsberg
  unsure (1)..(1390): unsure at all n locations
tatctgtgttcgattcgagtttagttcggtttatttatcatcacaaaagtttgtttctgtccggattaattaaaaaattcgtttcattttggtctttatgaacacggctaattaactttcaataattatgaatatgttaggaagaaaaaatgtggaaaaattaagcttagaatgcattgctgctttctaaatgaacctgtctttttgcagaatgcctggacggacgtttgcaaacggtgaaccgatatggttgtgcaacgctcatacggcggatagtaaagtgtttagccgttctcttctagcaaaagtaagttgtagtaattgatgtagttgctatgtaacacttttttgcgatttgaaaacactaaaatcgttcgtttttgtttgcgttttgtggtggtttagagtgcttgcggtaagacagtggtttgctttccgtaccttggaggagtcgttgagattggtaccacagaacatgtaagcccatatttgtgttttctgcttccaatgttttagaataatttattatgaaaatcctttatttagaaaaaaagaataattatagagtgaccgcaatgtattctaacatttcaatttgacctttcaatctgtcgaataacggtatagacaccaagaacacacaaactaatattttagtagtctcgatttttaaagatttccacggtttggttatgacaaaacgcgaaaatacggcttttgtactttttactagctcgttggtatagttataattgaaaactttttcaaggctttttcttggtgtgtttcgtctcgtagattacggaagacatgaatgtaatacaannnnnnnnnnnnnnnnnnntcgaagcccctgatccgtacgctacaatattaccagcaagatccgattatcacatcgacaacgttcttgatccgcaacagattctaggcgacgagatttacgcgcctatgttcagtacggagccttttccaacagcttctccgagcagaactaccaacggtttcgatcaagaacatgaacaagtagcagatgatcatgattctttcatgaccgaaagaatcactggaggagcttctcaggtgcaaagctggcagctcatggacgacgagcttagtaactgcgttcaccagtcgctaaattccagcgattgcgtctctcaaacgtttgttgaaggggcggctggacgggttgcttacggtgcaagaaagagtagagttcaaagactagggcaaattcaagagcaacagagaaatgtgaagacattgtcatttgatccaagaaacgacgacgttcattaccaaagtgtgatctcaacgatttttaagaccaaccatcagttaattctcggaccgcagtttcgaaactgcgacaaacagtcaagcttca

SEQ ID NO: 170863 - DNA, 594 bp, Arabidopsis thaliana landsberg
ctaaaatcttctctttctttctcctttcatcacactcttgagtccttgtctctgtttttagtcacctgaagaaaaaatatatggagaacggagaatctaaccaagaaaatctcaaatctctcaaccacgacgaatcgcttaagaagccatctgcttcctccgtcgttgtagataggttaaaacgcgatgaatggagcgaaggagctgtttcgactttactcgaagcttatgagtcaaaatgggttctcagaaacagagccaagcttaagggacaagactgggaagacgtggctaaacacgtgtcctcacgcgccactcacaccaagtcaccaaagactcagactcagtgcaagaacaagatcgagtccatgaagaaacggtaccgttctgagtccgctactgctgatggctcctcttggcctctttatcctcgtcttgatcatctcctacgtggaactcagcctcagcctcagcctcaagctgttctgcctctgaattgctctgttcctctgctcttacttgagccgccgttgcctacggtggcccatccgccccagatttcttacggatccaacggcgtaggcaagaaaccta

SEQ ID NO: 170864 - DNA, 1264 bp, Arabidopsis thaliana landsberg; identical to SEQ ID NO: 16783

SEQ ID NO: 170865 - DNA, 1576 bp, Arabidopsis thaliana landsberg; identical to SEQ ID NO: 61609

SEQ ID NO: 170866 - DNA, 859 bp, Arabidopsis thaliana landsberg
atactcgcgctgacaggtatgcattctctgtttattctttacgattccatcactttgctacttctttagtttattctttatgactggtgccctaatgattggtttagtcctgctaattcgggagaatcggattaccaccgtggtgtgtttgtctggctctggttctcatgagagtcggaggagagtctatggctaaacattatcatcaggatgatgcttaagcctaattttcctatccgattgaatctcttcatcctatagaatcttctcatagaaaattggagtcttctccttttgcttttcagaaaacaatttacatcactcagccaacatggggaaatcatccaaagattttcacgctcgctggtttgacagtgaaaacttaccgatactacgatccagcgacgcgtgggttgaactttcaaggtgagactactgagttctttgcttgctattgttgatatgcttatatatctttctgaattcgtttacgtcaactttttttcttcttttgttcacaggtttattagaagaccttggtgctgccgcacctggttctatagtgcttctccatgcctgtgcccataaccctactggtgttgatccaaccattcaacaatgggagcaaatcaggaagttgatgcgatcaaagggattgatgcccttcttcgatagtgcttatcaggtacacctgatgaatccttttgtgtaagatcagctgatatttaaaccattttccttctgaatcaatggttaatacttgtctctctttttgtatcgcagggctccgcaagtggaagtcttgataaaaatgcgaaacatattaggatgtttgttgctgatggcggagaatgcctcg

SEQ ID NO: 170867 - DNA, 1973 bp, Arabidopsis thaliana landsberg
gagagtagtgagaaccgtgaaaaccagatctatttacacgtcatcaccggtgttgaaaatgaggcaaagacggcggcggatatgagagatttagggttcttttaatgaagatttttttgatcgcttctctgcttttttatttcatgggggtaatatgtttgcacatgaaaactgatgagtcattaccgagactttgcgtacgtgttgtcatataaacggctactaggttggtttttcggcagttttttaattctgatgttgccgcttctttactctaatgccctttagttttttagtttctttaatttattccttgatagtttcggaattgtcattatagtccagctttaattaaattattccggtaaattttgttttcgattgtgggtattctgtgataattgaatatttttataggggtacgttatagatgttggcacaaaattaaacacaaaggaaaaaatgtagataaaacactaaaaaaaaaaaggggtgcagactgtagaaagcatgactgtgttagatctggaaggcgtggctcatttagaaccgttggattgtataataggatcccacgtaagggaacaagctgacggcttagattgaaaggtatggcttctccagtcttcaaagaatcgtaggcattattaaacaaatatatcctactttcaatcttttggtctattgatttactattgatatttttctagtgattgaatgggctttttgttttggtcctcgaaagaaaaactaaccattcgaaattttgaagtcatatacacactatagggtttcttaaaaatatgtatgggccagtcttggatgttttataggaaaaacatatagcttctgaaaataatacatacactttgtcaccaaaaaaaagagtctgaagattggtatggatattgaaaattatacgagtatttatactatatacgtataagtttaacaaaaagtcagggtggccgagtggtctaaggcgccagactcaagttctggtcctcgtaagagggcgtgggttcaaatcccacttctgacatttctttttatgctttcaaaaaaaaatcttttacccattccaatagacaattggaccattctcagatactttcatagacgtaataacctaatttgagcatgaaaaggatattaaaaaatcagtataaaatcacacgcctcgtctcatgaactcaaaatcgcttccaaaaaaaaagaattaagtctgtttctaaaccaacaagagaaaagccatgggtgacgctaattttgactacagtgtctctttccgccaggacttaacttctccgcttaccgtcgagctaacgtgcaccaacgtcgtccacaaaaaaatccgtctcttcaccggcgaaacaaaaacactctctctacccgaacaaaccatcgaccaccacaccagctttattcccctgaacgtatccaccccctccacaaacactcaaaacgacctccttttcgacatctttcgtagtcccgaccaaaccactgttatctccagaccaagcaagactagtagtaattattcgctaagttgcgtgagaatctccaaaatcttgagcagcttcggcgtcaccgaaaacggctgctctactatcttgcgcgagatcgacatggccattacatcatcatcatcatcatcgagaggcagaggagtggttgaaatcaagatatggaaaatcaagactgagttttacaaagccaacaaagctgcggagaacttgttgatcgacagctactgttataattacttgaacgttgcaacaacggaggagaatggatgcgctatttgcatggaagattacatagaaggatcatcaatagtggctaaattgccttgtgatcatgaattccatggagattgcatcaacaagtggttgcaactcaatcatatgtgtcccttgtgtcgatcatcaattctaaggatgttaaatccgggtatcagtcctgtttag

SEQ ID NO: 170868 - DNA, 539 bp, Arabidopsis thaliana landsberg
ggcgcttatatttgtcggggccctgctgttatggttgccgatatcggtacacaaaccggtcagcttcctcaactcactgttctcggccacttcggctgtcaccattaccggcctcagtaccgtcgatatcggcaacacctatacagtgtttggacaggccgtgttggcaaccatggtgcaactgggcggtttgggttttgtcaccttttccatagtagccattctgacactgggcaagcgtatcagccttcagcatcaggccctggcacaagaagccttcaaccagaccaatgtctcgatggtgcgccacattgcggccgccatcctgaaaattaccctgtttgctgaagccataggtattgtgctcttcaccttacgctggtggcacgatacaacgttgaccaacgcattgggtcgggccattttccacaccgttgcggcattcaacaatgccggcctcatgatcagttaaacccaactgacgcagtatcagcacgatgccttcattattttgctgaccagtgtattgtacattgtgg

SEQ ID NO: 170869 - DNA, 1991 bp, Arabidopsis thaliana landsberg
ctcaggaagaaaggagtaacatgaaggtagagtaaaaattcaaaacttttactctactgatgtcctagagatcgagtatattggtcgtgtttgagtgatgtttaaaaacctaaacaattttaaatcatcattttactcgaccaacagaagctatggaatgttacaaagagttcatcaagtttacagaagattgcgggatttcctggggatttttctagtgaacagagaatcagagaagagctgaaatcgccagaggaaagagggcgatgtcaagtagatatgagctgattgatgaggatatcgagactgagtatgagccagagtcatggcgcagggagacaaagctgctgaacaaacccgacgaggttaaagtggaggagtatatcaggttctttgagatgaatgacttctggagaacgaggtatccgtgctatgagactttagcccagctggagttactggaggacgtacatcatctgttcgagaagtgtcatctggagacactcatgtcttacccttaccctgcctataagggggagacaatcgagtttctttccacgctgcaagtggagacgtatgaggcactcacaaactttgagctggataccatggggttaggcttcttgacgttctcagtgaatgaacagcggtatcagctatcgatcaagaagttagaagaactatttggtttccctagttgaaagggaacaaaacccagatttggcagagaagagcttaaggatttatgggccactatagggaacaatctaccgctaaactcggcgcggtccaagagcaaccaaatctggagtcctgtgatccgctacttttagagatcggttgccaacgtcttttactccagggagtctacaggcaccgtgtctaacacggacatggagattatagattatgcgcttacagggattctccgccggacgaagggaaagaatgtcttgagaggcgatctcaacaacgcaccaccagtaatgcctctgttgatccatctgtgtggatacaggaagtgggcgttgacgaacggaaagaagaaggtgagaggagcactatgcgtgggtggcgttgtgacgccaattctgcaagcctgtggagtaccgctcaaggaaccagggttagcaccgaggatgatggacttggatcatttgcgccgatgtgagtttttggagtttgacatggctggcgactttcaccgctacaggttcgagcattcatcgattaaaatcgccaacattcttctcccctgcattgacgctactaggattctcgagggcaggaacattgacttcaagcctgcgcttgaagaactttatttcgagggtagtccgccaactgaggagatcagtcatacctaaggagctacaacagaagatattgatgagacgaatgatatagatgaggcggaatttgacacgagcatgtatcatttcagtgagcatatacctcctgcgagggaaagcaggagtttaagcgaagctcacaggaacaacagcaagctgcagaagtggtgcatgaaacaggacaagttactcgccaagtgcctcaaggctatcaagtttatgaagaacaagctcagctgctcctcttccactacagctattccgcagggacatctctctcaggaaatgccttcgaagagatatgacgcgcctgagcctagagagctggagattccgcatgtccctgcgaggcattcatcattcgagcctcgtgaatctgggtggaagaggaggaccacactcactcgatctaacagtaggagcgaacgacttctgcagtctcatagtttacgcgaccgtggtgctggccgcagcagaaggagagaggtcgagtttcctcagagcggtgctggccgccagagagctgatgaggtcgagtacccacctcctggagctgatacagaacaaggtggttcgtctatggcctgggagcaatcacaggcagccattgacgagcaactacgttcattcttcgactga

SEQ ID NO: 170870 - DNA, 515 bp, Arabidopsis thaliana landsberg
ggtaccagcgtcgagctgttcgctgggggcggtggactcgccatgggcgttcacgccgcagggttccggcacgtactgctaaacgagtacgccaagcgcgcgtgcgagactctgcgcgccaatggcgcgatcccgcgcgagactgaggctatccctaagccggacgaacccccgctgcttgtcgaggggccgatccaggacctgagcttcgactacctgtcaggcaaggtggagctactcgcgggaggaccgccatgccagccgttcagccttggtggggaacaccgggggtatgaggatgagcgaaatatgttcccgcagttcttcaaggcattgagacagatacagcccaaggcattcatctgtgagaacgtccgggggttgctgaggccgtcgtttcgcccgtacttcgagtacatcctgaatccgctcagcctgccatcggtcgagcgaggaaaagaagggtgagacgcgagcacagcgccgctctagcagagctaaaacaatctgcccct

SEQ ID NO: 170871 - DNA, 2738 bp, Arabidopsis thaliana landsberg
atggcctccacaaacacaacggccaccggtgaagattctcagtcaggatcaccagaaccaagtaaccctcccgctgcaaccttaccgccgttggataagagagtagaaatggtggaaaaagagctcctttacataaggaaagctttaacccagatcttaaggaaccagatctttggtccacctcgtgaaggtcaaggaaacttaccagctgcgttcgctagtccttctccgggcccagctttccaagcgacaccacctccgaactccgagcgtggaaacagagaggctattctgcctttcccgactccagacctgcaaatgagacaagtggagactcgtttccaaccgccagcgttggaacaacacgggttattcaccgagacagaggcaggaggctccggtgagacccctcgagctaccgctgtacgaaggagaaaacccagatgactggattttctgcatggagcagtgtttcttaactcataacacaccagaagacatcaagctcgaaaaggtgatatcttgtttgactggtccagctgtaacgtggtggagatgtgctaaagaaagagaagggatttacacaaggaaggacttccaagacaagtttaaaatgaggttcagaccgagcagaggaagctcagcggtggatcacttgctgaatattagacagacaagcactgtcgatgagtatcgaggcagattcgaagagcttttggtggagttgcctcatgtccctactaacatagtggagtcagcgttcttgaatggattgaagagaagtcttaaagaccaggtggtcagatgtcgtcctgtcaacttgaatgacattgtggagatagcaagacttattgaagcacaggagaggactaaccaaagttatcaagttagaccccaacagagaccatcgttcttagctagccaaacgccatccggatccagagcaatggagagcccgcagcctaaacgtccctatgatcccagtaaggacatgaaccgtgcttcaggaagtggagaacctgagaacaccaatccctgtaggaactgtggcgatagatggttccctggccatcattgcaagcagcagaggttgacaagtttggtaactgctggtgaagaggaccaggaagacccacctgaagaagaatatgtagagcagaatgatgaagaagagcaagctgaagaagaaaccttggcgactcatacattgggatcactatctgatgttgaaagagaaaggtctatgaagctcaaaggctatgtgggaagagctaaagtggtggtgttggtagattcgggcgctactagtaactttatagatgagagcttggttcatgaaaggggctggccgattactgagactagagggttctgcgttaaagtgggaggaggcagagtgattaaaggcagaggcatgtgtgttaaggtaccactggagattcaaggtatcgaaatcatggaggattccctgctctttgacttgggagatctagacatggtgttagggtttgcttggcttgctaagttgggtgaaacaagagcgaattggggaagattgagactcagctggcagattgggcgcacgtgggtgactatccatggagacccggagttgtgcagagaacaagtatcattccgcaccatggaaaaggagatcaaacatgcagatgaagcctatttgctggaattggctacactgtttgagagtgatgaacagcagaaaccaaaggaagtgacgccggttctgcaatgtgttctggatcagcaccagactgtttttcaaatgccacaggccttgcctcccaagaggaacagggaacatgcgattacactggaaaaaagtacctcaccaatcaacttgagaccttatagatactcttatgaacagaaaaatgagatagagaagctcattagggaaatgctagcagttcaaataatacgtcctagcattagtccttactctagcccggttctcttagtaaagaaaaaggatggaggttggaggttttgcgttgactatagggctttaaacaaggctactataccggatagatatcccatacctgtcatagaagagcttctagatgagttaaaaggggctactgtattttccaagctagacttgaaatccgggtatcatcaaatctgaatgcttgcagaagatgtagcaaagacagcctttaagacacatgacggtcataacgaattcctcgtaatgcctttcgggttgacgaacgcaccatcaacgttccaatcggagatgaacgatcttttcaggccatatctccgcaagttcgttttggtgtttttcgaataatatcctaatctacagtccagacatgaaaacgcatgttaaattttttgagattgtgctttaactgttgaagttgcatcaattttatgctaaccctaagaaggggggccttagaaccaaagggaaatcatacctaggggaccataaaaaaagcaaagggggtggaaccaaatccaggtaggggggaggcatggtgaggcggccctggcccaaggctggtaccgggccgagaggggttttgggggtggcccggtattaaccgcaaattgggaaaggataatggagggatggcaggaccctaacccaaccggtgagggaaaaagggtttgggggggaagaaaaaaccgggcatgccattggaggggctaaaccagcgggaacccacctaccccgggtggacttggcccgccttcaaaagggggtt

SEQ ID NO: 170872 - DNA, 1655 bp, Arabidopsis thaliana landsberg; identical to SEQ ID NO: 23232

SEQ ID NO: 170873 - DNA, 268 bp, Arabidopsis thaliana landsberg
atggctgaaattacagcagcactcgtaaaagagcttcgcgtaaaaactgacgcgcccatgatggaatgcaagaaagccctgaccgaggccgatggcgacctggacaaggctgaagaaattctgcgtgtcaaacttggcagcaaggccagcaaggcatccacacgcgttaccgctgaaggtttggtgggtatttacatcgatacagaaggcaagcttggcagtatcgtcgaagtcaactgcgaaactgactttgggccaagaacgacga

SEQ ID NO: 170874 - DNA, 1421 bp, Arabidopsis thaliana landsberg
tgtgtagaactaaatgttccaagaggtgctctagtgttgaagaatgtaggaagcattttgaacaacaacacgatgcagatttcaaaccttcttcagaaaaggatatagtcaagcggataggaaataactgggctcgtaagatatcgcttggaggttgggaacctgtggatgcggtagctgccgttgaaatgatcaagaatcagctcgcagatgttaaagcgtttgcatctaaatctaagaatggatggtcctacgaatggcctttagctgtcgatgaagagcgcaagcagttactccaggaaatcaaattgctccttgtctctttttgcgagctgaaaatactctctggtagcatgcgagactgggtgatgcattttccagttaagtatcttgcaaaacttgaagtttccaaacaagggcttatcgattctcacctatcagaaacacctcagagtatctgttttctggaatgtcatgaactcactcgaatcctagactttctgaaaaccatcaagtgtaaaaggaacgatggtacagatcaggtttgcacagcagtagatagtgtcttaggtcgtattcaagtcaaagtaaagatcgactttgaccctcagttttcatttctgcttttagataaaagactgctgaaaatcaatgatgttcaattcgatgatgatgaagggacgatcaatgttttggatcccagtgctcactacgccaaggcaccagttcatggagatgatatcatatcctggttaactgactacaattcagtagataagacctttcccagacctatcagggaacacaatcttgatatctggttggctgttttgaaagctgttcagttcacctgtaggactctgggaaacaaatatgcaaagaaagtacaggtcgtggactatgatgcagctcttactgatgtcgagaacatgtgtgtgagcgaaaatgaaaggagaaagaatctgccggaagatcaatggagcagatatgcatctcttctatgcgatgtgtgtgaagagagagtccccaaaaattcccttactacaaaaattattcgtgcgtgcagtaagagatgttttcgaaggagcattgcatccaacacttgatttcctcgatttagaagattgcttgaattttatacgtgagcacaaaagtctcagtgacgataaagtgttgcaggccatagaccttctgaaatcagtggtcacccaaaaggttcgtccatgattttaatattcattaacaacagaataccatgaaattgtccatctaaaagtatctacatgacttgcaggttcttttaatggatacaaagatcttgatgattgataattcaaggataagtttgctaaaaaacctaacaaggctttctgcttttgataaccgcacttatatccttcaactgcttgaaccttacttgc

SEQ ID NO: 170875 - DNA, 1503 bp, Arabidopsis thaliana landsberg
gtgaacactctgagggcggtcttggctttagaacgttggaaaaatttaatttagctcttttagctaaacagttgtagcgtcttatccgctttccaaactctctcttgagtagggtcttgaggggagatattttcgatatagtgatccattacatatcagcgcatcaaatcgtccgtcttttggatggagaagtatcatggcaccaaaccccttcttgtctcgggacttcggaggaccataggttctggaatgctgactcgcgtatggaaagatccatggattcccactatccctgcgcggccgacaaaaagcattcttgacataagagatcccctactctatgtcaatgatttaatcgaccaaaatacaaagatgtggaaattagaccgtcttcaagcattggttgatctcgttgatattccactcattttagggattcgcccaagccgtacctacttgagtgatggctttagctggtctcacactaaatctggtaatcataccgttaagtcaggatattgggccgcgagagatctatctcgtcctacttgtgaccccccttttcagaaaccaggtgtttcggcacttcaggcacaagtatggaagcttaaaactacgcggaagcttatgcattacgcgtggcaatgtatctctggttgtcttgccacttgccaaagattgacatatcgtcacatgggaacagataaaggatgtccccgttgcggagaaccagaagagacaattaatcatcttctttttcattgacctccttcaagacaaattggggcattatcgcctattccttcttcagggaatattttccctagaaattccctcttctataattttgacttccttttttggcgtggccgggaatttggaattggagaggaggtgttagaactctttccatggataatttggtatatctggaaaagtagaaatcgttttgtttttgagaatttcagggaacctccccctgacactttggctttggcacttaaagaggcatctgtttggaaacaagcaaccctaaaagaagacgtccccataagctcaccgcctttcctagtttcttctcagatttcgctcaccttggtccctgaatgtcaacttgatgcttcttggcatgcagaggactccttaagcggatatggttgggtccttgttcgacaagacttagtcctccatcttggcctcaagagtgctcgacgaagtttatcactgcttcatgcggaatttgattccttgttatgggcaatgcaatgcatgatctctattggcgatacttctggcgcttttgcttccgactattcagacctgatttctatcaatggcaatcaagacgattggccaactttttcagcggaattggcatcctatcgatctttagtttgttttttcccttctttccgtattagatttcttcctcgtagttctaatactcgagctgattgtttagctaaaacagctcaggctcgaaatagtctttttcccatgtaa

SEQ ID NO: 170876 - DNA, 839 bp, Arabidopsis thaliana landsberg
ccggacttgaatacatgagcatcactgattaccaatctgagagcttcataatacataatatatctccttgtgcaaaggtgaacatcgatgttgtctttgatgcggaggatgaagattctgttatccatgattttatcaccgccatatccactgtccgtgaattgacaatctctgctcgaactctagaggtacacatgattcatttgagtcaataccaattcattttatacaattttcttatggacagttgatatctttctaacagatgattcatgattacgttgaatcggaaacggaactagtacctcagttctcgaacctgttttgcttgcatgcttcgttctctgaatcttcttgggaaatgtttccgacatttcttggttgttgcccgaatctacattccctcttcttggtgcgcatcattttcctattatcctataatagcattttgaaagccctaactaaagaacgaaattttcgtttggttgtatcatcaggaatttgactgcttgccagagaaggaggagattaaactgtcattggttcctcattgcttcgaatcatctctcgagtatgttcaattgaaggtaccaatcacagtgagtgagacatcaagcaagatggaactagctatatactttgtaaggaactgttctgttttgaagaaactgatgttaaatgaaagtttcggaaacgtcatcaacaaagtcagaaagattcctaaacggtctgaagggtgtaaaattgccatgccaaagccattgcacgagaatgtttctcatggatccagtttactacctttgatctgcgggttcattcccaaaatacttgatcagtaa

SEQ ID NO: 170877 - DNA, 959 bp, Arabidopsis thaliana landsberg
atggaaacttttggtactattccaccaccaccaccactaccaccccgtctagaattacgacgacaacgagcaccaccaccacaaccaccacctccaccaccaccaccaccaccacctccaccaccacggttaggaccacgactacgactacgactcctaccaccaccacgacaacaactactacgattacgaaagcaacagccactagtactacctgaaccattgccattacgaccacgggcgattccttggcttactggacatgatgtcaaaaaaggaaaatcttatgacaagttgagagaatacgtcgaaaatgtccgtagacaaaacgaagaatccgaacgtgtcgttttacccaaaagtatcagctatgaagaccaaaacttggagaaccagcaagacactcgttctaaacctggaatacacgaggtggtcgaagggagcgggaccaaacgacttgagtgggtgatctcaataagagacaagctcgagcaagcagatagagacgacgacacaacaatttggggaaagctctgcatctacagagttccacattacctacaagagaacgacaagaagtcctatttccctcagactgtttcgcttggtccgtaccaccatggtaaaaagcgtcttcggcctatggagcgccacaagtggcgtgcgctcaataaggtcctgaaacgtttaaagcagcgcattgaaatgtatactaatgccatgagagagcttgaagagaaggctcgtgcttgctatgaaggtcccattagtttgagcaggaatgagttcacagaaatgcttgttcttgatggctgttttgttctcgagctcttcaggggaaccgttgaaggatttaccgagatagggtaagcgtgaataaattttctggttttttccggttatctactatacttgctaaaccggtcttattttggcctgtatctgaaaagttgattttt

SEQ ID NO: 170878 - DNA, 1029 bp, Arabidopsis thaliana landsberg; identical to SEQ ID NO: 281

SEQ ID NO: 170879 - DNA, 489 bp, Arabidopsis thaliana landsberg
cctgcaactcatcgaactggcccggcagggcaagcgggtactgctgctggtggccggcaatgccgccgcccatgaacacggcggcgcgctcgatgccctggcggcgcacggcatcccgttccaggtagtgccgggcgtcgacagcctggcggcgccagcgcccgcctgaagcatcggccctccacccttaccgcccattccaccatgcagccccaccgcgtccatcaccagatccttcgcagccaccatctgttcgagcccttgagcgaagcgcaactcgacaccctgctggaaacggcccggctgctcaatgtcgacaagggcgaaaaactgttccaccagggcgaacccgcccatgccttctactttgtgatcgccggcacggtaaaaatctatcgcctgacgccggacggccaggaaaaagtcttcgacgtgatcgggcgccgccagaccttcgccgaagccatgatgctgatggacacccccgac

SEQ ID NO: 170880 - DNA, 599 bp, Arabidopsis thaliana landsberg; identical to SEQ ID NO: 45631

SEQ ID NO: 170881 - DNA, 1076 bp, Arabidopsis thaliana landsberg
gcttaaaatattgtctttcgtagtttcgtataaagattattgtcttcatgtctttcatcgatgcaggttcttagcatggcttgctgtatatttaacagccattgtggtaatcgagctgttctgaggcaaaaacctcttggaagacagtatacaagctggttttcattctggaaaagagaacataggcacaatacctggcttgcaaaattcattcgtatgaatgagctgaaagaccaagtgtgttcatcgtggtttgctccagttggatctgcaagtgattatccactgttatccaaatggttcatctacggggaggtatctcttctgtaaactgttctaatgagttgtgaatatgttttatttgttcaccctttaaattttttcatattcttacgctgttatttgcagattgcatgcaacggttcatgtcctgattcagctgacgaaatttctcctatatactcgttgtgggccacatttatcggtctttacattgccaattatgtagtggagagatcaacagggtaatctatctatggcataatacctttcaaattaatattgcaattgaggatcaacagtacattcatatgaacaactctggtcttacattcaaatggcatgtttaatcttaaagttttaatatgctgtttaggtgggctctaacacaccctctgtcagtcgacaaatatgagaagttgaagaatcagcaattgaaacctgatttcttagatatggttccttggtattcagggtatgtcagtgctacactaaaatttcccctttttgcttaccattgtctcaatgtggtgagtgaacgatgaaggcaggaaaattcacgaggtgctgacctatctaattatgtatttcagaacatcggctgatttgtttaaaaccgtgtttgacctcctcgtgtcagtgacagtatttgttggccgctttgacatgcggatgctgcaggtatacctttttaatttatgatatgatcaggtccattcagcattctgaagataagagcatttaatttttgctgctttcccttgtgccaaatctttaggctgcaatgatcaaatctg

SEQ ID NO: 170882 - DNA, 1099 bp, Arabidopsis thaliana landsberg
  unsure (1)..(1099): unsure at all n locations
atggatgtcaccaagagcctcctctgcttcatctctttcgtcgcctttcttctcttctcctccgtggcagaagccaacaaagcacaccaccacgagttcatagtacgaccgcgtttcaataatatgaacgttttttatcaaaatgttaatcaaaatgtaaaagaagatgtatgcttacatataatgtttatgcatgcagatacaagcgacaaaggtgaagagactatgtgaaacacacaacagtattacagtcaatggaatgtttcccggtccaatgcttgtagtcaacaacggtgacactctcgtcgtcaaagttatcaaccgggcccggtacaacatcacaatccactggtaatacacgatttaaaccacactctcgtgcttttagtgattaatgggcccgtttctttactgtattgaacggtttggtgtggctatcatctataggcacggtgtgaggcagatgcgaaccggttgggctgacggaccggaatttgtgacccaatgcccaatcagaccgggatcaagttacacgtaccggtttacaattcaaggacaggaaggtacactttggtggcatgctcatagttcgtggcttagagcaactgtctacggttcacgttctcgtccttcctcctgctggttcgtcttacccattcacaaaaccccaccgcaacgtccctctccttcttggtaaaattatactaaaaaatcataattaacaaattcagtgtgatcatagttaataaataggtgattttgattctgataatttatgattctttaaggtgaatggtgggacgcaaatccggttgatgtgttgagagaatctatacgaaccggaggagctccgaataactcagacgcttacaccatcaatggtcaacctggcgatctctataaatgctcttctcaaggttttactctttttcttcaaattaattttaattttatcaactgtccaaaaacttgtcccatatattttaccctgttttctcccaactgtcataactgactgtggtatcttttagtcaaaataaaacacatcagcccaaaagactcanatcagtatatcaactagactcttttataatctttg

SEQ ID NO: 170883 - DNA, 750 bp, Arabidopsis thaliana landsberg; identical to SEQ ID NO: 14820

SEQ ID NO: 170884 - DNA, 1673 bp, Arabidopsis thaliana landsberg
ttccaggtcttgttcaaattgcctaagagtttatgtaagaatttgacttctgtgatgatgaaattttggtggaacagtgttcaaaggaaaatccattgtattagttggcaaaggttaacattacctaaggaacagagagggtttggtttcatagatcggcaatgtttcaacaaggccttattggctaaacaagcttgaagactcttgcatgagaaagaaagtctgttttgcagagtttttaagagccgatatttctctaagtctgatttcattaatgctaccaaaggctctagaccttcatatgcttggaatagtattttatttggtagataaccacttcaggaaggtttgagaattgtgattgggaatgggaatcatacttctgtttggattgataactggttgaatgatggtcataatcggagaccaatgaatagacagcctctcattgatattaagttgaaagaaagtcaacttattgacccggtgtctagaaattggaatctcaacatgcttagagatctgtttccttggaaggacattcagttgattctcaacacagcccagtggtttataaagaagcctatatttgttgggatcagtcgaataatggtctttattcggttaagtctgggaatgattttataagcaacaagactcatttctgttgtatcaagagtctgaggttcatccatctttaaatccattgttagatcctctctgccttcacaagacagttctaagaattaaaatcttcctctagaaagttttaaaaggggcagttgttgttgaaggcagactcagaactagaggaatgattattaagcatggatgctgattgtgtgatgaaacaatcaatcatattttgtttcaatgcccttttgatagacaagtttgggctctttctcatttgtcattttcaggctttgaatttttgggttctgtttatgcaaacataagctctttgtttgatttaccacaaagacatgatattcatcatcggttgagattgttggtccttggattatttggttttttatggaaaatcagaattaaattgttatttgagggtataggatcaatgacagttaatctagtggacaaggcgtttgaggaatgtcatcaatggtgtttggctcaggctcatagtcatgaaaatcataaagttttgccctctcagaaatggattccacctctgccagatgaattgaaatgcaatatcggctttgcttggtctaagaaacatcaactctcaatgaggcatcttgggtggttagagactcacacggtgaggttctgctgcatagtataagatcttttactcaggtactatctctttttgatgctaagatgcaaagttgggaatgggctttagactgtatgtctcatcatcattttgataaattcacattcgcctcatccacctatgacattattcaagctttgcacaaaccaagtgagtggcctaatgttttgggtcatattactgagcttctgcttctcactaaagacaagccaaattagtttctcatgatggaacgtgctcactgtaatagaggcgcttctgacatagcaacaagtgtgatcacaggtttcagattgcaatcttacgtggcaagaggataccctttgtggatgacaatggttttactgcagagagaggtaattagaat

SEQ ID NO: 170885 - DNA, 511 bp, Arabidopsis thaliana landsberg
atgaagtttaagaccaagaggtttgggattagatttggatttggtaaaagaatcaacaacaaaggcacacaacaagatcaacaacaaaagggagttggtaacaacaacaacaatagtagctgcagcaactgtgagatcaaatgggaacttaggccaggaggcatgcttgttcaaaaaagacaagagagtattggtgaagacttgatctccattagagtctctacttttgctcattttcatgatctttccattgaagccacctccacttttggtaagtttcttgtccctcagcatttctcaacctttatgtttcatcttttgggagacttttaaatgactctttatcagattcataacataagattctatttatgggtttacaggagaacttaagatggtattatcattgcttaccggtttagagccaaaacaacaaaggctagtattcaaagggaaagaaagagaggatcatgaatatctacacatggttggtgttggggataaagacaaa

SEQ ID NO: 170886 - DNA, 391 bp, Arabidopsis thaliana landsberg; identical to SEQ ID NO: 61124

SEQ ID NO: 170887 - DNA, 1419 bp, Arabidopsis thaliana landsberg
aatgccaaacctgacaacagatcagaatcttctcccactccaacggaggttttttcaaatattataattctgtccatctctgcaaaaattatgttttttagatatcagtttcaataattttttcatacagataattacttatcctttttgacatatcctatcaggatcaaatcactgattctcgagacattggtgcacatgatctggatgataaccaggtatgctctaaacaagataaacacaacatctttaatactataaactaatgtttctactttcaaacctaatgatggttttcttctttgcactaatattacattataatgtacaggaagaaggttatgttgatgtttcagattcatctccagcgcgagaaagagagaaaccaactctgtctgaagctgaagtttttcttgtagcagagttgttatcaaaatcaaaaacaggctcatatgaacttttaccttcaatgagtaaatcagagtttgcactgtttcgcaataccctctccgctgcaccgaatacgtatggttatactttcattttatttatcatcaatacagttataatcttgttataagcttaagcttttttttttccttgcagtgaacatctcacttcgtgtggattcttaatttcaaactcattccttctatcacttgccaagcctacaaactgggtttcaactctggtataaaatcaacaatttttttacaaatattacctttataatctttagtgagaaagtctaattcttattgtttgtttacctagcatatggaggtgttggtgtccttgctttctcaaaagcttgcgaccacacttacaaaccagcgtgccgcttttgttcaaccatggttcgtaaaccatctacaaggaaaattaaaaagcttcaaagctgccaaaatgaagtcacgcgtcaagtggtccgaacccatgaaacagttcatcctagggcccaacactaaatggttcacagacattgataccatttacttgcctatgatatgggattcaaaacactgggtaggacttgcaataaatctgagagtctggtccgttgaaattctcgatccaaatacagatctttacgaggaagatgaggttcgacgtttcattgaacatgttgttacaatcttgccatacctcatccaaaggtattgtaagcctgaatgttcttagaatcatggtcttcagcctttttattggaagcgattagatggcttatataagaatatgcaatctagtgactgtggcccggtggcaatgaagttccttgagattcaggcaagtgataatcccccagagaacatggcgaaaataacagataaacacgttgacttttttaggcgtaaatattccatggacatttatgaggagtttgtctgccccctctatgcatctgactttagtaacaag

SEQ ID NO: 170888 - DNA, 1576 bp, Arabidopsis thaliana landsberg
aaaacgatgctcgccagaggagagaatgagattgcgggcttgttactaatttaggggttattgttagctcgaaattcgactaccacgctggcaattgagaatcttcagagagctactgatttcgaaaagttattcaagtatccatgggcgcagattgtttactcaaatttggtaactgaagtgaagaaattcgatattgacattttgttaaggaaacaatatgttctatttcgatttgtttctgcaattcagctatgggcattatcatcggttctgaagttgggagaaaagtttggcactagagatgaatcatctagtgaaaatattccattaattctccaatggagatcaacatcgtctccaagtgcaaaagctataacaataattgcagatggtgacaaggtacattttcttagatatggctttttttttttgttttaaacactgttttttttgttttaaacactgtttataaataaagagtatgttttacaatagtttttacaatcaagttttaaagatttacaaagggttaaaagcaatttaaactatttacaacggattttaaaaggttaattaagaattgtgcattatttttacacagtttagaattttgtttatctttgcaggttgaagtgacaccaatagttggtgttcatactcatgaatatgaccacttggtttcacagaagaatcctgaagacaagaatctgttacatgtttttgatcttgtgattaaagggtatataatgagcaagaatgactagagacagggatggattgaagtggaacaagtacatgaaggtagaattgattatgtaatgaaacattcaattgaaacacttgtgtatcgcagaagaaaaaggaaatcaatgtcctttagtgagaaaataggacttgtctatgaaaactgtgaagatcttaggtacaaagttggaaagatggatgactatttagggatcaaaagagttcttgtcagttctagtagagaagaagaaaaaaaaaagaggaagaagataattttgcgagggatatattcctcgcaaattttacgacgaattagcgaggttgtcttacctgcttgcaaagtcctcgcaattacgtagcaaatttttgagggaccatttccatagcaaatgtttctcgcaaatcgcttgttttcttgtagtaaaaaggtttctaaaaaaattttaaagcgctgaaaaagttattgtaatgttaacactttaactgttagtaattgggcttagacctcttatttacgaaaaagcaaaccgttttagtataaactcactgaatcccaaaattcactaaaaaccaaaacaaaaaagaaaaggaaaccttgaaagtaacaaaaagtaaaaaaaaaaatttagagaaactgtcgtctctctcactgtgtcttcttccttagaacaatttgaagaaattttgtatctccatcaaaggaatcaattgaaggtaacaaatttatgatactaaattttgatatttgggttcgttcgattttatttctttttatcgaacctctcctctattataggaatatctagggttttccgttcgaaaattccac

SEQ ID NO: 170889 - DNA, 1307 bp, Arabidopsis thaliana landsberg
acattctcggtcatggtggatttggttcagttacaaggcgagaaacgttttatcctctttgctctttttcttttctgtcattttttgagatgacatttgcaaattgtttcagggaaaactgcaagatggaagggaaattgcggtaaaacgcctttctagcagctctgagcagggcaaacaggagttcatgaatgaaatagtactgatatcaaaactccaacacagaaacttagtccgggttttgggatgctgcgtcgaaggaacagagaagctattgatttatgagtttatgaaaaacaaaagccttgatacttttgtctttggtgggtcacaacttgcctctttcttgtagcattcctctctctatatgtcgaactgcttatttgatagtttttacatggtatttttgcttaggttcaaaaaaaaggctcgagcttgattggccaaagagatttgatatcattcaaggtattgtgcgtggacttctctatctccaccgtgactcacgcctcagagtaattcacagagacctgaaggttagcaacattcttctggacgagaaaatgaacccgaaaatatcagattttgggttggctcggttgtttcagggaagccaatatcaggacaaaactctcagggttgtgggaactctgtaagagccattcttcgataacatgatgaactagattcccttgtcatgatagtcatatgtgaaactatgtgatgtttgcacagaggatatatgtctccagagtatgcatggactggagtattctctgagaaatctgacatctacagcttcggagttctaatgttagaaatcatcagtggagagaagatctcaagattcagctatggcgtagaaggaaaaacccttattgcatatgtaagtaagatttataggcattgacacagtaagatcttgtatttgattctcattaagtgcgcagatctcgctgactgtttgaaaacatgtattgctcttatattcgcttggtctgaaatcacaacaggcgtgggaatcttggtctgaatacagaggaattgatcttttggaccaagatcttgctgattcatgtcacccattagaagttgggagatgtattcaaatcggcttgctctgtgtacaacaccaacctgcagacagacccaacacacttgagttgctggctatgctcaccacaacatcagatcttccatcaccaaaacaacccacatttgcatttcacacgagagatgacgaatcactgtctaacgatttgatcaccgtcaatgggatgacacaatctgtgatccttgggcgttaa

SEQ ID NO: 170890 - DNA, 1241 bp, Arabidopsis thaliana landsberg
  unsure (1)..(1241): unsure at all n locations
tctatttaccttaattcaaaaaaaaaaaaaaaaaaaaaaaatnagtatggagagtcgacaatgtatatggcaggagtatcactttagttaaagcagagattgcagctcttttcccttttgatataggtcaatgccaagttcgatacttaggtttgcctcttgttactaagagactcatggctgaggattatgatcctcttcttgagcagattaggaaacgcatcgcgtcgtggacttcacgctacctctcatatgcaggtagctcaacttgattcaatctatcctctggagtatttgcaatttctggctaggcgcttttcgtttaccgagacagtgtatccgagagattgacaagatttgctccgcttacctatggtcgggtttagaactgagttcaaagaaggcaaagatatcgtgggaaaaagtttgtaagccgaaaatagaggggggtttgggtttgcgaagcttgacaaaagctaatgatgtttgttgtttaaagttggtctggcgaatcatttctaatagcaagtctttatgggttcaatgggtcaccacataccttcttaggaggaagcatttttggacattgaagcagaatacaaatgcaggctcttggatttggagaaaaatactaaagtacagagacaaggcgaaataatgtgtacaatgcatcattctctaccaaagaaacgtggcaccatatcagagctccttctcccacagtcccctggtacaacgggggttggttcaatcacgccacaccaaagttttcgttttgtacttggctcgcggtccaagataggctctcaacaggggagcatatggttaaatggaacagaggagaatcgggtctctgtgtgttttgtactaacactatggaaactcgtgatcatttgtttttctcctgcaactatgtctcgacaatttggggtgacgtagctaagaagctatggaagaccagattcacaaaggaatggccacaaattctggcctatgtttcagacaagtcattacagcgagtcgatggtttcttaatccggtatgtctttcaagctacaatacacacagtttggagagagaggaatgggcgtcgtcatggagaaacaccgaacaccacgtcacacttgataacttggatagataagcaggtgatcgaagatatgacaagggcaacgtacagctcactctaaacattctctaaacacctttaatttctaactattttttttctcagcttttct

SEQ ID NO: 170891 - DNA, 377 bp, Arabidopsis thaliana landsberg
  unsure (1)..(377): unsure at all n locations
atggagaaacctggtggcttctggatccccaagaaaagcaacaaagagtcatcttgggaagagctggcctttgcagaagacgatgccgccggatctttgtggccgccaagatcttatacgtgtagcttctgccggagagaatttaaatcggctcaagccctcggtggccatatgaacgttcaccgaagagacagagcacggcttaagcaagccgacgaccaatacttattccccaaatcttcttcgtcttcagagtatccatcttataaagatagcgataatattcatgaaacctcttgctatactttggttttaacaccaaaccctattattttaagactcaacactctngnngtattganccttcttcttcttct

SEQ ID NO: 170892 - DNA, 946 bp, Arabidopsis thaliana landsberg
  unsure (1)..(946): unsure at all n locations
attcccggagtttcccgtaaaactcgagggcttcagggaacaaaccattcttagaaaaagctctgatgattgaattccagaggtaaacatttttggccggagaaactcgtcgtaaagcagagagggaagaggcgggttcacganagtgagagtacttgtcgataagcttaccggagaagaagtcggagctgtcaagaccaagagagatcacaagggcgtgaattcgacgaagctcattgaggttagatgacgacgaaagagctctagagatgaaaggtgatgacactctagtctgcatttcgccattgtagagttttacctcttcttcattgttttagtttccatcgaattaattattcaaaacagaacaaaacaaatattcaaaccggaataacccggtttaaaccgagaaacttatttcttttccacgaaaaaacatgcaacgacgattcaaagcagccgacacttttgttagacctggttatgtcgatcttgcaacgcttgagctttgctgattttcatagagccagatgcgtttcttcagaatggtattcggcttcgaaatcatgcataacaacaactccatggatcatcacgattccatacaaatattcgaaaaacagcaacaatgattcatcatgtaagttgttcgatcctcgtgacaatagttggtacacattaagagatctcgggattgatatggctacgagtcgttgtttggcgagttccggtagatggtttcttctgttagaccataacctagattttcaccttttgaatctgtttactagagagaggattcttccgactcttgaatcaatcgatggatctccgatggaacttatgagaatgggtgattataaagagaaagatgagaggtaaatatatctaaattacttactatgtcaagtttggactagctatctatcatgtcttatacatatgc

SEQ ID NO: 170893 - DNA, 1326 bp, Arabidopsis thaliana landsberg; identical to SEQ ID NO: 11474

SEQ ID NO: 170894 - DNA, 1175 bp, Arabidopsis thaliana landsberg; identical to SEQ ID NO: 24965
  unsure (1)..(1175): unsure at all n locations

SEQ ID NO: 170895 - DNA, 511 bp, Arabidopsis thaliana landsberg; identical to SEQ ID NO: 68659
  unsure (1)..(511): unsure at all n locations

SEQ ID NO: 170896 - DNA, 595 bp, Arabidopsis thaliana landsberg; identical to SEQ ID NO: 57891

SEQ ID NO: 170897 - DNA, 522 bp, Arabidopsis thaliana landsberg; identical to SEQ ID NO: 44758

SEQ ID NO: 170898 - DNA, 596 bp, Arabidopsis thaliana landsberg; identical to SEQ ID NO: 76536
  unsure (1)..(596): unsure at all n locations

SEQ ID NO: 170899 - DNA, 826 bp, Arabidopsis thaliana landsberg
cacaggacgtctgaagccgacctctggagtcttactcaacttcagaacaaatccctgcgatcttacgtcgaaaaattcaaagcaatcaaatcgaagattgcgaacctaaacgaggaggtagccatagcagcccttcataacggtctgtggttttcctctaggttccgtgaggaactcactgttaggcaaccggtctctttagacgatgcccttcacaaagctctctacttcgccaaagccgaagaggagctcgctgtgctggccttaagattcaaagaatctaaaacgcaaaacgctccccttgcaattaaaaaacccttcaaaaaggaaaaccaaacgcaagggcagcataccttactcgcaatagaagaggcagctgaggacgagagtccagaacttgacctcgaaaaatattgcaagtaccacaaaaaaaaggacattccaccgaggagtgtcgcgccgttaaaaaattaatcgcagctggggtaaagactaaaaaaggttcaaaccccaaagctgaaacccctcctcccgacgaacaggaggaggagcaaactcccaagcaaaagaaacgggaacgaacactggagggaagtgactctcccccacctgttaggagagaacgcatagacctagtctttgcagaactcgatctaggtggcgggacaggaaggtcagtcaccacacctccccctgccccgcataagaaaaacatgaggtttccattacgcctctcccctaaacgcatagatttcataatggaagggtcttagctctgcaacgactcaatcaatttgatcaaaactcatcagaggaaggcagattc

SEQ ID NO: 170900 - DNA, 500 bp, Arabidopsis thaliana landsberg
gtgctattcagacagattttaccgggggaagtaacagggataatcctgaaaaggtggcctttatgataaagcaaacggcgttggggcgtgcaggaaatgctgatgatataggaagtgtggttgccttcctttgtacagaagatgcaaaatggatcaacgggcaacgaatagaagtaacaggcggcattaatctatgaaagcagtccaaaaaatatttttagatgaaacctacagacagtcagactatttttgtcaccggatcaacggatggtatcggaaagctcactgctttcaatcttgcgaagcagggagcccgcctggtgatccacggaagggataaagataaaacgggccgggtggtcacggagctaaaagaaactaccgggaatgaccggatagaaggattggtcgcggatgtttcttcgctggatgaagttcggggaaaagcgaaagaactatggaaagacaagatcagttagacgtacttatgataatgcagg

SEQ ID NO: 170901 - DNA, 1169 bp, Arabidopsis thaliana landsberg
tcccgtcccgccttcattgccaaattcaaactggaaatctctctctcactcactcaatgagcgatttcattttgatctctgacggcgaggatgaggctactccaccaccgtcgaagagggctcgaaagaatcctatacccacggatttgaacttggataccgaaccatcactgcagaagcaaccgccgggatctgcttctactccgttgttcatcgacgagacacctctctctgacgatgtcactgtcctcaagtcttcctttggttctggaatcggagtttcttctcgccgcgaaaacaagttttccggtaagttgatgtcctcaatcgagaaatctctcaatccgtctttgttaatttcagttcgccgacgattatgctgaaatagtttcttttgtagaggaatttatacttgggggagactgttctacttgtcaattttgtgattcatgatgagtctttcagtttcctttttagggttttactgtttcgctgagttttttttttgttttattggaatctgattaggtaaacgagttatatctcttgaatcggattctgaagacagtcctggacctggaacttcaaagaagtatgaacctgtacatgctgattcttcgaagcaaccttgtagattggaatttggatccagtgatgctaattctggtgaggctaactatgacctattaaaatatatgcgtcatgatgatattcgattccaaagggtagtttcttctccacttataaattgcttgtggttgttttctttcagatgatgatcctagttggatgcggagagctagttttcaatcttcgctgtctaaagatgctattgaggtacttttatctgcattcataccatattcttcgtgtgtttacatgattaaggaattgttggctatttttgtgcttcctaatgctttcttttagagttgtttgtttattttgggcattgctggttacttctctcttttatttggtacaatctgtagaaaatattgcttacgtcttttcttattttgattacttgcaaaaatcaggtagattctgaccatgagaaagaagatacaagcgttgagaaaatgggtcgaaaaaaggagaccataacttctaaaagtacatctctttctgctgattcattgcctaaaaagaagatgtcaaaagatgaa

SEQ ID NO: 170902 - DNA, 601 bp, Arabidopsis thaliana landsberg; identical to SEQ ID NO: 75122
  unsure (1)..(601): unsure at all n locations

SEQ ID NO: 170903 - DNA, 436 bp, Arabidopsis thaliana landsberg
atgggcagagcagcaagatggtttaagggcatgtttggcacgaagaagagtaaagatagaagccacgtttccggcggagactccttcaaaggcggcgaccattccggtgacttcaatgttcataaggactctgtttggttgggaactattttgacggatacagagaaagaacacaacaagaacgcaattgtggttgcaactgctacggccactgccgcagacgcagcggtttcggcggctgcggctgtggttagactgaccagtgaaggaagagcgggagatatcatcatcacgacggaggagcggtgggctgcggtcaagatacaaaaagtcttcaggggctctttggtaatttttgcatcttcaaaatattttaatattttggcaaatggttttgttaagttcgaatttttggttatgacacagttcgaatgtt

SEQ ID NO: 170904 - DNA, 574 bp, Arabidopsis thaliana landsberg; identical to SEQ ID NO: 72612
  unsure (1)..(574): unsure at all n locations

SEQ ID NO: 170905 - DNA, 1920 bp, Arabidopsis thaliana landsberg
cctctacgttcaaagccgatttccccgagatggattgatttgcagcaccttatcaattcaaagagcttttggtcgcagcagaagaatgacctatatagatttaggtttgatcaccctgaagcaggacaatctgtctttctcctcccaaaccctgcctctacttcgattggagaaggcagtaacatagagttttgcccaccaatataagccctctatgtctccggagatgaagttgtgccgatggaaggagtgaatgatgatgaagctccaattcaacattcaaataatgaggcagaacctatggacgagtcttatgcaacacaacaattttactttgaggagtactccgcgccaaggcaaagcaaagactcaaaggaaattcacaagcgccttggtttcctccaaagctggtgtaagcttcaagacaaggctttcacagcactcaacaagaagtttaacgctctccaactcaagttcaaatgttcttcttctaccacaacaatgccacgagacatgccttttgggagaagcggatccactagccatgagcctatgaattacgatccgcctttgtcaccaagaaaattttcatatgagccaagggaacaccagttgtacctttaccactgaggcaatcatccttcgaacctagagaagaggaaaggaggagcaagttgaaaaagcgcagaagaacaaggaaatcggatgttggggcaagccactccaccgcaccacttgaggagccactcgatcaacaacccaagcaaagggtcgagcatctagctaaaccaagtacaacacaacccgctccctggagctacacaaaggagagcatggatgactttgtctccgcctacttcacctaaccgttgaggtaacaccactaccaccattgtatataccatagctttttatttttctttgttcgttctttgttttggtcttgaattctttctcagattgggggagggttcaagacatgtttgacattgtgttctcttttcttatttcaaattttacatcatctaaggcatagaaaaaaccagaaaaaattgaaattttttcagaaaatgatttcatcaaaaacagagtgtcatgtagattgcatttcattttaggaatgtatataaagtgcttgcatttaggattgctcatttgcatagggataatgatgatttcaaaccgttaaggatgttttgatccagggaagtaagttcaatgcccaagttgttagttctttgttgcataaacgattgtttctctaaagtaagactgcaccctgttttgaatttagaacttgactatactggtttgattcgaaactcgctaatctgatgtcattccctatctattagaacctgaactgaatttgcaactattatgtctatgcattgtttgtgaactcatggctaccatatacatacttggattatcttattcacttcaccaccctttgttaatccaagtagctaactctcatttttagagcagtttccaataccctaacctaagcattctttcaagccatatatcacttgtgagtgtttgtgaggtcttatttcgatcaagcttagtagaaagtgttaggtttgtaacgacaaagatagtacctcatgtagttttaattcgcgttatccggactagattagactaggtgggtacttatactatgggttgggaagagtttaaaagagaaaaagggttgaattcattgtttacaagaaaagggaaaagaattttaggagaagtaagctaaagaagttagaaaaagtctagtgaaggatttgagatggttaaagaaaaagattgggttcttgttagctaatgaagaagggtaaaaagccctaagattaaaagagatttaaaacagaacctaagttgctaaagaaagccaatctcgctagaagtatcaaagaatta

SEQ ID NO: 170906 - DNA, 688 bp, Arabidopsis thaliana landsberg
ctacactcagccggagatcgctaaacaggctaaagcctccgccgcgaagatgatcatcacgaagaaatgtttagtcgataaactaacaaacctcaaaaacgacggcgttttgatcgtttgcctagacgatgacggtgacaacggcgttgtttcgtcgagtgatgatggttgcgtgagtttcacggaactgactcaagcggacgaaacagaacttctaaaacctaaaatatcgccggaagacacggtggcgatgccgtactcttccggaacaacgggacttccaaagggagtgatgattactcacaagggtttagttacaagcatcgctcagaaagtcgacggagaaaaccctaacctcaacttcacggccaatgacgtcatcctctgttttctcccaatgtttcacatttacgctctcgacgcgttgatgctttcggcgatgagaaccggtgcagcgttactgatcgtgccgaggttcgagttaaatctggtgatggagctgattcaaaggtacaaagtcacggttgttccggtggctcctccggtggttttagcattcattaaatcccctgagacggagagatacgacttgagctcggtgagaattatgctatcaggtgcagctacactaaagaaggagcttgaagacgccgtgcgactcaagtttcctaatgccatttttggtcag

SEQ ID NO: 170907 - DNA, 1172 bp, Arabidopsis thaliana landsberg
tgttcgattaattacatcctcaggcgtgacaaatccaaattcacaataattcatataagtaatacagcttttcgattacatcttaaaccaccttagtgaggttttataactaaaaggtttaattctattaaactaaacaaacattgttttttaaaaatggtatgcccaaaaatggtttacgaaaaatagactcaaaaatacaaatgtcattggcgaaaaataaatgacaattaatgaatatacaaataatagataaaaagcaaaatgaaataaattttcaatgtttcatttagttaaagatagtgtatcttgaagatcataacgtattttagattatgtacctgatttataagtggcttataaatcacctaccattttaccagtaaccgatctaatctacacacaaatatcatcttttactcttataagattttaaccatatttttagattctcataagaatcaatgcaatttcatataaaacatcaaaataattctataaattaaaattttctcaagataatatttaattttatttataaatctcttaattagccatctttctacatttatcaaaagatattagctatctgttctcataggcaatatgataaataaaaaacttcttccaagttaggggcacaaaaagagtttccctgggacttgggctgagaataatgaagtggctgggaaatgattagttaaggatggcttgatgaattctcaatattctgttgagggaacaaaatatactaggaaggatgcaagtccagtttggtctaaaccattgtacgaaccaaaaacaatcaataaagtaactcagggctcacaaatggtcgataatatttctaaagtttcagttatagaggatgagcagaaggatttgatgatgggagatgtactagaggtacaagacaagagtctcactgtagggttgaatttcagatattttaaatcacgtttggagtaacaaaaaacaaatgtgagaaagaactcaattagctccaactgaatctagtgttattagggatactttggaaactccaattcaatctttaagatgtaggattgatggattcatggaaatcggcagatccatctatgagtttagtatggtggtgtttcctaggaattgacaatacaattttgcttggtgcaaagtgtcttcggagg

SEQ ID NO: 170908 - DNA, 588 bp, Arabidopsis thaliana landsberg
aagtagcttaaggtagacaagcttaggttgattgaagtttgtgggacatcagaatctgaatttcattgtgtaagtagcaccagtttctctaacatgcaattcaatcttcaaagtactgatttaggactgtgttgatcaaacaggacttgacctccatgatggacctttgctttgacttttttcgcgtatcaaaggaaaagaaagatcttaaggaaacaaaaggaagtaaaagtaaggttctatcatatgtggtatacatattgttacaatggctcgatccggtgaacgattattaaaacaataagtgcttatgtgcataattttgtgtaggtttggttgatgtgttaccccaaaagaagaggagacttgatgatacacatctgatgatgaggtacttcttttgctagttctgaacaaattgatctgtttctagatagctagaacaaattcttccaaaagggtgcatagttaattcccaaatcatttatatgtgatcaccactggtttaatactaaatttgattgagtttctgcagcctcatgaaacaaaagacaagagaagataaatcaagtacgaggactgtaagtc

SEQ ID NO: 170909 - DNA, 270 bp, Arabidopsis thaliana landsberg
tgtataaccagaatgtcttcagtaatgatgtgttgttgtttgcttctcttgtttggtttgttgtctgaaggtagagagattctggtgggaggcaaatctaacacatggaaggttccagaatctagagatgaaacactaaaccaatggtcaggcagaacaagattcaaaattggagattctctctgtaagtaataagatttgactttggtacatggctctgttttgtttctcataaaagttcattttgtctttcaacagtgtggaaataca

SEQ ID NO: 170910 - DNA, 422 bp, Arabidopsis thaliana landsberg
tgcaggagaaaaataatgttttatatgatcgcgttattaggcattttaggtttaattggtacagatttatttgtgccatcattaccagccatagcacagcatttccaacaaagccccaaccacacccaattgacgataagtttatttttggcaggatttgctttttcccaattattctatggccccatctcagacaaaacgggtcgcaaagcacctttattatttggtgttagcgtctttgagttcggctcattcatttgtaccagcgccgattcttttacctggctttgcataagcagaatgaatcaagggcttggggtaggcagaggcttatccttagcacgagtcattattcgcgactgctaccatggtacagaacttgctgtgaaaacttctcaactagctgtttttatttctatgac

SEQ ID NO: 170911 - DNA, 831 bp, Arabidopsis thaliana landsberg
aaggaaagatcatagctccaacgagtgcaagtgcatggggatcaggtctcttgcaatggatagaattcaaagcacttcaaggaatcactataaaaggaaaagggatcatcgatggacgaggatcagtatggtggaacgacatggtaaacagttaattcaattttcttggctaaacaaaattgtgaaagcttgcaatgacatctgctaacgttctttttcaactgtgacagatgggtacaaaaatgccaaggaccaaaccaacagtaagttttacctgagtaaattacatggatattgccaaattaaaaccaacatttattttggattcaccatggttggtatgtaggctttgaggttctacgggagtaacggtgttacggtcagtggaataaccatacagaacagccctcaaacccacctcaagtttgataactgcataagcatccaagtttctgatttcacaacttcatcccctggagattccccaaacacagatggaatccacctgcaaaactctcaagatgccgttatatatcgcagcacgctggcttgtggtaaccacagactctacttattgaagctatgatgaaacttaccacgatgaagaaataacaattcctttcattctacaggagatgactgtatatcaattcaaactggatgctcgaatatcaacatacacgatgtagactgtggccctggccatggaattagcattggaggactgggaaaggacaatacaaaggcgtgtgtttcaaacatcactgtccgtgatgtcacgaagaatgaaactacgaatggtgttcgaataaagtcctggcaggtaaattc

SEQ ID NO: 170912 - DNA, 586 bp, Arabidopsis thaliana landsberg
tgtttgtttcaatatatatactcataaaacgtaacatataatatgtgtgacagggaggtggcacttgagttcctaaattcatcgatggaaatggtgaaaaatgtagttaacattctgatggagaatgttggagtgacactagaagaagagaaaatgaatggtttgatgggaaccaagatggtcaacatgaactactaccctacttgtccgagccccgagctgaccgtcggcgtcggccgtcactcagacatgggaatgttgaccgttttattacaagacggcattggtggtctctacgttaaactagacaacggtgaatgggccgagatccctcctgtccatggagctttggtcatcaacatcggcgacactttgcaggtaatttgtttaaacgaattaacaatgaatggcctgatatagatgttgtatccatgtttatttctgaaattctaataaaaatatgtaaaaatttcaacagattttgagcaatgggaagtacaaaagtgcggagcatagggttcgaaccacaaacatcggatcaagagtctctgtgcccattttcactgcaccaaatccctgccagaag

SEQ ID NO: 170913 - DNA, 718 bp, Arabidopsis thaliana landsberg; identical to SEQ ID NO: 50575

SEQ ID NO: 170914 - DNA, 381 bp, Arabidopsis thaliana landsberg
atgtcggaaaagaagaatggtcgacatatgtctacactttgagggatgataataaagtcgatcaggttaaatataatctctccgttgttggggtgactgcttcaggtgaaattgttttggtgaagaagactcaaacacttaagccattttatgttttatactttaaccccgacaaaaatactctcttaactgttgaagtcaaaggactacaccggggattgtatgccgtacacagaatttacgcctttgtagaccatgtagaggatcttgagtttaatattatgaagacaacatatgctgcaaaatcaaaattctctcaggaagaccgtttttaattacccgcaacaagatctttgtaagcttgagagccccaacaaattc

SEQ ID NO: 170915 - DNA, 400 bp, Arabidopsis thaliana landsberg
atggggagtgcgcccttgagtattcagattctcgatatcgtcctctacgccgaagaccgacatccgcgcgtgctgtcgcttcaacccggacgactcaacatcatcacgggcgattccaagacggggaaatcggcccttatctccatcgtcgactactgccttggcagcggttcctaccaagtgccgcacggcgtcatacgcggccatgtggtctggtacggtctgcgtctgactgatggccaaacgcagcacttcgtcgcgcgccgtgctccggacgcgaaccgtcagagcacgacggatgcctactatgccacgggctccagcttggccatcccttcgctcgaacagttgaacagtcaccaccaacatcgacaccgtggtggaacgctggggcgtagtg

SEQ ID NO: 170916 - DNA, 598 bp, Arabidopsis thaliana landsberg; identical to SEQ ID NO: 21450
  unsure (1)..(598): unsure at all n locations

SEQ ID NO: 170917 - DNA, 826 bp, Arabidopsis thaliana landsberg; identical to SEQ ID NO: 4901

SEQ ID NO: 170918 - DNA, 1670 bp, Arabidopsis thaliana landsberg
cgacgacggaatattcaacccactcctcagctttggcaacgctgactcgactagctctattaccaagaaaactcaccgtcggcgtgcggccaccgttgacgaataagggaggtagcttcctaaccctaatgttgcttttccttatttggtttgggcctagcccaagaactgtttaccctccctccaatccatttttcaagtcctcgaagcccatgaacagtttttttaggttaagctcacatcttgtttggcccaggttaggtctttatttcactctagcaaacccaaacgttttgatttctttctcgtctttggagagtagctaccttccgagattagttgtgatggtcattgtttggttttggttttctctcccacaaagtttggcaaataggttagctcgttggttttatgttacaaatctgatctcaaaaagctttgggctaactccacttttgaagtgttttagagtcttgatgcccatgatccgtattgttatgtttctgtcaattacaacccctatagcaccctttaactttgttttggctggtcgtggactccacgctaacagagtaacggttcttttaggctgttttgatagatacttttgtcgagatcatttgttaattttgtttcgaaccctatttgagactctcatcccaaaccattggcaattgtccaaaagagtgaagaagaacgacattatgatcccgtctccacgaagcggtggttaccgaagcttcttcaactctctacctccttacccgccaattaccaagctccttcaaggtatcttcaagtatacggataagttgcaaatctgtgaaagcttggcaaagagcggcgttatgatctaccctttagcttctcccgtggagcaccttttcaaaggctcatatgcattgtttgcaatagccgtttatgaccacacgttggtcgaagatttcgcgaagcccgtcttcatggtcgaatccgccaaggcctcaacagatttttcaaaccttgtaaacttttttaaaagtgaacacctctttgcaaaactcatgaagcctctatatttattttcttgtactatcttagttctaatttgtatgaacttccttttttttaggcttaagtgaatagaaattattgtttgacaaaaaaaaaaaataagatgaggacccaaaagctcatagttcgtcatctgtaacatgctgcatttttcaggcaaagcaatccgactaaaatcaaggagatgtggaggggagaagcttccgcctgataccaacggtaagagctccacatgcggtgtagcgatgcagagtagaaaagggagatctacggcgaagaacgagagagacaagtagatagatctgagaccgaaaattgtggcggttccacgagatctttgtcgatgggggaggtatatttgatccggcaaagcgaagccaacgtcgaaggtctctgttttctattccctactattttctctctttcatgactgagcaaggatctcttcaacaaaaacgagatcggctctcttcctcctcaaaacaactctacagtggcggcatggcaacaaattttggatcaccatctcgtttggctcgcgtcgtccagactcaccagatatcttgttctggcgagaatctacagtattggacggcggcttcgttcaagttctttga

SEQ ID NO: 170919 - DNA, 688 bp, Arabidopsis thaliana landsberg
cattgtgtgattcaaggagatggtaaggcatatttaggaagagcttaccgaaactactctagagttgtcttctatgaaaccaccatgtccaatgttgtcgtacgtaaaggatgggatgcttgggaatatagcgaccaagtgtacgtaatatttattctcttcttcttatactatatgcatttgttacatatatatttgggagccatattttaacaacaatcacgacttacaaaaaaccaaaaatcagggataaatttacatatgcggagataaactgcacaggggaaggagcgagtaagaaaggaagagttggatgggagaagaatctttctgctaaagatgttgaatctcttatagaaccaaaaaatttcattgatgaagatggttggatagccactcttccttcttctctcgtctctttatatttaccgtcttccatcttttaaatgatcaataatttgtaaatctagtgtacgtgaatgacctttgtcattgtgatttacccataggtttatcgctgactcatttaaaggcaaatgatggatatatagagttttttggtttctcaataatatgtagtttcttcttatgttcgtgtatcaattatatcgttgatcggatagactacaatgtccaaaacgtttctacatcggtcgaggaaggctataaacaactacaaaaggtttga

SEQ ID NO: 170920 - DNA, 650 bp, Arabidopsis thaliana landsberg
ttttttggtttgttgaaggactttttattgcgggaacggaaacgaactctcccacagtggaatgggcattggctgagctacttcgtaacccagaggctatggctaacgctaaagtcgagatcaactttattgttggcccaaaccggtacgttcgtgactccaatctattagagtttccttatctgcaagctgttgtaacagagactctccgtttgcacccaccgactccatttctaatcccacgcagagctgagtcagacttggagattttaggataccccattcctgaaaatgctcagattctggtgaatgcttgggctataggacgagacccgaccgttggggaaaatgcggaacagtttgagccagagaggttcttgggacgagacattgagatgataggtaaagattttgagatgataccgtttggagctggactaagaatatgccctggaatatcactggctttgaggattgtacctctcatgcttgcttcacttatttattcgtttgaatggtatcctaaaaacgtaaaaaacgaggtcgttcctgaggatttgaacatggacgagacgttgggatttaccttgcacaaggccgaaccaatttattctgacaccctcgagaaagcgtacaattatttttattag

SEQ ID NO: 170921 - DNA, 836 bp, Arabidopsis thaliana landsberg; identical to SEQ ID NO: 47120

SEQ ID NO: 170922 - DNA, 1035 bp, Arabidopsis thaliana landsberg
actcaatgcaaaaaccctaatctcatctgactccaacacattccgcatagccgatcttggttgtgcaactggaccaaatacattctttctcgttgacaacatcatcaaatccattgaaaccagcttaagaaaatcaaactcgtcaaaaccagagtttcttgtcttcttcaacgacctcccacaaaacgacttcaacactctcttcacatctctccctcaagaccggagttacttggcggtcggagtcccgggttcgttctacggccgtgtccttcctcaatcctccgttcatattgtagtgacgatgggggccacacactggctatcgagtgtaccaaaagaggtgttggacaaaagctccaaggcgtggaataaaggcaaggttcactactcaaatgccgcggatgaagttgtgaaggcttatagagatcagtttggtcgggacatggagaagtttctagaagctagggctacagaaatagtaagtggaggtcttttggttgttggaatgtgtgggattcctaaaggaatgcctttctccaatcttgccgacagtatcatgtatacgtccatggctgatgttctcactcaaatgcattccgaggtatttcttcatattcaaaaaaattctcaaaaaacaaaaatgacacctaacaatatacatctctcgtgtgttttattattatgggatttgttgagtgtggtgagattgacatgtagggtttgatcagcgaagagcaagtcgataccttcaacatacctatctactcagcaacgcctgaggaggtaacagtcctggtagtgaaaaatggatgcttcactgtcgaatctatggagctgatggacccaacggcctggctcaaacggccgacgaacgtggaggatgttaggcattggatggtttgcataaaggcaacaatgggatctctcttcatcaaccattttggtgaacatctcctcgacgatgtcttcgaccgtctcaccgcaaaactggttggactcaccgagaaaattgaatccagctaccgtgagaag

SEQ ID NO: 170923 - DNA, 723 bp, Arabidopsis thaliana landsberg
atggcggatccactgattccctccccaaccaacaaagctttcttcatcatagatctatctggacaaaaatccaatcctgtacttttccactgtctctatctcatcgtctctttccatgtctctgttacaatgcatcaatcggttctgtttttcttaattgttgtggttgcagatcattcctactgagttcatttggaatcacttcaatggtaagattcagtcaacgaatatgaaactaacttctgacgcttcggacagaaactgggacgtgaaattggacggcgcgagattcgccggcggatggaaagatttctccgtctcccactctgttagagacgacgaccttttgagtttccggcacgacggaggcatggtcttccacgtctcacccttcggacgtagtttctctcagatacagttaatctcttcttctacctctgacgatgatgatgatgaacgcactgtttttgatgatgatgaagacgacgatgtaggagatgatgatgacaattcgatatccgaagatgatttttgttcaaagaaaatttcgtcgaagaagagagcaagaaaagaaacagagtcttcatcagacaaatcttatcttgttgcacacgtcacaccttcaagcctactccgagaaaatatggtgattactacttcgctggaatctttatacaaatctattctattcttttgctacatatatatgaagttgtgattttg

SEQ ID NO: 170924 - DNA, 1555 bp, Arabidopsis thaliana landsberg; identical to SEQ ID NO: 37711
  unsure (1)..(1555): unsure at all n locations

SEQ ID NO: 170925 - DNA, 638 bp, Arabidopsis thaliana landsberg; identical to SEQ ID NO: 76771
  unsure (1)..(638): unsure at all n locations

SEQ ID NO: 170926 - DNA, 1858 bp, Arabidopsis thaliana landsberg
atggccaaagaaaacccaatactacaatgccctcattgcaacgcattagtatggtattcagaaaaaataggggatgatagcaaaacaggagaaccaatcttcacaatatgttgccagcaaggacgtgtcaaacttccaccaatcagaaacactcaagattttctcgacaaattactacaaaacagtctcacattttgtcttaacatacgtgtctacaattcgatgttggcattcacatctatgggagcaaaaatagatcacagtgtcacatctggcagaggaccaccatgtttcagaatacatggccaaaattaccatcgcattggatcattgctaccactgccaggacagtcaccaaaatttcttcaaatgtatatctacgatacaaaaaatgaaatctccaatcagatgatgacaatgccgcgcaaaaactcagcaaacgaaattcaagaagatatagttgtgggcttgtttaagatattagatgaccataattgcttgtgtatgtttttcttgaaagctagagatcgctacaaagcaaatgaagttcaagacttaacaatgagattggtaggacaaaaaggtaagggtaagcaatatgatctaccccaagtcaatgaaattgcaggcttaattgtaggggatataacagctacttctggtcacagagatgtagttttggaattgcagtcacgccacttacaagaaattagagatgatcatcctttgttgttcccttatggtgaatatggattttatacataaataccacatgcagtcaccacagccgacgaaaggaaatgaacttctctaagtataggagacttctatgcttaccaaatacagactaggctagtggaaggaatgacactcataaaggcatgacggttattccaccaatatgttgttgatgtattcactgtcatcgaacaagaaagacttcgctgggcaaaagataatcaagatcaattaagagctgatctatacaaaaacatattcgatgcagtaagtaaaggtgatactaaaggcataaaaaaagggaaaaaagtaatttaaccctcgagttttacaggaggtccaagatacatggtcgaaaaatatcatgacgccatgacaatatgtcggacatatggtaatcctactttgttcataacaatgactacaaactctaactagccagaagtaaaggaacatttggcaacctatggtggcacatctacaaatgaaagacctgatattgaatgtcgtgtcttcaagatgaacttgaagaattgctattagatcttgaaaaaggcacattctttagcccatctattcctggtacgttaagtaattaaaagtacatatgtacaaaactttttttatgaggttagataataaaatgtgttttactttatgtacagagctacatacaattgaattagactaccgcatgcacacatacttctatggttagtctagacatctaaaatccaaaccgctgctgaaataaatgcaatcatctcagttgaactacccaacaaaatcactgacccactcggatttgaacttgtagaatgcttagaccttgtggaatggatagaccatcatctccttgcatggctaataaggtttgcaccaaaaaatacccacgcccatacaatgctttcacctagattgaaaaatctggatatattgtctacagtcgttgctccgaccaagagaactttgtcatcaaaggaggaacaaagttagataatcaattcgtcatcccgcataatctcgcaatcttaaagaaatatcaagcgcacataaatttggaatggtgtaacacttcaaatgttatcaaatatctattcaaatatgttgcacaatgaga

SEQ ID NO: 170927 - DNA, 1265 bp, Arabidopsis thaliana landsberg; identical to SEQ ID NO: 17115
  unsure (1)..(1265): unsure at all n locations

SEQ ID NO: 170928 - DNA, 908 bp, Arabidopsis thaliana landsberg
ttcccattgaaacgaatctatggttggtagtgaatctccagtccaggacagagttaggttctcatacacttaatagagatgtatgggcgaacgacgcggtttcgagaaccattgagtcccacttcatcgtatggcaggtctatgatgatacgaacgaaggtcagaaaatctctagtttctacaagatcgaatctgctcctcctgtggtgtttgtaatcaatcccatcactggccagaagatgcatatgtggagcggcttgattgaagctgagagtattgtcgaggatttgatgatgttttgggacgctggtcctcacgaaaacattgcttctctgacaaggaacaggcgcacggaaactacagagacttgtttgtcaagctacaacatctacgaaacccctgctccttcctggggtgaagagtttgaagaggaggataattggtcgtcaagaagcaacaataatcaagtcgtggctcctacttgggagaaagaacttgaagaacaagacgagtgggagatctggtcgtcacgcagtgacactgatgagtttgtgcctccttttatgggggacgaatatgaagatcctgatgaagtaaaggaggaggagacttgtttagtgttcccggttttgacagaagagccaaagggagactgtgatcgaagcggtgtgtgtagtctctgcgttcgatttccagatgggagaagaaaacagaggaagtttctcaagaccgaaccgattcagcttctttggtccttctgttattctcacatggatgaatctgagaaaaaggcattcaagctggtgcaggcgattcccggtgcttcaaagactctagattatgaagctgaggccacgttcgaccaatctgggctcgcttattcgctgatctcggttacttgggaatga

SEQ ID NO: 170929 - DNA, 3722 bp, Arabidopsis thaliana landsberg
acatcgttcggctgcagtcccagatttatcattctctcaaacaagtcaagtgcttcgcgtcagaaaccgttctgtgcataactgtatatcattgtgttcaaagatataacatcaacttcactcaaggtatcaaaaaccaatcttgccatgtctgagcatccacatttcccatataaatcaatgagccctgatccggcatacttatctctatcaaaaccatatttagtcactataccatgaatctgtctaccttcttcaaacattgcgagattcgagcaccccctgagagcacttgacaatgtaaaagagttaggcttgattgaatcacgcatcatttttctaaattcgattagagccatctcttctctaccattttggacaagccctgatataagagacgtccaactcacctgatttgggtactcaatacacttgaaaacccgcaaggaatcatcgaccaaactgcacctcaaatacatggtaagaagagaagtttgtgaagcaagcgcagactcaaaaccggacttgaccataagtccatgaatcaacttgccattacctatatcctttaagtttccacaagaaatcaatacactagcgtaagtatactcattaggctgaactttctccaccaacatactttgaaatgccttcacagcttcagtatcttcacccttctgcgagtaaccaacgatcaaagctgtgatcaaaactacatctttctcctccacgcggtccaatactaacttcgcctccctcgttttaccaaactttacatacatatccacaagagcacttccaacgaacacgtttgagacttccaaacccaaaatcacagcaagtccgtggcttctctgtgcttccttctcaagactcaaatctgaaaacgccttgaaaacactagacaacgtgtactcatctggcaaaacattattcgtaatcatcaatctatacatctcaacagcttccttgcttcttctgtgcttaattaaataagcaattaaagagttccatgttacaatatgtctctcagacattccatcgaacacctgtcgtgcgtaatcgatatcgccacactttaaactcgcgtcgacgagtttgctgccggaaatttcggccggaaaaccagatttcagcatatgggcttggatagtcttgattcctgatatcgatctttcgtcgatgcattgtctgagaagctgagagaaattgtgcgtcgttgtcagggtatcacaagtgatgcagagaagcctaaactggttattgatagatgattccggtgaacatgttctgctagaaaagaagctgaaatatctcgaaaaggcgatcaatccgccgttataatctcttctcattgccggcgcattattccgccgatcacctccatagtgtagctcatatcggcccattaaagctcatcaaggcccattaaattgttgaacttgaacatataacagcttattaaggtgacgaacttgtacatataataatagcccattaaggatcatttaggcccattagataaacccccgattctgaagattcgttctgcaaagtttcctcctttttctcttctgtgttcatcatcggagagatccaaaacgccacggatcatcgatgatccgtcgaatacaaccacggtgcaattcgggtttgactggttcagtatccgccttcgaagtcctgaagaagaaattctcgacggatgttacggttccttctccggtcactcgccggcagttttgctctcgtgtctccgctacttcgcaatcttccggagggagaacatgattaatgagtgttccacaccgtctgctatcaattctttctaaacctaattgcataaatctccgtccttgaaatctatggtttctgcgataagcccttctcacgtctcttcactattctcactcgatctagatccgaaaacagctcttaatttttctcactggatctcacagaatccgagatacaagcacagtgtatattcctatgcatcccttcttactcttctcatcaacaatggatatgtgggtgttgtgtttaagatcaggttattgatgattaagagctgtgattcagtgggagacgctttgtatgttttagatttgtgtaggaagatgaataaagacgaaagatttgagcttaagtataagcttattattgggtgttacaacacattgttgaattcgttggctagatttggattggtcgatgaaatgaagcaggtttatatggaaatgttggaggataaggtttgtcccaacatttacacatataataaaatggttaatgggtattgcaagctgggtaatgtggaagaggcgaatcagtatgtgagtaagatagttgaggctgggttggatcctgattttttcacatatacgtctttgattatgggttattgtcaaaggaaagatttagattcggcttttaaggtcttcaatgagatgcccttgaaggggtgccgactacatgagggtgcgtacactcaccttatacacggtctttgtgtagcgagaaggattgatgaagcgatggacttgtttgtaaaaatgaaggatgacgaatgttttccaacagttcgtacttatacagtgctcataaagtctttgtgtggatcagaacggaagtctgaagctcttaacttggttaaggagatggaagagacaggcattaagccgaatattcacacttatacggtgctaattgatagtttatgcagccaatgtaagttcgagaaagctagagagttgctaggtcagatgctagagaaagggttgatgccaaatgtaatcacttacaatgcattgattaatgggtattgtaagcgggggatgattgaagatgctgtagacgttgtggagttgatggaatcacgtaaactcagcccgaatacacgcacgtacaatgaattgataaaggggtattgtaaaagtaatgttcacaaagcaatgggagtgcttaataaaatgctggagcgtaaagtgcttccagatgtggtcacttacaattcattaatcgatgggcagtgtagatctggtaattttgatagtgcatatagattacttagtttgatgaatgatagaggattagttccagaccagtggacatatactagtatgatagattctttgtgtaaaagcaaaagagtggaagaagcctgcgacctgtttgattctctcgagcaaaaaggtgtaaatccaaatgtggtgatgtacactgcattgattgatggatactgcaaggcgggtaaagtagacgaagctcatcttatgcttgagaaaatgttgagtaagaattgcttgccaaattcgttgacttttaatgccctgattcacgggttatgtgccgatggaaaattgaaagaagcgacgttgttggaggaaaaaatggttaagattggtctacagcctacagttagtacggatacaatattgattcatagattgctaaaagacggggattttgatcatgcttatagtcgttttcagcaaatgttgtcctctggaacaaagcccgatgcacatacttacacaacatttattcaaacctattgtagggaagggagactacaagacgctgaggatatgatggcaaagatgagggaaaatggtgtttccccagatttgttcacttattcttctctgattaaagggtatggggatctagggcagacaaattttgcatttgatgtcctcaagcgcatgcgtgatactggt

SEQ ID NO: 170930 - DNA, 700 bp, Arabidopsis thaliana landsberg
gctctctcttgtcgccgctattatgtcttttacttactcgttcattggcatcggcctcgcccttggcaaaatcataggtatagatattactttttctttgttgattttgattttgagtcaacttcacttattataaaatcatttctgagatgggggtagaccatcatataactttgtttttgtcttttttgaaatgaagagaatcgaaaaattgagggaagtataaggggaataccagcagaaaacagaggtgaaaaagtatggatagtgttccaagctcttgggaacattgccttttcatatcctttctcaatcatacttcttgagattcaggtaaataattttaccttcatgcataatgactccaagtaagattaattaacacattaattaaatagtactcttagagatcaagaaacctttttttacgcgtgttaaatgaaaattaaggacaggacacattgagatcaccaccggcagagaagcaaacgatgaagaaagcctcgacggttgcggtattcatccaaacattcttcttcttctgttgtggatgttttgggtacgcggcctttggagataccacccctggaaatctcttgaccggtttcggcttctatgagccattctggctagtcgatttcgccaacgcttgcattgttcttcatttagttggtggatatcaggtatcttagaaacccct

SEQ ID NO: 170931 - DNA, 306 bp, Arabidopsis thaliana landsberg
gttgatgcactttcttgtcaaaaaatcaagagagtcatctcataacatgaagcatgtcgaaaagatgttgaacgtgcgttaggagtcttacaatcgaagtttgctatcatagcatggtcgtcatattactggaacaaagaagtatcgcatgatataacgacagtttgcattataatgcataccatgataattgaggatgaacatgatatcaatgcatcgattaaagattcaagattgacgccaccgccaacagttaaaacggcggtaaatgaacatacaagatttcaacaatttttatctcgtaat

SEQ ID NO: 170932 - DNA, 891 bp, Arabidopsis thaliana landsberg
atgataacagtaaaatggagcttgtgtttaatcttctgcctttcaaactcaatacttgtttttgctaaacacttgtgtcttccagaccagagggattctctttgggggttcaagaacgagttccatgtcccaagcgagaagtggaggaacaacactgattgctgttcttgggatggtgtttcttgtgatcctaagacggacaatgtcgttgggttagatctagcgggcagtgatctcaatggccctttgagatctaatagcagcctgtttagactacaacatcttcagaagctgtatcttggctaccggaatcgtattgttttaacgattacttcattcggaagtctttcttataatgatggtttgaagggtgagctaccggattccatcggcaacctcaaatatttgaaggttttgagtcttcgtggttgccatctctttggaaagattccttcttcactcggaaatctttcttatctcactcatcttgatctttcctataatgatttcaccagaggaccagattcaatggggaaccttaaccgactaaccgatatgcttctcaggttgagctcgctcatctggatcaaccttggtaataaccagttcagaggtatgctcccatctaacatgagtagcctctccaaactgaagtattttgatattagtggaaattcattttctggaaccattccctcttccctcttcatgctcccttcgttggttgaacttggcctgcgaagaaaccacttcagcggccctcttgagattgggaatatctcttcacaatctaaacttcaactattacaccttggaagaaataatttcaatgggccaatcccttcttcacttcgaagtcttctatctcactcatctgatctttcgatatga

SEQ ID NO: 170933 - DNA, 459 bp, Arabidopsis thaliana landsberg
gcatggcatacaggtcagcgacgaggcgatggcaatggaactggccggtgtcgctcccctgctggtcgaaggcgccgaggccaacatcaaggtgacgacggcggcggatttcgcgctggccgagttcctgctggcgaggacgacatgaacatgcgcattggccagggtttcgacgtgcacgccttcggcgagggcgaccacgtcacgctgggcggcgtgcgcgtgccgcatcagcgtggggtagtggcgcattccgatggcgacgtggtgatccacgccctgtgcgacgcgatcttcggcgcgctggcgctgggcgatatcggccagcacttcccgccttccgatgcgcgctggcgcgatgccgacagccgccagttcctgcgtcatgcggcgatgctgatggaacagcaaaactgcgccctgggcaatgccgacgtcaccgtgatcggcgaggggccc

SEQ ID NO: 170934 - DNA, 1009 bp, Arabidopsis thaliana landsberg
gtatcaaatccctgtgatcaattatgcctcctacatatatgtatcatgcaatatacacgtgataattctatggacagaaacacatgatctacgcaagggatcttagcattgcatggtcggacaaagacgagtattggtcatggctgcctctccggtatgatatatcaaggtatagagttcttataagtttgatttatatcttctataaaaacttcataatgggacaagtggtgtgagtgtccaatcttctttaaccgattgaaacgaaactgtatagaaatttctgaattaaatggaaaggaaaatacatcaactaaaatcttgatttattggaaagtcgatttattggaaagtcgatcttgatttacttttaatttgagcaaaacaagtatatttatttgcgcaaaataaatatatttattgcgtaaaataaatatatttatttttaattttgagcaaaataagtatatttattttagattaaaataaaacagaatgaaaagcgagtaaaccgaaagtaatatttgagggaaagttgtaatttaactatacttctagatattatttagtatgagcattaagcttctgcgactgctgttcctaacattaaattttctattgtgttttattttcaagcgaaaaactcgttgatgctgctgtgctagaagcagtttgttggctagatgtaaatggaaaatttgacacgagagaactgacactagagacaacctatgaggttgtgtatgtcgtgaagttagaagatacagcttctggatggaacataccagtgaatctgaagttgaccttgcccgacggtaagaaaaggccacaagagcgaagcatgtgcttgaaagagcatatagggaaacggtggatagatatatcagccggtgagttcgtgacatcaccagataatgctggagagatcagtttctccatgtatgagaccaaatcttgctgttggaagagagggctctttgtcaaatgtgtcgaaattcgtccgaaaaac

SEQ ID NO: 170935 - DNA, 568 bp, Arabidopsis thaliana landsberg
  unsure (1)..(568): unsure at all n locations
ccaaaaaccaaaaattacaantgctcttaagctgaagaatatgttttatttcaggtgaacaatgaagccgctgttctgggatttgttggagctccatttacactttcttcgtatgtaatcgaaggtggctcatctaagaacttcacacagataaaaagattagctttttctcaacccaaggtggattagtaaaagcttaaagcaattgtacaacttgacaatttggttaatatctcagagattgaacagattttctttcttctcaggttctacatgccttactccagaagttcacaacctcgatgataacgtacatacgctatcaagcagatagcggagctcaagctgtgcaaatattcgactcttgggcaaccgagcttagcccggtggattttgaggagtttagcttaccttatctcaaacagattgtggaagctgtgaaacaaactcacccaaacctacctctcatactatatgctagtggatcaggaggtttgctagagagacaggctcggaccggtgtggatgtagtgagattggactggagggtgcacgtgggtgaagtgag

SEQ ID NO: 170936 - DNA, 526 bp, Arabidopsis thaliana landsberg
aaaaaaaaaaaaaaaaaagcagataaagacttcttacatgattaataggtgctcctctcgcaacgagctttgcatcgaccctcgcctgggtcatggtcaaatcgccccagctcagctccatagccccctggcgcctgctattcatggtcgagggccttccctcggtgatagccgccgtcgccgcctggaacatcatctctgactccccccagacggctccgtacctaaccaagcgggagaagaaggttgcccgccttcgtctccgcaacgagaagcccgcgatggcgacagatgcaacctccaagccgtcatctggcctccgagctcgcgatgtgctcgccgtgttccgtgaccccgtcgcatggatcactagcgctatgttcttcctcacaaacatggcctactcttcccttccagtcttcctccgcaagatccttaccgagatgggcccccataccctcacctcacaggccctcagtgcaaacaaaaactggccgcctttgtatcgtctcttcccgcaccatgt

SEQ ID NO: 170937 - DNA, 727 bp, Arabidopsis thaliana landsberg; identical to SEQ ID NO: 44279

SEQ ID NO: 170938 - DNA, 1720 bp, Arabidopsis thaliana landsberg
  unsure (1)..(1720): unsure at all n locations
ttttntgtgtatcagtgtgacaatggacatatagcttgttcttcttgttgtactaaactgaggaacaaatgcccttcttgcgctttgccgattggtaactttcgatctagaataatggagagagttgttgaagcagtcatggtcccatgcccaaatgtgaaacatggttgcactgagaagttttcttatggcaaagagttgttccatgagaaggaatgcaggttcgctttgtgctactgtcctgcaccaaactgcaactactcggggatgtataaggatctctacagtcactactacgttaaccactatgacacatggaatcaaatcgggtgtggcaatttcgctggcgcatggctacgtatcagtgagaagattttagtccttcaatatggacagggtccattgattgcggttcagtgtttcaaggagccgcaaggaatgtatgtgactgtgaacggtatagcaccttgtgctccaggagttggggagttctcctatgagctctcgtacaagatgccgaggggagataacactatgacgtttaaatcagaggagatgaataggattcagaaagtgagtttccaaactccggagaaggacttcatgttagttccttattatttcttgggtgatttcactacattgaagatggaaatttgcatacgcaagctaaaaaaagatgaagaagaagctgatgaagacgaagaatctgaagaataagaagaagatgatgatgatgatgatgatgaagaatatgctgatgaatatgattgatcctcatcatatcatatgcatcgtggggcgtgccgatgataacttcatctaccctttaaatacatttctgatgtttttctgcagctactttagtttgtcatctatgcactctaaacgaataagtttcattgctctgagaattttacagggctttatttgattctgcaagaataatttctcagctttaaaaccttaactctgttttggagtttcattagataatttagatgctatactttgcacaatgtgtttttctgatgatccatgattttgaggatctctgcattgataatagagatttggttacattactcattgctaataaagttaggaaccaactattgtcctctgctaatgaggttatcaatatgttccaagatatctattttttctacttgtatatttttagtgtataagacagtctagcattttcatgcatattcaagttctttcagctatgtttatttttacatctaaacttgaagcagaataagtaacgtataagaatctaaattactaacatggacctgaaaagaaggagcataaaaggctttataaatcaaaagtacttgctgtcaaaaagcatcaagtcggtaaaatcaaacgcctagtcaccattgaacaaaagctcgttaatatcaaattcttcgttcatgttaaggtctgtgttgtttgtcctccatggtaagtgcttgttggtcaattgttgcgacttgcgagatgaggcataaacgattcagacacagtttggtctaattgaatcatttttggaaccgtttgtgtcatcaattcatcaccaactgcaaaagctgcagctttacatgtatgtattagatgacatgaagtaacgtataaaaagatatcgtgctacttcacacttgatttttgagttagaaactcatgaactttgtttattacatatggaacgagtcaatgagagtttagc

SEQ ID NO: 170939 - DNA, 1059 bp, Arabidopsis thaliana landsberg
atgacaactgaagatcagacaatttcaagtagtggaggatatgtccaaagctcatcaacaactgatcatgttgatcatcatcatcatgatcaacatgaatccctcaatcctcctcttgtcaagaagaagagaaacctccctggaaatcctggtaacaattaattaagtttaatagagatcacaaaataattcaaccctaatcaacatttttttttctgtttgctgaaaagtcatgttcttttttttttcgatcttgatctacaaacatgcatgctttctactgtttagatctttcacatgatcaaatatgtatccagaatttgattgttatatttcgttctctatagatccagaagctgaggtcatagctctatctccaaagacacttatggccacaaatcgtttcctctgcgagatatgtggaaaagggtttcaaagagaccagaatctacagcttcaccgtcgaggacacaacctcccatggaagctaaagcagaggacgagcaaagaagtaaggaaacgagtgtatgtatgtccagaaaagagttgcgtccaccaccatccgacgagggcacttggtgatcttaccggcattaagaaacatttttgtcggaaacatggcgagaaaaagtggaagtgtgagaaatgcgccaagagatatgcagtccaatctgactggaaggctcattccaagacttgtgggactagagaatatagatgcgactgtggtacaattttctccaggtacttagtgtatatctacacacgtacgtactaatagatgatctttacatttcctcatcacggtatcatatatttttagtggcgtaacaaatattttgatcacctagctgtaagcgcatatcatgtttaattgcattatatatagattcaaatatgattttaacttcttaaccagtaaagttaatcatgtttgaatatattagaatataggaagaatatatatttacttatatacatatcttaaaactcatactaaacctagctagagcttatattttaccgggtgaatacttgatgaaaaacaaaaaaaaaacg

SEQ ID NO: 170940 - DNA, 1071 bp, Arabidopsis thaliana landsberg
tattcgagagctggtggtatggtttatgcacgtaaggtgttcgagaaaatgcctgagagaaacttagtttcttggtctaccatggtttcagcttgcaaccatcatgggatttatgaggaatctttggtggttttcttagagttctggagaactagaaaagtcagtccgaatgaatatattttgtcgagttttattcaagcttgctcaggcttagatggtcgtgggcgttggatggtgtttcaactacaaagttttcttgtcaagagtgggtttgatagggatgtttatgttggtaccttgttgattgatttttatttgaaggatggtaatatcgattatgcgaggcttgtgtttgatgctttaccagagaaatctactgtgacttggacgaccatgatcagtgggtgtgtaaaaatgggaagaagctacgtttcattacagctgttctaccaactaatggaagacaatgttgttccagatggctacatcctttcgacggttctaagtgcatgttcaatacttccgtttcttgaaggtgggaagcagattcatgcgcacatcttaagatatggacttgagatggatgcctcactgatgaatgtgcttatagattcttatgtgaagtgtggcagagttatagcggctcataagctattcaatggaatgccgaataaaaacatcatttcgtggaccactgtgctctctggttataaccagaacgctcttcataaagaagccatggaattgtttaccagtatgtcaaagtttggtttaaagccggatatgtatgcttgctctagcatactcacatcttgtgcctcacttcatgctttgggatttggaacacaagttcatgcttacactatcaaagccaatcttggcaatgatagctatgtgactaacagcttgattgacatgtatgcgaaatgtgactgtttgaccgatgccagaaaagtttttgatatcttcgctgctgctgatgtggttttattcaatgcaatgattgaaggtaactaaagacatgggacacaatgggaactacatgaagcattgaacatctttcgtgacatg

SEQ ID NO: 170941 - DNA, 702 bp, Arabidopsis thaliana landsberg
tttctatgccttaaatcgcatttctttcagaatttgttgagtaaaagttcatacatttcggaatttgatcatgaacctgttttgattctgagctcacacaaattgcatgaacctgttttggttataagcttatgagagactacatggttcttctggttatatatttcaggatgaagagacgatagactctagtgactttcctttcaaaatcgaagataatcctggacacaggactgtgacattgactagagaatacaatggagagcagattaaagtagaagtaagcatgcctggtcttgccatggatgaaaatgaagatgatgtggatgacgatgaagatggtgatggtcgtcatgagaaatcgaatgaatcaagcattccacttgttgtcactgtgaccaagaagagtggacttagcctagagtttagctgcactgctttccctgatgagattgtcattgatggtttgtctgtgaaccgtccagatgattcttctgaagaacagttgacttatgatgggccagattttcagtaagcaacatactgtatatcccctctgttttaaccatatgataaccccaagaaaaaactcatatgttgtttctttcttgtgctttgcagggagttggatgagaatatgcgcaagtcgttccacaagtttctagagacgagaggaatcaaagcaagcgcaacggatttctg

SEQ ID NO: 170942 - DNA, 704 bp, Arabidopsis thaliana landsberg
  unsure (1)..(704): unsure at all n locations
atgattgtgaatctttaacttttattttgtgtgtgtgtgcagatggtcaaagattgcctctcatttaccatgtagaactgataatgaaataaagaaccattggaacacacacataaagaaaaagctcaggaaaatgggtattgaccctttgacccataaacctgtcnnnnnnnnnnnnnnnnnncaacaagctcaagggagaaagaaaagtttagtgcctcatgatgacaagaacccaaaacaagatcgacaaaccaaagacgaacaagaacaacatcaattagagcaagctttggagaagaacaacacatcagtgtctggtgatgggttttgcattgatgaagtcccattgctcaatccacatgagatcttgatcgacatctcttcttctcatcatcatcattctaatgatgataatgtcaatatcaacactagtaaatttacttctccttcttcctcttcctcttctacgtcgtcgtgtatatcatcnnnnnnnnnnnnnnnnnnnnnnnnnaagttttttgatgaaatggagattcttgacctcaagtggctttcatccgatgattcttcaggggacgatattagcaaagacggcaagttcaacaacagtactgttgatacgatgaacttgtgggacatcaatgatttgagcagcttggatatgtttatgaatgaacatgatgatggtttcgttggaaatg

SEQ ID NO: 170943 - DNA, 1663 bp, Arabidopsis thaliana landsberg; identical to SEQ ID NO: 8711

SEQ ID NO: 170944 - DNA, 408 bp, Arabidopsis thaliana landsberg
agagatgttctcacctcataatcttcctcttgaaatgatggaagagattctcttaagactacccgtaaagtcattgacgcgattcaaatgcgtttgcagctcctggagatctttgatctcagagactctgtttgctctgaaacacgctttgatcttggagacatcgaaggcaactacttccacgaagagtccttacggagtcataacaacgtctcggtaccatctcaagtcatgctgcatccattctctctacaacgagtcaacggtctacgtctcagaacatgatggtgagcttttaggaagagattactatcaagtcgtggggacgtgccatggattggtttgtttccacgtagattacgacaaaagtctttacctgtgggatccaaccatcaagcttcaacaaag

SEQ ID NO: 170945 - DNA, 411 bp, Arabidopsis thaliana landsberg
atgaacgaagagatgagcggtgagtcgccggagaataacaaacacgtaaagaaaccgacgatgccggaaaagatcgattacgtgttcaaggtggtggtcattggagattctgctgtcgggaaaacgcagctcctctcacgttttacacacaacgagttctgttatgattcaaaatcaaccattggtgtcgagtttcagacacggaccatcactcttcggggcaaactcgtcaaagctcagatctgggacaccgccggtcaagagaggttatatcatctatatccaaaaacacattgataattctttatatattttattaagctctctctttaaaattcaaatcatttgtttagactatcacttcatttcacttggatcacggtaatttagatatggttttgatttgatttt

SEQ ID NO: 170946 - DNA, 1418 bp, Arabidopsis thaliana landsberg
atggatagatccatggaaatttattcatgtccgtcgttagacatctcaaattgcattaccgtaaagcttacagattgcaactatttactatggaaatctcagttcgaatcgtttctctctggccaaggccttctcgggttcgtcaccagcgcaatctcggttccaacaagcaccattctggttcctcacattgaaggtcacacggatacagctgcaaatccagatttccaggcgtggcaccgttcagatcaagtcgtcaagtcatggcttctgggttcgcttactgaagacattcttagtgtggttgtcggttccaaaacgtctcaagaggtatggctaaacctcgcaagtcattttaaccgtatttctgcatctcgtgtctttgagcttcagcgtcgtctccatggtttgtcaaaagaaggaaaaaccatggatgagtatttgcattgtctaaagaatatttgcgatcagcttgcttcagtaggaagtcctgttacagaaaagatgaagatttttgcaatgattcatggtctaactcgtgaatatgagccactgattacttcacttgaaaacaccttggatgttctccctggtccatcctatactgaaatcatgtttcgtctaaaaagctatgatgataggcttcaaggatacactgcagcagatgtatcaccacacctagcatttggtacattcaacaactcctctcgaggtcgaggtaaaggatctagaggaagaggacgcggaaactactcaactagaggtcgaggttttcagcaacagtttctttctttaagttctcagtcgtccggtgaaagaccaacatgttagatctgtggtaaaagaggacaccctgctattcaatgttggcatcgttttgatgaaagctatcagtactctgaagctgctgctgcattctctgctttgcatattactgatgttacggatgatggtgcttgggttcctgactctgcagcaactgctcacatcaccaacaatggtcagagactgcaataaagtcagccctattatggtaatgacacagtaatggcgagtgatggtaatttcttacccataactcacattggttctgctagtctaccatcaacgtcaggtaatctgccattaaaagatgtattagtttgtcctgatatagctaaatctctgttgtcagtatcaaagttaacaaaagattatccatgctcttttacgtttgatgctaatggtgttcttgtaaaggacaaagcaacaagcaaagttttgacaatgggaagcagcactagtgatggtctctataagttggaggatccaaagtttcagatgttctactcaaccagacaagtcaaggcatctgatgcagtgtggcatatgagatagggacatccgaatcctcaagtcctccagcttttatcttcaag

SEQ ID NO: 170947 - DNA, 951 bp, Arabidopsis thaliana landsberg
  unsure (1)..(951): unsure at all n locations
tccgtttaccggatttgtactatcacaaacgacccggaatcttctaacactgatcagattgttccgtcgaatcctacttcgattccgcattctccggttagcgttagagaaccggaaattcacagtcatagagggattaatccgggaataatcgctgcggttatcggtggttgcgtggcggttattgttttagtatcttttggttctgctttctgttgtggaagattagaccgtatcggcgaaagatcaaaatccggaagtgtagagactggtttcgtcggaggaggagaagggaagagacgaagcagttacggagaaggaggagagagtgatgcgacgtcggcgacagataggagcagacttgtgtttttcgagaggaggaaacagtttgagcttgatgatttgttgaaagcatctgcggagatgcttgggaaagggagtttagggacggtgtacaaggcggtgttagacgacggcnnnnnnnnnnnnnnnnnnnagcggcttaaagacgcgaatccatgtccgaggaaagagtttgagcagtatatggagattattggtaggcttaaacaccaaaacgttgttaagctaagagcttattactatgctaaagaagagaagctcttggtttatgagtatcttcctaatggaagcttgcactctcttcttcatggtaaaactctcttctctaagctttgattatcaaactgaaaatgctctgttttgcttagtgacaaaagtgttgatttttactacattatcggccaaagttatgatttttttattggtggatttagggaatcgaggaccaggacggattccattggattggacgacgaggattagtctaatgttaggagcagcgagaggattagcgaagattcacgacgagtatagcatctcaaagatccacacggcaatacaaatccctaatgttctattggacagaac

SEQ ID NO: 170948 - DNA, 538 bp, Arabidopsis thaliana landsberg
gcgtggtattgaaaatcattacatgataaaatggagtttatgggtactataaacttgcaacaatatagcaacaagcaaaaaatacttttggtcggagaaggagacttttcgttttctttgtctctagccagagtttttggttctgccacaaacatcactgcgacctctcttgacactcgaggtagaaatatttctaacaccacaattcatcttacatatttggttatttttatcatcttctgataatacatctaaaacaccgaacataagatatgaaagttaatttggtgattattgttataagctaatgatgaatgttgtagaggagctagggattaagtacactgatggaaaagcaaatgtggaagggttggagttgtttgggtgcacagtggtccacggtgttaacgtccactccatgtcctcagactatcgcttaggtcgatacgatagaatcatctttattttccccattcaggattaggttttggttcagagcacgacatcttctttattatgtaaggttcttttggccttc

SEQ ID NO: 170949 - DNA, 654 bp, Arabidopsis thaliana landsberg; identical to SEQ ID NO: 2108

SEQ ID NO: 170950 - DNA, 201 bp, Arabidopsis thaliana landsberg
accaagcatacccctccacattcttctcttacactcaagaactcgttaagaacttggaagtagaggtgcaatacattcgttcaagtgacaatgcagcagatctattcacaaaggcgcttccaacttctacatttaaaaatcatgttcaaagcattggaatgcgtcatctacaaaacctgtgaagtcccttcgagggggagt

SEQ ID NO: 170951 - DNA, 489 bp, Arabidopsis thaliana landsberg
tttaatctcaaaatccccaaaaaatttgccgcgctggtcgatcaggcgcatcaagtcgcgaaggaggtgtttcgtccgaattcacgcaagtacgatcgcgccgagcacagctatcccaaggaactggatatgctcgccgcgctgctcgacggcatgaatgccggcagcgacagcggcgccggtgcgaccggtgtgcgtcgcagtgcgactcaggacggtggcggcaatcgcaacggtagcaacatgtccaccgcgctgggcacgatggaattatgctggggcgatgtgggcttgctgctaacgctgcctcgacaagggttgggtaattcggccattgcatcggtggctaatgatgaacagctcaagcgctttgccggacgctgggcagcgatggcgattaccgagccaggttgaggttatgactctgccgcgatccgcaccaccgccaggctggatggcgatcattacgtgctcaatggagaaaagatt

SEQ ID NO: 170952 - DNA, 599 bp, Arabidopsis thaliana landsberg; identical to SEQ ID NO: 63413

SEQ ID NO: 170953 - DNA, 228 bp, Arabidopsis thaliana landsberg
atggcatccacaggagccgccactaacctcctcctcctagcgatggtggtggttgtggctactgccgattgctatgcgcaacgacaaccttacgttcccaaaccaacaaccacctacacatcaccggttaagacgccatacttgccaaaatcaaaccaaaacatggccatcgaaggtttcatcttgtgcaaatctggcgacaaaacctaccccatccaaggtgcaact

SEQ ID NO: 170954 - DNA, 833 bp, Arabidopsis thaliana landsberg; identical to SEQ ID NO: 23582

SEQ ID NO: 170955 - DNA, 1919 bp, Arabidopsis thaliana landsberg
gggaaaaaaatggatttggagtttgcagttaatggggaaagattcaagattgattctgttgatccatcaacgaccttacttgagttcttgcgattgaacactcctttcaagagtgtcaagctcggctgtggcgaaggcaaaatctctatctctcttctctgtttttatgttttagttttaattttatttctcaccaactgttataaaagagattcctttatgtccggaaacaatctatatgtgttgttgaagccttgtgttatgtcttacttcttaccagaagaattagtgaagttgacttaaatttagaatccaaatctgagttctgtgtattgagatagatttttaatgtttgattgaaaatgtgtgtgtatttggttagtgcaggagggtgtggtgcttgtcttgtagtgttatctaaatatgatccagagttagatcaagtgaaggaatgttgtataaactcttgtctcactcttctctgtagtgtaaatggatgttccattactacatctgaaggtcttggaaacacgaagaaaggatttcatccgattcataagcggttcgcgggttttcacgcctctcaatgcgggttttgtacaccagggatgtgtatttctctctactcatctcttgcaaatgctgagaataacagctctaaagattttacggtttctgaagctgagaaatctgtttcgggtaatctttgtcgatgtactggttatcgtcccattgtcgatgcttgtaagagttttgcttctgatgtcgatatagaggatttgggcttcaactctttttggaggaaaggagaaagcagagaagagatgttaaagaaattgcctccttacaaccctgagaaagatcttatcacttttccggatttcttgaaggaaaagattaagtgtcaacacaatgttttggatcagacgaggtatcattggagcactcctggtagcgtcgcagagcttcaggaaatattggcaacaaccaaccctggcaaagatagaggtttgataaaattagttgttggcaacacgggaacaggttactacaaagaagagaaacaatatggtagatatattgatattagccacattccagagatgtcaatgatcaagaaagatgacagagaaattgaaattggagcagttgttaccatatctaaagttattgatgctttgatggaggaaaatacatctgcttatgttttcaagaaaatcggtgtccatatggagaaggtggctaaccattttatcagaaactcagggagtatcggtggtaatctagtgatggcacagagcaaaagttttccttctgacataaccacacttttgctcgctgcagatgcatctgtgcatatgataaatgctgggagacacgagaagcttaggatgggagagtatcttgtgtcgcctccaatattagacactaaaactgttcttttaaaggttcatattcctaggtggattgcttcttccactactggtttgcttttcgaaacctatcgggctgcacttcgccctattggaagtgcattgccttatatcaacgctgctttcttagcagtagtctctcacgatgcatcatcaagcggcatcattgtggataaatgccggttggcatttggttcttatggtgggtatcattccatcagggcgagggaagttgaggatttcttgacgggtaaaatactcagccacagtgttttatatgaagctgtgaggttacttaaagggatcatagttcccagcatagatacctcatattctgagtataagaaaagcttggccgttgggtttctctttgattttctctatcctctgatcgagagtggcagttgggattccgaaggaaagcatatcgatgggcacatcgatccaacaatatgtctacctttgctgtcatctgcgcagcaggtc

SEQ ID NO: 170956 - DNA, 1171 bp, Arabidopsis thaliana landsberg
atgtgggtgacgaataccgtacttctacatcatcccaatgctctgacccgattaaccttttcttacccgacccgaatcgcccactctcgtaaaacctcttccttttcccgtttctttcggtctcggaaaaggaagaagcgtgttacgacattgtcgacgaagaaaccaggttcagctttctcacctccattgacttaccaatctctttgctaatgtttatctgtaaaaaaaaatcaaactttattcaaaattttaacagatgacgatcacgagatatcgccagttccgtcagttgagaagctggagaaattttccgctgatttgggatggttatcggcttttcctcatgtatcagttgcttctatggccaattttctctttggttatcacattgggtaataatatagccagttcactgttgccaaatttgtgactttatagaaacagtcaatgttgtttgttttactggcctagtttgatttctatacgaggagattaaactctgttcttgtagtagtgttaatgcttggttgtgttatggaattcgaataaaagttttcattgtgacattgctgatgagaccagcttcagtgtgagcttacaaagatgttgattagattgtttttacagagtgttgatttgtccccgtcttgacaatttgttagcttccagtgagaagaatatgagttagtcaggttgatctggattagtttttcgaaagcttagtacttataataatatcagtttgttcttgcagagtgatgaatggccccatcgtgtctattgcgcgtgaacttgggtttgaaggcaattctattcttgagggtcttgttgtgagcatatttattgccggtgcatttattggtagcatagtcgccggtccactagttgacaagtttggctaccgacgcacctttcagattttcacgatacccctcattcttggtgcccttgtgaggtaatatcttgttactaaggtgaatgttgatttcgttatgttagtaacaattccatgatgatgttttaagttgtgaggtagcagcataacaaaaactcgtctttttttctcagtgcacaagctcactccttggatgagatcttatgtggaagatttcttgttggtcttggtattggcgtcaacacagttcttgttccaatatatatatccgag

SEQ ID NO: 170957 - DNA, 627 bp, Arabidopsis thaliana landsberg
  unsure (1)..(627): unsure at all n locations
ttgggtttgccttggtgtcgtgttcttgctgttgtcttggttggtcccggtcgttttcttgctgttcgttttttgcatgctgctcttgttgctggttgggctggttcgttggctctgtgtgnnttagcngtttttggtccctccgtccccgttcttgctccggtgtggtgcccgggtctgtcgtttgtgcctttcttgtctcgttttggtctccccgtctcgtggggcggttgggttgtcncgggggggnctctgtctcaaccgggtctttggtctcgtctgggtgggccggagcaaggctaggaatttctggtttgtgcttcttggcagcaatttggcattgggtgtgttggggtcttgnnnttttttgtggtgggcgtgcagggcccccttctttgaatttgcccccgctcttttggggttcgtgtgtttcattaatgagaagcttgcttcggttttggcgcgtttcttgttgcgggtttttgtggtcctggtttgtgggtgtccgccccttttggtcttcccggtgtggtccctcccgttctcccggcgtggggcgtggngggttttgccccttttgttccgggtgggttggcctctcttctttttgccgccgggtcgttgggt

SEQ ID NO: 170958 - DNA, 317 bp, Arabidopsis thaliana landsberg
atgtttacaacaaagtcaggtatctttatgaccatagagtcaattatatctacgttatcagctcctaccgcggaaattgttatcgacggtggatgctctcgagataagtcctaacaggagtggctttaccagtctcacgatagcggtaactcgtcctcgttcgatatgtatcaagttctgtttccctagcgacgatttcacctccaatggaatagccgatgacagttcctccgtcttcggtttgtaccagagttcaaaaaaaaaatcgtccggctcgggagattgtacaatacgattcgcaagggcagtaaacggtc

SEQ ID NO: 170959 - DNA, 700 bp, Arabidopsis thaliana landsberg
ggaagtaccttggagtgaggagacgtccatggggaagatatgcagctgaaatcagaaacccttttactaaagaaagacattggcttggaacgtttgatacagccgaagaagctgcttttgcatatgacgttgctgctcgatccatcagcggctctctagctacaacaaacttcttctacactgaaaacacctctttagaaagacatccacaacagtctttggagcctcatatgacttggggatcttctagtctctgtcttcttcaagatcagccttttgaaaacaaccattttgttgctgatcctatctcttcttctttttctcaaaaacaagagtcttctaccaatctcactaacactttctcacattgttataatgatggtgatcatgttggccaaagcaaagagatttctttacctaatgatatgtcaaacagtttattcggtcatcaggacaaagtcggtgaacatgacaatgcagaccatatgaagtttggctcagttctcagcgacgaacctctctgctttgagtatgactacattgggaattatcttcagagttttctcaaagatgtcaacgacgatgctccacagtttcttatgtgagcttgtattaccgatccttcaatttatgtaatataaaaagtattgtatctttaattagtgtcaaatgcattcccaaaccagagttgtgtattaag

SEQ ID NO: 170960 - DNA, 435 bp, Arabidopsis thaliana landsberg
gccgtatccatgcatgcgatggtcaatggttatttttggacctatgcatccctcgaagcagagaagggagttctcgtcttgaccgattatttctctaagtggatagaagccaaatcttacgccagcataaaggacgctcaaatcgagaacttcgtgtggaaacatatcctatgccgccacgggataccttatgagatcgttacggataacggcttgcagtttatatcaacccgcttccaaggcttctgtgataaatgcggaattcgacttagcaagtcaacaccacgatatccccaaggaaacggccaagccgaggccgctaacaaaacaatcctcgacggattgaaaaaacggctcgatgctaaaaagggctcgtggtccgacgaactcgaaggtgttctatggtcgcatcggacaactcctcgccttagtcta

SEQ ID NO: 170961 - DNA, 519 bp, Arabidopsis thaliana landsberg
  unsure (1)..(519): unsure at all n locations
gcccgtcgacacagtgtncagcacctcccccaactcccatttgcctagggttgaatccagatctccaccaccaccatacagtcccaacggtcccccacctcccgcagactactctccttctcctaagatcgactataaggctacaccaccgccatatgtttacagactgtcacccacctccaacatattatttctccttcaccaagggtagactataagtctccaccaccaccatacgtatacaacctacttccacctccatatgtatacaactcaccaccacctccaccgtactattctccatctccaacggtaaactacaaatctccaccaccaccatacgtatacaactcaccaccacctccaccttactactctcattttcctaaggtagagtacgaatctccaccgccaccatacatctataactccccaccacctccaccatactattctccttctccgaagataacctacaaatctccaccaccaccatacatctacaagacaccttattat

SEQ ID NO: 170962 - DNA, 846 bp, Arabidopsis thaliana landsberg
ctatgatctcgtgatcagttattcttgttcccgaagtcacgctcctcgaggtcgtgaatagccgagaggctgacagatgggcttacgaaaacaagctcagccgctctcttactatttcatgatataaggcctggcctgaataaatggttttaatgaccaggtgaggcccagtaccaacagtgaccaaacgagaaaaataaatagctatgttgttttgtggtcaagatctctttagccaaatggtttagtacctctcactatatatatatttttttcctgactgtatctttggcataacgagaaaaccaattattaagtttcaattttctcgtaaagtcaagattgcagtggcaaacaaaaacatcactaacaaaggatacacggatatcctttaaacttcaactagatcataacccgtgttatacaacacggacattaatattttgtataaattaaattgtatactttgttatgtttgctatgtttgtcaaaattatttgttatatttgtcaaaatttagtaaaatatattcaaatataattaaatttattaaaacttaataaatttaaaagttttttttgtttggagacgcactatctacatacaaaatacccgtttctatttttaagggtctgaaactttttatccaaactgacccaaacccaactggacccgacccgaaccgaatatttagaattattctattaggtagtaaatcatatacccattaatcccaaacccgaacgggttcaacccgaacgggttctacccgaactcgaatgagttactcatatgcccagccctattctctgatttaattatctaaaaaatttcaataaaacatat

SEQ ID NO: 170963 - DNA, 183 bp, Arabidopsis thaliana landsberg
gaaaacgtcaatacattcgcatgaccccataagatctgcccggagtaagtgtagatatcgtatcacacgagctctacatcgacccgacgttcaaacctattaagcagaagaggagaaaattggtcggaagagagcaaaccgtggcattgttggcaaagcgtcacctaagacaagcgaaagtca

SEQ ID NO: 170964 - DNA, 531 bp, Arabidopsis thaliana landsberg
tcggcctgggcgggatcgtgcacttgccggccctactgtcggacaacggcgtgtcgcccgagatggcggcggtcggtgccgcattttccgccctcggcctgacggtgggacggttcctggtgggcttgctcctagacctgattccagcgagagtgctggcttctatagtgttcctgttcggaggctgcggcgtgatgctgctgggtaccgcaacgcacgaaaccccctatctgcagcttgcattgggagcgatgctgacaggcatgttaatcggcggggaaggcgatctggtgccgttcttcgtgaaacgttactttggccttaagagcttcggtgccatttacggcctactgatctcgctgttctgcctgggcacaatgttcggccccgcgctgtatggcttggccttcgaccgctttcatagctacgacctcgtgatggtaaccgccggcatcgtgtgcttcgcctgcgcgctgggaattctaatgatcggctcctatcgttatcccgatccgcatccggtcatccgta

SEQ ID NO: 170965 - DNA, 410 bp, Arabidopsis thaliana landsberg; identical to SEQ ID NO: 23738
  unsure (1)..(410): unsure at all n locations

SEQ ID NO: 170966 - DNA, 472 bp, Arabidopsis thaliana landsberg
gtattgaaactctttggtgaggaatttggaagtactttaaggcttgacggagaagagagagatgagagggaacgccttaactttgctgatttccaacgagctaaatccgtgtgctcctcttggttctctacttcgacgaccgtgacaaaaaatcagatccctttgctgattctcttccccgataaaaaccacgacaactgttgtagattgttcaaccccgaggaaaaagacagactctacaaaacgaaagattttggtgtgggatttgcaaaaagtgtttgtattgcaacctatggaaattggcttcttatgcaagattcaatgtataatctatacattttgcatctattcacccgcgagaggatcaatctgccgtctgtggagtcacaaactggcaaggtaaaggttgaaaagaccatatatgatgagtttcgcattattcaagacgaaagcgagtcggaagatatgagta

SEQ ID NO: 170967 - DNA, 157 bp, Arabidopsis thaliana landsberg
agttactagttatgtcgtgtatatatacatgttttttaagttttagttaactatattcacatacaaaatctaaccatgtgtgattttaggagaaaacaaagatgaatgtccttgctatcgcgatatgaaaaactccaaaagtggatccaaatgccta

SEQ ID NO: 170968 - DNA, 658 bp, Arabidopsis thaliana landsberg
gcctcccggtggtactccgtcacctcctccacagcctctcccgattcctcctccgcctcagcctctccccgttactcctccacctcagattatcccaattcctcctccgcctccacctactgcccttcctcccgcccttccccctccatctccgcctactgcccttccacccgcccttcctcctccaccttcacctaccaccgttcctcctatacctccctctacgccttctcccccacctcccttgaccccttctcctctgcctccatctcccacaactccttcacctcccttgacgccttctcccccaactccttcacctcccttgactccttctcctccacctgccatcactccttcacctcctctgcctccgtctcccaccaccccttcaccttcgcctccatctccaagcattccttcacctcccttgacgccttcccctccaccatcttctcccttgaggccttcttctcctccaccgcagtctcccgccactccttcaaatccgccaagatctccaccacctccctcaacaccgactcctcctccacgggtaggcactctgagccctccacctccagcgagtccctctggcgggagatctcctagtactccatctaccactccaggctcttctccaccggcacaatcttcc

SEQ ID NO: 170969 - DNA, 285 bp, Arabidopsis thaliana landsberg
atgttgagttcgtgaagattgatgtcgatgtcttaatggtaataaataatcattctccttttcttcatcttttttctcaaagtctaacaaaaggttaatttcaacaaaatttgtgtttgcttttgagttataaaatagtgtttggttgatatacagagcgtgtggatggagttcaaccttagcactttacctgcgattgtattcatgaaaagaggccgagaagtagacatggttgtgggtgtgaaggttgatgagttagagaggaaactcaataaatacacacaa

SEQ ID NO: 170970 - DNA, 660 bp, Arabidopsis thaliana landsberg
ctcatgtctctgctgaccaaggagttccccgagcttggtctgtagccggagaattgcacggagatgacgtggagacagtcggtgatgtggtgggccaacaacgacaacgccacggtgattaaaccggagatcctgctggatcgaaatccggattcggcgtctttcttgaaaagaaaatcggattacgtggagaaagagatcagcaaagacggtttagatttcttgtgtaagaagttgatggaggctgggaagctagggctagtgttcaatccatacggagggaaaatgagcgaagttgctacgacggcgactccgttcccacacaggaagaggcttttcaaggtccagcattcgatgaactggaaagacccgggcactgatgttgaaagcagtttcatggaaaagacgagaagcttctacagctacatggctcctttcgtgaccaagaaccctagacacacttatatcaattacagggatcttgatattggagttaatacccctggcccaaacagttacagagtagcagaggttttcgggaggatgtatttcggtgaaaattttgatcggttggtgaaagtgaaaactgctgtggatccgcaaaatttcttcagagacgaacagagtatacctaccttgcctggcaagccagctaggcgt

SEQ ID NO: 170971 - DNA, 463 bp, Arabidopsis thaliana landsberg; identical to SEQ ID NO: 35305
  unsure (1)..(463): unsure at all n locations

SEQ ID NO: 170972 - DNA, 1156 bp, Arabidopsis thaliana landsberg
gacatttatggatccaccagctccaacatatgtaggttcagacgtaacaccatcacttaagagaaactcgaatggtattggttgggaatatgagattgtgtgtaatccaaagaatccagataggattaaatgcaagttgtgtttgaaagagatgtctggaggagtgtatcggattaaagaacacattgcccacctcccaggaaatgttgttgcatgtccgaagtcattaaaagaggattaaattaagtgtagaaatgcaatcataaaagcaaggaaaaataagatgagcaaaaaacatgaaggtgatctcctaagggctaaagtgaatatagatatgtagaagcttgaagatgaataagtttgcaacatatattggtcctgaagctgtgttggtacgcaaataagacaacagaacatcaatattgtgcaagatggatgtattgtgcaagatggatgtattaataaggtattccttgtaatgccattgataatgatgcttttaggatgttttgtgaggctcagtgacagtttggacctgacgggttcctccaactcaatatcaattaagggaaccactgttaaaggaggaacaagaaagacctaaagtgctcttaaagactcaaaaggcaggatggaaacaaaacggtgtcatgactgatgcatggagcgacatgaaaagaaggagcataatgaatctatgtgttaattctaagggaggaaaatgttttctgtcttcttaagacgcttccacaaattctcacacagggatatacatctttgagtatgttgatcgatgcattgcagatgttggtgcgaagaatgttgtttaagtggttatagataatgcgctcaataatgttgcagcagcaaagatgcttaaagaaaagaggccaaatattttttggacaggttatgctgctcatacggttgatatgatgcttgaagccatttctaagctgcctaagttttcaaagattattgagcaagccaaaagtcttattgtttttatttatgctcatcataaaaccttatcaatgatgagatttcacatcaagaggagggatattgtgcgatggggagcaacgcgatttgctaatattttcttgacgttgcaaagcttgttagagaaaaaaaaaacagaattaacgtcgatgtt

SEQ ID NO: 170973 - DNA, 661 bp, Arabidopsis thaliana landsberg
atgttgaaactttctcgtgatccgattctatgtatcgctacattaattctcattataacattctctctcttatcctatgaaactgaagcaaggctacatcatcaagcgtttcattctccttctccctctccaaaccctaacgacccgtcgaaatctccatctcggtcccaagatctcgaccacgaagtagtttacaacgttagaaagtatggtgcggtgggagacggtgaaaccgacgacactgaagcattcaaaacggcgtgggactcatcttgtaacaacgagaacaacaccgattcagtgttgcttgttccttacggctatacattcatgattcaatcaaccattttcactggtccttgccgctcctaccaatttttccaagtaatagttctctactaaataaaaattcaaaagcttaattttcaacatttagataattgggtcaaattttttgtttgtaaatttgattttttattattattattgctaggtggatgggaccattgtaacacccgatggaccagagtcgtggccgagcaatataagtaagagacaatggcttgtgttctatagagtcaacggaatggctttgaaaggcgaaggagttatcgactgcaggggacaaaagtggtgggatcttccatgtaaacctcaccgg

SEQ ID NO: 170974 - DNA, 403 bp, Arabidopsis thaliana landsberg
gctcttgatggcgtctatggcggtagcaacacacaatctcgtggggcatctttaaaagggaatacgtattggatggcatcagaagtcatcaaagacttttcactactattaagtttcgatttcacaaccgagagatttggacgcctgaatcttcccattgtacgtcttggttatgagaaattgcccctatcagttgttaaagaagaacaactttcagttttgcaacagagaatggatacatcaagggtagagatatgggtgactaccaacgataagattgatcaaaccaaagtcttatcatagagcaagttgttggcagtggatttaagcacttattatgaccataggtttatgtgtcatgtaagtttctttatcgaccaagagaataatgtcgccgtttgtt

SEQ ID NO: 170975 - DNA, 695 bp, Arabidopsis thaliana landsberg
atggagacaacagttgatacgacgattacttgggtgattaaaaatttctcctctttgcaatccgcatcaattcactctgatcaattcgtggttggtgattgcaaatggtaagaaaataaattgttatctaatgttatccctagaatatgggtttagctgattattttactttgttttttgcttgcaggcgtcttatggcctatcccaagggaaatgaaaaggctacttatttggcttatagggctaataatttggctctgtattgaaacgttgctaatagtaaatctttccctattggatggagaagacacactaaattttctcttactttagtaaatcaaaaatcagaaaaactctccaaactaataggttattgttctctatgcttgctctattttatggtttatgttagttgtaaacattgatattaaattgtttctctaactttagtactaaatcaattttcggaccaactctcccaactaaactgtttttgtttttgcttcctacttaatagtttaacttcgtttcatgcttctgtgtatgaacgttaatattaactccatgggagtgcaccacatgtcttactgatgagatgactattttttgtgaattttgcagaataacaacactggtttgatcataagtctactagccgggggtttccagctatgattcctctcactaatcggcat

SEQ ID NO: 170976 - DNA, 1745 bp, Arabidopsis thaliana landsberg
aggattggactagtaaatggcttacataggttttccatgaatttcagcaagaagagactgcagactatctaatttgttaccgaaaatggtgatcttccttcgtatagctgaagcacgacgctgagcatcaggccctgtgacagccgatgaacttctttctgatatcattccattaatctcctcagagagttttaaagcctcgttgtatgctctcatccatgaatccgatgaagacgccattattcctatataattaaaagctaatcaaagcctggatcacttccattgaaattttaaaatgatcaaggatatatacgtaagatccaacagaaacaacaacaaagatctacaaattgagacaaaaacgcggcctttgactacaattttgaggcacaaggctcaaaatctgaaatttacaggatcatgaagtccattatcaggggaagatcagagagattcagtaacagatataatacctcatcaatgactcggattgacaaaaataacatcgtttaaaggatcgaattgcttaccaaattatttctcggacctttgtattcttcaatttgtccgagctcgtaccatgtaagagatcggcttattaaatgttgagtctgtagtcgccggaatcaccgtgaatcggaggagaatgattcaacctgtcacgcaccgggtagaagggcccgtcgcaagaaagatgagataaagacgaagctgaaataaaacgacgcggttttaacttgttatcttggaaaagttatgggttaaattagttatttaagaaagtatgcgttaagaagcagaaagaacatataaatgaagggatcaataaagaatatttaaattttcgacccattataatggatctatccatctcatgcctgtttcttccgtctcctctcttccttgccagaatcctgagtttctctctgactgtgcttagttccatcataactatatcgttctgattgcagtttccgtttcgattatcgttaatggtgtttttgtttccgggaaagtgataaactttgaagcgcgattttggtgttctaaagcaagttcgagaaggggatcagaagatacatttacaatctctcgagtacgattcggttcatgtaagtgttagctctcttgttcttccttcacaaagttgaatctaaatctcaatcctttaccttttctcttcaaaatcatgttttgtcttaaaacattgaatgttgattattgattgaataagtctgatcgttagtggctgaaacttgttttcagggaatcaatcgagcagtctataatcccaggtttgcctgatgatttggctttgagatgcatagcgaagctttctcatgggtatcatggagtgctcgaatgtgtttccagaggctggagagatttagttcgtggtgctgattactcgtgctataaagctagaaatggatggtcagggagctggttgtttgtgttgacggaacgttctaagaatcagtgggttgcttatgatcctgaagctgatcgatggcatccattgcctagaactagagctgttcaagatggttggcatcattctggttttgcgtgtgtttgtgtttccaattgtcttcttgtgattgggggttgttatgcgccttcggtgtcatcgtttcctcatcagaagcctgttgtcactaaagatgtcatgcggtttgatccgtttaagaaacaatggaaaatggttgctagtatgcgaacaccacggactcactttgctt

SEQ ID NO: 170977 - DNA, 619 bp, Arabidopsis thaliana landsberg
tttatgcttttttacgaatacacatactctacactgtgtatgtgtaccatacagatgaggataaaactctgcattctcattttgcttgatggcacgtggaacaattctgctgcaatgctcaagcgtttaaaggctcaggctgatcatatattacatggactgcatatcttccccctttctataaagaactacacgaacatatgcttaaactctgttctcgtctgtaggatcatgcacaagtcagtatggggagacgaagatcttccttgtatatctcttgcaaccggtgcatccgcaatgcacaaactccggtaaaaatagtctttatttctcatgttcctggtccagtctctgtctgccaaaatagtgcccttccttcctcatttgatctctgacgtacaggccacaaccatcatgggaccggacctgcacggctgcagcagcaattggactcctatctgagcttagccttctcccacagttaagcagctacgagttagacaaacaagctgatgcagtcgaggaagctttggtcatactactggactcactaacaggtcgccgcttaagaatgggcaggtcaataactcgtaaaggcagaaacaccatcagcatgtgc

SEQ ID NO: 170978 - DNA, 901 bp, Arabidopsis thaliana landsberg; identical to SEQ ID NO: 42306

SEQ ID NO: 170979 - DNA, 554 bp, Arabidopsis thaliana landsberg
gtcatatgcatcaaagcttgaaatattttttcgttactgttgttgtcacaggatcagcttggatggctctatcacgcccgtttgtagagtattgcatatggggatgggacaatttaccacgaactctcctaatgtattacaccaacttcgtttcatcgcccgaaggttacttccagaccgtgatttgcaacgtgcctgagtttgcaaaaactgcagtaaaccatgacctacactacatttcctgggacaatccgccgcagcagcacccacacgtgttgtcactcaacgacacaatgccgatgatatggagcggtgctgcgtttgctaggaaattcagaagagatgatgaagtacttaataagatcgataaggaattacttaaacggaggaatgataaagatagttttactcctggtggatggtgcagtgggaaaccaaaatgctccagggtcggtaatgtggctaagattgttcctagctttggagctcagaggcttcaaggacttgtgaccaggttagtcaacgaagctaatacaggagttagtcagtgtaaa

SEQ ID NO: 170980 - DNA, 1108 bp, Arabidopsis thaliana landsberg
gttcaatattctttgatctaccttactggaaggtaaagtaaatttgtaattgaatgatattctgttattgtggatctgaataagcctaacagtttctgatttctcttgttaggatttgcctgttcgtcataatattgatgttatgcacgtagaaaaaaatgtgtcggatgctatattgtctatcttgatttaaagtgctaagtctaaagatggtttgaaagcaagaaaagacttagtagatattggaatcagaaataacttgcacacagaggtcaggggaaagaaaacatacttacctccagcagcctattggttatccaagaaagagaagaccattttctgcaaaaggttatctaaatttagaggtcctgatggttattgtggtaatattgcgaatagtgtttcagttaatcctccaaatataggtagtttaaaatcgcatgatcatcatgtcctagtacagaacttgttaccggctgcattaagaggcttgttacataagggtcctaggattgccataaatagattatgtagttacttcaacaggttgtgtgagcgcatcatcgacccagagaaacttttgataatggagacagagtttgtggaaacaatgtgtcaacttgagcgcttcttccctccatccctttttgatatcatgttccaccttccaatacatctatcaaaagaggcacgtttgggaggaccagtacactttcgctggatgtatcccttcgaaaggtttgatgtactcatttggttcaatatatgtattttctgcaatgattttcaactaatattcatttcttgactgagatataggtacatgaaaacattaaaagcgtttgttaagaatcatggaaggccagaagcatgtatggctgaggggtatttagctggagaatgcgttgcattttgtttagagttccttaaagattcagtaccagttcaagaaatagttaatcgcaatgaagatattgaggctgatagaagcgtggttgaaggtcaacctctacagaagggtgtagaagttaccctatcagataaagatagggacactgcacatcgttatgtgctaatgaacatggcatctttggatccttctgtcgag

SEQ ID NO: 170981 - DNA, 234 bp, Arabidopsis thaliana landsberg
tggtttaggacatccgaccgacctttgtagattcttcgatagagaggcgagtgtcggtcagatgatatgcgtgatatctttctaataagtggcagttagatgatcacgcgattcttctcctcttcagcaccgatcgttgggagaaaaggttcttatccagttgattccctttttggtggtgtgcgtccttagttcgaaaacttgccaagcccctggcattggcaggtcgttgat

SEQ ID NO: 170982 - DNA, 1655 bp, Arabidopsis thaliana landsberg
ccagtcaccacgaacgataaagagccattggttaggaagcagaaaaagagtttgtcccttcctgatgatgtgttagtaagcttcttagcccatgtctcgagattgcactattcgattctctccttagttttgaagaacttccgatcactcattgtttctacggagctttacaagactcgctcactcttaggtcgtatagagagttgtctttatgtctgcttacgtttccccaatgaatctcatccacgttggttcactctctacatgaaacctaatcaaatcgtagccaataacaagtcaaattgtaatcttttggtcccaactccaactataagttcttctcctgcgcactggttatgtctcatagcggttggttctaggatttattaactcatatgtcacccatagagtgttcatatataagaatatctttgtgctcatgcatgaattagattataaacactccatatggaattatcgtctaaaatacaaaacctaccctgttaatgaaaattacatgtctttacactcactatttcaatccctaattatttatattcaaaccaaagcagctaaattcatctagaatgtgatttataccatattaagctgtaaattcaactactatatcttttgatttaatttatgggcttattgtcctctaatatcatatgtttagctgcttagggtttctaattatgggcttaagcccaagactgggattaatcttagagtttcgtttttctttgaataaaacctaatctcaaaatttcagcggaaaatctatgtgctaatgtcgtctccaacaacatccctgaccaccacgaggggcgaagagccgttggttacgaagtagaagaataattgttggggtcagatttcctatttcccccaaataaccgagccgaacagagtcataagcgcctaggtaactaggttcgtcgccgtcaaagggtagaaatgattcgagagagtccttatccggctcaggtgtcattccaagcaacacacccagagccagggaaagcaatacttcgggcctcaagaaaacacctctttaatccctcaaacggttcgagtgttattccaggaaacacgcccgagccaagcttaagcatgcctcggggatcgtctaggatcggctcagtgaacgtcctatcaagcagtattcgtcccaagccaaaatccagcgttccccagaccatatacttacttgaggaaaagacttgtacaaattctgtgaaggacccaaaaatcatttcctaaaaacccggaagtgatattggagaatctctgaggatattgtcaaatctgaaagtttttctgaagctcccgaagaataaggaaaatctctttattgcaaagatcctttttagccgacttagagataaatggaaatcttccgagaatattgcaggaggcggtcacttggcctataaaagggacctcaaggacttcgcaaaaggggacacaaaaaatgctctcaacttcagactatcaaaaaggctctgactttgaaggctaaacacttttctaatcacatttctaaacacttgcatgatcaaatcatcgtttccaattaataatatcaaaaacaccatccgtggttacttatcgattgttgatctttgagattctcgcgaagactgtgttct

SEQ ID NO: 170983 - DNA, 522 bp, Arabidopsis thaliana landsberg; identical to SEQ ID NO: 74563
  unsure (1)..(522): unsure at all n locations

SEQ ID NO: 170984 - DNA, 631 bp, Arabidopsis thaliana landsberg
  unsure (1)..(631): unsure at all n locations
ggcctcatcacttccaagtatcctcatatcaaaggtgttaatttcgatttgacttatgttttaacccatgctcctttttggccagggacaaaaactactaactatatttgatgtgctagtactactaactaatgtatgtacctcctaaaccttgtgttttggttgattatactaatgataggagttaagcatgtctccggagacatgtttgttgaagttccaaagggagatgcaatctttatgaaagtaagttaacaaatatattaacatagatnaaatttaactaaatatccattgtttccgaaatataatatgggtaagttattgacagcggatactacatgattggtgagacgagcattgtataaagattctgaaaaattgttggaaaagtctaccggaaaaaggtaaagtgatcatcgtagagatgattacaccagtggaaccaaagcctaatgacttttcgtgtaacaccgtgttgggcatggacttgttgatgttaacacaatgctctggtggtaaagagcgatctctttcgcagttcgagaatttagcgtttgcgtcaggctttcttctatgtgaaatcatatgtctttcttattcatattctgttatcgaattccacaaataa

SEQ ID NO: 170985 - DNA, 2236 bp, Arabidopsis thaliana landsberg
ctaaaaccatcgattcgggcctcaaaatttagtaattaaaccccccaactaaagatatattgtgaaaaaacccctcaattatttatttaatgaaaaaatacttgaagtttaaaattatttgtgaaaaccacccgccgtctacagtaccgtcaaaataaaatgatgtgttttaaatataaaaaatgacatgtttttttgcttaaaacaacacgaaataaacaaaaaaaacaccacgaagttcttataccttattataaacccctaaatccactttaactcttaaatcgacgacattgaatcgcgaaattttgtaaactgaatgcggctggagcttgcaagatgttaaggtaactgttacaagacattcttattggttttagttttccttttcacatactctaaaaacttctttttttgcttcgatccatactctgacttttaaactcaccttggggagttaatttctttggtgcactatagagccacgtctttgagtttatgtgatggcgttcatgcttagagatgctacatgtatactcgtgcccacttcttatatcttttgaattttgttggaaaatattcttgttctttcaattttttaaattggttttgagacgtatatcttattccttgcattacatgatacaatattaaaaacttaggagattgatcagatttttagagagtttttgataattgtatttgtcaggacgcttttctttcgattgcatgtcggaggatattgggcagcagatggttcataccatggcggtgagacaagatgtttacagcttgattttcgaagatccgagtttagcaatgttgacaaatatggttttgagtgttggttatacagaaaatatgagtaagttttcttacttcccatctagaaaagtaggtcaaaatcgtaaggatttgtgtggtgatagtgatgttgccgaaattattacgtgtacatatgagttggaaagcaagaatttatatgttgttagggcaaatgatccttatctagatggtgttcttattggagaaagggaggaagaagaggaacctgagagtgagcaacttgatttctaccgtgatgattatgtcgagagtgatgactcagatgatgatggtgctagaatagatttttatgtagggcaagagtttgtttctaaagagaggtgaaaggatacaaatatcaagtgtcgttagttcaattggtaaagatcttagacaaagcttagaggtcgccggttcaagtgacgtttgggacgaaactaatattacatgttgtggtttcgggtctggtggaattacgggcttcggcccagaacctcctagtattcaaaacaaaaaaaaaaaaaaagaaagaaaggatacgattgagaagtatgctgttagagagaaggtgaatatacattttaagagatccgaaagaaataaaatagaaggagtgtgtgttcaggattgttgcaagtggagaatatatgcatcaataacaagtcgttcagacgaaatggttgttcaatcttacaaaggaattcacagttgttatcctataggtgttgtggatctctatagtgcaccaaagatagctgctgattttataaatgagtttaggactaattcgaacttgtcagctggccaaataatgcagaggttgtatctaaatggtcttcgagtcacaaaaactaaatgtcagagtgcaaggcagattataaaacacatcattagtgatgagtatgctgagcagtttacgagaatgtatgattatgttgaagagctgagaaagactaatccaggttcaacagttattttaggtacaaaagatagaatttttgagaaattctatacttgcttcgaagctcaaaacgggttggaagacagcatgtcgacgtgtaattcatttgggtggaacatttctaaagggacgcatgaaaggacaattgttgactgctgtgggaagggatcctaatgatgcaatgtatatcatcgcatgggctattgtaccagtggagaacaaggtctattggcagtggtttatgaagttattaggagaagacttacgtttggagcttggtaatggtcttgcattatcttcggatcagcaaaagggactgatatatgcaataaaaaacgtcctaccttacgcagagcatagaatgtgtgctagacacatttttgcaaacttgcagaaaagatacaagcagatgggacctttgcataaggttttttggaagtgtgcacgcgc

SEQ ID NO: 170986 - DNA, 1118 bp, Arabidopsis thaliana landsberg
catcttgtgcacctaaacaaagagagatgtggaacaaacgatcaaagaggagtcaattcctgtatgtaacagatttcattgcccaaatccaaagtgctgggctttgatgtcgaagaccgagcttactgaatccactgacgatggagttaggagatgttgctctaaatgccgtaaacccttttgcattgactgcaatgtttcgtggcatagtaacttgtcttgcaaggaatacaagatgaagggtaacaaggctactacaacagtgtggcgacaatgtagaagttgccaacacaatataaaactatcggaagaacgcatcaatgtaacttgcaggtattatctctaatcacattctacagttattatatatgatttctgaatcttttttagaattcggctactgtaatgttcatagtttgatgtgtaggtgtggctatacgttttgctatgcgtgcggagcccaatggaagcttggaggttgttctcatcatcgccaattggtgatgaaactggtggacgtttctatggtcttcattgtcctcatttctctttttttccttaggtttattatttactaactactgagcgcatggttaagtagatgataatggttaagtccatatctagggattatggttgtggtttatttgggttaacgaatattgtcccaaaactaaatcctagtgtttgaataaatccttggaagttccaagtaaaatcatcagttgttgctgctggtctaatctccccccagactccttctcctttgttcttttagaattatttttagtctcaatggttgaaggttgccttcaccgtcacggaatggtggaggagaatgcatactttagcctttttctgcttatttttttgggtggtttaaatattacttgtggatcctcttttgcttgtgagactgcttgtatctagttattcttattctatcttcattcttaagaaattatgtttttcttatagtgttctaattcttatttgtagtcttcgaaatctatgtctatagctcatcacttgatgatgttttctttattgatgttaaccaaaagtaaaataccgaagaaaattctttgttctgatcacatttactttgtttggaattg

SEQ ID NO: 170987 - DNA, 1569 bp, Arabidopsis thaliana landsberg
ttattttgcacacttagccatttaggatcatcttgcatacacattgcatgttttggtgtgttttcaggtgcagaaggagcttaaaaggactttactcgaccctctactctatccaaccaggagggaagcagtagagcattctactcgatccattcactcgatccaggcagccatagaggaggcagcaattcactcgaccctcttgctcgatcaaggcagccttagatgaagcagaagatcggtctactcgcccctcttactcgatcctctactcgacccatttactcgaccaagggcgaccaactctacaagacttgttgatctatcaaagcatcttcggatactcctcattccccactcaaccagacatctgagcatacagataggagaggaagaagcatctactcgaccaattgatcactcggagcatggacacaaaggcgcagactttgcagcaccctttacttgatccccaagatcgagcactcgcccaaaccgcctcaagtctcttgtcttctagtgaatctagggttttcaacattttactataaatagatcactttggaatttttccaaagaatctagcttttaccctttagtttttctttgtgttcttgaatcttcaaaacttaattactcttaatctattttgtttttgcatttagttttttttgagaaaagttgtttagtttgtttagatctacattttggtatgatttcagtaatttctaggtttgtgttcttagttatgttgcttgagtagtgattagggttcttgaggatggattagattagggtaatctctatattagtcaggtggttaagattaggttagattccttctggatttgtaggcccctatgcagttttcggtggctaatgtgggaattcgaccataggtatcaagcgtccaaaagacgttcaaatggatgtctgatctacgaattccaaatatttgtagattctagcccaagagattggatgtttagactgtttattgactttggtagattgttgcttaaaccctgctctgttatgtttcatcaacgagagttaagattaggaagtcgtcgagttatgggggtctctgtcacgagaattgattgacccaatttttgaatctatcgtcaagggtatctgcctttcgcctgttagccacctgatgaaccctagagtttcccttatcaatgaatccatccttagaacttctattagatttatttgtattccctgttgattgcacttttatttacctgttatttatatcccctgttgattacattttagttctgcttgttggttctattcgacccaatgatcgagtagggctcttaatgttcttatttttgttgtttgaatcctcacctaggattgttactagaaattcaccatcattataatcaggcttgacttagttgcttctgtacacaccttgattgctagcaataactgtggactcgattgacaccccctatacctgcatcgacatgttagtgtttaaggggaattgaaatgaacttcacattcagcacataagtaggcctaaaaaacccacttgctccggcaccc

SEQ ID NO: 170988 - DNA, 914 bp, Arabidopsis thaliana landsberg
atttttcacactaaaaaaggaaaaaaagaaaaatatattaataaaacttttttatgttaaaatcttgggcttctgcttttgcgactcttggtcttcttcggacatggcacattccttaacctcactcgccgttttccagagcgtcatccgcaaaggtaagtcaaaactctgactagaatctcgaatcgggtcggaatgactcgggtcggattgaaaaatggtttttattttgtttctatgggttttgttaatgcagagatggtgaggagtttgcatgtctatgaatcggtggagattgagagagagttctggttcaagagcaaaagctgttatgtagagaagaaagcgaagcctctgtttcgttcggaagatttccggcgaccggagatctcggaagggtcggtttttggcacgtggcgttgtatctttgtgttccggtttaatcactcgcttcctcggtttcctactcttctctgtctttccaggtaacgccagttttgactcattcattattcggaacgtttttgttttaaaaatttttggtgctgttatatttttcacataacagattgattttttttagaattaggtctcttgaatcgaattgtagattatatagtgttactgtcttattgactccaagactgtcaaattttgacaacaatggcacaaaaatagcaatggactatgtaaagtgaatgagttaagattacctaattgtgaacaaataggcttgtaacaataacacattgtagtgttgcatagaattcgatcttctgttatctctgtattcggtaaaagaaattcatagatgttctaaaacttaacattttactaaaaaaaaagcacattgtagtgttacttgagttgtgagcatttttagcaaccataacatgtttttgctctttttatga

SEQ ID NO: 170989 - DNA, 426 bp, Arabidopsis thaliana landsberg
cactggtggggcggcaatctgtggggggcaaaacagtaccctgtgcggctctcgattgttaaccgtctcgtctactccgcgcacgagtacccgcccagcgtcttcatgcagccgtggttctctaccggcgactaccccaacgacttgccgggcgtgtggcacgacaactggggctatttgctcggcgaaggcaccgcgcccgtttggctcggcgaattcggcacaaagctccaaaccgacgcggacaaacgctggctgaatacgctcgcgagctacatcacgcagcagtccatgaatttcgcttactggtgctggaacccggactcgggcgacacgggcggcatactgcaagacgatcggacctcggtgaacacggccaaacaggcggtgatcacgccgctgctcgcgccgacaattccttgacgc

SEQ ID NO: 170990 - DNA, 508 bp, Arabidopsis thaliana landsberg
  unsure (1)..(508): unsure at all n locations
cgacagcgaggcctacggccatgagcagggcctggaaaaggcccgggcagccannnnnnnnnnnnnnnnnnnnnnnnnngcgcaaggtgtcgatgccgagcgcattttcatcggcaacggcgtcagcgagctgatcgacatcagcctgcgcgcgctgctgcagccgggcgacgaagtgctgctgcccagcccggactacccgctgtggagcgccgctaccatcctcaacggcggcaagccacgctattaccgctgcctgccggaaaacggccatcagccggacccggccgagatcgaggccctggtcacgccgcgcacccgcgcgctggtgctgatcaacccgaacaatcccaccggcgcggtgtactcacgcgcgctgctcgagcagctggtggcgattgccgcgcggcatcggctgctgttgctgtgcgacgacctctacgacgagatcctctaaaacggcgcgaagttccagccgctggccgaggtggccggcaacgtgccctgc

SEQ ID NO: 170991 - DNA, 1574 bp, Arabidopsis thaliana landsberg
ttgcttggatagagctttcatcaacagtgaaggtgctgcttctttcccatttgcagacttagaattccttgatttcacagggttagatcatcgacctttgctgctgacattaaaaaaatctgaaattcaaaagaagataccatttcgttttgacaaacgactgcttcatgttccacatttcaaagcacacgttgtgaatggctggaatataaaaaacacacatcagaggattcatattattgataaactaagaacctgcagacaatcaatggcgagtctaaagcacaaatctaacatgaactcccgggatagaatcaatcaactacaagctgctctaaacagatccatggcaagccttattcgttcggagagacaacttattcctcaaatacagagagaacttacaaaggctcatcatcatgaggaaaaatactggtagcagaaaagtcgaaatacttggatgaaagaaggggatagaaatacaggctttttccatgcctatacaaagacattatttgctctgaatagaatcacatctatccaggatggagaaggagagatctacaaaggtgataaggaagttggtaggcatgctcaacaattcttcacaaatgtttatgcaagctttgttagacctgtttctaccatcgactttgcagattttaacccaacagtaactccacaaataaatgaggatctcacaagggacttcactgatgcaaaaattttagatgccataagccaaattggagatgacaaagcccctggtccagatggtttgacgacaagattctacaaatcatgttgggacatagtgtgacaggatgtgatcaatgaagtgaaacaccattttcagacatcgcacatgagccattcactcaatcacacaaacatttgcatgatcccaaaaataaccaaccctcaaacactttcagactaccgtcccattgccttgtgtaatgttcaatgtaaggatcatttcaaaatgtcttgttgaacgtttaaaaacccatcttaatgacattgtttcggacgctcgggctgcatttatctgggaagacttgtcaatgacaatgttatgattgctcatgaaatgatgcactctctaaaagcaaggaaaagagtgtcacaatcttatatggccatgatgacggatgttagtaaagcttatgacagagttgagtggaattttttggagacaacaatgcgtttgtttggtttcagtgagcattggatcagttggataatgggaacggttcgatcagtttcttattcgattttagtacatgtaatccctcatggcacaattcaaccacaacgtggaataagaaaaggagatccgttatctccctatctcttcatactttgtgcagatatattgagccattcgataaaatcaagggtctcagatggagacatcagaggcttacgtattggaaatggtgttcctggtgttacacatttgtagtttgctgatgactccctatttttttgtcaagccactgttcgtaattgtcaggctctaaaaaatgtaattgatgtttatgaatattactcaggtcagaagataagtc

SEQ ID NO: 170992 - DNA, 1336 bp, Arabidopsis thaliana landsberg
atggggagggtaaccagttcgaggaagttagctacatcaacaacaaccagggtggctacaaagggtataacaacttcaagacgaacaaccctaacctctcttaccgtagcacccacgttgctaacccataggacaaagtgtatcctccacaacaacaacaaggtcagaacaaaccttttgttccctacaaccaatgttttgttcccaagcagcaatttcaggggaactacgagctgcaaccaacacctgggtttgtacctcagcaacaccaaggtcctgctgctcctgatgctgaaatgaagcagatggtacaacaactgctacagggacaagcatctagctgcatggaaattgctaagacgttaattgaattgcaccataagctggactgcatttacaatgaccagaacgccaaagtggaggcattgattaccaaagtcagatacttggaaggacaatcagcattcagatgatgaatgtgatgctaatccatcaccagctgctgataggaggattgttcaagaaaaattagaagatcctggatcttttactctaccatgttctattggggaattagctttcagcgattgcgtgtgcgatctaggagcctctgtcagctaaatgttattctttgtggctactttctatggcaagaaggttgaaacttgttcagtataggccttgtgacctgactttgatccttgcggataggtcttctagaaaacccttcggcatgctgaaagacctaccagtcatgattaatggagtagaagtgcctacagacttcgtggtgctggatatggaagtagagcataaggatcccttaatactgggaagaccattcttagcttcactggaagcagtgatagatgtcagagaagggaaaataggtctcaaccttggaaagcacatcaagttgcactttaacatcaacagaactccacaagggtcaacagaagatggaagaacctctggaaatgatagagcgatctcaggagaaggatatgagactgaaagagtgaaagaacttaaaaagaggtctgataagcaagatgaaactatagagaaactagcccacactattgaggaacttaggagtaagctgaatcatatgcagaagaaagctcaacctaaaggcgggattaacactatcccgagaaaagaattcacttcaagatggtttcaagagacagattagcctccagaagagaaggaagcctattttgaaaaaaggggaattgagtattctgctgcagacctctccacggaggacgctgggtatgatgatgatgctagagaggactatgcagaccctctctatcattcattttcttct

SEQ ID NO: 170993 - DNA, 645 bp, Arabidopsis thaliana landsberg; identical to SEQ ID NO: 75531

SEQ ID NO: 170994 - DNA, 773 bp, Arabidopsis thaliana landsberg
tatatttaatttcagtttggaatccttgcaatatatagatgcattttcacaagcaaaaggtttaaatttattttagaagaatttttttttatctggtgacctctaactttattggtggttaattatgttggattatgaaggaactaatgttggcgacggttgataatccgtctaacgcggcagagtggggtatggcggagatgattaacgagccgagcatcatgcaaaaagccgtggaagagattgatagggtagttggaaaagaccgtcttgtcattgagtctgatctcccaaatcttaactatgtgaaggcttgtgtgaaagaagcattccggttacaccccgtggcaccgttcaacctccctcacatgtccaccactgatactgtggtagacggttatttcatccccaagggaagccacgtattgattagtcgtatggggattgggagaaatcctagtgtgtgggacaagccgcataagttcgaccctgagagacatttgagcactaacacatgtgtggatctaaacgagtctgatctgaatataatatcgttcagtgcaggacgaagaggttgtatgggtgtggacattgggtcagccatgacgtacatgttactggctcggttgattcaaggattcacgtggttaccagtgcctggtaagaataagattgatatttcagaaagcaagaatgatctttttatggcaaaaccattatacgcggttgccacacctcgtttagctccacatgtgtatccaacctaatggaga

SEQ ID NO: 170995 - DNA, 536 bp, Arabidopsis thaliana landsberg; identical to SEQ ID NO: 33562
  unsure (1)..(536): unsure at all n locations

SEQ ID NO: 170996 - DNA, 837 bp, Arabidopsis thaliana landsberg
cttcattctccaacaccagcaggtggaaagcaaatgctgggggagcatgcagacagatcatggaggaagcaacactccctcttctcagaataactctacgtcttatggcaccccatctcctagtgttctcccctcacagagtcaaccaggatttcctccatctgattcttggaaggttgcagttccaagccaatcgaatgctcaggctcaggcccagtggggtatgaacatggtgaacaacaaccaaaactcagcacaacctcaggctccagcaaaccagaacagcagctggggtcaagggactgtaaatccaaacatgggatgggttggtcctgctcaaactggagtgaatgtaaattggggtggatcttctgttccctcaactgtgcaaggaatcactcattctggctgggtcgcgcctgtccaaggacaaacacaagcttatccaaatccaggatggggcccaacaggccactctcaatctcaatcccagtctcaagttcaagctcaagcgggtactacgggctcgggatggatgcaaccaggtcaagggattcagtctggaaacagtaatcaaaattggggaactcaaaatcagacagcgatcccaagcggagggtcaggagggaaccaagccggttactggggaaaccaacaacagagccagaatggagattctgggtatggttggaacaggcagtcaggtgggcagcagaacaacttcaagggacaaagagtatgcaagttcttccgcgaaaatggacattgtcggaaaggagcatcctgcaattacctccacaactaaaacaccacttctctctctctctctctttctct

SEQ ID NO: 170997 - DNA, 613 bp, Arabidopsis thaliana landsberg; identical to SEQ ID NO: 11595

SEQ ID NO: 170998 - DNA, 412 bp, Arabidopsis thaliana landsberg
  unsure (1)..(412): unsure at all n locations
cnnnnnnnnnnnnnnnnnnnnnnnnnnnnnnnnnnnnnnnnnnnnnnnnnnnnnnnnnnnnnnnnnnnnnnnnnnnnnnnnnnnnnnnnnnnnnnnnnnnnnnnnnnnnnnnnnnnnnnnnnnnnnnnnnnnnnnnnnnnnnnnnnnnnnnnnnnnnnnnnnnnnnnnnnnnnnnnnnnnnnnnnnnnnnnnnnnnnnnnnnnnnnnnnnnnnnnnnnnnnnnnnnnnnnnngtggtggaaaagcagcggcgccgggtgatcctgaccggcgacgtgccgagcccggtcaacccgccctcgggctgccgcttccgcacccggtgcccgttcgcgatggaggtctgctcgaaggtggatccgcccttcaccgaccagggcaacggtcaccaggtcgcctgccacctccatccc

SEQ ID NO: 170999 - DNA, 286 bp, Arabidopsis thaliana landsberg
ttgtcctacagaggcattcgtcggaagaaatggggcaaatgggtatcggagatccgagaacccggtaagaatacaaggatttggcttggaagctacgatacggccgagatggctgcagcggcctacgatgttgcggctcttcacctccgagaacgtgggaccaatctcaactttccggaactcgtcaacagttttcctcggccggaaagctctagttcggagcacattcaagcggttgcgcaagatgcagcacttatgtttaaaccaggtaggttgagtgaaccag

SEQ ID NO: 171000 - DNA, 457 bp, Arabidopsis thaliana landsberg
attggtgtcactgtttttcccaattcatctatcaatgtgctatacaaattcgtgatctctctttattttaattgtgagtcaactatgtctatcttcacacttttgtgaattgatttaagggtatcacttactacataaatttcttaactctctttattttaattatgaattgatttaaggataagttgcattcctcatccttttttcaacataattctctcagtcaccttgttgattttttctgctactgtcctcacattttgctcgacctttcacttcccagtatgaagcaaagctcttccctagcttgatctatcgaatgaagtagccaaaaatcgtgctgctaatttttgtttccggtaagattgttctgacaagagctaaggttagcaactgtttcttgggtccattatcattagagtacatctcagttctttctgatcgcgttagagtatat

SEQ ID NO: 171001 - DNA, 1117 bp, Arabidopsis thaliana landsberg
tattccgctagaaacgtgagtactatatatggccatgtaaagataatattaggctttggcgaagccaattttacaatgccaaggggaactcattttaaagtaaatgatgcattatattcccctaagtctcatagggacttgataagtttcaaaaatatccgaagtaatggatatcatatagagactatgaataaagatggcatagaatatctttacataaaatacgagagacaatatatattagaaaaattgccaatgctatcctccggattatatttcacaaaaataaatataatcgcatcaaatgttacagtaaatttgagtgacaatcactcgtgtgagtttactagtacatttaagatatgacatgaaagacttggacatcctggttcagtcatgatgcgaaaaatcgtgcaaaattctaatggccatccattggaaaaccagaaagtatttaaatctggtgagttttcatgtaaagcatgttctgaaggaaaactcataataaggtcatcgccaaacaaaattgggcataaaagacctgaattcttgttgagaattcatggtgatatatgtgggccaatccacccaccgtgccggccgtttcgatattttatggtattaattgacgcatctactagatggtcacatgtatatcttttgactacacgaaacacggctttcgcaagattcattgtccaaataatcaggttaaaagcacaatttcctgattatgccataaagaaagtcaggcttgataatgctggggaatttacttcacaagcctttaatgactattgtgtatcgatgggaatcgatgtagagcatccggtccctcatgttcatagacaaaatggcatgaccgaatctttaattaaaaggttgcaactcattgcaagaccgttaatattgagaacaaaactcccaatttttatatggggtcatgctatattgcatgttgtagctttggttcagattagaccaagcgcatataatgaatattcccctttacaaatgacttatggtcaagtaccaaatttatctcatctccgcatttttggatgtgcggtatatgtgcccatagcaccgccccaaagaacaaaaatgagtcgccaaa

SEQ ID NO: 171002 - DNA, 565 bp, Arabidopsis thaliana landsberg
  unsure (1)..(565): unsure at all n locations
ttttctttatcatccatctccaaatctttgactcctagtcaagctatacgcgagaagaaatgtgttgcaagtgaacgcggtgaggacatgattgatgatacatcttattctttcttcaaaacgagaagaaaatcaaaacatctttaaaagttgcacatctttgttttattttgaagagaggaataaggtaaaacacaagaatcatggttttgaagaacaatctggatcgaaatctaacataaggtcatcgtannnnnnnnnnnnnnnnnnnnnnnnnacatcatcctactctggtctgaggttaccacttccaaagatgggatttttcgactcggtatgcttcctaagaaattcgttttattgaacctagcaaatatcttgtaatgtaagattcctgagatgatgaagaaaaaacaaacttttgttacagcaagagaacggagagaaagaaaacagagaaccaaatgctcttgaagcaaacagaagaagatgacacagatccaaacttgagacttgttctacaccagaaaaccgcatcattctgggacaacgcaaaacacgaaaa

SEQ ID NO: 171003 - DNA, 543 bp, Arabidopsis thaliana landsberg
  unsure (1)..(543): unsure at all n locations
atcgatttttcgctggcccacagggtagcggatatgagcctcgccgcatgggggcgcaaagagatcaggcttgctgaagccgaaatgcccggactgatggcgatccgcgaagaatacggatcgagccagccactgaaaggcgcacgtatcgcaggctgcctnnnnnnnnnnnnnnnnnnnnnnnnnnnnnnnnnnncactgatccacctgggcgctgaggtgaaatggagctcctgcaatatcttctctacacaagaccaggctgctgctgccattgctgctgcgggtatcggcgtctttgcctggaaagggcaaacccaggaagaagcggactggtgtatcgaacaaacactgtttttcggtggtgcagacaagcccctgaatatgatcctcgacgacggcggcgacctcaccaatatggtctttgacaaataccccgagctgatcggcggcatcaaaggcctgagcgaggaaaccactaccggcgtgcatcgnnnnnnnnnnnnnnnnnnnnnnnnnnnnnnccgatccctcggtcaatcg

SEQ ID NO: 171004 - DNA, 1802 bp, Arabidopsis thaliana landsberg
cttgaaatttggaactgtggtgttaagtaagtatgtggtttttcagatggctgggaggcagcgtcgcggccagaacgagcgcgttcctccaccgccgccaccacctcccactctgcaggagctcatggctcagcagaatgagatcctgaggcagctggctcaacgtcagccaccacctcagcattatggtggtggagaccaccaacgtcaccccgcagcggctacataccaggaattccttagcacccagcctcccttgttcacaagggcggaggacccgctggacgcagatgtgtggctgcgagtggtggaatccaaattccccctactccatggagcttgctcagaggtcaccaaagtcaggttcgccacccagcagcttcgcggacctgcaaggacttggtgggatcattttcttgctatgcagccagaggactgagaggtggagtggagggagtcaaggcagcttttagaggacccatatacccgccgggatcatggacaggaagctcaatgagtttttggcactcactcagggcaacaggacagtgttgcagtatgccaggcctttaatgacttgtgccagtacgcggatatcatgcagatacagatgagaagaagagggataggttcaggaggggctcagcactaagctccgggatcgtctcaacgccgtcagggccaacagctacaatgagttggtcaacatggctatctcccaagaggactgtattacagctaggcaggcagagaagaagaggaagacccccgtggcaggaccctcagctcagccacagcgctttaggattgtatccgacacccagggcaggggaccccagcagcagcaggggcgatgggtaatccgacctcagcaacagcagcagcaggcacccaaccgcacccagtttccagctcagcggaacaatcaacagcagcagcaatatcgtcaggtgaatgacaacaagtgtttcacttgtggtaacaccggacactatgccaagaattgccccaagaaccagcagaggcagggacagaatgttaatcagaaccaaggcaagaggcagaaggtgcaagtgaggcaaggcaggctgaacttcaccaccatagctgatattccagagggagcacccgtcatgactggtatcttttcagttttgaattatcctgctattattcttttttattctggtgcatcacacagttttatcagtgccaaatttagtgccaagtgccaattaccttttcaccacaccgatgggggtattacaatttcaacaccaggaggcagggttgccacctatcaaatcaaccgacgcatgccaataaaattgggtagtcttgtatttaagaccactctcctgatcatgggattagagagcatggatatcatcttggggactgactggttatcacgacaccatgccttgattgatgtagcagcgagagctattgagatacactcatcttttgtggagaaatcacattgtacttgcctaaccagggttgtacccgctcttgtgccttcgctataatagagtcacctgtagagaaaatttcagtggtctgtgagtacccagatgttttcccagatgaattgccaggttgccaccctaagagacatagagtttgcgattgagctgcaaacaggaactgctcctatatccaagagaccctataggatgcctccaacagagttggcagaattgaaaaagcagttgcaagagttgttatacaagggattcattcgcccatgtacttccccatggggatgtccagccttgttcgtgaagaagaaagatgag

SEQ ID NO: 171005 - DNA, 185 bp, Arabidopsis thaliana landsberg
atggagatacacagattcatgaaacgtatggttcacgtattactattgatactagcgattcatgcgcatatacaagccgttgctttaatcacaaatacttttgtctcatccgaccatctgaaacctaattccatcttaggaacaaaacgtgttgtaagatagattttccggtttggcagcgggag

SEQ ID NO: 171006 - DNA, 477 bp, Arabidopsis thaliana landsberg
tatgttatatactaacatattacttatttatcaaatgtaattttattataaaggtggattactaaagaaaatgccgtttcttgctggatttggcaaagatattgttacaaaatcatataaggtgattttgatatattcaagaaataaaaattatgaccattatttcaaggccaaggttctatcccttgataatggtgagcaaagagacacaagtttttataatttacatcattgcatcttctgcgatgagcaaacatcagtctacgcaaacggatccctcttttggttgacattgaagaagcttaagcaaacatcttaccaggtattagctatcgatcttcacactgaagaatttcgatggatagtattaccagagtgtgacaccaaatatgctactagtatagaaatgtggaatctaaatgaacgtttgtgtctatcggatgtgctagaatgttcaaatttggtcgtttggagttt

SEQ ID NO: 171007 - DNA, 878 bp, Arabidopsis thaliana landsberg
gtgtgcagattaaggttctttacaaagcatctatcgtaaggatccgaacgagttaaacgaagcgggtaacgcgaagtacaaatggagattatgtagtgtgcagcaggtgaaaaacctcaagtgtgtgacagcaattttaccagtttgggtcacaggaatcgcgtgtttcatactgactgaccaacaaaacatttacgggatccttcaagcaatgcagatggataaaacgtttggaccacataacttccaagtcccggcaggatggatgaatctcgtctccatgatcactctagcgatttggatctcactttacgagtgtgttatcataccaatagtgaaacaaatcacgggtcggaaaaaacggttaacgttaaaacatagaatcgagataggtattgctttttttttaggttaaaagatttacaagatcatagtttagtttctttgctttatatttagttttctaacattctttgtattaggtatagtaatgggaatcatttgtatgattgtcgcgggtttccaagagaagaagcgaaggcatccgctctaaagaatggctcattcgtgtcgccggtttctattgtaatgctccttcctcagttcgctcttgccggtttaaccgaagcgttttccgcggtggctctgatggagtttctgacggttaggatgcctgagcatatgagagcggttgctggagcgatcttcttcttgagctcgtcgattgcgagttacatatgcacacttcttataaatgtgattgatgccgtgacgcgcaaggaagggaaatcttggttaggagacaaagacttgaacaagaaccggcctcagaactactttttcataatagccgacattcaagttgcgaatcttctcta

SEQ ID NO: 171008 - DNA, 730 bp, Arabidopsis thaliana landsberg
tccaatcgcattcgggattgttgattctgagaatgatctttcatgggagtggtttttcatgcaacttaattttgtacaaacgattagaaagatttagtttttgtgtgagatagacatctctcgattggtaaaacaattgctacaattttcccattagcaaaacatgatttgcatccaccacttgctgaataatgtgataacatactatcacggaaggggtttggttgatatggttgtcaaagcgtcaaaaacatataggattactgaatttgagggtttattgacgcaaattagcaacattagtccagcgattggagtatacctacaagatgctaatgtgaaaaaatgggtttggtgtcattttctcggatataggtacgacattaacaccaacaatcctgctgagtcaataaattcagcgttgagatctcctaaagagtatccaataattcctttgttagacaacattaaatgttgacacgatggtttcatgagcgtagagctttaagtgcaaagcataccgaccctttaactgttgaagtggagaaaaagattgatggtaggatagaaaaaggtaaaactctgaaagtttatccggttaccgaatacagatttcaagttaaaggtgagtcatctaactacgtcgttgacttggaaagaaagatatgttcatgtggaaagtttcagttagggaaaattttgtgtcgtcatgccataaaagctgtttttg

SEQ ID NO: 171009 - DNA, 174 bp, Arabidopsis thaliana landsberg
atggaagtgagcgatgggtcgtctcaagttttaaattcgatgaagcatgttgcgtctctgcgcgccgatgaagacccgacgagacatccgtctactttctctacgctcacgatttggttgtgttaggccgagctggtatgtatgtgtcgagtgtgatgtggacaatacaagagg

SEQ ID NO: 171010 - DNA, 228 bp, Arabidopsis thaliana landsberg
ttcttctctaactcaaaaacagttagattgaggaatgagatctcgggtttcacacagaagcaatctgaatccttctctgaagtatgggaacgctacaagggatacactactcaatgccctcatacttcacctattccaaacatgacggctatgcttcaacaaaacctaaaaagtcaaactactagttctttggtcttggaaaaacatattattgagataaacactgat

SEQ ID NO: 171011 - DNA, 442 bp, Arabidopsis thaliana landsberg
atggagccgaagaagaagacgaagttgattagttccgacaacgattcaaagtggtcgccggttcttgcccctgacctgattcgatcgatcttcgaacgtttgaactttgcggagtttcatcgagctatgtcaatttctttagattggtattccactgcggaattatgctacagacaaaacccaactccatggctcattctcttttcaaactatagacatatttcgtgtaggttgtttgatcctcttcatgacaaaacctacgtaatacgagacctagggtttgatttccataggagttgttgtttggctacttctggtagctggttgttgatgttagatcatagaaccgatttttatcttttgaatctgtttactcgagagaggatttgtcttccgactttggaagcaatcgacccatgccagatgaagtttgagagggttg

SEQ ID NO: 171012 - DNA, 277 bp, Arabidopsis thaliana landsberg
taagacaagctgcaactatattgcctatgggccgatctttccgacggcatccaaaatcaatcctgatccgactgtaggacttacgggactgaaggcggtgcgcgcccttaccgacaagccgctggttgcgatcggcggcattacaagaaaaaattgccgcagcgtgatcgatgcgggggcggactctctggcggtgatttcggacctgttgccatcgggcgagataaagaatgatctctatgggacggcgcgtcgggttgcagaggaatttctccgg

SEQ ID NO: 171013 - DNA, 1076 bp, Arabidopsis thaliana landsberg
cgggtgatataatgggtttgaagtgtaaaaaactggtgatgacctctatgttgaatttgtatggcaagtgtgatcatgttggagatgctaaggaatttttttgatcagatggagcaacaagatatggtttcatggaacacaatgatttcagggtatgcttctgtttgtaatatgtctgaaatcttgaagcttttgaacagaatgaaaggtgatggtttaagacctgatcagcagacatttggagcatcactttcagtgagtggaacaatgtgtgatcttgaaatgggaagaatgttgcactgccaaattgtaaaaactggttttgatgtagatatgcatctcaagacggcattgataacaatgtacttgaagtgtggaaaggaggaagcttcatatcgggtactcgaaacgattcccaataaggatgttgtttgctggacagtcatgatatcaggacttatgcggttgggtagagcagaaaaggcactgattgttttctcggaaatgttacaatcaggatcagacctgtcgagtgaagcaatagctagtgttgtagcatcttgtgctcaattgggttcctttgatcttggcgcttcagtccatggctatgtactgaggcaaggatatacactagacactcctgcgttaaactctttgatcacaatgtatgcaaagtgcggtcatttggataaaagtttagttatctttgaacggatgaatgaaagagacttagtttcgtggaatgcgattatctccggatatgcccagaacgtagatctgtgtaaggccttgttattgtttgaagaaatgaagttcaaaaccgtgcaacaagttgattcatttactgttgtctcgcttttacaagcctgttcatctgctggagctctccctgtagggaaactgatccactgtattgtaatcagaagctttatcaggccatgttccttggttgatacagctctggttgatatgtattcgaaatgtggctacttagaagctgcacagaggtgtttcgatacgatctcgtggaaagatgttgtttcatggggcacactcattgcagggtgtggttttca

SEQ ID NO: 171014 - DNA, 1242 bp, Arabidopsis thaliana landsberg
gcacatttccatgtgacccactttttgtatcttaaaaaattccaaagggacctttagaataaaagagagggtccctacacaaacacatagtgaaggtgatctatttaagcacacccatattcattgttcaaacataaccaaatccatcatttctagttatctttctatcatttcacattttgactatttgataaactatagtaattagctatggagttcaatggtaatttgaatgccggttcttgctctagatcaaaaaagagtcataggcaaaagcagcaacaaccgcagccacagccacaacaacatattgaagaaataaagtatgtaggagtgaggaggaggccatggggaagatatgcagctgagataagaaacccgacgacgaaagagaggtattggctaggtacttttgacacggccgaggaggctgcattggcttatgatagagccgcacggtccataagaggcttgactgctcgaaccaacttcgtctactccgatatgcctcgtggctcctcagtaacttcctttgtctctcctgatgaatcccaacgtttcatttccgagttattcaacgctccaagccaactagaagctactaacagcaacaataacaacaataacaatctctactcatcgaccaacaaccaaaaccagaactctattgagttctcatacaatgggtggcctcaggaggctgaatgtggttatcaatctataaccagtaatgctgagcattgtgatcatgagcttccacctcttcctcccagtacttgttttggagctgaactgaggattccggagacggatagctattggaatgttgcgcatgcaagcatagacacgtttgccttcgagcttgatggctttgtggatcaaaacagtcttggtcagagtggaacagaagggtttaattctttaccctccacattcttctaccaataacagtcatgagttgtccaagtttgtgtctttgttctttggtatttcttttgttttcactgtccttttcgcctttataatggagtggaatgagagatatcaagtgtctctctctcgcttgtagagtttatgtttctttgaaaatttatcaaatgttttgttattgtcgcttaccaaatgcaagactctcttgattagtacttgtaaactttgtgtaacgcatacgattgtgacatgtcccttttggtacgattgcttcaaagtcgatttttcggtccatataccttttggtgatat

SEQ ID NO: 171015 - DNA, 536 bp, Arabidopsis thaliana landsberg
atgaaagtcctggtcatcggcaacggcggtcgcgaacacgcgctggcgtggaaactcaagcagtcgcgacgcgtcgacgaggtgatcgtggcgccaggcaatgccggcaccgcgcgcgagcgtggcgtgcgcaacgccgatgtggccgtgaccgatctcgacggcctgctgaagctggcgcaggacgagaagatcggcctgaccgtggtcggccccgaagtgccgctggtggccggcgtggtggacaagttccgtggcgccggcctgcgcattttcgggccgcgcgcgattgccgcacagctggaaggttccaaggccttcgccaaggatttcctgctccgccacaacatcccgacggcgcactacgccgtgttcaccgagctggaacccgcgctggcccatgtgcgcaagcacggcgcaccgatcgtcatcaaggccgatggcctggccgccggcaagggcgtggtggtggcgttgaaaaagtatgacgccgaaaaggctctgcgggtcaaggtctttgcgcaccccaagggcaa

SEQ ID NO: 171016 - DNA, 318 bp, Arabidopsis thaliana landsberg
  unsure (1)..(318): unsure at all n locations
atgccgaaaatgatgccgatggctgccgtcaatgtcgaggtcaccggcccgacaatgccccggcgctgatgctgtcgaactcgctcggccccaatttgcatatgtgggacgatcaggtggcagcgtggtcgcagcacttccgcgttgtgcgctacgaccgccgcggccacggccagtccggctcgccgcccggcccctattcgatggagcgcttcggccgcgacgtcatagccatcccccccgcgctgaagatcgnnnnnnnnnnnnnnnnnnnnnnnnnnnnnnnnnnnnnggtcgggcaatggctcggcgccaatg

SEQ ID NO: 171017 - DNA, 438 bp, Arabidopsis thaliana landsberg
gctagatattgaaattgttaataggtttgccttttcttccaagaaacttgatcacctcttgatacacttatcttgaattatatacagggtcacgaaagccatctatttatgaatctagcttcctggagacctcatttgtttgtgaaccaatcagatccagtctgctcagaatatattggctatttcaatcatagaggcgatatgaatgagctgcaactgggtaggatcgagaggttggctagatactcaattaggagaatattgttcggaggaggagaaagttcgtcgtcgtattcttcagaagaacatcttcattttcttccgtcggccatcgtgatggtgaacacaatcatatcaccggattttcagacagatcatgggattcatcaatggtggaatcctatgcttggacagttttcataccaaattatagcatga

SEQ ID NO: 171018 - DNA, 1231 bp, Arabidopsis thaliana landsberg
ctctaaaacaaggctctgcagccaaatgtgtatcaacaagtcaattaggtaactcagagaaaaaaagaacattgattaagatttgacatgagcgtaatggagtttgactgttgtggaagtgtttaggttttagtttactggttctataaagcttgtttggatattagcattgtaagccgtttcatggtcccttagacttagcagaagggttgtgagggaggatgacgttttctgaactttcctagagccgtttatagaatattgttttactgatttgtcacaattggttacgtgactaagagctcttaatttcttttgatttatcttatggttggcatgaatacaggttgcaacttcttcattggcatctgttgcaagacttccatggggatctcgagtatcaactgggagtatagataaccaggatgtctcttctaatccgcctttgcgattgcagctttttgaatttggtatgttttgttagtgccatgtaaacaaagagcattagtggaaagctaattttacatttgtaagagttttcttggtttttggataacagaggcatgtcccttttgtcggagagtgcgggaagccatgactgagctagacctttcagtagaagtaagaaccgaatcatattttccagagagatggctcattaagcaatatacaaagtttatcctgacatttgttggtgacttgttgttcaggtttatccttgtcctaaaggatctataagacacagagaactggttagaagatctggcggaaaagagatgtaattttacgttcttgttctgtcaattggtttcgttttcatcattccatagcagtttttgttttccttctgtcgtcagtctttaaacttctgagaatgaaaatctgcaggtttccatttctcgtcgacccgaatactgaaactttaatgtatgagagtggtgagtcgtaagttccatcatcaatacctgattgtcgtttttctctggatatcttttcatcggttcttttctctctttgaatttaggtgacatcgtaaagtacctatttaaacaatatggaaatggaagaggcccttccacaggacttctggaaaggtgagcattctcagaatctggtatacttggtcaaactatctgggatgtgtagtctccagctcctagcgtgaataagttttaattgtatcactgacttcattagaattgtccagcaccttgttcactggatggatgcc

SEQ ID NO: 171019 - DNA, 442 bp, Arabidopsis thaliana landsberg
agcatctgttagtgttcgtgctatacgccatcaacgccatcgagatggtgttcgtgaaggacttcgttcagtatttcaccctgcgcatcatcgagcatcagcgcatccccgcaatgtcggcggatgagaagatcgagttctggctcaccaaggcattctatttcgcggtttttgtgggcctgccgctggcgctgtttccggcttggcaggtgctggtcggcttcttggtttatgaagtgacgttgggtctggcgctggcgctggtgttcggcatggcgcatcaggtggaatccgtggcctttcccgcaccgcaaggctcgccgccgaccattcacaaagcctggaccgcgcatcagatgcgcaccacggcgaacttaacaccgccagcggattgctgaactggtacaccggcggcctcaatcaccagatcgagcatcacctg

SEQ ID NO: 171020 - DNA, 476 bp, Arabidopsis thaliana landsberg
  unsure (1)..(476): unsure at all n locations
ggcagagctgggagtattatcgcatggcgcggtgctggaatatgataatttttcccgcaagcgtattcctcttcgctgcaggccaattcgggttccgggtattcggtgtggtattatggagtgcggcgatctcttccgtggtaggcgcggcgtatacttctatatcattcctcaaaacactgcacccgctgatagcgaagtatgagcggctgagcatctctgtattcatcgtactctccacctgcatttttgtgatcataggtaagccgagacagttgttattattcgcgggactggccaatggatttatcctgccgctggcgctgggtgtattgttggtagcctgtaccaggtcgcagatcatgaaagggtacaaacatcctgtatggatgcaggcagcggggtgggcggtagtggtggtgatggatgngatgaactgtgtggctgttatggactggatggcatgaagattgtat

SEQ ID NO: 171021 - DNA, 180 bp, Arabidopsis thaliana landsberg
gtggcactcaaaccgcgttacgccgcttacgtggtggcgctctggctcgccggcatcatcatcaattttctgacctactccggctactacgacgtggcgctgcgagacctggggctgttggtcggcgcgctggctctggcacggctggcctcgacctacgatcgaccgctcggcgccccg

SEQ ID NO: 171022 - DNA, 1553 bp, Arabidopsis thaliana landsberg
  unsure (1)..(1553): unsure at all n locations
atgtcggcggcgaggattgaggtggaaaagttcgatggtcgtggggattacacgttgtggaaagaaaaacttatggcccatatggagattttgggcctgaccgaagccttaaaggaagcccacatctcagatccagaagaaacggatggagatgataaggagaaggaagttctcatggaggagaagaggcgaaaggctagaagcaccatggttttgagtgtttcagatcaagtgctaaggaaaatcaagaaagagaagactgcagcttccatgatggttgctttagacaagttatacatgtctaaagctcttccaaaccgcatttatccgaagcaaaagctttacagctacaagatgcaagagagtctgtctgtggaaggaaatatcgatgagtttctacatctcatagcagacttggagaacacgaacgtgctcgtgtctgatgaagatcaggcgattctattgctgatgtctctgccgaaacagtttgaccaactgagagacactctcaagtatagctcgggaagaactacaatgacactcgatgaggttgttgcagcaatatactcaaaggaacttgagttgggctctaacaagaagagcataaggggtcaagcagagggtttgtatgtcaaggagaaagaagagacaagaggcagatctgagcagagagagaaggggaacaaaaacaacagatccagatcgaagtcaaaaagcaaaaagggatgttggatctgtggtgaagagggtcacttcaagggttcttgtccgaacaaaaacaagttccaaaacaagaaaaaggaccaagcaagcagcagcaaaggtgaagcagcgatggtagaaggaaatcacactgatgctgcaggctactatgtatcagaagcccttcattcaatgggtataaaccttgaagatgaatggataatggatactggatgcagctaccatatgactcacaaaagagagtggtttgaggagctaagtgaggatgctggaggctctgtaaggatgggaaacaagacgatttccaaggtcagagggattggaagcatcagaatcagaaacgatgatggctccccagtattactcactcaagtaaggtacattcctgacatggatagaaacttgctttcgatgggaaccttagaggaacagggatgtagctttgagtctaagaagggagttttgctagttaaggtggatacaagaactattatggtaggtaaaaggcatgaaaaactctacttgcttcagggaaaaccagaatgtggacattctttggttactgaaaagaaaagtgatgaaacaatcttgtggcataggagattaggtcatatgagtcagaagaatatgactatcttggttaagaagggttttctggacagaaagaaggtctcagaatttgaactatgtgaagattgtgtttacgggaaagcaagaaggattagctntgttttagccacacatggcacagagaacaagctagactatgttcattcggatttatggngagctccaacggtcccattatctctgagcaaatgtcaatactt

SEQ ID NO: 171023 - DNA, 1795 bp, Arabidopsis thaliana landsberg
aaaaatagaaaacaaaaatttctaagtgcgtagacctaaatttatttatcatttaaaaaaaaaaaaaaaaattatcttggtgttaggttcttaccgaatgccgaattaccgtctaacggttatttgaataaaatacaatacaagtcaaaaataaataataccaaagttaatgttacatatatatatatatatatatatatatatatataatataccaaaattaatgatgtgatgtgctacatttcccaaaaataattttagattactacaataacaaaaatgcattgacacaaaactatttcttcactctttcactcttttcaattttcacttatttatattcaataaacttctcttgtgttgaagtctatcttcgggtgatttattttatttttaggtgatgtgagatatggttcttgaaggctatcattttcatcagtcttcaatagcttttgaaatatataaaacaagatttctctacaccttgttgcaatattcgtaagtgaatacaaataccgtttaacaaaaagcatggtcttgaatgcgccaccaccatccacatatcgatatacaacatgaaccatatgcatgcaaggccttcctataaaacaccatatgtgtatctttgaaagaccatacgtataataatgctttaagtaatatatatttgatagatgtgtgtaaaacgctccatcacatattgtctctatgcaaggtgcattagctccttccattagattcttgaactcacaagtgacgtccacgtattacatcaagtgattcacatatacaaaattatccttttaacattattttcttgtcaattagcaagttgtttcgaaaaatgataagtttcaaaaatagcagacaatttattaacagttaaaagtatggacactttccaatatttttgggatagtttggataaaaaattcaggaattttgtctttttgttcttggtttaaatctttttttttttgccaattagaatcaaacaaattaaacttttgtttggtttccgtcaaaaattcttttgtacttgtcatatggcaatagtttgaaaactacattgcacaacctcataacatgtcgtaacttgtaacttttaaggaacacactatttaaatgtgattatgctaagcgctgtttaaagtagcagtgttcaatatacaacataaattgtgcttcggatcttgaggtaaccaaactaactttccgagtagctaaaatcttccttttggtttaattccacgagttagacaacagatcgaaagtttccgaatcgctacacaaaattctagaatctagatcatcaatagaatctcactaacaaacgtacatgatctctcttctaaaaccaattccagatcaccctgttttaagtcaaagttttactcaattgtgtcatgtttttggtataatcatgtctcacttgttggattagtgtgtgacaaagatgtttcaaagtcacacaagttagattcactcttgatgatggaacaggccaatttgactgtaaacgatggtaaactcacagaaactattccttttggcagagtatgcaagattgtttttaggtacaaatggtcagttttgaagtttgtagttggtgttgttgtgcccttttttagagggtgaatgatactgtcgacgctagaaaatgtagtatgtgcggttagtatctacggcttaatctgatttgtggtgagatcacatttagtttggaggtaagcttgtggaacagagatggaacctatgtgcgtctcaatggtcagttaagacttttctctgtgag

SEQ ID NO: 171024 - DNA, 140 bp, Arabidopsis thaliana landsberg
atggagagcaagaaaaagcaattgtttgggaacttgcgcgatctgacgaatgacgtccgtccaagtgcgtatggacaacaagacgactgcggcggagttagccgcaattgccgagaagcttctcaagtgctgcattgatg

SEQ ID NO: 171025 - DNA, 367 bp, Arabidopsis thaliana landsberg
gggtgtgagttctcaacagtaaaccgtgtttgaagattgatgatcgataatacccatgtctaatagtgtgtgtaggagcgcttgatgtaagatagagcctccaatgattgttcttataatatgtaattatgatatgaagttcatatacgcataggttggtgtacctcgtagagctcatgaaaaaaagcttttaaattattgtgcaaggaatataccttttttctttcaacccccgaatggaaagtattatcttgtagacatcggagatcccaccagtcctggatatcttggtccacatcgtagtatcaaacatcgtattggtcaaattggtagcgagggaccgtcagttaatgcacaaaagttgttc

SEQ ID NO: 171026 - DNA, 403 bp, Arabidopsis thaliana landsberg
cacgcttttggctcgactcacacgccccgatgtgcccgacgcgttcgcggcgctacagcagtggtccaccgctggcgcgcactttggtgccgcttgctccggtagtttcttgcttgcagagagtggcctgcttgatgggcatcgtgcgacgacgtcatggtggctggggccgatgtttcggcagcgctatccgaacgtcacgctggacgagtcacgcatgatcgtgaactcgacacgcttcaccaccgcgggtgccgctttggcccacgtcgacttggccttgcgcatcatccgagggcgcagtccggcgctggcggccctggtggcacgctataagctggtaaagacacgcagttcgcaagccgagttcgtgattcccgaccaccttgcgcatccgacccga

SEQ ID NO: 171027 - DNA, 532 bp, Arabidopsis thaliana landsberg
  unsure (1)..(532): unsure at all n locations
cgtttcttgtctgtgttttntgtaggctagcgtttccagaggagaccgatagcagcttaaaganaatcccgaaactggaagatcgtgctcagtattctatgcttgggcttaagcctagacgagctgatctagacatgaaccaacatgtgaataatgttacctacattggatgggtactcgaggtgagttactaagtatattccacaaaaccttacgtcatttattaatgagctaactaataatttgagcttggtaatggcagagcataccgcaagaaatcatagacacacacgagcttaaagttataactctagattacagaagagaatgccagcaagatgacattgtagattcactcaccacctctgaaacccccaatgaggcggtctcaaagcttactgggaccaacggatctaccacgtcaagcaaacgagaacacaatgagagccaattcttgcatatcctgaggttgtcagaaaatggtcaggagatcaatcgtgggagaacccaatggcgaaagaagtcatcaaga

SEQ ID NO: 171028 - DNA, 1140 bp, Arabidopsis thaliana landsberg
  unsure (1)..(1140): unsure at all n locations
acaccatcatcctctcaaaagcccgtaatcggagacccactatacttgtatcggatactgctgttagcggagtgttagtccgagaagacagaggtgaacataaaccgattttttaagtctcacagacattcaccgggcggaatctcgctacccacaannnnnnnnnnnnnnnnnnnnnnnnnnnnngtcggctcggaaactgcaaccatacaatcaatcccattccatcatggtaatgggatccagtggcctccgcgctatcttacacagtccaagccaatcaggacgcctagctaaatgggcaatcgagctcagcgaatatgacatcgagtatcggaacaaaacatgtgcaaaatcccaggtcctagctgattttatcgtcgatacaacttgcctattgcacgtagacggctcgtcatcaaagcaaggttcgggtgtagcatccgcctcacttcgccaacgggagaagtcctcgagcaatcatttagattaaacttcgaggctaccaacaatgtggtcgaatacgaagcgctcgtagccggacttaatcttgctcaggggctaaagatagagaaaatccgagctttttgcgactcccaactcgtcgcaaatnnnnnnnnnnnnnnnnnnacagctcgggacgaaagaatggaagcctatctgactcatgtacaaaatctagcgaggaatttcaacgagttcgagttaacaagaatcccccgaggagaaaacacattggccgatgcccgagcttgagacaagtgcatgaactgatcgctggcatcctcgagaagagctgccttcccctaggccaccttaaacttagcgagaaagacctttgaagcctctcgcctggccttctgcgcagcccaagccacctcgctgtctcttagccgcctcgcctcggcaagcattcgcttatagcgaacgacctcaaaatccatcctcagattgctctcagctaatcgtaagattggaccatctgattcattgaacccatagcctgaaaccatattcaaaagcggctcagaaagtaaccagaccgacgacgtcagtctcagcaagtcccggttcagcgggcgcagcagtctaaggaataacttcccgagccgcggaaggctcgggattgacatctatacc

SEQ ID NO: 171029 - DNA, 608 bp, Arabidopsis thaliana landsberg
atggaggtcaacaatgaaaccatgcaaaagtcaaagtttggaagaatctgtgtgttttgtggaagcagccaaggcaagaagagtagttaccaagatgctgctgtggatctaggcaacgaattggtattattacatacacctctggatttttctatgtgtagttattactctgtttcttgagttcttacagttttatgttcaccagatgtttgtgaatatgtttctgagtttttttttttgcaaatgcagagcatttcctctgttttctactttgaaaaacgctcttaaatatgtaattttgatcactcaaaaagattctttctttttttcccttttatcatattcatcttttatgatttggagcccacaaattccgcatgggaatgtttgtatctaatttgatagtacaaatagagtatctttggttttgatttcttttcatagctaatttctcaaactatctgtagtgataaagatggtttatttactctgtttcgtttactatcacaggttttaaggaacattgatctagtctatggaggtggaagcataggtttgatgggtttggtttcgcaagctgttcatgatggtggtcgccatgttattgg

SEQ ID NO: 171030 - DNA, 3152 bp, Arabidopsis thaliana landsberg
  unsure (1)..(3152): unsure at all n locations
cgcgcgtggatgggagagatgctgcatgttgatagacggtttgggttattttggtttactcaactgaaattaccttttatgaaaaatgagtcgacaattaatttactttttttttttttttttcattctttcattttaacccaaccatggttaagttacaacagcgtaataaaactcatataaaggcccagcaacataaaattacttatttctttcagttaaggaaaataagtatttcgttatttttataattgtttttttttgagaaacaataactatctatatatacatttttgcagccactttagcaaataacatgttcacttagcgcttatttactatggtatgccattgacatttattattttactaaacttatttttacatctaaatataaaatctattatgttactaaaatttatgaaactaaagaaaaaaatcacaaaaacatttaaatctttccaattagcattaatcaccctgattttcgttttaaatcatttattttcagttaataaaatgaatcaaatcttatattacaatatatgctttaatattttcattaaaaaattaattacgtaataaaactctaaaacccaaaattatttctcaatccatattttttgttttaaacttgcaattgtacaaaataattttgttctttttttctgggataaataaattatacatgtattaagttgatattgttgattcaaataatattaacaaaatgactaaatttaggttattcaaataaaaaatagttagtcaaaaaccaagtatatcaatcccaaattatgattaaactaaatattttataataatttttaccaaaaattaacattatatatattaaaaaatttgaagtacctttttaaagtacttttgtgttagtaaagtaagaatttacaaagaatgacattacattaaagtcaaaaacaattattatttttaaagaatattattgatatattttaactttatgaaacattattaatatttaaacataaaaaaattaaaatatcatgagacgagaagtatagcaggacgggtttggattgatatgaaatacagcgagacgggtttggattgatataacacaggttaaatatttattttattattttatcataaccaattttnttagttataatattaatataaaattatataattttaatactatattaaaaatagtaaaatttaatattattatatatatgaataaaatatttgttccgtggtgtaccacgagttaaattctagttgggcttaagactgtagactgtatcttcatcggatatgcgcacaacagtagtgcttatcgatttttggtgtataaatcaggtattccaaatatccatgaaaatacagttatgaaatcaacaaattcatcgtttttaaagatattttcctttataaaaaagatcaaaaacgaacttctgaacaacgagatgcagcaacctcggaagctgaagacaatactttgggtactattactgttgaagaaacagaacaggaacctgaagaacatcctaggcggatcaaaagagcttgaaagagaaatctttctgtgatgatttcttgatggcgtttttagctgaaaacgtaccaaaaacctattcagaagcaatgtctacccttgatgcaccttattggaaggaagcagtcaatactgaaatagactctattttgcaacatcatacttacgagatagcagatctaccccaaggctctaaaccattggggaagaaataaaattttcacaataaaaaagaaaacgaatggtgatattgataggtacaaggctaggcttggggtacaaggatttcgacaaaaaaaaaggtttagatttctttgatacctattctccggtaacgagaatatcttcaatcaagatgctcataggcattgcagccttactagatcttgaaatccatcaaacggatgtaaaaacaacctttttaaatggagatttggaagagaaaatctacatgaaacaacctaaagggtttgttatcccaggacaagaacacaaagtatgtaaacttgtgaagtcactatacggactcaaacaggctcctaagtagtggcatgagaaatttgactttgttatgatgtctaataattataccattaatgaatgtgacaaatgcatatatttcaaaattactccaacatggtacattttgttatgtttatatgtagacgatatgctcatcttggggagtaacacagatatcataaatcaatctaaaaacatgctcaaaagatattttgaaatgaaaaatatgggtctagcagatgttattctgggtataaaaatcatcagaactgatgaaggcattatcttgtctcaaacccactatgatgagaagatactcgatcgtttcaagcattactctaatgggactgcaaaaactccagttgatcctcaacttcacttgactaaaaactctggtgaacctgtgcaacaggtaaaatatgcaagagtagttggcagtttaatgtacttgacaaacagtacaagaccggatttagtgcactctgtaaatgtacttagtcgctacacaagcaatcaaggatataatcattgcaaggctataactagagttatgaactacgtatgttataccaaagatcatggcttgcactatggtaaagaacctgcggttttggaaggttacagtgatgccaactggatagcagattccaaaaactttaaatccactagtggatacatctttacacttggaagtccagcagtatcctggaaatctagcaaacaaactgtggcagccaaatcaactatggaatcggaattcatagcattggatacaactgcagcggaagccgaatggcttcgtaatttcttggaagacattccaatgtgggggatacctgtgcctgcaatacgtgtacactgtgatagccaatcagttataggcagggcacaaagtaccctatataatggtaaatctcgtcacatcagacgacgacataaaaccattcgacaacttatcttaactaaagtaatcacgatcgattacatcaaatcagttgacaacctagcggatccatttacaaaaggtttgaatcgagatcaagttgcaagatcatcaagaggaatgggtttaaagcctaccacctaa

SEQ ID NO: 171031 - DNA, 421 bp, Arabidopsis thaliana landsberg
atatataccaattgtatcttaggtaatataattcatataacaattgcatgttgtaaaattacaaaatatcttttcatttaaaaatttggattaaatacatatctcaaaaatgacatttttagtatttattaaataacaacatttgtttttaaaacacatgcaatttgaattgaatgaatgaaaataccacaacatcactagaatataaatcactactttacaaaatcatagtcaatgacatactttttaaacaatatttttgcaggaggagagagctggattaagatatgagataacttgcacaaaatgtgatggacatctaggtcatgtcttaaaaaatgaaggttttccaacaccaactgacgaacgccattgcgtcaacagcgttgctctcaagttctcttccgctatcacatctcag

SEQ ID NO: 171032 - DNA, 520 bp, Arabidopsis thaliana landsberg
tcgaacgggcggcggcatgaactgagggtggatcatgaacaagcaatttggcgcattggcgtttttcctggcgattcccctgctgggcgcagctgtgtgggcggctccggccacggcggcgacggacgtatcgccgacaccacccatggggtggaacgactgggcgcactatcaatgcgattacacggcgcaaactgtcctcgccaacgccaaggcgctggttgcctcgggcttggccaagcgcggctatgaccgcgtgacggtggacgactgctggatggggcgcaagcgtgatgcgcagggcaacctcatggttaatcccaaacgctttccgcaaggcatcgagccggtcattgcggccatccatcgcatgggactgaagttcggcatctacgaggacgcgggcagcctgacgtgcggcggttatgccggcagcggcgcggccaagccgggtgcgccggatcattttaccgcgacatgcgccagttcgcgcagtggggtgtggattacgtcaagctgg

SEQ ID NO: 171033 - DNA, 463 bp, Arabidopsis thaliana landsberg
gtaacaaaagagacagctcatgctggcaaggagatgattcctttaaaacagtcctcattgctactaggagtgtggacttttacaaccactatgtaaatcactatggtgattcctcagaaagacagaaatcaatttacctcaagatccaccaataccactgttgggcatatacccaaaggatgcttctttctaccacagggcacttggtcaaccatatttgttgctgctgtactcatactaaccagaagtggcaaagaaccttaatatacttcaaaagaaaaatagatttaaaaaatgttgaacatttaaacaatggagcattactcagttgtttttaaaaagaactgaaaggctgtgctatcacatagttgtagaaggcccatgtgcaaaaattcctggactcacaatcttggctaccatccatgcccaggtccactacttagagttggtgcactccaatatc

SEQ ID NO: 171034 - DNA, 1612 bp, Arabidopsis thaliana landsberg; identical to SEQ ID NO: 8301
  unsure (1)..(1612): unsure at all n locations

SEQ ID NO: 171035 - DNA, 541 bp, Arabidopsis thaliana landsberg
  unsure (1)..(541): unsure at all n locations
ctctgtgatatacatcacaatctctggaaagataatgagaccaaactttattgaggttggatcagatcgataaaccaggaaggcgggaacaaggcaagaggtttggagtagaacagtatgagatgcgaaccttctcgaaagatcgcccaatgttggaaaatctggtaatctatctctccctaaagttagacaagacaaagagtattaatacattccttcttgcttattagaggttttgtgcatttggtacatttcaagtcgtatattgaattggtttgtacagaaattaggggaaggagtgaagggggtatacatctcgatagacgttgactgtctcgatccggcatttgcacctggagtgtcgcatatcgaaccaggaggtctctctttccgtgacgtccttaacatcttacacaaccttcaggcagatgttgtcggggctgacgttgtcgagttcannnnnnnnnnnnnnnnnnnnnnnnnnnnnnnnnnnnnnnnnnnnnnnaagcttgttagagaattagctgcgaaaatctcgaaa

SEQ ID NO: 171036 - DNA, 386 bp, Arabidopsis thaliana landsberg
gcggagtacaatgcgcgtctccatcccagccgggaaaccccacgtgcccacgtgtcttcgcagtgcccaattgccgggaatggaagcgagctatcgcggcaaggtccgcgacgtgttcaccctgcccggtgagcgcctgctgatcatcgcttccgaccgcctgtccgctttcgacgtgattttgcccgacccgattccgggcaagggcgaaatgctcacgcaaatctccaatttctggttcgacaagacccgtcacatcctgcccaaccacctgaccggcacgccggttgccgacgtgctgcccgacggcgtcgacaccgacctgtacgccaagcgcgccgtggtgaccaagaagcatcaagccggtgcgcgtggaagcgatcgcg

SEQ ID NO: 171037 - DNA, 594 bp, Arabidopsis thaliana landsberg
atggcgaaactgagacactcgcgatttcaagcgaggaaatggtcgacattgatgctggttctgtttatgttgtttatgttaacgattgttctcttaatgcttttggctttcggagttttctctcttcctattaacaacgatgaatcctctcctatcgatctctcttatttccgacgagctgccactgagaggtgagctttgcatgaatttcttgatctctctggaatttttatattaaatttgtttaatttcttttttgtttgtgtatcgaattcagaagtgaaggacttgggaagagaggagaccagtggactgaagtgctttcttgggaacctagagcttttgtctaccacaatttcttggttagtctgattctttattccacagattttattcgattaatttaccactgattgtgttaatatcttcagtttgatcattgtttaagatttagtatctggaggattgattaattaattattgatatgattttgaccagtcgaaggaagaatgtgaatatttaatcagtcttgcaaaaccacatatggtgaagtcaactgttgtagatagcgaaaccggcaagagcaaagatag

SEQ ID NO: 171038 - DNA, 966 bp, Arabidopsis thaliana landsberg
aaatggggattaccaccgctcttctcttagttatgcttatgtccgttcacacttcctcgtatgaaaccattattttaaaaccatacaaagaagataactttcggtctcttgtcgcgaaagcatgccaatttatcgatgctcacgagttgtgcgtctctaacatctggacacacgtcaaggaatcgggtcacgggttaaacccgcattcggttttacgtgctgcggtaaaggaagcacatgacaaagccaagttagcaatggaaagaatcccaacggtaatgatgttatctatccgttcgcgtgagcaagttgccatagaggattgcaaagagcttgtaggcttctcggtaacagagctagcatggtcgatgctggagatgaacaaactccatggaggaggaggaatagatctagacgatggctctcacgatgctgctgcagcaggaggcaatcttaaaacctggcttagcgcggccatgagtaaccaagacacgtgtctagaagggtttgaaggaacagagaggaagtacgaggaattgatcaaaggtagcttaagacaagtcactcagcttgtgagcaatgtcttagacatgtacacgcagctcaatgccttgcctttcaaggcatctaggaacgagagcgtcatcgcaagtcctgagtggctcacggagaccgacgagagcctcatgatgcgtcatgaccccagtgtcatgcatccaaacacggttgtggcgatagatggaaaagggaagtatcggacaattaatgaggccatcaacgaggctcctaatcatagcacaaagcgatatgttatatatgttaagaaaggtgtgtataaagaaaatattgatttgaagaagaagaagacgaacattatgcttgttggtgacggaataggacagacgattattaccggtgaccggaatttcatgcagggtcttacgacattccgaactgcaaccgttg

SEQ ID NO: 171039 - DNA, 612 bp, Arabidopsis thaliana landsberg
aatctccatgcgctggttcagtctctttaggctaacctccatcttggtagctagccaaacaccggacttgatgaccaagttgtcatcatcttagtagccaaacattcacacatgccgttgcttattctacaagaaacacataaagactatccttgcaagatcgtgtacttgtataggaatgtgattgacacgttagtgtctcgttggtgtttcaggtgcagctatctgaaaaagaagtagagagacacgtttttgaggctatgtttgagtcgttttgcagcggagttagctttcacggtcctttgtgggaccaagtcttgagatattgaaaaggtgtgatgttaaacgccatagattagcgcgaccgcatatgagctcatatgacatacgagcagggccgtatataggctgtgcgacaatgcatttgcactgggattttgttaaattacctcaaaaattagtgtattaaaggccccaaaatttgaacatggaccatagtttatttttgctattttgagccggcctatgtcggaccatagataaattttgctattaaaagtatgagaataccctttttatatactaaaaatttgtaaacaatagtaatataaa

SEQ ID NO: 171040 - DNA, 553 bp, Arabidopsis thaliana landsberg
cgcccttgaaaattgtagtagagaggttgtaaaggcacttcttgagcttggagcttctgatgtgaactatcccgcgggtccgacagggggaaccgctcttcacattgcggctgaaatggtgtctccggacatggtggctgttttactcgaccaccacgccgacccaaacgtccagacagtggatggaatcactcctctcgacatccttcgaaccctaacgtcagattttttgttcaagggggcaattcctggattgactcacattgagcccaataagcttaggctttgtctcgagctggtccagtccgcggcattggttatatcacgcgaagaaggaaacaataacagtaacgataacaacacaatgatctaccctaggatgaaagacgaacacacgagcggaagtagtttggattcaagattggtttatctgaatcttggtgctacaaatcgtgatattggagatgacaatagcaatcaaagggaaggaatgaatctgcatcatcatcatcatgacccatcaacgatgtatcatcaccaccaccaccatttc

SEQ ID NO: 171041 - DNA, 470 bp, Arabidopsis thaliana landsberg
tctatctgggcagcggtggcgccattggtgcggcccacgaaggcgcgctgaagatgctggagatgaccggtggcaaggtcgtcaccatggccgagacgttcctcggtctgcgacacgggccgatgtccagtgtgcacgaagccactctggtagtggcgctgttgtcgaatgatcccgccgtgcgcggctatgagcacgacttgttgcgcgagctgtcgcgcaagcgcctgggcatggccacgttgctggtgggccagggcattcccctcgacctgatcggtccgaacgacattgccattgatttgccgttggccggtgatggcgagatccccgcgctgctggcgcaggtggtggccgggcaatggctggcgttcttccgctgcctgcatctgggcggtacgccggacgcgccgtcgcaaggcgtgctcacccgcgtggtgggcgaattcaccatccacggcgacgacgca

SEQ ID NO: 171042 - DNA, 913 bp, Arabidopsis thaliana landsberg
tttttgtctatttttaccagcctagggtggaagctgcaatggtgaatgctaggatctgcaagacagtccgtgcatcaaatgccaaggttggatatgttggtccacctgcagagttcaactacgactgcaaacacctcgggactgggcctgatactctcaaggaaattgctgagggacggcatccattctgtacggctctcaagaacgccaaaaaccctgcaatcattgttggtgctgggctcttcaacagaactgataaaaatgctatcctctcttctgtggagtccattgcacaagccaacaatgtcgtccgaccagactggaacggtctcaactttctccttcagtatgctgcccaagcggctgctcttgatcttggtctcattcaacagtccgccaaagccctcgagtctgcaaaattcgtctacttgatgggagcagacgatgtaaatgttgacaagattcctaaagacgcctttgtggtttaccaaggacaccatggagacaaagcggtttaccgtgcaaacgtaattctccctgcatcggccttcactgagaaagaaggaacctatgaaaatactgaaggatttacccaacagactgttccagctgttccaacagttggtgatgcaagagatgactggaagattgaagagccttatccgaggtctcgggtgtgaagcttccatacaactcaatcgaaggtgttagatcaagaataaagagcgttgcaccaaatctagtccacacagatgagcgagagccagctgcttttgggccttcattgaagcctgagtgcaaggagacaatgagcacaacaccgttccaaaccgtggttgagaacttttacatgacaaactcgatcacaagagcatcaaagatcatggcgcagtgcagtgccgtgctcttgaaa

SEQ ID NO: 171043 - DNA, 1095 bp, Arabidopsis thaliana landsberg; identical to SEQ ID NO: 57001

SEQ ID NO: 171044 - DNA, 376 bp, Arabidopsis thaliana landsberg
ggttacttttggcattcgggtattaccaagagaagagagtcctggttttaaaaccctggatcttgggttggctgatgaacgtgggatggggattgttgatgatcccagtagggttgggcctcatgacaagaaaaacttgctgcagattgctaggtacaagtattttggagacaagtcttgtttgttttcagaagataagaagaagatagatgagagtgatgagaaaggaccattgaatactgctttgagattcctcaaggatgttcacgaagaattcttctatgactggtcgaagaaagacttggattcagtggatgtgaggccgttgctaaaggagatttctttgagatggaagcgtaaagcagacggtgtggtt

SEQ ID NO: 171045 - DNA, 1273 bp, Arabidopsis thaliana landsberg
gtcctgtgcggtttaatgttgctctagaggcgttgcaatcagtagcttcgatttatgggagcagtaatgtctgtgtagtggggcattcgttaggagctggttttgctttacaagttggtaaatccttggctaaagaagggttatttgtagatgctcatttgttcaatccaccttctatatctgtcgctatgagcttgagaaacatcagcgagaaagctggtgttgcttggaaaagactcatgtcaatgcttcctcccaaaaacgagcctctgatacagaatagtaacgaaggtcaggtttctcctagcaatgtttcatcagggttcaggaactgggtaccgagtttctacgggtcgaatcagaaacctactgtggatttaagaaaatgggtgcctcatctatatgtgaacgatagcgactatatttgttgccactacactgaccaggatggagtagcagagaagagggaaatgaacaacaaagagaacaatagccctgttgtaaacactaattttcaagcagcagcaaagcttttcgtgatgtcgaaagggaaacagaagtttcacgaggcgcacgggttagaacaatggtggtctgataacctagagcttcaatcagctattcacagcagcaggttgatcagtcagcaactcaagtcattatacagtatcaagtaaaacatcatgatggtaacaaatccatctccatcgttcaataaacacatttgttttctttctttatgtctaagaacactttttcatgaaatgtaacaacataaatgtaagaaagatcagtagtgactgatgtgcaacattttgtagagaaaaaaaatgaagataaatttttctaagaatctcgaatccatagagagggatgtgttgtgttcctaccattgaagcgttattaagagcaaatgttattacaaaaacagtcgttagagaggaaccaacgggaacagatccatgtgcagatttgagattggtgattcactaattgaattgtgccaaagaacttaacggctgtaacaatcatttggggccaccaataaacaaaaaaaatgccatgtgctttcgaccaacattatcatcagacagaacataccatcacaatccaactcatattaagcaacagagacagtttcatatcgcagacactgcactgttccttgattaagataaaattaatcaagcacttgagagaggatcacgttcttgaagttacgaggacaagaaaaaaagttggaatgatcatatcaaactctgatatgattagc

SEQ ID NO: 171046 - DNA, 614 bp, Arabidopsis thaliana landsberg
atgtctatcttcctcctatgtatcctcttccttttccctctctttcagatcatttttaaaaagcttttaccttcgaaaagtaagcttcctccgggacctacaggtcttccgatcataggaaacttgcaccagcttggaagatcgcttcacagtgtttttcacaagctctctttataatatggaccagtgatgcttctccgttttggagttgtccctgtggtcgtgttctcttccaaggaagcagctaaagaagttctcaaaactcatgacttagatactcgcacccgacctaagctagtcgcgaatgggttgttttctcgcaacttcaaagacattggtttcactcagtacggtgaagactggcgagagatgaaaaagctggtggggcttgagctctttagtccgaaaaagcataagtctttcaggtatatcagagaggaagaaggtgacttgctggtcaagaaaatatcaaattccgctcaaacacagaccctaatagatttgagaaaaacctctatctccatcaccgccggtacaatcttcagactagcctttggacagaacttccaccagtgcgatttcatggatatggacagacttgaagaactggtgct

SEQ ID NO: 171047 - DNA, 570 bp, Arabidopsis thaliana landsberg
tcggactttgggcttgcagagaaggacctgatggcgacaatactcatgtcactaccgcagtaagtttggtttgatatataaatgtgcattttataagctcactcgtactttaaagtgatgaatctgttacaaagttttaacagttcttcttctttctatgtatagagagttggaacacacggctatgcggctccggaatacgtgcaaacaggtcatcttcggttaaagagcgacgtctatagcttcggtgttgtgctctacgagatcataaccggacgcagaaccattgagaggaacaagccagtggctgaacgaaggctattggattgggtcaaagagtatcctgctgatagtcaacgtttcagcatgatcgttgaccctcggttacgcaacaattatccagctgctggagctaggagtttggctaaattggctgatctttgcctgaaaaagaacgacaaagagcgacctacgatggaaattgtagtggaaagattgaaaaagattatcgaagaatcggataatgaagattatccgatggctacgactacgaccaaggaaagtagtcag

SEQ ID NO: 171048 - DNA, 571 bp, Arabidopsis thaliana landsberg
cttttttatgtgcaaaaaagctagttgatcgccaaaaaatatcgaaacatggagcaccaaattctcagtcaaagagacaatgacgatggtgacactttggacactaaccgttgatatgttgcgtttttggtgttttaagtcccttagttttgagtcgtttgtcgtgtcatagtctgtcttttgcgtcttacacaaaatgctgaaacttctattattttttcaattatacttcatgtgtttttttttaaccatactttatgtttataatacttttttcttatataaattgtaacatgcaattttgaaattgcaggaagttcaagtgaagaaaggcaagaaatttggctatggttcaattctggtagctgatcctactgttgatgcatctccaaataatgaagaaatgtatcttgagactcaagaaaagctccagaaatcggaccaagaaattgagggaatgctcctgaagtttaaagatgttgatttttggattactatgatgcagaacaagtttgcaaatgaagttccaccttccatgagaacaacaatgaacaccaatggttgtctttga

SEQ ID NO: 171049 - DNA, 389 bp, Arabidopsis thaliana landsberg; identical to SEQ ID NO: 80680

SEQ ID NO: 171050 - DNA, 753 bp, Arabidopsis thaliana landsberg; identical to SEQ ID NO: 2112

SEQ ID NO: 171051 - DNA, 469 bp, Arabidopsis thaliana landsberg
  unsure (1)..(469): unsure at all n locations
aatctggcgtctgctcagagagcacgaaggcccggctacgctgcactgatggcgtcctcgcgccgcaagccgttgctccggcatgaaaacgacgcgccccggaaacagaaacnccgtacgtgcggactgcaaacgtggaagacaggaagccagactttatggatcgtggcaagcaagcagtgccgagcattgtcatcaccggcggtgccagcggcataggcgccgccgtggcgcggcacgtgattgacgcgggaggctacgtagggatcgtggatctcaatgccgagcgtgcgcggtcatacgcgatggagctcggggaacgagccgtgggcatggcggccgacgtctccgactatgcctccatgatgggcgcgcaccagacgctccccgcccggatgccgcccatcaacgggctggacaatagacgccggagcgccgccggtgcccactccgatcgagacggagtccg

SEQ ID NO: 171052 - DNA, 867 bp, Arabidopsis thaliana landsberg
atgggttctgatggtgacaagaagaagaaattcatcgtcgccggtagtgtctccggttttctagtcatcatggttggctctgtagccgttgtaacgtctaaacactctcccaaagacgatgaaaatcatatcagaaaaaccaccaaagcggttcaagcagtttgtgcacccactgacttcaaagacacttgtgttaacagcttaatgggtgcttctcccgattccgatgaccctgtcgacctcatcaaactcggcttcaaggtcactatcaaatccatcaacgaaagcctggaaaaggcctctggagatatcaaagccaaggctgacaagaacccagaagcaaagggtgctttcgagctgtgtgagaagctgatgattgatgctatcgatgacttgaagaagtgtatggatcatggattctcggttgatcagatcgaggtctttgttgaggatctacgggtttggctaagtggctccatcgcattccagcaaacatgtatggattcctttggggaaattaagtctaatcttatgcaagacatgctcaagatcttcaaaacatcaagagagcttagtagcaatagccttgccatggttactagaatctccactcttatcccaaactccaaccttacaggtatcttttcaatttactaaagagatctccaaactaatccataaccaaccagtcagaatcattggacagtaatgtgatgcttcaaaccaggactaaccggagctttagcaaagtacgcgagaaagcttctgtctacagaagatagtatcccaacttgggttggaccagaggcacgacggctcatggcagctcaaggaggaggacctggacctgtgaaggctaattgccgt

SEQ ID NO: 171053 - DNA, 1396 bp, Arabidopsis thaliana landsberg
gttagggtttgtaagctatgcatcttttacgactcgataaacagtctgtctcaaacatcctcgagatttattttcacgacggacgcgcattcttgtacaatattatggaggtactcttttttctatctcttacttagggttttgaaactcgattgagaaatcttgcaactcactcaaacttggttttggcaggagaaggaatcaaatgataggataaagaagctagaatctgacatagtgattcacattgggaaacaagaagcagaacttgcattgaaagtaaacagtgcagctttccaaggagatttttaccagcttaagagcttaatccgatctggagccgatcctaacaaaaccgattacgatggaagatcaccgcttgtacgtttttcgcttatcgattaatctttcttttaagagcttaagtttgattctttttttgttatttgcagcatcttgcggcatgtagaggctatgaagacattacattattccttattcaagaaggtgttgatgtcaatctaaaaggtaaaatatgaatcgttctaatggaaaacattacattgttttatgtttacgctttggatcacaaattttcgcagataagttcggacacacaccattgtttgaggctgtgaaagcaggacaagaaggagtgattggtttgcttgccaaagaaggagcctcctttaatttagaagattcaggaaacttcctttgcacgacagttgctaaaggcgactctgattttctcaagagattgctttcaagcggtatggacccaaacagtgaagattatgatcacagaacgccgcttcatgtcgcggcttctgaagggttattcttgatggctaaaatgttggttgaagctggagcaagcgttatttctaaagaccggtaaaaatcatgaaaaatgaatcattttaattggttaaaactatagttaataaacttcgtaacttctctctttgaaggtgggggaattctccgcttgatgaagctcgattgtgcggaaacaagaaactgattaagttactcgaagatacgaaaaatgctcagtcgtctatctacccgacaagcttgcgtgaattacaaggtactcgtatacttccttcagacgatacaactcaaaaatggatcttgtaattcttgaatttgatttatgttttgaaaaacagaggagagaattgagagacggaaatgcacggtgtttccattccacccgcaagaggcgaaagaagagcgtagtagaaagcacggagttgtggtttggatcccaagcaatctcgagaaactcatagtaaccgctgcgaaagagctagggctatcggatggagcctcatttgtactattatccgaagaccaaggtcgtatcacagacattgatatgagtagt

SEQ ID NO: 171054 - DNA, 520 bp, Arabidopsis thaliana landsberg
  unsure (1)..(520): unsure at all n locations
tttggaaaatctcaatgcacaagtagtctgcgattacgcttttatcgacttgttcgctggcatcggcggcatccgcatggccttcgagactcacggcgggcgatgtgtattcaccagcgagtggaacccctacgcgcagaaaacctatctggccaattttcccgaggcggcgcatgcgctagaaggcgacatcaccaaggttgatgcgcgcgacatacccgaccacgacgtactcctggccggcttcccctgccagcctttcagcatcgccggcgtgagcaagaagaacgcgctggggcgcgcccatggcttcgccgacgaaacgcagggaactctgtttttcgacgtggcgcggatcatcgccgagaagcgcccgaccgcgttcctgctggaaaacgtcaagaatcttgtcagccacgacaagggcaacacctttcgggtcatcaggaaggnnnnnnnnnnnnnnnnnnnnnnnnnnnnnnnnnnnnnnnnnnnnnnnnnnnnnnnnnnnntgcctcag

SEQ ID NO: 171055 - DNA, 1545 bp, Arabidopsis thaliana landsberg
ttgttgagtatgctgatcaattatcttttcatgtttggtgtccaaaggtaaaagggttgcctttcaacaagttctcatggttaacgacccactattcatttgctcgaatgggtgcaaaggtcaggctctggctctatgtttcttgcgccttccagccgccaaagattctatcgctagcctactccttgtaaatattcttcttcatcataataaacccatttcaaaagttttattcttttgataaacccattccaaatgttccattctttgatttgattcttatgtttacattttttgggttattacagaatggtgttagagggtttatgcttgacttgtacgacttccaaaacgatatatggctttgccattcttacggtggaaattgtttcaattacaccgcattcgtaagttctatatagattcttataacttgatcggtccagtgtcgaaaatagttctaattaatttgttttttggtttgtatgtagcaacccgcggttaacattttaaaggagtttcaagtgtttctagacaagaacaaggatgttgttgtaacgcttatcctcgaggactatgtgaaatctcctaatggtttaaccagagtgtttgatgcatccggattacgaaacttcatgtttccggtatcaagaatgcctaaaaacggagaagattggcctactcttgatgatatgatatgtcagaaccaacgattgcttgttttcacgtctaatcctcaaaaagaagcgtcggagggaattgcgtttatgtggagatacatgatagagaatcaatgtgagttcgtctccaaatatactaatacatcatattatgataagttattataaatatgaaatattgatataatgttatgattttgtagatggagatggagggatgaaggctggagtgtgtaccaatagaccggaatcagttgcaatgggagatagatcaagatcacttattctagtcaattattttccggatactgcagatgtgatcggatcttgtaagcagaactctgctcctcttcttgacaccgtcaaaaactgtcaagaagcctcgggaaaacgttggcctaacttcattgcagtcgatttctacaaggtacgttttggtgagatttggatccggttaatgttaacatttgtgtaatgttcatgtatgtgtgtggtggtttagagaagcaatggtggaggagctccaaaagcagtggatgttgcaaacggtcatgcagtttgcggctgagaagatatagccgcttgtaaagttagtattatatgattatgtagtactcactatgtgagttatgctattatatgtaatgaaaaattgttatttaacgtttttgactttgtgcaggagaacatgccatatgggacgtgtgagaagcaagaagagaagaaaccggaatcaaacctaatgatgatagcaaaacttaccgcggaagcgactaaaggctatggccacccatctaccaaaccgaccctacttgggctttctgtgtttgttgtaacctttgtctcacttctctcaactttttga

SEQ ID NO: 171056 - DNA, 698 bp, Arabidopsis thaliana landsberg
ggtggttttttaaacgctcgggcttcttttgctggtatggtagtcgggaggcttgagttgtttagaagctccccaagcgataacggcaaatgtactgtgggcataactatgtttggagtgacaactccatgtgtaaatgcagtccaggagatattaacaagagaaggttatgagacactagtgtttcatgccactggtgttggtggcagagcaatggaatctttggttaaagaaggatttatacaggtttctctttttctcttcattcagatgagatttgttattatgatttatgcagttagtcttaattttttggttgtggtgttggttacttttaatgtttcctctacctgttctttccttagggagtaatggatattacaacaaccgaggttgccgaccatctcgttggaggggtgatggcatgcgatagttcccgttttgatatcaccatagaaaaaggaataccgttggttttaagtgtaggtgccttagatatggtgaactttggtggtaaagatacaataccttctcatttccaaacgagaaagattcacgtccacaacgaacaggtgaggaatcgttacaaagatgttaccatgttaagttgtctttactagtggtatctgttaaaagagaaactgttattgacaggtttctctcatccgaacgacagcagaagagaataagaaatttgc

SEQ ID NO: 171057 - DNA, 423 bp, Arabidopsis thaliana landsberg
tgaaaaaaataaaaaagggacatggctttgccatcttcaacaccgttacaaaccaccggaaagaagacgatatcctcgccggaatataacttcccggtgatcgatttctccttaaacgatcggtcaaaactatcggagaagatcgtaaaagcctgtgaggttaatgggtttttcaaggtgataaaccatggagttaaaccggagataataaagagattcgagcatgaaggagaagagttctttaataaaccggaatcagataagctacgagccggtccggcgagtccgttcggttacggatgcaagaacatcgggttcaacggcgatttgggtgagcttgagtatcttcttctccacgcaaatccgacagctgtcgctgataaatctgaaactatatctcatgatgatcctttcaagttcagg

SEQ ID NO: 171058 - DNA, 923 bp, Arabidopsis thaliana landsberg
catcattcacatcaaagaaggtatctacaaggagaaagttacggtcaccaagaaaatgcctcacgtaactttcatcggcgatgggccaaacaagactctaatcaccggtagtctcaatttcggtatcggcaaggtcaagaccttcctaacagccacaatcagtgagtttcaatctccaaactctaaaagtccacaaagagagagtctaaacattaccaaattattgtttcgcagcaatcgaaggcgaccacttcacagcgaagaacatcggaatcgagaacacagctggaccagaaggaggacaagcggtggcgttaagagtctcggctgattacgccgtattccacagctgtcaaatcgatgggcaccaagacacgttatacgttcactctcaccggcaattctaccgtgactgcacagtctcgggcaccgtcgatttcatcttcggagacgcgaaatgcatcctccagaactgtaaaatcgtcgtccgaaaacctaacaaaggtcaatcgtgtatggttacagctcagggacgaagtaacgtccgtgaatcgacaggattggtgctccatggctgccatataacgggagatccagcgtatattccgatgaaatctgtgaacaaagcttacttaggaagaccgtggaaggagttctcgaggacaatcattatgaaaacgacgatcgatgacgtcatcgatccggcgggatggcttccctggagtggagattttgcgctcaagacgctatactacgccgagcatatgaatactgggcctggatcgaatcaggcccaaagagttaaatggcccggaattaagaaactaacgccccaagatgctcttttatacactggcgacagattcttacgtggcgatacgtggatcccacaaacacaagttccgtatacagctaaagtgtag

SEQ ID NO: 171059 - DNA, 575 bp, Arabidopsis thaliana landsberg
agggcggacccttaattgttatgctccgctaagcaacgtgcgtaccctttaacccttcagaataagcgcccggcggagatattttcgcggggttctatcataaaaagaacagacatggcttcattgaaagaaaggtttaaggaaaaggctgaagcagcgaatatagaggtcaagaacctgctgaaggaacatggtaccaaaaagataggagaagtatctctttcccaggtataccagggaatgcgcggcattacaggactggtaacggaaaccagcctgctcgatgcacaggaaggtatccgttttcggggttattccattcccgaactgcaggaaaaactgccgaaatcgcccggtggcggcgagcctttacctgaaggactgttctttctgatgctgctgggcgaactgcccgcggaagccgatgtgaataatgttaccagcatctggcagcgccgcagtcatgtgcccaaccatgtatttgccaccattgatgcaatgccaattacggcgcatcctatgaccatgtttgtaacgggtgtgatggctttgcagacagaaagcaatttggccac

SEQ ID NO: 171060 - DNA, 1029 bp, Arabidopsis thaliana landsberg
ctcgctcccagaacgaggagtttcaacaatggtggaacaagcaacgagataggaacaatcacgacgttctttacgccggcgacgatgaagcattcctcaccgttgaaatccgtactccggccaccgttgaccctgataaggatcggatccggactcgtaccgttcgtcagctctctcgtctctacctcctcaagttcaagcaactcgcatcttccttcctctggatcggtaactctttcctttaccttgttcgcaccgccaatcgccgcattgccaacgataatcctccatccgtgtcttcctccgctagattgtaccgtctaatcaagggatttctcgtcgttgttgtgcttcttctctgtttcgagctcgccgcttatttcaagggatggcacttcacacctccctctgttgcctccgccgaggtcgctgtggaggtggtttacgcttggtggttggagatcagggcgtcttaccttgcgccgccgcttcagagcttgaccaatgtatgtatagttctcttcttgattcaatcggttgaccgtctggtgcttgtgcttggatgcttctggatcaagctccgccgtattaagcctgttgcatctatggagtacccgactaaattggttggagagggagttagattggaagattatccaatggtgattgttcagattccaatgtgcaatgaaaaggaggtaagaacatgtatgtaggtctctaatccttagttgtatctagctgtttgaagttgatttgggaatcaagcatctctaggtaggatttgttgctatgttgactcgtaatctctaagtgtttcttatgcggtttcatatctgaaacttattgatagttttaaatatgtttactttgatctgcctgcttattcgtattaaaatccttgcagttccggttctgttatctcatctcgttgattttggtttgtggcacttgcaggtttaccaacaatctattggagctgtgtgtatgcttgactggccaagggaaagaatgctagttcaggttctt

SEQ ID NO: 171061 - DNA, 1246 bp, Arabidopsis thaliana landsberg; identical to SEQ ID NO: 9214

SEQ ID NO: 171062 - DNA, 1541 bp, Arabidopsis thaliana landsberg
atgcatgagaaagcgttggcgaagtttgagtataattctcaacccgagatgaaggaggaggtcaatacctatagttataatagaaaatgttatagacattgatccatgtaatagagaaacaaaagacatcattgatgcatctaaggaaaatgcatattcggacaaattcgaggaatttaatgatagattagattgtagtgaagataatgaactttgaaatgattccatatatgaatctgaatgatttttagtggtgttttgttgttcttttcattcaaattgattatcgttaattcaataatactaaatttcatgagactttttaaaatccatgtttgaataacataatgattataaactctacacaaatctcttaaaattccactttcaatacaccccctaaattctattaccaaaaccgaatagatacaaacggaaatattttaggtaaccaaaaatatccaaaatataaatatattttcaaaagtattagttatttctatactaaataactaaaaaatactagagaatatatataaaatagcaaacatactcgaaaataactaaaaaatatccgaaaatattcaaaaataactgaaatatttaaagcaaaatatctgaatggacactaaattttaaaaccaaaaaaacagaaaccgaaccgaactttcaaaataatcgaatggatactaaactttagaaccgaaaaaacagaaaccgaaccgaactttcaaaataaacgaatggatactaaactttaaaaccgaaaaacccgataatcgaatggatataaccgaaagtgaatggataaccgaacgtgtaggactagttgaggctgtttgcatgttcctcttttgcttgttttgtttcggtttgcttaattaaaaaaaaagataaatgtactctaaacttattctttaaagggtattttaggaaattgactgttttttatttggttctgtcttgaagacaaagaaagctttcttctataatacatctttctctacagatcacacagaagcaaaaattccaactccgatttcagaagaaagttcttctcttctctgagaagaagaagaagatgagtagaggaagcggcgctggttatgatcgtcacattactattttctcaccggaaggtcgtctcttccaagtcggtcagtaatctatttctctatcgtttttttttctttctttaccttcggagattgatactactggttacggattttgtagagtatgctttcaaagccgtgaaagcagctggaatcacatcgatcggtgtccgagggaaagattcagtatgcgtcgttacgcagaagaaagttccggtgagtcctcttttgactccttagggtttttgttcaagtgagggttttgaattagggatctgatgaatgatttgtgggcaggacaagcttttggatcagtctagtgtatctcaccttttccctgttacaaagtaccttggattgttaaccactggcatgacaggtttgtttctcctatcacaatgcttgttgattcattatggtcaagaa

SEQ ID NO: 171063 - DNA, 3270 bp, Arabidopsis thaliana landsberg
aaaataaaataactgtcaatattttaacgtaaaattgagataaagagacacaactaagggaaaactaactttcactatttttataaaaatttgtgagaaaaaacactaacaaaaaaataacagttaatgttaacaaaaaattacgatgaaaagacattaacgaaaagttgcgataaaaagacactaaaaaaaaaaataatcgttaatattaacggaaaggaaagatgagaagatatgaataaaaaatgaccgtcaatattttaacagaaagttgcgataaagagacaaaaccaaaaaaaataaccatcaatatttttacgaagtcactataaaaatttactaaaggaaaaataaccgttgatattaactgaaagttacgttgaaaagacatagatgaaaatttgcgataaaaaaaatactaaagaaaaaaagaacaatcaatgtgaatagaaagttacgatgaaaagatattgacaaaaattaattgtctacattttaacaaaatattgcgataaaaaaaaaacataacaaaaaaataaccgtcaatattaaaatgacaaaaatacaaacaaaatattgcgataaaaaggtactaatgaaaaaaataaccatcaatgttagcgaaaaattacgatgaaaagacatgaacaaaaaattaaccgtcaacattttaccaaatgttgcgataaaaacacaaccgctcagaaatgctaaagacattattttattcatcatgaaacaaataatctgtgataaagaacaaaaattttagaaattacttaagaagaaggacgaatatatagagttcaacagttacaaacatttaagcagacaactattaataagaaaaaatacgatgaacagacacaaccgaaaaatataactatcaatattataatgaaaagtggagaattttggaaaagaaaaacggtgcgttttgctctaagggtgaaaaaagtgcgatctcgggtttcgatgtttgcctagaacgctccatgccgccgggggattctccaccgccggaagatggcgagttgagtagggggactctagaagtagggttggtgatcgtgagtgaatcggaggaagtggaagtggttagatcagaagctttggttgttgtggagggggaaaaaacagagagggagagactacaggttgcgggggggagtagaggagatagaagcgcaaaatcttatggcgaagggaagcgaggagatctctgtgggtgtaagtcaagaggttgcagatccaaaaaacgttcgcacacaggtctcttatgcatcagtggtgcaaaacacattggaaagaaaagtagagttggtggtagaagagatagatgggatgcaacagctcgtataccgaatagtgtctttgaggatgctaaaccactttgggaagactttctagtgggtaaattcttcgcaaaagctccttttgtgggtggaatacatgccctagtgaataagatatggactctagggaataaaaccgtgaagattgatgtttttgttgtgaacaatactaccgttagatttcggataaagcatgatcgcatcagatcacgagttctgagaagaggtatgtggaacttgtgtggtgtaccggtggttttgtcaaaatggactcccattattgacatggaacaagaagaggtgaagattatacctctttgggtgatagtcaaaaatgtaccaccaaagtacttctcatgggaagtcctgaaagcaataaccaatcctttgggagtccctcagaaacttcaccctgatactaaagcttgcaaatcttttgaggaagccaaagtgttagtggaagtggatttgacgacgaatttaccaaaatttttctctttcaagtctgaaacaggaggagatacaatcgttgagtttgtgtatccgtggctacctccaagatgcacagattgtgagaaatggggtcaccaaacgtctgagtgtttgattgggaaaaagaaggccatggtaacacaaaaagtggtgacagaaacggatcaagttgattcacggtttgaggaggataatacagaggaaacatggggaacaaaacatcaaaaaaattcaagagaaccctacagctgtggtgatattagaagaaacagagcaaagaggtatggatctggagggaaataataaggagtggtctactccaacaaaagttggtagaagcccgagtatgaaaaaggatctaacatatggagaagtgtccatattgaccaacagtttccaatgtctaagagaggaaggagaagagggggaagctactgtctctttggatgagaatacaaaagaagtacaaataaacgaaaaggaggaaaacaaggcagaatctgtcatagaaaatcagaataaaaaaaggagtgaagatgagactaagagttgtccaaaagggataggggaagtaactcttaggcaatccctgccacgagcctcaaaagatgaacacaaattagtttcgacgaacatctcgcaaagtagaaggaccacaaatcctattacttcgaaaacacgtaaactcaacaaacagaagtaatgtcgggtttcttttggaacattcggggtttcaataagaaaggtaaacatggagttgtgagagattggattaatgcaagaaagtttgattttgggtgcattatagagacaaaagttaaagaaagaaaagcagagagaatagtacaatctgtttttagtggctggtcttttctctcgaattatgaagatcacagacttggcagattatggttggtttggagaaacaatgtccgagtaacgcctctgtacaaaacatctcagatgattgcatgctcgatctttattgaaggacgtaaggaagaattctttgtatcatttatttatgcttcaaactttatagcgaaaagacggattctttgggaggatcttaaacatcatcatgattctcctctgtttcaaggaaaggcttggctaatatgtggagactttaatgaagtcttggagggagaggaccattcactgtatgaaacttctccatctatatcaccggggatgcgagattttcagcaactgattcaacactgtgagttaacggatctcagctaccaaggtccgagattcacttggagtaacaagagacatgaaggagttgtatgtaaaaagctcggtagagttttagttagtaagcaatggctttgtcaatatgatcaatcatattccgtgtttgagccctggggatgttcacatcatttgagatgtcgcttctcataagggaggagga

SEQ ID NO: 171064 - DNA, 615 bp, Arabidopsis thaliana landsberg
caatccaaaatggcctcaagatgttgctaaggacgaggattgttggtcagatactcaataccttcactcacttgagggaatattgtatctttgaagctaccatgttggtcagttgtctctgtgttatacatatacaccaagacagtaatagaattgagtgtttaatgtgatgcaaaaaatctgaggatctcagggttattggcgttattactatcttgccaaaacattaacggaacgtgaagctttagagtggagtaagagaaactttgctgatgttgttacgctctgtccgtctgtcattataggccctaggcttcaatccacgcttaactctagtagtttgggacttctcaagttcataaaaggtgatgtaaacatataatgtgtgttctcttacctcctattgcatattttggttaagtgattgattcattcttgataatttgatgaattggtgtgtctcttcttaggtggtataaagtccttgttgagcgatgaactgtatcttgtggatgtgcgtgatgttgcggatgcgctcttgtttgtgtatgaaaatcgagaagcacaggaagatacatatgtaattctcattcacttacactgattctcttatgg

SEQ ID NO: 171065 - DNA, 1213 bp, Arabidopsis thaliana landsberg; identical to SEQ ID NO: 32695

SEQ ID NO: 171066 - DNA, 1262 bp, Arabidopsis thaliana landsberg
caaggtcaggagaagttatcctttttgctcttcaagatcctctgtttatgccctcgaactgaccttctgcaatctgtttcagggaaagttacaagatgggaaagaaattgctgtaaaacagctttctagcagctccggacagggaaaagaggagttcatgaatgaaatagtactgatatcaaaactccaacacagaaacttagtccgggttttgggatgttgcatcgaaggagaagagaaactactgatctatgagtttatgttgaacaaaagccttgatacttttgtctttggtgggtcacttcttggtctttctctttttgttttgcagctttttctccctataccggaatttcttatctgataacttgtatatggtagatgcaagaaaaaagctcgaggttgattggccaaagagatttgatatcgttcaaggtattgcacgtggacttctttatcttcaccgtgactcacgcctcaaggtaattcaccgagacctgaaggtcagcaacattcttctggatgagaaaatgaacccgaaaatatcagattttggattggctcggatgtatgagggaacccaatgtcaggacaaaactcgcagggttgtaggaactctgtaagaacctgtctttaataacatgcttggcaagattcattgtcatgttagtccaatattaaactaggtgatatgatactattttatttttgaccagaggatatatgtctcctgagtatgcatggaccggagtattctctgagaaatcagacatctacagcttcggagttctactgctagaaattatcatcggagagaagatctcaaggttcagctatggcgaagaaggaaaaacacttctcgcatatgtaagttaattctttatgttttcacacatttacaaaggatttcaaaagtggttcttgctctgatactctttaagatatgaaactaaacgtctaaacaacaggcatgggaatcttggggtgaaaccaaaggaattgatcttttggaccaagatcttgctgattcatgtcgggcgttagaagttgtaaggtgtgttcagattggtctgctctgagtacaacaccaacctgcatacaaaccaaacacacttgagttgctggctatccttaccacaacatcagatcttccatcaccaaaacaacccacatttgtagtgcactctagggatgatgaatcatctctgtctaaggatttgtttaccgtcaatgagatgacacaatctatgatccttgggcgt

SEQ ID NO: 171067 - DNA, 613 bp, Arabidopsis thaliana landsberg
  unsure (1)..(613): unsure at all n locations
atggagactgagtctgagatttctgattcatggtcaagcaacaactcgatgatccctcctcttcctcaaaaccctattttcactgtgaaactctctccgatcattctgaagaacaataaaagggagggatttacacccgaaaggtatagtagtctttggtctgaagaaataaccaaacaagtattcgacggagtagtcagaaagtcttcatcttggatcaagtctgtgttccttggaagaggctcttacggttcggtttatctggcgacaagtaagaaggccaaaactaaaacgaccatggcgatcaaatctgcagagatttcacgagcttcgagtctaatggacgaggaaagaatattaacccgtctctcatctcctttcatcgttcgttgctatggccacgagattgcacgtgaggagactctgttcggtggcgagagaacgaattacaatttgattctcgagtattnnnnnnnnnnnnnnnnnnnnnactgtatcaacagtcaccttggaggattgtcagagaaagatgtgaaacttcttgctagagatattctttacggtctcgactacattccagggcaaacattattcattgtgacattaaaccgga

SEQ ID NO: 171068 - DNA, 523 bp, Arabidopsis thaliana landsberg; identical to SEQ ID NO: 2491

SEQ ID NO: 171069 - DNA, 1276 bp, Arabidopsis thaliana landsberg
agccaaggacaggcgtcttctggaacgtcgaggactacccaatccctaatctctatcctcatacgatttttcaaaatattaaatcagctcttgagaataaggtacggtggtgaagtgaaaatcttgggttattatgagaagaataacatatccgaggttcggttttgtcaaaggttcattgagtatcataatgccggaatcatgttacgcggaggtgaactttcttctttaataacttaaaactctcttacgttctcctttggtacactttgtaatccagatctctgtttttatataatatagtgtcaggcgataaagctgcgagagttggtcaaatgatagtgcgcatttgtttatggccactggataatcttgtatcaaatttgatggtagtctttaaaaacatctcacaagaacccgagctcatcagggttcttcaagctctgagattgaataatttcaatgttctcttagcacagcattttaatgtcgaaacaccattgctacttcaaactgtaagctcatccatatggctttccacaagcctatttgatcgaggaatccttatcaaaccaagctttacttcatccgcagcctcttggccaccagaaaccatgtacaaaggactcaatggtaagacttctctctatccatttgcccgagcaatccaaaatatacatatatctaatattgcttggagtgcacgttggtgttgatttcggatcaggtttcatctgattgatctgtcattgtacgtagaccagcagatttaatcaatctgtcatatactaaactaatgtttttttgaaacctcgcagaaacaaatgtattctgggacgtcgaggactgcccaatccctaatggtgtcactactgatgagtttttacagaatatcaaatcagctcttgtaaataagggttatcttgtaaaattgctagagttgataaaatgtttatggacatttgttttttcacactgaacaatcctgtggagtatcctaaaagatcaaatttggtggtgatggcgagaagctacaatttagaagttgaccagctaaaggttgataaacctctcgttttcaaaatagaaatgttggacggttttcttaaagctttgagaacgagaggttacaacgttctcttagcagaacctgatgattcctatagaagatccggctggctttggccgcgtcatgcctatggaggaaaccctatgcaacattcggatctcactactacttgtcatagtaagcgttaatggattctttaattttttt

SEQ ID NO: 171070 - DNA, 2860 bp, Arabidopsis thaliana landsberg
atggcttgcatcaagggggtgggccgatccgcctccgttgccctggctcccgatgctccttacatggccgccggaaccatggccggagccgtcgatctctcctttagctcttccgccaatctcgagatctttaagctcgactttcagtctgacgatcgcgacttgcctctcgtcggggaaatccccagctccgagcggttcaatagactcgcctggggaagaaacggatctggatccgaggaattcgcccttggtcttattgccggcggccttgtcgacggaaatatagatctatggaatcctctttctttgatcgggtgcgtttcctttcctcgccttgctttgctgctattgaatcgccattttcactctgtttttttttataatccgcattaatagagttatgtatgtggtatccaattttcatctgaacgagtctaactcaaacaactgtcacaattttcagttcccagcccagcgaaaatgcactcgttggccatctttcagttcacaaaggccctgtgagttgtgtctctctgcattattttgttgcttaacgctgttttgtttttatcactcctcattttcatgtgtgcgtgcttctttttttcttaggttcgtggtcttgagtttaatgctatcagctcaaatctacttgcttctggggctgatgatggtgaaatttgcatttgggacttattaaagccttcagagccttctcattttccactgctcaaggtataccaccacttcttactagtcaacaaccttggtttttgtattaccttttactctcattattgctttggtataaacccatgagtaactttatgcgagggtcttttgcagggtagtggttctgctacgcaaggtgaaatctcctttatatcgcggaatagaaaagttcaacagatattagcttctacctcatacaatgggactactggtgagacttaggggtttctctctctttctctatctacttgactactacttcacttctgtctactatatttctgcttctgctcatcagtctttattttcattttcttttcccccagtaatttgggacttgaggaagcagaagcctataattaagtaagtattcaatttattaagtgatataattgaggctctcgaaaaacttgttgtcaaatccttgatctcgccattatcattcaacagctttgcagattcagttcgacgccggtgctctgttttacagtggaaccctaacgttactactcagataatggttgcatcagatgacgacagttcacctactttgaaggtaaggaatcatttaacgcgttgcttcatatagttcaattttggttcttttagtgatgtaaggtatctgcaatcagctctgggacatgaggaatataatgtcacctgtgcgcgagtttactggacaccaaagaggtattttcaaatcattgatatcaaaatgcttttctcagtgcttctctctagcttggtatcattttctatggttggtaagtggacagccttgtagatcagacgtcttagtctttaacccactcatattttggtgcctttatattatagtcctgttgtcttcattcttggtgttacaccttggtgaagtgtagtggtgatacttcttatctgtcaggggtaattgcaatggagtggtgcccaagtgacagctcatatcttctcacctgtgctaaggacaaccgaacgatttgctgggatacaaatacagcagaggtagtgtgaaggaatcaataaaagatacagatttgctgggtccgtgaattagttaactattttccattttgactgagtttgatccaaccataacagattgtggctgagttacctgctggcaacaattggaattttgatgttcattggtacccaaagatacctggagttatatcagcatcttcatttgatgggaaaattggcatctataactttcaggtagctctttgcagtttcgctttggtgcttgaaatttgtgttctagatcaagatcaatcatatatggttgtatacaaataatgaaccagtgaattcagcacaagttcatttttcctattcattgttattttaggagttaggttcctgttctgtcatggtactgcttagttctgaagaatacttgtttgtttcccacccataaataaaataaaatgaaagtatgtatctatgtagggttgtagcagctatggtaccgaggtgaacaatttatattcaggtaatgtccttcaagatccctcttgttgaacaatatgcttgaatcattgctttgttgggagcattagaaccaacagcacttcttattccatcttctcgatgcagatcctttaacagcaccaaaatggtggaagcgcccggctggtgcatcttttggatttggaggaaagcttatttcgtttaacaaaaatcctcctgaggcatctgaggtcttgttttagagaggacattgttttattctgttttgctgtttttatatttcttcagttcattgactcttatgtgtgcgtgtcaggtctttctgcatagcttggccacagaaaaaagtttggtgaatcgaatttctaaatttgaagctgcattagaaaatggagagaagacttcccttaggggtttatgcgagaagaaaacagaagaggccgagtaagtcttgctgtgactgaaaatgatcaaataatcatccttatataagtaacagaaacttacaattttcctctttgtgtacattgtttctgaagatctgaggaagagaaggaaacatggggactgctgaaaattatgcttgaagaagatgggaacgcaaagacgaagttgcgtagccatcttggctttagtttaccatttgaggaaa

SEQ ID NO: 171071 - DNA, 1565 bp, Arabidopsis thaliana landsberg
atgatcgaggcagccttatcgaaccctttctccgacgtcgatgaagccatggctcgccggcgtcgggatttgtcttccctttactacgttgtttctctcccaacacatccaaatcctttctcggcccatgtcccacgatctcccatgcccactccttgcgacgattcctatatatctgaatttcttcaagttacaatcgtcttcctctgctatcaaacaacaccgtttgatgcggctcagcccactcctgaaacaagatcttctccctctaaaccttttgtgattcttgtaaatcttccctctcaatggctccccttgaagtcaaaacctgcatctcacaactcctttctttgggattcaattcctcccaccaagtgtttttcttggttgcgtttggaccggagctctgctttgacgccggagccgatgaggatttcaacgacggaatcttcaacccactcctcagctttggcaacgctgactcgactagctctaaccctaatgttgactttaccaagaaaactcaccgtcgtcgtgcggccgccgttgacgaataagggaggtagcttcctaaccctaatgttgcttttccttatttggtttgggcctagcccaagaactgtttaccctccctccaatccattttcaagtcctcgaagcccatgatcagtttttttaggttaagctcacaacttgtttggcccaggttaggtctttatttcactctagcaaacccaaacgttttgatttctttctcgtctttggagagtagctaccttccgagattagttgtgatggtcattgtttggttttggttttctctcccacaaagtttggcaaataggttagctcgttggttttatgttacaaatctgatctcaaaaagctttgggctaactccacttttgaagtgttttagagtcttgatgcccatgatccgtattgttatgtttctgtcaattacaacccctatagcaccctttaactttgttttggctggtcgtggactccacgctaacagagtaacggttcttttaggctgttttgatagatacttttgtcgaggtcatttgttaattttgtttcgaaccctatttgagactatcatcccaaacctttggcaatgtccaaaagagtgaggaagaacgccattatgatcccatctccacggagcggtggttaccgaagcttcttcaactctctacctccttacccgccaattaccaagctccttcaaggtatcttgaagtatacggataagttgcaaatctgtgaaagcttggcaaagagcggcgttatgatctaccctttattttctcccgtggagcaccttttcaaaggttcatatgcattgtttgcaatagccgtctatgaccacacgttggtcgaggatttcgcgaagcccgtcttcatggtcgaatccgtcaaggcttcaacagatttttcaaaccttgtgaacttttttaaaaagtgaacactcctttgcaaaactcatgaagcctctatctttattttcttgtactatcttaatttgaatttgtatggacttcccttttttgagactt

SEQ ID NO: 171072 - DNA, 570 bp, Arabidopsis thaliana landsberg; identical to SEQ ID NO: 78377
  unsure (1)..(570): unsure at all n locations

SEQ ID NO: 171073 - DNA, 447 bp, Arabidopsis thaliana landsberg
  unsure (1)..(447): unsure at all n locations
atggcgttttttgggctctcnnnnnnnnnnnnnnnnnnnnnnnnatcttccgtctccgtaactccatcttcttcctctgctctttggcaatcacaacataaatccttgtccaatcctgtgactacccattacacaaatcctttcactaagtgttatccttcatggaatgataattaccaagtatggagtaaaggaagagaattgcatcaggagaagttttttggtgttggttggaattacagattaatttgtggaatgtcgtcgtcttcttcggttttggagggaaagccgaagaaagatgataaggagaagagtgatggtgttgttgttaagaaagcttcttggatagatttgtatttaccagaagaagttagaggttatgctaagcttgctcgattggataaacccattggaacttggttgcttgcgtggccttgtatgtggtaa

SEQ ID NO: 171074 - DNA, 1053 bp, Arabidopsis thaliana landsberg
gctgatccggagatacaggtattgactttttgccaaaatctcctcctatatattaaaaatgccactttgttattaacaattgaacataacctgcattggatttcaatagttagctacttggtaaaagagtgactgttttgtgttacttgatacaatcattacccacattttagactagtttctagaatggcactttacaaaacttccttcgttcactcattagcataaatggaaaatttcaggaggaaaaagttgatagctctctcgagtttctcattcttgcaagtgatggtctctgggacgttgtatctaacgaggtaggaagtgtcatttgatttctaaacttccctgttaaacttcctctttttaacattcccaatcctcggactcgaaaactgatctctgttcaaatctttatttcaggaagccgtaggcatgatcaaggcgatagaagatcccgaggaaggtgcaaagagactgatgatggaagcttaccaaagaggaagtgcagacaacataacttgtgtcgtcgtacgtttcttagagagcaagtcagctaacaacaacggttccagctcatccgaggaagcaaatcaagtgccagccgctgttagaaatgactcagaccacaagatctcagccaaagaaaccaatcaagaccataccgcagtacatagggatttggaccgcaacgctgacagtgaaagctcgaaccaaaagccgattgaagctagaagtaaggataattcgaaccaaaaaccaatcgcggttacagcagcagaacgcagagtttcttcagaacagagtggtttagccggggaaaagactcaaatgccaataaaaaatcgcagcggctcagagcctaagagttcagccaaggtacctaatcaagtgcaaagcacagtacacaacgacttggacagtagcaccgcgaagaagccggctgcaacagaacagagcggatcaacgggtgaaaggaatcgaaaaccaatcgaagttcatagtgattccgccgcaagaaagacaagtagcactccctctatctttaactaa

SEQ ID NO: 171075 - DNA, 1088 bp, Arabidopsis thaliana landsberg
taaacccggatccaaatttgaggtatggatgatggcacttctggttaatattgctatcaaaactagcgagatttgaaacctttttcaatatttgaaaatgcagaccgagagcacaagatgttatgcatcatccattgttctggaactctgacatgaggctgtcttttcttcgggatgcaagcgatagagtcgaattggaaaaccgagaagaaggctcacagctcttggctgcacttgaaagcacagcagcagttactttaaacgggcggtgggatgagaaactggatagcatattcctagacaatatcgggcgttacaggcgttacaagtttgacagcatccgcgatttgttacgggtcataaggaacaaattgaaccactatagagagcttccaaaagaattacaggaactacttgggagtgtacctgaagggtttgagaggtacttctctagcaggttcccaaaactgttgattcaggtttatacagttttatttgattactgtaacaatgaagagttctttttcaagtactctaagaccactgtattctaggattcttttcttctgttggctctctctgtataatagggatttactaataaagagctacaattgatctgatcaaagaaacatttgttgctgatatgttattgtaactcttaaatactttagttttatagtaattaactgttatgggaaaacaaaactattatgtttcagccatatatttaaaattacccgaaccggagccgacccgaaaaattggaccggaaaccgaacccgaacacgaagatttaccctattgggtcctaaattcccctacccgaacccgatccgaacccgaaaatacccgaatattgaattcaaaaatctaaattttacccgaaacccgaaattttatccgaaaatccgggtatttaccccaaaaatctggatatttacccaaaaattcagatattgggcctgaaaatctatatccgaaccgatccgaaccgaaaccaaactgatattttggatttaccctattggatcctaaacttctcaatccgaaagacccgtacccgattgggttttacccgaacctga

SEQ ID NO: 171076 - DNA, 621 bp, Arabidopsis thaliana landsberg; identical to SEQ ID NO: 33840

SEQ ID NO: 171077 - DNA, 537 bp, Arabidopsis thaliana landsberg; identical to SEQ ID NO: 52000

SEQ ID NO: 171078 - DNA, 539 bp, Arabidopsis thaliana landsberg
caaaagatgaacggataccaaatcatgtgcccggagaatacactaggtggtcaacctattgttccttgtggtcttgttgcttggagtttgttcaatgatacttatgatttcactagaaacaaccaaaaacttccagtgaataagaaagacatctcgtggaagagtgatagagaatcaaagtttggtaaaaatgtcttcccaaaaaatttccagaaaggatctctcatcggcggtaaaagtcttgatcaagatattccagtaagtctttttgatgtattgaaatctcatcttttaaggaaaataataatctaaagtgatatataagagagatgaaccaatctactcgctatcaatcgatatctaaacatttttaaaaatgtatggttctgatagttgagtgagcaagaagatctaattgtctggatgcgaaccgcggctttaccaacatttacaaagctgtatggcaaaatagacactgatcttcaagctggagatacgataaaggtcttgttgcagaataattacaacactgatagctt

SEQ ID NO: 171079 - DNA, 309 bp, Arabidopsis thaliana landsberg
  unsure (1)..(309): unsure at all n locations
atggaagcggctctgagcatcttcaagctctcgttccttctcacccttctctccggcggttcagaccttatcgannnnnnnnnnnnnnnnnnnnnnnnnnnnnnnnnnnnnngttatgaggttgtccacgccgggaatggctacgagattcatcgctacaacaccaccgtttggatttctaccgaaccaattcaagatatctctctcaacgaagcttctggcaacggttgaaaaagtatgttattcatttttaattcctaaattaactaaggtttttaatcgaaaacgtattcaaaatgcgttggctca

SEQ ID NO: 171080 - DNA, 1838 bp, Arabidopsis thaliana landsberg
atgagatccattattgctctaatgaggcaacgagaatatttcgttcgggcaattcgtcgaacaacttgcgtgccatcttcacctgcggtgaatcaagctaatttccaagcttcgagatttctcactaccctaagatcttcgacgacatctccggaagagacatgtatcggatcggaggaagaagaagaggagcccaacaagtgtttgtctttgagaatcgagaagcttccgaagggcgtaactgttgggtctgctttacagagctggatgggtgatgggtttccagttcatggtggagatgtttatcacgccattaatcgattgaggaaactcggacgaaacaaacgtgcccttgaggttcgaattcttacttgcttctctcttttgaacgaagaatcagttttatgggtctgaatagtttagaaaaagttagatacttttttggtacaggcattgttgtatcaatgtgattttgccagtttgaattcagatgagtaatttgggaatgctacttgatagaaatgagtttcttttgatgaagatatctcttgaatgtgagctgaaacattttggtatgtttgattcagttgatggagtggataatcagggaaagaccttaccgtcttggtgagctagagtactcttacttgctcgaatttacagtcaaacttcatggcgtctcgcaaggagaaaagctatttacccgtgtccctcaagagtttcagaacgagcttctttacaacaaccttgtgattgcttgtttagaccaaggtgtcataaggcttgcgctagagtatatgaagaagatgagagaactcggttaccgtacttcccatttggtctacaaccgtcttataattcgcaactctgctcccggacgaagaaagctaatagcaaaagaccttgcgctcatgaaagctgacaaggcgactcctcatgtctcaacgtatcatatcttgatgaagcttgaggctaatgaacataacatcgatggggtgctgaaggcttttgatggtatgaagaaagcgggagttgagccaaatgaggtgtcttactgtatattggctatggcacatgctgttgcgagattgtatacagttgcagaagcctataccgaggaaatagaaaaatctatcacaggggataattggtcgaccttggatatattgatgattctatatgggcgtttagggaaagaaaaagagctagcgagaacgtggaatgtcataagagggtttcatcatgttagatccaagagttacttactggcaaccgaagcgtttgctcgagtagggaaccttgatagagcggaagagctctggttagagatgaaaaacgtaaaaggacttaaagaaactgagcaattcaactctctgctctcggtatactgcaaggacggtttgatagagaaggcaattggtgtattccgcgagatgacaggaaacgggtttaagcctaattccataacgtatagacatcttgctcttggatgtgctaaagccaaactgatgaaggaagctctcaaaaacattgagatgggtttgaatctaaagacgagcaaaagcataggaagctcaacgccgtggctggagacgactctatcgatcatagagtgttttgcagagaaaggtgatgtagagaactcagagaaactgtttgaagaggtgaagaatgcaaagtataataggtatgcgtttgtgtacaacgctctgttcaaagcttatgtgaaggctaaagtgtatgaccctaatctgttcaagaggatggttctaggtggagctaggcctgatgctgagtcatacagtttgttgaaacttgtcgaacaatataagccctga

SEQ ID NO: 171081 - DNA, 824 bp, Arabidopsis thaliana landsberg
tgagctgaccccattgatgagcgtggcttgcttcgccgaccccgccctcgtctaccaccgccgcgagcggccactcccgacgccccgctggcccgcatcgagcctcctgtgttccacccggttgccatccaccgtaaccccgggcacgtccactcgatggcgactcgtcgcgtagccggcgttctccaccccgttgaccggctgatcctggcgactgacacggctgccactcctccggatgcctccccggtcccctccgttcgcgccgccctcgccgacccccaacggcgttgcgctatggaggagtacgtggccctgctggccaaccacacttgggaccaggtgcctcgtttaccaggcaccaacgtggtcaccagcaagtggctctttcgccacatgctgacctcggatagctcgctcgactgctacaaggctcgttgggtcctttgaggcttcatccaacgccccgaagtggactacaacgagaccttcaaccacgtcgtcaagttcaccaccgttcgggccgtcgtttcccttgctctctcgggattgggcggtccaccagctcgacgtcaaaaatgccttcgttcacggtactctgacagagacggccaactgcagccagcccaccggcttcgtcgactccgctcgcccggacctagtctgccggctgaaccgctccctgtacgacctcaagcaggcgtcacgggcctggtacagtcgtcgcctcctacttggcctccctcggcttcgtcgaggccaagtcagacgtgtccctgttcatccatcggcatggcgatgacaccgtctacctcctgctctac

SEQ ID NO: 171082 - DNA, 914 bp, Arabidopsis thaliana landsberg
aacaaaactctgtttcagggttatggaatgaccgagtccggaacggtagctaagtcattagcgtttgcaaagaacccatttaaaaccaagtccggtgcatgtgggactgtgatcagaaacgccgagatgaaagtggtcgataccgaaaccggaatctccttgccgcgcaacaaatctggcgagatctgcgtccgaggtcatcagctcatgaaaggtaaaaagggtcaaacgatcaagctatgtcccttcttttttttcctttgggagaataaacattgatagggaaaacatggtgcaatgttgttaggttatttgaatgatccggaagctactgcacgaaccatagacaaagacgggtggttacatacaggagatattgggtttgtggatgatgatgatgagatcttcattgttgatcggttgaaggaactgatcaaattcaaaggctaccaagtggctccagctgagcttgaagcattgcttatttctcatccttctatcgatgatgccgcagttgttgcgtgagttcaaaacaaatctgaaacttccaaactgagacactaaaatggttgttgtctctaatgatatttgaattttcagaatgaaggatgaagtagctgatgaggttccagtagcatttgtagcaagatctcaagggtctcagttaactgaagatgatgtcaagagttacgtaaacaaacaggtacgaattcgctttcggtttttcaatgcgaaacacacacaagatggaaaactgtctatgtcttaaatcaatggtgtgatggtttatataggtggttcactacaagcggattaagatggtgtttttcatagaagttataccaaaagcagtttcgggcaagattctgaggaaggatctgcgagctaaattggaaaccatgtgctctaaatag

SEQ ID NO: 171083 - DNA, 473 bp, Arabidopsis thaliana landsberg; identical to SEQ ID NO: 15069

SEQ ID NO: 171084 - DNA, 532 bp, Arabidopsis thaliana landsberg; identical to SEQ ID NO: 33642

SEQ ID NO: 171085 - DNA, 1042 bp, Arabidopsis thaliana landsberg
ttggctcatcgcgatcgcttgattagaggtcgaggtcttgcctctaacaattatgaaaccccgatcactttcgatgggggaaacctcacggtttcagtcaagcttctgggatcgtaaggcatcttctcatcttgattcacaactattcgttttcttgtttattgctagttggtgatagtaaaagcgatatgtatgaatgagatgcttgaatccattcgttgttgaaatatgatttgtatctccatgtggtttggtttcagtctgtactacgccaatgtctctgtgggaacaccaccttcttcgttcctggtggctctggacacaggcagtgatttgttttggttgccttgcaattgcggtactacttgtatccgtgacttggaagacattggagttccacaggttactttcccctcttttgaaagcagctaaacggtttcttcaaactatttttgtttaactctttgtcgtttgctcttctttgagacagagtgtaccactcaatctatacactcccaacgcgtcgactacaagttcaagcattcgttgcagcgacaagcgttgttttggatctaaaaagtgttcttctccttcaagtatttgcccttatcagatttcctactctaacagcacaggcaccaaagggacattgttacaggatgtattacatctggctacagaggatgaaaatttaacacctgtcaaagctaatgtcacgcttgggtaagtaaatgattcttcacctctgtcttttctttacaaaaaaccttcatgtacgctattgtgccgcttaaatactgtccgtgtcctgttaacgccgaggtgtgcgtagcataaccgataatatacagtaagattagatatagtgtgaaatctggagatgtaaaatgtgtaggtcttttgcctctcttagcactcatgtatggctccatcaactgtcctctgtttgagaaatgacctcaacccccaaataactgaatccgtgtttgtcgtgcaattgaagtcagaagcagacaggtctgttccagagaaacaattcggt

SEQ ID NO: 171086 - DNA, 716 bp, Arabidopsis thaliana landsberg
atgtcacattatagaagacattcgctagaaccttccattaccagtaaattccgtgattctttgagtttccaacgagacgatgacgtcatcaacaaaccagatttccgagaactcgattttggttctccgttgaggcctcgtggctcctcctccgccgctgccactcccgccgctagtggcagcagttcaagctcctctggttctgcttccggaaaacccgctgtcacttctcagtttgctagacggagtcactccggcgagctttccggtttaagccagaccagtccggttaaacccggatccgtgaaccggaatttgaaaccgggtcacagaagatccgttccgctggaacgccgttgatttattccggtttggggttctctccggtgaacaataacaataacagttctcgcggcggaggaagcggggctacttcgccgaaccccggcgttttacctaccggaaacatttgtccatcgggaaggatcttaaaaaccggaatggctacacgagcctccgttagacccgagactctatgcacaggcacggccaactacggccacggaaacatcatccgcaccggcggaaaggtgagtcacgcgacgaaagcggcggcggaaatgagtgactcagaggaggtgaagaaggcaggtaacgtaatgtataggaaagggaattacgccgaggcattggctctttacgacagagctatctca

SEQ ID NO: 171087 - DNA, 1184 bp, Arabidopsis thaliana landsberg; identical to SEQ ID NO: 61733

SEQ ID NO: 171088 - DNA, 4373 bp, Arabidopsis thaliana landsberg; identical to SEQ ID NO: 15470

SEQ ID NO: 171089 - DNA, 1069 bp, Arabidopsis thaliana landsberg
agcctaatcgctcgaagtgatgtcgggagatcacgccaagaaggagatggagaccggcgaaaacccactacaagccacgggagcacttcatcggaagagtcccgcaccaagaggaaggagaagaagaagagctcctccaacaaagggaaggagtggaaatcttcttctcaccacaaagagaagaaggagaaatcttcttctcacaagccgcatcggagtggggacaagcacaagaggatgaggaaagtggtctactacgagaccgattcttcatcaacgtcgacctccgactccgatgcaccgtccgtcacttctaaacgccaagagcgcaagaagtatagtaagatccccctacgctacccctcaaagcgtactcctttacatctccgttccattaggcaaaccaccggtttttgacggtgaagattataacatgtggagtgacaaaatgaggcaccatctaacctcactccaaacaagcatatggaatgttgttgagtttggtgtacaggtaccatccgtaggggatgaagactacgactcggacgaggtggcccaaattcaccactttaactcccaagccaccactatactcctcgcctctataagtcgagaggagtataataaggtgcaagggttaaaaagtgcgaaggaaatttgggacgtgctcaaaaccgcgcacgagggagacgaggtgacaaagatcaccaagcgggagacgatcgagggggagctcggtcgcttcatgcttcaccaaggggaggatccacaagctatgtacaaccgcttgaagaccttggtgaaccaagtgcgcaacctcgggagcgaaaaatgggatgaccatgagatggtcaaggttattcttagatccctcgtatttcttaaccctaaacacgtccaatcaacgccgcgctgatcctagatataagctaatgtctcccgaggaagttataggacaatttgtgagctttgagctaatgattaagggctcaaagcaaatcatcgagcaaggcacctcctccacacccgaagcacaaccggtcgcattcaaggcgacagagcagaagaa

SEQ ID NO: 171090 - DNA, 1528 bp, Arabidopsis thaliana landsberg
  unsure (1)..(1528): unsure at all n locations
taacatgtgctcaagcatgttttaagcaagaccattctcaaatcgnaggacctggtatctctcgtgttgtttattgtaatgaacctgattcacctgaagctgattctagaaactactctgataactacgttaggactactaagtatactcttgctacttttttacctaaatcactctttgagcagtttaggagagttgcaaatttctactttttggttactggggtcttggcttttactcctcttgctccttatactgcttctagtgctattgttcctcttctttttgttattggtgctactatggttaaagaaggtgttgaagattggcgccgccaaaaacaggtaacttttggttctgattgtgattagagatggattagattatgtgttgttagctaatgaggtgaataatagaagcttttgtgtatgtggtgtttaggataatgaggtgaataataggaaagttaaagtgcatagaggtgatggaagtttcgatgcgaaggagtggaagactttgagtattggagatatagtgaaggtagagaagaatgagtttttcccggcggatcttgttttgctatcttctagctatgaagatgctatttgctatgtagagacaatgaaccttgatggggagactaatctgaaagttaagcaaggacttgaagtaacttcgtctttgcgtgatgagtttaactttaaagggtttgaggcttttgtcaaatgcgaggatccaaatgctaatttgtattcgtttgttggaaccatggagcttaagggagctaaataccctctctcaccgcagcaacttcttctgagagactcaaaactcaggaacccagatttcatctttggagctgttatcttcacgggtcctgacacaaaggttattcagaattcaacagatcctccatctaagagaagcatgattgaaaagaagatggataagattatctacttaatgttcttcatggtgattactatggcatttattggttctgttatctttggagttacaacaagagatgatctcaaggatggtgtgatgaagagatggtacttgagaccagatagctccagtatcttctttgaccccaaaagagctcccgtggctgcgatctatcattttctaaccgcggttatgctgtacagttatttcattcctatatccttgtatgtctccatagagattgttaaagttcttcagagtatcttcatcaaccaggatattcacatgtactatgaagaagctgannnnnnnnnnnnnnnnnnnnnnnnnaacctgaatgaagagcttggacaagtggatacaattctctcagacaagacaggaacattgacatgtaacttcatggagttcattaagtgttctgttgcagggacagcttatggtcgtggtgttacagaggtggagatggctatgggaagaagaaaaggtggtcctttggtgcttcagagcgatgagaatgatattgatatggaatatagtaaagaggccattactgaagaatctacggtgaaaggat

SEQ ID NO: 171091 - DNA, 1006 bp, Arabidopsis thaliana landsberg
aacactcttgttctgttcatgtgtttgcatctaagttctctgactcggagacttgttctttacagatatgttttttataagaagtggggatcttaagtggcacttcttctgccccagggaaaagaagtatgctagtggggtaagggcaaaccgtgcaactgagtgtggctactggaagaccacggggaaggagagaccagttctgtgcaattctgaggttgtgggaaagatcaaaactctggtttatcactttggcaagtcgcctcgtggggagcggactgattgggttatgcatgaatacaggcttgacgacaaagtactgacgcagatgaatgttcctcaggtaatatatactacttattataaatggcaaatatgatttcaacttgaacaggtgtttaggtttacgagtatttactgatgatagcttgccgttttaatttgttccttaattgctttgatagtgtgttactgtcctgcctgcaattttttccttcttccacttatatattgtttcctgcttgtttagttttatagatttatgtatcatccatgtaagcttatatcactctctctttacttacaattatgttttggactgcaggatacttatgtggtgtgtgttctgttcaagaaagatggtcctggacctagaaatggagctcaatatggagctccgtttaaggaagaggactggagtgatgaggaagtacgtactgatgttccttctactagtaatcccacaaaccttcttgagcctagcaaagaaaccactctggctttgactgccccagatgactccaataaggattgttttggtggcatgatatcagagtcatgtgtctcggatttcctaccagctacaactaataccaccagcgagcttccacatccaagtgatgcacctctggcagagaccgttcagacccccaacaatgatgacttatattcaatgttggatctatttgatgatgacgaagagttcttagggttcaacaataatgag

SEQ ID NO: 171092 - DNA, 992 bp, Arabidopsis thaliana landsberg
gtgttggctgatagcttgtatcagatcttcttgcatgaagttatcaatgatttacacgaagaattcccggaatcgtcgtttttagcgtttaatttccgagaaggggagaaaaaaagcgtgtttgctgaaactctctgtgaatatgatgttactgttcttgagtatccgaggcagtatgaaggctgtcctatgcttcctttatcattgattcaacattttctccgtgtttgtgagagttggcttgctcgtgggaaccgtcaggatgttattcttcttcactgtgaaagaggaggatggccacttttggcttttattctagctagttttctgattttcaggaaagttcatagtggtgagcgtagaactcttgagattgtgcatcgagaggctcccaagggtctcttgcagctgctttcaccgttaaatccgtttccttctcaacttcgttatcttcagtatgtagcgaggaggaacattaattctgagtggccacctcctgaaagagctctttctttggattgtgtgataattcgaggtatcccaaactttgactctcaacatggctgcagaccgattatacgtatttttggaagaaactatagtagtaaatctggtctttcaacggagatggtgtattctatgtctgataagaaaaaaccccttcgccattacagacaggtgggtttgatcttatgttttatgatttgtttgacaccttctataaagtatcactcttctgagtaacgtaaatctgtaccatatggctccaggcagaatgtgacgtaatcaaaattgatatccagtgctgggttcaaggagatgttgtactggagtgtgtgcatatggatttggatccagaacgagaggttatgatgtttcgtgtgatgtttaatactgcatttatcaggtccaacatactaatgttgaactctgacaacttggatattctttgggaggccaaggatcattacccaaaagggtttcgagcagag

SEQ ID NO: 171093 - DNA, 599 bp, Arabidopsis thaliana landsberg
  unsure (1)..(599): unsure at all n locations
tttgctgacatttatgtatctcttnacttntgttatctgcaggaagaacatgatgatgaatatgaagcagaacgtgaggtgnctgatgagtttgacagtgacttcaatgacgatgtatttatgtcttgcttatgtattgagtacttattcatcaaggtttttgcttatatttccattctttttaatttctttcttttgccttttgtttgggattaggagcctgagcctgatgcagtcgctgtaaatgaaaaagaattgaggtttgaattttttcaaagcttgtcttatgatggctattatgtgtgtctgttttaattttgttacaattttgcatattgttgtagggatctgccannnnnnnnnnnnnnnnnnnnnnnnnnnnnnnnnnnnnnnnnnnnnaaaaagaagacgaaggtagtttcacaactagaatatattcctggagatgagaagccaggtgaagaattgggaaacaaggaacaagaagaaaaagaagagaatgaagcacaagaagatatggaaggtgagaaagtcattaggaaatcaacacggacttcagtggttgtacggcaagcagaaagagatgcattgcgtggtgc

SEQ ID NO: 171094 - DNA, 415 bp, Arabidopsis thaliana landsberg
ggaggaaacacaatgacacaacaaaataccaagacgacgcggcgcaccgcgctcaagaccatcgccgcggccggtttgtgcatgaccggtattggcggcgcccgggcgctcgactatccgacccgtcagatcagcctcgtcgtgccgttcacgccggccggcggcgtcgacgccatggcgcgcgtcgtggcgatgaagctgtcggaggcgttcaatcagcaggtcgtggtcgagaaccgccccggcggcggcggcacgatcggcaccaagatcgttacgcgcgccgcgcccgacggttatacgctgctgctcgggcacaccggcaccgtctcgatcaatcccagcctctacgcgaatgccggcctcgatccgcgcaaggacttcgcgccgatcggtcttgtcgcctcgatgcctg

SEQ ID NO: 171095 - DNA, 712 bp, Arabidopsis thaliana landsberg
aagtctcccaaggccagcgccaccttttctgacatcatctcaaaggcgctgggcctggtaatcccgggcgcaggcgagaatgacagccctgtgggcaagatcgcaaagggcattgagcatgcagccgtgggcttcttgggttggtggcgcaacgggcaccatcctgggcttcattggcgacaaggccatcagtgccggtttcgccatcttgggcaagttcgctgacggtgcattgaagggcaagttcgggtaacgtcggtaacgtcatgaacgccggatctcacaagatcattgacggactgaaagactacctgatcaaccaggacaagcagaaggctaaggagttctccgcttcggcggttgctggctccaagtccgttcaggcctgggcgcccatgatggcggcagcgttgcagatggccggtgctccggcatcctggctcggcggcatgctttcgctgatgcagcaggagtcgggcggtaacccgaatatcttcaacaccaccgactccaacgcagcaaagggcacgccgtccggcggtctgatgcaggtcatcggcccgacgttcgcggcctactgtcagcctggtttctgttccaatctgcttgaccctatgtccaacatgctcgcatctatcaactacaatcaagctcgttatggtcacgtgcctggttcgccttacgcgaccggtactcctagtaccacgcctgg

SEQ ID NO: 171096 - DNA, 816 bp, Arabidopsis thaliana landsberg
cacgaaaaaggaatcgacttgttctggtttctgcggcttctaaggttgagagttcaggtcttaatggtagagctcaaaagttcgaaactttagcttctgggtatagcaatagtaacggaaatggtcattatagctctgtgaattcgtcttttgcgttggaagatgtcgagagtaataaccatttgcgtcagctggttagaaccggagaattggaggaagggtttaagtttctagagaacatggtttatcacggtaatgttcctgatatcattccctgcacgacattgatccgtggattctgtaggatgagtaagacgaggaaagctgctaagattttggagattcttgaaggttctggtgctgttcctgatgttataacttacaacgttatgattagtgggtattgcaaagctggggagatcaataacgctttatctgttcttgataggatgagtgtttcgccggatgttgttacttataataccatcttgcgttctctttgtgatagtgggaaacttaagcaagccatggaggttcttgataggatgcttcagagagactgttatccagatgtgattacttacactatattgattgaagctacttgcagagatagtggtgtgggatatgcgatgaagcttctcgatgaaatgagggatagaggatgtactcctgatgttgtgacttacaacgttcttgtgaatggtatttgtaaagaggggagattggatgaggcccctaagttcctgaatgacatgccgtcttctgaatgtcaaaaaaatgttattacacataacataattctgcggagtatgt

SEQ ID NO: 171097 - DNA, 1751 bp, Arabidopsis thaliana landsberg
aaaatccccccccagacccaggaaggaagggttaccgccaatttttttataggaatgctatcactgaatattggggtagaaaatttcaaatcgtatgtgagggtcaccctgaatattatttagttaaatctgtgagtatctaacaagtttcatttttctctaatctagggaagaggatgttcacaatttccaggttcacaccctgtctccttaaacaggtatgaatctctgtgttactctttgtagtgtatgaaaagagatgattggactaatgcatccccttagttttggggtcaattagtccatttcttttgcagaactttagtcttaatatttctcttgtggtaaaacagggaaaatttgcaactcttgaggcagcggtactattatgcaacatggaaagctgatggaacgcgatatatgatgctgctaaccaccgatggatgttacatagtagatagaagctttagattccggagggtacagatgcggttcccctttaggcacccaactgaagtgagtaatattcctgctttgtgggcgagattgtgtgaactagtggtttttcttacttatttgtttttggttgccagggcatatctgataaagtgcaccatttcacattacttgatggagaagtgataatcgataccttgccagataatcaaaagcaggagaggagatacgtaatctatgacatggtagcaatcaacggccaatcagttgtagaggttggaattgtcattatttatttatgtaatcaataatggttggattggtggctcttttgatcaagatctgagtatttactgaagcacattgtaaatactgtagctgccattaccctcattatagaatattagaacattcgagaaattaaacacattatgtaggccgggcttactgtcgtaattagcttagagtgtttgttgtttgtcatgtctgactttctcgtggtgcaataaatattttgggaattatgaacatatacaattcctatgctcatatagagcatctgactccgatggtgcatattccatgcaaatatgttatatcgtttttcgcagttgttcagtattctttgttgctgacagttaaaccttgacgtaatctggttaccagcatacacatcttgtcagtagtatagagtatcaatgagttgtatttggcttgctatattatgtgttaatttcttaagatactaatagaaagttgcacaattcaaaaatggagcagaggcctttctatgaaagatggaagatgctcgagaaggaggtgatagacccccgtaatcatgagaaggcaagaagtcatatctatagatatgatcttgagccttttagggtgcgttataaaaaaattcatgccacttttccatttttatatttttccttgtataaactgtttatggagctgttaattattctttcacctaggtgcggagaaaggatttctggttgctttctgcggttgagaaggttttgaagggtttcataccatcactttcacatgaagccgacggcctaatctttcaggtaaccatgcgactgaagaggatctttgatgttaaagcctatttttcatacaaaggcagtgaagttttagttttagtacagtgtatattgtcttccaaatacatatctgagatctaaatctctgttaacagggctgggatgatccttatgttccccgcacccatgaaggtctgttgaaatggaagtatccagagataaccggttacttcatcagcc

SEQ ID NO: 171098 - DNA, 838 bp, Arabidopsis thaliana landsberg; identical to SEQ ID NO: 12764

SEQ ID NO: 171099 - DNA, 296 bp, Arabidopsis thaliana landsberg
atgggaactcatcgaattttcataggtctcatcgctctttgttgtttttgtctacctcacctcattgaagctaagccattcggagtataccaacaacaagtatttgttgatcaatccggccatggaaatttcacgacaatacaaaaagctattgattctgttccaatcaacaatcgtcattggttcttcatcaacgttaaagccggtctttacaggttagtctagcaatattttgattgagtaattatcatgaagttctatatgtcttgtaatgaagttatatatgcgaaagtgct

SEQ ID NO: 171100 - DNA, 1100 bp, Arabidopsis thaliana landsberg; identical to SEQ ID NO: 51771

SEQ ID NO: 171101 - DNA, 935 bp, Arabidopsis thaliana landsberg
  unsure (1)..(935): unsure at all n locations
gctttcatgacagcttcggtagatgagctagaggcggccttgtatacggcagccgccggaaacaacaagacggtgataataacgatggtgaacaaagcgtacgtgaaggaggttggaagagggagtacgatgcttgatctgtttttggagagtttttgggaaggagaagggactctaccacttttggaccatctaatggtggtggcagtggatcaaacggcctatgatcgctgccgtttcaagaggcttcactgctacaagatggagactgaagatggggttgacttagagggagagaaagtattcatgtcaaaagatttcattgagatgatgtggagaaggactcgcttgatcctagacgttcttcgtcgtggctacaatgttattttcacggttagttccctcagattttggaacatataacaatataaaacattttagattgttgctcaattagtatattatatgtacaatgtcatcaggacacggacgtgatgtggctaaggagtccattgtctcggttaaacgtgagcttggatatgcaaataagcgtggacagaattaacgtgggaggacagttgatcaacacgggattctaccacgtccggtctaacaacaagaccatctcactcttccaaaaatggtacgacatgaggctaaactcgacggggatgaaggaacaagacgttctcaagaatctcctagactccggcttcttcaaccagttaggtctcaacgttggcttccttagtaccaccgaattcagcggtttttgccaagacagtcctcacatgggcgttgtcactaccgtccatgctaactgctgcctccacatccctgccaaagtctttgatctcattcgtgttcttcgggattggaaacgctacanagcgtcacatgtcaacagcaaatggagccctcatcttaagtgttgg

SEQ ID NO: 171102 - DNA, 2741 bp, Arabidopsis thaliana landsberg; identical to SEQ ID NO: 22602
  unsure (1)..(2741): unsure at all n locations

SEQ ID NO: 171103 - DNA, 435 bp, Arabidopsis thaliana landsberg
caacaaagaagaagacattgctgcatacaccatgagagccattgagaactctcaacaagactctctacatcaatcctccagagaacactgtttcgcagaacgacatcatcgaattgtgggagagcaaggttggtaaaaatctggagaagacttacgtttcataggagaaacttctcaagaaaatcccaggtgagagagataatttcacactcttttttaccaaacataaacaattaagatcaggtgtttgctaatacttgaaatgttgcagagtctccacatccacttgatcttctgttggctttaaatcatgccatttttgtgaaaggagatcaaacctattttacagtagagccttactttgaagtggaagcttctcagctttatccagatatcaagtacacaagcgtcgatgagtaactcagccagtttgtc

SEQ ID NO: 171104 - DNA, 532 bp, Arabidopsis thaliana landsberg
  unsure (1)..(532): unsure at all n locations
gttcagcttgtttcgccgtgacgannnnnnnnnnnnnnnnnnnnnnnnnnnnnnnnnnnnnnnnnnnnnnnnnnnnnnnnnnnnnnnnnnnnnnnnnnnnnnnnnnnnnnnnnncgagcggctgaccaaggccctgcaaccggtaggcttcgacatctaccagattgatcatgaggacgccaacggccagttcgagatcaactacacgtacagcgatgccatggagtcggccgaccgcttcacctttttccgcatggccgccggcgagatcgccaacgacctggggatgatctgctcgttcatgcccaaacccgatcccaagcgcgccggcaacggcatgcacttccacctgtcgctggccagcagcagcaacaagaacctgttccacgatccgtccgacagcagcggcatgggcttgtccaaactggcctatcccttcgccgccgggctgttggcccatggcccggaaatgtgtgcattcgccgcgcccacggtcaactcgtacaagcgccgggtgttggggcgcacgctg

SEQ ID NO: 171105 - DNA, 545 bp, Arabidopsis thaliana landsberg; identical to SEQ ID NO: 72581

SEQ ID NO: 171106 - DNA, 1793 bp, Arabidopsis thaliana landsberg; identical to SEQ ID NO: 1033

SEQ ID NO: 171107 - DNA, 1043 bp, Arabidopsis thaliana landsberg; identical to SEQ ID NO: 12015
  unsure (1)..(1043): unsure at all n locations

SEQ ID NO: 171108 - DNA, 532 bp, Arabidopsis thaliana landsberg; identical to SEQ ID NO: 68374

SEQ ID NO: 171109 - DNA, 234 bp, Arabidopsis thaliana landsberg
tttgtctctcggtcagtttctcaacttcagtgagattagtgggtaaactgagtagaaattggtgttaaactgagtttcatcttcttgcttatgaaggtgctaaacttagagtccatggataaaagccggcactggaagatagtgggttgcagcgcatacacgggtgaaggtttgttggaaggattcgattggttggttcaagacattgcctccaggatttacatgcttgactaa

SEQ ID NO: 171110 - DNA, 1539 bp, Arabidopsis thaliana landsberg
atgcattccatcaaattggttttgttggttttgttgataatttcttttcactctcaaagtttgtcaaaacatcatccaactattgatggtctgcttgaccgtttggattctttattaccaacttcttctgtacaagaatcagcagcaaagggtttattgcagagactgcttcccacccattctcagagctttgagctcagaattatctcaaaggttcttccttttatttccttaggccccactatgctaggtgattcttcagtactgattgttttttgttacaataggatgcttgtggtggtaccagctgctttgtaattgaaaactatgatggcccgggacgaattggacctgaaattctgtaagtatcttctgatttcctgatgagggatcgaattttacttaaaattcttctcttttagttttgccgtcttgtgtctcaggattaaaggcacaaaactggagttgagattgcttctgggctccattggtatttgaagtataaatgtaatgctcatgtttcttgggacaaaactggtggaattcaggttgcctctgttccacaacctggacatctacctcgtatagattctaaacgcatctttatccggcgtcctgtcccttggaactattaccaaaatgttgttacatctagctgtaagatatatacacttcttggaatcaaaagtttcctcatgtcatgattcactagaatcacactcctgctactgcctgctttcttgttttttccagattcatatgtttggtggggatgggagagatgggagagagagattgactggatggcattgcaaggaattaacctgcctctagcattcactggacaagaagctatttggcaaaaggttttcaaggtaaaaagtcagattgcattagtaattgtttgctgtgacatgattagatattgcaacttttttatttaatataagttgatatataccgctaaccaagttctatatcaattttgttagaggttcaatatcagcaaagaagatctggatgattattttggtggaccagcgtttcatgcttgggctcgcatgggaaatctttacgcgtaaataacctgatctttgatattttcaggctcctatctccagtgctccttctgagcttgatttatctttcattcttgaagctcacataattcatatctctaactacatctacatcacagttggggtggtccattatcgaaaaactggttagatgaccagttgcttttgcagaaacagatactttctcggatgttgaagtttggcatgactccaggtccaagaacaatcactttcttctcttttcatatactcgattgattgttctcatagcatcttatattttcttatgtttcctcctttcctagtactcccatcattggcaggcaatgttccatcagctttgagaaagatatatcgctgaggcaaatataaaacgactcgatacctcgtatgtgttccttccgtaaatcagaaaaggaaaaatttttcaatgcaatgcatgaaactttttgagttgtgt

SEQ ID NO: 171111 - DNA, 529 bp, Arabidopsis thaliana landsberg
  unsure (1)..(529): unsure at all n locations
gtctgatatacatggtcgacaagggacatgtactgaacatagaaggagatcagctgctattcatactctcataattgggtgcatcccttctcctgcagttggtagtagtgaatctagtgatgtcaatattatcatgaggggaggctctggagttcgcgctgtccatccaaatttcagtagtctagttgatggttcaagtctgcaagctctatttgagcatcttctgctccataacaatcgtctagccactcctcctgctcctcagtcagctattgactccatgtcgattgggttcgannnnnnnnnnnnnnnnnnacacatgcatgcagtttgcctgaagctcctcgagaagaatcttcagccgggaatgccagctctcgacgttggttcagggattggtctgtccgctggccttgttctttctggtctgagtgctgtcagcagtggccaaggtaatttttcagtatttgtttgggatcctggtgataccggcttggttccctctagtgtgagtgccgtcaaaagtata

SEQ ID NO: 171112 - DNA, 1417 bp, Arabidopsis thaliana landsberg; identical to SEQ ID NO: 27272
  unsure (1)..(1417): unsure at all n locations

SEQ ID NO: 171113 - DNA, 378 bp, Arabidopsis thaliana landsberg
atgacgtcaattctttctacagtctcaaagctgagaggatgtgttaaccaaattgagtataaagatcctagcagtgcttccgaagaagactttgtaagtactcaattataaattattgcgtttactaacttatttttatttgttattgtcaagatgttattaactcaatatgaaaaatacaaaagaggattcaaatttgatcatgtatggcctattcttaaaggcatcgagaaatttgctaatgataacatgaagacaaccgctgcattccaaggagagggtcgtgatgttacgtcatctttatcatttacaatcaataccgagtcatcaccttcccctggtatgaattcaattgatctaaatagggatagtgaatat

SEQ ID NO: 171114 - DNA, 949 bp, Arabidopsis thaliana landsberg
ggcaaggcgggtttgggatggtgttaaagggaaatggcagggtagagacatagctgtgaaacgagtttccgagaaatcgcatcaagggaagcaagagtttatagccgagatcacaactattggtaatctgaatcataggaacctggtgaagttattgggatggtgctacgagaggaaggagtatcttctggtttatgagtatatgcctaacggaagcttggacaaatatcttttcttggaagacaagtcaagatcaaacctaacatgggagacaaggaagaacattataacagggctatctcaagctttggagtatcttcacaatggatgtgagaagaggatacttcacagagacataaaagcaagcaacgtaatgctggactccgacttcaacgcaaagctcggcgacttcgggcttgcgaggatgattcagcaaagcgaaatgacacatcattcgaccaaggagatcgctggaacaccgggatacatggctcctgagacttttctcaacgggagagccacagttgaaacagatgtgtatgcgttcggagttctaatgcttgaagtagtctcggggaagaaaccaagctatgtcttggtcaaagacaaccagaacaattacaacaatagcattgtgaattggctatgggagctatacagaaatggaaccatcacggatgctgccgatccgggaatgggaaatttgttcgataaagaagaaatgaaaagcgttttgctcttaggactagcttgctgccacccgaatccgaaccaaagaccatccatgaaaacagtgttgaaggtcttgacgggtgagactagcccaccggatgttcctacagagagaccagctttcgtgtggccagcgatgcctccatctttcagtgacattgactactctcttacagggagtcagatcaattcacttacggagcttactggcagatga

SEQ ID NO: 171115 - DNA, 772 bp, Arabidopsis thaliana landsberg; identical to SEQ ID NO: 12211

SEQ ID NO: 171116 - DNA, 995 bp, Arabidopsis thaliana landsberg
aagagtgtgtggtactcggtgatcgttctattcgattccctgttggagtggctgaggatgtacaagtccgggttgggaatttctatatcccaaccgattttgtcatcattgagcttgatgaagagcctagacatccactcatccttggtagaccattcctgaatactgtcagtgcattgatagatgcgagaaagagcaagatcaatctgcagatgacattgttcagaaatttaacatggaaagaataatgtccatgcccaccattgagtgtcagacattctggatagatatcatggatgagctagctgatgagcttcttgctgagttgaacatggaggatcctcttcaaactgtcttgactaaagaagagagtgagtttgggtaccttggagaagcaactactggatttgctagaatgctggattttaattcaccaatgactaaagtggtggcatttgctgagcttggagacaatgaggtagagaaagctttggttgtatcttcacctaaagactgcgatgattggagcgagctgaacgctccaaaagtagaactcaaaccactttcctccgggctaagggtcgcgtttcttggtcccaactctacatacccgtgattattaatcccgaactaaacaatttggagagtgccctgttgttatgtgagttgagaaagtacaggaaagccttagggtatttccttgatgatatcacaggcatctctcccacattgtgtatgcacatgatacatttagaagatgaatcaatcaattctgtatcaaagacggttaaacccgaatcttagagatgttgttaagaaagagataatgaaacttctagatgcgggtatcatctaccctatctctgatagtatttggtgagtccggtccatgttgtgcctaaaaaaggtggtgtcattgtgattaaaaatgaaaagaacgaactaattccaactagaactgtcacatgacaccggatgtgcattgaatatcgaaa

SEQ ID NO: 171117 - DNA, 1212 bp, Arabidopsis thaliana landsberg
tgatgtcaagcctttcaaatcaaattggcgtgtccgagtgaagattcttcatcagtggaggcaaaccaaggattcatcaggagaaacgttagatgtcattatatgtgatgaaaaggtaaaagagaatgctattgattacatatatgaatctatatatatatattttggtttgaaacatataacatgctcttatgtgtttttgtttatttggctttgatatagggatctaagatgcagattaccattagaaagcattatattggcaagtttaacatgtcactaaaggttggtgattggatgatcattgataccttcactttgagtccttcgtctggcaagtacaagatatcgagtttgagctatcgaatgggctttaaccataacacagatgtgattaaatgtgatcctgtatcggatagtgtttttctggatctagcatattttgaaggggttaagaccgagagttatgatgaaaatgttctaattggtatgtattttctaaattccctatcattagtttaactcaaactatatgtctgttacggattttaatattaacagggtattctttacaatggcagacatattaggtcaagtggtgagtgtgggaagatattatggctcaaaacaaaccaaacaaaaaactagagattcaaataagagatgtcaggcaagtagaacattgttttcatataatttttgattcataataactatgttttcaaacaagtaatattgaaatcgtttgttattgtattaaagcaatgagggtttgtcttgtactttgtggggtgtgtttgctgagaaagtatttagtgctttaaaaagtgtaaagcatgacgagaagacagtggttctgatatgctatgctaaaatcaataattttaaaggtattcactcttcccttaactatgtttaaagtagtcaatattggatgtatatgtgcatgtcttagttaacatatattgtctaattctgttacaaaggtgagattagtattacaagtgcttttgatgtttcggatgtcataatcaatccagttcatattcctgaggttgaactgttcgtgaaatcataagtgcaaatatattatgaccttctttgttctgtttaaattcacagacattttaaacagacaaatgtggatttgcagactcccaagtgatggtcttgctctcactattcaagataattattgaaccgtgacataat

SEQ ID NO: 171118 - DNA, 360 bp, Arabidopsis thaliana landsberg
aagtaaaacgaagtccaccctgggaggaaacaatgtggaccaaaagcctatgcagacttgctctggttgccgccgcgctggcggcaacgctcgcgccggcgtcggcggagaactatcctgaacgccgcatcacgatggttgttggctatgcggccggcagcggcgccgacattctcgcgcgctactatgcggccaagctggcggcggaaaccgggcagacggtgatcgtcgagaacaagtcgggtgccaacggcaccatcggtgcgcagggcgtgaagcagaagaagccagacggctacacgttgctgttctctccgagcgcgggaatggcgggcggcaagttcctctatgacgatctgc

SEQ ID NO: 171119 - DNA, 898 bp, Arabidopsis thaliana landsberg
  unsure (1)..(898): unsure at all n locations
atgctcgccaatcctcttccatttactcccttgaaatcgctaaagccttacaagaatgcttggcgtattcaggttaaattgcttcatgtttggagacaatattctgtaaaggttggtgaatccatcgaaatgattttagttaatgaagttgtacgttttatagtttaaacagtatatttggtccagccttatagtgtgttcaatcatcattttcatatattaattattatccatttatttttgtcatatagggtgataagatgtatactcctgtgagaagagagcagatcgagaagtttgaaaggtgcttaaccgagggtgtttggaagatcattacgaccatcactctaaatcctacaagtggtcagtatcgtatttctgacttgaaatacaagattggttttgttttcaaaaccacggtctctccatgtgataccgttttcgatgctttgtttctctcacttgctaagtttgacgtgatcttttctggatccgctaacccaaatatcttgcacggctaaattaaattttaaatttgaaatttgaacatacatgctcttgcatagtcaactatttatatgtttctcttttttgtttatacagatcttnnnnnnnnnnnnnnnnnnnnnnnnnaaattcaaaatcttaatactaacaacaagcccacaaaaaaaatcaatttccatatgagatacatgcaatacaaacaatctataccactgggtacatgccaagttttttgtttatttattatttagtgatcaattttcttttttctatttaagtgacactcgcttgacatgtacacttgggggaagtatgttgagatagttgacaaagcttgcaagaagtcaactgatggtattgttgtctgcttaatccgatatgcgaagatcct

SEQ ID NO: 171120 - DNA, 1509 bp, Arabidopsis thaliana landsberg; identical to SEQ ID NO: 28321
  unsure (1)..(1509): unsure at all n locations

SEQ ID NO: 171121 - DNA, 607 bp, Arabidopsis thaliana landsberg
atccatcctaatactctacataccgatttatcaccttcgagccccaagaaaaggcaggacttgctcgcaaatgggattcatgagaaagagtgttgcataactgtaaacccacaacctcctgttatcgaagctcaccagaatgagctacctacttggtcaaacgagtttactggggccatgaaaaacgtttatggacctgttactgctgcaaaaacgatctatgaggacgaagaaggctacttgatcataatcagccttccttttgtggatttgaacagcgttaaagtctcctggagaaacactctcacgcatgtactcataccatgtgaaatgcctcagcacatcgagggtcccttagaagtcaagacatgatagaacatccatgttgtctgattcagcctctgagcattgcccgccaggtgaatttgtcagagagatcccattatcaaaccgaatcccggaagatgcaaacattgaagcgtattacgatggacctggatcagttcttgagatacttgtcccaaaactaagagctggcccggaagagcacgaggtgcgggtgtgtctccgtcccaacctcggtggaaacgatcttatgctgacttaa

SEQ ID NO: 171122 - DNA, 1844 bp, Arabidopsis thaliana landsberg
atgttgctgatggattatagatggcgagcatcctctcagtcatgtgttttgcgggtgcaacaacctcgtatccttgctgttcctgacttccttcttgcggttggtgaattttttgttccagctttgcgtgcaataacaggaagagatgaaacattagatccaacaaatgatcctatcaccagaagtagaggcatagttctctctgagccactctataaacagacagaagatgttgtgcacttgtccccacgtagacaattagtagcagattcactgggcattgatgagtatacctatgacggatgcggaaaggtaatctcgttgagtgagcaaggagagaaggatttaaacgtaggaagattagaacccatcataatcgttgggcatggaaagaagctgcgcttcgtcaatgtgaaaattaaggttgagactcttctctcttttaaacaatttaatatttaatacatacttatgtaatttgcatagtcacttagcttgctcagagtaaatttctacacatttgctaagcacttatagtgagaagaggagaaggaactttcttgttgtaatcattgctccacactcccctttttccaagattcttgatttatgctagctgcttgttttctgtttttccttttatgcatgtggcagaatggatcgcttctgagcaagtgcatttatttgagtaacgatagtagctgtttattttctccggaagatggtgttgacatctcaatgttagaaaatgcctcatctaatccggagaatgtgcttagcaatgcgcacaaatcatcagatgtttcagacacttgtcaatatgattcgaagtctggtcagagttttacctttgaagctcaggtaggtttacttctctttttgttatttcacgggtttatttaagttttgagtgcctaaattatgttatttttatcttctttgaatcatggtttctctttacttgttaccttactttttgagtcgttactccctgattttggtgtataattctttttctctttttactcataacctttggttatatagagatctcttcctcaaccttcttcgagtgatttaccacaaactctggattccaggcctatctgattaaggaaatccaaatattcttgttttgctggatttgtcaaattcatagcttatttttgtgcaggttgtatctcctgagttcacgttctttgacggtacaaagtcatctctggatgactcttctgctgtagaaaagcttttgcgagtgaaattggattttaattttatgtaagtgcagcgttctctaaaccactggatcagtgatttataccattttgtcatacatgacagttctggacatttgggtctgagcgtaacaacccaatatttcggcagacacaaatatgattgcttgattactttatctatatgcctgtataaagaaaggattgtactaaagtaacccctcatctgaccaccactacgtcctgctcgtgacattgaaaaccagtttttttctaaactagttgcttactggatcttaagtttcatgttacattgttgatgtaatttttgctcttgtttcaacaggtatgcctcaaaagaaaaagacatctgggttcgagccttgctaaagaacctggttgttgaaactgggtctggtcttatcattcttgatccagtcgatatctctgggggatacacttctgttaaagagaaaacaaatatgtccttaacctccactgacatatacatgcacctttctttgagtgctctttctctcctactgaatctgcagagccaagtaactggagctttacaatctggaaatgctattcctttagcttcatgca

SEQ ID NO: 171123 - DNA, 511 bp, Arabidopsis thaliana landsberg; identical to SEQ ID NO: 79364

SEQ ID NO: 171124 - DNA, 6014 bp, Arabidopsis thaliana landsberg
aagtccaagatggggagggtaaccagttggaagaagtcagcaacatcaacaacaaccagggtggctacaaaggatacaacaacttccaaaaccaacaatcccaacctcttctaccgcagcaccaacattgctaatcctcaggatcaagtgtatcctccacagcaagaacaaggtcagaacaaaccttttgttccctacaaccaaggtttcgttcccaagcagcaattccaggggaactaccagccgccaccaccacctgggtttgcacctcagcaaaaccaaggtccagctgctcctgatgctaaaatgaaacagatggtacaacagctgctacagggacaagcatctagctcaatggaaattgataagaaattatctgaattgcaccataagctggattgcagctacaatgacgtgaatgccaaagtggtggcattgaataccaaagtcagatatttggaaggacaatcagcatctacctctgcacctaaagtcacaggacttctagggaagtccatacaaaatccaaaagagtatgcaactgctcacgccatcaccatctgccatgatcgagagctaccaactcgacatgtccctgatttaatcattggggacaatgatgttcaagaaggggaggcttctactcagattgaagtctctgttgttgaattcaaccattctgatggttctcgccatctcattcaatccacctcggaagagaaggccgccactatcaagagaatagtgaaacgattcaaacctactccattaccctcacgtgctcttccgtggacattcaggaaagcgtggatggagagatacaagtctgctgtaacaaagcagctggacgagattgaagcagtgatgccactgatggaagttctctacctgattcatgatcctcacaaagatgtgagaaatttgatactggaaaggatcaatatgtatcaagattcagatgatgaaagtgatgccactccatctcgagctgctgataagaggattgttcaaaaaaacttagaagatcctggatatttcactctaccatgttccattggggaattagcttttagcgattgtctttgcgagctcggagcctctgtcagtttaatgccactctctgtggcaagaaggttagagtttattcagtacaaaccttgtgacctgactttgatccttgcggataggtcttctagaaaacccttcggcatgctgaaagacctactagtcatgattaatggagtagaagtgcctacagacttcgtggtgctggatatggaagtagagcataaggatcccttaatactgggaagacccttcttagcttcagtgggagcagtgatagatgtcagatatggtaagattgatctcaaccttgggaggtgataataggtttttatgcaattatcctaaaacaccaatcaagtcgttgtagtattttaggtgtcaatccaaatgggtgtgatgcaaacagatgagatgtgatcagaagtcactaagtcaagccaagcaataacagttttggggtttctaacagtcctaagcgaacatgcagaaaacagaagcaataacagaattactaaaatcactcgaccacaacaggctgatgccagaagtaggatgtggtcgagtaacaggtcgagtaacagacaggatatgaaacagctatactcgactgcacagtctgttgccagacactgggtgtggtcgagtatactggtcgagtaacagacaagaaacaagacaatcttactcgactgcacagtctgttgccagacactgggtgtggtcgagtaagttggtcgagtgattataaaaactaagaaacaggcaatgagaacgattaagtgataacgataaaacagagaaataagatagacgagaaattcctaaggatggggtaatcgagtagagtgctatcctagcctattcgaatggttaacaagcgcaatcaagctatccctagacaacggggtcaacaacagattaattcactcccgtgatagaaatcctcaagcaaagcaagcccagactaattcccattaacgaaatctaactatgcaggcaataagaacagacttataaagtcaataaacgctttaaacagccaatcccttgagatatagacgaatatctcgaattaaagatgaaatcaaatgcggaatctgaataacttggaaaaatctcgaattacaggttgcagaagcaaatgtggcgcaaccagagtaaaacagaaaataaaattgaagcaaaaactcaatttcgactagatgtctcaagacagatcctaagacagctatttatacaaagcgaaataaaatgatagtagacgggccaataacctaatcgcccggcccatagaatgataatgggcccagatgggcgtcgagatccgatggagcttcaggctgcttccaaacacttggtcttctcctcttctcttccttgtgctcaacttgtctggttaagtgtggatttgagtagcccatgaagatgtgatcgagtgtccggtcaagtaatggtgttggtggtgaatgacgatactcgaccagggggtcgagtaaggtggtagagtgaacggccgaatgtggtcaggtggtgtggcaaagtgatactcgactagggggtcgagtggcgtcatcgagtggccttagctgaggttactcgacctggggtcgagtagatgggaagaatggctccaaattcactcgaccagggggtcgagtatggtgctgtatgcacaagacctggtggtcgagtatgtcttctggttcaggcttgtttcttccaatttgctcgcaaacagctccaaatcacctgaaaataactcagaaatgcaatatgtatgcaaagctatcctaatcatgcaaagtatgcaagaatgatgagaaatgatataaaacagtgatgaatgatacgaaactggactcaaaacgaggatgaatggacactaaaaacatgcaaattatagacatatcaaaccgcaaccgaatcttgaaagcccaagtagtgtttccttgttagaagatacaaagtaaaagagtcatatggaattaagactacaccatcaaaactttgagaagcaagaagaagcttggttagagttttggagtcaaatatgacttgatgtcatgtgtatgattgagtataagaactagaatctcgaacggaacccaaaagctaaagtagtgtttccttgttagaaaaaacaaagccaaagactcatacgtacttcggctataccgttaaagctttgagaagcaaaaagaagcttggttagtgttttggagtgaaatatgactatatgtcacgtgtatgatgtagtataagaagtagattgtaaccgattcccaaaagcaaaagtaatgtttccttgttagaaaaaacaaagccaaagactcatacagactttggctacaccatcaaagctttaagaaggaataaaaaagcttggtagtgttttatagtcaaatatgactagatgtcatgtgtatgattgagtataagaactagaatctcaaccggtttccaaaagctaaagtaatgtttccttgatagaaggaacaaagccaaagactcatacgaatttctactacaccatcaaatcttggaaaagcaatacgaaacttggttagtgttttgcagtcaaatatgactagatgtcatgtttatgattgagtataagaagtagaatcgcaaccggttcccagaagctaaaatattgtctccttgttagaagatacaaagccaaagactaatacggacttcggctacactatcaaatcttggagaagcaatacaaagcttggttagtgttttggagtcaaatatgacaagatgtcatgtgtttgattgagtataagaactagaatcgcaaccggttcccaaaagctaaagtaatgtttccttgtcagaagatacaaagccaaagactaatacagacttcggctacactatcaaatcttggagaagcaatacgaagcttggttagtgttttggagttaaatataacaagatgtcatgtgtttgattgagtataagaactagaatcgcaaccggtgaccaaaagctaaagtaatgtttccttgttagaagatacaaagccaaagactcatacggactttgactatcccatcaaagctttgcgaagcaagaaaaagcttagttagtgttttggagtcgaatatgacttgatgtcatgtgtatgacttgatgtcatgtgtatgattgagtataagaacttaaaccgcaacctgatcttaaaagccttcgtagtgtttacttgttagaagatgcaaagccaaagactcatacggaatttagctacaccattaatgctttcagaagccaaaagaagcttgtttagtgttttggagtcgaatatgacttgatgtcatgtgtatgattgaggtcttattccgattaagcttggtagaaagtgttaggttcgtaacgacagagatagtgtctcatgtagttctagttcgcgtttttcggactagataggactaggtgggcggttatactttaggttgggatttgtttaaaagaaaaaaaggggttgattcattgatgagaaaaggtaaaagactctaggtgaagtaagctaaggaagcagaaaaagtctagtaaaggttttgggatttgtgaagaaaagaaagagttcttgttagctattgaagatgggcaaaatccctcggttttaaaatgtaaagaacaggaaccttagttgttaaagaaatccaaatccgctagatgtatcaaagtgttgagaaaccttctcttagagttaagagaaaagaaaagaatgattagaaacaaggcttaaaagattcatgaatgcaaagggtagagttaggttcttatattgggattggagatgggattaccattagagcttcattggttatactctaggtagatgggatcttatctctgtatgcatagcttgggacttacctttagcattctactaaagcttaatcattttttagagatcccctgttactgaaacttattctgtaagggaccatttttgtctcttgacctttaccttagccaactgagttcattgatgatgcattgcttgattaacgttccagaactaatgaatgttaaagggattggtagatttgagaacatgtgtaggtcgagcataagagtcggattgattgataacaatgcatggctaacgtttttgagtagaattcgatcatgtcgcagcttagaactatcaacttggacaatgatttcatctggtttatctggtgctttggctttgagtccccgctttcaaacctcacctccagcttgttcttgattgtttgcttgagggcaagcaaagactaagtttgggggagttgataagtgtgtattttgcatgttttgagcatccatttgtcatcactttagcatcatatcatcactattttataccatttcacatcatttgtcatcactttgcatgtttaggatagttttgcatgcatgttgcatatttgtgttgatttcaggtaatttggagttgttgacgagctatctggaagaagcggacctgatcgtgacaaaccactcgacccacaggtcgagtaggagcttcaagacctcaagagaccactcgacccccaggtcgagtagaagacctcagcacttcatgtgaccactcgaccccctggtcgagtaccgccaagagagacactagatcacattactcgaccccctggtcgagtatcatcacctccaccacttcacactcactcgatcacactactctaccacatggtcgggtacattcatcgccttcactcgatcactttaccaccaagccgagtaccatcatctctatcactcgactacaaactcgactgccagcttcagatttttcttcattccgcactcaaccagacactcgagcacaaggaagaaaagaagactccagcttatcactcgacctctcactcgaccacctcggtcgagtacagttcttaatccgtcccaatactgcgtcgttttga

SEQ ID NO: 171125 - DNA, 1546 bp, Arabidopsis thaliana landsberg; identical to SEQ ID NO: 5961

SEQ ID NO: 171126 - DNA, 908 bp, Arabidopsis thaliana landsberg; identical to SEQ ID NO: 9477

SEQ ID NO: 171127 - DNA, 516 bp, Arabidopsis thaliana landsberg; identical to SEQ ID NO: 73565
  unsure (1)..(516): unsure at all n locations

SEQ ID NO: 171128 - DNA, 579 bp, Arabidopsis thaliana landsberg
tcttcatcttctggttcctcataccaacgttcattccggtgtacttctttggcgagccgatttggaaaacttatcttctggcagttgtctttcggcacgtctactcgctcaatgtgacgtggcttgtcaacagtatgagagagagagataacttctttgacatttgacttcatgactcatcatcattttttaggctgggcacacatgtacggctggcgaccgtatgacaggcgcattgctccggtggagtcctcaattcgccatctggtgatgggtgaaggtaagctaaacagggaaaaaattcttttgttatactgaaaatgcttaatcttaccacttctcaggtttccacaacttccaccacgccttcccctgggacttttcagcttctgagctaggtccactggacgtcttcaaccccgccaccgccttcatcaacttcttcgccaagataggcctcgcgtacgacctgaagaaggcaaacaccagtctggtggagcgaaagttggttgctcatggcgagcggcagtcgcttggccctgatgggaagagcagctactacaagagtggagtttagag

SEQ ID NO: 171129 - DNA, 1974 bp, Arabidopsis thaliana landsberg
  unsure (1)..(1974): unsure at all n locations
cgttagctgacttcaacgaaatcaaaagcaatgaagagaagaatgtaggaccacgacgacctaatcgatcatttgaagacttcatccgcatgataaccaattgtgacgtccatgatttaaagttcattggcaacaagttctcctggacaggaaagcgttactcacataacatttggtgctgtcttgatcgtaccatggcgaattcagactggatgacattatttccttctgcacagacaaaatttctggattttgaaggatcagatcaccgaccattggttaccaatttttgcaacacggttgaccagagaagaaaccaatttcgatatgacagtcgcctgtttcacaaagaaggattcagagacatgatcttggagagttgggaagctgacaacactagcatgacgctaaattccaggattcgtcaaagtagaaagcaaatggccgcgtggaaacgtcgtaatcgtctcaatgcttcaattcggattgcaatgctcaaaagagaccttaacgacgcttatacatatggaaatcgatctacagaggaaattcatgaaatcactctaggcctgaatcaagcttataaggatgaagaacaattctggaaaatcaaaagcaggaagaattgggtcaagttgggagacagaaacactaaatacttctatggtgcaacaaagcaaagacttgctagaaacagagttttagcagtgacagatgatgctggaaacatatatagaggagatgatgaaattggtgaagctgcagaagagtactttacaaatctgttcaagtccacaagagatgaatttagagataacacaagcgtcttccaaggtctacaggggaaagtgacaaatcaaatgaatatggacctccaaagaatggtgaatgaagaagaaattcaaaaggctgtgtttgatattgggccggatagagcgcctggaccagatggaatcactgcagcattttaccaacaattttggccagatgtgaaagatgcagtcattgttgaaatccaacgttttttccgagagggtaacatgcgcgaatcaatgaaccacaccaacatctgcctcattccaaagaaagatgtctcttcagcgatagtagactttaggccaattgctttatgcaatgtgagctacaaaataatctccaaaatccttgtcgaacgcttgaaacaccacctgccatctataatttcagaaaatcaagcagcttttataggagggaggaacattatggacaatgtcatcattgcaaatgagatgcttcactcactgaaaaaaggaaacgttgggctaattcctatatgacggttaagacggacatcacaaaggcttatgacagattggagtgggcctttctacgagaaacaatgcagaatatggngtttgactcgatttggataaattgggtaatgcaatgtgtggaatcagtcagcttctcagttctagtgaatggttctcctagaggaatgataaagccagagcgaggaatccgccaaggtgatcggttatcaccatacctctttatactgtgtgcagaagttctgagtaacctactcaccaaggcagaagatttgaatagattgaaagggatgaaaataagtactacaggacctgtcattaatcatttgctgttcgcagatgatgctctattcttttgtcatgcacaccaaaagtcatgcaatactattatgagtattcttcacgagtacgagcaggtctcaggtcaagcggtgaatctgaacaaatcggcaatcacttttgaatcgagagtaaagcaacatgtgaaaacaagattgcgtcgtatacttaatatccataatgatggtggaggtgggaagtatctcggattgcctgaacaaattggaagcaggaaaaaggccatcttccgttatgtcgtggacaaagtcaagcaaagaacacaaaattggtcacacaagtttctttcagaaggtggcaaggaaat

SEQ ID NO: 171130 - DNA, 1394 bp, Arabidopsis thaliana landsberg; identical to SEQ ID NO: 24526

SEQ ID NO: 171131 - DNA, 1009 bp, Arabidopsis thaliana landsberg
ctagtggattctgtaaaacctatatgtatgaccggattattattattttgttatttgtgtacatgtagtagggatcaatggagcagtgggttcaaatcagccttcccaagccaataaaaatccaaagctgtttgtgttcggaaattcttatgctgataccggaaacatgaagcccactgcattgtcttggaaacccccttatggtatcactttccccggtaaaccttccggccgttattctgatggccttaccgccaccgattttctaggttctactctcactctcattcttaaaacgtcaattgttcttaatgtttctctacatgataaatataatcaaacataccaataagaaagttctatatataaactttcctttctactattctcacacattagaaatttatatcataacgtctatatcgtttgaacattaatatacttctaaagaaaattagcatgaatttactaaagttacaatcttttatgttcttcctcaaattcattaatatagtataattatttattgaatttgacgtcaacaaaaaaaaaacttacttcgtgcagcaaaacagttgggagcaaaattaccgtacctctggagaactcacggaaaaaagaaagttaaactaaacagaggaatgaattttgcgttcggagggtccgaagtgtttgactctccggttgatcgatcgccaaacatctctactcaggtgggtttcttggttaaccttgcccttgcccgccgtgtctacactatcgacggcgaccttgcttcctcatacgctctcctcagctactccggcaccgactattatggtttcatcgaccaaaaccctaatatggctgtaagaaaacattcatatttccttaaacgacactagtcatgcctatcactacttatgctaagatttcgatagtttcaaacgtaaatttctctgagtttataagtgaaataaaaaagcaattgaaattagatatcccaaaaaaaaaaaaaaaaaaaaaaaaa

SEQ ID NO: 171132 - DNA, 338 bp, Arabidopsis thaliana landsberg
tcttttgttctgagaataatgggcccaacatacagagctttgccagtaggtatgaggtttcgtccttcagatttggagttggctgtttactttttgatcaagaaagctttaggacttcccatgaacgctcgtacggtacccgaagaatgtaatgatatcttctcaacacatcctcgcgacttgcctggtgagaatactttctccgatccttttgacaaaacagatttgatagagtttttgagtttcttgatttaactttggctacttctttcttgcgtgacaagctttattttgtgaacttgtttttgctctgttctttcaggctatggaagcgaaga

SEQ ID NO: 171133 - DNA, 1383 bp, Arabidopsis thaliana landsberg
catcgttttaaccaagcccttcttgcaaagcaggcgtggagaattttgcaggaaccagactgtcttttagccaaagtcatgaagagtcggtattttccctttgctgattttcttgaggttcctattgctcgcagaccatcctttggatggaggagtattctttttggtagagaattgctggaaaaagggatgaataagaaagtgggcaatggtaaatctatgttggtttggattgacccttggattttggatgaggagatgagagctccttacaggaggaactatttctttaatccgggtctgagagtttgtgacctgttggaccagagaagaagagattgggatgagcagattcttgatgaattattcttaccagaagatatcatcagaataaaaaagataaagcctgtggtgtcgcaggacgatttttatgtctggaaatttaacagaagtggagatttttctgttaaatctgcctactggttgaattctcaggacattgtttcggatgtgatgcaagatgcgatggctttaccctccacaaatgatttgaagtgtcaggtctgggaccttcaaactgatgctaagattaagattttcttatggaaggttttgtgtggtgcgatgccagtggcccaagccctgaataaaagggggatgagtgtggactccacttgtcaaatttgtgggtctgaggaggaaagtcttatgcatattttgtttgcatgtccctttgctcgacaagtctgggctatgtctgatttcccttctccccaatttggttttcatggaggctctgttttctcaaacattcaacatcttctagaaaataggaaaaacagagagtggccaaaggagctaagaaaaacgtttccttggattctatggagaatatggactaataggaacgctttgctctttgatgggaagcgcttttctgcttttgaaacgatggttaaaattcgagatgatgttttggaatggtttgaggctcaggtagtggaccagagtgagtcaaatggtatcgggttggttggtaatgagggagtgggcctggaaggtacaagtggggtggtgaagtggaaccctccttctatggggtggttaaagtgtaatgttggcatatcctggtcaaaaagaaatagattggcaggaggagcgtgggtcgttagagatagtgatgggaagactttactccatagtcgaagagcctttgttaatgtgagagatgaacatgaagcaaagttcttaacgattaagtggagccttgagagtatgaagactcatagattcaataaggttgtggttgcttttcaggcatacctctttcgttgggtttgtgaatcggaccagaagggcgtgcgccttacctttaagtttttg

SEQ ID NO: 171134 - DNA, 1046 bp, Arabidopsis thaliana landsberg
gttgtgactaaaatattgtttgtgcccgaagtgacttttatgaatgtgctaattgtgtttttcttggttgcagaacgcactaatctgattcctcgaaccgattccagaggacttcattttggcctatcacgcattatcagctaggaagtgcgactggttgaagcactttttccgagatcaaattcaccaagcgtttcgattgtttcacggtgttccttgcccttccagctctaagtattcagatcatcgcactcaattcttcgtggatatgcagtcaaccatacttactctgaggaaggtctacacgaagccgaaagaagataaagagaggcgtttggcggagagaaacgtcttaacgaagcggggctgatttcactgcgggtcgctcccgaggcgacccaggacgaggaagtcttcctgatgcaattgcgccggttgagacggtgcctaatgaagctcaggaagccgatccgccttcagttgcgcatgcgcccgaggcggtcgttgcgctgccagcgagcgataaagcggtgggtaaatgtgtttgggtggacgattcatcgtccaaaaagaaaaagaacaagaagaagaagacctcgggcatcgatgtggagaaagagctctcgatctttgaagatcgtgtcgcctcggtcaacctcctcgggggatgcgtgggtccttttctccctcctccagatactcttctagagtcggggaagtacgccgagacggggtctcacttcttgcgggtaatgtttccttattcatggtttgtcttgggtttcaatcctataatcctatcctttacttgtttaggtcgtcgcctcgatgaaccgactggtgcattcgtatgattcggccaggcgaatcaacatggaggtggttagcaagttggccgaggcggaatcccgggtgcaggacgccgagcgagagaagaataaagcactctccgaacccaccgcggaaattctggcgagggaggaggccgagagggcggccttcgtaaacaaggagaacgccataaagatggcagggggatcctctag

SEQ ID NO: 171135 - DNA, 1530 bp, Arabidopsis thaliana landsberg
aggtcatcattctattaacaatgatgaagaaatagaaaaacaagaaattcccaaacaaggacaagaagaaaaacatgaggaagaaggaaaagaagaggaagaaggaaaagaagagaaaaaagaaaaggtatgtatttttacaagagattttaacagcttataaatggggtttaaaagattcttagccgtttttaaaagataggcagtgttcaatacatatttacaaggaattttaaaaactttttaaaagtgatttacatgaataataactgtgtccaagcttgtatttgggaacttgtaattatttatacaggttgaatacagagatcatcattctacttgcaatgttgaagaaacagaaaaacaagagaatcccaaacaaggcgatgaagagatggaaagagaagaaggaaaagaagaaaaagtagaagaacatgatgaatataatgatgccgcagatcaagaagcgtatataaatttgtcagtcgatgaagataatgatcttgcacccacagagaaagaatctcaaaaaaaaaaaaaaaaacaaaggtttgctttccttaactttttaaaaagacatgataaaattgccaaaaaataaaaattttgttttgatattttggaaaacaggttccaaaagaagaaaacgtagaagaacatgatgaacataatgaaactgaagatcaagaagcgtatgtaattttgtcagatggtgaagataatgggactgcacccacagagaaagaatcacaacaacaaaatgaagaaacaacagaggtctgcattccttaactttttaaaaagacatgataaaattgtcaaaaaataaaaattttgttttgatgttttggtttacaggttccaaagagaccaagaaagataatgaagatgttagacaaacaccactctctaataaagaagaaaaaagcactcaggaacaaaacagtggtaagttgtttttacattcacagatgatttgccttgagaaacaacttctaactatttttttttgttttgtatcagttgaaactcctttgacgcaggtcattttgagtcaggagctaatggaagaaattgacctaaaagttaaaaaatgggcgaaaaacaaaggaattagagatttgctatcgtcacttgaagaagtaagttaaataacgtcatagtttggctgtcaaagattttaattctaatcattttggaatttttacatttcagattctttgacatgacagtaaatgacaaaaagtcgaaatttgggacatgtggaacgaggtgaaattcaaattagcattaaagaaagcaacgttactcattcatcctgacaaactgcctcgacctcttccagaagtgaaatacctggctgaacaaatctgcaatatattaatggttaatgttaaactctacttttgtataacgatatctctttaaaaacttgaatattattgttatgcaaaaaataacttacagcttgaattttatttgtaggtagagaaggacagagttaataagtcaaaaatggatttatatcat

SEQ ID NO: 171136 - DNA, 684 bp, Arabidopsis thaliana landsberg
actggtgtcattcgacacacacctagtgtcgatcgacactggactcaggctccattttttttccttgaatctccgcctattgcttacacaccacaagttacttttcttctgcctcgacagtcgaagaaggagattcctgagatgctttgcatgggtatcatggatgagattctacttcagttgcctccggttgatatagagaagttgtcaccccctcttcagagtgctatgatacgagatgatgctccagagaagcaggatgacaagacaaagataatggttgtctcagcacagatggagtgctaatattctaggacctgttgtcacaaaaaccaatgcatctctaccactacatgcacctccgaaaaggcaaaggtactcatctcctcctccaaaacctactgatttcatcaataagagtttaagatttcaaaaactgttttacagttcatcaagccacgagtttctcgtcgagggcttgttctttcatttgatgattgttcaggtaacaggagtagaccactcatacatttgtcctgccatgctgatattcctcacttccttggtagaccgcacaaaccgactgtttatacgccaccttggatgatgcgaggttctactaggaagtattgacttcctccatctgatccacctgatccccaaactccaccaaagtaaagctaa

SEQ ID NO: 171137 - DNA, 543 bp, Arabidopsis thaliana landsberg
caaacaaatatggctacttcaatcaaatctataaccctagctctcttgatattctcagtgttactaatctccttgtctctcggctccgtcacagcgacggagactacacgaaacgaggcggaggcacgacggatgtatgaaaggtggcttgttgagaatcggaagaactataatggtctcggagagaaagagagacgctttgagatcttcaaagacaacttgaagttcgtcgaagagcacagttccatcccgaatcggacttacgaagtcgggttgacccggttcgctgatttgactaacgatgagtttcgtgcgatttacttgaggagcaagatggagagaactagggttccggtgaagggagagaagtatttgtataaggttggagatagcttacctgatgctatcgattggagagctaaaggtgctgttaatccagtcaaagatcaaggatcctgtggtaagtccaattgcgtttgcgttttaatcgcttattttttggcgtttctattttttggttttgagctaatcagggattgtttt

SEQ ID NO: 171138 - DNA, 524 bp, Arabidopsis thaliana landsberg
  unsure (1)..(524): unsure at all n locations
atgaagaagaagcaatgttgctgtttaaggaagaagatgaaggaagaataagaactagtgttcctacacaactcatgaaactaaatcgaagccattggtggattcttgttttcataagcatcttctttctcatctctgctcaagccatttctgttctccttggtcggttttattacaatgaaggtggaaacagtaaatggatctctactcttgtccaaaccggtggctttccgattctttatctccctctttctctccttcctgcttcacaatcttcttcttcttcttcttcttcttcttcttctttcaagactctggtttggatttatctttctcttggttttgctattggtttagataattttttatactctgttggactgttgtatctctctgcttcaacttattcgattctatnnnnnnnnnnnnnnnnnnnnnnnngtgtcttctcttattacatcaatatctcagaaaaacacttgtttgattttctttttagtgtggaggctctctatttctgctgt

SEQ ID NO: 171139 - DNA, 1670 bp, Arabidopsis thaliana landsberg
acctaacactcactgaagctgaaattaagaattacacactactggaaatcgagaaaattatgctgtcaaatggagcaaccttagaagatattgatgagtttcctaagcctactagagatggtattgataattcaaatagactcattgttgaggagttaagatataaccgtgaatccaacctaaaagagaagcatgaagaatggaaacagatgctaactcttgagcagagaggcgtatacaatgagattacagaggcagtttttaataatttaggtggagtcttttttgtgtacggttttggaggtacagggaaaacttttatttggaaaactctgtctgctactattagatatagagatcagattgttcttaacgtcgcctccagtggcattgcctctttgttgttagaaggtggtcggactgcacattcaaggtttggtattccattgaatcctgatgagttctctgtatgtaagataaaaccaaagtctgatttggcaaatttggttaaagaagcgtctttagttatatgggatgaagcaccaatgatgagcaggttttgttttgaagctttagataaatctttctccgacattataaaaaacacagacaacacggtttttggtggaaaggttgttgtttttggtggtgatttcagacaggtgtttccagtaattaatggtgcagggagagcagaaatagtaatgtcatcgcttaatgcttcgtatctttgggatcactgcaaggtgttaaagttgactaagaacatgagactactagcaaacaatttgagtgaaactgaagctaaagaaattcaagagttttctgattggttattggctgttggtgatggtcggataaatgagcctaacgacggtgtggctataatagatattccagaagatttgttgattaccaacgcagacaagccaatagaatcgatcaccaatgaattttatggagatcctcaaatcctacaagaaatcactgatcccaaattctttcaaggcagagctatattagcaccaaagaatgaggacgtaaacacaatcaatgagtatttgctagagcagttgcatgttttactcttcagtttaaagtttagaatctttatatgcaatatattttttattgaatatacaactgacatacattctatttgttttttttccagctgaggaaagaatttatctatctgctgataccatagatcctacagattctaattcacttaacaatcctgttatcactccagattttttaaacagtatcaagttaccaggtttgcctaaccattctttgcgtttaaaggtcggtgctcctattatgttactacgaaatttggatcctaaaggtggtctatgcaatggcactaggcttcagattatgcagctatgtactcagattgttgaagctaaagttattacaggagacagaattggtaacatagttttgattcctacaatgaatcttacacctacagacactaaacttctattcaagatgcgtagaagacagtttccgctctctgttgtattcgctatgactataaataagagtcaatgtccatctctagaacatgtaggactttacttggccaaaccagtgttcttccatgggcagctttatggtggcttgtgtaggggtacccctaaaaaaggtttttaaat

SEQ ID NO: 171140 - DNA, 1133 bp, Arabidopsis thaliana landsberg
  unsure (1)..(1133): unsure at all n locations
ttatagagaaaactgtcgggatcaccaggagagattggtttgtaaacctcgacgatttgttatttgcgtacagaacaactttcaagaaccccattggtacaaccccgttcaatcttctttatgggaaatcttgtcacttacctgttgaactggagtacaaagctatgtaggcaatgaaacttttaaattttgacatcaagactgctgaagagaaaagattgnnnnnnnnnnnnnnnnnnnnnnnnnttcgtctagaagcatacgagagctctaaaatttacaaggaaaggaccaagtcgtttcatgacacgaaaataacttcaaaatattttagagtagaagatcaagtgttgctattcaattctcgcttgaagctttttccaggaaaactcatgtctaggtggtctggccccttcaatgttagtgcagtaagaccatatggagctatcacgttgtctggaaaaggtgaagacttcaaagttaacgaccaaagactaaagaaatatatggcagaccaaacaattccagaaggaacttctgttccactggaagagccacccaacccccaatgagtatgaggagtcaagctagagactctaaacaagctcacttgggaggaaattccatgactatctttgtacatatctttatatttccttattgtttttgatgcatttggttagtgtcttcaggagataagtataaagagctgagtgaagtggattttggctatgagtgtacagctgtatactcgaccacatagcaatgaaaaatactcgaccatgttttatcttatccacgccaagagatcactcgaccgcggtgctggccgcagtagaagaagagaggtctagtatcctcagagcagtgttggccgtcacaaagctgatgaggtcgagtacccacctgctggagctgatacagaacatggcggttcgtctatggcccgggagcaatcacaggcagccattgacgagcaactacgttcattcttcgactgaggtaagcgcctcacttcaccattgtattatatcatctgttgtgatttgtttcttcattttttgtttctgttattggatttgtcctgagtactctcttccaagtttattcgcacagtggactgtgtgatttaa

SEQ ID NO: 171141 - DNA, 1182 bp, Arabidopsis thaliana landsberg
atcgctattgcctacgtagacaacgaacttggcatggacattttattgtacatccaaacaaccaagtaagctcatcctcttcacatttatgtcgaaaatcaaactatgaactcctttgatgtaatagaaaaaatttccttggatgatttctgcagatcaccaatagctaaaatcagtccgaccaagacgttcgttggccgacctttagcgaccaaggtcgctagattttcttctagaggtcccaattcactatctcctgccattctcaaggtgggatactttttactctctcttacattcaaattgtttagcattttctaaatgttactttttaaatttaagtacagccggatatagcagcaccaggttcaggtatactcgcagccgtaccaacagggggaggatacgatttcatgtcaggaacatcaatgtctacacctgtcgtgtcaggaatagtcgcacttcttagaaaaaaacgccccgactggtctcctgcagcgatccgatctgctctcgtcacaaccggtaaatatacataagttttattcacgcaaaaaacttgtttcttgctccacaagaaacacccgggaataactgttaaccattgcagcgttacaaaccgacccatcgggagagcctatcgcagccgagggttccccacgcaaactcgccgacccgtttgactatggaggcggccttgtaaacccggtgaaagtagcggacccaggacttgtttacgacatgggccacgatgagtatgttcattacttgtgctccgcaggctatgacaacacatccatctcaaaactacttggagaaatctacacttgccctaccccaattccatcaatgcttgatgtcaacatgccttccatcacaatcccatatcttagtgaagagatcacaataacaagaactgtgaccaatgttgggccggttggttcggtttacaaagctgtgatccaagcgcctcaaggtattaaccttcaggttagtcctgagactcttgaattcggttccaacactaacaagactacgttcacggtgaaagtctccacgactcatagagcgaatactgattatctctttgggagcttgacttgggccgacaatgaaggccataatgtaagaatccctctttctgtgagaacaagagttttcaacttcaagatctaacaaaat

SEQ ID NO: 171142 - DNA, 956 bp, Arabidopsis thaliana landsberg; identical to SEQ ID NO: 62335

SEQ ID NO: 171143 - DNA, 469 bp, Arabidopsis thaliana landsberg; identical to SEQ ID NO: 71928

SEQ ID NO: 171144 - DNA, 2200 bp, Arabidopsis thaliana landsberg
aggtaggcacacaaactctttatttatttttaggatctcgaaagtggaatccatttacgtaattagagtaagagctcaaatttttattctaccataggtgctcgtcgatccagatgttccggctataaaccaaaatgaactgaaaagtgtgcttatttcggctcttgcatcacgtggaaaatgggcagatgccttgcatatatatgaagaaatgaggaaagccgaatgccacgtagacccgaaatcgattatatctcttatagtaagtattacactttcagccacatttttcttagtatcatatattagttgattgataatcagtgaattgattatctctgtaggaatactctgattcaaagggagagttaagtacgctagttcaactggctgatgacctacaagatgatactagttggatcgacggtttcttcagaatgattttgttcgctgtccgcaataaaaagtcaaggtagagtaaatcacccatgctctcgaattagttcttgtctacccaatgttgaatgtctcattcttgatttgctctttttgttgtatagcgatattgttgatctgctgaaacggaacaaggtccggttgttaaagaaaggcatacctgtggaagctcattttgacgaggtttgattttgtttttctcatgggcttctttctggaaacttgttcatttactcatctaagataaccttgagatgtctccaatatgtgcaactttcacattccatgttcttggatcattgtggggtttctcaacgaagaagtttgaagtaaagcactaagcaagaacatttaattagaacagctatcaagctcgagtgatcgagtctgtaactagtagctatgttctcttttactgaattagccttcagtaatttaagcctctcagtgatatgctgctttggatcaggtgttttgggcaatcgcagagacagagccatccaaagtgcatctaggaatggatttgctaagatttatgaaagatgagctcgggtttgttccttcaagaaaatgtctagattttctcttacatgcatgtcttaatgccaaggacctggagcacggtctattggtgtggaaagagtaccaatctgcagcattcccttgcaacgtcctgagctttctgaggtaagccactcctgttctctttgctcaagaactatagatttaaggaacagaaagaaaagatatatcttgaaattacataacaaaagaccaattttgtactatcattggcacaaaaagagttacaagtttaccactagggttttggtttacgggttcgattagtttcaagaggatgcagtcaattttgataactagatcatcagtttccaaaagatcaagaggttttcggtatatcattggttcttgtttatggtttggcaggatgtatcaggttctactagctgcaagggattcagaaggtgccaaggcattgatatcaaaaattccaatagatgataaagatgtacaacatatcatcgaagaagtcagtctgcattttctcaagcacccaacaagaagaaacctaaaaagaatatgagtgtttcatcaacaaactaccgtaaaacctctataagttaatattgtttgggaccgagaaaattaattaatttatggataaattaataattatcaatttataaagagattttacaaattttataatttcttacaaaaatttaattttaaaagtgatcttttctttataatcaataatctttcttaatccgattataagtagaaaacaaaaattgtattttttttttttcacatagcaaaagtattagaattgaactttacaaaaaaataataaaaattaaagaaaaacaatagtagagtcatatttcactaaatattttacatataatatttatataaatatatatattggtaaatttatacaattgttaatttataatattgatgggactggctaaagttttcttttcatcctaaagcttcatcacgcagacaaaagattgttggactctatacaagtcttgtgagagagcgaaagaaggatgaagagttaggatatcttcacatgcttgagtacaaatacacaatcaagatccggttttggaccacaacttatggactggtcatttcttttcagcaacttggattgaatgtgacagataccagagttcatagtaatttgaccatcatagtaatttga

SEQ ID NO: 171145 - DNA, 538 bp, Arabidopsis thaliana landsberg; identical to SEQ ID NO: 80412
  unsure (1)..(538): unsure at all n locations

SEQ ID NO: 171146 - DNA, 733 bp, Arabidopsis thaliana landsberg
gtgattatgaagacaaagattttgatgtctatcgtccatatgatgtttttggtaatgttacaagcctggtttctgggatacgcaaagttaagacccttcacctgtctcctgattctcttgaggtcagttctgttctgctacagctgactgatgggtggttttatcggttttgtatcatgtctatatgtgtttactggttgtgattataaaccaggcgtttttcttctgctgcaatcacatgccggtcttcaacaacctccgtaatctatctcttgagagcgacgaagaaaaaggatggcaagcattgcctcttctgctcaataattctctaaatcttcatactctatctatcaaagtatgacatgtttttgagaaattaatacacaatgttctttttggctcttatgtaaaagaagtttgtctgatttgttgttatggtttttagggtcttgtgcacagagttactagtagatgtggagacgcatgcgcctgcattagcgagaggaagacaggaatgtgttgtttatcggcatgtcgaatcaaggtgctagagattacagggtatggaggaagttttatagagctgaaacaaatgaggcattttttgggaaaactgcaatgtcttgaaactgtgagaattggtgttgaaagggacggcaacaacgagcacctgcgagccaatctaagctctcttcatagagcttcatcagagtgcaacatccagttcatctga

SEQ ID NO: 171147 - DNA, 2941 bp, Arabidopsis thaliana landsberg
  unsure (1)..(2941): unsure at all n locations
gacgtttgggatgaatgcgttgtctggccctattcctaaagaaatcggtttgcttacagatttaagattactgtaagcttaggctgcttcttcattgtttaaatatgatagtgtcttcacattgcttctggaggattctgacggttccttatacactatatatatttctgcagtagtattagttcaaataacttttcgggttctataccagatgagattgggagatgtacaaaactacaacagatgtgagttttctgtcaatctataagtgtttatgtctttatatccttggttataatttagatatgattaaatattaacctttgaaatcatttagcgatcaccgacctcaaaattctagcgcagttgatgactgatgggaaatttcttccatctattgcagatacatagatagttcgggactcagcgggggattacctgtatcatttgctaatcttgtggagctggaacaagcgtaagacatattgaagtcgaatataagctttattgtttaactttagttgcatcttatttttgtaatctatttattactttacaatttagtcttttttgccgtgatgtgattgtttccttaatgtggtaccagttggattgcggatatggaacttacaggtcagataccagactttataggagattggaccaaacttactaccttgtaagaagttttcatttttacgggacttataataggctggttccattcatcttgttttaatatagtctgtattaattttcctcttagtagaacactcttctttatgtttaaatttgggatttaacgattggtacatgttttactgcaggagaattattggaactggtctgagtggtccgataccggcgtcattttcaaacttaacttcgttgacagaattgtatgtgttgcattggtatcataatcattatcgttttactgttgctcttctctttccctttcctcacatattcatattcgatatgtaggaggcttggtgatatatccagtgaaagctcttctcttgatgtcatcaaagacatgaaatctcttagtgtattgtaaggcagctttgattcaacttccgctccaatttatgatcagatttttgtagtgttaaactgtttctctctcctccgtgtatttaacatttatgatatatgtcgcagagttttgaggaacagcaatctcactgggacaatacagtctactattggagaacactcaagtttgagacaagtgtaagtatatatgtcaatctgtttcttcaaatgctctgaaagctgtttcagggtctttccctgtaaaaaatgtgagatcatcactgtcaaaagtcaccgtgagaatacgaaatcatcccatattgatgatttgtaaaagtccccgagaaaatacaaaacaatcttaaattgttgttaattgctgatcgtctaaacaggaatggtttaatgttataacatgtaatgcatgtctgttagcaaacaagtgtaagtaactcgtgtctggtttccagtgatttaagcttcaacaaactacatggaccaattccggcttcacttttcaacttaagtcagcttactcacttgtaagatgatgtgttttctgcttctcttgggtcttaataagttaatatacaactacatgggtagtatttttattaaaaatgttgtcttttcatattaggtttctgggaaacaacacgttgaatggctcctttcccactcaaaagacgcagtctctgagaaatgtgtgagtaacaaaattctttataattgtttcatcctgatgtagactcaagtttcatactgacgttgaaataggttccactcttggttacgcggataacttcgccagataatcaggaaaccattttgggacatattacatattatgtgtattcctaattattgttcttttatgctcacagagatgtgtcgtacaatgatttgtctggaagtcttccttcatttgtcagcttaccaagcttgaaacggtaagtggacaaaacaccatatccaacctatattcacagaaaatttctcatatgtatattcactaggcttcttcatatccagcatgatagttattataatctgtattaaacaaaactgtatgatatttctgcagcaacctagttgctaacaacttcacattagaaggtcttgacaacaggtgattatcttaaatatgttcttgttggtgattgaaacgcctatatgtttctcttttctttctttttattttcctccaaaaggatgcaagatttaatgaatctttctttaatcatttttctttctgtaaaaagggttttaccaggactgaactgcctgcagaagaacttcccatgcaatcgagggaaaggaatatgtaagtgtaacagcaatatccgcttcttgagcaaatgttggaaaaaaatccgctaaattttttctctttacactggtgtctagattctgacttctcaatcaactgcggaggcccagagataagatctgtaactgaagcagtatttgagagggaggacgaggatcttggaccagcttcatttgtcgtgagtgctggtcagagatgggcagccagtagtgtaggactttttgccggaagtagcaacaatatatacatagctacttcacaatcacaatttgtcaacactttggactcagagctatttcagtcagcaagactttctgcatcttccctaaggtattatgggttgggtctagaaaatggaggctataccgtcacacttcagtttgctgaaatacaaattctaggttctacttccaacacttggagaggtttaggaagacgacgttttgacatttatgtccaggtatgcactacttgaccgagctttctgctttacaaattaaattttggtgttattataagcaaccgcctttttaattttaacaattcccagtntaggtcactttttccagg

SEQ ID NO: 171148 - DNA, 512 bp, Arabidopsis thaliana landsberg; identical to SEQ ID NO: 67500
  unsure (1)..(512): unsure at all n locations

SEQ ID NO: 171149 - DNA, 1031 bp, Arabidopsis thaliana landsberg
  unsure (1)..(1031): unsure at all n locations
atcaggtccatgaaatatcataaagttgcacttttcttatgctggttgaagcacatgtgtgctagccattgaagccaaagaaatgtaaaatagtgagatcttataatcagcttcggaaattgtttatcagcgttgtgtcacatatgctgaagctttgtgtacaaaaatattggtcgtttgctggatgtgcagtgatgctaaatgtcccgtctcttctgcaacaaacgaagacagaagaaaccgtgctgantattgccgcttctttccaggtacaaatttatctccggttttaatgttctagtgaaatgctgatttctaaacattttcagtttgtatgaaccagcgagtagctgtcttgcatctggaagaaaaatgtgagcgagcaatagactgggcattagaactagagccttctattaaacatatggtgaggtttagaacaagaaaaagaaacctctgttttgcttgacaaatgcttctagacttattattgactaagcttcaggtaatctctggtggtgttgcttcaaacaagtatgtacgactccgacttaataacattgtcgaaaacaaaaacctgaaacttgtttgccctcctcctagcctctgcacagacaatggtaaatagagtttgaaattctcctactgatcaaattagagacacagagaatagaaactaacaagaattcattagtctcaccaggagtaatggtggcttggactggtctcgagcattttcgtgtaggaagatatgatccacctccacctgcaactgaacctgaggattatgtggtactttttcttaacaaaactcggtacttgtaaagattctattgtttgaaaaactgataacttggagattgatgttttgttggttatgaatttagtatgatcttcgaccgaggtggcctcttggcgaggagtatgcgaaaggaagaagcgaagctcgttctatgagaactgcacggatccatccgtcacttacttcaatcattagagcagattctcttcaacaacaaacacaaacgtag

SEQ ID NO: 171150 - DNA, 543 bp, Arabidopsis thaliana landsberg
atgaacgtagtaaaaggagaacaagaatttttcaaaggaatcgggcagataaaatatgaggggcctgagagtgataacctgctggcttttcgctggtatgatgaaaataaaattgtgggcggcaaggccatgaaggagcatttgccctttgcctgtgcttactggcattctttctgcaacacaggttccgatccgttcggagggcccacgcatgaattcccatggaatgaaaaacaggatgcggtggagagagccaaagacaaaatggatgctgcttttgaattcatcaccaagatgggcatcccgttttattgtttccacgatgtggacctggtggactatggcaacgatatagcagaaaatgaccggcgcctgcaggcgatggtggagtatgcggggcaaaagcagcaggaaagcggtgtaaaattgctctggggaacggctaatttatttacgcataaaagatacatgaacggggcggccaccaatcctgattttcaggtgcttacccatgcggcggcgcaggtcaaagcggccctggat

SEQ ID NO: 171151 - DNA, 2049 bp, Arabidopsis thaliana landsberg
tcccaagggcgtcaaatccccacggaaggagttaaggttactgcactgggaccattttccattgttatccttaccacaagattttaacactagaaatcttgttatactcaacatgtgttacagtaaacttcagagactttgggaaggaaccaaggtaagaaagtctatatgcatttgaaaaccaattactattttgcgtctctgttgttatttttttaacaatttgtttttccaggaacttgggatgctgaagaggatcatgctttgtcattcacaacagctagttggtattcaagaactccaaattgctctaaatatggaggtaattgatctccaaggttgtgcaagactacaaagatttctagcaacaggtcatttccagcatcttcgggtgataaatctctctggttgcataaagatcaaaagtttcccagaggttccacctaatattgaggagctgtatctcaaacaaactggcataagatcaataccaactgtgaccttctctccactagataactcatttatttatgatcataaagatcacaaattcttgaatcgggaggtctcgtctgattcgcaaagtctgtcaatcatggtttatctagacaacctcaaagttcttgatctttctcaatgcttagagcttgaggatattcagggtataccaaaaaacctaagaaagttatatcttggtggtacagccataaaagaactgccttcgctcatgcatctttctgaactggttgtattagatttggagaactgcaaacgccttcacaagttaccaatgggaataggtaacttgagttctcttgcggtgttaaatctctctggatgctcagaacttgaggatattcaaggtatcccaagaaacttggaagagttatatcttgctggcaccgctatacaggaagtgacatcgttaatcaagcatctctcagaacttgtagttttagatttacagaattgcaaaaggcttaacatcttccaatggagattagtaacttaaaatctcttgtcacacttaagctaacggatccatctgggatgtccataagagaagtatcaacatcaattatccagaatggtatatcagaaattggcatcagtaatttgaattatcttctcttgactttcaatgagaatgcagagcagcgtagagaatatttgcctcgaccaaggctgccatcttcaagtttacatggcttggtcccaagattttatgccctagtatctttatccctcttcaatgcatccttgatgcatataccggaagagatttgttccttgccttcagtagtgctgttggatcttggtcggaatggtttcagcaaaatccctgaaagcataaagcagttatctaaactacatagccttagattaagacattgtagaaacctcatattgcttccggcgcttccccaaagcctgaaactgttgaacgtgcatggttgtgtgtctctagagtcagtttcttggggatttgagcagtttcctagtcattacaccttcagcgattgcttcaataagtctccaaaagtggctagaaaacgagttgtaaaaggcctggctaaagtagcaagcattggcaacgaacatcagcaggtaactctctcgttctcatgtcccttctttctcactcatacatactttagcgtatatgtaattttcctttttcttgttgggaccaggaactcatcaaagcacttgcattcagcatttgcgggcctgcaggagcagatcaggcaacctcttataatttgcgggcaggttcatttgcaacgatagagataactccttccctgcgaaagacactcttggggtttgctatcttcgttgtagtatcgttttcggatgatagtcacaacaacgctgggcttggcgttaggtgcgtaagcagatggaagacaaagaaaagggtggtcgctggtaaagcagagaaagtgtttaggtgttgggctccgagagaagctcctgaggttcaaaggggatcacatgtttgtgttttatgaggatgccgaaatgcatcgaggtggtggtgaggga

SEQ ID NO: 171152 - DNA, 275 bp, Arabidopsis thaliana landsberg
cacgacgaaccctagccttacagagaagcatgttccttcctgcgattaaggctatctccggcgacgagaaagctccgctgaaggagaaaaagaactacgcgttgaagaaatcaactaccgtaatccagaaatcgcactgtttccagaattcttggacattttggctcgataatacttcctccaaatcgaatcaagtcatatgcggaagctctctgagatccttgcatacactcggaactatcgcagagttctggaggtgagagttatgtgaccgt

SEQ ID NO: 171153 - DNA, 774 bp, Arabidopsis thaliana landsberg
gtgggtttatcaatccaagctttccaaccaatgcaatcaccggtaagtctacccaagattacatcatatatcactgtaggatataacaagcagcatctaatgtggttggaattctttgcatcataaggtacaaaatctaggcacaaggttatgcgtggtcagtttctctaaagtagatccatcaatgtggttcgatgacactcatcatatcgcatgagtatgcacatttcttcagtagagccatccctcccaagcaaaataactgacctatctctcccacagatatatgtcggtccatcaaatacgctgttgattgggcaaactccatcccctctcaagtatgaattccacattgctcatcatatgaacgataaatcggataccattcatgttcctaggacgtttccttgtcacaggctgaaacaattggaaaaagaggacagggttatatggaaagctttagcatgaaccgggtttatgactatatgtttcatctcatcactgagtactcgaaacttcagaagttcaagccagagaagccggcttccgctaatgaagtctgtgcaggatcattgctctgcattgcagaacaaaaagagcgggaactactcgaaagatccagagtcgtaccttctctggatcaaccatgtaaacttccagtagaagataggaataggcttgagtggttgatccaacagaagaataaaacaatcgaaaatgttagatgcatggagatgacaagaacacagaggggttctaaatgaattgtctttt

SEQ ID NO: 171154 - DNA, 916 bp, Arabidopsis thaliana landsberg
attttgtaggaagacatgcaatgaaaacattgttaagatctatctggaagagaaggcaggtttgaagactttatttagtgttgagaaacaaagggtttcattgactacagacatatggacgtgtcccactacttcctacagcgacatggtgatcacaggtcattggattaatactgattgagaaatgcagaagagaatcctgagttttaaggtgatcacagatcataagggagacaccatagcaggtcagttgctggattgtttagaagattggggaattgagagggtgtttacagttacagttgataatgcaaggaacaataacacggctttggatgcttttaaggatgggttaaggctgaaaggagtacacgcattagttcaagatggtgagttcttgcacatgcgctgttgtgcacacatcctcaatctaattgttaaagatggtttgaagaaggcaaagccataagttgttgttgttaggaatgcagtgaagtatgtccggtcaaacttcagtatgcttaaatccttttccttgaggtgtgagacaggaaagttgtgtagaggcagtttgcaattagatgttgtcacacggtggaacttaacatatctgatgttgatttctactttaaagctaagagtagcttttgggaagatggaagctgaggacaagctgtactatgagtattttgaagaatatgaggatgagaagaagatgactaaaagagttggaccaccatctacttctgactgggatacaattgcaaggttggtcaactttatgaaaattttctacaagtgtactttaactttctcttcttcacagactgtgtcttcagctatttgttacaataaaaattgtggacattgagccggatctcattactaaatgtggaaatgcagacaaagcgatcag

SEQ ID NO: 171155 - DNA, 285 bp, Arabidopsis thaliana landsberg
gggcatcttttgactcaattgtatcttatggcattttgaatttaaggttggcaagagtttgcaccgggggatggggtacacttaggagcagcggcatcagaaatccctcagccccttttggatcagctaaaacccggtggacgaatggtgattccactaggaacctattttcaagagctcaaggtaatcgacaaaaacgaggatggttcaatcaaggtacataccgaaacttcagtccggtatgtgcccctcactagccgtgtcgaacagttaggaggattttga

SEQ ID NO: 171156 - DNA, 592 bp, Arabidopsis thaliana landsberg
  unsure (1)..(592): unsure at all n locations
attttttcatagatactgccatcgaaaatgccaccagaggactcgcncagtttcataannnnnnnnnnnnnnnnnnnnnnnnnnnnnnnnaaagagacaattcggtaatccgtacaggtcttcgatggtttctgttttttcctcaactcctcggacttttgatctacaacttcctcgactttttcggtatcaaagatttggttgaagagataagattcacggtcagtgatcgcctcaccagagaactatgggagttcatattcacagaggtgcaacaaaaacaccgatttgctgaagaccaagaaagtgcaaagggtatatcttcagctagaggaaactggactctacttgaaacgtcaagcaaaaagaaagaagacggaacagaccatacgaaacttctgcagtacgtgacagagaaggactacgatcagagcattctactgtggcacatcgccacagaactcttataccaaaagccaatagacaaagaagtcacagagaaagaagaacacagtaccaaccgagagaaagaagaacacagaaataacagagagaaagaagaacacagtaaccgagagttcagcaagatcct

SEQ ID NO: 171157 - DNA, 1037 bp, Arabidopsis thaliana landsberg
agttttctattcttctcaatcttatctcgcttcgaagtggatcaatgtgagtttccatgatcgtttttgatccttctcttacttgtagttgatgatcacgtttaataattgtctttttcttttgtagatgtcaatgacggaagaaaccaagacgacgaagctcgaatcggcgggagattcgtccgatgtagacaacgggaactgtagtagcagtggaagtggaggtgatacgaagaagacatgcgttgattgcggaacaagcaggactcctctttggcgtggtggacctgctggccctaaagtaaggatcatgatctctctctaccattttcttttaaacccttaaaaatccaagctttaaggtctcatgtgttagatctagtcaaataggtacttgaatccacttaaaatgtaggttgatcttgtgtgcttagctctgttgcttgtgggttttgtctcattgatgtgatcatgtgtatacatagtctaggtatgcgaggtttgtgtcaatctgtggttgatatttaaatttgttatgtgatctctatgttttgttttgattctgtgtttgaagccttattactaattgatcaggttaagattattgttacactgtttttatgatgccttttttactaagagatggttatgtctctttaattttagatctgtttgatgattgttcactatttgttctctggtctgatcatggattgactttgtttgcagtcattgtgcaatgcgtgtggtatcaagagcagaaagaagagacaagcagctcttggaattagacaagatgatattaaaatcaagagcaaaagtaataacaatcttggtcttgagagccgaaatgtcaagaccggaaaaggcgaaccagttaatgttaagattgccaaatgtgaaccgggaaatgtcaagattgccaaaggtgaaccaggaaatgtcaagaacaaaatcaagagagatcctgagaattccagtagcagcaataataacaagaagaacgtgaaaagggttggtagatttttgatttgggt

SEQ ID NO: 171158 - DNA, 1981 bp, Arabidopsis thaliana landsberg
aacaaaacgaattcaaagggttaagagggtaggagctaaaattagcaaacactacataaaggcaattgaaatcgaaatcacaaacattaaggtaagaacgtgagaggagtcgagttatgaactcttttcttaaccctttgaatcacccgtagtgtgacggtttctgtgtgattcaaggatcccaggatataacctttataaacttatttcgcatcactcgaaacgcagctctagcgaacatagttactacgatactctcgagacttacttttgagagagagagattgttagagcttttgctgtttgtgtgtaacgatcaaatacttcactatgtctctcaaagacttgaagagttggtttttatagaaatttagattactaggttttgaatttgtttttcaacaaactcaaccgacatcaatcggaagtctaggagtagtggacttgactctcaacgactcctattctcatggtctttgaagaagcgaccagcgagtctctaggaacttgaaacagaacgacttgttttgtcacgttcactatttgacccgacatttccggagctccaccacgaactggacctaaccattaaggcccatttcttattcacacaacttgattatactaaacccaattgggattagtaaaaaatcagcccaacaacttgcgtatcgattttacattgaagccaccaaagacgagttcccaaagcaagaaatcgatggtagtatgttgaaaatatggaccaaacggtatatacatataaccattcaatttcctatgtatctcacggattgcaagttttctgaatatttcaatttgcagcaatactttgagaacagattgaggtatcttgcagtgcagaagtaaaagggacagaatccattgccaagtatactacgttaagcaaagaagagtctgttgaagatgacgaagtttctctagccggtatgatacacccatccatgaagtttgttgtactgaaaaaaaagtttatatgttcaatgtttttttgaattttggtaggacgaataatgagcaagagatcttcctctgacaagcttttcttctatgatctacataatcgtggttctaagatccaagttatgactgatgcgaggtgactaattggttttaattagagagatagttgttcttttttgttttttatatatgtagtttaactagatttttttttcccttgtgatgcctcagtacttcagaattagatgaagctgagtttgcgaggttccatgctaatgttaagcgtggagatatcgtcggtgtcactggatttccaggttcctaaagcctctttgtttatatattttctcattacggcatattattattctgtatctttatctgaacacatggttcaaatttctccaggaaaaactaagaagggagagctaagtatcttcccacgatcgttcactgtgttgtctcattgcctccacatgttaccgactaaggaaaggcctcctcgtggaactgctgaagctccccttactcttaaggtttggagaatacggtgtggctaatgtgtaaacctttttgactcgtctcatttacactaacctttttatcatttcctctgcagaaaactgaaacttgggttccaggaaagcctagaaatccaaatacttatattatttaagatcaggtaccattaaactttacccaatattctttagatacttaattccatcagtctttttcttctatttgggcggtaatatatatgatatgtaccttctttttttttcattttgtgttaggaaactcgttatcgccagcgtaccttgacttgatactgcacaatgagatctaccagattttcttgaccagaaagaatgcaatcaattacattaaaagataccttgacgatcttgatttcttggaggtacaataatgattctctcaagcgaaactttccataccttcagtttttcttcagtttgtttgcgaattgatcaag

SEQ ID NO: 171159 - DNA, 637 bp, Arabidopsis thaliana landsberg
gttattatcagttctgtaaagcaaaatgaaaaccgaaacttatttggttgttacagcggttacatggctcccgagtatgcaatgagtggcgaattctcggtaaaaaccgatgtatttagcttcggtgtactagtcctggagattattaaaggtaagaaaaacaactggtctccagaagaagacagctcattattcctccttagctatgtaagtgaataaaactcttgttttgtttttttgactctagactttgagtttggggttgtaattgaggactcatttattgtcttcatttaaagtcatatattgtcttttatacgtataggtatggaagagctggagagaaggggaagtgttaaacattgtggatccaagtttcgttgaaacaataggtgtcagtgatgaaatcatgaaatgcattcacattggtttgttgtgtgttcaggataatgcagagagtagaccaacaatggcttctgttgttgtaatgctcaatgcaaattctttcactttaccgagaccctcgcaacccgctttttacaccggagatggagaatcaattctaagatacaccaatcagattaatcatattgcgtctttgaatgatgttacaattaccgagttcgatgctcgttaa

SEQ ID NO: 171160 - DNA, 1807 bp, Arabidopsis thaliana landsberg
tccctctggccattcttcatattgtcttgacccaaggtgtctgattcttgttaggtttcacattaattcttttaataaactatgtcacatccttagttcattgtaggccttcacatgctttttcacttaccctaaaactaaaactttctctgacgaggctagtttagaatctggaatgattgagaaactaaatcattgtatcaaaaccttaaaatagattaacttaaaattgaattgatagtattagttgtttggttccccttggcaaacttttatttattgtattgaaaccgtggaagtaatgggtggtgagaaagtggtcatgcttgtatttttcttactttatatcttgtgaactgaaggagtttaatggggttcaggtctggagtggcatcctcgtatcccaattacgcaaaatcacttaatttatgacgacttgcctcacattattatggatccctatgaagaatgcaggggtcctccacggttacacttgcttgataagtatgcctcaagctaaaatatttatatctgatatgtatgtactatgtactataatccatcatgttatactgattctttgctttattttctcagatttgatataaatggtcctggatcttgcttgaagcgatactcagatcctacttatttcagaagagcatcaagcaacctgagtcaaggaaacaagaagttccaaaaagataaaaagcattgtaaaatgaaggtgtggttctcagattaaattggtaaaccattttctgtagaattctcttttacttgacacatatatatctgttttctggcatggacagaagaaaaaaacttcgtcaaggagtcgagatatgtcacgtttggcctccttggctaaccagaatgccaggtaaattatagatattgttggcatatttaagtttccgtgcacctaaagaataattaactcagacatagttcactccaggaagacatttgcttcatttagcttcagtggacaaacctcttctaccaaaaccacctcaaccagtgacatggaaaaaagatatgattttcaagatcatcattctcgctcttttgagtccagaagtggttcaggctacaatgaatgcctttcaactgcaacttcttcactgaagactggagaaagaccgaaaggggtgttcgtttcatccagcttgacaccaggctcttgcactattgcttcagtcctttctgaatgtgaaaccgaagatgctcatgataatttccagtttagtccttctcaagggcaagctgctcgtggctcttcttgcgttagttgggatgagaaagcagagatagtggaatctcttggtctgcagacagatgaagcttctgaaatggtggaggcgaactctgttgtagatactctagatgagaaaccaagctatggggaagggataggtggagttgatttccattctaaggacaatgaaaatgataaatcagaatcaggactacgaaaacgtgctgggattgatgaggtaagagagataaaaaatggtcgggagattgtgggagaaccgagggatagtgaacaagagactgaaagcgaaggggagtgttttgttgatgcgcttaatactatcgaatcagaatctgaaaacaatcaagggcttcaaactagtcaagtgagcagttcctgtggtgttgcagatgagaggttggaaaagtcagtgtgtgagcaagaaacagagcagaattcatacagtgtcgaagattcttgcagatcaatggatgggcttatggccaacagttttaaaaatgaagagaatgcatggtcagaagatac

SEQ ID NO: 171161 - DNA, 540 bp, Arabidopsis thaliana landsberg
actggatcttggatccaaataccataccatttcagatgtccaatctcactcgaacttatgcaagacccagtcaccgtctgcaccggccaaacctacgaccgagccagcatcgagtcatgggtctccatcggtaacaacacaacatgtccagtcacacgagctcctctctccgacttcacactcatccctaaccacactctccgtcgtctcatccaagaatggtgcgtcgtaaccgctccaatggagtcgaacgtatccctactcctaaacaaccagctgatccaacctctgttcgtgctcttctcagtcaagcctctgctataacaggaacccacgtctctgttcgttcacgcgccgccgctctccgccgtttacgtggtttcgctcgtgattctgataaaaatcgcgttttgatcgcagctcataacgctacagagattttgattaagattctgttctctgaaacgacgtcgtcggagttagtctctgagtctttagctctacttgttatgttaccgataacggagccgaaccagtttg

SEQ ID NO: 171162 - DNA, 1184 bp, Arabidopsis thaliana landsberg; identical to SEQ ID NO: 27823
  unsure (1)..(1184): unsure at all n locations

SEQ ID NO: 171163 - DNA, 2279 bp, Arabidopsis thaliana landsberg; identical to SEQ ID NO: 17739
  unsure (1)..(2279): unsure at all n locations

SEQ ID NO: 171164 - DNA, 456 bp, Arabidopsis thaliana landsberg
ctcaaggccaaagccgaaattcgcgtcgccagcctgttcaagagcaccgcgccgaaatttctggaaatggtggtcgtccatgaactcgctcacctgcgcgagttcgatcacaacaaggcgttctaccagctgtgccgacacatgctgccggactacgaccagatcgaattcgatctgcgcctgctgttgttgcaacgtgaactggaatcggcggaagcaagcgagagctcctgaattcggtcgtagccggcatcagcgtcgctgtactttccccgtcttgatcgccaccacgccgtcaccgttcaactcggtcgcaaagccagcgcgttgcaaacgcgtcgccacttcgttcggcacatcacggcggctggtcagtttgttcggcgcgccggtgtaatgaaacatgcggccgcgcggtttcaatacacgcgcgagctggtcatagaacgtctgtga

SEQ ID NO: 171165 - DNA, 581 bp, Arabidopsis thaliana landsberg; identical to SEQ ID NO: 49909
  unsure (1)..(581): unsure at all n locations

SEQ ID NO: 171166 - DNA, 543 bp, Arabidopsis thaliana landsberg
atgaagacgctcaccggcatcgacggcaaggaattcgcgcgccgcaggcgccagctgatgcgcatggcgggagacgacgcccatcctggtgctgccggccgcgcccgagcgcatccgcagccgcgacacgcactatccgtaccggcaggattccgacctctggtacctcagcggcttcccggagcccgaggcagtgctggtgctggtgccggggcgcgcgcacggcgaggcgatcctgttctgccgcgagcgcgaccccgaggcgagggctgggacggcccgcgcagcggcccggaaggcgcggtcgagcgcttcgggctcgacgatgcctatccgatcgaggacctcgacgagatcctgccgggcctgctcgaaggccgcagccgcgtgtactaccacttcggccgcgacaccgagttcgacctcaagctgatcggctggctgaaccgggtccgcgcgcaggtgcgcagcggcgcgcagccgcagcaaaaattcctggagctggggcacctgctcgacgagctgcggctgttggagtcgccg

SEQ ID NO: 171167 - DNA, 551 bp, Arabidopsis thaliana landsberg; identical to SEQ ID NO: 7162
  unsure (1)..(551): unsure at all n locations

SEQ ID NO: 171168 - DNA, 388 bp, Arabidopsis thaliana landsberg
ttttatgtgatcttggcatatttttgagtttggtataaagatatagtcacacattgatcttattttacaaatccaaggagggttttagttactgcagatcttttaacactcaattgttgtcggttttctcagtggatgccgattgaggtatacataaaccaaccttttattccagaacagagagaacttcaggtacatggctaacatctgcttgaagaggtctcaagagaaggagtacttaggtttctccaatgtccttaccaagaattcaactggtaaggagagctatctttactgcagcaccgaccacgcgtactttctcaaaggaaagcctgatcatagttctacctcactcttcacaactcttttgagaaagtgtttctctatt

SEQ ID NO: 171169 - DNA, 1199 bp, Arabidopsis thaliana landsberg
gcttatgctgatgaagaagaattttggcgactcaaaagccgaaagacttggttggcaagtggtgatcgaaacacgaaatatttctttgcctctacaaaaatcagaaaatccaggaatcgaatgcactctatctttgatgatgatggcgttgaacacagaggcgactctaatataggcaaggtggctcaacacttcttctcaaatcttttccacaatgatctaacaaccaacaacaatcactaccatgtcttaaacggattcacacagcgagttacttcagacatgaatgatgacttaacaaagaggatcacataagaggagattgcagaagctgtattctctattggaggttccaaagccccaggcccggacggattcacaggagatttctatcacaagtattgggctgatatcaaacaaacggtaatgaaggaggtacataatttctttgagaatggcgtctttgataaatccatgaaccacacaaatctatgcttgattccaaagccagaacatccacgacacaggagtgattacaaaccaatcgccttatgcaacgtgagctacaagatcatctcaaaaattcttgttggtcgcttgaaaaaacatctatctagcatcatttcggaggaacaagcagctttcatcccagggcgtgtaatcactgacaatgttatcatttcgcatgaaattacacacgctttaaaagtgaagaaacgatgctctacctcttacacggctatcaagacagacatcaccaaagcatatgaccgccttgaatgggacttcctgcaagcaactatgtttaagtttgggtttgatgttcgttggatagaatggatcatgacttgtgtccgaactgccaccttctcagttaatataaatggtgcaccatatggattcattcaaccggaacgaggcatttgtcaaggagaccctctatccccatacctttttattctatgtgcagaagtcctcagtcatatgatgaaaaaagcagaacaacaaggccacatcaaaggaatcaaaataagcaacaagagccctccaattagtcacctcctttttgctgacgactcgctcttcttctgtcaagcaaacatgaaatcgtgtctcgctatcaaagatatactccctcagtatgaaagagcctctggacaaagagttagcacaaacaaatgtgcaactgcaagtttgag

SEQ ID NO: 171170 - DNA, 650 bp, Arabidopsis thaliana landsberg
  unsure (1)..(650): unsure at all n locations
tggttagtagctttaacaacataatgcagtagttttgagcttgtcttctcttattttttatagcacttcagtgggagaacagtgagaccacggagagagatattcgatacagcttctgttctggcgactgaaatagatattagtgctatatatagatatgtaggtgacagtgcatttaccaaataccgnnnnnnnnnnnnnnnnnnnnnnnnnntatttgatttttaatttgtttcagttccgcttaagtttactatgtttaccaatgttgaatattcaggtttggtcgcatggaaatctatacaactgtgtagcttatgaaaacaatagatgggtcagacatttttgttctgagatagaggtaaagctttatagacatttttgtaaaagacaagctagtatgttgttgatctatgactgagtgatgtatattgctggttgtccaggttattggagactgggatggtgttctcagcatttttcgagaactgcatattcgacctgagattctattctttgaaaacgtaagctcctttgactgagtatgcatgtttattttgcttatgtgtgtgtgttctcaattccacctacttgaattgcaggctattctaaaggaccagatgttttccgagcagggatttgaagtctga

SEQ ID NO: 171171 - DNA, 355 bp, Arabidopsis thaliana landsberg
aaacggaaaatacgagctccattacatatcttcgtcggcataacgttcttcctccttcagctttggtcgggaacggcccaaattaaccatgaagagtcttccacaaaaccctccgttaaaaactctccgtcagcgacgagtactcggcttctgttgtcaccaccttcgttcaccggaaaccgattctcgttcaggttcaggtggaggagaatacgacgtcgtaacagagtcaacagagcgagcagagagtttttaatcgcacataacctcgtaagagcgcgcgtgggagaaccaccgtttcaatgggacggaagattagcggcgtacgcgcgcacgtgagcgaatcagcgcgtgg

SEQ ID NO: 171172 - DNA, 537 bp, Arabidopsis thaliana landsberg
attgcagcaatgttgaccgttgactctcaacactgtttcagtttcatactcctctgcttcttctcactcctctgttactctctcttgttcaagaaactaaaggactcacatgttggccgtgatttgcttcagagccctccatctcttccgatcataggccatcttcatcatctcctctcttctctagcacacaaatctttgcagcaactctcatccaagtatggacctctcctacatctcagcatcttcaacttccctgtagtcctcgtctcctcggcctctgtggcttacgagatcttcaaggctcatgacttgaacatctcgtctcgcgacaatcctccaatcaatgagtccctcttggtcggttcttctgtgttcgtcggcgccccctatggagattattggaagttcatgaagaagctcttggttacaaagctgctgggaccacaggcactcgagcggtcaagaagcataagtgcagatgagctagagcggttttgcagaagcttgctcgatagggcgttgaagaaaaagagt

SEQ ID NO: 171173 - DNA, 870 bp, Arabidopsis thaliana landsberg; identical to SEQ ID NO: 15820
  unsure (1)..(870): unsure at all n locations

SEQ ID NO: 171174 - DNA, 2913 bp, Arabidopsis thaliana landsberg
gcaagtgtttgaatcatattgagaatggctcaggggcagaataggactgttcttcagtcaggacagatgcataattctgttgtagcttctgcttctagtgtttcttctcagcctaatatggtcaatggcatatctcaggacactctcttattacgccaggagatgctcaacagaacgtaagactgtttttctgttttcattctacttgcttatgctgtgtctgtcttgagtcttacttgttgtatattccattgtgtatgtggttgttttattactagtttacatgtaccactcacattagtagtgtactttctcttttactggctcgaataattattgacccatctcatattctagttgtttaatttctcctctcattgacaatctcttggattcctgatttcctggggtttcgtttgtagacaagtcttatggtctttacttttaagggaatttctgatgcaactgcttgtacagtactcttatttatttcattgtttttgttttgtaaagtttatgtaaatggaaaacactcttatttacttgattgttatgcattattcctcattctctccagctacgcttggttacagcagaggcagccttcaaagacagatgatgcctctaaggcaaagttatctgaggttgcaaaacggttagagagtgcaatgtggagaacggctacgtcaaaggttcctcccgttttgatcttctcattgctactgtttgatatatatatattcctagctaagtactacttgggaagctttagtgttgcacaggttgtcattgttcttgatggtaatttcttttggcaggaggattacttagatttccgaagttttgacgttcgcgtagaatctactctcaaacaacttttgagtcagcgccgtgctaatccttcaagctcggtcagtacgatggtccagacacctggggtttcgcatggatggggtcaaagttatacggccacccctatggtggatacgagcaaattcaatagtagtaataacttatcagatgcaacaaccgaaactggaaggctattgccaactaatcgcatgtacagaggtaactatcagtcagatctgatgttagattctattgtataagagtaaaaattctgtcccgattcttttattcatagactatatttcgacaggtacaataaataatggtcgccaggaattatctgcggttggccagatgattcctactcctggatttgacaatagtgctaatgctgatgtttatcagtctcatcgaaatgaagaatattctggagatggtggcaagcttctggctaccgggtctgactttggaaatccatctcagctgcagaagcaacgtcctactggttcaaatgaccttatgggttacaaccttgatcaccagttgggaggtggtttcaggtcaaatattcaccagaatacatctgggatgaccagtattccgctaaatgctggtgtagggatgagcgggaacaatgtacaccttgctaatgtgcccaggagttctgaaggggtcctcagttctacgcatttttcaactttttcccaaccttcgcagcagcctgtcgagcagttgcaggtgtcacatgtgaacagtaaatctctctaatttttccttttatctaatgctatttaaatatcaatgctctcttgatcgtctctcttcgcgttatccttctgacgaatatgtaagtcatagtggtatgctgattggaaatttttttcatcatttgaaggatactcaatgagtaactctggtacttttgtgtctgggaatctctatggagttcaaacatcatctggctcaatagaaactgctgtggatatgaattctatgagcctgaattctatgcggagagttgatacttcattcggtagtcagtcaggcctgcaaaacaatccattgctaaaacctcatctacgtcatcagttcgagaatgggaatttccaatcttcttccaattccaaagaaaacttggctcaggtgagtcatcgaccattagaacgtcaattcaaccaacaagctcattatggtcaataccaccagcaagagctcttaatgaacaatgatgcctatcgtcaatctcagccagcttcaaatttagttagtcaagttaagaatgaacctcgcgttgaatactacaatgaagcttttcagatgcaggctataaataaagtagaaccatccaaaccgcaaaaccaatacaagcagaacactgtgaaagacgagtatgttggtgctcagagtgcaccggtttctagtagccagctaaagatgtctccatcttttccaccacaaactcatcagacacagcaggtgtcacaatggaaagattcgagcagcctctcagctggagtgcagccagtatcaggtctgggtcagtggcattcatcttcgcagaacttgacaccaatatcaaaaaattctaatgaagagagagaacattttggggtaagatttcataagcagcatgaaggtactaataatagttcgtctgtaagagagtctacaaactgccttactgttgctcctagtggcaccttggatgttcctcatctcccagtaggaatcaacgtcttgagtaaacagctgaatggagattgtggtctaagttacaaaaatcagaggcggtggcttttgttcctgctacatgtacgaaaatgcaatgctgcagaagataactgcgaaagtaagtattgttttactgccaaaacgctattgaaacatatcaattgctgcaaggctcctgcttgcgcatatcaatattgtcatcaaacccgacacttgattcatcattacaagcactgcggcgatgaaacatgcccagtctgtgtttctgccataaacttcaaggcgaaacataatgacaaatttaccttacttcaaagagcagagcctagc

SEQ ID NO: 171175 - DNA, 1770 bp, Arabidopsis thaliana landsberg; identical to SEQ ID NO: 7864

SEQ ID NO: 171176 - DNA, 1212 bp, Arabidopsis thaliana landsberg
cagcaaaaccaaggtcctgttactcctgatgctgaaatgaaacagatggtacatcaactgctacagggacaagcatctagctccatggaaattgctaagaagttatctcaattgcaccataagctggactgcagctacagtgacctgaatgccaaagtggaagcattgaataccaaagtcagatacttgaaaggacagtcagcatctacctctgcacctaaagttacaggacttcctgggaagtcaatacagaatccaaaggagtatgcaactgctcacgccatcactatctgccatgattgagagctgccaactcgacatgttcctgtcttaatcactagggacagtgatgttcaggagggggagccttttactcagattgaggtctcttttgttgaattcaaccattctgctggttctcgccatctcattcaatccacctccgatgagaatgcagccataattgagagaatggtaaaacgtatcaaacctactccattaccctcacgtgctcttccatggaaattcaggaaagcctagatggagagatacaaatctgttgcagagaaacagcttgacgagattgaagcagtgatgccactaatggaagttctcaacataattcctaatactggaaaggatcaagatgtatcacgattcagatgatgaatgtgatgctactccatctcgagctgctgataagaggattgttcaagaaaagttaatgccatgttccattgaggaattagctttcagcgattgcttgtgcgatctcggagcctctgtcagcttaatgccactctctgtggcaagaaggttggaatttattcagtacagaccttgtgacctgactttgatccttgcggatagatttcaagaaaacccttcggcatgatgaaagatctaccagtcatgattaatggagtggaagtgcctacagacttcgtggtgctggatatagaagtagagcataaggatcccctaatcttgggaagacccttccgagcagtgatagatgtcagggaagagaaaataagtctcaaccttggaaagcacatcaagttgcagttcgacatcaacaaaactccacaagagtcaaaagaagatgaaaaaacctctggagatgatggagtgatcccagaaaaaggatatgagactgagaaagtaaaagagagtacaaaataaaggcaaggagacattagaaacaccccg

SEQ ID NO: 171177 - DNA, 1491 bp, Arabidopsis thaliana landsberg
gaagagccaaagagcacccggtggatccacccatgtagcaaagaacccagaacttccttactagtagctcaagctccttgacaagcaaagaagaatctcaacaagtttgctctgaccagtccaagtcttcgcgtggcagagttcgagcggttccttctaggttcaaggactccattgttggtacatggaaatctagccgtcgcaagggagagtcgacggagtctagtcatgatgacgacgacgtatctctggggaagaaggtcaaaggtttcagtggaagctcgaaattgcatcgcagcaaagactcgaaggtgtttccacgtaaggataacggagacagcagtgaagtagattgcgattactgggatgttcaaatttcctacgacgatgctaactttggtatgccgaaaaagtccgacgcctcgcgtaagggcgtgtacaaaccagaggaatttacggttggcgatcttgtgtgggccaagtgtgggaaaagattcccagcatggccggctgtggtgatcgatccgatatcacaagcgcctgatggggtcttgaaacattgcgtccctggcgcaatttgtgtcatgttttttgggtactccaaggatggaactcagagggtaatctctttaatcctaatctgtcttcaagctggcgtttatttttactatctttttttctgaaaacttgtggtcattaacaggactatgcatgggtaagacaagggatggtgtatccatttacggaatttatggacaagtaagtacatgagacgctctttctggaaatctttcatacttgtgtgtttgtttcttgttccttactagtctttcatctcttcagatttcaggatcagacaaacttgttcaattacaaggcaagtgaatttaacaaggcactagaggaagcagttttagcagaaaatggtaattttggagatgctgaaatcatctccccagattcctctgggacggaatccgaccaggactatggacctgcttctagatttcaggcacgttttcttgacacatattccttttcttttttttggttagatgttcaagtttgctcttctaattgttttgggaagacaaaagtaaatcaattctggacagttctataagcatcttgtagtgtctacgtctggtgatatactttctgttctaagtcatgaagtttaaacatactacataggcgtagatgtactgtttgtatctgactcttttatagttactggaaataccttcccctaaacgatttgctgatttaattattgtgtagggttcatatcatgaggacataaagacatgcgacggttgtggctcagtaatgccattaaaatctctaaaaaggactaaagactcacaaccggaagagcttttatgcaatcactgctcaaaggttcttatcaaaacttcctacctcttcagttttctttgatcgacgggaattgaatccaaatttttgtttcagttgcggacatccaatcag

SEQ ID NO: 171178 - DNA, 414 bp, Arabidopsis thaliana landsberg
ggcaggaagttgttgggcgttctcagcgattggggcgatggaaggtttgacaaagatatctggcaaaaatctattaacactgtccgaacaacagctaatagattgcgacatagagaaaaacggtggttgcaatggcggagaatttgaagaagctttcaagtacataataaaaaacggaggcgtttctttagaaacggaatacccttaccaagtgaaaaaggagagttgtcgtgccaacgccagacgcgccccacatacacagattagagggtttcaaatggttccaagccacaacgagcgtgcgttgctcgaggccgtaagaagacagcccgtctcggtgttgattaacgcaagagcggacagtttcggtcattacaaagggggagtgtacgctgggctggactgtgggacaga

SEQ ID NO: 171179 - DNA, 655 bp, Arabidopsis thaliana landsberg
cgggctgatccgccccttgcgcacgatccagcgccaggccatccaggccgccagcggccagcgggtcgacgaggggcacctgacccggctggacgaagccgcctccatccagaaagccatcaagcaatgcagcctgaacctgcattccttcatcgacgacgtgcaaagccagctctcgggactgcgccacgcctcggccgagatcgcccagggcagccggcatctcagcgcgcagaccgaatcggccgccgaccgcctgaacgacacgagccgcgacatgcagcgcctgaaccgcctcatcgaggaaaaccacggccatgcccggaccgccgtggacctggcgcaggcctccagcgcctcggccgggcgcgcggcccaggtggtccaggaggcagccgcccgcatcgagcacatggacaccgccagcaagcgcatcggcgacatcgtcggcgtgatcgacggcattgcgttccagaccaacatcctggcgctgaacgccgcggtcgaggccgcccgcgccggcgagcacgggcggggcttcgccgtcgtggccggcgaggtccgcgccctggcaatgcggaccgcggacgcggcccgggaaatcggcagcctgatccaggaagtcgtgggcatcgcccaggccggcgtggcccgg

SEQ ID NO: 171180 - DNA, 1175 bp, Arabidopsis thaliana landsberg
tactgttcttccaaactgtcttgaaaagattagacgagatgacatggagattgttattctaggcactggttcgtctcagccttcataatgcgaaacggttagtgcaatttttattgacttgttctctagaggtagtcttctcctagattgtggtgaaggaaccttgggccagcttaaaagaagatatggtttagacggtgcagatgaggcggttagaaagttgagatgtatatggatctctcacatccacgctgatcaccatacaggtcttgcgaggattctagctcttaggagcaagcttttgaaaggagtgactcacgagccagtgattgtggtggggccgaggccgcttaaacgctttcttgatgcatatcaaagacttgaggatttagatatggagtttcttgattgtagaagcaccacagcaacttcttgggcttctttagagagtgggggcgaagctgagggttctttgtttactcaaggaagtcctatgcagagtgtcttcaaaagatctgatatctcgatggataattcttcggttttgctgtgtttaaagaatctgaagaaggttcttagcgaaattggattgaatgatttgattagttttcctgttgtacattgtcctcaagcgtatggtgttgttatcaaggcagctgaaagagtaaatagtgttggagaacaaatccctggatggaaaatggtttattcgggcgactcaagaccttgccctgagacggtcgaagcatcacgagatgcaacaattcttatacatgaggtaaaagttgttatttaactcaattctacaagttagatttcgacattcataaactgattgtttttgacaggcaacgtttgaagatgcgttgatagaagaagctttggcgaagaatcacagcgcgactaaagaagcaatcgatgtgggatctgcggcgaatgtgtatcggattgttctcacacattttagccagagatatccgaagattccagtgattgatgagtcgcatatgcataatacctgcattgcctttgatctgatgagtataaacatggcggatttgcatgtgcttcctaaggttttgccgtatttcaaaactcttttcagagatgagatggttgaagatgaggatgcagatgatgttgccatggatgacttaaaggaagaagctttgtga

SEQ ID NO: 171181 - DNA, 408 bp, Arabidopsis thaliana landsberg
gtagtgaccgattttctgttgcagtatggtcttttcctggccaagaccatcaccctcgccgcggcggtcatcatcgtgctgtccgggctattcgcggcggtgcgtgaagcccgcgaacactcccacgaccagctccagatcaagaacatcaatgaacgtttcgagctgatggccgatacgctcaaccacgaattgctcgacgaaggcgagcgcaagcagttgcagaaggccaggaaagccgaggagaaagcacgccagaaggcacggaaaaagggccagcaagcgccgcgcccgcgcctgtttaccctgtcgtttgacggcgatatcaacgccagcccggttgactcgctgcgcgaggaaatcagcgccgtcctgcaggtcgcgcgcaaggaagacgaaatcgtgctg

SEQ ID NO: 171182 - DNA, 967 bp, Arabidopsis thaliana landsberg
tctaattcaacgaagagttctttatcgttccccaagtttttttcatttggatccattcaatcttattgattgtagcgcttctctaaaaacagttttgatcaagacaatggaaaatggtttctcgttggtgcccaaagaagaggaagaagaagaagattatagtaatgagaaatctgaagatcagacgagttattatttgtcaacagagatgatgaagaaggtaagcttcatggctgcaccaatggtggctgtggctgcttctcaatacctccttcaagttatctccattgttatggctggtcacttggacgagctttctctctcagccgttgctattgccacttctcttaccaatgtcaccggcttcagcctcatcgtaaattcctcctcctcctcctcctccttctctctcgacttatagacctgtccaaaggacaaacatgctaagcaaaaaattagggtcgccaaattttttttatttttaaatattaatgcaacttcactttttttagtagttatatctttaggactaccaattttttgttttgatagaaacttacaccttttcaaagttatgggagtgtacacatttcttgtttcataactaggaccactatttttattggaccgactttgctgacttagatcgttagtttggattggcaggtgcgttagagacactgtgtggtcaagcttttggagctgggcaatttaggaatatcagtgcatacacttacggctcaatgctatgtcttctcttggtctgtttcccaatctcacttttgtgggtttttatggacaaactcttggagcttttccatcaagatcctcttatctctcaattagcttgtagatactcaatctggctcataccggctgtattcggatattctgttcttcaatctatgactcgatttttccagtcacaaggattggttctacctcttttcttgagctctcttggagc

SEQ ID NO: 171183 - DNA, 358 bp, Arabidopsis thaliana landsberg
gtgggttttgttcatacctcgtttagaccgataaagatttcaagaaacaacacaacgtacgagaaatgtttaatcaatccagctctgtctcgttaatctacgtagttgaaatcgccaaaacaccacaaaacgtagacgtcacttggtctaaaaccacctcctcacattctttaaccatcaaaatcgagaacgtcaaagacgagcaacagaatcatcatcaaccggtgaagatagatctttcaggttcttcgttttgggccaaaaagggtctcaagagcttagaagctaacggaactagagtaaacgtatactgggattttcgtcaagccaaattctcgaacttccctgaaccttcctc

SEQ ID NO: 171184 - DNA, 239 bp, Arabidopsis thaliana landsberg
accgtcccggtttgttttatttcattagtggtgtctcaggccactgtgaacaaggtcagaaaatgattattaaagtcatggaggtggaatctacgacgcaatctcctccaccttcctcgtctctagccgcttcaactcacaagaaaaaccacgccgtaaggaaaacgagtcggttcttaggtgccggtttagttacaatttcgattctggttattacggtttttagtcttgtgtagtat

SEQ ID NO: 171185 - DNA, 1396 bp, Arabidopsis thaliana landsberg
cattggaagaatttaatttagctcttttagctaaacaactgtggcgtattatccgttttccaaactctcttttgagtagagtcttgaggggaagatactttcgttatagtgatccattacatattggtgcctcaactcgtccctcttttggatggagaagtatcatggccgccaaacctcttcttgtctcgggacttaggaggaccattggttccggaatgttgactcgtgtatgggaagattcatggattcccactactcatgcgcggacggcgaatagccttcttgacataagagaccccctactctatgtcaatgatttaatcgatcaaaacacaaagatgtggaatttggatcgtcttcaagcattgattgatcccgttgatattccactcattttagggattcgcccaagccgtacctacttgagtgatggttatagttggtctcatactaaatccggtaattatactgctaagtcagggtattgggctgcaagagatctgtctcgtcctacttgtgacccccctttgcgtggcaatgtatctcaggttgtcttgccacttgccaaagattgacatatcgtcacatgggaacagataaaggatgtccccgttgcggagaaccagaagagacaattaatcatcttctttttcattgtcctccttcaagacaaatttgggcattatcgccaattccttcttcagggaatgtcttccctagaaattccctcttctataatttcgattttcttttttggcgtggccgagaatttggaataggagaggaggtgttagaaatctttccatggatactttggtacatctggaaaagtagaaaccgttttgtttttgagaacataagggaacctccccttgaaaccttaggttgggcacttcaagaggcagctgcttggaaacaagcatccctaaaagatgatgatttcattcggccaagtccgttcgtaggttcttctcaaatcccgccctctttgcttcctgaatgtcaactcgacgcttcttggcatgtagatgacaccttgagtgggcatggctgggctcttgttagacaagactcggtcattcaccttggccttaagagtactcgtcgaaactaatcatcgcttcatgcagagtttgattccttgctatgggcaatggaatgcatgatctctattggcgatacttctggcgcttttgcttccgactgttcagacctgatttctatcattgacaaccaagacgattggccgacattcgcagcggaattggcatcctatcgctccttagtttgtttttttccttcttttcgtattagatttcttcctcgtagttctaatactcgagcagattgtttagctaagaaagctcgggctcgtaatagtcttttctcccat

SEQ ID NO: 171186 - DNA, 2410 bp, Arabidopsis thaliana landsberg
gattgttgactcccacgatgcaagagaagctgtggtttatctagactacaagatccttaagaatcattgtcgacatggccaccgccttacccatgaggaaaagcactgccctggcgttgcacagaagtctgaaacacaaaggaacccctctcctgtacaatctgcttccctccatgcctcaaaatcaagctcaaggaactactacattcctcaagacaacttcatcgcccccaggagttcctctcagcgctctgagagaagtgctatccctcaccaggcagtaaactctgcaaaaagaagattgaatcaggatggggttagatccaagtccccttctactctcagatactcccctcagagaagtttttttaatagagaaaactcccatagatatggagataatcaacgcagacatcattctcaggattcctctaagtcttaccatcaggatggagggtctgctccttttccacctcagcaactccaatggcgagagaaatctaattcatcagcaggacttcatgctacgtcatcaagtgggtccagggcttgtcgcccccctcttgagagagatgttgcctcctctgatcctcttactcctccaaccttaaaaggcagtgatcccagaagtcttgggatggaagtttcttcccctccacctacaaaagaccaagtcatgagtgagttgagggatgtaacagtccaatacctctcttgtcctgatccagtagaaaatgcagcaaggaaaaccagggtttttcaaggggaaaccagaaacctgatggaaaccacatctcttggtatcctctcagccgcttctggctctgatcttctagcttatgagagtactgaaatccccccagggtctttggctacaggctcaaacctagagtgtgttcctgctgcccccactaaaagaggtagaggtcgtcctcctctaccaagacaagccaacaaacctgccatataacttctaggcacaaagtctcataagagaaattttacccagggttctccgagtaagacttctaactccaaatctgggaaaaagacgggatctcttattattccccctaggcctcaaactatccctggttcatcaagttctaaacctcaggccaagaacattaacctctctgcaggaggcaccctaggagcttcctcctctgctactccaaaaattgatctgattcctgtatccaggaaaaagaaggtggattttcagaatctgccaaccccttttccttaagaatggtgagctggaactgttgtgggttggggaaccccatgacagtccagagaatcatggaaatccgtaaatcggtttttcctgatctgttctttcttatggaaacaaaaaacaagtctgaaaatgtcttacaactccttcatggccttgattactcctctcaccacttggttccaccatcctccccaggatctggtggtcttgccctgtttttgaagcacaatgtggaagtttaaattatctcttcatgtcaacatttcatagacacaaagattaaagtcaagggtcggtgcttttactcaacttttctctatggtgaacccgacaggactaagagagttgaatctggaatcaaatccaggatctggctgccttcaaatcttctgcttggattcttactggggactttaatgatatcatacacatttctgagaaggttggtggcccccctcgaccggaaggctctttctctgacctgagatctctgatgtcttcttgtgacctctatgatctaaatcacacgggcaaatttctatcctggaggggcaaaaggcacacgcatggcttatggcaaacagtgactggatcatggcttacccgtcgggtcgcagtgaatatcttcactttgaaggatcggatcatcgtccccttgtcacatcctttgacccgaaaactaagaaaagaaaatgtatctttagatatgataggaggctgaaggataatgatgaggtcaagaaattagtcttggattcatggaactcaaacctgtctgcaactgttgatcacagaatttctgcttgtcgttcttccatcatattgtggagtaaacaacatcatcttaacagtcaggttgagatttccacgcttcgtgaacaacttgaggatgaaatgtccagcaacagctcacctcaagaggaaattgactccataaacacaaggctcctgagtgcttaccaaagagaagaggctttttggaagcagagaagtcgtaatctttggctggctctaggggataagaactctggtttctttcacgctgctataaaaaatagaagagccatcaacaatatagcagttattgacccatcagcgggcttaccagtttatgaggaagaaaaaatagtctctgctatctctgattattaccaacagatttttcct

SEQ ID NO: 171187 - DNA, 1270 bp, Arabidopsis thaliana landsberg
  unsure (1)..(1270): unsure at all n locations
gttgtcttgttttcataaggccaattccaatcacggaatatcacaagtctgtacatttctcagaatttaaaaatcaaagtacatccccaacagtgtcgacgaaaactatatttacgaaacaagacaactttacatgtggtgctgaaaactataatactaataatagtccgagtatatatcgtttatcaatgactcaatgtataacttatgcatgaactagtggtaatttgatgaatagtataaatgagaatcgcgggataacaatactctaaagagaacagaagtcacctttttcagttacctcaattttagaaatttttcatatttttttttacggacaatgatatatcaaaatcaaactggaattgataggtcagtgatctaacttcatgtccttagatctcactgtgttggttcaaatttctatataagaagttaaaaaggcctaaatccactagagttgttgacaacaaaatagcagagccgatttttttccatacaagtttctccatatagaaaactatttctcttttgaaaatactcgtatccctttaaacaataattcagtttaacgaaaatgtaaggaggcggatttttgggaagcatgaaatgcttttttttttctttaacaaatgttcaataaagaacctttctgatataaaagtaaaaaccattgtgggccatatcttacttccactaacattattccaaagttataaaaatatatctgtcccaagatttttttcctcttgtccaatcaaaatatgcatattaacacattactctctcttattcgtggaatctaattattccctttcaaaaattagaatagctaaaaaaaggaagaaacaaaagctccttttctccataattaaatcacctttctccttctctgaatcaatgaagacaatacttacattatagatccctacattcttctctaacgaataacttaacatctatctttcatacataacatctattcttctctgaatcaatgtttatactctttagagggaacggaacactcgtctgcacacttcttcttcgagacctgctgctggactgattatggagataaagaatcttattcgcactcatcttgatcctctctcacgagctcaannnnnnnnnnnnnnnnntttatcgtacctcgccacttggttcggtctctttatttgatcatgtgctctgttttacttttctttgttgtttcgtaggtgttactcgttttggaggcactgtgtattcgatttcgttttataaatga

SEQ ID NO: 171188 - DNA, 964 bp, Arabidopsis thaliana landsberg; identical to SEQ ID NO: 54319
  unsure (1)..(964): unsure at all n locations

SEQ ID NO: 171189 - DNA, 558 bp, Arabidopsis thaliana landsberg; identical to SEQ ID NO: 2365
  unsure (1)..(558): unsure at all n locations

SEQ ID NO: 171190 - DNA, 693 bp, Arabidopsis thaliana landsberg
aggtttcaatacgctttaaagatgatgtggtctatgtgtaatgaatctatatcttgcttgctgagtccacaaatgccactgatctttgatcctattagagtatactgaaacatcacggtcataaaactttccacaacttatgcagctggcgtttctggaagaattggaaaaaactgtggctatactccgttttagagatctccctgacatcccggaggcagagagagagcttcttgacaactcacggtggtttaagacagctgccgaagtaaatgcagcgattcttactagccagactggtctaaaatgtaagtgatcaactttcttactagttatggcttaagatagcaagtaaaacaatgagcttaaacctccagcacagttcatatgcaaacaatatataggatcaatcggttatgatgccaaaaactgttataattacagtgagacagctatttttacattccgtagtttcccacatgtgtcatcaagatttcctcttgaaactttgtcaatatactaagtcgatgatgatcttatgtttgtgacttaacaggtcccaaacttctagacttgttgaagatgttgacttggactcagaaccaactggatgaaaaagtagagtacccacgcatgagtgttttgcccactggccagctcacagtcataaacccgccatggccatcagaatga

SEQ ID NO: 171191 - DNA, 505 bp, Arabidopsis thaliana landsberg
atgcgttctttcaccgaaaaaatttatttcttcgctaccaaatctcctcttccccggaataggtgagttccgatctccttttcccgtttcgagagccctaatctcatcatttctcaaaccactaatctgtctccttcctcgaattttctagatctgagcttcttctttgactattcaccgatccggatctaaaaaggtgtttcctcaatttgttaaaccagatatgaggtcaatggatcgatttgggatctgggttttggcgattttgttagtgattcaatcaagttttgggttttaccttcctggaagctatccacataagtataaagttggtgattacttgaacgtgaaggtgaattcacttacttctatagaaacagaaatgccttttagctattatagtttacccttttgtaaacccagtgaaggaattaaggatagtgctgagaatttaggtgaacttcttatggagatcggattgagaattcgccttataggtttagat

SEQ ID NO: 171192 - DNA, 372 bp, Arabidopsis thaliana landsberg
atggggagcttaaagttgagcacagttgttgttactgcactagtcgtttgtctctccatcctcctcatatctcctacaggtacgtaaaaaaataccaaaaatctttgatcaaagagctaaaatgaatacatgtttatgaaaacgtttgtctctttgtatggattggacagaagcagtggaggggaaactgaaagaagaatgtgagaatgtcccatatggtttctgtccgttttggttattcaatccgagatccgaggaactttgcaaggagaaatgtaagaggtttaagtcagaaacatccgaatattatggtggtttttgcacgcctaatggtccacctgggggagtgtctctcacggcgacttgcaactg

SEQ ID NO: 171193 - DNA, 149 bp, Arabidopsis thaliana landsberg
atgcctaagaaagtgatgatcgatgaggataacgagctcaatatgaagctcttccgcgacctgatcgaagccagagggtacgagaccgtttgcacccgcaacggactcgaagccctcgatctcgcccggtagtaccgtccgaacctgat

SEQ ID NO: 171194 - DNA, 721 bp, Arabidopsis thaliana landsberg; identical to SEQ ID NO: 40670

SEQ ID NO: 171195 - DNA, 647 bp, Arabidopsis thaliana landsberg
tcttgaggttcgtgatttttctctcaattttgaattcgattgtgaaaactctgcgaagtggtaaaatgttttattttgtgtgtgtgtgtaaatatgtgaatggatggttgtacaggaagatataaagctacaagcaggtgattacgctgtacatttggatttgatatctaaaatccgtggtttaaacagtgctgagaagtttttcgaagatatgccagatcaaatgagaggtcatgctgcgtgtacatctcttttacatagctatgtgcagaacaagttgtctgataaagctgaggcattgtttgagaaaatgggtgaatgtggtttcttgaagtcttgtttgccttacaatcatatgttatcgatgtatatatcgagaggacagtttgagaaagtccctgtgttgattaaggagttgaagattagaacatcgcctgatattgttacttataatctctggcttactgcgtttgcttctggaaatgatgtcgagggtgcggagaaagtttatcttaaggcgaaggaagagaagttgaatccggattgggtgacttatagtgtgttaacgaatttgtatgctaagactgataatgtcgaaaaggcgagacttactttgaaggagatggagaagttggtttctaagaaga

SEQ ID NO: 171196 - DNA, 624 bp, Arabidopsis thaliana landsberg
atgagttggtgtgatggttcagatgataactacgatcgtaatcttgaaagagtatcgaacactgatcatgcatcggttcaactcaaagaccaatctcaatcatgtgtaacgagccgtccagattccaagattagcgctgaaactcccatcacgagttgtccttcttgcggacacaagctccatcatcaccaagacgaccaggttacatatgctaaccattaattcacctaaatgttctttagttatcaatatgattactttagattttgacataaaatgagatctgataaggttggtagcatcaaagatttaccaagcttaccggcaggagtcaaattcgatccgtcggataaagagatccttatgcatttggaggcgaaggtatcatccgataagcgaaaacttcatccgttgattgatgaatttatacctacgcttgaaggagagaatggaatttgttatacgcatcctgagaaacttcctggtatgtaaccctctcttttttttttttttttttgtattatcaatacagagctaagtataaattacagaaaaataaatgaatactattgacgatatttctttctcaattagcaccatgaaaacaaggagaattatccaaaa

SEQ ID NO: 171197 - DNA, 3002 bp, Arabidopsis thaliana landsberg
atgcatttttttatattgtttgagaatccgaaacactttgaaccaccatatattagcctttgtgaccaagcccataacgtgttcgatacccccttggtgagagtatacgcctctgctaatgaatgttaaaagatgaagttctatgactctgaaagttcttttagatcttgggatttaattttgtcgctacggttatggcgaagtacagtctagtacgggttgatgagttttgtgatggtggtttgcaggcaattgataagagcatgacctcgaagaaaatgtgaattctcgtgttttcaaacctcttctcttgataaatatttttgtttttccttgaggacaagcaaagatccaagtcgggggaagttgatatgttgcgtttttggtatcttaggtcctttagttttgggtcgtttgtcgtgtcatagtccgtcttttgcgtcttttcggttgtgtcttgagtcatttgcaggttttaggtgtttaagcgggacgcagatgctttcgggacttatcaggctcatttggacaaaaaacaacggtgggaatggagaaaccagagtcagcaacattggatcgatcggtcccatcataagaacgatcgatccagtgttcatcgtcgaaaaccatccgccagctccagatcgattgatccccgcctgggtatcatctgccaaacaagaatctgccctgctagctcgagatcgatcgatccgaagggggatcgatcgatccaaccttctcgacgagaaaaccggttttccttaaccggatttatccgtcttttctgtatttgggtataaaaaccccagagacctaattttatttctacattttcttttatgcttctttttctacaactctttgagagcttttctttgtaaacacctttgggattagagattcatccactttgacactttggagaagatttctgaacctttatctcatttactcaatttgaattatgttttcgttcatatccctttgtgttgttcattttgctatgagtgagtagtttcttaattgggttttagggttctaagtaggggattcaatgaattgatggtttgattgttgtttggagttcttgatctctaagttctttaattcacatgttagcctaatgaacctaattctaatgcggatttcactaggaaattacaaatgaaagtttagtagttaagtagtcaaatttagtgattaatgtcttgagagagaattagtctaaacttgtgttcatgttcgagaacggttctttatgctgaattccttgtttattatttccaataatcattgatctctgaaataccctattgcctaatgctttttatcatataaatctaatcgtttactttcttgcattttaatttacaatctgaaaaccaaacaaataacctcttcgctttagctaagaacgagtctcggaaatctttagagtatctttggtccttgtggatcgacctcgaatattatacttaacggttagatatttcgggtaattactcgagcaatcaagttggcgccgttgccagggaccaattgcgttacgtaaggatttaggattagtttctagtctaaagcatttttatttactgttactgatattcatttccgtgttttctttggtgttttcaggtgtatgacccgtagcaaaggctcatcagatctagtacactaccacgaagatattggaaggtttgaaagaaagaacaagaaaaagaagcagttagcggttcagagagaagctgaaatggctaatgttattgatgatgatggactccaatttgaaggagagcatcatggagtgtttcaatatccaccacctcctgatggaaatcttcatgctgatggtggaaacgctaccaatgctgctgctgccaacgctgcacgtgtcgttgttgccaacgctgcccgtgtagttgttgccaacgctgcccgtgcagctgcgttgaatgctaggcttgtgcctgctcgacaaactcttagagatcacgatgctcccaattttgattttttcagagacaggaaccaacaactccctatcaacaggaatgactttgagatcaagaccgggttgttggctcttgtgaagcagaatcagtttcacggtcattcctctgagaatcctgtctatcacttggataattttgaagatatttgtgggacaacgagaatgaatggagtgccagatgacattatcaaatgcagactgtttatattctctttggcagacaaagcccaccgctggttgaagtcactggatcatgtaaatctgagaagatgggaagactacaaagctgcgtttttgggacagtatttcacgcagtccaggaccgctctactgaggaataagatcagtagcttccaatagggaagcacaaagtcattccatgaagcttgggagaggtttaaggactactacagggagtgtcctcatcatggttttccacgggctacattgatcaacactttctatcggggagttgacaaggcctacaagatggcattagacactgctagcaatggggacttcatgaccaagactgagattgaggctacatagctaattgagaaccttgcagctagcaacagcaaccacaatgttgactatgacaggtccaatagaggtggaggaggagaatcaaaacagcttgctaaattgtcagctaaggttgagcaactactcaggagagatcagagggttgttaatttctgtgatgacactggggaagctcaggtgtaccaggagtttaatgggaatggttcggaagataatcaggctgaattgaactacatcaacggtcagggcaactaccggaacaggggattcaatctgaactacagaaaccatcttaacctttcctacaggagtaccaacgttgagaatccgcaggatcaagtgtatccagcacagacgggatcacagggtcagcagtttcaggccaaacctttcgtacccagacagagaaattcaacaacaagccattcgtacctaacca

SEQ ID NO: 171198 - DNA, 1111 bp, Arabidopsis thaliana landsberg
aacaacggggaagatgaaagaagctgtgatggtaacggatgttgcatcgcaggtctaccggattctgaggctccacaagtgatcggcatcaacatagagagctttgatcatggaaactcgacaaaactagaatgcagagtcgctttcttaacagatgacgtctccccgttttcgaatgcaagcgaaccaaaaaggttatttgctaaaagatatgctacagttagtttaggatgggtcatccagacgaagaatctctcctttgtaaactccttgagctacaaaaacacgacagagtacgataattctacgtataatatcaaactcgtaacaagttgcatatgcaacaatgtcaccatttctgggacagattatgcaaactgtggatgctcccaaggttacgaaggtaacccatacctccctggcggatgcaaaggtcagttaaattgtttctaaagtcctctcttattctatgtgtaaaacatctgggaacctcagagtacgtaggattgtacggagtgtattttcacaattttcttaaagacctttcgtattcactatccagatattaatgagtgcctacgtaactcttatggacaacgccaaaattgtagagaaagcgatacttgtgtgaatcttcccggaacatttaattgcattggcaataagactacaataacaatgataggtaagacagagtgaatatatctttagattcagttaacatcgtgatgataggaaacatgtgatggttaacatatccatacaatctttttgtacggttttcaggagtaggtgctgcttttggcatcttagtcctagtggttggaatttggtggttgagaaagttccttaagaagagaaggatgagtaagaggaaaagaaagttctttaaacgtaacggaggactattgttgcaacaacaattaaatacaaataaaggcaacgtcgagaagacacgaatattcagctcgagagagcttgaaaaagccactgataacttcagcgaaagcaggatacttggacagggcggtcaaggtactgtgtacaaaagaatgcttgtcgatggtagaactgttgctgtcaagaaatcaaaagttgttatgaagacacg

SEQ ID NO: 171199 - DNA, 2808 bp, Arabidopsis thaliana landsberg
tacatatgacaaaaagctttatgctttggtgagagcactacaaacgtggcagcattatctttggcctaaggagtttgtcattcacaccgatcatgaatccttgaagcatctcaaaggacagcaaaaactcaacaaaagacatgctaggtggatcgaattcattgagacgtttccctatgtcatcaaatacaagaaaagtaaggacaatgtagttgtcgatgcattgtcaaggaggtatgttcttctttcatctcttgatgctaagttacttggatttgagcatataaaatctctttatgcaaatgattctgattttaataagatatattcatcgtgtgaaaagtttgcatttggaaagtattatagaaatgaaggattcctgttttatgataaccgtttgtgtattcctaattcttctttgagagagctttttgtaaggaaagcacacagtggaggtttaatgggccactttggagtctcaaaaactcttaaggttatgcaagatcattttcattggccgcatatgaagaaagatgtggagagaatgtgtgaaaggtgcacaacatgtaaacaagctaaggctaagtcacaaccccacggtttgtatactcctcttcctattcctttgcatccttggaatgatatttctatggactttgtagtaggtttgccaaggactaggacaggtaaagattccatttttgtgattttctaaaatggcacacttcattccatgtcataaaactgatcatgccatgcatatagccaattttttctttagggaagttgttcgcttacatagcatgcctaaaaccattgtatctcatagagacactaagttccttagttacttttggaaaacgctttggtctaagttaggaactaagttgttattctctactccttgtcacccgcaaattgatgggcaaactgaggtagttaataggactttgtctacactcctgcgtgcattgataaaagagaatttaaagacttgggaggactgtttacctcatgttgagtttgcatataatcattctgtgcattctgctactaaattctcaccttttcaaattgtttatgggttcaatcccattactcctttggatttgatgcctttacctttgagtgaaagagttagcatggatggaaagaagaaagcagatttagtgcagcagattcatgagcaggcgcgaaagaacattgaagagaagaccaaacaatatgctaagcatgcaaataaaagcaggaaggagcttatcttcaacgaaggagacttggtttggagtcatctccaaaaatcacgttttcctaatgagagaatgtctaaacttatgccgcggatggatggaccttttaaagttctcaagaggatcaacgacaatgcctactctctggatttgctaggtaagtataatgtaagtaatagttttaatgttgctgatcttgttccttttattgcatatgaaacagatttgaggtcaaatccttttcaagtgggagaggatgatgtgataatgggaagcttggatcatggagctaaggagcagcttgaacccaaggagcttggatctcgagcacggtcgacgatcccttactcatggtcaagttttctcgaccacacgcgatgattcttaagcatcagacagaatttcctcaacgaggggcaagttttactgaatttgggcaatcttttctcggtttcggacgagttaacgatgggacagccttatagtctctctctcgccttcagaaatgaatttgggcggaaaagctctatttatagcccgcctaaggtcggccagactgcaccgctcgctgccacatgtccggacagcttctgcgcccacaggcgactgctgtctcgggcgatgacgttgtgataggtggcgacgggtgtcactccaccgtcccaccaacttcggctccaagactcagctaacttcgactccaaggttggtaacttaagccgcaaggcaccgtgagtgaggtgtccttttcatgtcggttctgcggccggcggggcaaacttcgcctgtggcatgcccattcttgcccatttgtgcccattctcgcccgttcttgcccttttttgttttggcaccatttggacacacgcggtcaattggctttgtattcgggcaaaatgtttcttattcggtcctttggccgtcccgatgcccttatgtgggtcactacattctcccctccttaatagaatttgccctcgaattctaacctttggccattctcaacttcattgtcctaattatacaattgcctgctcctcgaactgaacttcctttcttttgcatgtttccctgaagtatgctcgatctagatctctagcccaaataagttcaatttctttcctctgattcttcatttggccggatgttgctgaggcacttttgatggggttttgaactcatcctattcttatacaagtgatttctcactcatataatggtcggccacacacaagcaagaaaatacttaacttctcatacattcaaaaggttcatacaagtaataagtaccggattttagtcttagttttatacactatttaacaagtcctaagccttagcatatttacacccaaaatttcgctatgactcagccgattttgtacttagccgaaaagttaactatattttcctagatgatcttacggaccatcggtcaagggttcctacacttgggacactcacaccttacccacaaaaacgagggcatcccttcattcaaacacttctcctctgtcaccgcagtcattgatggcccgactcctctcaaagatccttc

SEQ ID NO: 171200 - DNA, 276 bp, Arabidopsis thaliana landsberg
ggtcgccttcggcccaagaccaccgccaaccgcatcgccgacgtgctgatcgaccacgacatcgccatgcccgcccgggcgcgcgcggccgatcggggcctgatccgcaccgacggcggcaacctgatctatgacgccgcctgccaggccatccgcgacccggcccgcctcgccgacgacctcaaactgatcaccggcgtggtcgagcacggcctgttcctcgacctcgccgacgaggcgatcatcggcacggacgacggggtggaggtgctgacg

SEQ ID NO: 171201 - DNA, 529 bp, Arabidopsis thaliana landsberg
  unsure (1)..(529): unsure at all n locations
acgtcatcgtcgccaccgggccgctgaccgccaacccgttggccgaggcgatcgggaaactcacgggcgaggattcgctcgccnnnnnnnnnnnnnnnnnnnnnattgtccatggcgagagcatcaaccgcgacatcgtttgggcgcagtcgcgttatgacaaggtggggcctgccggcaccggcgccgactacctcaactgccccatggatgaagcacaatacaacgccttcgtcgatgcgctgctgacgggcgaaaagcatgtcttccacgaatgggagaacgtgccctatttcgacggctgcctgcccatcgaggtgatggccgagcgcggccgcgagacgctgcgccacggaccgctgaagcccgtaggactcaccaatccgcgcaatccaaccgtcaagccttatgccatcgtgcagttgcggcaggacaatgcgccccgcacgctgtggtacacgctcgcctnccagaccaagctgaaataccgcaannnnnnnnnnnnnnnnnnnnnnnnnnnnnnnncttg

SEQ ID NO: 171202 - DNA, 1270 bp, Arabidopsis thaliana landsberg
catcctagagacgactagctcgtctgtgactacttaatgagaagaaccgttcgcagcctctatcaaccagttgtcttgatcgacgtcgatcttaacaaatgcgagccttgggacattcctcgtaagtaattctgtgtttacacaacatctcgcaactctatatcatatagtttaaaccattccatcggtagctattaaatccataattcttgtttccaacatgatctggttattgtttcttctacaattcgagtatatgtggtgtttagaaaaaaaaaaaaaaaaaaagttcaacttgcaagccacctgcaaattagtattttgttccttactaatttctcgtgaaaagaccatttagctgcacaattataaatgcttagttcacattcattagacgcatatagtttattaatttagaatgaaaacgataccgtccgtttacataataaaagaacaaatcatcctaatcttgcagacgtgttggatgcctattcgatgactggttggttaagatatgaatatatgatacggatagaaaccatttggatattattgaatatgtcattaagatgaagactatttctgaaaagagaattctgtttatatatcttaatcttatcataaagtttctaaaatatgttggagaaaataccccctcccttaatagaaaactaaaatccattaatgtatgttagtatgtactatgtaatatacaaagaaaaacattcaacgcccaacttcttatcaatagttaagtttgatagtatataaaaaggtcattttcagaaacggcgagagtgggagggaaagaatggtacttttacagccaaaaagaccgtaaatacgcaacaggctacagaacaaaccgggctacggccaccggttattggaaagccaccgggaaagatagagcaatccaaagaaacggtggtcttgtgggtatgagaaagacacttgtgttttaccgaggtcgatcccctaaaggtcgtaaaactgattgggtcatgcatgagtttcgtctccaaggaaaacttcttcaccactcccctaattctctcgaggtattactcgtaaaaccgattgggtcatgcattaattagtccctctctttagtccattttttcctgcaaaataaatgtctctttgaaatgtaaatatagtcgaaattcaaaagtcaacttttctaaaatactccacaatagaacaactgatttatttttatgtcgcataaaaaaactaaagcaacatttagtattacattatatatcgg

SEQ ID NO: 171203 - DNA, 713 bp, Arabidopsis thaliana landsberg
atgcaaaaagaagaaactttcagctctcccgctggaaatactcgatcccgaaggtcgagtaaatcttctgcaagggaattctcgaattacaaggcagacatcactcgaggaaagaagcccgtggggaggaggcttgaactggtagatgaagactccaaaaagaaatggcttcaccagaggaagatgatcaaactgagaaaggaggtggtgatgatttggaatcagagaagtgtgcaactcgaaacgagtactacaagctgctgaagcgcaatgagtttttatgacttcgataccctcatcccgagaccatggagagactcggcatctatgatgatgtagactatatgtttaagtagtgcagcctgaatattcacatgtttcggccaatggaggggtatgaggaagagaccatccagtttctttcatccgtggaattcttcttatatagagagtcagaggacaatgaaatcaggctaggcggaattttgggatacttggagttctgtgagtatgacgtagagtatcggcttccaatcgagcaacttgagctgatgtatggattttcaagcagaaaagacacgagtcatcgttttgacaagaaagagctttagtcattatgggccacgcttgggtctaaacatggggtttcataaaaaaggaccaagagcaacgagataaggagtccggtggttagatactttcataggtcttta

SEQ ID NO: 171204 - DNA, 802 bp, Arabidopsis thaliana landsberg
atgggtcaaggccaaagcagtgatgaagaaatggacgatgaggaaatgccgagatgcgttgtgtctgatccggctcaacctcacaacttctcccatagatccaagcagaaggtaaagcacgactgctttgggtgcgggaaaagtgacgttccttgggagatacgtgagtgtcctgacttgtattactactgcaccatatgcgatctggagttccatgagaattgtcttgagtacccaagtaagataattcacccttatcaccctcaacaccctctcgttttcaccgttataaactatgaaaccggaatcatagccgataccaactatggtgaatactatagatttcggtatcgttttgatatagaaaattctgaataccccaaaaatattaagccaaaatccagtatcatattcgatatatgcacttggtgtggtaatgatctcagcggatggttctatcgttgtacgatatgtaacttttccttggatttccaatgtgccttggaatttccacctcttacaatccaaaatcctaaaagccatccccattcactcgccttgttccctcgaccactttcatttccttgtaatgcttgtgggttgattaacgcgttggagccaagttatgcatgttaccgatgctactatgtggttcaccaaagttgtattgatttaccccgcgtcataaagatcacacgtcaccctcatcgactctctcacactccttaccatccagccaaagtttcgccctgccgggtctgctacaagaatgttgacatcaagtatggtcaatattctgttt

SEQ ID NO: 171205 - DNA, 548 bp, Arabidopsis thaliana landsberg
gtatgcatatatactggttcttcaggacttcttgaataaaggcaaggtttaatgatttattcagatatggaatacctgatatagattttaagatcgaggaatttaaggaccttatagaggatttgaggagtggttatgaagacaatcaattatcttggaggtagcttttcatcaccacaaaaattttgtgttcatcttaaggttttgattgtataaccatttcatttgatgttctttaggcaacctgatcttcatgactcaccagctagctctgagtatagttccggatcaaccatcatggtggatcagtctggtgataaaacacaaccattctcagcagatactcagacagaacataagcaagttggagaggagttgctcgtcccgaaaaatcctgatgagaatatgcccatctcgggcgaagaaaagttcagctcgcctattcaggtcacgccattgttcagatctttggcagacggtataccaagtccacagttctccgaaagtgtaagcttcgcaccttctttgttcatcacacaactacttag

SEQ ID NO: 171206 - DNA, 538 bp, Arabidopsis thaliana landsberg
catccgtgagaccttctttacctaacatgagtgaatctgaaaaagcatcatccccacatgttgtagttcaactccaagagggtaaatctggaaacgtaccatccgtagattctaaagcggtgccgttgatattgtcggccaaaagacttcgcctccaagggataaagttcaggctaagaaggagtgaagaagattccatactaaatgtaagattaaagaagaacaagcttcagataccacagttaagatttgatgaattcatcagctcattcttcctcaactgtgttgcctttgaacagttttacactgacacttccaacgaaataacaagctacatagtcttcatgggatgccttctaaataacgaggaagatgtaactttcttgagaaacgacaagctcatcatagagaatcattttggtagcaataatgaggtatccgagttcttcaaaactatcagtaaagatgttgtgtttgaagtagatacaagttacctaaacaatgtgtttaagggcgtgaacgagtacaccaaaaaatg

SEQ ID NO: 171207 - DNA, 403 bp, Arabidopsis thaliana landsberg
acgagttcctggcccgcgtaagcaagctgctgaaagcgggcgcccccagagggcgaatgagcgtgtagacggattctccgtcctctccggctgaggaagctggggctggtgccttacacggaggggctggagctgcaggccggcctcgtgcggcagcggcgcgacggagagatccccgacacgctcctcctcctccagcacccgcacgtgatcacgatggggagcggggcgcacgaggagaacatcctgctggggccggaggagcgcgcggcgcggggaatcgagctgcacgctgcggggcggggcggggacgtcacctcccacggacccggccagctcgtcggaataccagatcctggacctgaagccggaccggtgcgacctccaccgctacctgcgcggt

SEQ ID NO: 171208 - DNA, 549 bp, Arabidopsis thaliana landsberg
  unsure (1)..(549): unsure at all n locations
cacgcaaggccaccgcgaagatgctgcagacccgcgagcgcacntactcgctgccccagcctttctacaccgacgagcgtctgttccagatcgacatgcaggagatcttccacaaggaatggctgatcgccggcatgacctgcgagatcccggccaagggcaantacatcaccttgcagatcggcaagaacccgatcatcgtggtgcgtggcgccgaaggtaaggtgcacgccttccacaacgtctgccgccaccgcggttcgcgcctgtgcgtcagcgacaagggcaaggtggccaagctggtctgcccgtaccaccagtggacctacgagctggacggccgcctgctgttcgccggtaccgaaatgggtgccgacttcgacatgaaccagtatggcctgaagcctgtgaacgtgaaggtcgccggcggctacatcttcatcagcctggcggaaaacccgcctgccatcgacgagttcctggccaccctggaaaactacatgaaaccgtacgacatggaaaacaccaaggtggcggtacagaccgcct

SEQ ID NO: 171209 - DNA, 379 bp, Arabidopsis thaliana landsberg
aaattttagagtcttttattagtatataaacccccccttttttttccaaagtccatttgggaatacccaagattcggaaagggaaagttggccaccactactaagtatgacaactaagtgggggttaaaaatggagatatagtaacgtttttgggaaaatggggaaatcccgcccccgaattcggttcgtcaaagatatagcagcggaggtcaaaaaagcctttgatgttacaagaagctgcacaaacaggggatgtcgggttgagaggttgatcggttggaaaaggccggatgaaggctaggttatggtgtacatggatggggcttcacctggctactcaggacacaactacaactggaggcgtaatataggatatac

SEQ ID NO: 171210 - DNA, 1087 bp, Arabidopsis thaliana landsberg
atggatcctaaggggaagggaattgtgatcaacgacaaggagaaggagtccttcgtcaacgagccaagggatgacaagtccaatgactcaggctcgggccacaagcgaaaagatgggaagaagaagaagacaagacgcatcaaggagatcgtctactacgacagcgatgagtcctcttcttcccaaaaggacaacgacgactacgacaaacaaaagacggttaactcaaacttctcttttgattattcgcgcattccacatagctcaaatactcatttgctccccattccacttggcaagcctcctcactttgatggagaggactacggattttggagtcacaaaatgcgtagtcacttgttttctcttcatccaagtatatgggagatagtagaaaatgggatgcaattttatagttcggataactccatatttatcaatgaacaaatccataaaaatgcacaagctactactgttcttttagcatctttgtgcagggaagagtacaataaggtgagcggcttggacaacgccaagcagatctggacaccctcaaaatcttgcatgagggaaacgatgtcaccatgctcaccaagatggagttggtggaaggcgaactaggaaggttcgcaatgatcaggggagaggagccaactcagacgtacaataggctcaagaccctggtcaacgagataagaagctatggaagcacgagatggatgtcggcgtttcgagaccgggggtccctaagccgacgagtgaaatgtcgccgcgtgccccagcccagatgggtcgagcgcgaggccgagcgcgaaggggggaagtgaggtggccggagatgggcgtgagagaggtggaaatcccgctgccttcgtgttcgtcccgcgcctaggtcgggtgcgcttgcagtagggggttacaagcgtccacacgggtgagggagcgagcagccccaagcgagcgcgtgtctcgtcctcgtccccgcgcggccaaccctctctaagagggccctggtccttccttttataggcgtaaggagaggatccgggtgtacaatggggggtgtagcagagtgctacgtgtctag

SEQ ID NO: 171211 - DNA, 250 bp, Arabidopsis thaliana landsberg
tactaaggatcctctcctttcgtggtactcgtttggtacccctgtagcatctagatctcataacatcgggatcaagaccccatgcgaaagaagcgtgttaagcaaatcacagtttttcaattgtttcaccgtatcgctagttaccaaacttctacgcctggataaacctaacgggaaagagcaacaaaaatgtgtggagtacacatgccacggtgaggcctccacaattttttctttcacaaacacaaag

SEQ ID NO: 171212 - DNA, 500 bp, Arabidopsis thaliana landsberg; identical to SEQ ID NO: 2455

SEQ ID NO: 171213 - DNA, 427 bp, Arabidopsis thaliana landsberg
  unsure (1)..(427): unsure at all n locations
gatgagggcaagccgctcgttttcctggccagcggcactggctttgcacccataaaggccattgtcgaacaaatgatcgccagcggcgaccagcgcacggtcactctgtattggggcgggcggcgtccggccgacctgtacatgcacgacaaagcccggcaatgggagcaatccctgccgggcttcaagtatgtgccggttnnnnnnnnnnnnnnnnnnnnnnatcactggcaggggcgcacggggtttgtacatcatgccgttgtggaagattttccagacttgtcggggcaccaagtgtatgcttgcggtgcacctgtcgtggtcaatagcgcgcgtgccgatttcacacatcaatgcggtttgccggaaggcgaattctatgctgacgcttttatttcagatgcggataccttatgaatattaa

SEQ ID NO: 171214 - DNA, 428 bp, Arabidopsis thaliana landsberg
ctttatcaaactcttcatatcctccatctcgaaactgtttgatttttttcgaaatcgaaaaggtaactgattgattttcttgaaacacacacgaagaaagagtttttgctttgtcttgtttttttaagggtaaattgcgcacagtagccgttgacccacttttaatttcagattttgacattgtggactgcgcctttcatttcttagacattcagccaaaaactgaccagcccctgacgaaattgaacccggtttgtacgtacggaccgcgtcgttagaatccaagtgaaccgggttcgtacgtacattgttcatcgtcgagaaatgcattaaatgatttctgggtttcggcgaatttgacacttgagattggaattaaatttttaaaaaattagttgggcttagaagtttttaatgctaaaaagttt

SEQ ID NO: 171215 - DNA, 534 bp, Arabidopsis thaliana landsberg; identical to SEQ ID NO: 39545

SEQ ID NO: 171216 - DNA, 1259 bp, Arabidopsis thaliana landsberg
taatctgaaacatgggctcggatatcaggtttaccctaatggcgatgtctttgaaggttcttggattcaggggttgggagaagggccagggaagtatacttgggctaataaaaatgtctaccttggggatatgaaaggcgggaagatgtcaggaaagggtacactgacttgggttaccggagactcctatgaaggaagttggttgaatggaatgatgcatggcgttggtgtatatacatggagcgatggcggttgctatgttgggacatggacacggggtttgaaagatggtaaaggctcgttttattcagcgggaaccagagttcctgcagtgcaagagttttatttaaatgctcttagaaaaagaggtgttttgccagatatgagaagacagaaccaagttgcttcttctgttaatatggaaaaccttagagttggtgtgaaccgtaataagctctcaaaagggagcttaataaacttagaacagtcccgcaatggaagggtttctttagaaagacgttggagtctggaagtatctattgagaaagttattggacatggttactcggatttatctacggcaattttagatagcggaagtagtgtgcagtataaagctaacataccgatcttggagagggaatatatgcaaggtgttctgatcagtgagcttgtggtaaacaacgggttttcgcgcacatccagaagagcaaaaaggaaacacataagacttgttaaagaagctaagaagcctggagaagttgttattaaaggtcaccggagttatgatctgatgctcagtttgcagcttggaatcaggtatgcttgctctttctaaacctgtgccctgtgagcgtgtttagctctaaatttatcaccgaatattgttgttactgaactagttcaaacgttagatacacagtggggaagattacgccaatacaaagacgacaagttcggacagcagactttggacctcgggctagtttttggatgacttttcctcgagctggctccacgatgactcctccgcaccactcggaggattttaaatggaaggactattgccctatggtattcaggttagaacttgtgtactgcatacttttttcttagtagtatgttagttgtgtccttggtgtttacattcattctaaaccttgtagaaacctgagggagatgttccagatcgatgcagctgattatatgatgtccatttgtggaaatgatactttaagagaactttcttctccagggaa

SEQ ID NO: 171217 - DNA, 1092 bp, Arabidopsis thaliana landsberg
gagcaacttctagaggacttatggtaattcaacttaccaggcccccctccacccttattagagagccgaatggaatccatgcttgttattgagtttaatggcaagtttgatgctgtctacatagatcttaatgggaaaatcgacaatctgagctctcacatgaagaagctagatgtacaagtagctcaaactgcacaatccatcaagcgacaagaaggttttcttccttgaaaccctgatgcaaactctaggaagagctgtaatgtcatcttggtcagagatggagatgatgaatgggaggaattggacactgaagacgagttgaagctcgcagcagcagagctggtgtcgaccgacacctaccagtgtcgatcgacaccctatggaacactattttctgagacgattccatacgaaggtgtcgatcgacactgggtccggactgcaccatatgaggtaagaatcccgatgcagaccgaatctgcctacactcctcttgttccttatccaaggaagcgtcgttctaagcaggagattcatgctgctaagtgcacaaccatcatggaaaagatcctcacctcaattcctaaggatacttcggagacatcctctgctccactcaacaggtatgtcaagcgacttgttgacaatggtattaaatcagatgaagcctcgctgctgacaagggacatcagtgcaatcatgctgcctaaggttaagaaagagaaggcacagagagtggacattgttgagtagttccgcaccatcactcctgatcagaccactgagaaactccctgagccaggtagctttgttcttgattgctctatctccacaggcaggttcagcagctctttatgtgatctgggatcgagtatcaacctcatgcctaagtttgttgatgagagactaggcatgactaactacaggccgactagaatcactctcctcttcgtggatcgttccaaacgcatccctgaaggaattcttgaggatgtttctgttaaggttggtaactccctaatccctgctgattatatggtcctggactacgataaggaacccaaggatcctcttatcctgggagagcat

SEQ ID NO: 171218 - DNA, 604 bp, Arabidopsis thaliana landsberg
gggtcctcacaggaaagcccattacgaaggcccattgatgagctttgactgcatcgttctgtatccttcttgtgacatcttcttcttcgttcatcctcaggccactccatcaagattcgaaccgatacatggtcgtcgttctcagtcgccaccgtcgaccgaatccgctggtgagaatagcgtaagaagcatccacggtaacgaatcaacaagaagggttaaattagaagagaccataactaaatcacgataagagaatgctttcctccgctcaaatcttacggataggttctgagatgaagaacgaagttgtttcagagataatttagtaatggatcatcatcggagatcttaaaattcgtagataaaatatggatttattttttgtcgtttagaagaagaagaatagcaaattttcgagtatttccttttttccgactaggttacgaaaaaggaaatttcattaattatgctaaaaacaaaaaaatatggaaattttctcacaacggtcatatttgttgaaacagagaatgtgccgttgagatcgagaggagaaattcgggatcatgtgagctcttttcaaccgacaagatcctgcaaccaa

SEQ ID NO: 171219 - DNA, 473 bp, Arabidopsis thaliana landsberg; identical to SEQ ID NO: 79620
  unsure (1)..(473): unsure at all n locations

SEQ ID NO: 171220 - DNA, 394 bp, Arabidopsis thaliana landsberg; identical to SEQ ID NO: 50250

SEQ ID NO: 171221 - DNA, 470 bp, Arabidopsis thaliana landsberg; identical to SEQ ID NO: 79432

SEQ ID NO: 171222 - DNA, 561 bp, Arabidopsis thaliana landsberg
  unsure (1)..(561): unsure at all n locations
anggatgggnacttggaaactcagaaaggcagaaagancngcattgaattaggttactgggacacagtgttggagatcaaaaagaagatcgagaagtatcaacgtatccctgttcccaatcaaacccttttcttcggcaatgctcttgaagaccatcttgatatcggtcaatgcaagattctccaaaactctcatgtcgtactcttcggccttccagaccctaatgacaacaacgatcaagttcttcaaacggaggagcaacctcctataatcggagatctcatttacggtgaggatttgcctttgacaactgaagttgttttgaatattcgacctttttgcccagttcaagattctccggtgagaaacaacgatcaatctccaccgtcagacgcagcaaaagatatcatcaaaggtcatcaagattcgccggtgagaaacaacgagcaaactccaccgtcagactcggttaaagagaacactaacaatcaagattcgcctggggggaagataataccaacattacgggtgatgccatattccggcaagaataaagctgcg

SEQ ID NO: 171223 - DNA, 429 bp, Arabidopsis thaliana landsberg
actctctcaccttccaatacaaattctcgctcgatttaaatgtgtttgcaagagatggaacactcttttcaaggaaaggaggttcttcagcagtgatttgggtctcgcccgtccacaattcatcttgcttgccgaatccaagatttgctcggtggacgttaatcttgacggcccatctatagaggtgcataacttgccctcagatattcccggttataaactttatatgcccatgcacgtcgaatattgcgacgggttatttctttatgcaacctgttatgggattgggatttgcaacccatggctgagacagattagatggttcaaatccagttatgaaggttatgatttcagtcccatgggatccgacaatagtagacaggacaaaaactacaaaatcttagggtcttactgtacaaatacaaccat

SEQ ID NO: 171224 - DNA, 693 bp, Arabidopsis thaliana landsberg
tgggaaggtatcatcacacgactttggcccaaagcaaagtttattgaatgcattgttacaggacaaatggcccaatacattccaacattggacttttattccaacaagcttcctatagtttccatggtatatgggtcttctgaaagtatatttggggtgaatgtggatcctttatccaaaccacaagatgtgtcctacacatttctgcccaatatctcctactttgagtttctacctgttgatcatgaggaagatatgaacaccattgttgatcttgtcgatgtcaagctagggtgctattatgaaaccgtggttactagttattttggtctacacaggtatcttgttggagatattctacaggtgacaggattttacaataacacacctcaatttagatttgtacgcagaaagaatattgtgttaagcgtcaatagtgaagcaacaactgaacaggacattttaaaggggatggctagtgcgacacttgttcttgagtcttcaaattcaatgttgacgggtttcacatgctatgcggacatctccagttttccaggtcactacgtcttttactgggaactcaaagcaaaagatgttgacgatgttgttgaacccgactcaaaaagtattggaagaatgttgctatacgataagaggaatcgtttgatgctctttataaaagactaaggagta

SEQ ID NO: 171225 - DNA, 469 bp, Arabidopsis thaliana landsberg
ggtgaaacgatgtcgtttctcgacggacttatccacgtcaccagcaacgcgcttagcatgatggtatcgtacgataacttcggagacaacgtcgcgtcgtggacttacccagcaacggaacgtgacgggttttgggaaaagactgggcctggtttgggcttagatccgagtacagggcttaatttgggttttccttccggtttaaaagaagacgtgacggtgtgtaaagacggaaaatgcggttacaagacggtgcaagacgccgttaacgctgcgccggaggataacggaatgcgtaagttcgttataaagattagcgaaggagtctacgaggagaacgttattgttccgtttgagaagaagaacgttgtgtttatcggtgacggtatgggcaaaacggtcattacaggttcgttaaacgccggtatgcctgggatcactacgtacaatactgcaactgtcggtgagt

SEQ ID NO: 171226 - DNA, 861 bp, Arabidopsis thaliana landsberg
gatttgcaagagttagaattgcataagtgtaatgataatctcttgcatggcattgctgcgtgtaagaatctgaagggattgagattggtaggaagcgtagacggattgtatagttcatctgtgtcggatataggattaacattcttagcacaaggatgtaggagtttggtgaagcttgagcttagtggttgtgaaggtagctttgatgggattaaagcaattgggcaatgttgtgaagtgcttgaggagttgagtatttgtgaccatagaatggacgatggttggatcgctgcgctttcgtattttgagagtttgaagatattgaggatttcgtcttgtagaaagatagacgctagtcctggaccggaaaagttgttgcggtcttgtcctgctatggagagtttgcagctcaagaggtgttgtttgaatgacaaggaggggataaaagctttgtttaaagtgtgtgatggagcaacagaggttaatattcaggattgttggggactgagtgatgattgtttcagtttggctaaagctttcaggtaacttgtcctttttgcttcattggtcttctcggtgggcttttgaatcatcatttttgttctttgcaggagggtgaggtttctgtctttggaaggatgctcagttttaacatcaggaggtttagagtcggtgatttcacattgggaagagcttgagagtatgagagtagtgtcatgtaagagcataaaagacagcgaaatttcaccagcgctctcgtctttgttctcacttctcaaagaactaacttggagaccagacactaggtctcatctctcgtcgagtcttgaaggaacacaggattggaattatagggatgca

SEQ ID NO: 171227 - DNA, 288 bp, Arabidopsis thaliana landsberg
ataacgcgaggaatggtaccgatttggacggattcaagctacccttcaagatcatggatagatagtacatctctttaccaacactacaagaaaacaggtaaacgacgactacaatcagcgacaacaaacgtagtcgtaacattatacgactatttggccacggatttacgactcgcatgcgacaacacgaaaaattgtagttacatagtcgttgttttacgactatcgtatgcagtcggcaaagagtcggcaagtaacgactatttgatgattatattattgaaggga

SEQ ID NO: 171228 - DNA, 372 bp, Arabidopsis thaliana landsberg
tgatcgaaacatctctgtcgggtcctagcgatccagagatgtggatcacggtggacggtgtgccggcgattaggatcatgaatttgaattggagatttagagggaatgaggttgtgactgtgagtgatggtgtttctttggagatcttttgggacgttcatgattggctgtttgaaccctctggttcgtctagtgggttgtttgttttcaagcctaaagctggatttgaatctaaatgtcttagttttaatggtggctatggtgatggtgaaggtgaggatcatgatgtggaagatgacgattcgtcgcccaagtattgtcatgtcctatatgccgtcaaagaactagaatttccatgtcaaaaaaattagt

SEQ ID NO: 171229 - DNA, 613 bp, Arabidopsis thaliana landsberg
atggcgtcttgtgatgaatcaattcatgagaatgatgaaatgtcagaagaagagattgaaacatctatttttggaaaatcaaccaagaagaaagataatggaggggcagggggaagtggttctaagtcaagaaagaaggttaggtcttgggtttgggatcatttcaccaaactgtcaactgatggtaaccattggaatcgcaagcactgtgggaaagagttggcgtgaacagccacgtccgaaacatccacttggaaaaagcaccttatcaatatgcgccaggcatattatgtgtgcaaagctgattatgtctacactacctacaaccgtgctactcttggtggaaaaacgcgtgtttgactgtcaacatggacattaaaccaaagagagctgctacagcgaaatctatggctgactcagatatgattcatgataccccatgcgatacgcttaagcctgcacaacataagtgctcccaaggataggagcctaagaccgaatttctggagagcaactaccagaggtgcgctcttagggagaatgaactgtgagtactatcattggataagctagttcgatcgctctatgtggccctgtgaaactcactatcctg

SEQ ID NO: 171230 - DNA, 473 bp, Arabidopsis thaliana landsberg; identical to SEQ ID NO: 14031

SEQ ID NO: 171231 - DNA, 656 bp, Arabidopsis thaliana landsberg
tagctaagagacgcagtggaacctcgcagcagatttagcaggaagtctcaagagtatatcaggaattagatcaagaggaatcatctcgagaaacttacaaaaactctcatcttctttagattgtatacttacttccctatcttccgcctcttcctctactctatccattggcgtcgatccactagttttttttttaaaccctaatttttcaaccctaagtttttcaaaccattatagtagttgtcatctctggacaaaaggaacaagtcaatgcatcgatcaccgaaaaggaagcatcgtacaaagagaagaaaactgaagattaagaacatctctttctcttttaactggcatacttcacaagaactacatcttagcagatccaacaaccgaagaagaatcgatcatggacactcttgtgactgttgttttggattcctcggatcaaatggtttctttctacaaatcaggaggagctgctctcgcctattcatcagccatcaaggtgagagttttagctttctcttaggttaatccaccacttgatttacaccgttttttgtttcttataaagttgctatgcgcagagctgtgtcgagttagcaaggaagagagcaaaggagcttaagcagatattgggagagatggatatcgac

SEQ ID NO: 171232 - DNA, 480 bp, Arabidopsis thaliana landsberg
  unsure (1)..(480): unsure at all n locations
nnnnnnnnnnnnnnnnnnnnnnnnnnnnnnnnnnnnnnnnnnnnnnnnnnnnnnnnnnnnnnnnnnnnnnnnnnnnnnnnnnnnnnnnnnnnnnnnnnnnnnnnnnnnnnnnnnnnnnnnnnnnnnnnnnnnnnnnnnnnnnnnnnnnnnnnnnnnnnnnnnnnnnnnnnnnnnnnnnnnnnnnnnnnnnnnnnnnnnnnnnnnnnnnnnnnnnnnnnnnnnnnnnnnnnnnnnnnnnnnnnnnnnnnnnnnnnnnnnnnnnnnnnnnnnnnnnnnnnnnnnnnnnnnnnnnnnnnnnnnnnnnnnnnnnnnnnnnnnnnnnnnnnnnnnnnnnnnnaacagtaggatgtggagggctcaagtgaagggaaaggaatatgggttgtcctgtgtatgagcgttgaattgcgcctcaagccctatgcattagtggggttttgtataaaatagataaatctgtgttagttgccccagtttttg

SEQ ID NO: 171233 - DNA, 684 bp, Arabidopsis thaliana landsberg
tacaggccaaactcctaaaggaagcccaggcgcagaacacctgcatcttctccaccgaattcgcgctgcgcatgatgggcgacatccagcagtaattcgtcgaccacaaggtgcgcaatttctactcggtcagcatcagcggttatcacatcgccgaagccggcgccaacccgatcagccagctcgccttcaccctgagcaacggcttcaccatcgtcgagtactacctcgcccgcggcatgaaggtggacgacttcgcgcccaacctcagcttcttcttctccaacggcatggacccggaatacaccgtcatcggccgcgtcgctcgccgcatatgggcccgcgccatgcgcgagcgctacggcgccagcagccgcagccagatgatgaagtaccacatccagacttcaggccgctcgctgcacgcgcaggagatccagttcaacgacatccgcaccacgctgcaggcgatgtacgccctgttcgacaactgcaactcgctgcacaccaatgcctacgacgaagcgatcaccacgccgaccgaggagagcgtgcggcgggcggtggcgatccagatgatcatcaacaaggagctggggctgaacttcaacgagaacccgtggcaggggagttacgtggtcgacacgttgaccgacctggtggaggaggccgtatacaaggagt

SEQ ID NO: 171234 - DNA, 1279 bp, Arabidopsis thaliana landsberg
agatggcatgctgagcattcacgtttagatggttaggtcacattttcatcagatgcgaaggcttgggggcattttaacacggtacattttgactttgcaagggagagtaggaatgtttatcttggtctatgcagtgacaggtttagtccatttggtatgtccggtcgggagtattctttgtggccagtaatcgtgacaccatacaatattctacctccatctatgtgtatgtagcgagaatttttattcttgagtattttagtccctggtcctaagcatcctaaacgttctcttgatattttctgacatcctttgatccatgacttacaacagctttggtatactggagttcgtacatttgattactcataacaataaaaatttacaatgcatgcaatgcttatgtagaccataagtgatgtttctgcgtacggaatgctatcaggttggactacacatggtaggttatcttgtccaaatcggatgcatttcaactgaagcatggtcgtaagacaagctagtttgattgtcatcgtcgttttcttccgatgagtcatacgtacaggaaggacaaaaagttttttaagaagaacaaagtggtacgtgacctccacctgtatatgtgtctggagaagccttgcttgagcagatagattattggggtgcttaagaaactgttccatgtgggggtaattggcacatccccgccaatatgccagattgatatctggttaatcacaagtagcacaagaaaaacatttttttgcagcttccttactggaaggatcttctgttgaggcacaaccttgatgtaatgcatatcgaaatgagtttttttgataacatgatgcatacacttttgaatgtgcagcgacgtagtaaagacaacttaaaaacaagactggatttgcctgatatatgttcgcgacctgatttgcatcttacgagagatgggaaggttctcgttccaacttttagattatcctctgaagcaaagacagcgctttttgagtgggttaaatctgatgtaaaattcctagatgattatgtgtcaaaactttcaaagaatgttgagcaaggcaaaaagttttcgggtatgaaaaagccatgactgccatgtctttatgcaacgcctattaccatttgcttcaaagagctattaccaaaaaatgttcatgaggcaattgcaggtatgtgtgataatttaattaatttagttagccatatatgtaattatactcataatttgctatgaacgcaggtatggaactttctttcg

SEQ ID NO: 171235 - DNA, 580 bp, Arabidopsis thaliana landsberg
ataattaagattaaaaatatcatgtactcatttgtacgtacacgtttgtaatttgtgttcatatacgtacataaacatcgaataaattttatatctatgtttaaaataatttttgaatataaaaacaaaatatacaattaatgtactaattacacctgaaaatatattaaacctaagaatcaaacgaacctatttcgaaaaataagaactaaactcagaactaacaaattattcgaatgatattaaatttctatacctgaataatttgaaacatagttgaaaaaccaaaattttatccaaagcaaacagagatctgaatggatatccaaaatatagttatatacttaactatttaggctttataattagacttttatattctaactaccctaatttacaactataaaatcgaagttaacatacactaatacatttatcaaagaatttgtacgtacactaccaactatgtacccggtaaattatgtaaagatgttacgtacacgaatacatataaacatagtagatgtgaaatgaatgataatggtgtgcatgttaatatttgagatcggttttacctgaa

SEQ ID NO: 171236 - DNA, 1141 bp, Arabidopsis thaliana landsberg
gcattgcagggattaagtacatgaggaaggtggttcttgtcgatggtactgccatcaaacataagttcaaaggagttctcttaacagctagcatgcaggatgccaacttcatggtgtttccaattttgttggttattgttgatagcgaaagtgaaccagctttgacctaattttttaggcagttgagtgccattatgcctgatgctaaaaatttggtcatagtttcagatagacatgcttcaatatatgctgggattaggcaggtgtatccaaaagtttttcatggggcatgtgctgtgcacatagaaagaaatgtcagagtcaagtttccaaagaaaggggtgtctaaccttgtcagtaaagcatctagagccttcaatgaaactgatttaactgatttcagggcctttaatacagagatatggaggcgcaacagtgggtgtgccgattatttggctggaataccaaaagaacactggacacaagcgtactgtgaagcaaaacggtacaatctcacgagctgcaacattgttgaggcattaaattcagctttggggaagattattgaactgcccataatgacattggtggaaggaataagaacgaaattgatgaagtggttttgtgtgcgacgtgctaaagcactgaagcttaaagacagaattataccaaatgcacacaagctaatattgcgccatcatgcaggctcaaatggtttggctgtgctaccaatctctccgtggaccttccaagttaacaatgttgagagaactgtgttttatgttggtcttcaaaagaaagcgtgcagccgcaggcagtttgacaaactacagatacctcgttgccatgcgcttgttgcaactgaacaaacaaaaattcacataccaaccctagttggaaactggttcaaagtctgtgtttgggaaaaatattatgctgagtttatcaaacctgtgtctactcatggcaaagaagaagttgatggggttattgaggaatccgagttcattccacgagatcatagtatcggtcatggaggccgcatgaagaggagatttccctcagttggaaatcacatggtaacggaacattgagttataaacatgatacttttttactttgctatgtacttgagttacta

SEQ ID NO: 171237 - DNA, 980 bp, Arabidopsis thaliana landsberg
catgaccgttccgaaagaattccctcttcttttggtggagaaagaagcgttgatttaagctgaggcgcaagaaaagatcgtgaggacggttttagaactgaaaattccttatctctctatcacgctttcactcatatggagggcggagtttcaaaacaagccggacaatcagcatggggtaggaaccagaggtatttgcctgactgaagggcagattgtcaatagtgtaagagcttatagggggtaacacttacttgagactaaaactagatcggattcatgactttaactctgctctggtccacatatgcaggtctttaaaaagccaaccatggggccaaacggtgagctagtaagcttgggtacagaacctcaaaaggttgttggtggatgtgaggtcactgcaattctcatcctatatggacttcgtaggtacaataatcttttttaagctcatctcatccttctaagtaatctcacgcaaatagactaaatcaaatctctttgcggacacaggtccctaactggatatatcttggctcatgagatgatgcatgcttggcttagactcaatggtactactagtacccaatttgtatttgccaatcaatatggagagagctctcaactaaaagtgctatttggtttgatcacaggttataggaatcttaagttagagctggaagaaggaatatgccaagtgctaggccacatgtggttggagtcacagacatactccagttctgcagctgcatcatcagcttcttcttcttcgaggactccagctgctaatgcatcaaagaaaggtgctcaatctgattacgagaagaaactggtggaattttgcaaggatcagatagaaacagacgattcaccggtctacggtgttggattcaggaaagttaaccagatggtctcagactccagcctccataaaatcctgaaaagtattcaacactggacgaaaccagattcaaatc

SEQ ID NO: 171238 - DNA, 1108 bp, Arabidopsis thaliana landsberg
accggttatggtaaacggtaagcaaaaaggttgtaagaagattttggttttgtataccaattttggtaagaatcgaaaaccggagaaaaccaattgggtaatgcatcaatatcatttggggacacatgaggaagagaaagaaggagaacttgttgtgtctaagatcttttatcaaactcagcctaggcaatgcaactggtcgtcttctacatcgagcttgaacgctataggtggtggcggcggtgaagcgagtagcggcggaggcggcggagagtatcatatgaggagagatagtgggactactagtggtgggagttgttcttcgtctagagaaattattaatgttaatcctccgaaccgatccgatgaaataggcggcgttggtggtggcgttatggccgtagcagctgcggctgcggcggttgcagctgggcttccgagttatgcaatggatcagctcagctttgttccgtttatgaaaagctttgatgaggtatgcacccatttttgtcattttgattttttcgtttaataaaataactaaattaatttgcatactcactggtaatattaggaccaaaaatgtgatttgactattaattatatttatcaacctcgcataagattaataaaaacaaaggtgaatgctggaaaaataatgcttagggctcttatattggcttgtattgcaagtaaacaatgctcattttgtttgtgtaatttctgatttttctttgtcttattataatttagttacctaaggaaattaaataatcaatttatacgacgtgataataatgaacggttggtgataatcaatttttaactaacaatgtgacttaaagtttcacccgacgtgataaactcagaaaacaatgtctaaaccgcaacggtccaaaagaattgtgatataataaaagtaattaattttctatatataaaaaaagaaagtatatataatatcagttattttaattagcagttaaaagtttataaatgttcaggtggcgaggagggacactcctcagactgggcacgctacatgtgaggatgaaatggcagaacaacatcgtcatcgtcatcaagcatcatcatcaacatcacatca

SEQ ID NO: 171239 - DNA, 728 bp, Arabidopsis thaliana landsberg
aactgtaacatcgaaggatccatcgatttcatttgggaaagaggccaatctatataccaagtaatctcatatttctctcatatacatgctaaatatagagatataatgatatatacgtatcctgatcgtgcatgtttcaagcctaaatcgatcatggtcgaacgaaccaaacaaaactcgttcttaagaatttaaggttagatttaaatttgtattttttcaattaaggggagtaagatatgtttgtatgtggatgcagaactgcattatacacgtgaaaagagtggcaacaaagggaaaggtgaagagagaacaaatgttaacaggatacataaccgcacaagggagagaaagcaaggaagacccaagtggatttgtgttcaataattgcgtgatagaaggaagtggtagggcattattgggaagagcttaccgaggctactctagagttgtcttctatgaaaccagcatgtccaacattattgaacgtagaggatgggatgcttggcatcgtcaaggccaagagtatgtgatgctccttctcgtttacttctaatgtatgcatttgttacatatttggtagatataaattaacgatagtattatattacatgaaaaaaaaatcagggatattttacatttgcggagataaactgcaaaggggaaggagcgaataagagaggaagagttcgatgggagaagatacctagtgctgagatgttaaatct

SEQ ID NO: 171240 - DNA, 437 bp, Arabidopsis thaliana landsberg; identical to SEQ ID NO: 12402

SEQ ID NO: 171241 - DNA, 440 bp, Arabidopsis thaliana landsberg
atgtaaaagacgaaaacccacgatcatgaataatcgaaagcatatagaaggcggctcactgatgaatactccccacgttttcgcagtgtatgtgagtatgcttaccgttaggtgaataatgaccgagggcggactggaataaatgggcagaaggatccggaaataatccgggcttttatacaatacaatagatagcctgcccgtctttacctgtaaggtaaggcccgaagacaggagccagatgaatgcagtgttctttatgacagacccctcgctggaagccccgttcctggaacgctgtaaaaaaaaaggcatggtaggtgtgaaaggctacagcactgttgacggagtacgcatcagtatgtagagatggcgggggcctatggaaaagtgtaaagtcaactatgcgccgtcttgtgagatttcgccgttacataagg

SEQ ID NO: 171242 - DNA, 2105 bp, Arabidopsis thaliana landsberg
acgaaaaacctatcttctataccagtaaagccctgaatgacgccgagaccagatatccgaccttagaaaagctggcgttggcggtgataacggcagctcggaaatttcgaccttatttccaatcacattccatagtgttcactgatcagccactacgcacagtgctccacagcccaaaccagtctggacgaattgcgaaatgggcaatcgaactgagtgaatacgacgtggaatatcgctttcgcccgagcctcaaatctcaggtcctagcggacttcatgactgaactatccccggatgtgattgacgttatcccggacgaaaactggatactctactcggacggctcctcatcattacaaggctccagcctcggaattctacttcagtcaccaaccggagaaatccttgaacagtcacttcggctccagtttaaggcatcgaataacgaagcagaatacgaagcacttctcgcaggacttcgactcgctaaaggcctcggagccaggcacatcaaagctttcagtgattctcagctcgtagtctgtcagttcagcgaggaatttgaagctaaaaatgaaagaatgcgagcctatctttcattagttcacgatctgtccaaacagttcgaccaattctctctggtcaaaattcctcggactgacaactccgcagcagacgctttagccgcacaagcttcaaacacgaaccccgatatgaggcgaacaatcctcgtcgaaagcatagcgaaaccaagtatcgagctaccaagtgtgacctgcgtgattatagatcccgtgacggccatggacgtagatgtagacgcaaccaacacgccaaacatagaagtggatccggaaccatcagattggcgagaccccatcaaaatgtacattgccgacggcgtagttccaacagatcaatgggaagctcgccgattgaagacaaaagcggcaaactacatgatgatgggcggcgagctatataggcgaaatgcgacaagaactttcctcacttgcgtggatcaaaaggaagccctaacactcatgaaggagacacatgatagagacggcggtaatcactccagcgggcgagctctggccctcaaaatctagaaagacggtcattactggccaactatgttggcgtactgcgaggcctacgcggcgaagtgcgaaccgtgtcaaaggcacggcccaatgaagaacgtccctcccgagatattgcactcggtcacggcgccatatcctttcatgcgatgggccatggacatcgtgggaccaatgcctccttccggatctaaaagatttttgttggtcctaactgattacttcactaaatgggtcgaagcacaggcgtactacgaggtcaagtcgctcgatgtcgtcgcattcatcaggaaaaatattatctgtcggcatggtcttccgtatgagatcgtcacggataatgggaaacagttcgtctcactcattaccatgagcttccttgctccatggaacattcgcatgagcaactcgactccttgatatccacaagggaacggacaagccgagaccacaagcaaaacaatcatagccgggatcaagaaaagacttggccccaaaaaaggaaactgggcaaacgagctggaaggcgtgttgtggtcataccgaactacaccttggcgacctacgtcggtgtctcctttctccttagcttacggcattaagccaatggctccgttcgaagctggaattccgacgttacgcagatgcatgatgtcaaatgaccataaactaaataatcggcttcttggcaaccacaaaggcttcgccgaagaacttcacgatcaagccatcatccggatccaaaattaccagaatgcagcggcaaaatactataatcgaaatgtccgagaacgtcgctttcacgtgggtgacctaatactacgggatgtttacagtaacaccaaagaaaagaacgccggaaagctcggagctcgatgggaaggaccttacttgatctccaagatactccaaccaggagtctatctgttgatgaccatgaagctgaaagaagtggaaaacccgtggaacgaagcccaccttaaaaggttctactac

SEQ ID NO: 171243 - DNA, 184 bp, Arabidopsis thaliana landsberg
gataaaagatgttgatctgagtgcatcggccaccaatagcattgttcctgatccaaagattctgatatagctgatcagagctttgggattgcaaagcttcgccggagctaattgctctctttccccgcctccaagctgtgttccaattccatgtttcttagggactaagaactttctccttgtt

SEQ ID NO: 171244 - DNA, 308 bp, Arabidopsis thaliana landsberg
ctgccaccgaattctcctcaagtatgatttcagaaatttacttgataaacactacgagaatagaaaacgaaggagccttcaccgtctgtccactcgtccccattagcccattgtttctgtccggtgacggtttcgaaccagccagtgtcctctttccccgcgctgcttttcacttccctccaaaagataaaaaggaggcgtacgacttcatggataaggtcgggattcactcttccttccttaaagcttcttctcctttttttttttacactaatcggtttcaatactagggctgttgacacacatcg

SEQ ID NO: 171245 - DNA, 366 bp, Arabidopsis thaliana landsberg
tttcttctagggctcagattgttcgactttcttctttaacctttcttttactttccaaagagacatgtctcaccaccaccaaaacttcgatacaacattcacaaagatatacgtggggggtttgccttggacaacaagaaaggaaggcttgataaacttcttcaaacgttttggtgaaatcatccatgtgaacgtcgtttgtgatagagaaacagatcgatcacaaggatatggcttcgtaagtaaccaagaaacaatatatacgtttaggttatcgattattcttgaatcttgtatatatctttcttcaggtcacgtttaaagacgctgaatctgcaacaagagcttgcaaggatccgaatccgg

SEQ ID NO: 171246 - DNA, 619 bp, Arabidopsis thaliana landsberg
gtccgatccttattactatcaaccctttttttgtttggtttacattaacattttccctttgttacaagctttgcaaagtgcaaacgtaaatgtcaaactagactaaagacatttttttggggtcaaaaacatgcattatatgagtttcaactgactaatttgactcgttatatgcatttttatttttctatcagtaacatgcattttttatcttttgctatcagtactacatgcactaagctacatgtcttgtcgtacgcggatttaaaagcgtcatgcgaacctgatttaatcatttaattgtacctaggtgattgtttcggagacgggatgggcatcaaaaggcgatgcagacgagcctggagcgtcggtaaagaacgcgagaacatataatcggaatcttaggaagcggctgcagaagaggaaaggaacaccgtacagaccagacatggtggtgagagcttacgtgtttgctcttttcaacgagaactcgaaaccaggtcccacttccgagagaaactttggcctttttaaacccgatggtactattgcctacgatattggcttaaccggactcaagtcctcttctgccacacggtatcgttttaagtcgtctctt

SEQ ID NO: 171247 - DNA, 1897 bp, Arabidopsis thaliana landsberg
agcaaatcagtcaatacatttagagaccacgggatcgagagaagccttgaaatcgcccctgagcttttctcagcaataaaagaatcaaggatcgcaatcgtcatcttctctaagaattatgcttcttcaacttggtgcttaaatgaattggtgaagatccacgagtgctataagaaattggatcaaatggcgattccggttttctaccacgttgatccttctcatgttagaaaacagacaggagaatttggcaaggtctttgaagagacatgcaagagaaaaacactggatcagaaacagaggtggatgcaagttctaacagatgtagcaaatatggccggagaggatcttcagaactggtatcttgtttcgcattccatatttgtgtgtgtgtgtgtgttttatttatttattatctctgaactggagtttctttgcatagacttaggttgtgcttttagggctgtgctctttaatgacaaatttactattattgttattaggcctgatgaagcagccatggttgaaacaatcgccgtcgacgtcttgaataaacttattactccaacggatgattttggcggcttcgtgggaatcggagctcatttaaaggcagtaaatacaatgttgtgcttggaatctgaggaggttagaatggtcgggattttaggaacttcagggactggtaagactaccattgcaagagctcttttcagtcaacactcttgcaaattccattatcgcgctttcgtaacttataagcgaaccatccgagatgactatggcatgaagttgtactgggaagagcaatttctgtcaaaaattctaggtcaaaaggacttacatgtataccatttatgaatggtggagcgaaggttaaagcacaagaaagttcttatcattcttgatgatgttgatgatctagagttactaaaaacattggtagggcaaactgaatggtttggatccgggagcagaattattgtgatcactcaagataggcgacttctcaaggctcataagattgaccttgtatatgaggtagagttcccatctaaggctcttgctctcaagatgttatgccgatctgcttttgagcaagactacccaccccgttgttttatggaagtcgcggttaaagtggccgagctcgccggtaatcttcctttgggtctaagtgtcttgggttcctctttacgaggaaaagaaaaaaaagagtggatggagatgctgcctgagctccaaaatggtttggacgaaaatattgagaaaatattaagaggaagctacgatagattagataaaaaatgccaagagttatttatttacatcgcatttgcatgtttattcaacggtgtgcaagtcagttacatcaaagacttgctcgaagataggcttagcgttaggcttacagtgttggctgataagtccctcattcgtataacatcaccatatgaaactatagagatgcacaatttgctacagaagttgggtagagaaattgttcacgcagagtccaaaaatcctggaaaacgtcgatttctggtggattctgaggatattttcgatgtatttacccataatactgtaagttatttgcgtattcgcataatgtgtagtgacttttatactactagttaatcagacatttggtcattgttcaacttttagtacaatagtttccgcttccacatgcttaataatagtttacttgggatttttcagggcacggaaactctggtaggaatatatttcaatacatcatataccagtgagccacttgtcatgcgtgaaaagtccttcgaaggcatgcataatctccaatttctaatagtttgcgattatggcgaggggcgaaagagggaagccagattatctctacctcaaggcctcgttt

SEQ ID NO: 171248 - DNA, 413 bp, Arabidopsis thaliana landsberg
atggtgatgatgaagaagcttttgtcgaagcgtttgttcaatatgtcaaaaacggcgtcgcaaagtctcatgaactgtcgtacttcgtcttcttcgttagccatgcgaactagggttcctaaagatttagaagccacgattgatccagagcctggagatttgacgatttctcagaggtttgtgaataaattctccatgaatgggattgatacgacttcgaagatgtcgatgggggagagtctgatggagaagcttaaagaaatggatatgaacaacgatcggattcgattagatggtctttctcatccgaaggaggagacgttagggcttactgtgcaagacgtgaagacgtgctaagagcagcagagatcgaagttattaaaacgaagctgatggagacaggaaaaatctgg

SEQ ID NO: 171249 - DNA, 1803 bp, Arabidopsis thaliana landsberg; identical to SEQ ID NO: 6968
  unsure (1)..(1803): unsure at all n locations

SEQ ID NO: 171250 - DNA, 323 bp, Arabidopsis thaliana landsberg
gctgcacgcccgtaggcggcccgctcgttcggtgacatcgccatcgaccgtgagagtccggtgccactagtcttccagctcgaccagctcctcgaggcagagattcagtcccgcgcgctgtcgacgggagcccggctggagatcgaggccgagctggccgcgcacctgggcctgtcccgaccgacggtccggtctgcgttagggtacctggccaacaagggcatgatcgtgcgccacctaggcgccggacccgtggtggccaaggagcggatcgaaatcgaagtcgggctcaccagcatgcacaatgacctacacacggcggg

SEQ ID NO: 171251 - DNA, 339 bp, Arabidopsis thaliana landsberg; identical to SEQ ID NO: 71422
  unsure (1)..(339): unsure at all n locations

SEQ ID NO: 171252 - DNA, 838 bp, Arabidopsis thaliana landsberg
ggagatcgagagaccattccaacaattactaatttctctcctctttcgttgcttttgaaaccttagttattaccgagagatcaaacagagaacgatgcagaggcgagagttcttggagttgttcgaggcagcacttagagcggctaagtctgtgaaaggtgctgagagttctccagaggtattgaggtttgtcgatgctatgaatcgtttgaaggaagcacctaagtcacttgtttgtgacgtggtctgcaaaacctccatggggaagggtttgggattcttcattgatcacaaaaaccctaaaattcgatcggaaggaaggattcttcgggatctttggatgaagattcattatgcttcaggtagagaaaagagtcgtgatagagaaactccggtgaagattccgacgcattcaacgatgaagaagactggagattcaaaacgagataaagtgcatgagattcttcaatcatctttggctaaagtcgctactgaggttgttgacacggagatgaagagacgagtcatgactgtttgtgatccttgggttgtggctgtatctgtggaatctgcaatgtttgagaaattaggttgtttcatgggacctcaaaaagcaaagtacaggtcgattctgttcaacatgggagatagtaacaatccagatttgaggaggaaagtgttacttggtgagatcagtggggagagattagtgaagatggagaaagacgagatggggagtgagaagattcagaaggaggttcaaaggattaaagagagagcaagatttaaggaagagagtcgcgtgaagatgctttcatcagcagatatgatcatgact

SEQ ID NO: 171253 - DNA, 691 bp, Arabidopsis thaliana landsberg
tcttatcgtgtggtccgtttgcgtgattgtccttgtctgatttcaagtagtttggaagtagtttctcgtgggatgggtcctatattgttgctgcccgcgtgaagcatcgctaatatcctgtcaggttccctccctttagcaccctttgtctctgatatggctggttatggacgccacgctaatttacccaaccatagtcatttgcttggtttcctttggaccctttccgagactagtttacccaaccatagtcatttgctttttagagttaagagtaccggcattatgaccctatttctacggagtaggtgttaccgaagcctctacaactctctatctacccatacaccaattatcaaggtcagtcatgtattaatcttttgcttggataatttgcaaccttctgtttgtttggaaaagtacggcattatgaccatgtcttttagagttggttaccgtttccttttcaacctcaccaacccaacatcctcctccgtggagcacatgatcaaaagctcggatgcattgtttgcaaggatttcgccaagcccgacttcatggtcgaatctttcaatccttgtaagctttttttaaaagtacacatctctttgaaaaactcatgaagcccctatctttaatttcattgtattatcttatgtctttgtgtatgaacctccctcttttgaggatt

SEQ ID NO: 171254 - DNA, 606 bp, Arabidopsis thaliana landsberg
caatggatcatggcggagatcattacccatcccaagattcttgagaggttaagagaagaaatcgattttgttgtagggaaaacaaggttgattcaagaaactgacctaccgaacctcctttacttgcaagcgataatcaaagaagggctaagattgcatccaccggggccactcttaccaagaacggtccaagaaaggtgtgaaattaaagggttccacataccagagaagactatacttgttgtcaattcttatgctataatgagagatcctgatttttgggaagatcctgacgagtttaagccagagagatttttatctatttcaagatcagggcaagaggacgagataagagataaattcctaaaatacattccttttgccagcggcagaagaggttgtccaggaacaaatctagcttatgcttctgtaggaaccgcggttggagtaatggtgcagtgctttgattggaaaattgaaggagagaaagtcaacatgaatgaggctgctggaacaatggtattgaccatggctcaccctcttaagtgcactcctgttcctcgaaccctaaacacttaaacttcgtagttcttgacttggggatgt

SEQ ID NO: 171255 - DNA, 724 bp, Arabidopsis thaliana landsberg
ttttgtcattttgggccagtgccacaaaagaggtcattgtctttaccctgatatttcccatactcatgtggcgttcgtttgctgccccccacactgacgacgaggaataggtccatgaaccgtttgctgaccctgtttgtggtgtttgttctgccggcgttgccgttgttggccatcacccccgagttctggatcacacagctcgattacgtggggttgtccagcctggtggtgctggggttggtgctgctgaccggcgtgggcgggctgacgtcattcggccaggctgcatttgtcggtattggcgcctacagtaccgcgtggttgaccacggccatgggcgcttcgccgtggcttggactggtgctggggttggtgctgacactggctatttcgtatgtgctgggggccattaccctgcgcttgtccggccattatctgccattgggcactattgcatggtgtctttccctgtattacctgtttggcaatctgacgtttctggggcagtacgacggcatcgcaggcatcgaacccatcagtctgttcggcgtgccgctcggtagcgggcgtcatatttattatttgatctggtttttcgtactgatgtccatgtgggcaacgtataacctgctcgattcccgtccgggccgggccatacgtgcattgcgcagcagcggcggcatggcttaatcgttcggcgtgcacacggcggcggtcaagg

SEQ ID NO: 171256 - DNA, 187 bp, Arabidopsis thaliana landsberg
caaagttttgtgaacagtgtggagttggttttgttgatttatgggtttgtagatatcacatggtatacataacccttacatgtcccgtctttcatgtatggggttggatctgtcttccatagttagtattgcgaatctattagatagacgtctttaaagattacaaggcgtagtatccttcaatgtg

SEQ ID NO: 171257 - DNA, 609 bp, Arabidopsis thaliana landsberg
atgtcaattttcctctgtttcctcttgcttttgctacttcttttagtaacaataatcttcacaagaaaatctcaatcctcaaaactgaaacttcctccgggtccaccaaagtttccgatcatcggaaacttacactaccttaacggattacctcacaaatgtctcctaaacctctggaaaatccacggaccagtgatgcagctccagttaggatacatccctctagtcgtaatctcctcaaaccaagcagcagaagaagttctcaaaactcatgacctagattgttgcagccgaccagaaaccatagcgtcaaaaacaatatcttacaacttcaaagacataggattcgctccttacggcgaagaatggagagcgttgaggaagctcgctgtgatcgagctattcagcttgaaaaaattcaactcttttaggtatataagagaagaagagaatgacttgttggtcaagaaactctctgaagcttcagagaaacaatctcccgtgaatttgaagaaagcccttttcactctaagcgctagtatcgagtgtagactcgctttcggtcaaaatcttcacgaatccgagtttatagatgaagatagcatggag

SEQ ID NO: 171258 - DNA, 559 bp, Arabidopsis thaliana landsberg
ggttgttggtgtctcaagaagggattggtcagctaaacttgatgagactttatgggcctatagaaccgcatacaaaacgcttattaggagaaccccaatccagatgctatatgggaaatcttgtcatctaccagttgaagtggaatataaagccatttgggcaaccaaacttttgaatttggaaatcaagggagctcaagagaaaagagcagtcgacctgcatgaactagaagagattaggctggaagcatatgagagttcaaacatctacaaagaaagaacaaaagcttttcatgaaaaaaagatctctccaaaagatttcaacattggagaccaagttctgcttttgaactccaaactcaagttgtttccaggaaagctaaaatccaggtggtctaggcctttcaccatcaaagaggtactgccatatgggacaattactcttactaagaagggaggttatgaatttactgtgaatgggcagagagttaagcgttatatggcagattgtcctattcctgaaggaactacagttgacctccaggaacccatcaatgcc

SEQ ID NO: 171259 - DNA, 536 bp, Arabidopsis thaliana landsberg
tgtagttaagtttcatgcagatgtatgcactttaaattattacatgttggcagataacatcattcaagtgcggtggatttgcaatgggaatctcatcaagccatctcacgttggatgctcttagtttcagaacattcctcgaatgcttagcttctctacttcgcgagaagccattatcaacacgtccatgcaacgactgtactcttatcaaagctcgtgatcctccaagtgttgcattccctcaccaggagcttgtcaagttccaagactgtgagacagcaacagtcttcgaagctacttcagagcacttagtcgtcaagatcttcaagctatcctctgatcaaatcaagaagctcaaggagagagcctcagagactagtaacggtaatgttcgcgtgacgggtttaaacgttgtaaccgctttggtctggaggtgcaaggcactctctgtagcaacagaggcaggagaagaaaccaatcttgaaagaaaatcaacgattctttatgctgtggacattagagggaggctgaatcct

SEQ ID NO: 171260 - DNA, 946 bp, Arabidopsis thaliana landsberg
ccatacaaaagtttcacaacctcgacctctggcttctgcagttccacaggctgctcgtaatgcgaataggattcctcactcttcctcagcccctaatctatctgatacaagatcacttcagccttctcattcagattttcctccagtttcttctgctgttgtgcaaaatcgtaaaacatcatcaaccactacacagggatcgtcaaacactcaaccccctccagatgtacaatctgccaacaagtcattgattgagaaaatgcgatctgcacttggtcatgatgaagatgtattcgtggccttcaggaatatatcaggacagtatcgtcaaggttccattgatgcaaagacttatttggagtatgtgcaaggttatggattgtctcacttggttattgatcttgctagactgtgtcctgaccctaagaggcagaaggaactcattgatacccataatgccagtttgagagaagaggattcaaaggataatggtcggagtgctgcgcagagctcttctcagcctaaagagagtcaaagttcaaagaaaaacaaaggaaaagctgtgaaagttgttgaccctaaagaaacactagcagataactttatggacacagtaaggagattacaatcttctcagaatccacaggaagaagaagaggaggcgatatcaaaggataagaatacctatagatcagacaaaggcaaatcacaagtagtaggaacggattcttcttcaacaggaagcaaacagcaacgtaagaaaacttctaagtttcacagagtacggcttggagatggatcaatggctgccttgctggatcttaacaattgtactcgcgagtctgaacaagaatctaaggatagtaattccaacagtaaccaaaatcagaccggtggtttaccggttcgtggggttttgcgtaaagaagggactaatcttttctcg

SEQ ID NO: 171261 - DNA, 1176 bp, Arabidopsis thaliana landsberg
  unsure (1)..(1176): unsure at all n locations
tgggaaacttgtcatcactccagatgctcgattttatatataaccaaatagaaggagagatccctgtttttatagccagactgaaacagatgatctttttccgaatagcattaaacaagtttaatggggttttccctcctccaatttacaacctgtcctcactaatattcctgtccattaccggcaacagtttctctggcacccttagacctgactttggttctcttctccctaaccttcaaatactatatatggggataaatagtttcacaggtaccattccagagacactttccaatatctcaagtcttcgacaacttgatattccgactaaccatcttactggaaagataccattgagtttcggaagacttcagaatctattactgctaggccttaataatannnnnnnnnnnnnnnnnnnnnctggtgatcctgattttcttggtgcgctgactaactgcagtcagttgcagtatttcaatgttggcttcagcaaactcggcggtcagttgcctgtctttatagccagtctctccacccaatgaactgagctctctctaggtggaaatctcatctctggaagtattcctcatggcatagggaatcttgtaagccttcaaacattagacttgggcgaaaatctgttgacaggcaaacttcctccctcattgggagaactttctgaattgagaaaagtcttgctctattcaaatggactgtctggagagataccatcttccttggggaatatcagtgggctaacatacctgtatctgcttaacaacagttttgaaggaagcatcccttcaagtcttggaagttgcagctaccttctagacttgaacctcggtactaataagttgaatggcagcataccccatgagcttatggaacttccatctcttgtcgtcttaaatgtctcatttaatttgttggttggccctttgagacaagacattggaaagcttaaatttctattagctctagacgtttcatacaataaactatcaggacagattccacaaaccttggcgaattgtctctcactagaattcctttcgctgcaagggaattcatttgttgggcccattccagatataagagggttgactggcctaagatacctagatctgtcgaagaataatctctctggtacaatacggtgaatgtatg

SEQ ID NO: 171262 - DNA, 653 bp, Arabidopsis thaliana landsberg
gatattgtcgaatctactgctccgttgttgcaagaatcatcatcagagagcaacggaggaggagaattcaacggagcttcgtttagtggtgcggttttcaatctcgctacaacgatcatcggagctggtatcatggcattgcctgcgacgatgaagatcctcggtcttattcccggaatcacgatcatcgttctcatggctttcttaaccgatgcttcgattgagttcttgcttaggtttagtaacattgggaatcaaagatcttacggtggtgttatggatgattcttttggtaaatgtggaaggattatgttgcaagtttcgattctcgttagcaacattggtgttttgatcgtttatatgatcatcattggtacttatctttaacttctttgggtttaggttttagattggatctaagatttggttttataactctgtttttgtttggtattttgaaggtgatgttttggctggtaagaatgaatatggaatccatcatgctggtatgcttgaaggatggtttgggattagttggtggaacagaagaacttttgttcttcttgttactactctcactgtctttgctccattgacttgcttcaaacgaattggttagtattcttctccggaccccttgaaaaaggtgatag

SEQ ID NO: 171263 - DNA, 352 bp, Arabidopsis thaliana landsberg
gtcctgaatgactgccgtgacaagtctcccctacgatccgaacccgaaaaagcccggcataaaactgcctgccggttcctgcgacgcgcactgccacgtcttcgggccggcagcgaagtttcccttcgcgtccgagcgcacctacacgccggtcgacgcgccgaaagagaagctgtttgcgctccaccgcctgcttggcatcgaccgatcggtgctcgttcaggcgagctgccacggcaccgacaattcggcgatgctcgacgcgatcgcatcgtccggtggcaagtatcgcggtatagcgatggtccggcgcgacatcggttaagcggagctcgaaaagcttgcatgaggg

SEQ ID NO: 171264 - DNA, 1248 bp, Arabidopsis thaliana landsberg
ggctatgacacagacttgcatagtgaggggactatttatacattataaatggatatctgggttacaactaagattgagcccaacatgttgtcgtggggcagcaaggtcttcttatcagtggatatgacaccactcactggcaacgattttatgttttcgtttatggctacaagtttcttcattgatgaagagaagaaaatcgctgtggtttttaatcaaagcaaagacaggaagcacaacacagctttcatcattggacaggatggatccttgaaagaagtggatcttggagaagttcgaaacagagatctcaaaccacttgtgtcctcttatgttccaagttcaatgcaacttgaatagtgcattttacaaaacccataatctatttcttgcacttttacttgtttctttttctcttttgtcatcttcttctttgaacaatatatagaaatttaattcgtctctcatacttctttttgtttgccatatttgacttcgttttgttgcctttagttgtttaatttacttcttctgttgtagtagactcattgctaaatctctgtttctcttctaacatttgttatgtttgtgttcttgcaaataggcagctctgctgttgtaatttatgtagaacagacaacagagtaagctgcgtttaactttgaaatttgcaagtacgcatgcttagatttgagtttcccattttaacttttgtccttgtcagttttacaaagtgcaagtggctgctaggctgacacgtagaagattgaatgatttctcggagttaagttttgtcctttgatactccctggtcttaaagcatacttacagagtaaccgtagctgaatatcaacctcaagcaagtcatggaaccatacaccttccttcaatccaccagttttgggctggttagcgctctcctagatttatgtttcatataagctaaccattaaaagtttaagagaagcttgtgtagtaagaagacaagctaaatgagttctcagtagccttaattcttcttctttttttgactaaatatgagcacttatagatgaagactagtaatgcattgattatgagaatactaaaaagttaagatgaataatcaaaaaaattatttgggtagtattaaaatcttcaaatgaaacttagtcttaagatttgttgagatctttcatactatcgaagtcatgtagagtggaggtacgtagccaggcctatgagaagagaagagaagagaaggagaag

SEQ ID NO: 171265 - DNA, 2098 bp, Arabidopsis thaliana landsberg; identical to SEQ ID NO: 15421

SEQ ID NO: 171266 - DNA, 431 bp, Arabidopsis thaliana landsberg; identical to SEQ ID NO: 15207

SEQ ID NO: 171267 - DNA, 1607 bp, Arabidopsis thaliana landsberg
  unsure (1)..(1607): unsure at all n locations
attcttatcattcgtcatgacaagatgctacgtccaaagtatgcagggcgttttgttcttagggactgatatctgttcaatcaggcactnnnnnnnnnnnnnnnnnnnaggttgttatatgatcctcattgtctcttctcaaggtttttgagaagcaaatcttacagcaaaacatccttcttgctaagtaagttcggttctcgaccttcttatggttggcgaagtattctctttggaaaggatctgcttctcaaaggactcaaatgggttattggtgatggacaagatactttggtctagattgacaaatggatctttgatgatctggcaagaagacctattggtcttcactcacttatgaacatttgtcttcgggtgtctgacttaattgatccttcatctgggttgtggaacatcagtcttcttcgacatcttttccaccaagatgatgtctttcgcatcctttccactaaaccgttgttagcaaagaaggattcttactgttgggctgggaatcgatcaagggatatactttgctacatcttgttatgatctgatttttaatatggagaataaggagaagttcgtggaaccagttaatactcctttcttattttccgttttagcagagtgttggaaagttaaaacagcacctaaaattcaggtttttctgtggaagagtattaaagaagctattgcagtgtcagctcgactcctaacaagaggcattaaaaattatgatggttgtctgttatgtgatgcagaggaggagacagttaatcatcttttatttttatgtccctatgcaagacaggtctgggctgttgctaattttcctactccttctggtggtatttggagactcagttgtgggaaattttaagtatcttttctctttagggaggaatgtgcatcttccatctgaagttcggagagtttttccatggattgtttggattctttggaagaatccgagcaagatgttatttgatgagtctctttaccctcaagacttgctagttagaaaggcttatgaggattctgcagcatggtttgctgctcagtcactgaacattacagagtctccttctccaatacaacatcagaatcactggtctccccctttatggtctgaagtaaaatgtaacattggtttctcatggtcaaagaaacagtgcttatcaggtgcttcttgggtggtcagagatgctatgggaaatgttttgcttcattgtcgtcgttcttatgctcaggtggcttctgtttttgaagcaaaggttaggagttgggaatgggcacttgaaagtatgcacaacttgaaatttgagaatgttctatttggtgcatccacacatgagattattcaagctcttcacaaatctgttaaatggccttctcttcttggtcatatcttccctctgattcaacttagcagattgcattctagatggatgatggtttttgggcctatacagtctaacattggtgcttccagaattgctgctagtgttatctctggatataggctttcctcctatgtggcacaaggcccttcacgctggctaaaaattctctttgatcaggagatatttacggctgcatctttg

SEQ ID NO: 171268 - DNA, 1638 bp, Arabidopsis thaliana landsberg
ttatttattattatttcatcttgaactggttgttgctttcatatcattgccagcaatcatatatacttgaatactcatctgcattgtattactcatgtctttcttctgtcactgatacattcattttatgtgagcttgactgattcctctgattcaaaagatcattcaaaatcagtaaaccaatagaagaaatcgaataagaatatatataagctctctcaatgtctttgaatccaccattaatgaaagagtaccaaaaacaccaaattcatctaaaatatataatgaacctcaaaatcaaattgtttatttagtgacaagaaaacgagctagggggaaaatttgttttcttgatttattaaataatgactcgactgaaagactaatccgggacaatctttaaaataacataagttgctccgaaaacaaagaaaagaaaagacaagttgctgagtcgtctttctcactcccaggtaaaagaaaagaaaaacaacaacaacatcaatggcttcccaaaaacattgcccaaaccccaaagttctcaagtaaatctgagaaagaaaaaaacatctcatgatctgaataacaaagagagagagacagagagagaggctttatctcttttcctcaagtgagagcaaaaatggtggacgtgataccaaaacatatcaaagatgcgtgggacagatggaacattagaggaacaatctttctaagtcttacccttcaagcctttctcatttgcttctctccattaaggaaacgaacaccaagaaggcacttgattatcgtcatttggtcctcttatctcttagcagattggtctgctaatttcgctgttggtctcatctctaagaaccaaggtaaagatctcaaacctgatgaccctccacaggacaaaaagctcatggctttatgggcaccattcttgctcttacatcttggtggaccagacactataacagctttcgcgcttgaagataacgctctttggctccgacatgtttttgggcttgtctttcaggcaattgctggtgtctatgtggttctccagtctctgcccaatagcctttgggtaacaatactcttagtgttcatttctgggactataaagtatctggaaaggacaacggctctgtatagtgcaagtttggacaagtttagggattctatgattcaaggaccagatccaggaccaaattatgcgaagctcatggaggagtacaaggccaagaaagaagcaagattacccaccaagatcgttctgattgatgagcctgacaaggaacataggcctaagaagttagagcatccatccctggcctcggagacaaaaagaaaagagttgactcatcttgaaattgctcagtatgcttacaaattcttcaacacattcaagggccttgtagtcaacgttattttcagcttcagggagcgtgacgagagcatagagatctttgagaacttggaagatccagaggaagctttaagaatcattgagattgaactcggctttctctacgatgctctattcaccaagaacgcggttcttcatactgttttgggaactgtctcaagagttgttgcttcgggttcacttgtggctgcatacatcgactttcataagatatctacaaa

SEQ ID NO: 171269 - DNA, 335 bp, Arabidopsis thaliana landsberg
  unsure (1)..(335): unsure at all n locations
caactaagcataaaaaaacgatatggtcccaaatannnnnnnnnnnnnnnnnnnnnnnnnnnacggtggcagaatcaccccacgttatcccgacggcaagctccgttatcaaggcggcgatacacgtgtcctctccgtcactcgcgccatatccttcaccggttagttagttaatcagattttttttttttttatcaccctacgaattctagggttagtgtagccgtctagtagcacactcaccggttatctgtttgataatattaacagagctaaagaagaagctaaatgagatttgcgggattgcggtgactagtctccgatgtcagttacca

SEQ ID NO: 171270 - DNA, 842 bp, Arabidopsis thaliana landsberg
aaaccctaactcctaaatttaaaccataaatattagatactaaactctataacattaaaccctaattcctaaatttaaaccgtaaaccctaaactttaacacatagacagtaagtcgttaaccatatacatataccctacaccatctaccataaacactaagccattggccataaatgttaagcataaatcccttaaccctaaactctaaaccttaaaccctaaaccctgaaccctaaactttaacccatagacattaaccctaaactatatacatataccctaaaccctaaacccatatgaccataaacctaaaaataattataaaacttgtttcatcatattttatcaacatcttttacataacgtaacacttgttttatggatagtattatcaaactacaatcattttgaattatcgaccatcaacacacatccaccaaactatgaccatgtggtcatttcaatcatttcgaattatcgaccattcatgcacattcaccaaacctctaacaacgtggttggcatacaaattagaaagacaaaatagtaatttgtatacatatcatcctttccttgaaaccctagccgcctatcactctactatcatcttcttcctccgacgcattaacctatcactacaagaaaacaggtaaaagacgattacgaagagcgacaatcaacatagtcgtattatcaagcgaccatttggcaacggtttgacgactacaatgcgacaacacgaaaattagtagtaacatagtcgttattttacgactaactcaatttgtcggaccatagttgtccattaacgactatttgacgattctattattgaaggga

SEQ ID NO: 171271 - DNA, 398 bp, Arabidopsis thaliana landsberg
atttgggggtcattaatgtctctggaacttccggtgtttgacatttcaaagcctctaagcgagtcatcattgacgtcactacaagatgcgtgtaaggagtggggtttcttatacgtaaccaaccgcggcgtctcccgcgacatgtacaagaaactccggagattctcatccggagttttcgagctagaagatgaggagaaaatgaaaatgggagcgtctaattacactccccgtttcatcgcatcgcctttcgttgaaagccttcgtgtgtccggtcccgatttctatgcctcggccaagtcttccgttgatgcttaatccgaccaagccaccgatgaagagttcaggtatatacatatatatgatatagagttgtatatataaagatatatatcgac

SEQ ID NO: 171272 - DNA, 403 bp, Arabidopsis thaliana landsberg
agggatgatcgggagggccttggtgatggttatgattcagaatcacctgatccactcacatgggagacgaatgtagagagttcaagcgtaatcgacgacggtttgattctttctgagcattactctgctactgatcgggggatcgaatcgggttattatgattcttttggggtggagtacgggtcggagtgtctgattccgggtgaggacagtgttgactctgttttggatcatgtcagtgttagtcaaacgggtgatgattgtgtgcagaaatgaatttcggggtttatgattcacaaactggaattttgggtgatggtgaggttaggcttagagattttgaagctgccaacgagaagtttgtccaagagcgacactgcttctgacttccctgggggaaccg

SEQ ID NO: 171273 - DNA, 202 bp, Arabidopsis thaliana landsberg
atgccgcccaaattggacccatctcaaggtggtggaggtcttcgtccggcgtgaacggaagcgaggtcggcgcggcgtcgtcgctggcccccaagatcgggcagctcggtctcttcccgaagaagatcggcgaggacatcgccaaggagactgccaaggattggaagggcttccgcgtcacggtcaagctcaccgtgcagaa

SEQ ID NO: 171274 - DNA, 462 bp, Arabidopsis thaliana landsberg
ggcggcggtttcggccatctcgcccaccacctccccctcgaacgcctctccatcgccgcacacgccgtcttagtggcaaactcggtcatcacctccaccgtcgaatgcgtcgacagccgcatcgccttcggccaatccatcgcggacttccaaaacacccgctttcaactcgccgacgtcaccaccgaagtcgaggtcacccgcgccttcgtcgaccaatccatcctggcctggaacaacgaagacctctccgtggtcgacgccgccaaagccaaactctgggcctcagagatgcagaaccgcgtcatcgaccgctgcctacaactccacggcggctacggctacatgctcgaataccccgtcgcccgcgcctaccaagacgcccgcatccaacgcattttcggcggcaccaacgaaatcatgcgccaaatcatcggccaagacataatcggacgacgctga

SEQ ID NO: 171275 - DNA, 516 bp, Arabidopsis thaliana landsberg
taccctgctcaaaaaggggtgcacatcgttaagatattcgggcccgagcacgggttccggggcacggccgatgccggggctacggtggccaacggggtggatcaaaaaacggggatcccggtggtctccctctatggcgagcataatatgcccacggcggccgacctgcaggatgtgaatgtgctgttgtatgacatccaggacgtaggtacccgtttttatacttatatcagctccatgcagcggttcatggaggcagccgcccgctatcataaacccctgatcatcctggaccgtcccaacccgaacggtttttatgtggacggccccgtgctggagaagaaatatacttccggggtaggcatgcagcccatccccattgtctatggaatgacaataggggaatacgcccgcatgctggtgggtcagcactggctccgggactccacgctgcggccggacctgacggtcatcccctgcctgcattatacccacgacagcctgtatcgctgccgg

SEQ ID NO: 171276 - DNA, 1002 bp, Arabidopsis thaliana landsberg; identical to SEQ ID NO: 46474

SEQ ID NO: 171277 - DNA, 335 bp, Arabidopsis thaliana landsberg
gtagaaaaagtaagctacatcaacaatcaaggtggctcaaaggatacacaacttcaagactaacaacccaacctctcctaccacagcaccaacgttgctaatcctcaggatcaagtgtatccgccacagcaaaaacaaggtcagaacaaaccttttgttccctacaatcaaggttttgttcccaagaagctatatcaagggaactactagcagcaaccaccacctgggtttgcactcagtaaaaccaaggtcctgctgctcctgatgctgaaatgaaatagatggtacaacagctgctacaaggacaaacatctagctccatggaaattgctaag

SEQ ID NO: 171278 - DNA, 621 bp, Arabidopsis thaliana landsberg; identical to SEQ ID NO: 66270
  unsure (1)..(621): unsure at all n locations

SEQ ID NO: 171279 - DNA, 1231 bp, Arabidopsis thaliana landsberg
  unsure (1)..(1231): unsure at all n locations
atgggtcgggttaaattggagttanagcgtatagagaagagcacgaaccgacaaattacgttctcaaaacgtaaaaaaggtttaataaaaaaggcttatgaattgtcaacactttgtgacatcgatcttgccctcctcatgttctctccctctgatcgactatgtctcttttccggtcaaacaaggtatgtccatttcttcttctagaacgttccatgctcttctagaatcttctccttaggctttttcatcttaattaaagtgtaaccatgttttgcatatacatgtactgtccatatcatttgattaaaagacaaaacggacaagccatatattctttttatcaaaaaaaaaattgttggtggaagccaccgaatagtggatctgtattttttgtactacgtagtaattttgattttttcccccactgctttgttattcagtattagaggtgcaactgagggttgacacgtttttacatattactgaagattttagtatataaaagttgcagaacatttcaaaaatagtaagagtttcaggatttcttatgtaaatagaaaaaatcgctgctgcgcttttctataaataacaacagagttcggggttatttagtaaatagtaaaggtatcggatgttttcggtaaatagagaaagttccgaaatactttgtaaatagccccggaacttaaaaaataaagaaacagtccgcaaacaatctttaatttttgttgtcaatttgttacaaaataaacaaaaaaaaatcattagaaaacaccacaaaatcaagtgttatattagctttccagtcgatttaacatataaaatttccacttgttaaacattttgaaggattttttgataaattttcaccatttgctattacaatagtatattatttgttattccgacatggccatgctctgctctctagtcgatcaagttcgtactatatgtggcactccaaaacgaaacacgtcgtgtttcagtgacatcggtacatgcaatgactcagtgtgaggcccatcaaataaaacttatcattatatggttttttagaaattaaaagttgaaaaaaatttcttcattaattgtaaaataagaaaaccaaccgattctacttatacatagcttcttctttccttcattcaccgggttgctcccaccgttttctctataagacttggtttgttctctatcttcttcaacgatacataacatctatgaaaat

SEQ ID NO: 171280 - DNA, 182 bp, Arabidopsis thaliana landsberg
atatcaatgcagaattgttggagtaaatgctacaaaaaagtttggtttgaaagtgataacagagacgtagcgggtttgattaatggcaagaaacttaatttttcagtctacaattggatcaggaaactcgaagatggaaatcaaggcattttatgtcaaaaacattcaataaccgtgatttt

SEQ ID NO: 171281 - DNA, 359 bp, Arabidopsis thaliana landsberg
cgatctctgacgagatcatcgatgccggccgggtcgacggcgccggcgagttccacatcttttcgcggctcggcttccgcctgctgatgccgggcgtcaccacggtcttcatcctcgctttcgtcgcgagctggaacaattacttcctgccgctggtggtgctcaattcgagcgagcatttcccggtcacggtgggcctggcgcaatggtacgcctcggcggtctcggggtccggcggggcgctgctcttcaccgtggtgatggccggggctttggtctccatcctgccggtgatcatcgccttcctcatcatgcagcgcttctggcagggcgggctgagcgccggcggcgtcaaggcc

SEQ ID NO: 171282 - DNA, 144 bp, Arabidopsis thaliana landsberg; identical to SEQ ID NO: 61899

SEQ ID NO: 171283 - DNA, 333 bp, Arabidopsis thaliana landsberg
tctgtaagttactacttcttccttttttccagcatatactggaaaagtttcgtataagttctaactccaaaccacaaaatcatcttgcagcttttcttactccgagctgccagttttcttcttccttgctacatcatggcatcagccatcagtatcctgcatcgccgtagacagagacaggaagcagcggacttggccactcggtttgcgttggtgctcagctcgcgccaacctagacccgtgattaattatttgtcaatggagccatgattttatagttccactctaagagtttcaggtgtatatgcttttcaaatatttcatcagaaaaaa

SEQ ID NO: 171284 - DNA, 355 bp, Arabidopsis thaliana landsberg; identical to SEQ ID NO: 79148
  unsure (1)..(355): unsure at all n locations

SEQ ID NO: 171285 - DNA, 376 bp, Arabidopsis thaliana landsberg
  unsure (1)..(376): unsure at all n locations
tgtcgcgcaggtcatcaaggaacgcaagccgtcggcagggttcatcgccgtggagccggccgcgtcgccggtgctgtccggcggacaaaaggggccccaccccatccagggcttgggcgcggggttcatcccgggggtcctcgatatnnnnnnnnnnnnnnnnnnnnnnnnnnnnnnnnnnnnnnnnnnnnnnnnnnnnnnnnnnnngctggccgccgaagagggcctgctggtgggcatctcgtcgggtgcggccgcggtgaccgccctgcaggtggcgcaacggcccgagaacgccggcaagctcgtcgtcgtggtcctgcccgacttcggcgagcggtatctgagcacgccgctgttcgccgacgtggcggat

SEQ ID NO: 171286 - DNA, 571 bp, Arabidopsis thaliana landsberg
tctctttgtttgtttctcactaacctactaagctttagttgtgagtcttaaatcgatttcagcttcaagatgagttcacacagctacgaatcatctatggatgccgactacaatgttgatgaggctgaatcttggtcaactaggccagagagagaagcagaggagtacaggcgatttgtagaggaaacagagcgagcagtcgccaatgacagagaagagatttccagaggaaaacgggcaatgacagagaaccatgagttggtcgatgaagagatggaggatgatgctgaatacattctggagcaaacccgcaagaccaccaagtccctgatgaaagaagacatgctgaccccgggagattactacaaggatctcaaaagaaatctgttttggggaacaagatatcctcacccggagacaatggatgagctaggcatactgtaggacgttcagctcttgttcgagaaatgccacatgacaacacgcatgtctcatctctatcctacctaagaggatgagacactctaatttctttcatcacttcaagtgaaaatgcttgaggggttgtcag

SEQ ID NO: 171287 - DNA, 560 bp, Arabidopsis thaliana landsberg
gcgtgccgcgctgagcgacactcccgcggtccagctcgggtatggcgacccgcgcggtcatcctcaactgcgggaagcgctaggcggctggctgacacgcacccgcggactgcgggtgcgggcggaccagctgcttgtcctcaacggcgtcgcccaggcattcgcgttgcttgcgcagatgttgcaacggtctgcgaaagatgttgtggcggtggaggatccgggctcggccggcgcttccgacgtgctgtcctactggggactgcgcgtcacgccggtgcccgtcgacccggccgggctcgtggtggaggcgctgcgccgcacgaatgcgtccagcgtgctcgtgacacccgctcaccagtttccgaccggcgtcgtcctggcggcggaacgacgcgccgaactcatcggctgggcgcggtccggcggcctgatcatcgaggacgactacgacgcagaccagcggtatgaccgttccccggtcgccgccaagcaagcactcgctccggagtccgtcgcgcacaccgggagcacctcgaagtcgctcgcgcccgggatgc

SEQ ID NO: 171288 - DNA, 518 bp, Arabidopsis thaliana landsberg
atcgctcaaaggcgccgatttcgctttcatcgccgtcggcacgccgacccgccagggcggcagcgtagcggatctgacgagcgtttatgccgtcgcttcagagatcgcgctcagcgccgaagacggcctcgtcgtcgtcaccaagtcgaccgtgcctgtcggcaccggcgatgccgtcgaagcgatcatccgcacctcgcgtcccgatctagtcttcgccgccgtgtccaatccggaattcttgaaggaaggcagcgccatcgatgacttcatgagcccggatcgcgtcgtcgtcggctgcgatgttccctgggcgaccgagaagatgaagatgctctacgagccgcttcgcgccaccggcgctccaatcctctataccggccgcaatgccgctgaagtcatcaagtatgcagcaagcgctttcctcgccatcaagatctccttcatcaaccagatcgccgatttctgcgaggcgaactccgacgacgtctcggaagtcgcaaacgggatcggccagg

SEQ ID NO: 171289 - DNA, 359 bp, Arabidopsis thaliana landsberg
tatgaatatatactagattttgctccaattattgacaattgcgttgtttattcaaaattacgagtttacgtttttttggcagaaaattacgggtttatgttttaacggaaaattgcaagtttacgtttttgacaagaaaattacgggttacttttatggcagaaaaattaagagtttctgtttatggcaggaaaattatgataatgttatatcatgactatgatatgttgatatgatgatgataaagatagtatgatgatgatggggatggtagtatgatgttatgagaggtaatgatgatgatgatattgtgttgataatgaataaattgatgggttgatgaagtcattggaaaaagc

SEQ ID NO: 171290 - DNA, 516 bp, Arabidopsis thaliana landsberg
gagcgggaattacctatctagtgaaggaagggaatcagatcgccttgttcactggtgtcacggcgctcctggtgttgctctcacacttgtaaaggcagctcaggtaatcatttgttgattgaaatactcttatcagtaagtaaaaccacaatgaaaaactcattttctggatatcgtcaggtttttaagactaaggaatttgtagaggcagcaatggaggcaggagaagttgtgtggaaccgtggcttgcttaaacgagtaggaatctgtcacggtatcagcggaaacacatacgtgtttctttctctataccggttaacaggaaaaccagagtatttataccgcgctaaagctttcgcgtctttcctactcgataaatcagagaagttaatttcagaaggtcaaatgcatagaggagatagacccttttctctctttgaaggcattggaggaatggcctacatgttactcgacatgaatgatccaacacaagctctgtttccaggttatgaactc

SEQ ID NO: 171291 - DNA, 872 bp, Arabidopsis thaliana landsberg
acagcattcctctttggtttctatagaaacttctttggttgacatgtatgctaaatgtggagatataaacaaagcaaagaaggttttcggaggtaagctatacagcgagttgcctctctacaatgccatgatctcggcgtatgcattatatggtaacttaaaagaagcaatcgctctatacagaagcttagaaggtgtaggtcttaaaccagacaacatcacaatcacaaatgtcttatcagcatgtaaccacgcaggggatattaaccaggctatcgagattttcactgatatcgtttcaaagcgtagtatgaaaccatgcttggaacattatggacttatggtagatcttcttgcatcagctggagaaacagaaaaagctttaaggttaatcgaggaaatgccattcaagccagatgcacgaatgatccaatctttggttgcttcttgcaacaaacagcgtaagactgagcttgtggactacttatcaaggaaattgcttgaatccgagcctgaaaactccggtaactatgtgacgatatcgaatgcttatgcggttgaaggaagttgggatgaagttgtgaagatgagagagatgatgaaagctaagggtttgaagaaaaaacctggatgtagttggatacagattacaggagaagaaggagtccatgtgtttgttgccaatgataagacacatactaggatcaatgagatacaaatgatgttagcattgttattatatgatatgggtacaggttccaaatgataattatgtgtatgaaatattataaatttgatcatgtatatttagactctcaagaattgagaagctttgtgattactgttgtttaattataaaacacaacaaccat

SEQ ID NO: 171292 - DNA, 480 bp, Arabidopsis thaliana landsberg; identical to SEQ ID NO: 76305

SEQ ID NO: 171293 - DNA, 723 bp, Arabidopsis thaliana landsberg
ctacctggaggaccagaagcgtttgagcttgcatccaaattctgctatggagttcccgtggatctcacggcaactaacatatcaggattacgttgtgcagctgagtatcttgagatgacagaggatcttgaggaagggaatctaatcttcaagacagaagcttttctcagctatgtggttctgtcttcatggagagactccatcttggtcctgaagagctgtgaaaagctctcaccttgggctgagaatcttcagattgtgagaaggtgtagtgaatctatcgcttggaaagcttgtagtaatccaaaaggtattagatgggcttacacagggaaagctccatctccatcaacaacaaatttcgcgggttctagtccgagatggaacgaatcaaaagattcaagtttctattgtagtccgagtaggaacactaatagccagcctgttcctccagattggtggttcgaagatgtctccatcttaagaatcgatcatttcgttcgtgtaatcactgcaatcaaggtactactacacataggttatttttctctcaagcattttcacaaacacttggtgtacatatctcaatcctctatccattgaaacaggtgaaaggtatgagatttgaactactcggagctgtaataatgcattacgccggaaaatggcttccgggtttgatcaaagaaggaggagttgcaatagctccagcaatgtcctccg

SEQ ID NO: 171294 - DNA, 127 bp, Arabidopsis thaliana landsberg
attaatacaaaatatttaaaatattatagagaactaaaattaaagataatatttattttggattttgttgctttgtggatatatcatggaaaagaaaagataagttttgtggattagggtggttgtc

SEQ ID NO: 171295 - DNA, 585 bp, Arabidopsis thaliana landsberg
aataaattttcaaatggtattgacgtagagaagatggaaactgcactatctatcaaggagaacgaagatttcagaacagagtggtttgcaccagaagatcagaaaggagttaacttagaggaaagaagcctagagagcaagttgttgagtgaggaggaaatccctattccgacttattctccagaagtacctgaaccaaccaccaacccctctgctaaagaaaaacacttgattcttgattctgttaccgatgaactcctggagctctgggttggatataaagctcaagaggatacaattggaaagttaactcataagatagaagagttaaatagcaccattctagaacttcaagaaatggttaaaggctaccccagtattgaaattgaggattggtcaaagtagcctggttcagaagaagaagactactctgctgatcagaaagaagtttatgttgaagaaaaatcaaatgaatactcatcctaccatatgtcaagagaggatgcagagtatgattcaggcactgaaaattcaaccactgaagatgaggacttctctgttcctctcttcaacctttttcctgat

SEQ ID NO: 171296 - DNA, 1653 bp, Arabidopsis thaliana landsberg
aaaaccgtaaatgagccaaccgtaaatgagccaaccgtcaaagagccagtcgccaaaaagaaaagaggaagaaaggcagcggcgcttcctcctgctccactcacaaaggtgtctacaaagatgaaactaagaatgctaaaatcacttgataatgatgtgaagatagaagatgctgcttctgtccccaatagagttgaggaagtcaaggaaaaagctaacaagattgacggtgagaaggtagatgatgatgattctatatttgatataaagaccagttactagctgaagacaatcgcatgctgcatgagtctgatgaagatgtggaggaaactatgaggcatgggagagtaaaagctaagaggatataaactgttaagctggccccaaatgggagttcattgattttcagtcaataatttgaccacaaagacttttcaatttattggagacaacggactgagccgtatgaggaagggttgtgtgcctttacgaggaatctatgatcttgttgcaccggttgatccggcaaaattgcagaaacttaaggattatttgttaagctccaacaagtatgttcctttgtaccttattaagttgttaagtacggcatgcttacactatttgagtatattataactttttattatttgttaggagtatcccgctggacagtggagaagacaatgttgatttctacggagttatcatgaccgaaagaaaggactagccagagccaaaatatggcttgttgtccgatagtataagttattgttatattctatttgagtttttttctactttatggctgagttatcgtgttgttatggctgtgtggtggtattgttctgtttgagataaaacaaattatggctggtttattctggtgtttaggcttagttgtacttagttattgctgagttatggtattgtactatttaagttaaagtaaattatggctgatttattctggtgtttaggttgagttacggtattgtactgtccaagttaaagtaaattatggctgatttattctggtgtttaggctgagttgtgcttggttatggctgagatattggtgtgttttgtctgagtagattttctttttttgtacagcaaatggctgcgtatctaaagtcctagccatgaggtacaagcgagatccctgcccataccacaacaaacgcgtcatgattctatacccgtggttcatgacttatttggtgactgagtacagtcagttcaagatcaaaacaaagaggtttactttcaaaaacacagcgtataaattatgggttaacggtacggcaggagaagtcctgacatggatgaagtgggtaatagatgtggatcacttgtatttgatccaccaaaccggaggtaatcattgggtgacgcttcacgtgaacttgcttaggtcgcacatcgattgctatgattgcatcgtcggagagcatacactagaaagcgagttaaaaatactggaagcttgtaggccgttcacgaggatgattccacagataatgaacgaactggttccttccacagtccgtaaaccgaactacgaccaattttaattccggcagaagaacaagaaactggtcccgcaaaacagagtagctggggacagcggcggggatcctctagagtcgacct

SEQ ID NO: 171297 - DNA, 265 bp, Arabidopsis thaliana landsberg
tgcaagaagattcatgattgctccaccgaggtcttgccctgtggatggctgtgaattttctgggacatatgctctccttagtaagcacttgatacctgagcatcagggtcttgtcccagcagaggtcgttccacgaaggcatagtaggtgggaattgttggtaagacatgctgattatgttggtctcctgtctccagctgggattccgcataggttgggatctggcataataatcttcccggcgatcttcttcttccgatgtttc

SEQ ID NO: 171298 - DNA, 472 bp, Arabidopsis thaliana landsberg
caaaacacagatgcatatgtggggacatggatctgagttcagaaaaggggctgactcgttgaaaggcacaacccaaccggcagccatcctgcggctgccatgctattgctgtgccgagggatgcaagaacaacatcaaccatccgcggtccaagcccctgaaagatttccgtacacttcagacacattacaaacgtaagcatggctccaagcccttttcttgcggaaaatgtggcaaagccttggctgtgaaaggcgactggaggacccatgagaaaaactgcggaaagctttggtattgtacatgtggatcagatttcaagcataagaggtctctcaaggaccacattaggtcctttggcagtggacattctcctcacccgtctcttttgtttgacggttttgaggaggatacagaatgcgtcaccacagagtgagaatgttgttagatacaccggggagactgtggaagg

SEQ ID NO: 171299 - DNA, 1099 bp, Arabidopsis thaliana landsberg
tgttgatgcgtgtaagggaaggagatgtgggagaaattgacggcggatccggcgactatgttttttttggagcaggatgattttgttaagacgatgaaggagattcagaggaaccctaataatcttaatttgtatatgaaggataagagagttatgaacgctataagggttttggtggatgttaaggatggtggatctagtggtgaagatactgagatgaaggaggctgatgagaggaaagagcctgaaccggagatggaacctatggagttgacggaggaggagaggcggactaaggagagaatggagatggctatgaaggagaaaggggaaggaaatgttgcttataatatgaccgatgctgagagagctgttgaacattatactaaggccatggagctcgatgatgaggatatttcgtatttgacgaatcgtgctgctgtttatcttgagatggggaaggtattaagtcttatacttggcttaaaagttaaaccttttggtactttaagattaaggaggagatcttgggttcttgaagtagcttgtctgtttagtatagcttgtcactagttagtacatttgtgatgaccttgatgggttttgataactttcatctgcttcttgttggagatttaagagttttgaacttaagttttcacttgtgctgaaagtagttagctttagatgaggtagaaatttagggtttatggcttcatgatggagtttattcacttgttctgtagaagtggttatctttattattactggaatcaattaatcttcaagtatcctgagtggttcaattccattggtctatgtgttcttgcattagtcttgtttaattaacagttggttcatctggatcttactgtatcttgtgtgatgtttaacttcatttctcaaatgagattatcagtacgaggagtgcattgaagactgtgacaaggctgttgaaaaaggcagagaacatcgttctggcttcaagatgatagcaagagctctgtctagaaaaggatctgctctagtgaaaatggcaaaatgctcgaaaggctttgagcctgcgattgagactttccagaaagctctacagagcatc

SEQ ID NO: 171300 - DNA, 877 bp, Arabidopsis thaliana landsberg
ttgtgctctttacttaggtggtgcaattgttggaaactccattcctcaatctcatcaaatacgcatctttggttgctacaaatgcagcaagacatcggtttgttgcaggaaaatctaagcttctgcttgagtttggtgctagaagagctcaggtttgtttccctctcaaaacctgttatatgtttagccttagatgttgaggttttgtttgttgcatctctgatatgcaattgttatagggacccgatggtgcaataagcgcatcaaagtattgctaccttggaggttttgatgcaacaaggtatgtctttactagtgatatttttgttttgttatggaaacatcaaaagggaagagaggatatgattttctcattttgcttgctttgtttattactgcagtaatgttgcagcgggaaaactgtttgggatacccctccgtggtactcattcccatgcttttgttagctcattcatggtaagtttgctttagcaaaatttgtgaaaaaactcgctctaacgtcattgattgagaattgtgtttgcgatattttgtatcactggaatattggaagcagtagtgaatatactttactttggttcttgtgtagagccttgatgaaattgttgacaaagtgcttcaaagttctgatgggaaaagcacttgtaaggattttatatgtttggtccaaacttgcctaacaaagattcaggtttgttcagtcaaatctagattttttctcagtgtagtattgttctgtatttgattcatctctttttaatctttcttgtgatcggtggacgatagaattcatcttcattacaaggaattttttccgagacaaatcaaagcgagcttgcagcgttcatttcatatg

SEQ ID NO: 171301 - DNA, 579 bp, Arabidopsis thaliana landsberg
  unsure (1)..(579): unsure at all n locations
gaatgcggaacaacaatgatctcttcttttcaggctctgaccgttttgatatggagaagcattacaagagcgagaaaagtaccaaatgatcaagaaactacttgcaggtttgctgctggaaacagatcaagaatgaatccaccattgccgacgaatcaatttggagtttacatctctcttgtgaaaacgactactaaaatcggtaatctactggagaatgagtttggatggattgctttgaaactgcatcaagctgttaccgaacacactggcgaaaagatctcttacgaaatagatcaaatgttgaagtctcctttaccgttgcaagcatatcgactttccaatttgaacatagttcacatgngaagttctccaaggtttaacaagtacggaagcgagtttgggatggggaaagcggtggcggttagaagcggttatggcggtaagtatgacgggaaggtatcagcttatccaggaagacaaggaggaggacccatagatttggaagtatgtcttcttccagagtttatggaagctttggaatcagatcaagaattcatgtccgttgtctcttcttct

SEQ ID NO: 171302 - DNA, 470 bp, Arabidopsis thaliana landsberg
atggctgatgaaatttggcaagacatacagtatatggtgttaggccgtgatgatctagaactctttgtcccgcaggcagctgatgcttgtatcgttgcgggtaaccgtcttagtatcatcgccagaccactcaactctcatgcacaacatctccgacgtgttctaagagctttgcctcgcagttggggtatggcctcaagagtccatggacgtatcattgttgataggtgtatccaatttagatttcgctctggtcttgacttggcttcagtcatgttgcgaggtccgtggttgtctaatcagtggtttgttgctttacaaagatgggaagattttcctcgtactaactctctcatctatattgatctatgggttccagttaggggaatccagttctcgatgtctcatctatgactgtcaggtgtatcactagtactttgggaccaatcacgggacttgactttgatggg

SEQ ID NO: 171303 - DNA, 582 bp, Arabidopsis thaliana landsberg; identical to SEQ ID NO: 12808

SEQ ID NO: 171304 - DNA, 1334 bp, Arabidopsis thaliana landsberg
gcaccggagcctaagaaagaaataaacccaccaaacttagaagagccatctaagccaaaaccagaagaatctcccaaaccacaacagcctagtccaaagcctgagacaccatcacatgagccttctaacccaaaggaacctaagccagagtcaccaaaacaggaatctccaaaaacggaacagccaaaacctaagcctgagtcaccaaaacaagagtcgcctaagcaagaggcaccaaaaccagaacagccaaaacctaagcctgagtcaccaaaacaagagtcgtctaagcaagagccaccaaaaccagaagaatctcctaaaccggaacctccaaaaccagaggagtcacctaagcctcaaccaccaaagcaagagacaccaaaaccagaggagtcacctaagcctcaaccaccaaagcaagagacaccaaaaccagaggagtcacctaagcctcaaccaccaaagcaagagaccccaaaaccagaggagtcacctaagcctcaaccaccaaagcaagaacaaccaccaaagacagaggcaccaaaaatggggtcgcctccattggaatcaccggtaccaaatgatccttacgatgcatctccgattaaaaaacgtcgtcctcaaccaccatcaccctcgacagaagagacaaagacaacgtcgccacaatctcctccagtacactctccaccaccaccaccaccggttcattccccaccgccgcctgtattttcacctcctcctccgatgcattctcctccaccaccggtttactcaccaccacctccagtacactctcctccaccaccaccagtccactctcctccaccaccagtacattcaccaccaccaccagtccattctcctcctccaccggtccattcaccaccaccaccagtccactctcctcctccaccagtccactctcctcctccaccggtccagtcacctccaccaccaccagttttctctccaccaccgcctgcaccaatctactcacctcctcctccaccagtccactccccgcctccaccggtccactctccaccaccgccaccagtccactcaccacctcctcctgttcactcaccgcctcctccagttcactccccgccgcctccagtccattctccaccaccaccagtccactctccaccacctccgtcacctatctactctcctcctcctccagttttctcaccgccaccgaaacctgtaacgcctctaccaccagcaacatcgccaatggcaaacgctccaacaccttcatcatcagaatcaggagaaatctcaacaccggttcaagctccgaccccagactctgaggacat

SEQ ID NO: 171305 - DNA, 363 bp, Arabidopsis thaliana landsberg
acaatggagagagtattacttagagaggatctaatggaaggcatgctctcaaaatcatctgctaattcttcttctacatcagtactagacaacaacgacaacaataataacaataacgaagaacactttttcgacggtatggtcgtttcttcagacaaacgttccttgtgtggtcaataccgaatgggccacgaggcctcaggatcatcttcattcggatctttcttatcgagcaagaggtttcatcatacaggtgatctcaacaatgataactacaatgtctcttttgtttcgatgcttagtgagattcctcagagttcggggtttcatgcaaatggtgttatggatacgacgtcgtctcta

SEQ ID NO: 171306 - DNA, 493 bp, Arabidopsis thaliana landsberg; identical to SEQ ID NO: 63050
  unsure (1)..(493): unsure at all n locations

SEQ ID NO: 171307 - DNA, 1211 bp, Arabidopsis thaliana landsberg
tataaccgtcggttcggggtcggtaacaaccatcagccatgtctcggttaaccgtcaatcttaaaccaaacggaataccgacgaatatattactgacgatattaatttgttgaaagctcgtcgggaatataaccgtcggtaatccgtcgagctccccgacaaaatatcgacggaatttgtattaccgatgctctagaaccgacgaccatattttatctgtaaatcgtcggttaaggccttaactgacggattatcaacggttttgtttgtcggttacacgatgttttcttgtaattaccaccacctgtactaatccttctttgcctttaaccctctttcaggcgagtaatgaactcaatgaaactcaatgatatgattgagcattatgaagggttgctactcagtagggaaaacgaaacaagggcctggagagatctcttccctcgaagctgatcaccacgccctttcgaattctctaaaagggaaacacgagatggaagatcaggttgccacttcaaatatgagctcaataagtcagatgatgagctacaggcgcaatacaacaagtatgacaacttcgaaagagaactgtcgagagttcaagacagacttcttcaatccgagtaggccgctaacatctcgcacaatcaactcaccgaactcaacctaaagtatcacgcattggtcaagctaagggactccgaattggcaaagtcagcatcgagggccagaaaagaagttaaaagtcatggaatggaattgattcagggtgccatccgtttcattcagatggaaaaagcccgaactgaccttgaatctgatatcaaggaatacgagagcaacctgcttttattggaccagacttatgaggatgacttctccgaggaagaagagagattcaaactagaggccaatctgaaagacaaaaaagaacgtcttgcggcacttcccacgtcttctttttatcccagcacttcgcggaattcttcaaagcttatcacatatctgccttgtgattgatttgactacttttcttaggttcaagcgatttggctgaacctgtttagcccgaggtgcctgacactttggcaccgatccttgaacctagcgctgctcaaggcgaagtgcctctagttgagaacgatgagcaggtaatgactctgaatgatggtcacgccatcaaaactgggccggaactctgttctgaacaa

SEQ ID NO: 171308 - DNA, 419 bp, Arabidopsis thaliana landsberg
  unsure (1)..(419): unsure at all n locations
ggcccgcactgtacattataacctcagcggcatgtcttctgcatcacttttttaggacctcgtaccttagtttatctcgggcatgcagtatacttgaatacttactcttggttcctccatgtatcttcttattagtttatttcccaaccttttgacatttttttttatactgtaggannnnnnnnnnnnnnnnnnnnnnnnnnnnnnnnnnnnnnnnnnnnnnnnnnnnnnnnnnnnnnnnnnnnnnnnnnnnatccgtgctattccatggtcttctgagcaatcttacagcgacacgctgagcaaattcttcacaaactactactcgtccagctacgtgtcccaccaaatggtctaccataatggcatcattcaaagactgctggtacgtatatttcttggaacagtcatttttaact

SEQ ID NO: 171309 - DNA, 940 bp, Arabidopsis thaliana landsberg
ttatgaattaatgaaagaggagggtctacagcccaatgatgttactcacaatgtgatcattgaagggttgtgttctgaacgtaaagtaaaagaagccgaagatttcttagagagtcttgagcaaaaatgcccagaaaattatgccagtttggtgaaatgttactatgaatctagcctttctaaaaaggcctttgaacagttcgttagactggaattccttctacgcaagagtgtgtacatcaaactattcactagtctctgcattgagggttatctcgataaagctcttcgcgtcctgaagacaatgtgggcttatcgagttgaacctgggaagagcatgtgcgggaaaatgattggggcgttgtgtaggttaaaccatgcgagagaggcccgactattatttgacacaatggttgagagaggactcattcctgatctgtttacttatacaattatgatttacacctactgtaggctaaataagttacagaaagcagattctctttttgaagacatgaagcaaagaggaataaaacctgatgtggtaacagttttgcttgatagttggatccagagcatcatgagacaggttctgttcaagaagaagtgcgaaaaaggaaagctgaagttttgagagaattcgcagatgcttgttttggactagacgttgtatgctatacagttttgatagatcatcactacaagattaacaacctagaaaatgccactaatttttttgattgaatgatagacagtggggtggagcctgatatcgtggcttacacaggtctaatatctgcttattgtcacgaaggatacatagataaggcagtcacacttgtaaccgaactgtcaaaaaaggatattttacccactgggcattttggggctgtagtataaacaaaaagctttgaagcagaagagatttcaatacaagtaa

SEQ ID NO: 171310 - DNA, 193 bp, Arabidopsis thaliana landsberg
atagcgggagaagatagccgcgaagaccatgaggaatcaagtcctctattgaagggaaacgagaacgacaacaagatctgctcggagggagatgccaacggcggatggagtgcatgcgagccatggtagcgtgattttaattgtttgtgaaaatcgaaatgatgaatcttgcaacatcgatctccatgtttgt

SEQ ID NO: 171311 - DNA, 1094 bp, Arabidopsis thaliana landsberg
caaagagttgtgattacgatgatgcttgatctatacactcgtctataatgagggatctttgctcgcaatgttagttggacgctgctctctggctacggagaaaaatgatatatagtggagttattccaggtttgatcacgcacaatcatatcttaaataagttgtgtaaatcaggttatatcgagaaggcggatgggctcgttagagagatgagggagatgggtccttcgcctaattgtgtctcttataacaccttaatcaagggtctttgcagtgttaacaatgtagataaagctatgtacctcttcaatactatgaataaatatggtattaggccaaatagagtgacttgctacataattgtgcatgcactttgccagaaagatgttataggaaacaacatcaaaaagcttcttgaagagatcttagatagtagccaggcgaacgcacccttggatatagtcacctgtaccattctgatggatagttgttttaagaatggaaatgtggttcaagcccttgaggtttggaaggagatgtcacagaaaaatgtccctgctgattcagttgtgtacaatgtcattattcgtgggttatgttcgagtggaaacatggtagctgcttatgggttcatgtgtgacatggtaaagagaggagtgaatcctgatgttttcacttacaacactctcataagcgccttgtgcaaagagggaaagtttgatgatgcatgtgatctccatgataccatgcaaaatgttggtgttgctcctaatcagatctcatacaaagttatcattcaaggtttatgtatacagggagatgtgaacagggcgaacgagttccttctaagcatgctaaaaagttctctgcttgcagaggttctgctatggaatgtggttattgatggttatggaagatatggtgatactagcagtgctttatctgttctgaatctaatgctttcgtacggtgttaaaccaaatgtttacacaaacaatgctttgattcatgggtatgtgaaagggggaagattaattgatgcatggtgggtcaaaaatgaaatgcgatctaccaaaatccacccagatactacc

SEQ ID NO: 171312 - DNA, 896 bp, Arabidopsis thaliana landsberg
gttgatggggcacaggctagggtgggtttgttttgcacggcttttgcctcccttatctcacagaacgattccaaagagaattccaaagctctgttcttgtagaccttttttgggaggctgcgcattgtctcacagttctcgagttcaaatcaaaaatcaacaagatcgagcagatatccccggaagcttcgttatggatccaaaacaagtctcctgctcgatgggcatcatcatactttgaaggaacaaggtttggacaattaactgcaaatgttattaccgagtcactcagcaattgggttgaagatacctcaggtcttcctataatccaaacgatggagtgtatccaccgccatttgataaatatgttgaaagaacgccgtgaaacgagcttgcattggtctaatgtgcttgttccttctgctgagaaacaaatgcttgctgctatagaacaatctcgtgctcaccgagtttacagagcaaacgaagcagaatttgaagtcatgacttgtgaaggaaacgtcgttgtaaatatcgaaaactgttcttgtttatgcggccggtggcaggtttatggtttgccctgtagccacgccgttggagctctcttgtcttgcgaagaggacgtttatagatacacagagagttgtttcacagtggagaattacagaagagcttatgcagaaactctagagccaatatcagacaaagttcagtggaaagaaaatgattcagagagagacagtgaaaatgtaataaaaacaccaaaggctatgaaaggtgctcccaggaagaggagagtaagggcagaggatcgtgaccgtgtgaggcgtgtggttcattgtggtcggtgtaatcaaacaggccatttcagaacaacttgcactgctcctatg

SEQ ID NO: 171313 - DNA, 508 bp, Arabidopsis thaliana landsberg
cctccacttttggctttacagactatccgagcactgatctcgacgggtgctggatcaacttcctacccaggtaacttttgcataaattgcaaacttctttagcattgttgtgaattatggtgtaatgatttttttcccttcttctgagttgcaggtccaatgaggctcttcatattggttcatgctccacctactttgaatcttccacaacatttccttcctaaacgtgacttcagatacaacagaaaggtatacacttctctgctaattctatttcacacatccatgtacaacattccgattttccgtcacctgcaaacatcttttattattgcagtttgtgccttcaaagttgagattcaagtgcagaacgcaagacaatgcaacaaattctcctcccacaaatgatctaatatggtacttctcttattcacaattctccagttacacactaaacaagttcttgaccatgccttactgtgtcattgcaggtatcaatgtcgacatg

SEQ ID NO: 171314 - DNA, 300 bp, Arabidopsis thaliana landsberg
  unsure (1)..(300): unsure at all n locations
tacaaaggagtgaggaagaggaaatggggaaaatgggtttcagagatcagacttcccaacagcagagaacgtatttggttgggctcttacgatactcctgagaaggcggcgcgtgctttcgacgcggctctttattgtctccgtggcaacaacgcatagttcaatttccctgataatcctccggtgatctccggcggacgtaacttgtcgcgatctgagataagagaagctgctgcgaggttcgctaattcngccgaggatgattcacgtggcggagcatgatacgagatactgcaagaa

SEQ ID NO: 171315 - DNA, 620 bp, Arabidopsis thaliana landsberg
atggagatatggttacttatcttgggctcgctcttcctctctctccttctcaatcacctcctctttcgccgccgtgactccttctcctctcttccattaccacctgaccctaactttttccctttcattggaaccctcaaatggctccggaaaggtttaggtggtctcgacaactacctccgctccgtccaccaccatctcggtctcatcatcaccctccgtatcacttcccgccccgccatcttcgtcaccgatcgttctcttgctcaccaggctctcgttttgaacggtgccgttttcgccgatcgtccaccggcggaatcgattagtaagattatttcgagtaaccaacataacatcagctcttgtttatatggagctacgtggcgtcttcttcgtcggaatctcacttctgagattctgcacccttcccgcgtgagatcttactctcatgcgcggcgttgggttcttgagattctttttgatcgatttggtaaaaacagaggagaagaaccgattgtcgttgcccatcatcttcactatgcgatgttagcgcttacatgttctcatgtgttttggagataagcttgacgagaagcaaacaaaacaagtggaatatg

SEQ ID NO: 171316 - DNA, 513 bp, Arabidopsis thaliana landsberg
aagatcgaagtaaaagaagaaaagccaagagagacacgagaagaatgggtgatctcgatcaaggacaagatggagaaagcacttagttacgacgcaacaaatagctgggacaagctctgtatctacagagttcctttctatcttcaagagaacgacaagaagtcttacttacctcaaactgtctctattggtccgtaccaccatggaaaggtacacctcagacccatggagcgtcacaaatggcgagcggtcaatatgatcatggcacgtaccaagcacaacattgaaatgtatattgacgccatgaaagagctcgaggaggaggctcgtgcttgctaccaaggtcccattgacatgaagaatagtaatgagttcacagaaatgcttgttcttgatggttgtttcgttctcgagctcttcaagggaacaattcaaggattccagaaaattgtgtaagcctggctaaattttatctagtgattttcttctattgcttaaactgttgactctgtt

SEQ ID NO: 171317 - DNA, 135 bp, Arabidopsis thaliana landsberg
ataggtgaagtggagatgaagttgcgaatgaggcaacggtagaatgaggcttgtctatgggagctacgaacattactagagatgagtaggtactggccattccacaatggcactaacctttcccggatcagcctt

SEQ ID NO: 171318 - DNA, 2328 bp, Arabidopsis thaliana landsberg
accgttaatattgagaacaaaactcccaatttctatatagggtcatgctatattgcatgcttcggcttttgttcagattagaccaaacgcagataatgaatattcccctttacaaatgacttatggtcaagtaccaaacttatcccatctccgtatttttggatgtgcggtatatgtgcctttagcaccgccacagagaacaaaaatggggccccaaaggagattggagatatatgtcggttatgtatcaccgagtataataaggtatcttgaaccacaaactgatgatttgtttacggcacgttttgccgattgccattttaatgaagatgaattcccacctttagggggaggaattcatcaaatgcatatgcataaagatatagaatggtgcgcaccatcattaaaatatcttgatccccccacgaagcaacgtgagctggaagtagaaaagagtgtacatctacaaaatatggaaaatcaattaccaaattcgttccccgatacaaaaagggtgacaaaatcatatattcccgctgcaaatgccccatcaagagttcaaattcctagagagctagaattagatgggaacaaatataatgaatttaaggttcaatttaagcgtgagaggcctattggcgcacaagataaaaatccccgaagaaaaaaagaaatgggaaaagaaaatgaaaaagttattcaagaaaaaccaagtccttgggacagtagagaaaagtatgagatttccattaattatacccatgatgatataatatgggaaagagatgatattgatgatgaaaatgaaaattctcgttttctttatctaaagagattgatcatgagaataatgattcagatctaaagacattatctgaatgccagaaaagaccagattgggagaaatggaaatatgccatgcaagttgagttgcactcccttaacaaaagaaatgtctttggacctattgtcactgcatctaagaatgtaaagaatgttgggcacaagtgggccgggtattcgtgcgaaatttctttgagaaagatgagatcacacgatataaaacccgacttgttgcacaaagtttctctcaaagaccaggagttgattatgaagaaacatattctccggtcataaatgcaattacattcaagtatataatgagcgtttcggcatctaataatttagatatgtaccttatagatgtagtgacagcttatttatatggatctcttgataatgatatatatatgaaaatctcggaaggattaaaagttcccgaggcattagactcatcgacttaaaatcattaagaaatcttcttcaagatttgtgattattgttgtttatgttgatgacataaatataattggaataccaagagagattgatgatgcacgaactcatatgaaagaagaattcaaaatgaaagatcttggaaagacaaaatttgtcttgaacttcaaattgagcatttgaaggtatatttgtgcatcaatccaattatataaaaaatattttaaaccgctttaatatggataaagcgaatcttttaattactcctatggtaaatagatctttaaatgttgaaatgatccatttagaccttgtgaggataacaaagatatacttggtcccaaagtaccttacatgagtgatgtcggtggacttatgtatattgcaaattgtacaaaaccagatattgcttttgctactaatttgcttgcaaggtacaattcatcccctacacgaaggcattggaatgggataaaacacatctttcgttatcttcaaggtactattgattttggattatattatcctagaaaccccgagtttggtctagttggttttgcagatgcagggtatctatcagaccctcataagtctagatcacaaaacggatatgtttttaccattggaggaactgcaatctcgtggcgttctcaaaagcagactatagtcgccacttcatcaaactacgcataaataattgctcttcatgaagcatctagagaatgtgtttggcttagatccatgattaatcatattcaagaagcaagtggattagtcatcaaaagagagccaacaagaatatatgaagataatgatgcatgtgttgctcaaatcaaagaaggttatatcaagagcgacagaacgaagcatatccctccacgattcttctcctacactcaagaactcgagaagaacaaggaagtagaagtgcaatacgttcgttcaagtgacaatgcagcagatttattcataaaggcgcttccaacttctacatttagaaagcatgttcaaagcattggaatgcgtcatata

SEQ ID NO: 171319 - DNA, 1174 bp, Arabidopsis thaliana landsberg
  unsure (1)..(1174): unsure at all n locations
acaatgactacgatctctgatatttcgaattacttggtagagaagatactctctagggctcccataacttgtctcggagcggtgagaaccacatgcaaacgatggaacgctttatccaaagaaaatactttatgtaatggagaagcaagacatcagtttctggggtttatgacgaaaaagtataagctttgttcaatgaggttcagatctcaatggaaaatataacgaaggaggaggtgacgatttcgtggatccaactataaaggagttagatgattttctgaatcatgttaagatatctaatgtgtctttcaatgcgaagggttattgttatgcgtgaccaacgaaggacaagactaggctcgccagctcgtggtatggaacccataaattagatatattaaatcctcataaaattgctgaaatcagaaactaagcctcagtttaacctaccgatcaactctaatgaaatgattgtaagctcaagttgatgatataatacttactactgattccacaataacatttctacgttgatcttacctactaactgaaaaaagaagttcaaaaacaatcatttatttgaaatcatcacatatttctaactagaaaatcaaattggaaatatataatataaagttttatatatatcatgacacatgtaacaatctaaaattataagcacgatgatatatgataaaatcttatataattcaaatatgaaagtaaaaatcaaaataaataatttagaaaaaaaaatgaaatagaaaattataaacatgatgatataaaaatctttgataacttaataaatttcacgatcatagagatcttggataattcaataaacactatataataagattttttacttaaaatataaaaaatttatattctattgccttttaataatatttttttgaaaatagtaatagtaattattttttatattttccctttatataaaatttattgtttaattgaattatactttaattatatactttaataaatatgtttttatgtaaacaaatttgtaagtttaatttttgtgtaaatatgtgtcaaaatataattgggggaagttttttacatgtatcanaatctcattacgtgtatcaatatctcatcaaatgattgacacatataacaatcatgttaattagttactaat

SEQ ID NO: 171320 - DNA, 463 bp, Arabidopsis thaliana landsberg
ataatgattgaaggcaaaaagtatgtggttgtgcaaaatcgcgtggctttcaaggcaaaagtagatagatggcaagctataggaatgctgcattatttggaaacatgatggtacttactttcttgctatggtatacaaaatgtgttatatcgttgtattgatttgccaagaatccaatgcttcaactctaatacaagatactgggaatctttgaagggttaggaaggtctgccagtgtttgacgatgatggttgtgttagattggtagattatagtggaaagatgactcttttgtgggataagtgcgttccttcatgtagaaacaaaatgatttagtgtgttgtgattgcgcttgaaagacgaagtactcaagagatttggggaaagattgagtgggctgatgatgttcttagtacagtccttcttttttatgattttgtttgtgcgctcaggcccgattatt

SEQ ID NO: 171321 - DNA, 319 bp, Arabidopsis thaliana landsberg
actggaaacccatgcttctttgaatttggaaactcggaatcgagtaagagatttttcacatgataacaattattctggatatcgttgctttgtgaatggataatggaaagaaagcaataagttttctggattaggatagtattgtacgtcatcaaatggagagacgccaaccatgagacctgtgaacctccgaagaagtctatctccattacatacagaggttgaagctcttctttgggcgatgaagtgtatgattggtttcaacaaccaagatgtggtttttttagatttggtgaagatggtgtcttccccaaccgaa

SEQ ID NO: 171322 - DNA, 470 bp, Arabidopsis thaliana landsberg
atgtgagtgtccctaatatcttgctctttgtttgtgaagcaagaaaccttgttttaatacttactacatttgcagcaaaacctaggagttttatacggttggtattcttacaaatgttgtcaggtgaaatatggaaatatttgggtgatgatgatcatggctctctggtttacttgatttttaactaagtttttggaatatctagaaagcgaatgggcctttggtttgctttactgtgttgcctttgtggtaatggacaagcagtggctggacaagaacgccacctacatggaattcaacgtgagtcgatcatctttcggtttatattgcttggttatggtgatggcgatgtgatgataaattgtatttgtgtaggatgtgctaagatgtattaaggatatcaatcatatcctacatttattaagaggatcaatcatatacttgattgcaaaggttaaatgttcatatat

SEQ ID NO: 171323 - DNA, 334 bp, Arabidopsis thaliana landsberg
ttctggtaaacactcactcgggaaatgcatggtcttcgatttacgacaagctggtagtctttatattcccttactcatgacctcttctactccatgctgatctgactccacgattacattcgtttgtgttgaggtacgtttttcatctctttatttagtctttggcgagaacggaatagtaaacggaatggtgagtcacccacactagcctcaaagcttgcaaaacttatcgataagaattgtacgaaaccggctaagaactttggtaaatgactgggtcaactaaatacaaaggcaggctgccatatatattgatttcgaaacccataatcgc

SEQ ID NO: 171324 - DNA, 817 bp, Arabidopsis thaliana landsberg
  unsure (1)..(817): unsure at all n locations
atgcaaggacttacattaaatcgtcatcgtggtcaaccaggttatcccttcgctactattgatacaaaacttgttgtcacagtaactggagatgtccttaaggttgacagaatagtggagaaagagactagaatctgcagatttttttacgtctacaaggtttattcatcggggtcctataagaaatatgaaaaagttgaatctttgggggacgaggcaattcttttggatctaggtatcactatgctcgccaatgacactgtgggactcctaggaaattccatttatttcagtggtactcatacaaagtcgaaggtcattaacgatacatttatcttcagtctcgagacacagaagatggatccagtgcacaagtttgattgttcatcagctcaactctctagtgctcgatggttcttaccaagttcacacaaacttgattgatttcaactttcttcttcatatgttatttttctgattttctctaatgaataatgatgacgtgtttggtgttttagttattataaattaacaaaatgataattgtaaagattgatgaaatttttttgtcaaaagaacgactagttaattgggccgatgaagcccatagaaacgacctgatttcttatgaaataaaacccaatgggtcacattacaaatgcaatcctaggttttaggttaagaccttgactcttgtaatataaatacgtaacttctgtgctacgacaaaacatttcaagtaagcataaccctaattctcaaaagcgtttcagacgagattcatcccatccctggtcngagcttcctctagatctct

SEQ ID NO: 171325 - DNA, 342 bp, Arabidopsis thaliana landsberg
atacagtttgtgtataacttggttgggttgttgttctgctatcttctgtagcattgtcttcaatatgcttgctggtagacatggaatcttaatcgtcatacttgtacgagtttacttggttactctctgcttcccgttgtgattttgtccgcggtgtccttgtttgtgccacaaggtgctggtcccgttcggtttgtgctcggtgcggctttcgtgttgtgggctactagagcttgttctaatctggtggtgtctcttgctgatggaggagaagagcaccgtggattgatttcgtacgcctgtttcttaatctatactctgttttcgcttctcgttatcttt

SEQ ID NO: 171326 - DNA, 1769 bp, Arabidopsis thaliana landsberg
  unsure (1)..(1769): unsure at all n locations
tatcaaagaatgtgaaaaaattggaatatgtcgaatggttttttcactttaatgttctcaataattttgttagttaacaanattattaaattttgatggtattgcttaaggacaatacagacatttcagcctaagttatagtaattgccaacttttatttctttacgaattcttacatttccgataaggacaccgacgaactctcaaagaagaaccatcactgccaaagaaaaacagttgccacgtggcctaaggggacggagcttaacaagacacgtgtcttaattggtggccaagttttacatttgtgtgccaggtcagcacctacgctcaaggctctcagcctccgtgacttgtgggaatcgtttaccctataaaatcgacggtcctgtttgagtcttgcgattcgatcatacccgtcaaactaatcacgacaatatactgttcttacttctaaacgatcttaagtcaataatatcaacacctgtttttgtaattgactttcggtcgaatgcaacaaaagtttggtaaataatacatcaatttaataacttttctaacaattttcatgtccaaatcaattcaaatgagacctaaattgttggtcggaaactgaaaaagtcatgtatacatgagtttctgaatataaacgttcaatatcgtggaaattaattgaatccaaaacaaaatttagaaatggttacgttagaagcaaaagtgtcaagaggcaacgtgcaaactttagtcaccacgtggaacttcttcttttccacgcaaccacgtaataactaacgtaccattcgtcacaacgtgtttattttcggtttagtctgtaacgggaacaatgtcaaaccgtagttttgattggtctggcttgatttattgttgtttctgtggaccggtcgtgatcctatgggcttttctctcacccaaaaataaacgcaaaacgagcaagcttttaggcccatttttactgcattgggctattagttattgatctggcttgaatgtagtgttgttttcgtaggttatgaacttatgatgtatgatttgatccatctactaatagaggcttgatatctatcatattttacaagtcgtgatatcaatagcatattttactgcgaggattgttatgtgtcactaaagacaacactaggctcgtgggttggaccttgtggggaaaaccaaatggatcgaaccgagaagtaataaccaaaatttagataggtatgctctcggacatgatgagaacaagaaccactaaatctttgaagtatgactgcaatgtaaaacataaaacatttcagtgccaaatctactattttaactcgaattcatggtaggttcttgatgtcattcccaattggaaaatattgttatatccgaccgtacaattttatgctacagaggaagtatataatatttcatggatttctagcagatgtttacataatgactttttaaattgtaactgtgataataacttaatactatatggttatacaataattcaaatgtgtggaaaactgagaataattcaagttggtactagtaatatacaagcattgagattctcgaatctaaagcaatcgtcgaaagtccagataagtgttaaaatattcgaattttatggggaaacgacgagtttgtcatgtaagaacacggtacatgtatcaatatgagatctgaacatccaatgataatttatttaataattcatcgtctaatgattgcatttccagcaactaatgccaccttaactcaat

SEQ ID NO: 171327 - DNA, 3167 bp, Arabidopsis thaliana landsberg
gcaggcttcttccactcttttgcttttacacaaagaatctatcatactagtatatgtccactggtctggaactaatcctctatcattcatcaaactaagtaatctatatgcactatcaaaattaccagatctacactgcccatcgattaatgaattgtaagtgaccacatctggaagcactttacgctccagcattttattaagcactcccattgctttgtgaacattacttttacaatacccctttatcaattcattgtacgtgcgtgtattcgggctgagtttacgtgattccatcaactccacaacgtctacagcatcttcaatcatcccccgcttacaatacccattaatcaatgcattgtaagtgattacatttggcatcaaccctttctctagcatctgacctagcaactctctagctttctcgaacttacattggctgcataaactatcaattagcaccgtataagtgtgaatattcggcttaatgcctgtctcttccatctccttaaccaagttaagagcttcagacttccgttctgatccacacaaagactttatgagcactgtataagtacgaactgttggaaaacattcgtcatccttcatttttacaaacaagtccatcgcttcatcaatccttctcgctacacaaagaccgtgtataaggtgagtgtacgcaccctcatgtagtcggcaccccttcaagggcatctcattgaagaccttaaaagccgaatctaaatctttcctttgacaataacccataatcaaagacgtatatgtgaaaaaatcaggatccaacccagcctcaactatcttactcacatactgattcgcctcttccacattacccagcttgcaatacccattaaccattttattatatgtgtaaatgttgggacaaaccttatcctccaacatttccatataaacctgcttcatttcatcgaccaatccaaatctagccaacgaattcaacaatgtgttgtaacacccaataataagcttatacttaagctcaaatctttcgtctttattcatcttcctacacaaatctaaaacatacaaagcgtctcccactgaatcacagctcttaatcatcaataacctgatcttaaacacaacacccacatatccattgttgatgagaagagtaagaagggatgcataggaatatacactgtgcttgtatctcggattctgtgagatccagtgagaaaaattaagagctgttttcggatctagatcgagtgagaatagtgaagagacgtgagaagggcttatcgcagaaaccatagatttcaaggacggagatttatgcaattaggtttagaaagaattgatagcagacggtgtggaacactcattaatcatgttctccctccggaagattgcgaagtagcggagacacgagagcaaaactgccggcgagtgaccggagaaggaaccgtaacatccgtcgagaatttcttcttcaggacttcgaaggcggatactgaaccagtcaaacccgaattgcaccgtggttgtattcgacggatcatcgatgatccgtggcgttttggatctctccgatgatgaacacagaagagaaaaaggaggaaactttgcagaacgaatcttcagaatcgggggtttatctaatgggcctaaatgatccttaatgggctattattatatgtacaagttcgtcaccttaataagctgttatatgttcaagttcaacaatttaatgggccttgatgagctttaatgggccgatatgagctacactatggaggtgatcggcggaataatgcgccggcaatgagaagagattataacggcggattgatcgccttttcgagatatttcagcttcttttctagcagaacatgttcaccggaatcatctatcaataaccagtttaggcttctctgcatcacttgtgataccctgacaacgacgcacaatttctctcagcttctcagacaatgcatcgacgaaagatcgatatcaggaatcaagactatccaagcccatatgctgaaatctggttttccggccgaaatttccggcagcaaactcgtcgacgcgagtttaaagtgtggcgatatcgattacgcacgacaggtgttcgatggaatgtctgagagacatattgtaacatggaactctttaattgcttatttaattaagcacagaagaagcaaggaagctgttgagatgtatagattgatgattacgaataatgttttgccagatgagtacacgttgtctagtgttttcaaggcgttttcagatttgagtcttgagaaggaagcacagagaagccacggacttgctgtgattttgggtttggaagtctcaaacgtgttcgttggaagtgctcttgtggatatgtatgtaaagtttggtaaaacgagggaggcgaagttagtattggaccgcgtggaggagaaagatgtagttttgatcacagctttgatcgttggttactcgcagaagggtgaagatactgaagctgtgaaggcatttcaaagtatgttggtggagaaagttcagcctaatgagtatacttacgctagtgtattgatttcttgtggaaacttaaaggatataggtaatggcaagttgattcatggacttatggtcaagtccggttttgagtctgcgcttgcttcacaaacttctcttcttaccatgtatttgaggtgcagtttggtcgatgattccttgcgggttttcaagtgtattgagtacccaaatcaggtgagttggacgtctcttatatcagggcttgtccaaaatggtagagaagagatggctctaatcgaatttagaaaaatgatgcgtgattcaatcaagcctaactcttttacattgtcaagtgctctcagggggtgctcgaatctcgcaatgtttgaagaaggtagacagattcatggtatagtgactaaatatggttttgatagagataagtatgccggatcagggctcattgatttatatgggaaatgtggatgctcagacatggcaagattggtttttgataccttgagtgaagttgatgttatatctttgaacacaatgatatacagttatgcacagaacggtttctgacgcgaagcacttgacttgtttgagagaatgataaatctgggactgcagccgaacgatgt

SEQ ID NO: 171328 - DNA, 812 bp, Arabidopsis thaliana landsberg
  unsure (1)..(812): unsure at all n locations
agagccatggcttcatcgaacgctctttttcttttcccggaaactaaatcctctgttttaccagatccttctcgtttctttagcccagacctcctctcaaaccctctccctacaaattctttcttccaaaacnnnnnnnnnnnnnnnnnnnnnnnnnnnnnnnnnnntcatccttacctcatcaaatctgtggactcctctctctgtatctcatacccatctctgtttcacaactctgatttcttctacgaggtgtttaccgcagacatcatcatttccgggtcaaacggacccggaccgcgttcccggaaaactcatattatcttttcgttcagtgatcttgtcgttactcttgatttcccttcctctaatctcagatttttcctcgttagaggaagcccgtttataacttctctgtctccggtaactccatcactatctcaacgagccatggggtcagatctttgtccagtagctcatctactaagtggtcagacaagctcaccaacaaccagagatggctgatttacgcctcctcgcctattgatctgactaaacacggcgattcctcgattcattgccgtggtgggtttacgggtatagtacgnnnnnnnnnnnnnnnnnnnnnnnnnnnnnnnnnnnaatctacactcgaccgattcagttcttgttacccagtttccggtgacgctgactttacaaagccctttactttaaagtatatgtgggagaagagaggttctggagatctgctgatgctcgctcatcctcttcatctgaaacttttagcacgagacggtcgttcatgaaat

SEQ ID NO: 171329 - DNA, 625 bp, Arabidopsis thaliana landsberg
  unsure (1)..(625): unsure at all n locations
tctcctcccctaccanacgtcacaacgatcgctgaccaggtaacatcgacttcaaaccaccagtcgagatactatatggcgtgacaacaatgagcaacccgctgaagaagaagaagccgaagaagtagaagccgaggaggaagaagtggacctggatatggagaatacaacaccaggagattttacttcgtagagcacaagccgccatcaagacagagcaagagtctcactgagtgtcatgagaagctcagcaaggtgcaagcctggtgtaagttccaggacaaggtcattgataagtgtttcaagatgatcacgtccatacacaagaagatgagctgttcctcttctggcaccgctgcaccaagagtagaccctccagaagagatgccctccagacgctatgattcggatgcaccaagggactccacctatgagccgagtcaagtcgtctacgaagtgcccaggcaatccgcctatgaaccaagggaagctgacacttccctgacaccagcgaggcattcttctcacaagcctagagagcacaggcgaaggaggaagcaagcaccggttcactctagaagctcgacaaggatcctgcacgctaggagaccactcgaggggatcc

SEQ ID NO: 171330 - DNA, 711 bp, Arabidopsis thaliana landsberg
aaacatcattgcataccctttaacgtaacttgttagtccatgtctcaccctaacgatagagaaacaaagatatatgtggcaggttcgccttggattacaagaaccgaaggtctcataagttacttcgaacgatttggagaaatcgtttatgctaaagtagtttgtgatggagcaacacaaagatcaaagggatttggttttgtaagcatttaaacaacatataatatgtagagtaattatttgatataaattattatttttaatcatgactttgagtcaatattattaggtcacgtttagagaagttgaatctgcaacgagagcatgcgagaatccaaatcacaccatagacggacgaacagtcaattgcaaacttgcttatcttggtgctagggttcacaattaccaaccaaaccaatacggttattaatctcaattctctttttggtttctttccaattcaattttttttgcagtgataaatattcattataatctttaatcttgtatatataagattacttcgctcctttgctctctttgctccttagctgaagagtccagggatcatctgctcctcacttgctcctactctgcgcaggtatggcttcaaatacttgcacgtatcgatcccaacaggctttattcatctcgtggggggaactcctttcttggtttcgtgcattctctgtttcggttccgtcaattctc

SEQ ID NO: 171331 - DNA, 458 bp, Arabidopsis thaliana landsberg
  unsure (1)..(458): unsure at all n locations
tattccaagattgtgatatcctaatcgcttcaaaacactccaaactcgagcaaggcggtgccaacaacgcgatcacagcacacgggaggattgatgcgtcgcagtccacgggatctgtgtttttgaactgttcgattaacggaacagaggaatacatgaaggagtttcaagctaaccctgaagggcataagaacttcttgggaagaccgtggaaggagttttcgaggacggtttttgtaaactgtaatcttgagtctttgattagtcctgatggatnnnnnnnnnnnnnnnnnnnnnnnnnnnnnnnnnctttgtattacggtgagtataagaatacgggtccgggatcggttagatcgagtagggttccatggagtagtgagataccagagaagcatgttgatgtttactctgttgccaattttattcaggctgatgagtgggcttccacgactgct

SEQ ID NO: 171332 - DNA, 1054 bp, Arabidopsis thaliana landsberg; identical to SEQ ID NO: 12914

SEQ ID NO: 171333 - DNA, 350 bp, Arabidopsis thaliana landsberg
atagacaagatcattgggtattctgatgatgaattgctcgtgaagatcttatcgtttcttccaacaaaagttgctgtaagcacgagtattttgccaaaacttgactacgataacaccgtcaattttgatatggagaaaagcaagaggatggagctttttattgacaggaatctgccagcttgtgtctcaagtctatctgttcatctaatcaacctaaatgtatcaaattttgggttgacattgcagtttcacggtgtttgcgtgagctaagtgttacttattataggagaacattgatcaggaactatgcattactgccgagtagtttgtatacttgcaaatctctagtg

SEQ ID NO: 171334 - DNA, 275 bp, Arabidopsis thaliana landsberg
atagcgtagagatctcttttccacggagactctagtgttgatgagaaaacggtttcagaagcaaatgaggtatttatctcgaccatctgaatagtacaaatcgttagccatctaatgtggtgtatatcatctttgtgttaatgtaggagctcgatcgtatggaaataaggataagaatgaggtacgacgaaaacaggaggcgcgataaggggggtctgatcaagtgtgattgccatgctaaggctttctgtgccacttctcgggaacctgttaca

SEQ ID NO: 171335 - DNA, 545 bp, Arabidopsis thaliana landsberg
  unsure (1)..(545): unsure at all n locations
tagatcagtttcaagaactctgtttaggtctagaatcaactggttttccgtttctggttgccattaagcctccttcgggtgtatcaaccgtcgaggaagccttaccggaaggattcaaagagagggttcaaggacgtggcattgtgtacggaggttggattcagcnnnnnnnnnnnnnnnnncatccttcagtgggttgttttgttagccattgcgggtttgggtcaatgtgggagtctttgatgagtaattgtcagatagttttggttccgcagcatggtgaacaaatattgaacgcgaggctgatgacggaagagatggaggtggcggttgaactggagagggaagagaatgggtggttctcgcggcagagcttggagaattcggtgaagagtgtgatggacgaaggtagtaaggtcggtgagaaagtgaggaagaatcatgacaagtggagatgtgttttgactgactctggtttttcagatggttatattgatatgtttgaacagaatttagttgaacttgtgaagtaatgagttcatttt

SEQ ID NO: 171336 - DNA, 613 bp, Arabidopsis thaliana landsberg
gtcatgcagcatccaactgatattagccgatagattagtcagaatccaccatgtagtcctgcaagacctacgtgtcaaagtcggatcaatagagatccccacacttttcataatactggagatggatgaggagccgaaggacccattaaacataagaagacgattactggcaactgcaggagctattatcgatgtcacacagggaaagatcgaacctaaacctcggaaaggagatgaagatgaccttcaatatcaacaaagctatgaagaaaccaataattaatggacaagtcgtttggatcaaagaattggatagattggtcgacgtattactggaagagcttacggagaaagattacttggcaagtgctttaaccaaggctccaaaggttgaccgtaagcctcttccaaaaggtccaaggtacgcgtttcttggtccaaatgatacctaccctgtcattatcaacaatggattaagtgatgaacaagtgcatcaattgttaaatgagcttagaaagtatagaaaagcaattgggtattcattagctgatattaaaggaatttcacgtactttatgtactcataggatccacctcgaaaatgaatcatatac

SEQ ID NO: 171337 - DNA, 248 bp, Arabidopsis thaliana landsberg
gagatgatggacctcttatttgacataggagttcacagtactaaatggagagtctatgtgaagattcttgttctttggcattataatccatcccaagatggtgttgtaaccacgatgatgcttgtcgattcaaaggtaagtttataaattagcatagcttaccctgtgacttgattatatttgaaaccctatttttaaaatttttataatttttatgtagtataatcgaattgatgcaactattcaag

SEQ ID NO: 171338 - DNA, 592 bp, Arabidopsis thaliana landsberg; identical to SEQ ID NO: 63709

SEQ ID NO: 171339 - DNA, 539 bp, Arabidopsis thaliana landsberg
ccagtactccggctggtcggtgagcccaacggatcaaggtcatcagccgctacatcgcgtatcacggcacgaccatgggcgccctctccatcaccggtattcccgacctcaagacgcccttcgagcccctggtacccggcgcggtcaaggtgaccaacaccaacttctaccgggcacccctcttcgccgatgatgaggtggccttcggccgttgggccgccgacgagatcgagcgggccatcctgcgcgagggaccgaacacggtggcggcggtattcctcgagccggtgcagaacgccggcgggtgcttccccccgccacccggctacttcgaacgggtgcgtgagatctgcgaccgctacggagtcctactggtctccgacgaagtgatgtgcgccttcggtcgtctcggacactggttcggttcgcagcgttacggctatcaacccgacatcatcacggcgcccaacgcgcttgacgtcgggctacgcgcccaaggggaacatgatcgcttcggaccgcctggtcgagcccttcct

SEQ ID NO: 171340 - DNA, 367 bp, Arabidopsis thaliana landsberg
atggagaagtggatgaacttgagagacgaagacttaacggaagaaacaaagactctaatctcttcactttcttcagagaaagggtacctcggtcgaaacctctgcaagtaccaaggctcttggtattactacaactttctccaaggtgttctcaatttccagagaggttttaagcctcaagacactgatattatcgtcgcatcgtacccaaaatccggcaccctgtggctcaaggcactcactgtcgcgctttttgagagaacaaagaacccttctcatgatgatcctatgagccatcctctagtatccaacaatcctgacagcctggtacctgtccttgagatgaatctttaccgggataccaaac

SEQ ID NO: 171341 - DNA, 495 bp, Arabidopsis thaliana landsberg; identical to SEQ ID NO: 3177

SEQ ID NO: 171342 - DNA, 707 bp, Arabidopsis thaliana landsberg
tgacgcctctctcatatccgcagttatcaccggtcttgtcaatgtgctttccaccattgtctccatctactccgttgacaaattcggacgaagagctttgtttcttcaaggtggttttcagatgatcgtgacccaggttcgtacaaaccctaaaacaatgaaaatactctgttttctaaaacagagtatcttgctctgctttctaaaaccgaggtaggtaacaatgatttcttttgctttggtttcagatcgcggtcgggtcgatgatcggatggaaatttggattcaacggggaaggaaatttgtcaggggttgatgcggatataatcttggcattgatatgtctctatgtggcgggtttcgcgtggtcatggggaccgttgggatggttagtgccgagtgagatatgtccattggaaattagatcagcaggacaatcgttaaacgtttcggtgaacatgttctttacatttttcattggacaattcttcttgacgatgctttgccatatgaagtttggtttgttctatttcttcgcgggtatggtcttgatcatgaccattttcatttacttcttgttgccggagacaaaaggtgttccgattgaggagatggggaaagtgtggaaagagcatagatattgggggaagtatagtaataatgatgatggtgatgatgttgatgatgatgcttatttttagttgatg

SEQ ID NO: 171343 - DNA, 978 bp, Arabidopsis thaliana landsberg
  unsure (1)..(978): unsure at all n locations
atgactacattttctggtattcttcgatcgatcaggtattagtagccgcggtcactaatcggaaacagatttgcccatcaaacccaaacatggttcaccaacgttcaacggatcttgtttgtgtcaaacctctcctccattctaataaattcaggtgatttgactttaatcttttttacaatagccgccaaattgactaactagctaactaactaactaaccgactcttttttttttgacgtgcaggtttcttgacaaggcttgcatcaagacgcaaggcaaggcaatggagagtccatggagactctgcacaatcgaacaagtccatcaagtcaagatattgttatcagtcataccgatattcgcgtgtactatcatcttcaataccatcttagctcagcttcaaactttgggtgttcagcaaggaagttctatgaacacacacatcacaaaaacattccaaatcccaccggtttcttttcaagccattccttacatcattctcatcttctttgtgcctctctacgagacgttcttcgtcccactcgctagaaaactcacgggaaacgattctggaatctctcctcttcagagaattggcactggactgttcttagcaactttctcgatggttgcagccgctttagtggagaagaagagacgagaatcgttcttggaacagaacgtaatgctctcgatcttttggnnnnnnnnnnnnnnnnnnnnnnntggtttatcagagatgtttacagccgttggattagtggagtttttttacaaacagtcttcacagagtatgcaatcttttctcacagcaatgacatactgttcttactctttcgggttttatcttagctctgttcttgtctcgaccgtgaatagagttacttctagtaatggttccgggaccaaagaaggttggttaggcgataatgaccttaacaaagatagattagatcacttttactggcttttagc

SEQ ID NO: 171344 - DNA, 565 bp, Arabidopsis thaliana landsberg; identical to SEQ ID NO: 1624

SEQ ID NO: 171345 - DNA, 495 bp, Arabidopsis thaliana landsberg
tcaaagcgggttccggcgcgctcacattcggccagccaagctcggcaggcgtgccaccggaactcgccgcgcacaccttgacgctgccttacaacgacaatgccgcggtcgagcaactgttcgcgcagatcggcagtgagatcgcctgcgtcatcgtcgaaccggtcgtcggcaacatgaacctcatcgtcccgcagaatggcttcttgcaagtattgcgtgaccagtgcaccaagcatggcgcggtgttgatcttcgacgaggtgatgaccgggttccgtgtcgcactcggcggcgcgcagcagctgtacggcatcaccccggacctcactacgctgggcaaggtcatcggcggcggcttgccggtcggcgctttcggcggtcgccatgacatcatgcattgcctggcgccactggggccggtgtaccaggccggcacgcagtccggcaatccggtggccgtgtctgccggcctggcgacgcgcaaggtgatcc

SEQ ID NO: 171346 - DNA, 680 bp, Arabidopsis thaliana landsberg; identical to SEQ ID NO: 23501

SEQ ID NO: 171347 - DNA, 305 bp, Arabidopsis thaliana landsberg
tgtgcgactaccgcgtgcgcggtttcacccgcgacgtgaagggcaagaagcacttcatcgaccacaagatcaattcggtacaggattacctggcacgccacatcaagcagaagtacgagatgttcgacgtgaacgtgtaccaggagaacatgttccacaccaagatgcacatcaaggacttcgacctcgacacctacctgttcgaggcccatgccgacgatctctcgttcaaggagcgccagcgcatcgagtcgctgctgcgacgcgagatcgaggaactgttccacggccgcaacctgatgtga

SEQ ID NO: 171348 - DNA, 1586 bp, Arabidopsis thaliana landsberg
tttgatattctttgggatgctttgtctagtgaagagcacctccacctctttgctagcatcaaagggttgccaccatcatcgatcaaatcggtacatcaccctaataacataaaatatacttcatattcatgtgtgttacaaatatctgatttaaacttttggctaagcataccttttcattaaaaaaagattgttacgtatatatagattgcagagaagttactggtagatgtgaagctaacaggatcggcgaaaattagagcaggaagttacagtggtggaatgaaacgtcggctgagtgttgcaatagcactcattggtgatcccaagctggtttttctagatgaaccggtctgtaatatgcaacattcctctctttttttttttctttttaaaaatgagtttatatagacaaacatcaattttttttttattctaacatttgtggattgtagactactggtatggaccctatcacgagaagacatgtgtgggacattatacaagaatcaaagaaaggtcgtgccattatactaacgacgcattctatggaagaagctgatattttaggtgatcgaatagggatcatggctaaaggcaggctccgctgcattggaacctcaatcaggttaaaatctcgctttggcacgggatttgttgctaccgttagcttcatcgaaaacaaaaaagacggtgcacccgagccattgaaaagattctttaaggaggtatgtatgtacactcaagttttttagtagtattgtttagttagtaaataatctagtacctctgagcctggaacaaacatcatgcagcgtctaaaagttgagccaacagaagaaaacaaagctttcatgacttttgtaatcccacacgacaaagagcaacttttgaaggtaaccatctataaaaagctttattaattatctcttaaatctttcatttgatgaatgatttttccataattaacgggaataggggtttttcgcggagttacaagatagagaatctgaatttggtatcgcagacattcagctcggtcttgccactcttgaagaagtgtttttgaacatcgctagacgtgctgaactagaaagcgcaactgttgaaggaactatggtaactctcgagttagaatcaggcatcgcagtcgaggtaattagtctacaaggtccatcaaaataatcagtttcacatgtaaccgtcgatgaaatgcactattgagaattaatgaacaagaatttaaatggatacaaactaacctcaatgtgcagatacctgtggagcaagatttgtaggtatccctggaacagaaaacgcagagaatccaagaggaataatggtgaaagtgtactggcaacaagacgggtcaggatcgatgtgcatttctggacactcggcggagatgcggatcccagagaatgtatcggtgatatatgaaccatcatcacaagtattaggacatggacagcgacgagttcggggtattgtgattgattatgaatctaacaattaacattcccttcttgggcagtttggggcaaaaaatacttggtttacgctggagtttaaaaacagtcatggag

SEQ ID NO: 171349 - DNA, 305 bp, Arabidopsis thaliana landsberg
atgacgaggaagaagctaaacctatcttacatcaccaatgagtcaatgagaaaagcaacattcaataagagaaagaaagggcttgtgaaaaaaatccacgagctttccgttctctgcggaatcgaagcatgtgcagtgatttatagtccgttcaactcaaaccctgaagtctggccatcgaattcagaagttaaaaatgtaatggaaaattttgagatgttgacaaagttggagcaagagaagaaaatggtgagccacaaaggatattatcagacaaaacatctcaaaaactatggagagtaacg

SEQ ID NO: 171350 - DNA, 1314 bp, Arabidopsis thaliana landsberg
aatttgcagctcgatatggaccgcaccacaaaacatcataagacactccctgaagttattcctttgtgtttggccactgaaagatattctgttggtgtttacattttgcgcaatcgttatcagatggaagccgtcaggcttaaacatctctcttttttttttgcagattgctcttttcatactttttttgtcctttcaacatcatataccgctcaagtcggtttttctttatacgatcactgtttcactgtatatgtgcccccctctacgaggtaatcgtattaaattgactcctggatgttattcaatattcatcttcatgattttatcctttatcacaggtcacacttccagattttttcttgggagaccacctaaccagtcaggttatagatttgcattaatgtttgctgacaaatgacaataaatgatcagaataatagactgatgttttttgttttgatagttcagatacaagccataaggagctttgagctattcatttgctactatggcttaggagaatacttgcagaggcaaaacaagtgtcatagtcatggtgtttacaatgccttctactttgtcgttgctgttataccctactggctccgcttcctccaggtttcacacaattcaatctcttcctttttttattactgccttcactgattctgtcacatccgaatctataacttacatgtattcacttttttgcagtgcaaacgcagattatgcgaagaaaaagaatccgtacacggatacaatgcgttgaaatatatgttgacaatcattgcagtcatcgtaagaacagcgtatgatctgaaagagggacgcacttggatgattttggctcttataagctcaggtgtagcgacagggatgaacacattctgggacattgttatagactggggactcctccgtaagcactccaagaacccatacttaagggacaaattactggtccctcacaaaagcgtctattttgcagccatggtaagtagtaacattttaacatcagaatatgtcatgtgctaaagattctggttgaatcatatttgattttgacaggtagtgaatgtgattctaagagtggcatggatgcagctagtgctagagttcaacttgaagtcgcttcacaaaatcgcagtaacaagcattatttcatgtttagagattattcgtcggggaatatggagcttcttcaggttggagaatgagcacttgaacaatgtaggcaaatacagagccttcaagtcagttccacatcctttccattactacgatgacgacgatgttgacaaagatgactga

SEQ ID NO: 171351 - DNA, 1517 bp, Arabidopsis thaliana landsberg
cgaggaagtgttaaaggagcctgttcatttcggtgttggagtaggcgccttaaccttgtatgttgtccgagaagattattcgtacttaggtcgacttgtagatagtaatctcggttacttagcagatgaagattatgatggtgagttagccattgctaatgaaggtgatgaaggtgctaatccaaaagatgaaaaaaaaaatgaagagcaaaatggtgacagcagcaaagagagtgatggtgacgatggtggcaatcaagctgttgatgagagcaagtatccgaaatttagtattggtgatgagtacaacacaattgagtcttttaaggatgctattaacaagtattcagtaaagaagaggagggacattaaatatgataagtcggatagcaagcgtgttgtagctatatgttcagcgaagaagtgtccttggaggatttctgcatctataaatactagcagtagtatagtggttattagagctttgaatgatgaacatgattgcacttggcaaggtaaagtgtcacttctctctaatgctcgcattgctgatctttatcttgaagagttcagacttaatccggatttctcatcaactcagttgcagaataagcttttgagacataatatcattattccttagataatctgcgagaggacacgcgtgagatgcttgcagattttttatgatgagcaagcggagtctttttcaaggctttttaattatgtagctaagttgaaaagaagcaatgagggatctacaacgtcattgtagttaaaagaagaaaaattcatagattcaattgttgctttgctgctctaaaagatggatgaaaggcagcttgtatgaagattatacatcttggcggtccatttttgaagtggagaatgataggaatgtttgttagtggcttgtggaagagatcctaatgatcagatgtttcctatagcttgggggatagttgattgtgagaatagtccaaattggcagtggtttcttgagcatttaatatatgacttagatttagaggttggagatgggttacaattaggtagtgatcactagaaaggattgattgcagcagtgaaggatgttctgccgtttgctgaacatagaatgtgtgccagacatattcatgcaaactggaagaaaatacattccggagtagagtttgaagacttgttttgggctgctgcatattgttattatactgttcagtttgatagaaatatggaagagttgaagacttattcacttgatgcttataatgacttgaagatatttgtcttctttccatggtccaggtatgactcttataattttatagtaacattattagctttatagatttctcagttcatagatgtttgatgttttcttattcatgggtttcttcaccgagttctcaaaatgtagtgttgaggaaaacaatctaggagagtcattcaatgttacaattcggattgcaagaaccaaaccaatactggagatgctagaagagataagaaaaagagtg

SEQ ID NO: 171352 - DNA, 622 bp, Arabidopsis thaliana landsberg
tctttacgttcttactccaccggttagtgaggatgctttagatttgttgtcaaagatgttcacttttgaccccaagtctagaatatcgattcagcaggctctaaaacacaggtacctaaaaatctcccctatggataatgcataagaacaggttatttagttttgttctcaaaccttgatttctttttaaaggtacttcacatctgcaccttcacctactgaccctttaaagctcccaagaccagtttccaagcaagatgctaagtcatctgatagtaaacttgaagccattaaagtgctgtcaccagcacataagtttagaagagtgatgcctgaccgaggaaagtctggtaatggtttcaaggaccagagtgttgatgtcatgagacaagctagccatgatggacaagcaccaatgtctttagatttcaccatcttagctgagcggccaccaaaccgaccaaccatcaccaggtaaaaacaattggttttattacagtcagttcttggtcagcttaaaaaatgaaaacttttgatgaattcttgatttttggatttgcagtgcagatagatctcatctgaagaggaaacttgatctcgagttcctataggatatcgcgta

SEQ ID NO: 171353 - DNA, 1646 bp, Arabidopsis thaliana landsberg
ggttttgagctacgatggattacacgcacctgatgctttagctgttacatctgctggaattgctgtgtatgtagggtcatctttttccgtttacatatgagtgaagcttttttatcttggcaaagttgacatggctatgtaataaatgaataccgcagagctctttcagaagtaccaaatgcgaaagcgattgcaggagttcgggttggtcttattgggggtgaattcattgtcaatccaaccgtgaaggagatggaagaatcacagctagatttgtttctagctggaacagatactgcaattctaacgatagaggtaaactctaatctttacttgagtttgcaagatttgccctttctctcctgtttttttttttttttctatactcagcccttgctcattgaaaaatctgggattgcagggatacagtaattttcttcctgaggaaatgcttctccaagctgttaaagttggacaggtatttcgatttttaattcggattatttcaatttttaaaagtctgaattagatactaaatgtaaggctttttcatttttaccaggatgctgtacaggctacatgcattgctattgaagttttagcaaagaaatatggaaagcctaaaatgcttgacgctatcagattaccacctccagagctatacaagcatgtgaaagtatgttatacactttgtttctgtttcgttttgccagaatggaattgcattgatattattttgtaattcatgtttaaaatgaattgttttatgtacacaggaacttgctggtgaggaattgacaaaagcgttacaaattaagagtaaaatatcgagaaggaaagccatatcgtccctggaagaaaaggtcttgacaatactgacagagaagggatatgttattgatgaggtagcttttggaaccatagaagcacaaccggatctgttggaggatgaagacgaggatgaggaagttgttcctgaaggtgaggtggaccaaggcgatgttcacattagacccatccctcggaaacctattcctttagtgagtctcttaaccttttcaacatgataacttgaatgtgaccttttatcatattcattttttcttaaatgtaatgctaacaaactagtcatttccctttgctagctattttctgaagtagatgtcaagctagtcttcaaagaagtatcgtcgaagcttctacgtaggcgaattgttgaggtacaacatctgatttcttggtatttataccctagacatgtatgtttaaggatttattttctcactgaagcattttatgaactacactacattaaagaatctaacatgtttgaagccacacatctttcacattgtctcctagtaattctttcctaaattttcaattttgttttcactttttcggaatgagctttattgattccatatgacatctttcttcatccatagggaggtaaaagaagtgatggtcggactctggatgagattcgtccaattaattcaagatgtggactgcttcccagggcacatggaagtactctgttcacacgtggggaaacacaggtaacataggaatgttgtcttctggagaaatcctgcgtggctatttcatataacgataatttctcttatcgccttttatgtatt

SEQ ID NO: 171354 - DNA, 1474 bp, Arabidopsis thaliana landsberg
acacggatatattcaacctgttgcgattctttttttacagattccattacatggctgtggcagatgacagaaaaaggataatgccttttccagatgatctatgcaaaggaagatgccaaactctagattaccaggaagcttctctgctcactgctccttgtgatccacgcctacaaggcgaagtataagttccatattttttccatcgtttagaaattacaacattttgttctttctcatgcgttgttgagctgtttattctcccatttactgatacatgaatgcgtatattatgaacttatgctcgttttgtgatgtattacaacttcaaattatgaatccggtaaatactgtttcacagataactaaatcatttttcttctctgacaggtagatgataaataccaatattcgtgtgagaataaggatctgagagtacatggatggatatccttcgatccaccagtaggattttggcaaattacgcccagtaatgagttccgctcaggcggaccactcaaacaaaacctgacttcacatgttggcccaaccactcttgcagtaagtgtccctgtgacatatgtggagaatgtttcagtataatacttagaagtgttgatttccgtaatggttatttcaggtgtttcacagtactcattatgctggaaaaaccatgatgcctcgttttgaacacgtgagccttggaagaaagtctatggccctgttttcatttacctaaattccacagccaatggagatgatccactttgcttatgggacgatgctaagataaaggtacgagtgaagcaaatcgctattggacttgctgaatacagaaaaagatttgtgaagggctcacttgtatgaggtaatctgcagatgatggctgaggttgaaaggtggccttatagctttgtggcatctgacgactatccaaagtctgaagaacgtggcacagcccgtggtagattacttatccgtgacaggtatttgtgttttttacattctaatttttttttatttttcctgcatcttcctttattttatattgcttctgtaatatttcttagtgtatattaacatgttgaatttttgtataggttcataaacaatgatttgatttcagcaagaggtgcttatgttggtttggctccgcctggtgattctggttcttggcaaattgaatgcaaggtgatttcttccttctccattcttaattagttgcaacgagcaaaaatagaagtcagttcaaagatatcaagaaagagatttatgatggaattaccaacaaaataaagatttgtctgtaaagagtacaacattttgagcattggttacacactaaatctttgccaatcagggataccaattttgggcgattgcggatgaggctggctatttctccatagggaacgtgcgtcctggcgagtataatcaatatgcttgggtccccggtttcatggaaattatcaaa

SEQ ID NO: 171355 - DNA, 763 bp, Arabidopsis thaliana landsberg; identical to SEQ ID NO: 11702

SEQ ID NO: 171356 - DNA, 1166 bp, Arabidopsis thaliana landsberg
tttttggatgccaaaacattttatataatggattaactcagatcaatagtccaaggaatcacataacgattttggatagcaacaacgcaactttatcaaatcttcatctaattgcccctgcaagtagtccaaatactgatggcattgatatctctcattcacaaaatatcaatattatgagctccacaatcaaaaccggtactaccattttccttagttaaacgaaaattagactacgccatatacagattgatcaggagaaagattacaatattttattttatgatatttatggttttctacctattaggtgatgactgtgttgcaattaaacgtaattcatacaatattaacgtaacttacgtgacatgtggtccgggtcatggcataaggttcgcacatataaaattaattttcaaatatatacttttactatcaattcttgatcaatgtgtgacgaaagtacagtatcggaagtttgggggaaggaggggcatctgaggtagtacaaaatgtgaatgtcagacattgcaccttcactggaacacaaaatggtgcaagaatcaagacttggcctgtaagtttttttttactgtttgttatagaataaaataatatacataatataaaaaacatatatcatgtacttggacgttacataccctaattttgcagggaggacaagggtttgtcaaaaatattttgtacgaagatattactctaataaatgccaacttccccatcatcatcgatcaacaatatcgtgataatgctggtcaatataaacaatcagcaggggtaatatttttaaatctacagtcatattttaataaatgaataggtgcatgtgaccacaatatacatatgaagtgatattattttaatttgaaatctctaataaaagacgatacataagtgataagtgaatgtaactaaaactgaaatatgcttcaaccttgatattttgaaaaattaaggctcagagagagagatggctaaatttcacgtatttttttagatttaagtataacaaacatatgtggtgttctttcaggctactgctgtgaaagtgagcaatgtgacatttagatactttacaggaacatgtgcaaatgatattgcgataaaactagattgtgatgaagtaacgggttgtagaggtatcg

SEQ ID NO: 171357 - DNA, 412 bp, Arabidopsis thaliana landsberg
atggagccgccggcgaaaggaacggtgacgccgttaggattttcagaggaggatgttcgaaaagcagcaagttacatggaggagaaaatcggagagaagcgagtagagatgaatcgtcttcaacagtacgtcgacgaaaacgataatctcatcaatctcgtcaagaagcttcccgatcagcttcatcacaacgttatggtgaatttttaatcctttgacttcctctccttatgattcaattttgctcccgtttaatgtagttggtgcttttgtgtaaacaggttccattcggtaaaatggcttttttcccaggtcgattgattcacaccaacgagtgtttggtaagtttcatgatgattatatgttctctcttctcgatttcaatggcaggatacatgtaatttattctaga

SEQ ID NO: 171358 - DNA, 1066 bp, Arabidopsis thaliana landsberg
atggcgaatcgaggcggcgaaaacgggaaattggatcggaagaagacgatgacgatgaattgggcggggttaggcgagtttgaagacgacgacgatcattttttcgatagctctaatcgtatctccaccgtcgtaccttcggatttagcatcatcttctgacgaagaagaaggggagtttgatgattgccggatctcgttttcttctaatgtgtcgtcctcctctcgcgctgctcctgcgccggatatgtcgccggattatgatatttggatgtcggcgccgggatctatcacggagcgtcgtcgaaggcttcttaatggaatgggacttgaatctaagaagactaggctcggagctatctcgattcaacgcgtgagtgaacctgtggcggcgacgggtgagtgctcacgttctcgcgttgcggaagtgaaggtggaggagtcagatcacaattctccggtgaatcaaagagttcgtcgatctccgtcgatgtcggttttgcttgtacggtctacatctgattccgatatcgaagcgtcttctgctgagaaacagaggaaagaagagatgttagggaaaacgtcgaaatcgcgattgactagaaccgcgtctgcgattggagctccgtgtgcgaggatttgtccctacttcacccaaacgcaagcctcgccgccggacgcaccaaacggtcatcatcagtctcaaggccaacgtagtggtccgttgctctcttcggtagtttccaatactcgttttagtgcttttttcttgattaagaaccttgaccctgggaaagagttcattgtgaaggagtatggtgagaatggaatgtggaatcggctaccgatttgcaacctggtaagcaattgacaatggaagaatttgagaagagtgttggttattcatctgttgttaaggatcttatgagaagagagaacgcgaattcgacgatggattttaggaaatttaactcgtatgtgtcaaagagtttgagagtaagtaagaagagaggagctgctttgttaaagaacataaaggacgttgctcattctatagctcttctagg

SEQ ID NO: 171359 - DNA, 492 bp, Arabidopsis thaliana landsberg
  unsure (1)..(492): unsure at all n locations
gacgtgctgaccggcgactccttcttccacctgtccgcatacggctccgcccttcccgggctgaacctgtgcggcgccggccgcgtcgtctgcctcatcgactccgtcggcgacgtgtacgcctgccccttcgccatccacgagaacttcnctgccgggaacgtccgggacaccggcgggttcgcggaggtctggaagtcctcggagctgttcgcctcgctgcggtccccggacaccgggggagcctgccggtcctgcggcttctacgactcctgccggggcgggtgcatggccgccaagttcttcaccggccttccgctcgacgggcccgatcccgagtgcgtccagggctacggcgaggcggccctggcggcggtgccgggcgacctcggcgtgccgaagccgtccgtggatcactcccaccgcaccgcgccccggtcctcctccccaccggtgcccgtgacgatcggtcgccggcgaacgcccgtgcgc

SEQ ID NO: 171360 - DNA, 1119 bp, Arabidopsis thaliana landsberg; identical to SEQ ID NO: 26891

SEQ ID NO: 171361 - DNA, 1500 bp, Arabidopsis thaliana landsberg
aaatgggtaaacgagcaacttatggagctggtcatgtcgatccaatagctgcgacaaatcctggactcgtctatgaaatggacaaagcagatcacattgcttttctctgcggcttgaattacactgcggatacccttgcactcatagctggtgaaacaattacttgcactaaagaaaacaaaaccttaccaagaaacctcaactatccttcaatgtcagctcaattgccaagatctgaaagctcactcacagtgactttcaacagaactgtcactaatgttggaacgcccaactcaacatacaaatcaaaggtggtcttaaatcaaggatcaaagctcaacgtcaaggtcacacctagtgttctgtcttttaagacggtgagtgaaaagaagtctttcacggccactgtcccaggtagcgatagcgatccaaaactgccttcatctgcaaatctaatatggtctgatggcacacataatgtgagaagccctattgttatttatattgatggtgcctattgataagggcacttcagtttatatctgtttaccgtcatcatcaaacattgtaatattcaatatctttgatattgtcctttgctttgtttcttgttaagttcaccaaatactcactgaaaagtatcaaaagcaattaaagtggttgtttgacgaccaatattcttgaaatgacattcttttttcacaaaacaatattttgtgtgcaacatatggcgtatgaactaattcttttaaacaaagtatttttttgttttaatagaatttcaacacgttacaaccattatactctgtaaaacctatcgcaaattgaagtttttaaaaaatcactaattaatgttaggtaagaaaaccttttctttgtttagttttttgactataaatctaagaaaagaaattggaagattttttccttttcatatatctttgaccacaaaatcacactttatctatatatatatatacttatcctaagtgtaaaaaacaaaggtccaagtctatcataaaatggctatcacaaaaaaaaaattagtcgtgtatactttcactcttctctttatcatatcttatgttcattgccagtctacatccgctagcagtcctggtattggcttattattatactgtccacactttacttaaaaacatatttttttctataatatttcttaatgtacatattgattattattaaataggttttgacaacggagaagtttgcaaacaattcaaattcaatccgtgtgaacgcggaggggatagaggctgcactgtgttttgtacaagaaagttgtttactcgaggcgaatgcagagacgagggatgttggtgttgtcctagttttgacatcggggaaagttgccaaggtttcaaattcaatccgtgtgaacgcggaggggatagaggctgcactgtgttttgtaaaagaaaattggttactcgaggcgaatgcagagacgagggatgttggtgttgtcctggacaa

SEQ ID NO: 171362 - DNA, 520 bp, Arabidopsis thaliana landsberg
atgtcagacctgaagaaacaatccggctatccgtcagtcttggtgcttgatgatcagaatgatgtggcggcgacgatagcaaatcttgtcggatcactcggaggaatagcgcgaacatcggacagtgcagaaagctttttccatcagtgggagaaagatccgcctgacgtttcgatcatcgatcttaaaatgccgcaaagagacgggctggacgtcctgcacgaactgggatccagatcgaatgctcaggtgatattggtgagcggcttcgacctgagcgtattgggggcggcacgccaagcggcgcaagcaaacggcctccacgtcataggtgtactaaccaagccggtgcggcgatccgagctggcaaagctcttgtcggaagctcagtctggcctgaaaaccggactcacgaccaaaagtaacgttgctccgcatgatatcagcattgaaacgttgacgaacgcgttgagacatggacgaatagtaccatactttcaacctaagatcgagttacgcg

SEQ ID NO: 171363 - DNA, 1313 bp, Arabidopsis thaliana landsberg
agggtgttgattccggtgaaacgtttgctccggttgtgaaaatgacaacagttagatctttcttatcgatagtctctgctccgaactgggaggtgcatcaaatggacgtgcacaacgcattccttcacggagatttagaagaggaagtttacatgaagcttcctcctggattctctaaacaaactgatggaaaggtatgtcgattacgcaagtcattgtacggattaaagcaagcgccgcgttgttggtttgctaagcttgcgacctctcttgaagcttatgggtttgagcagtctctgtctgattactcgctgtttgtttataagacagaagacatcgaggtaagagtacttgtctatgttgataacttggtcataaccggaaatacaattggtgcgatcactaatttcaaagagtatcttagtaagtgcttctacatgaaagatctaggagtgctaaaatattttttggggattgaagttgcaagaaattcagaaggaatatatttaagccaaaggaagtacgttctcgacatcttgacagaaaccggtttacttgggtctaaaccggctacatttccactcgaacaacatcaacaacttggtttagcaaatggacctcttctctcacatcccgaacaatatcgaaggttgattggtaagctgatttatctgggtgttacgcgacccgatctttcttactcggtgcatgtactttcacagtttatgcaaactccgcgtgaagaacattggaaagctgcacttagagtggttcggtatctcaaagaaactgtaggacaggggattctactttgattagattctgatctcactctttatgggtggtgcgactccgattatgctggctgcccgttaactcgacgatcatcgacgggctggttcatacaacttggtcaatctccgatttcttggaagacaaagaagcagcaagtggtgagtcactcttctgctgaagcggagtacagagccatgtcttggacagcaaaggaattaaaatggctcaaagcacttcttcttgacttaggcgtctcacacactcaaccaatgcggctttattgtgataacatggcagcattgcatatcagcgcgaatccagtctttcacgaaagaaccaaacatatcgagaaagattgtcactttgttcgtgacgagattaaatccgggaatattatcacagctcatgtttccaccaagatccaacttgcagatattttcacaaaggcattgggacaaaaagagttcgacgaattttgggacaagcttgggatcatgaacctccatgctccagcttga

SEQ ID NO: 171364 - DNA, 309 bp, Arabidopsis thaliana landsberg
  unsure (1)..(309): unsure at all n locations
ggaaccaaacttgggaacggcgagggcacggcgtttaagcagccggcggataatgtaacggtgattttgacggtgttaaagggatcgagtgttaagttaaagagctcgtcgcgtaaagagttaacggaatcgcagaagaaaggaaaagtgccgtttggtctgagaattaaagcgccggttaagtttaaggttggctccgttacaacgtggacgatgaccattacggtggattgcaaaataacagtggatannnnnnnnnnnnnnnnnnctgtgaagacggaaaattgcgaaacgggcttgagcctgttg

SEQ ID NO: 171365 - DNA, 1686 bp, Arabidopsis thaliana landsberg
catggcggatttgattcatttgaggctgttgctgctgaggaagaagttgttgcctaccatgtatctgtctttgagaaccgggaacggttatagggacctgacttggcaaagtagatgacacaggaatgttgagattgctctgtgtgttttgctgtaaccattgttggctcgttgtagtctgcatatatggcaacaaggcgggaagagattgagcttgattcacaactacttgagaagctgatgtttagataaacacatagaaaaaaaaaagttagttagtgatttctttgttattaagctaaaatagtataattatgaaacgaaaaacttattacctagaactctagtgtaagttctctgtatataatgcagtgtttcactgagtttcctaaggtaatcattctgaaacatagcaaggggacaatgagtaagatatcaaattcagattctgaagttaatagatggagaaacaatttgtagtttagcaccttatcggttgctatgctataaaaattctcttcaaatttggaagcgatgtcgttaatcttatattcttcatgtgcaggaaacttttccttgaacttttcaactctacacatacatgagaacaaaatatcagtgactatgaagaatttggttataactgatattcaagaggaagtgataccattttaattgcactaaaaatacaaaacagagaaaataatccgtagttaatattcgaacttacgataatcgtttagcgaacaaacactgaaacaattatacatatgtgccaagcaattgtacatagaagcgagagtaaaacaagattctcctagtgaggaagagcctaaatgcaggtaatgaggttaaaagaatatgcaaaacttaaagtacaaaaggttgaagttaggttttgtcaactatgataaacatttatgcacaactcttatgctttaactgttgcaatctttatcatgcgcaaactacaaatatcacatcgaaagcatgaccaagaaaaccttactctctttcatgaatgttaataatcaaataagaacaatgagtccaacaaaagaaacatgaaagaatggcttacatttttgaaagaaccttttgccgtaattcaggctcaagttgtgatctccaatcaatacaattattcgcagcagcgcggtctccgcgttgttcattaggcttccagttagtatttccctccattaagttatgcgtcctaacgggaagatgtatgtataggctttgaccaagaaccgccttcgataaaccttaacaaacaaacaaaagaatgattagagaaatcactcaagagggtaacacaaaacagataaatatatagtacaagaaaacgacaaaagagtattcaaaaatcaatatgcatatcacgctaacaacctatcgcataatatcacacaacacgtattatagtatttgttggtgcaggaattagcacctccgacaatactaatttaaaccgaggaataatgtgaataaaatcgagaattcgattgaaccggggtatcccggttagcctgttaatgggcctaagtcatgagctcgcccgaagacttaagtcgacaatcaagatcgccataaccaacttcttaggtcgtgtaaagggaaaacttccatttaagagaagaggatctcatgaagaatagaagtaatgaagatttaaacctagga

SEQ ID NO: 171366 - DNA, 1169 bp, Arabidopsis thaliana landsberg
aatctgtgtttattggccgattttcccaagaaaatgtcactctcttctctttcactgattttctctttgatttgttgtgaaagggagacgaatcttattttgatgtttgttgtaaactgattatgcctttgatttctgatattttcactgagatttacgtttgattagagctatttagtttaaagaatcctgttgttgatgtttaaagatgttagtgacagtttgtttgatagtatcttttacttcaactttgcagctaaccttgccattgagaaaaaaaataacagtttgttgaatggaaaaatgattcgagtaatgtggtctgttcgagcacctgatgctaggagaaatggggttggaaatgtctttgttaaggtagtactcttaacccaaagagatggatgatattctcaatgtctgttgttaatgttattgtttttatttggctagaatttgcctgagtcagtcaccaatgcggttctgcaagatatgttcaagaaatttgggaacattgtttcctgtaaggttgcaactcttgaagatggaaagagtcggggatatggttttgttcaatttgagcaagaagacgctgcacatgctgctattcagaccttgaatagtaccattgttgctgacaaggagatgtaaggctttcctacttacttgttccacgatttgtgtctttggatgagatatctgcgttctaccattatgttctaccaatggtttccaaatctgaatctctggaatttttttatgcagctatgttggaaaattcatgaaaaagactgatcgagtgaaacctgaggaaaagtacacgaacttgtacatgaagaatctcgatgcagatgtcagtgaggatcttttaagggaaaagtttgcagagtttgggaaaattgttagcctagcaattgcaaaagatgagaaccgattatgtagaggatatgcatttgtcaactttgacaacccagaggatgcaagacgggcagctgaaacagtgaatggaacaaaatttggtctgacggatctgtttctttcctcggacaataatattcacttaagtcttccccaagttatttaaccctttgtttctgcttgctaggttcgaagtgtctatatgtaggaaaggaacaaaagaaagcagaacgggagcaactgctaagggaaca

SEQ ID NO: 171367 - DNA, 568 bp, Arabidopsis thaliana landsberg
  unsure (1)..(568): unsure at all n locations
gcgccaaagccaagccggcgccatggccccggcccgcgcctataaagcacccagngacttcgaccgtacccctccgcacgcgctcgacctcactggagcccaaaaccaccggcgtttgcccgtgcacggtgtgcccgcggccgcccgatttccccgccaccgtagaccagccaacagaacccttcccaaccccgtccaaccctcggagaagactgtgcacacctcggtgaagctccccgagcgaggaatcggagtttcttcgccggagaagccagtccacggtcgccggacttcgcccgaccgccggtgagcgtagaccgggtaatcctctgctccattcttcgattccttgtgcacatagcctctacgtcacctcgtgaagctcactgtgccattggattgaactagatcgtcgtggtttggccggaacacccgccgccgacgagagcacccgcctgcgcacgtggaccgaacgattccggccacccccatcgtcaagccgtacaccgttgtgaccgccaggacctcccggagccaaccccgcccctcgccagacccctctcgcaac

SEQ ID NO: 171368 - DNA, 1313 bp, Arabidopsis thaliana landsberg; identical to SEQ ID NO: 58663

SEQ ID NO: 171369 - DNA, 1702 bp, Arabidopsis thaliana landsberg
attcaaagatcaaaatcacgtacgatcattatggcaacaacacaatcaacaactacagtagcacctcttcaatccatcgctgtagacaagcttacaatcggatcatctatgcagcatataactgtccgcctcttaagaatgtgggaagctcgcaatttcaaaagaaacggagagctaatgagtttagatcttcttctcctagattcaaaggtatattatgcttaatttgacatcatacgataagttatttataagccaaatattcacaaatcattcaccaccccaaaacatccaggattctggaatacaagcttcaatatctaagtaaaactcatttattaacatgtaatttattttttcctttcatgtttgacctctcttgctattgcaagaaatttttaattataataaaatctaactcttatattacctatcattgcatatagtaggttcaaaatattgttaaaattgttaaccatccatcaataaaataatatatatggggtaagaaatcaaaatatgaacaaattaagtagcaaatattagaaaaataatagttattttaaaatacaattttacaaaataacaaagaggagagcaaaacgaatgttaaaaacaaaatcaaatttattaaaatatgcacgagtaagctaaatgatgtttttctataatcctttacaacttactaatactaaacaaaaagtatatataatacacctacaaattaggctcaaataaaaagaagtggctaaactatggattaaatgcggtacagttcaaatactaacaaaaatatatacatacacatatatatatatatatatatatgtaatttcgttagttactattcaaagcaccggactatgcggtttcatcaacacactcaaagcttttacctatgagtaaaaattaacaaacaatatgcagtgcttaataaaaaatatatagttttcatccttcgtaatacaatctttcttataaaataacatttgtagaaaagaatgataaactaaatatattataaaaaaaaaacaaaaaaaaacaacaacaaaatcctgcgcgtagcgcggacactcacctaatattaatgaaacaaaccctcaagtatatgtaaatccattttaaaaccctcaattatataattaatgaaaaaattccttaactaaaagatttaagtgacaaaaacccttaagtattaattaatttttttttacttttgtgcaacatcttcaatatctaaattaataataaatgaagataaacttggagaatcctgtataacgaaatcagaaaaagaattttccgacttttaaagatatatacctgaaactgcatagatttgaaatttttctaacggggatgacactatctttaaaccttcaaagtttttaataatattccaatacatgatcaaatttccaaccatatttgaaatttagatcttgcatatatattagcatttctttcccttgattgaactggatacagttttaagaaaaatataaataaataatgatgcttgcatgtagtttatatagaatactcactacatcatcacttgaagcaccacttgaatgtttattgtcacattatttgatctatgcatgttgttttcttgtggctttctttttatttggtagggaattgatctatacagaagttttcgtttgttttaagacttaaaactatggttaaccaatta

SEQ ID NO: 171370 - DNA, 1082 bp, Arabidopsis thaliana landsberg
cgctgcgagagaagccctcttgatctacgtagccgcaaccactcaggtggtcagcaccgcgatcgtagtcgagagacgagaagaagggcatgcactgctcgtccagaggccggtctacttcatcagcgaggtgctatccgagaccaagatccgctacccacaaatccagaagctactgtacgcagtaattctgacacggcgaaaattgcgacactacttcgagtctcatccggtgactgtggtgtcatccttccccctaggggagatcatccagtgccgagacgctcaggtaggatagcaaagtgggcagtggaactcatgggtgagacaatttcgttcgctccttggaaggccataaaatcccaagtcttggcgaacttcgtggctgaatgggccgacacccaattgccgacagctccgatccaagccgaactttggaccatgtacttcgatgggtcgctgatgaaaacgggagcaggtgctggcctgctcttcatctcacccctcgggaaacatctccgctacgtgttgtgcctccatttcctggcgtcaaacaatgtggccgagtacgaagctctggttaacgggttgcgcatcgccattgagctaggggttcggtgcctcgacgctcgtggtgactcgcaacttgtcattgaccaagtcatgaagaactcacactgccgcgaccggaagatggaggcctactacgacgaagtgcgatgcctggaagacaagttctacgggcttgaactcaaccatatcgcccgacgatacaacgagactgcggacgagctggctaagatagcctcggggtggacaacggttccctcggacgtcttctcccgagacctacatcaaccctcagtcaagaccgacgacacgcccgagcccgagaaggtcttggccctgcccgaggcgccctcggctcagcccgaggcgccctcggttcagcccgaggcaccctcggcccccgagggtgaggcactgcgcgtcaaggaaaagcggaatggggtcccgcctaatcgagactggtagaccctgtacctgcaatatctccaccaaggagagctgcccctcgaccg

SEQ ID NO: 171371 - DNA, 829 bp, Arabidopsis thaliana landsberg
agtgttgttgaaattaaagaggtgaccaacagggaggaaactaacaatggtaagtctcacattgatggagattggagtgaactcaaggctccaaaggtggaactaaaacctcttcccaaggggctaaggtacgcatttcttggaacaaactctacttatccgattataattaatgaggagcttagtgacttagaggtctccaccttaatagaagaattgaaaaagtatagaaaagctattggttattctcttagtgatattaaaggaatatcgaaaactctttgtgtgcataggatccatcttgagaatgagtcaatgacttccgttgaacatcaaaagcggttaaattctaaccttagagatgtagtacagaaagagatcctcaaactcttggatgcgggaataatttacccgatctcggatagcacatgggtttctccggttcatgtggtcccaaagaagggtggagtcacggttgtaaagaatgataatgacgagttgatcccaactaaaacaataacgggacataggatgtgtataattgaatgccacttctaggaaatatcatttccctttaccgtttattgatcgaatgcttgagaggttagctaatcacacccactattgttttctagatggatattgggattctttcaaatcccgattcatccaaatgaccatgagaaaacaactttcacatgcccttttggtacatttgcatatataagaatgccatttggtttgtgtaatgctcccgctacattttaaagatgcatgatgtctatattcttggatctaactgaaaatgtggttgaagtttttatggatg

SEQ ID NO: 171372 - DNA, 2009 bp, Arabidopsis thaliana landsberg
tttgattactgaataatctgaccaaatcaaactattttcaaattactgatcggttatttatttcccactatcattaggtataagcattgactgtggaacaacgggttcctacgtggactccaacaacgtaacatgggtcggagataaaggcttcgtcaccaccggcgagtccattaatatcacggacgtcgtcaaaaaaccgatcaataccctccggtactttccaacaggtcaaacaaattgctacaccaacattccggcgacaaaaggccggaccaccctcgtgaggacgaaattttactacaaaaactatgacgagaattactcgccaccatctttcgacgtggtttacgatgggaaacaccgtgattctattgctatgacagttgactcgttgttcagcgacgaggaaacattccattactctgaggtgatatttgctccggcgaatgagaatatcagcgtttgcctcgtccgtacgtctccgtccgataacccttttatatcttccattgaagtttaccgcttcgatgccggcatgtatgacgatcttggtcctgaagaaggtttcattctctataaaagaaatgcgtacggtgccacaaagcttataaggtacacacaaaactggtcctcgaatgtttggggatatattattcatatatgcatcaattagtcgtagtatctttaaagtctcatgacactctcatgtcgatttattaactaaagtgaaacccataatttttctaattgtgggttcttgaaaatttattttagctacccgatagatcctttgggtaggtggtggacctgaaaaggggacccaagaccatcccggactgatcgatcttacaacctcagccccatccatagatatcaccggagcgttgaacaaaccgccagagattgttatgacgaaggcaatgtcaggagacggctttataatgtccggcctgaatctcccctctacccttctaccggtatacttagctctttacttttcagagcctcagagtctaggtcggacccaaaaacgatcgttcaccgttttcttggacggcatgcaagtgggttcacatcccatagtaccagtttttgggaaagcgactcaagtcgttttaagagatataatggccagttcggagtcccagttagtttttaagtcaaccgatgactcgggtttgccaaccatcatcagtggtttggaggtctattcgataagtaactacaaggaccatggaagcggaggcgggggccaaagcggcaatagtaataaaggtaagtttttattgaacctatgtaaatgctttattaataactttttttcctggtcaattaaacaaattacatcacacacaaaaattcacaagattttcccaagttttagtaaacaaccaaaaggtaataagttaaatttaaagaagtactattttgaagatagtgaatgtgttttcattttctgacgttaaaaggtgtattgagtttcaaaaacaaaacaaattaaattaattataactcatatatagaaaatttaacagtatataggtaacattatatcatttgattggatattattatatatcagaaaatataattactaaatatagattttttttttatcaacgtgtatagataaggatacaattttcatttttagacaaataattaacttaattatacatgcaaaggaggaaagaaaaagaacaacgtaccactcattctaggcgttacgttcgccttcgtgttcgtaattctctggtcagcgtttgtggttagtattttgagaaagcgtcaaaatgcgatgcaacagtccaacaaatcaccaactatgtccacaggtatttatatggttgcgtaatcgttatatttttcctagattaaatattggaatataattgacaagtcatattggtttttggtctctcctatgtcctcaagagcatggaatacgcacagggacgtcgcctctatttggacaagaaacggtcagcgacaagattgattcgtag

SEQ ID NO: 171373 - DNA, 725 bp, Arabidopsis thaliana landsberg
aagcaatattttacgttacatgacctccgaagaacataataaataaatattcctataattaatgtatgttgtgtcttgtctctcctttcctatttaggtttttgcacgttgggaaatattaaaatagttaaaaactactaattttggtgcagagagtggtggtacgaacaagaagtgtggagtttatgcctttctctttatcgttgtttcttacaattagcgccgtcacgtggctcttctacggtctcgctattaaagacttctacgttgccgtgagtttatttatacaattctcaaataattctcttattttattctgtttcgattatttcaaagtatattataaaggacagcccaacattatatgattagattaattattatgggtggttctttaataaagtaaaaacagtagttacctttgtcttttttttcctcattcaaactatatgattttgaaccgtacacatttttcgctttattattagcattatataaataattggacccccactaaatgtgctaaggaattgagagtacaatagcaaatactagaaacaaaaaaactaatttgttatgttgtgatgtcggtaatttcccttttataatttttctttgccaacttcttttgtcgacaataaatggaatattaatgtcctttacacgttttttgaactattgcagcttccaaatgtattaggcgcgttcttaggagctgttcaaat

SEQ ID NO: 171374 - DNA, 962 bp, Arabidopsis thaliana landsberg
cacatttaatgggcaaaataaaaagaaattccccaaaagggggttcagagtttagggtatttacctcaggaaggtcatattctcctttacatggtacataaagctactccattgtaacttagtactcacaaagagtactttctgtgtgaagcttctcttctcagatatggatgctgcctcttctgttgacttgatgaatttttcttccttggaagagaaagatggtcttccaatagaagttttttccaaagttcatgagttcttcaatcaagttgattgggttgatcagacagatgccacacgcaatatgtttcagcagttagccattgcaaatgctgtccaagaaggactagatggtaattcaagcccaagactacaagggttaagccctaaaagtatccatgatattatgaagcatgcagcaattgaaaatagtgcaaagttcaaattgtcttcaatgtccgaggttgaaacaatcgacacaccagaaaagcctcctactgattcagtcaagaagtttatagcagaagatgtacattctgtccttcagataaataatcaggaacaaaacgccagcgaggatgcaacaaagttgttacatcaagagtccccttctctcaagcttgtgcatcattctgcaacagttaaacctcttgtggacgattctaaatctccagaaaatgccgaggagaattttccgaagagtccttcagcacatgatgggaaagcaatctcgttttcgccacccacaccgtcaccacctcatcctgtaagaccgcagttggctcaagcgggagcacctcccccacctcctccacttccagctgctgcttctaaaccttcagagcaattgcagcattctgttgttcaagcaacagagcctctgtcacaaggaaattcctggatgtcattagcaggctctacgtttcaaacaggtccaaacgagaaaaatctcattacac

SEQ ID NO: 171375 - DNA, 2661 bp, Arabidopsis thaliana landsberg
  unsure (1)..(2661): unsure at all n locations
tcactagtgctttntgcaatagtgacctggaaaaagagatctttatgagtttaccagaagaatacgctccgccaaatggtgcttcattaccatttaatcatgtttgcaggctgcttaaatcaatatatggtctcacacaggcttctcgtcagtggtacaagtctttaacgaaggtttattgacgatggttttatccggtctcaagctgacaacactctctttgtcaatgtcactagtaagtctatcattgctatccttgtttatgttgatgatattctcattgtgagaaatgatgatgatgatgttaggtctgttaaggatactcttggagcacattttaaaacaaaagatctaggagaggcaaaattcttcttaggtcttgagattgctagcaattctgagggaatttcggttcgtcaaaggaattactgtctcaatatattagctaactctggtttgttgggtgtaaaccaaaatttgtgcctatggatcctaaggttcctttgactaaagatactggcacatttttggagaatgctagaccatatagagaaattattgagagattgttatacttgtgcatcactaggcctaatataacttttgtagtcaatcgcttaagtcaatttctattttgccctactgatgtacgtacaccttcaagctgctcattaaatcttgaagtacctcaagagcaatccaggtcaaggcttcttttactctgcttcaacagatttttgcttgaatggttttactggtgcagattggggcacttgcattgactcaagaagatgtacttggggaatatgtgtttttcttggaattccattaatcacatagaagtcacaagacattgtaagtaacagtaataatgaggcaaaatacaggagtatggctatgactaaaaaaaaactcctttggcttatttagatgttaagaaatcttcatatcaagactaatacttcagcctaactcttttgtgacaaaatattaaccacacacattgtaaataacctaatctttcacgagaagacgaagcatgttgagatagattgtcaatatgtaaaacctttaagaagccattcttcacaagggatcaagtgaagaatgactttcttaaaggtttcacatattgacacatgaaaccaacttggtggcatattgacaaagccccttcatccaggtcttttctactctctcattagtcgtttatcgatttcaagcaattttaatccatcagatgattcggcttgagggggtgtatgaacatatagagtatattagtattaagtctcctatactttagtattataaatactctcttctatcataactttaagattaatgagaaaaacactttaaattaaagtgttaatatgatttctaatcaatatgggggttatcaattttatgttgtatacaagtattaggcaagactgtataccattgttagcaaataagatcttatggggactctctctctcaaatgaaacgagtagaacgacctgtgtccccctagcaagtttcacatacgaccacatctccacagatttcgaatcacgtctccagtccacataaaaaaaagttaaagactacgttccacctaaaaagaaagttaaagaactcgatccgcatattttcgaatttagtggtttattattggtttactgtaccaaaaacaccattaaccgataaacaaagaaacaaaaccggatttacccaaaaaccaacccgaactaggacccattaaccccgaatatgactcgaacattcccaaattctaaaaacccccaattctagaaatccctaaatcgacaaaacccctagaaatccagattgttcttgagaccacgaaatcgaacgatggattcgattgagttggagagaaacgtgttagtcgttcatcaagaggccaccggttctattccgcaagaggaaagctcgatcccagacgatggacccgacaatgagcctgacgatgaagacccaagagatcgagatgcgtttgaaatcgagaaggcggtaatggagtttagagatgaaccttcagtttttcacgatgagtatccagacagtgagagtgatgaagacgacgaagctggtcgtgagagaaggcgagacaacatcagaggcggaggtgggaatttgtactatcaccaaaaattcttcagcgccattgcctttaaagaagctgttcttgatcatgctttgaagacaggatgcaatatcgctcaatacaggtatgataaggataagctgggatataaatgtgatggggatggctgtatttggcgtatttattgttcaatcacgaagaaatgtgctaggtggagggttaacgtgtacaaagatgtccacacatgtaatccaaatggagattgtgagatgttgaaggttccggtaattgctaggttgtttttagatagtattagaaaggaacctctgtacttcatgcctatgaagattgaggaaatcattaaaagacgatggaagatcaccgtatctaggcctcaatgtcaagctgcaaggagaaaggcattgagatggattgagagagaacatgatgagcagtttgctaggcttcaagactatgcggaagagatacgagagtccaataaagactcaactgttgaggttcagactgtgacaaatgaggcaggc

SEQ ID NO: 171376 - DNA, 519 bp, Arabidopsis thaliana landsberg
tcatacaatgtcatcgagacgaagtacttgagcctccagagtcggctagagtcataggattctcagacaaatgcgacgttgagatattctcagtggaagatcacttgctttgctttcaaggtcatcccgagtataacaaagagattctccttgagatcattgatcgtgtccacaagatcaaatttgttgaggttcgttttaaacgtctatctttggttttattaatcctattatgtatagattggtcggtcttctaatgtcccaacccttgggagattattccgctacgtacccaatttaaattccgttgttcaggatatatatatatatatatatatatatatatatatatatatatgtagccagggtgaggaatctctaaaacgattttttaaactaaaaaatatgtaggaggaaattttggagaaagcaaaggattcgatcaagaagtttgaaccagacacgcagcgtttgcacatgctttgcaagaattttctgaaaggacgaagaacccactaa

SEQ ID NO: 171377 - DNA, 1500 bp, Arabidopsis thaliana landsberg
  unsure (1)..(1500): unsure at all n locations
ctcaactctcagcaaacatcttctcaagcagcagctgtattacaagaacttaggtgaggatcctttctacatgtctttcattttcacagtatccaagtatcttatgcatcatttatctgtcttttcctttaatggagattgtattgacatttttgtttgcagaagagataatccgtcatgtaaactcttatacgtgacacctgagaaaatcgctggaagttcatcctttttggagacactaagatgtttagaccgcaaggtagcctgttcagtttttcttgttgttgttacataattcgataacaaccaaattctagctctaagaaaaatgtttaacattttcctttattaaccacagggactgctggcaggttttgtggttgatgaggctcactgcgtgaggtacaatactgttctacccttctttcacacattatcttgtggtctacactaatgttctctgattgttcatcaccaacaccttaatatcaaaatagatttctgcctgcacctgaagaatttttcctttgtgatttacatgaacgtgttgttttttctttccagccaatgggggcacgacttccggccagactacagggaactgggatgtcttaagcagaactttccccgtgttcctgtgatggctcttacagcaacggcaactgaatcagtctgtcaggtaataaccatcaccatgattagagatagatcctcttaaaattgggaacagatttaaatgctctgagctttttcattgctccgggtctcaattaatcatatgtagcggatctttatgatctgaacactggtatatagccattctgatcctcttttccacacacaggacgtactaaattttctgagaattcccagggctccggttctgaggatgagctttgacagaatcaacttgaagtatgaggtgatcgtcaaaacaaaggagccgctgaaacagctccaagagctgctaagagatcggttcaaggatcagtctgggattgtttactgtctctccaaaagtgaatgtgtggatgnnnnnnnnnnnnnnnnnnnnnnnnnnnnnnnnnagacagtttattaccatgccggggtgcctgcaaaacaaagagttgatgtccagaggaaatggcaaacaggggaagtccgaatagtttgtgcaactatcgcatttgggatgggaatagacaaagcagacgtggtaagtcaagcctatgcatagctgtttgttgcaaattttctgccacgatcctctttcttaaatcgtattagctgcagcgttttgttatccacaacaccttgtcgaaagctgtggaaagttactaccaagagtcagggagagcaggaagggacgggcttcaagcgcagtgcatttgcttgtaccagaagaaagatttcagcagagtcgtttgcatgttacgaaacggacaaggcagaaacatggatagatttaagtcagccatggctcaggcaaagaagatgcagcaatactgtgagctcaag

SEQ ID NO: 171378 - DNA, 1182 bp, Arabidopsis thaliana landsberg
agaccttttggtgatggaaccgataaacaagttaactgcgaaaaagaatcggatagtaagatgtgaacccaagctagtagtcaggctgaacaagagttcgatagtcctaagtcacatggtcaagtttctggtggtccagctcttagacgaagcctttcatggtcctctgcaggtttcctttttgacaagtttggagaaacttccaagaatgaactaacaactagtgctactaaaagcaaggataggcggcgcaatcattcatctcggtatgcttttggcctttcttcattcttatgagattgttttgatgattttctgtaatgttttcgctatcttggttctatatttgattaaaccactgacaaacaatgtaatgaatactgtgtaccagatgctttactccagaaagacaagttagagaaaggcagtgtaaagcagacaagtttcagcatgattcgtctgggagttcatcatcttgttctagcaatgtctcgagtaaagtcttggatcgttacattgatggagaagagcatttagaacggagtaagcaaaagagtaattcttcacacagtggtgtttctgagagtataaatcgaaggaggcttccaccccgagttcaatggacagtccctacatcaccatcagacactttcgatgagaaacgaaagtcccagtcatttagagaagctaaaggcacccatttacgttactcttctgctgattgtgtggataatgggttgcggcatggatcgcctcgttcggttgctagaaatgtcattgaaagactctctcagactcatggcaagtcaaagggttcaaaccacgaaccgatcacaattcaagatgtctatggtggatcccttaacagaacttttgactcgagctcagatatcgccgctaatgtttcactagctgaacattatgaacctgttaacgagtattatacgcaggactatggagggcaccagcaaaattgtatacggagtatgaacgtgtacaagtgtatggaagacgatcttgactccgagctagaaatgaaaattaaagaagctgagaagagaagctaattgttttctgcagaattggagcacaaagatgcctttcagactgtgacttcgatgtttcatcttttgttggggcaattagaaaactggaagatgagaggcttcacctggcatttga

SEQ ID NO: 171379 - DNA, 2319 bp, Arabidopsis thaliana landsberg; identical to SEQ ID NO: 4575

SEQ ID NO: 171380 - DNA, 1130 bp, Arabidopsis thaliana landsberg
atgggcttcgcagaacataagcccaagacacaaatatggaggcaacggtcatcagcttcaaatgttcaagagtctggaagcttcccaagtaatgacataaacggagctggcagtacggtaaagacatttaccctcaagctggagaatcagtttctagcccttgattgtgagaactcaacttgatgatgacacatgtcttgtctccttagggtttagctaagtctcagtctttgtatttaagcaagaacaatctcctcttgtaaagttaagcaaactatcaatgaaaacttaaaaggattgattttgtcttcagctacaagttcgagattgaattgggttactgggatacagtgttagaaatcaaacagaagatcgagaagtatcaacgtatccttgtttacagacaaaccctaatcttccattttgttgttcttcaagatcatcttgatatcaaacaatgtgtgatcctcaaccactctcatatccagatcttcgttgaacctaaccctaaccctaatcccaacaacgatcaagtgcttcaaaccgatatatcttcacctttaaactcatccatagatatcgataactttctagattcccctgtttcgacgagcgtcaagtttgggatcaacaacgacgatcacgtgctttaaccggagaaatctacaccgtttaactcattcaaagagatcgtttactttcaagaataccctatttcaacgagcatggagcttgtaagcaacaacagtgatcaagtgcctcaaccggagaaatctacaccgttaaactcatccaaagagatcgattactttcaagaataccctgtttcaacgagcatggagcttgtaagcaacaacattgatcaagtgcctcaaccggagaagtctccaccgttaaactcatccaaagagatcgattactttcaagaataccctgtttcaacgagtatggagcttgtaagcaacaacaatgatcaagtgcctcaaccggagaaatctccactgttaaactcattcaaagatatcgccaacactcaaggtccgtctgtgaagcgtataaaattgggaggcatcaacaacagtcaccaagattcgactatgagggttaatgacttaagtaccctaatctaa

SEQ ID NO: 171381 - DNA, 1021 bp, Arabidopsis thaliana landsberg
agttcctgcttctcctcgagcatttgtgtatccgagatctgtcgaatcacctcgttttggttctccgagatctgtcgaatcgccttgtttcgggtctccgattggtgttatcgatacagcttcacctttcgaatcggttagagaagcagtttctaagtttggtgggatcacagattggaaagctcataagattcagactatagaggttgtagttaagcttttgtttcttcacatgatttgtgtttatttgagatcttggttttgacgaaaatgtgtgtttcagagacggaagatggtagatgaagagcttgagaagatacaagaagcaatgcctgagtacaagagagaagctgagttagctgaagaagcgaaatacgatgcgttggaggagttagagaacacaaagggactcatcgaggagctgaaactagaattggagaaagcggaaaaggaagagcaacaagcgaaacaggattcagagctggcgcagatgcgtgttgaggagatggagaaaggtgtagctaatgaggcaagtgttgctgttaaaacacagctcgaggtagctaaagcgaggcaagtctcggctacttctgagttacggtctgttagagaagagattgaaatggttagtaatgaatataaagatatgttgagggaaaaagaattagctgcagagagagctgatattgctgttttggaagctaaagagattgagagaacgatggatggtttgagtatagagctgattgccaccaaggagttgttggaatctgtgcacacggctcatctcgaagcggaagagaagagattcagtgtagcaatggctagggaccaagatgtttatgattggggaaagctagtgcacatggtctgaagtcacgttcatgggcttagcctacaggctcgggcggcccattctgtgaaagctaagctatagcctggctcagctctccagcaggatttggggtccgcagtacggcaaatcacgggtatggcaacgggtcacctgttgttgtaaagg

SEQ ID NO: 171382 - DNA, 550 bp, Arabidopsis thaliana landsberg
tgtcggtaaccaagctctcaaactcaacaagagaagatgtaactatgagaacctgtgtcaaatgcggtgaacccttttgtatcaactgcaaacttccgtggcatagcaacttgtcgtgcaacgattacaagagcttgggtccaaatcctacagcagatgatataaagctgaaagctctagcaaatcagaaaatgtggcgtcaatgtgaaaattgccaaaacgtaatcgaactatcggaaggatgcatacatatcacttgcaggtataacctctaattacattccctataaaccaatctagaaaccataacatagagagtatacatatcaattttacagttccatttattctttttgtgtgaacttgattataactctatgttgcattacatggttgcttggtagatgcgggtacgagttttgctacatatgtggagccaaatggatcactggaagagtttgcactcattcaacaactaatcggtcattcctgctgacggactgaacaagagcagcacgaaatcatcaactctgaaattgtaaaagaatat

SEQ ID NO: 171383 - DNA, 590 bp, Arabidopsis thaliana landsberg
gatgtttttcatcgagcccaaaacactcgccgcagtccacctagcgtatggatgtggggacgttgcattagcgccaatgggcccgcattggaaaagaatgaggaggatatgcatggaacacctacttacaaccaaaaggcttgaatcttttacaacccaacgggctgagaaagctcggtatctaatacgagatgtcttcaaacggtccgaaaccggaaagccgataaatcttaaggaagtattgggtgctttctctatgaacaatgtgactaggatgctactagggaaacaattctttgggcctggatctctagttagcccaaaagaagcccaagaatttttgcacataactcacaaattgttttggctgttgggtgtaatttacctaggagattacttgccattttggagatgggtggatccgtccggatgcgagaaagaaatgagggacgtggagaagcgtgttgacgagtttcacactaagatcatcgacgagcacagaagggcaaaactggaagatgaaaataaaaacggagacatggattttgttgacgttttgttgtctctacctggtgagaacaggaaggcac

SEQ ID NO: 171384 - DNA, 746 bp, Arabidopsis thaliana landsberg
aggatgaccagataccaatttcttctctctgcagtagcaccactcaaaagcaagaagaggtttaaagaatccctcctgaaaccgaccatatcatgaatttcatatccaaatttgtttatcctggatttgattttgttgcttaggttgcttctcatgtcttaatgggcttaccaaagaacacagtaatattaccaactatgctttctcctcttggaaaggcctgtgcaaagatggaccttgcgacatttcacgacattttgcttaaaaccggttacagagatgaagaaggtgcagaaaatgagctttcatttcaagaatggacgcaacaagtgcaggagatgcttaacacaaaaaagttcggggacattgctttcagagacaaggatttcaagaactcaattgaatactactccaaggtgagaggaaatagcaacaaatccataattctcggtgttcgaaaagaatttctaacctctgtatctatggtttccagttggtggggatgatgccggttccttctgcaacagttttcgctagacgggctttctcctacttaatgacagaccaacaggagcttgcactgagagatgcaatgcaggcacaggtgtgcataccatatatggcctacagctttttacttgcaggctttagcgctctcaaagctcggaatggagactgatgctcaagatatgctcaacgatggcgctgcatatgatgctaagcgacagaatagctggcgctgctaa

SEQ ID NO: 171385 - DNA, 4543 bp, Arabidopsis thaliana landsberg; identical to SEQ ID NO: 5539

SEQ ID NO: 171386 - DNA, 1763 bp, Arabidopsis thaliana landsberg
atgcaccgggttggaagtgccggcagtaatggcggttctgttcgcactcgcaaagagaaaaagcttacttatgtgttaaatgatgccaacgatacaaaggttagtttttttacaccaatatggtttattgccatcaggagttgtgttactctttgtttgatttattttctagttccttcgtattatacattaagacatgacttgaaatagtttgaagttataagacatctccttctcaactcaatcctgatgatgttcttcttatgttatttgcaagctgcagcattgtgctggcataaattgcttggatgtgttgaagtcgtctgtttctaatgatcaaagctacctcttcactggaagtcgtgatggtacactcaagagatgggcatttgacgaggatgcgaccttctgctcagctacatttgagtctcatgttgactgggtatatagttttcttgacactgaaaaatttaattgtatagggatgatcagtgattaggatcctgtgtttcctgaggtggatgctgttctattgtgcatctaataatttcaaaccccatgttgactggtcaggtgaacgacgctgctctggctggtgagagcactcttgtttcttgttcttcagacactacggtcaaggtttgtgaatttgtttcgctagccgaaccaatattttactttgttttgtttttgtaattccatattggtttctaaatgcggcttaattattttgtatctagacatgggacggtttatcagatggagtctgtacgaggactctccgtcagcattctgactatgttacttgtttggcagttgcggcaaaaaatgtaatttctcatttgtcatgcttttttctttatagttctcactgaaaaaaattggtatggtggtgcaagttttgaggatatatgtgcttctcattgtcgcattctgattctatcttgatttcacaacttttagaataatgttgttgcatctggtggccttggtggggaggtttttatatgggatattgaagctgctttgtcaccagttaccaaacctaatgacgctaatgaagatagttcttcaaatggtgcaaatggtcctgttacaagtttaagaactgttggttcaagcaacaatatctctgtgcagtcatctccatctcatgggtacacaccaacaattgcgaaaggccataaggagtctgtatatgctttggcgatgaatgataccggaacgatgctcgtttctggtggaacagaaaaggtattcgtacattcccaagttgcagagagtatacctgagaacaacaacggataatttttttggggtttagatttcttaaaactaagttttttttatttattgcaggttttacgtgtctgggaccctagaaccggttcaaagagtatgaagctgagagggcatacagataatgttagagtgctgcttctggactcaactggcaggtaacttttttttttttttttttagttgtacatgccagcaatggtttattttgggtccttttggtacctattttttctctgacttacttgcgtttcctcgtgtttctcaccttgagactgcaggttttgcttgtctgggtcgtctgattctatgataaggtctgtatttttcttaactagtacataactatgatagctgaatcatttcagttctaactggttctaaattcatgtttagactatgggatctaggtcagcagcgatgtcttcatacctatgcggtgcatacagattctgtttgggcgc

SEQ ID NO: 171387 - DNA, 1574 bp, Arabidopsis thaliana landsberg; identical to SEQ ID NO: 31454
  unsure (1)..(1574): unsure at all n locations

SEQ ID NO: 171388 - DNA, 1073 bp, Arabidopsis thaliana landsberg
taaaaaaccaacaatgtacagtttctccacaacagcagcaaccgctagctcatgttgtgaagtggaaaggtatctcacagttagatcgcttaaggttcttctggtggagaatgatgactcaacacgccatattgttactgcccttttaaggaattgcagctatgaaggttttcttatattgaattgatcatccttgtttagcaatcacatttttgcttttgactaacagttgtaaatttggaaactttttgtcagttactgctgttccggatgtccttgaagcctggagaattctagaagatgagaaaagttgcattgatcttgtcttaacaaaggttgacatgcctgtgcattcaggaaccggtctgctgtccaagattatgagccataagacacttaagaacatccccgtcataagtatttactcaaatccttgattaaatttttgtttatccagcttcaatatgccatgctcaagtttgtgtaactcaagatgtgatgtttctttttgtagggatgtcatcacatgattctatggttctggtctttaagtgtttgtcgaatggtgctgttgattttctcgtgaaacccattagaaagaacgaactaaagaatctttggcaacatgtctggagaagatgtcacagcgtaagagttctgatttggttacctgttttacaaaagttactctgtgtttttttctaacttatgcgtttattgatttaccagtctagcggaagcggaagtgagagtggaatacatgacaagaagtcggtgaaacctgaaagcaccgaagggtcagaaaatgatgccagcatcagtgatgaacacaggaatgaaagtgggagtagtggtggtttgagtaaccaagatggtgggagtgataacgggagtggaactcaggtaatctgttctatggctatagataataacaatgtctgaataaatcggtttataaatttttgattggttttgcatttatacaaatatgtagagttcttggacaaaaagagccagtaatactaagagcacctcgccttcaaatcaatttcccgatgcacccaacaaggagg

SEQ ID NO: 171389 - DNA, 282 bp, Arabidopsis thaliana landsberg
cccctccaggctggtgtcatccagctggccaagtcgttggcggcggtttgggttaagaacgatatccgggtgaactgcattgcccccgggtacatggacacggcgctgaaccgggtgccggcgctagaggcacagaagaagatctggaagtcgttgacgccgcagaaccggcttggtggggttgatgagctgaatgggctgtgtgtgttcctggcgtcggatgcgtctaagtttatgaccggcgcgaactgcattattgatggtggttatacctgctactaa

SEQ ID NO: 171390 - DNA, 4010 bp, Arabidopsis thaliana landsberg
  unsure (1)..(4010): unsure at all n locations
aggccggttttgtccttgccggtcagcttctgttccgcggttttttgcttccaccgccacctccaccggttgtgcggccgtccgaggtggctccgccggagcccgcgtccgtgctgccgccgtcggtccccgtcgaggatccgtcgcccgagcccgagcccgagtcgtcgcccgtgctgagcgacccaccgtcgctcgagccgctgctgctgccgttgtccgagccgctcgaggcgacgtgcacgcccggcttctgcccgcacgctgcgagcacagcgagcatcgccatgcacacgagcagcggggcgaatcgtcgtcggttcgggatcactcgttgtctccttcggacaaggcctgacgggcctcgagggcggtgagagcgccggggcgacgacccaaggcggcgggagttgcgctgagcgctgccaagcttacacaccatattggtaaaactcatatcatatttgatcagaccaattaatgcctgtttaaagtttcaaataggactgagagagaattggctgactagtcttaaatctctgtactttttttcgacgaactagttacttatttttttcaaaaaatcgaagtgcttattanagtgtggcaggtgacaccagcttttgaaggacaaaatcttgaacataatatcggaaatggagaattcagagaagcaaagttgtaccatggagataccttctgttggatgggttattgggaacatcatatccctcgcaacagttagtgaaaccgattttatggatccacaagaatcaaatccagagatgttttatgtcttgtatgttcatgttattgtgactctcgccgagaatctattgtctcaggttgaaagtgttggaattcaggatattcatcttgatattgaggccacatcgaatgagacagagaaaggaaattcagttaagatttcttttgtggaaatgcttcgaccagtatgtcaacagtggcatctcgcaaaactgttggcagcttctgggaaagaaattcgtgttatagcagataaagatgcatcaacgagtagtaagaaaggatcagaaacactaggactgcttgatatagcacgattatattcatgcatgttgagaatcttctgcgtgatgaatcctgttctaggacctttgcctgtccttaacatgttatccttctgtcctggatacattgtctctttgtggaattctctagagagtgtcctactccctgaaaatggttgcactgctgacgatgcatctcatggatctgctaaaacttcatggaatacaagaagtccttctgagaagaaattgaaacatctcaagaatgacagtgtcaacaagtgggtgaatgtgctaaacaagttttctggtaaatcaccgggaccacgtgaacatgtggagtgtactagtgatcaaccaggatcaggccaggttaatgagtcaactaatgatgtatgggatgtggaaactctgaggggtggtcctgtaggtatctccaaagaagtgtcatgcctgcttcatctattttgtgcaacctatgcacatttactcgttgttcttgatgacatacagttttatgaaaagcaggtaaatatgctatatggtttcctgcagcttatatgtcattagtctgatatttactaaaggtttgttatgtcatataggtcccctttatgctagagaagcaacagagaattgcatcaatgcttaatacactcgtgtacaatggattgttgcgaggcacaggtcctgagagtagacaactgatggattctgctatcagatgtttgcatttattgtatgaaagagattgcaggcaccctttttgtccttctgccctgtggctctcacctggtagaactagtagacctccaattgcatttgctgccaggactcatagaaatttaacaaccagtgatgttcttacaactccaagcatgggttctgttataacaattactccgcatgtctttccatttgaggagaggtaatcttacgttgattacccttcatagcctttccatgtcttttatctttgtgctacaataacttctaactaactttatctgttgaatgatgttcatgttgtgctatccctgcagggtccatgtgtttagagagtttataagcaaggataaagcttcaaggaaaatggctggtgaagtggatgcacctggtgcgaggtcaatagagatagttgttcgtcgaggtcatgtggttgaagatggatttcaacaactgaattcaattggtagcaggctaaaatcatccatccatgtctcgtttgtgaatgaatctggccttcctgaggctggcctagactatggtgggctttcaaaagagtttttgactgacataacaaaagcagcataagctactgagtaagctcttctgtatgtatgcatactttatgctagtctttgttgttacgtgttccagtggattaagttttatttatttattggtatgtccattatttttcttttccaaaaggtatgggttattctcgcaaacccctacttcagataggttgcttgttcctagcccatctgcacggcaccttgagaatgggattcagatgattgagtttcttggaagaattgttggaaaagctctatatgagggaatactgctggattactctttttcacacgttttcatccagaagcttttggggcgttatagctttattgatgaactatcagggcttgatccagagctctacaggaacctcatgtatgtcaaggtaaaaaccgttgcaggtgatatatctgtcgcctcatatgtcaaaattcaatcttgtaataagtatcacaggaaagggtttctgagatcaagactttgtttatatgcagcattatgatggtgatttgaaggaactctgtctggatttcacagtcactgaagagttttgtggaaaaatgagcataattgaactcaaacccggtgggaaggatacttcagtcacgaatgagaacaaaatgcaatatattcatgcaatggctgactataaacttaaccggcaggtatcgtctttttaacgttttataaataatcttaaggtcaatcatcctgcaaaacaaaagttacttcataattaatgaggtaaacatgttgtcctatgtcttgtctccaatgcagattgtgcccttttcaaatgcattttacagaggattgactgaccttatatctcctgcttggttgaaaactatttaatgcccatgaatttaatcaggtgtgcggctctaatgtaatgatttctagattttttttcttttgtacaaagctattgtctcacaaagattcctttacagttactctcaggaggaaaccatgatattgatgttgatgacttaaggaggaatacaaaatacactggtggttacagtgatagcagtcgaacaatcaaaatcttctgggaggtaataactcttaatcagaagtcctgatctctaccttttctttctattctgtttgccaatttatgacatatgctgagagtttgagtgcggcttgtataatttctctctgggcatcctgtctcaggtcatgaaaggctttgaaccgagtgaacgttgcttgctcctcaaatttgtgactagttgttctcgggcaccactccttggtttcaaatacttgcagccaaccttcatcatccataaagtttgtttttgaacttaagcttagaaatgtatgtttgatattctgtttggtaattttgttttcttacttttgtgctttttcatcttctgcaggtctcttgtgatacctctctttgggctgctattggaggacaagatgtagaaagacttccatctgcttctacgtgctacaatactcttaaggtgaagtttcaatagtccaattatctttgtagtctacatgtgaatattcctatatcttttttgttcagtctttctttttggatttcttcagcttccaacgtataaacgagcaagcactatgagggaaaaactattgtatgcgattacttcaaatgcaggatttgaactctcg

SEQ ID NO: 171391 - DNA, 2124 bp, Arabidopsis thaliana landsberg
tccctaagctgactggttttatagagttgggtctcatgactggttgcacttgcttgaagcaaacgtttatatctcagcatatatcttcgattaaggcgagggccactcctcattttgtgagaaaacaaattgggcctacagacttcgtggcgctgcatctggaagtagagcataaggatcccttaatactgggaagaccctttttagcgtcagcgggagcagtgatagatgtcagggaagagaaaataagtctcaaccttggaaagcatatcaagttgcagtttggcatcaacaaaactccacaagggtcaaccgaagatggaagaacctctggaaatgatagagcgatctcaggagaaggatatgagactaaaagagtgaaagaacttagaaagaagtctaataagcagaatgaaactatagagaagctggcccacaccaatgaggaacttaggagtaagctgaatcagatgcagaaggaagctcaacctaaaggcgggattaacactatcccgagaaaagaattcacttcaagatggtctcaagatacagattatcctccagaagagaaggaagcctattttgaagaaagggggattgagtattctgctgcaaacctctccagggaggacgctgaatatgatgatggtatcagagaggattatgctgaccctctctacagttcattttcttcttgataagtgtgaggagtcaagctagagacttaaaacaagctcacttgggaggaagtcccatgactatccttgtaaataatttttactttcttgttatttttgatttgttttagttgtgtttttagttctcaggaatagaggaataacgtgaagctagagtaaaaattcaaaacttttactctacagatggcctagagatcgagtacattggtcgagtatgagtgatgtttaaaacccaaaaaaatttaaatcatcattttactcgaccaacagaagctacagagtcttacagggagtttatcaagtttacagaagattacgggatttcctggagtttttgtagtgaacagagaatacagagaagaaacaaggagacacacgtgggacccaccgctaacgcctatgttcctcatgcagctgacaaaaagacaagaatctatcctcttcttctctactccactcgacctccccttatcccttcactcgatcccgtcgccttctctcttcaaaaactcgacctccccatctctcttcctctcacactcgaccaactccaaaccactcgacctcacaaattgctgcgacactcgatttctcatcaccttctccttcgtccaagcctcatcactcggcctgaaggaatcaccgccgcagctcatctccaatccactagttactcgaccgctgctcccccgcagctccattgattcaccaccacaaccactcgagttctcatcaccattgtcatcctcacaaccttcactcgatctcttcaccaccttcttcataaccgagtcactcgattcagcaaccgaactcgaccgcttcacaccaccgccgcagctcacctcttcaccaaagccacctccgtcttctcttctcccgcgagctccacttcactcgacccctcatcaccatctccttcatcgcctcttcactcgatcgcgtctacacaccatctaccatcactccatctctccccactgaacgcttttcaccatcaagctcaaaaccactcgacctctacgctagagcaatcgctcgacccccttcaccatcaaacgataaaaccgtttcctccttcattcaagcaatcactcgaccgcgcgtctctctctctcgcagccaaagaatcatcaccacttctagttcactcgatcgttccacctccaggccaccaagaaaccactcgactactaattcgcaaaaccgtaaaaaaaattttttttagttctcggttcactcgaccggtttactctgttaggttgtgtttttggttttgctgttactaacgtattaacgtttctatttgagtttcgtctgttttcaggtctcatcatgagtaactacagtggagaatcttctatggaccttgattacaatgtggatgaagctgagtcttggtccgctagaccaagagagcaaaccc

SEQ ID NO: 171392 - DNA, 1921 bp, Arabidopsis thaliana landsberg
ttcagagctgagacccaacgctcagtagctcgacgcaatgaaaggagagctgagattgctagaggaaaaagagcaatgaccagcagatatgagttgatcgaccaagatattgacgtcgagtatgagcctgagtcacggcacagagaaacgaagctgttgaacaagcctgatgaagttatagtgaaggagtacatcagacttttcgagctgaacgacttctggggaacgaggtacccctgttatgagactttagtccagctggggctactggaggacgtacagcacttattcgagaggtgccatctggagacactgatgtcttacccgtacatcgcttacaagaaggaaacaatagagtttctctccactctgcaagtggagatgtatcagggacttactgcagatgagctggagagtgaagtgttggggttcttgactttttcagttaacgagcagcgttaccagctatctatcaagagcttggaaggattatttggttttcccagtggaaagggaactaaacccaacttcgagagggaagagttgaaggatttgtggttaaccattgggaacgatttggcactcaactctgcaaggtctaagagcaaccagattcgaagccctgtgatccgctactatcagcgctcggtagcgaatgttctgtaccccagggaatctacaggcaccgtgtctaacacagacatggagatgattgattctgcactcaagggcattctccggagaacaaaggggaagaaggtcctaaagggcgaccttaatgatacaccaccggttatgcttctgttgatccacctgtgcggataggaagtgggcgcacaccaacgggaagaagaaggtgcgaggaaccctttgtgtaggtggcgttgtgacaccgattctgattgcatgtggtgtacctctcacgtctccagggtttgatccgaggatgatggatttagatcacttgcgtcgttgtgagtttctggagtacgacatggttggcgatttctatcgctacaaattcgagcactccctgacccgaacagccaacattttgcttccctgcatcgaggccacaaccatacttcaggtcaaaaacattgacttcagacctgcgcgtgattacctctactttgagagcgctccaccgactgatgacaatgtccctacgacggaagctacagaggatgatattactgagatggatgaggatagggaggaggagtatgatacgagcatgtatcatttcagtgagcacgtacctccagcgcgggagagcaagagcttgagtgaagctcacagaaacaacagtaagttgcagaggtggtgcaagaaacaagataggctacttatcaagtgcttcaaagccatcacgtttctgacggacaagataagttgtttctcttctaccacagctattccgcagggagagcgtcctcaggacatgccttcgaggagatatgacgcgccagggccaagtcatcacaggcctgagccaagtcaccacaggcctgagcctagtgaccgagtagtcccaccagtccctgcaaggcattcatcattcgagcctcgggagctcgggagaaagaagaaggctgcactcgctcggtctagcagcaggagtacacgacttctccagtcccgtagcttacgcgacggcggtgctggccgcagcagaagaagagaggtcgagtatcatcagagcggtgctggccgcgacgaaggagcagaggtcgagtacccccagggggaagctgagacacaacagggagattcttcgatcgcctgggagcaatcacaggcagctattgacgaccaactttgttcattcttcgactgaggtaagcgcctcacttcaccattgtattatatcatctcttgtgatttgttctttattttgtttctttgattggatttgtcc

SEQ ID NO: 171393 - DNA, 692 bp, Arabidopsis thaliana landsberg; identical to SEQ ID NO: 46935

SEQ ID NO: 171394 - DNA, 419 bp, Arabidopsis thaliana landsberg
gtatgaatcctgttagcagatccagtagcatcttcaaagcaatgattgatccgggtaaataatcaagtaggtgataaatatccgtggagatagtttcattcctacaagtatagctgtaagtgcatcttcgagattactatggatggtagcaggagcctcacgcctgcctggtgtgatccatgctggtttagcgagggtgcgggtcttctcttgcctggagacaagaatcatcttctaggcctgagacgagcagattccgggaggggccccacaagtggagcgttttcaaggtagagtggctgttgaagagagtgtaatgagtgctacgtcagacgctgtgagagcgtcaatgtccagccctgtgtcaagaagctatactgcaaagcaagagagttcaggtcaaggcccggtaggtagga

SEQ ID NO: 171395 - DNA, 460 bp, Arabidopsis thaliana landsberg
  unsure (1)..(460): unsure at all n locations
ggtcatgtcgctgatcttcatggtgttcatggccatcccggtcatcgctcccagcatcggccagttggtgatcctgttcacgagctggcacttcatcttcgtgccgatggcgataggcgcaattctgatctcgacctgggtgacgctgcgtcttccctagtcgctgcatccgcaatatcggcgccccctgacatcgcaggcgatcatcggcggcttcacctccgtgctgtcgaaccgcgtcgccctctgctacgcgctcgccagcaccttcgccttcgcggcgatgttcggcttcatcaactccgcccagcagatctatgtcgggctcttcggcgtcggcgagctgtttccggtgatcgtcgcctgcgttgagggcatgctcgcggtctccngcgtcgccaatgaccgtaaggtcggacgcatcagcatgcggcgcctgtcgcagggcgcgcggatcgcg

SEQ ID NO: 171396 - DNA, 2882 bp, Arabidopsis thaliana landsberg
agactccggtggatactcgctagaagcatctcttcctttcaaaaagtcttttctattcctacgggatggatgaccatgaggaagaaatctacggtgacaatcaaaccagcatgtcttccgtccattgggtagataaatagactttgtactttccatggaaactggacaagacaacttaccatgagtagtccatcctgataacatgctatacgccggaaagtccctaatcgtccagagtagtactgcttttagattaaaattctgacttaatgaaacatcgtacgcattaaatcaagtagaccacaactcttttaactcctcaataagaggttggaggaacacatcaagactacctcgaggatgattttgatccataattgagaatggtaagaaataagtactctgtattcatgcacataccagggggtaaattatatggagtcaagatcacaggccataacgaatgattacgagacatcccaaatggattgaacccatcagtacacaacccgagataaacgttacggggttcttcggcaaaccggggatgtaactcttggaaatatctccactccgctgcatctgaaggatgattcatttctccctcctttgattggtgctcagcatgccatcgcattgccgtagctgtcttgtggctctgatacattctcttcaatcggtcttcaataggtagataccacatacgactatatggtactttggttcttcgacggtcgtccttaggcttccatctttgtgcgccacaaaatcgacattgatcttctttttcgtcttctttccaaaatagcatacaattgtttttgcaaacatcaatcgtatgatatggaagtcctaaattgcgcatcaacttctcggtctggtaatgtgaagtggtagcctggtttccttctggtaaaaaatctgtaaacatctcgcaaacggagtccaccaacttttcactcatattatactccgctttgttgtgcatgagtcgagatgctaatgataactgcgactgcccttcacgacaaccatcgtacaatggattatttgcaccttctaacaagtcgtagaacttatttgaatggttacggaccggctcttccacattctgataactaccatcatgatgatagttatcatcatgacccacgttatcatcataccccacgttaaaattaaatgcatcgttcaccatatccacatatggatcttctacaacattacccacttcttcatgattctcactaaaatacgtcctatccatgtaactagttccgatatccatattcatttcttctccatgcttataccaaacataaaaatcaggcataaatccttgactaaacaaatgactactaactcttctacccgagatgatgtgtttttcattcttgcatacactacaaggacaatgaaatttacctcgacaactctgtactataggctgactattagcgaatgtcatgaattcctcaactcctgcgacgtattcggctgacaaattccccgtcacttcatcgaatctcttgtacatccaatctcgatagaaaccgccactaccgccataattgtagtttcccgccattatagaataaactaaatttctattgttttctttttttttcttttgattgttgttttgatttgtttgcgaaagaagagtgtcgtgaatttgattatatagacgaatttttatgactaatttacgactacaacaaacaaattaggtgtaccaacttggcaatgcggaaaacgttttccaacaacttaatgcgactattctgcgactcagttgcgactattttacgattacagatatgtgtcgtatgttagtcgccgattgggcgactaacaaccgcagtcggaaaatgtagtcgtccatttgcgactatgtaacgacaaacgtttttcttctataatataatcgttaaatagtcgttactatacgagtatatgccgactaacatatttagtcgtaaaataacgactaattgactactaatgttcatgttgtcgtatctgcgtcgtaaaacggtcgtgacttagtcgccaaaaacgacgactacatctgttgtcgctttctgtagtcgttgtttgtctgttttcttgtagtggattgggaacaacattgactttgatcctcctcaatcgatcttagtcaatgtccttgcgcccctacaagcagagccgagcataggaagtgagtctcaagaagaaggagcagagtggaatgaagaagaagctgagcaggaagcctatactcggccgagtatggccaggacgagtttgagcaagctgagttcagtcaagctgaacagtttgatgaacaagaagattcgtgcgaagctgcagcggagcagtttttctttgaggattatgctgagtccgatccagagagagatcccggtcaagttcacaagaagttgggaatgctcaaaggtctgggcaagtttcagaggaagttgttcagtgggttgaagaagaaggtgaggaagatgaagagagcaatggatggaatggcggttcagattcaggagctgcaacgaagacagagatcaccaccacctcgacccgagtttaggagaagtaactcaacgagtgtggcaccgcgaagggacgctcgtttcgacccgccaagagcctcaaattatgagctcgggaggagctccaccttctcagatcgctgtttcaacagccgcccacccggtccagtgaaccagttggttttgaacgctgacccaagccgagaggagtactactcgggatacatgctcgaccggtcaaccgagtacaacgccaataaccccaacacctccacacgtgatcctgagtacacacaagaccgcctggacgagtttgtccagaacctcttcgtctaa

SEQ ID NO: 171397 - DNA, 550 bp, Arabidopsis thaliana landsberg
  unsure (1)..(550): unsure at all n locations
ccagcttatacatctcaanaattccagcagttttgccatcagatggacgtgacccacctgactggacttccatacaaccctcaaggacagggtattgttgagcgtgcacatcgcaccctcaaatcctatctaataaaacagaaaagggggagtagaggaggctctaccccgagtaccaagagtgtctgtgtctatggcactctttacactcatttttttaaatcttgatgctcatggccatactgcggctgaacatcattgttcagagccaggtaggcccaatgagatggttaaatggaaagatgttttatgtaacaagtggaaaggaccggatcctattttgataagatccaggggagctgtttgtgtttttccacagaatgaagacaacccattttggataccagaaagactcgcccgaaaaatccagactgaccaagggaatactgatgtccctcgtcttggtgatgtccagggcgacaataacaaagagagagcagcgttgggggataatgtcgacatttccactcccaatgccggtgatgtataa

SEQ ID NO: 171398 - DNA, 407 bp, Arabidopsis thaliana landsberg
  unsure (1)..(407): unsure at all n locations
agcaaatcangccggatttatgttattgcactgaatccgcgaattgtctgtttgatttgcttacattgcaagggtagtttttggaatgagtttgttatgtttgatacatagaaaaagaggcgtaagtaggttccttgggtgattttatttcctttggctaaaagtgtcgaatttttatatgctttacatgttttcttgctatattttgtccacttttgattccaagaggaagaatttttatatgctttacgtgtttatgtttgatagatttgcaaagaggaagttggatgaatcaagttttttgggaaatcggctccaaatttcatatgctcctgaatacgaaaatgtaaatgacacaaaggataagttagaatctacaaggaaagaagtgcttgcaagactgaacc

SEQ ID NO: 171399 - DNA, 1269 bp, Arabidopsis thaliana landsberg
ccaattttgatcagacatcgttttggtctaaacgcaagaacatgagcattttcaaacttgctcgctccaatgcggttaaaccaatcccaaactttgacagaagctctgtacgcaacgccggcgtcgaatcaagtgaaaacacagagtatcctccatataaacccaagaagcatcacattttagcaacaagatctaatgcggcacatatttcgaaaaaggattagtcgaagaagcacgctcactgttcgacgaaatgcctgagagagacgtagtagcttggaccgcaatgatcactggttacgcttcttccaactacaatgctcgtgcttgggagtgttttcaccagatggttaagcaaggaacaagcccgaatgagttcacgctctcgagtgttctcaagtcttgtagaaacatgaaggttttggcttatggtgctttggttcatggagttgtggttaaacttggcatggaaggttctctttatgttgacaatgcgatgatgaatatgtacgccacttgttctgtaacaatggaggctgcttgtttgatttttcgggatattaaggtgaaaaatgatgttacttggactactctaatcaccggttttacgcatttgggtgatggcattggcggtttaaagatgtacaagcaaatgttgctggtaatttagctatattcctcgtgtttttggtgacgtttttgtattgaagttcttacattttggatctgttttatgtgttcaggagaatgctgaagtgacgccttactgtataacaatagcggttagagcttccgcttcgattgattcagttacaaccggcaagcaaattcatgcgtctgtgattaaacgtgggtttcagtctaacctcccggtgatgaactctatattggacttgtattgtaggtgtggttatttatcagaagcgaaacactatttccatgagatggaagataaagatttaatcacatggaacactttaatatccgagcttgagcgatcagatagtagtgaagctctgcttatgtttcagcggtttgaatcgcaaggctttgtgccaaattgttacactttcacgagtttagttgctgcttgtgccaatatagcggcattgaactgtggtcagcaacttcatggaaggatttttagaagagggtttaacaagaacgttgagttagctaatgctttgatcgatatgtatgctaaatgcggaaatataccggactctcaaagagtatttggtgaaagtggtagataggaggaatttggtg

SEQ ID NO: 171400 - DNA, 850 bp, Arabidopsis thaliana landsberg
  unsure (1)..(850): unsure at all n locations
tcttgaatnctgtagtagcaatggacacacgctatatcatgatctcaatgcttacagagttttatttgacgaggtaattacttaaacgcaactcttgtccgggaaaccatgttttgttttatgctatattcccccactaatgcgtttatgaatctttataaggaatgtaatccaagactttcaacatttgggttaatgaagaatagtcgggatgggaaaagttatagcacaaatcttgcttttaccccacctgagtatctacgnnnnnnnnnnnnnnnnnnnnaccctcctcgtaggtcatattatttccaacaatttctacaacttgagacttaagtgtgtgttgatacagggagaatcacagcagagagtgtgatttacagttttggcactcttctgcttgatcttctcaccggaaagcatattcctcctagccatgtaagtgcccatggtagctactttaatcgtttcttgaattctctttattaattatctcagccttttgctgtgtgttttaggcccttgatttgattcgagacagaaatcttcagactctaaccgattcctgcttggagggacaattttcagacagtgatggtacggagttagtacgcctgacatcttgttgtcttcagtatgaagctcgtgagcgaccaaacataaaatctttggtcactgcactgatatctctccagaaagacacagaggttctgtctcatgttctaatgggtctgcctcaaagtggtacttttgcgtcacctccgtctccttttgctgaggcttgctcgggaaaagacctgacgtctatggttgagatcttggaaaaaattggttacaaagacgatgaaga

SEQ ID NO: 171401 - DNA, 250 bp, Arabidopsis thaliana landsberg
aatccaaaaccagagtttgattttgcatttgttgatgctgataaaccaaactatgccaacatgcacgagagactaatgaagctggtgaaggtaggtaggaggaatcatagcgtttgataacactttgtggtacgggtttgtggcggagaaagaggaaaacgtgccagagcacatgagggtgaacagaaaagtctttttggagttgaacaagcggctagctgctgatcatcgcatcgaggtctctctagtc

SEQ ID NO: 171402 - DNA, 929 bp, Arabidopsis thaliana landsberg
tgatccttcgcttacccaactcatggctccttgaaggcaaggtaaagcttaaaattttctatattgcaaatgtattcagagcctatctattgcaaagttgattccttttacttaaaacctttgaatcttgtagatcattgcatttattcactgcttcattggcgctagaggaatcgtgacattgcatgatttggaagtggcaatatgccaaaacgagtttgttggttgttttgatgatctgggattgggacctttgctgcagcatccacttgtcttgctctattttccatccgtctattgttctactgccccagttaagatcactagtgaggagataatatcattacttgatagctatctaaacacttacgatattgacgatgttaagctcgatgaattcctggattttgttgctgaggctaaagcagttacaagcaaggaaaagcttggtgtccgtattcagaacttgcggtatgatcagtttgatagtttttctgtgcgttgttaagatcttttgatttttttggatgttgaattgaagtttggttacaagtgaatgaatctggtttttaaggaatcactagattattgtattagttggttgtatatgttcgcattagctgattttatttgtttaatgcattttataggatgtatgtatctttcattcaagatgcgaagagacaagaaggcgaaatattgaagatcgtattgactgaactgcatcagaagtatcgcatcctctcatcaaagaaacaacggcaagataaggattattgtggcaagcatacaagatttaattcaccgagctcggaggaaaatgatagtgctgattatgaggttgaaaatgttaaaagatctgaccatttcagtagttgtccgtattcatctgctgaagaagaggttaagcagctgggagctccagtaca

SEQ ID NO: 171403 - DNA, 919 bp, Arabidopsis thaliana landsberg
actcatacttccgtggaggataatcaatcaatatatcatgatgctcaagttgataaatcaatggttcaagcaataactcgtccgatacaatacttgatcatctcttacctccggtatcttgtcggccctccttcgctgactcaccatgataatcaagtcccggttatcatcgaagagacttctgagaacggaaggatcaacgtgatccatggcgccactcaggcttatcttttcgacaaaatcaaccttgacttcgtggaagaacgtgagttcgatgatatataccaaggggccaagctcaagtggaggattttcgtggataaaaataatattggaaacatccctaagcaatgcttcgagctgagatttaacgaaaagcatatagatttgggcttcgactcttacatacctttcgtggagagcaaggcaaaggagatcaagagcaagaagagaatcctcgagatgcatacatactctcagagctctgacacttgggaaaccaagatccttgaccaccattcaagctttgaaacgattgttatgaacgaagacctcaagcgtagactcatcgacgatattgacctgttcatcagcaaggaagatttctacaaaagagttgggcgaaattggatgagatattacttgctgcatgggctaccgggggccgggaagactagtcttgttgctgctattgctaaatatctcaacttcgatgtctataacctaactgaaggggtgaaaactgacttcgacactcggagactaattcgcagagtcgaggatagctcgattctcctcgtagaagatatcgacacctccctcgaggttagtgaacttgtgctaataatctatacagtcaagtcaatgggccaaattacacacagttgatgattaattttattagtatatattttcaaac

SEQ ID NO: 171404 - DNA, 353 bp, Arabidopsis thaliana landsberg
atgaaatcccgtggtagggagatgttcaaagtcggaccaattgggtcacaacgtgcttatcttaagaatttggaatgggaagagaagggacgcaacatgatctctagtatatatgtcgctttcgacaaagataccataaattctattcagtttagctattgtcagaacggaggtcatgtcgtgtctaaaaagtatggtatgtctgatgcccaaaaacaaaagtatggttcgtacaacggtcgattccacgtaatggtaagttttgttataatacatcttcatgttttttcttccttctgatagttataatatctggtaatttttcttagtggaatctttacattttgtttatg

SEQ ID NO: 171405 - DNA, 996 bp, Arabidopsis thaliana landsberg
atgagacatgtgtacgttgggaatttcgactatgatactcgccattcggatcttgaaagattgttcagcaagttcgggagagtgaagcgagttgatatgaagtctggtaaaacgttttcttgcacttgtactccttatggcgatcaatctgctgtgttgtagtctctgtttgattctggaatttgagagcttctcaggcattattgattgatactttttctactgaagcatgaattagtgttaagagtgtggagagaattcaaaaggaaccatgactggggttgtgtttaagagagggattctcgtatgtaagtgtttgtttggtcgcaggagctttctctaaaggagcatgactgtgtttcctcttttcatgggattgccaatttcttcctgcaaatagattcctacattttctcatgcctaccgttatgatgttgtgcccacaatcttcgctgagcctacaatctattgccttgtttcttcacgcctttcatgtcagaatggtgaagcaaggcttagcaaccattcagaattgaacagaaatttggattttattaccttttcataggctacattctacaactgcacatctacatctttatttactactctacatcgaacgcctctacttcttatgtacaccagccttcacattgatgcaggtgttgtatatttatttagtttttgtctttctctaggtgaaaaggtgtcttctaatcgactaactcctgcattgcaatttctgtgggctgaaacagtttgtcaatgtatatgctcgctcttcttatcttgagtttttgttttcttgcaggttatgcttttgtgtattttgaggatgagcgcgatgctgaagatgcaatccgtaggactgacaataccacttttggatatgagcgacgcaagttatcagttgaatgggccaaggtatctttttcttctttttaaaaattaatcttatgctctgatattttcagagagctctaagtttcttttggc

SEQ ID NO: 171406 - DNA, 199 bp, Arabidopsis thaliana landsberg
ccgctctccttgaagaaagattgagtatgggactcaattttcttctttctgcagaggtacacaaatgatctgctacttagatttccgctggttcctgtattgattctcctttaaaactctggtttcgttttgttcgatccagctggatcataagaagaaggactacaagtttggtttcggattaacagttggttaaaag

SEQ ID NO: 171407 - DNA, 760 bp, Arabidopsis thaliana landsberg
  unsure (1)..(760): unsure at all n locations
tgaaccggctagatctagnaataggttgcacatgcggttctctatttttaaacaagcatcaatgtcgtgcttcctaaaatcggggaaagggctagtccaattgatgatttctatctcagggttgcaagtgatcgtacgttttgtaagacgtttccttgggggagacattcctttgagttcatgttaaaatcgatctcacacacattaaaacattttaatggtgtcgtgtcgaacactcagtcaccatgtcctgttcccgatttctgtatgccgcttgaggtaaatataatgttttatcattgttacattttcgtactaattgaagctaacaattaaatttgcatgtattttgtctagtttttagcatttgaggtcattccctcacttaggaaaagattcatagaagaaaaagagggtgtagatgccggctgtccaaggatgtgcagggtgaatttcaaaaggaccgagatgaaagggtttacccttgagcaaattaacaatgtactgggtacaacagatgtacaacgaggatgtgcaggcccgaatggaagccccaacagaagaggaactttctgcagctgttagaacgggacacccgcagttagttgatgtaatggagaagcttgatagcatcaatgacaagaagaatgaagcttttttggcgcttgcagatatggagaaaaaacatgcaacgttcgaagcttttatgaatgagatgaaagataaggtaaatataggtgataccggatatactgtacca

SEQ ID NO: 171408 - DNA, 682 bp, Arabidopsis thaliana landsberg; identical to SEQ ID NO: 58046

SEQ ID NO: 171409 - DNA, 943 bp, Arabidopsis thaliana landsberg
atgagcaatactttcgaagaatcactcaaatctatgtcattggattacctaaacctcttaatcaacggtcaagctttctccgatgtcactttcagcgtcgaaggccgtctagtccacgctcaccgttgcatcctcgctgctcgtagcctcttcttccgcaaattcttctgtgaatctgatccttcgcaacccggagctgaacccgctaaccaaaccggatcaggagccagagcagccgcagtaggaggagtcataccggttaactcagtcggttacgaagttttcttacttctacttcaattcttgtacagtggtcaagtctcaattgtaccacataagcacgagccaagatcgaattgtggagatagaggatgctggcacacgcattgcactgcagccgtcgatctctctttagatattttagccgccgctcgctactttggcgtcgagcagctcgcgttgcttactcaggtactaattatctttatttaggttaatgattcttgttctttgatcttgatcttggtaaactaatctacggatttgttttagtttggttcggttgagatgaattctgaaactctatatattgatcatgataaacatttttttgttgaagactattaacaataaacatatgtggatatatagataagagttgttattttcttgatttcatgtgtaactaagcttaaagattgcttgcattgcacgtactgcaactttctttccagatttagacggcaatggactgatgtgttttgcacaccgagaaatttccttaaaatggaatgatgcttttatttttttaatatacatactctttatttagtagaaaatatcttctaaaatagtaacttggagaaaaaaacagtgattttattagtagtccaaaaattgagaattgtcttaatcattcattctgcgattttgcatgatatta

SEQ ID NO: 171410 - DNA, 500 bp, Arabidopsis thaliana landsberg
ctgaaaacaaaggatctggtattacagccactggcgtcctcctccgcagttctttgtgacatgaatatggaagcaggcgtagctgtactggatattggcggcggcacttcagatttggccgtcttctatgaaggcgttcttaagcacacagccgtgattccattcggtggcgaaaatatcacacacgacattcgtctgggtctgggcgtcttaaagcaacaggcagaggcaatgaaaaagcagtttggctctgcacttacagatgaggccaaagccaatgcttttataaccattcccggcttacgcgggttgccacccagagaaatcagtgttaaaaacctggccaacatcatccaggcaagaatgaccgagattctggaatttgtaacctaccacttaaaacaagtgggtctggatacccgtaaattaaacggtggcattatctaaacagagaggtggtgcacagctcaaacatttgaaacaattaaccggatttgtca

SEQ ID NO: 171411 - DNA, 452 bp, Arabidopsis thaliana landsberg
atggccagagccaattttgagccttacggtcgtgacttccctggtggtcgcgccaccggacgcttttgtaacggccgtctctcctccgatttcacttccgaggcttatggccttaaaccgaccgtgccagcctacctagatccgtcctataatatatctgattttgctaccggagtttgttttgcctccgccggcaccggttatgataattccacagccgatgtgcttgtaagtccaccattcacctcaaacaacctaattacggctgtttcttgcgtaacaagaaacatcgagataattttcttgtttgacatttttagggcgtgattccgttatggaaagaggtcgagtacttcaaggaataccaaagcaacctttccgcctatctcggccatcggagagctgccaaaatcatcagagaatctctggggatcctctagagtcgacctgca

SEQ ID NO: 171412 - DNA, 3741 bp, Arabidopsis thaliana landsberg
gcagcacagagcctttcacaacatttccaccggagacgaaggatcgaatcacaccttgcatctttcaactgtcaacaaccaaataatcagttcctcaaaacgagatctataaaatcaagagctaaaagaacgagtctaatgaaactagatcgaaaagagaatgatcctaattcttaaaccgagtgtatttgatcaacaaatcctaaaatggaaagtttcctcaatcagattcagtaaaaagcatcagagatagtgaagaaggagagattcagacctgagattagagaagaagaagagatcgtagtggagcttgaggttgagcttgaaaaccctagagaatggggaagagacagctgaccagagagagttgagtggagagttttttgaagggttctctaatggataatcatcaaatatataaataaacgattttcgatagcgaaatactggcgacttttttcttttccttaaaatatcttacaaaatttaaaatagtgatgactgtgttgcttcattcaattattctatcatatcctgacaaatatcaacaggcccacttataaacttaaggcccactttaacagggccagatttggatacaaataatattcaatcgagacgacgtagaagatactcaacctcaacgagcttagtgagagggataagccattccccgtagatgcgagaggcaagcaatggatccactttatacttcttcttactctcatcgccatagccagagttgaattttacttcttgtccaaacgtttctgctttcttctgcactctcttcttaaccatttcttctactttctcaaacgtcaacagcttcatcaaagcctctctatcctacagtcgaaaatcaaacgattatggtgtgaatcatatcattttaaaaccacagtgaaacagaatccacaatgtgacactaagtttacctgagcgcgaatcgcaggctcgtaatcttgtggagcatctctgaatttgacctcagctacaaatttaccgtagtgaatccttctcgaaagagccttacacaagatcaaacatatcagatcagacatcattagccaaaagtagagctgattttgttatgtatactcaatcatctccttacttgtaaacaggcgagatcactagcagcagttgatggatagttgccatcatcgccaggtttgacaaacaaaggaagcaattctttaaagtaaatatcccagatttgtttgttaatgttaacagatagagccttagggtgcaaagcctaatcaagagaaaagaaaagtactgttagactaaagcattcagagttctaagaaaaatgctcaagactttactacatacataccgatggatatttgtgcgtaggaaaaaccgagtgaggaatgttctcaaggaagaaaggattctcttccgggtattcatatcttcctacctatataatatacacatacacataaggttttcaagtaaaccaatgaacaaacatataggctcaatatccagaaacttaagaatataaaccaatgagatgaatatattaatgaaataagactttcagacattataaaaatagaaaacaatagtcctccatttccaatctccacatataatgaggttttcataaggaaatctcgtatacatatgataaagtcggagccttttattggcagattcgcactcaaatcaaaacaagaagttatcacacaatgagattatacaggcaaagccaagttatcatcttttgcaatggaggagacacatagcaaacaaaaggcatgctaattcaagaatccaggcttattaaaacctcaatcaagttgacttgtagcttactttctgctaatttcatggaacaatctaaaacaatgctataccaaaaccgaatcaaacgaagcattgatatctctgtatctaattttagcaaaaggatcagtttttaaaatgggaagcaaaccttagcttggatgatttctgtctctctgacgaaaaactcagtgagagaagagaaacttccagaatctagacaacgagattcctcgaaagcaggagaattgagtggaaacttagctctctcgatcaagctgaagacgatggtgtcttcttgcctaatcaacgattctctgattaagtcaagactcagtacattggaacaaccagaacccgaatccgattcgaagactcttgccatgccgcttcaactgtatcccctgcttgatggtgtataagtaagcaaacaattcattcatagaaactatagagatgagcaattgtgaatgacgaaagtcaaaggacttattacctggaaaaatgaagctttcttcttcttcttcctcaatgctaaagtgttttggacctctttgcatagattgcttcctcaatcaaggaaaacagaaacaaaaaaaaacgaaagcgttgaaatcaaaacaagatccacatccgatgatttgggcccaactatattcaccgactggcccataaagaattattatatcttctcacaatagctggggtttatttgtattgttctgaattatttttctggcttacgctctaaggttgtgtgacaagtcaagcaattcctcgagaagcctctaggaaagtgaaagagatggtgaaagaaactcgtcttggaatcactgcaaagaaagatgaagattttgggaagtggtattccgaggcttgtagatttggtgaattggttgaatactacgagtctgtaaagggatgctacattctcaagccatcaggcatcagcgatgaatatttggaacgttatacgaacgttcttcaacgctgagattgagaagatgaaagtggatgaatactatttcccgatgtttgtaacacgtgattctcttgagaaggagaaagaccacactcaagggtttgctccagaggttgcttgggttacaagagctggtggataagaggacacagggacctccctttgaaggttaaccagtgggctaatgttacgttgttagatgggagtttagcgaccctaccccatttatcaggagccgtgagttcctttggcaagaaggacacactgattttgctaccaaagaagaggctgatgaggaggtgcttgatgtttgaacatctacagccgcgtgtatgactcatggagatgacaaaggtttagtattccctcctaaagtggcacctgttcaagttgttgtaatccatgttcccatcaaaggcgctgctgattatcaagaactttgtgatgcttgtgaagctgttgaatccaccttgcttggggctggaatccgtgctgaagcagatatacgcgacaactattcttgcggatggaagtatgcggatcaagaactaacgggtgttcctttgagaattgaaactggacctagagatttggccaatgatcaggtgaggatagtgacagcgtgacaatggagctaagatggatgtcaagagaggggatttgattgaacaagttaaggacttgctagagaaaatccagagtaacctctatgatgtggcaaagagaaaggttgaagaatgtactcaaaaggttgaaacttgggatgaatttgtggaagctttgagccaaaagaaactgattgtagctccatggtgtgataaggttgaagtggataatgatgtgaagaggcgtaccagatgtgatgaaacatgaggaggtagaagatgagctaagactctatgtactgctcttgagcagcctgaactcggagaagagactctatgctttgcatcatg

SEQ ID NO: 171413 - DNA, 362 bp, Arabidopsis thaliana landsberg; identical to SEQ ID NO: 62198

SEQ ID NO: 171414 - DNA, 4352 bp, Arabidopsis thaliana landsberg
atggagcaaatggagcaaacaaaggagctaaaagattgcaaagtggccaaagaagagaagctagtaggaatctaccaaactggtcgattgcgtggtcgattggtcaggaccagagctacggaggaatatgaatctaccaaagtggtcgatttcgtggtctactggtcaaggattaatgttgcggacaatattgaatctaccaagtgatctattgcttggtcgattttcttccttaaccggatcaaaacccggtttgttccgggttgatccggtttattttctcattactataaatactcttaacctagttttagagagagggagcttttgtttagggataaaaacttctcttgaaggttctttatcttaggtttttgtatgaatgttgagttcttaagtttctatatcaagtatttcttttaaatttctcatctattctctaatgattataactttacaaagatcaaaccaattcctttgtatgatcatgatcatgatcatgagtgagtagtctcctagagttctttggttagggtagattagcatggtttagatgttgggttatggagtttagggctagattacttaagattcttacttattggttgcttttaaggctagatcaaccttgatcatgatgatttagacattaggaatttcatgcccggaaggtgttctatgaaattcccaaaccaaaatctttaagtgattttcataccttacctttggaaattgttgattagggtgattagtggctagatagacttgttatttatgcttattgatcatttgattgcctatggaaattgccgatgattgattgattagtaaagggattaatatcatggaaatgtgttagtcttgcttagtattctatgctccataatccatctctttatcatttctaaataactgataagtttattatatatatactattatataatttactaacaaaaaaaatattaatacaaacttttatcaaaaccatatgataatacttacaacccgcataatgtgttacactataatatatttcactaaaaatttattcatatacattttttaaaatataaaattttgtgtgcgggtcagaatctagtaaatgtcttaaaaatgatatagtttgcaattttttgtatataataaaaattttaaaatatcaaataattctgcagtgttcgcagattaattcttagttatgtatatttttgattttgtaggattaatttacatttattggtgaaaaagagtaaaattgtaaaaataatgaatgggagaacttttttttgcagaaaaacaaaaattaattcattaaattgttgacttttctagtgttctaagtctactatagttgataaggtttagaatgacgacaaagatatagcagaaagtatggtataggtttatccacaagtctctctcattttctactaaagatttgattccatgtattcaccttattttccgaaacaaatctcaggaacggacgtttggatatccacatatgttttaggaatggtaaaaaaaagctgaagggtaacaattagttatccaataaatggccaataccattcgtttgtcctttcttttctttcgagtcagagaaagattggtccttgggtaaacagggaataatatctagtgactaatttttctgtctcaaattccttttatggcttagaaaaaattcagagtcaactaataaagccatttgttttttttttttaaagcgcgctctctctctctctctgtactccaaatccagaagatactgttcataaatcatacaaatcatgtactatcccctcaattcttgtttgatcttgctcctcatcttctctttaatctacaatcttccttgtgcttcaagtaaacaaggatttggatggtgtgagactactcagtttcagtgtgggagtatcaccgcgggtttccccttctggggtgggaatcgtcctgaaccttgtggtcattcgtccctggagcttcgctgcaacagcaaaaaaatcacctctctaaacatctcaaactatgagtacaatgttatccatataaataaaacatctaatactcttagacttgtcagagctgattttgtaggttctttttgctccgctacattcaataccacaaccttccctcccgaaatctctgagcttccaatctacaatagccttacgattttccatcactgcaaccctcgttttcattacgtttcgagttatacatgtcctgggggagttgtggtctcagcgtatcaaaaccctatctatcaaagatcctgccaagaaaatttcactgtgagcgttcctcggacatattctccaggagagaaacagttgaatttaactcttttggaaagtgttcttagagaaggagttgaggtgacggtgaatactgatgaaataacatgtgaagaatgttcttcctcacgtaagttttactaaagtattgttacattttcttcttcttatttattttgtttccttcttccacaacaccagtcagttttgcttcgtgcatggtcttatcctagttttttttccctatgactgacttgcctctgtccctaacaaagtctctgttctatactatgtgtatcgatgatttttgtgatcccatcttgtgttttatcagctattgaccattacgaccgctgcagtcaaccatttcgatgcggcgatcagaccagtctcttgtaccctttttgggtacgtggcagacaagactgcggccaccccgaattcaagctcaattgtagcgcaggattcgcagagcttaccatctcctcagttagattcagaatcctagaggttaactatgaatctcatatcataagactcgccagatcagattatatcgacaatctttgtccccaagacccactaaatgtgcaattcacggaaagcgtcgtccgccttgctggcatcgagatgctaaccattttttacggctgcaaaactttatcagttcttattgatcattctagtaactataacgtaagaaagcttgattgtgttggtgaccaaaagggtattacaaactactttgtgacgagaaacaactcgtctccttttcgtggcaataatgaaggcgataaattatcttccttgaggaaatcttgcaaatccgtcaatatacctgtgcctttatcggcgttcaacacactgcggccagataatctaaagaagactcttgaacagggtttcgagcttaaacttaatcaagactgttcaatgtgcctggaatctaagggtgcttgtggatacaatcagacttcaagaggatttgtctgctattgtaacggtgggacctatgaaaacaattgtagctctgaaaagagaagtcctggtaaaccattaattgtcttctctgggtttgtgctttatttttatacaagtttggttcaattctaacaaattttgcttgttcaatggttgtacagtaacttttgggaaagaaattcgcataggttagtttgctggtcacagaattcgaactattttcctttctaagattgaaaatgctttagtgtactaataaaacatttttctccattttgttttttgtagtttcgggttcagtagcaggagttgttttgttcctggtcttattaaccttgtttctccgttttctccggaagagaaaaatacggctgagacaacagaagctgaaggctcttattccactagaacactatacttatgcacaagtgaagagaattacaaagtcatttgcggaagtgattgaaaaagccgcatttgaagctgtttatagaggagcactttatgatggtcgtagtgttgcggtgaaagtcttaaaagagtcgcagggtaatggtgaagacttcatcaatgaagttgcaagcatgagccaaacttcacatgtcaacattgttaccctcctaggattctgctgtgaaggttacaagagagcaattatttacgaatttatggaaaccgggtctcttgataagttcatctcaagcaagaagtcatcaactatggactggagggaactatatgggatcgcgttaggcgttgctcgtggtctagagtacttacaccatggttgcagaacaaggattgtacatttcgacataaaaccacagaatgtactcttagatgacaatctttccccgaaagtttcagactttggccttgctaagctatgcgagaggaaagaaagtatcttgtcactaatggacacaagaggaacgatagggtacattgcacccgaagggttttcaagagtgtacggtagagtctcccacaagtcagatgtgtatagctatggaatgttggctcttgatattataggagctaggaacaaaacatcaaccgaggaca

SEQ ID NO: 171415 - DNA, 467 bp, Arabidopsis thaliana landsberg; identical to SEQ ID NO: 2628

SEQ ID NO: 171416 - DNA, 1737 bp, Arabidopsis thaliana landsberg
  unsure (1)..(1737): unsure at all n locations
gagttcccagatgtgttccaaaggacctaccgggtatgccaccagagcggaaagttgagtntgccatagagcttcttcctggaaccgcccctatctttaagagagcttacagaatatctggaccagagttggttgaacttaagaagcaaattgatgagctgtcagagaaaggttacatccggccaagcacctcgccttgggccactcctgtcttgttcgtggaaaagaaagatgacaccaagaggatgtgcatcgattaccgagctttgaatgaggtcacgatcaagaacaagtatcctttgcccagaatagaagatctgttcgaccagttgagaggagccagtgtgttctccaagattgacctgaggtcaggttatcatcagctcaggatccgaccttcggacattccgaagacggcattcatttccaagtatgggttgtatgagttcactgtgatgtcttttggtttgaccaatgcgccagccttcttcatgaacttgatgaacaatgtattcatagactatctcgataagtttgtggtggtattcatcgatgacattctgatttattctcaaagcgaagaagagcatgcaagtcatttgaggatggtattgcagagattgcgagagcaccagttgtatgcaaagttgagcaagtgtgaattctggatcagtgaagtcctgttcttgggtcacataatcaacaaaaaaggattggctgtggatccgaagaaagtggcagatattttgaactggaaagcgccaacagatgcccgaggaatcaagagcttcattggaatggccggatattatcggcgattcattgaagggttttcgaagattgcgaaaccaatgacagcgttgctaggcaacaaggtnnnnnnnnnnnnnnnnnnnnnnnnccaagaggcctttgaagcgctgaaagagaagttgactacagcgcctgtcctagtcttgcctgatgtgcacaagcccttctcggtgtattgtgatgcttgttacacaggtttgggatgtgtgttgatgcaagagggaagagttgtggcttactcgtcccgacagctgaaggttcatgagaagaattacccaatccatgatctagagttggcagcagtggttcacgcactgaagacatggaggcactatctgtatggacagaaatgtgatgtttacacagaccacaagagtctaaagtacatattcactcagtcagagttgaacatgaggcaacgaagatggttaaagttgatcaaagattatgagttggagattcattaccacccaggcaaagcgaacgtagttacagatgctttgagcacgaagagtcaagtcaatatgatggtcacttgtccgatgccttatgagttggccaaagagtttgacaggctgagtctcggatttctgaacaatatgcgaggagtaacatttgagttaaagcccaccttggagcgagaaatcaaagaagcacagaagaatgatgagaagatcaatgaagtccggcaactgattctagaaggcagaggtaaagactttcggggagatgcagaaggtgtgatatggttcaaagaccgcttgtgtgttcccaatgtccagtccattcaggaattgatcctcaaggaagctcatgagacagcttattcgatacaccctggaagtgagaagatgtatcaggatctaagaaattttggtggtacggaatgaagagggaaatcgcagggggatcctctagagtcga

SEQ ID NO: 171417 - DNA, 1154 bp, Arabidopsis thaliana landsberg
  unsure (1)..(1154): unsure at all n locations
atttatacacaggttttactcaacatcctactttctcgatttcgagcagaggtctttaccgagttcatcagttcagcaaagcagagatgttcgtcatatgccaacctgaagatagtgaatccttccaccaagaactcattcagatcgaagaagatttattcacttctctaggattacactttaagtaagaaactaacttttaaacccgatttcctcttaccagagatttttttttttcacttaaactttatctttgcagaacattggatatggccacagccgatttaggcgctccagcatatcgcaagtttgacattgaagcatggatgcccggtttaggacgatttggcgaggtaaaaaacaaactctattcatttgtgtcggaccaccagaatggaatcctagtttctactttgagcttgctgctttaacttctgaattagatatcaagcgcatcaaactgcacagattaccaaagtcgaagactgggaatccgttaccgcccatctgaaccgcctcagacgggtcctaagaaagggaaagcgaatcttccagccactaagtttgtccacactctaaacgcgactgcgtgtgccgtcccaaggatgatggtgtgtttgctggagaattaccagcaagaagatggatctgtggtgatccctgagcccctgaggcctttcatgggaggcattgaactcatcaaacccaagcacaagtagtttttaatggttagctctttgcaattcttgctgtgattcctcttgtacttgaggttttgttcattatacttttcacaggcgctgagttttttgtgttcttgtctcagaacataccatttatagtttatatcatcataaccgatgttctttgattcaataataacgaaagggaagtatacattaacaggtttctttttaatgcaaatacatgtggatcgtggtatttcttctaaaaataactgaggtcagattatgtcttactaaaaaaaagtgtttgataattgcaaactaaatattgaactacagaattgtagggctttaccccgaagggaacccttccagaaattctcgaaggcccaagacaagcttaggcctaggagggggtttggaaatagttttcaaccagcaatagacgcgcctcggnnnnnnnnnnnn

SEQ ID NO: 171418 - DNA, 909 bp, Arabidopsis thaliana landsberg
tgtcactgacggagaacttgttccgtggattcatcgccggtggtcacggcgaagaggaaaacatctcagttatcaaggagttggatttccatagacgcgacggggcaaaaaactgtgcttgacgttgacaaacacgtgattatgcaccgtgttcagatccacgctcgtgatctccggatccttgacccgaatcttttttacccttctgctattttgggtcgagaaagagccattgttcttaacttagaggttgggactttttgtcactcctctgcttttggatttttcacagctttttcaattgattcgtgtttgttttggtcggatgcagcatatcaaggcgattatcactgccgaagaggtcagaatcatttcttactggcttgtagctaaatgtgaagactttttttaaaagttcactatttcagctggacgttgtgatacttatgtgactgttgaacattttgtctctttttgaagtgatgatggcttgatttggttatttgaaaatgcttataggttttgatccgagattcgtcagatgaaaatgttatccccgtcctagaggagtttcagagaagattgcctgtaggaaacgaggaacatggtgctcacggagatggtgatgtgggtgaagaagatggtacccctcaaggccttaacttttgtcattttaagcatagaaaatttgaaaaatcttcgatcttttgatgtctacataagaacaaatgaaccattcactcttttcacttttggcattgaagtgtttgtttgttgctatatagaatccccgtttgaattccgggcgctagaggtggccttggaagctatttgtagttttctagctgcaaggacaacagaattaggaaaagtctgcttatcctgctttggatgaacttaccttgaaag

SEQ ID NO: 171419 - DNA, 498 bp, Arabidopsis thaliana landsberg
  unsure (1)..(498): unsure at all n locations
acaaatacgagtttatcaatttgttagttagtcatctttttcgacatgaatcgggaaagatgactgctgttttagcgcgtatgtttggttttgaccgcattgaaattgcagaagatatagcgcaggatacacttctaaaggccctaaatgaatggagaagtaagannnnnnnnnnnnnnnnnnnnnnnnnnnnnnnnntggcaaaaaaccaggcacttgatttattacgaagagaaaaactgttcaatgaaataagtcaggagttgacttatttttccgggcacgaagaaaatactttaggtaaactatttttatcagacgaaatagaagacagccagttgagaatgttgtttgcgtgttgtcacccttccattgcattagaatctcagattacactaagtcttaaaacattaggcggtttgagtacttctgaaattgcccgggcatttctaacangtgaagacaacatcaataaacggctatacagagcaaaagaaa

SEQ ID NO: 171420 - DNA, 398 bp, Arabidopsis thaliana landsberg
accggtgtcgattgagtacgcgattggccgcttcaccatgaaagccaagcgcatgttcgtcgtgctggataatcatgctggcgcgcggtcgttacgtggcgggcgaggagtacaccatcgcggatattgccatctggccatggttaggctgtgtggcgatgggtagcgtttataatgccgccgaattcctggatgcagagaagtacactcacgtgcagcgttggacgaaagacgtggcgaatcgccatgccgttaagcgtgtatgcatcgttaccgcaccatcgtcgagcttacggagcagctccacgaacgccacgcggcgagcgacttcgagccgaatatggaaccctaagccgtcaggcgctgtcgcatctgtccggaaaaagccaaaagccctg

SEQ ID NO: 171421 - DNA, 458 bp, Arabidopsis thaliana landsberg; identical to SEQ ID NO: 60893
  unsure (1)..(458): unsure at all n locations

SEQ ID NO: 171422 - DNA, 577 bp, Arabidopsis thaliana landsberg; identical to SEQ ID NO: 44742

SEQ ID NO: 171423 - DNA, 1931 bp, Arabidopsis thaliana landsberg; identical to SEQ ID NO: 7030
  unsure (1)..(1931): unsure at all n locations

SEQ ID NO: 171424 - DNA, 543 bp, Arabidopsis thaliana landsberg
taagaatggattggtcaactaaacttgatgagactttatgggcctataaaaccgcatacaaattgcctattgggagaaccccattccagatgctatatgggaaatcttgtcatctaccagttgaagtggaatataaagtcgtttggacaaccaaacttgaatttggaaatcaagggagctcaagagaaaagatcagtcgacctgcatgaactggaagagattaggctggaagcatatgagagtttgaaaatctacaaagaaagaataaaagcctttcatgacaaaaagatctcaccaaaagatttcaacattggagaccaagttctgctgttcaactccagactcaagttgtttccaagaaagctaaaatccaagtggtctgggcctttcaccatcaaagaggtattgccatatggggcaattactcttactagggattggagttcttaatttactgtgaataggcagagggtcaagcgttatatgacagattgccctattccagaagaaactacagttgacctctaggaacccatcaatgcc

SEQ ID NO: 171425 - DNA, 769 bp, Arabidopsis thaliana landsberg
tttttggtttaattcttagttggtgatattttcttaattgttaattgttctaaccgcaggagtaacgtcaagaaactttactatagagaacaaatgcgattatactgtctggccgggagttctaaccacgaatacggttagactctcaaccaccggtttcgagctcaagaaaggagagactcgtatcatcaacgcgccgttgtcatggactggtcgtttttggggtaggtctctttgctccaccagctcaacagggaacttctcctgcgctacgggagactgcgggtccggaaaaatcgagtgctctggaaacgcagcgcctccaacgactctagccgagtttaccctcgatggtttcaacggtcaagacttctatgatgtaagcctcgtagacggttacaaccttccgttagtggtggttccacaaagtccacaaaatggccagacatgcatcagcatcggttgcgtggtcaacctgaccaagacgtgtccgtcggagcttcaggtgatgggaagcttaggcgaggaagagccaatcgcttgcatgaacgcttgtcagaaattcaaaacggcggagttctgctgcaccggcagttactctacgcctaagaaatgtccaccgtcgctttacgcgaagaatttcaagaacgaatgtccactcgcttatagctatgcttacgacgatgcaaccagcaccttcacatgctcaaactcacctaactacgtcattaccttttgcccgccgattacttcgaacatcaccaagtaa

SEQ ID NO: 171426 - DNA, 1860 bp, Arabidopsis thaliana landsberg
gttgcattaaatcgtgaaggacagacttccgaagttcaccgaggaagaagtgaaaatggtgaaaggttccattttcttcgtggggataaaccaatacacaacttatttgatgtctgatcctaaaatatctaccacacctaaagatttgggttatcaacaagattggaacgtcacttttaactgtaagtttttgttcatatgtacatttatccgttatgacttatgaatgaacttgatcttgcttagattatagaacatataactagctaagttagggtctgaatgtttcaaaagcaaatatgtcagtatgagaaaaattactctagacttggaccaaaagtaaggctggttcgtccttatgggattggactgtggcaatatcagtgtgcagcatactaactaatactgagaaatcttaatatgtgcagttgcaaagaatgggacaccaattggtccaagggtgagataaatatatgttttcttttgatttttgctaactctctttgattacttgggtgtttgattatgaattaatctaatgttatgtaggcacattcagaatggttatacaatgtcccatggggaatgtacaaagctttaatgtacattaaggaacgttatggcaacccaactatgattctctccgaaaacggtattcaatatatatttttgttccacatccaagatctctagagatgttaagtgtataatctttataggtatggatgatccgggcaacataactctaactcaaggactaaatgatacaacaagagtcaagtattatagagactatttagtgcagcttaaaaaagcagtagacgatggagccaatctaactggatattttgcgtggtcgttgctagataatttcgaatggttatcaggatatacttcaaggtgcggaattaactaatgaatacctattgggtatatgattatttctgagaaaatgtatattatatggtactcttctaatgatttttttctgcctaggtttggaatagtgtacgttgattacaaggacttgaagagataccccaagatgtctgctttatggtttaaacaacttttgaaacgggaccagaaatgatgtggtcaatgtgtctatgatttgggttgttaacgagaggtgaatgaatatgtcatatgtgtataacttaagaacttgtcttcctttgacatttcaacgcttacataaaacagcagcaagaaatttggttcttctatcatagaacttctacattcaacaatgtatgctatcatcctcatcctcaatttttttttatttctattcactttaccgtggctcagtttctatttatcaagtcattcaaaattagaaaaatattggatttaaaatggatgtgtaagttcttccaaatcacttgtatcaaaaagatagatgttgatgttatgtgacagggcaactaattattgcaagtgaatggcaaaaaaggaatcttgatcaatggatattttgagatgctaaaatgcttgttagactcgacgactcaataatggatgtaatcattcctcttccactgaaaaatctcataacacgattcacatcacatatctttatagacaaaaaatctttagtttccgtaccgtttatcacatcaatggatattttaagcctaatgcatgcacgttctttgaaatgtgtggacttaaattgatttctttagtttctcttttgttgtcattcactactcactactcactagccgtttgtgctttcaagagttgaatgaagaagaactaaggaaaaatacgttttcacgtgaagatttgggagacaagtctaaggaagtggggcattcatggtccacgaggactgaacttaatggatcatga

SEQ ID NO: 171427 - DNA, 736 bp, Arabidopsis thaliana landsberg
atggacaacattgccgcgcagttgaagcgtgggatatcgagacaattctcgacaggatcaatgagacgaacattaagccgacaattcacgcgccaaaattctctcgatccacggcgtaacaacatgagattcagcttcggtcgtcaatcttcgcttgatccgatcagacgtagtcctgagtctcttagctgcgagccgcatatgtctgtccccgagaatcttgattcgacgatgcagcttctctttatggcgagtaaaggtgatgttaatggcgttgaggagctgcttaatgaaggaatagatgtgaatagcattgatcttgatggtcgtactgctcttcacattgcttcctgtgaaggtcattatgatgttgttaaggttcttcttagccggagagctaatatcgatgctcgtgatcgttggggtagtacggtgtgttctcttcttcccctgttttaatagtgtttggttttggatgcatccttaaggtgacatttttgacattgtccaggcggctgttgatgcaaagtattatgggaatgttgaagtttataatctcttgaaagctcgaggcgctaaagctccggtatggtatttaaaataaagatgattggtctctatgttttgcttcatcttcaacatttgtttgtagttcacgcttccccaactagaaagactccaatgacgaaagggaatccaaaagaagttccccagtatgagcttactccactcggcc

SEQ ID NO: 171428 - DNA, 728 bp, Arabidopsis thaliana landsberg
ggctacaggaagtttgggcagccacagggtaacttcaatggcaaccggtttatagggaatgagagttcttcgagctacactccaaagcctgcctttcagaagacatttcctcagagcaacttctagaggacctatggtatttcagcttactaagcccccccctctctccaccctcatcagagagcagaatagaatccatgtttgagtagattctagagagccatacaaagctcgttgttgagtttaatggcaagtttgatgctgtctacacaggttttaacgggaagatcaacaatctgagctctcacataaaaaagctagatgtacaggttgctcaaactgcacaatctatcaagagacaagaggactttcttcctggaaacccttatgctaaccctaggaagagctgttatgccatcttgatcagagatggagatgatgtgtgggaggaattggacactgaagacgagttggagctcgcagctgcatagttggtgtcgatcgacaccctgtggaacactgttttctcaaacgattccatactgaggtgtcgaccgacacacctctagtgtcgatcgacactgggtctggactacaccatatgaagtgagaatcccggtgtcgatcgacaccatatggaacactgttttctcaaacgattccatacttaaggtgcgaccgacacacctgtagtgtcgatcgacattgggtccggactacaccatatg

SEQ ID NO: 171429 - DNA, 1219 bp, Arabidopsis thaliana landsberg
tatgtaatatctaatcaagtgactaaatataatcggacaaataaatattaattttggttggtacattatacggcaaaccggaaaaaaactgtagatacaacatcggtaatacatatattgtatctatttatatatatatatatatatatatccatgtttagtatataaactaacgaagtcccaatatttatgagaaaccttgaaaaagaaaaaaaaatgttgccctaccatcttttacgcgacctcacgcctcaactcactgggtggacagtcagagttacagtcatgagaaaatacaagaagtacgaaagggacaattcatttgaactaagggtaattgttgcagatgaaacggtaagtgaattttttccaacataaaagttattaaaaacatcaacgtaggatctaatatggagtaaatttgaatagggaatgcgaatggaagttgtgattcaccataggttttcagcttactactacgagaaacttgaagagaacaagtggtttgcaatgactacattcaaagttataccaaactcggaccaagtaaggtcaacagcatccgcgtttggtatctatttaatggacgagacggtagtgacgtcaaccgatgcaagacctactgatcaattcaataatttaactcgattcgactacatcttggaggggacttttgatactgaacttttagttggtaaatgtcgtcctgaacatgatattgactatctgattttaacaatcatactcattattgttttaaatttttatcaacagatctagttggagccattgttgaagtaggtgtgctgacttacactagaaatctagatgaaggtggtgaggaggtgatactccctttcaagatcatggataagtagtacgttttatcttagcccttacactcccttttaattacaataaatactgtagtaatgaaatcaatctgaacataatcagcaaagaaactctaaattgtgaggctgtggggaaaacagttattacattcgagaaatgttaccgacagtaaggaaaacctaacatcattgttgcattgggttggtggagggtggttaagttatcagctaaccaaacaaatgttaagattgtgagttatggaggcgtttcaacggtttacccggaaccatccattgaagaagtgaatgagattaaaatggtaagtgaatttctacaacattaatacttttagttatgttaacat

SEQ ID NO: 171430 - DNA, 459 bp, Arabidopsis thaliana landsberg
atccatgaatcacccgcaaaatgaataaagcgcagaaaaaacaaaaaggcacagaaacttactccgagggaacgcgattatatacaatggctctgcacagagtaaatcctataaagagatagcatccgccatgtgcctcagcccacgcacaatagacagttaccgagataccctgttcgaaaaactaaaagtagcttcccgggtaggactggtgatatttgcgataaggaatggggtcgtaagggtgtagaaaatagtccatggtccatagtcaatggtccatggcatacgctataaactactattgattgggctatggactatggtccatcgactatcgaccactaaacaaatctcccacacttctctgccgcgcagaagtttatccaggtctcctatgcctttggtggcgatggattcttctatcaacataagaatgatatcttcataacaggggcg

SEQ ID NO: 171431 - DNA, 780 bp, Arabidopsis thaliana landsberg
acatgttcccaaccaatatttagttcctcgcattataaatagtgcatatatgtaagtgtataactaggaaaagtaatttccaactaaaaaaactaggaaaaaagtcttcgttgattttctatgtacattccttcagatttagaaatttgttgcgtctgaggattgatttgagttgagtaagacagaaaacctaatatataatttgacgacataaaatattgtttcgaaaagataatttttagaagtttactaattaggtgaaatgtctttttctgtagtttaccaaaatgcagacaattgttatgtgttaacatgtaaaatatttcaggttctgcttggacattcctatcaagaccgttcgcagaatattgtataataggttatgacaacttaccaagaacactgcttctctactacacaaacttcgtttcatccccggaaggctattttcagacgcttatatgcaactcggatgagttcaagaacacgaccgtgaaccacgacctccattacatcgcgtgggacaatccgccaaagcagcaccccaagatattagggacaagggattacagaaagatggtaatgagcaaccgaccattcgctaggaagttcaagagcaatgaccccgttctcaataggatagaccgggagattctgagaaggaaacggaaacttgggtcgaaacccgatcttggtcctggtccgggggctagaagattgaagagtttactaatgaggcttttgttgagaagaaactttgtcaatagacaatgtagatag

SEQ ID NO: 171432 - DNA, 597 bp, Arabidopsis thaliana landsberg; identical to SEQ ID NO: 40642

SEQ ID NO: 171433 - DNA, 1997 bp, Arabidopsis thaliana landsberg
gaggaagagattcgagctggagttgtaagagaattaggcgggaaagagcagaacgattacattgttgttcggaatcatatagtagctaggtggaggggtaatgttggaatttggctactcaaagatcagattagagaaactgttagtagtgactttgagcatttgatttcagctgcttatgattttctcttgtttaatggatacatcaattttggggtttctccattgtttgctccttatattcctgaagagggtactgagggatcagtcattgttgttggtgctggacttgctggtttggctgctgctagacagcttttgtcatttgggttcaaggttcttgttttagaaggtaggagtcgtcctggtggacgagtgtacactcagaagatgggaggtaaggatagatttgcagctgttgaactcggtggtagtgtaatcacgggtttacatgcgaacccacttggagttcttgcgagacagctttctattcctcttcacaaggttagagacaactgtcctttgtataattcagagggagtacttgtcgataaagtagctgactccaatgttgagtttggtttcaacaaactgcttgacaaggtcacagaagtaagggagatgatggaaggggcagctaagaagatttctttgggagaagtcttgaagactcttagggtactgtatggtgtagctaaagattcagaggaaagaaaactttttgactggcaccttgctaacttggaatatgctaacgctgggtgtctttcgaatctttcagctgcttactgggatcaggatgatccttacgaaatgggtggggatcattgttttcttgctggtggaaactggagactgataaatgcattagctgaagggctacccataatctatgggaaaagcgttgacactatcaagtatggagacggaggagttgaagtcatttctggtagccagatatttcaagctgacatgattctttgcactgtgccgcttggggtcttgaagaagagatctatcaagtttgagccggagttacctagaagaaaacaagcagcaattgacaggttggggtttggccttctgaacaaagttgccatgcttttcccatctgtcttttggggtgatgagttagacacgtttggatgcctcaacgagagtagcatcaaccgaggagagttctttctattctatgcctaccatacagtctctggtggccctgccttggttgccttagttgctggagaagctgctcaacgatttgagtgcacagaaccatctgttttacttcaccgtgttttaaaaaaactcagaggtaatatttgataacgtcatgaaccttttgctgcttccaagttctcgccataacaatgtttttgacataattgtaggcatatatggtcctaaaggtgttgttgtgcctgacccaatacagacggtttgcactagatggggaagtgatcctttgtcatatgggtcatattctcatgtaagggttggttcatctggtgtggactatgacattcttgctgaaagtgttagtaaccgtctattcttcgctggtgaggccacgacaaggcaacatccagccacaatgcacggtgcctacttaagtggtttaagagaagcctcaaagattctacatgttgcgaattatcttcgcagtaatctaaagaaacctgttcaaagatatagtggagttaacataaacgttcttgaagatatgttcaaaagacccgacatagcaatagggaagttgtcatttgtcttcaacccattaaccgacaatccgaaatcgtttggattagtcagagtttgttttgacaactttgaagaagatccaaccaatcgtcttcagctttacactattctttcccgggagcaagctaacaagatcaaagaattggacgaaaatagtaatgagagcaaactatcgtgtctgatgaatactcttggattaaagctaatgggtgccaactcagtactagacacaggtg

SEQ ID NO: 171434 - DNA, 653 bp, Arabidopsis thaliana landsberg; identical to SEQ ID NO: 20954

SEQ ID NO: 171435 - DNA, 424 bp, Arabidopsis thaliana landsberg
cagcaagatgtagcagcaaatgttgttgaatctcctaggaaattttgcaagaagcttgagcttaagaagaagaatgagaagtgtgttgatggaagcacctcacaagaggttcaatggagaaggacggtcaaaaaaagggacaggcatagtaagatctgcacggctcaaggtcctagagaccggaggatgaggctgtctcttcagattgctcgcaagtttttcgatcttcaagacatgttgggtttcgacaaggcgagcaagacgattgaatggcttttctccaaatcaaggacttccatcaaacaacttaaagaaagagtggctgcatcggaaggaggaccaaaggaccaacatctccaggttgatgaaaagaaaaaggaaaagacactgaagttgagagtctcaaagagaagaacgaagtcta

SEQ ID NO: 171436 - DNA, 865 bp, Arabidopsis thaliana landsberg
  unsure (1)..(865): unsure at all n locations
gtcttaccttacggaggcaatacaagaaggcggagcatcggcatgggagcgagctaatgaggcattgatctttgaatacatgaagaaaaatgagaatttaaagaaaattttcaatgaatcgatgacgaatcatacatcaatagtaatgaagaaaatactagagaattacgttggttttgaaggtgtgagtgactttgtagatgtaggaggaagcttaggcagtaatcttgcccaaatcctctccaagtacccacatatcaaaggcatcaacttcgacttgcctcacatagtcaaagaagctccccaaattcatggtaacttattttgttgtctctttgttattcttaaattgtcatttacttttttgtcttttctttttctttagtgattcttaagattaatattaaaactatcggtagacgacgttagaaggtaaaatctaaaaactaggtttagttgattttaggtggattagtcagtagtatacaaagaaattggttgtgccttcatcgcgaaccgttttatcgcttcctagatcatctaaaacgtatagattacaaagctactagtacttgtttgatgattaaannnnnnnnnnnnnnnnnnngaacacattggtggtgatatgtttgatgaaattccacgaggcgaagttatattgatgaaggtatatcaatttgaattccattgtttttttttttttaaaccataactatatgcaaagtagagtcagaatggatctaccaatttcacagtacataagtatctcagtttcatagacataagtaccaatttcatacttgcaacaattttttttttttaagtgactgttcataattgaggttgatgatcaattctacaatac

SEQ ID NO: 171437 - DNA, 327 bp, Arabidopsis thaliana landsberg
tccccatttgtttacctcgttgaaacacttccggcacaagccattcccgtctgtctctatgatgatccaaccgccgagacccaatggaactacgactcagtacagacattactacagtggcggtctagccgcaagtctgattcaaccgagctatgttacaggtggcgggttcaatggtgtagtcaggaaagacattttgcagtggatggcacaaagatgaaagatgatgcagctaagtcccatctttctctgacataattgagcctctctcttttctttttttaacttttaattgcagaaattaatgtgattgttgatagatcctga

SEQ ID NO: 171438 - DNA, 526 bp, Arabidopsis thaliana landsberg
aacagccgcaaggtcttcatcaagacctatggctgtcagattaacgtttatgactcgacgcgcatgagcgacgctctggcccgcgacggctatgaaccgacagaggatatggaagaggccgatctcgtcctgctcaatacctgtcatatccgtgagaaggcggcggaaaaggtctattccgccctcggccgtctgcgcgagatgaagaagaagaaggctgcggccggcaaggagatgatgatcggcgttgccggttgcgtggcccaggccgaaggcgaagaaatcctgcgccgcgcgccggccgtcgatgtcgtgatcggtccgcagacctatcaccgtctgccggaagcgctgcgcaaggccaaggaaggccagcggatcgtcgatacggaatatgcgctcgaggacaagttcgagcatctgccgatcgccgaaacgaagaagatccgctcgcgcggcgtcacctcgttcctgactgtgcaggaaggctgcgacaagttctgcaccttctgtgtggtgccctata

SEQ ID NO: 171439 - DNA, 607 bp, Arabidopsis thaliana landsberg; identical to SEQ ID NO: 34072

SEQ ID NO: 171440 - DNA, 274 bp, Arabidopsis thaliana landsberg
cgcggtgctcgccgagaccaagcactcccaattcgtcgtcgacgaggtgcgtggcgcggtcacgttcagcgttaaacagcgcagccggctggcgctgtggtcgcgccggctgctgggcgaggcgatcacccaggcccagtacgtgctggccgatcacgacgaactggtcgatctggtgatgtccggcgcggccgggctgacccatctggccgggttcttcgaccgggttcagcacacccacgacgagcggatgcgcgagctgggattggcctga

SEQ ID NO: 171441 - DNA, 1842 bp, Arabidopsis thaliana landsberg
  unsure (1)..(1842): unsure at all n locations
actaacaccagaaacaaaaaaaaaaagagattatgtagtgacttactcgtcgattctctttcttattttcctggtaaacggaggttatcagcttcgatttgtttgacgcgcttttcaatcaacaaccgtctctcagcatcctcaagtttagtaacatcaataatatctgacgagtcatctcctgtgtgtaacaaagcagtagtaacccttttaaaagttggtaatctctcaactgttgcccactgcgaccgaagcttctcctcatcatcaacaccatttccacaagcaaactcaacttggaaggactttgccttgtcaacatcttcacctgtttgagccattgtcaggtaaaagcagccaaagaaactaataacaacaaggagaagcaagcaaaactccacatgaatgaagaagctaatgaagtcagagttttatatatataacttgaacaaaacttacgcatacactaatatcacgcgagctccacgtgatcataaccatagaatccggtcttgtacagagagaaaaactgaacaaaagaacgaataaactagtgaaaaatcaggtaagcgttgaaaaaactggtgattcattaaagtaagtaaataaaatcaacgaagagatcttttagacaatagtcaactcactaaacaatgtcagaactgatttcacaatgtgcgaacggattcatactgacacacaacttattggctttctgtgaggcattccatcgaacactttatgtgcgttttatctgtttcggtagacgaatttgttcctgagatttgtgaatctgatcgaatcgaagctgcagtgaggtagacgaatgaataaacaatgcatgggtgagaaatcacatggataatttcttcaagatcacgtactctggaagatgagatatcacaaaatacttgatgcatgtcagagattaatgagattagcttgcattacaatttacagaggaagaatcatatgcaatcgaatcgttggcgcgcgtttacagtgttattcgctgacgccgacactgtgagaattgatgacgcgacatcagtttcaaaatagtttttggcttttataatattataaacagtccaatcagatgagtttaatcgtattgtttttttgtcacaagtgtgttttattgatattatagagccaaaagtaacaggtcaataattcacaaagactgaaataaacaagcccaaaaaaaaaaaaaaaaaaaacagcccaaaagcccaaatgaataaaaccctaaactgaaggaagagaacaaatgattgttgtgcgccgcatagaaaacacgtgttagtgagaaacattttgaaggacacataggaactggaagagaagggagtcgccgttagaagcttcaattccggccgaaacaccggagaacttgtttaattggcatagctcgcgtcgtcgctcaaaagattaatggcgaaatnnnnnnnnnnnnnnnnnnnnnnnnnnnnnnnnnnnnagtgcaaatcttcttcttcttctttttctttttcttcctcttcttcttcaatcaacatctttttaactttcagggttcatcaatctttgaactacaagcagaagataaaaaaaaaacaaatcaaatctaaatccggtcaaaaaaccggagaaaaaaccggctaaagacgccggagaaaagcccgacgaaacaagaaagagggtatcttgctctcgggagataagccagccaccatcgctaaaagtagccggtcgatgccggaagctgagcnnnnnnnnnnnnnnnnnnnnnncagcgatgccggagtagaagccgaccaaacactgttgataaagccagtcattgccggccaaaaaagc

SEQ ID NO: 171442 - DNA, 654 bp, Arabidopsis thaliana landsberg; identical to SEQ ID NO: 58347

SEQ ID NO: 171443 - DNA, 697 bp, Arabidopsis thaliana landsberg
atgttgaatttgtggctacgagaacatttagtatacgtttgccaccagcagaacctagtggctaagtttaggagtcagaaagcaatgaaattgttaagatttgctggtcttgttttcatttttatcacaaccttccagtttgtgaacatacgttattatggtggtgatatattctctttatcttcttaagataagtttccagtatcaattgatgtaagcacagaacccgtaagcacgttgtccggtcctgaaagattgaattctagtagttcaagatccgttgaggtagatgaagaggaaagcaccggtttaaaagaagaccatgtgattggctttgataagaatgacacagttcaaggccatgatagtttcgtagaggatgtcaaagataaggaaactcttgatttgcttccaggaaccaagagcagctcaaacgagagttacgagaaaatagtagaagatgctgatattgcttttgaaaatattaggaaaatggagattctggagagtaagtctgatccttctgttgataatctttcctcagaggtgaaaaagtttatgaatgtttcaaattctggggtggtttctatcactgagatgatgaatttactgcatcaaagccgcacttctcatgtctcactggtatgtgtctttagtctctgattagacaatcaatgctcttgtttatactagtaca

SEQ ID NO: 171444 - DNA, 633 bp, Arabidopsis thaliana landsberg; identical to SEQ ID NO: 43515

SEQ ID NO: 171445 - DNA, 526 bp, Arabidopsis thaliana landsberg; identical to SEQ ID NO: 3017

SEQ ID NO: 171446 - DNA, 467 bp, Arabidopsis thaliana landsberg
cggtgacacagtccggcgtgtcccgcgcgctagcgcgcatcgaggcggaagtcggcacgccgctgctgcggaagtccggccggcggctgcggctgaccccggccggggaggtgttcaagccctacgtggaccgaatgctggggcagttcacggagggcctggacgcggtggcacagttcgtgtcgccggaaacgggcaccgtctcgatcgccttcccgcagacgctcggctcgtggctggtaccggacctggtgcggagctttcgcgcggggcatcccgatgtcaggttccacctcacccacgtgaccgacgagctgcacgggctgccgctggacggcggcgccgccgacctggagatcggcgcccggcagttccggacccgcccgtaggacatgcggcccggggacctcgccgtccacaaacggccgatcgccgacgagccgctgcggctcgcgctggggagcgcc

SEQ ID NO: 171447 - DNA, 1147 bp, Arabidopsis thaliana landsberg
  unsure (1)..(1147): unsure at all n locations
atgacgtgaccaataaaatgataatattgtggatcacatcctggttacttaaaacagaagtcttattttttggccatgcatgatgctccgacgaccgggttgcacaatgataacccatgcttgaattaaagattaaaagaaaaggttaaaagggaaactgaagtatctatagccatatataaaacactactggttagtggaatattgttagatgactttctaaactaactcattaacaatatgaccatataaaaatgacatgtgttaccaaagaaagttgtagaagtattacatggcatttatacgcattctcactttttaaaatattttgcatatttcatttgtttccttttctcttttaactttataaaatcacttttgaaatattgtctcatatatttatttttctatatattttcttattacgaaaagaaactttttcaaaaataatatgtggttgattctgtgatttaattttggcagtaattttaggatacagaagggatacaaaattcttttatgtgttttatataagcaagattctgacctctatggtatgtgaaggcaccgntgactgcctagcttatgcatatgtggtaattactttatttttccacaatgatttattttataatattaacaaatgtcgctatgaaaagataatcacatttcatatgttttttttaggcagtaaatattcatggcagcacaagaatttcagcttttgtgattttagctggtatcaaaacaattgctggactttttggaacattaagttgctcgttttcttcccatagctttgacttttcaggtatatttttcatcaccaaaacttagctcattaaatttgaataattcttatgcatgtgattccaaaatcaatgattttatttttcggatgaactaggtttctgctatatcatttttcgttggcctagtgtacatgagagttttcctaaaagaaaatttaaaggctgatgaagatgatgatcatcatcatggtacgtatcatcaagaggatcatgatagtattaacaccacaatgttagcagagccgattctgaacgacacacccatcaaaacacaagtctttcaaaagaagtattcttcattgaaagatatgatcagcttgatgaagactaggtat

SEQ ID NO: 171448 - DNA, 1595 bp, Arabidopsis thaliana landsberg
ttccattttttggagattggttatcttggagaggttggcgagataagaaaccaatacgatgtcggttagatagggccttagcaaatgaagaatggcatgatttattcagtaattctttcattgaatatctaactatgttagcttcagatcattctccggtgattgcaacgattgcggataagataccacgtgggaaacaaaattttcggtttgataaaagatggattggcaaagatgggttattagaggcgatttcacaaggttggaatctagattctgtgtttagagagggacaatttgttgagaaattaacaaattgtaggcgggcaatttcaaaatggcgaaaaagcttaattccttttgggcgccaaacaattgaggatctaaaggccgaattagatgtggctcaaagggatgatgacaggtctcgagaggaaatcactgaattaacattacgattaaaggaagcttatcgtgatgaagaacaatattggtatcaaaagagtagaagtctatggatgaaactaggggataataattcaaagtttttttcatgctttaacaaagcagaggcgtgctagaaatcgaattacgggactccatgacgaaaatggaatatggtctattgaggatgatgatattcagaatattgcggtttcttattttcaaaatttgtttactactgcgaaccctcaggtttttgacgaagcattgggagaagttcaagttttgattacagatcggataaatgatttgttaacagcagatgcgacggaatgcgaggtgcgagcggctttatttatgatccatccggagaaagcgccaggtcctgatggtatgacagccttgttttttcaaaaatcttgggctatcattaaatcggatttgttgagtttggttaattcttttttgcaagagggggtttttgataaacggttaaatacaacaaatatatgtctgattccgaagacggagcgtccaacgaggatgacagaattacggccaattagtctttgtaatgtggggtataaagtcatttcaaagattctttgtcaacggctgaagactgttctaccgaatcttatttcggaaacacaatcagcttttgttgaaggaagactaatttcggataacattcttattgctcaagagatgttccatgggttacgaactaattcatcttgtaaagataagtttatggcaattaaaacagatatgagtaaagcttatgatcgtgttgaatggtcatttcttcgagctctcatgttgaaaatgggtttcacccagaaatgggtagacttgattaatttttgtatatcctcagtctcttataaagttctcctaaatgggacaccaagaggttttatcaaaccaacaaggggaattagacaaggcgatcatatttctccgttcctctttatcttgtgtacggaagttttggtggcgaatctcaaagatgcggaatggaatggccaaatccaaggtcttcaaatctcacgcgcaagcccttctacttcgcatctcctgtttgcagacgatagtttatttttttgtaaagctgatccatcccaaggtcaagaaatcatcaaccagga

SEQ ID NO: 171449 - DNA, 2692 bp, Arabidopsis thaliana landsberg
tatgagaactgcaatgtgaagggtccaatgagaagactgagttgtggcattgcagactttgacatatgagtttgaataacatgaagattttagcagaagaaggactgcttgaaaagaaagacattagggacttaagcttctgtgagaactgtgttatgggaaagtataagaagctgagttttaatgttgggaagcacatcacagaggaggttttaggatacattcatgctgacttatgcggttcaccaaatgttactccttcactgtcacgaaaacagtattttctctccatcatagatgataagtccagaaaagtttggctaatatttcagaaaacaaaggatgagacatttgaaagtctgtgaatggaaagagcttgttgagaatcaataaacaagaaggtcaagatactgcgaactgataatggtcttgagttctgcaatctcaagtttgatgagttttgcaagcataatggaattgagaggcatagaacgtgtactcctcaacaaaacggtgttgctgaaagaatgaatagaaccttaatggaaaaggtaaggtgcttgttgaatgagtcaggtcttgaagaagttttttcggctaaagcagctactaatgtagcttacctggtgaatagattacctgcatcttgtgtagatcacaatgtccctgaggaattgtggcttgacaagaagccaggatacaaacatctgagaagattcgggtgcatagcatatgtacacttggatcaagggaaactaaaaccgcgggcactaaaaggagttttcttggggtatccacaaggtactaaagggtacaaggtgtggttattggatgaagagaagtgtgtcatcagttggaacatactgtttaacgaaagtcaggtgtacaaggatataagggagagcagtgaacaacctgtgaaagacataagtgactcagaaggttacaatgagtttcaggtttcagttaaagaacatggagagtgttctaaaacaggtggagttactatataatagattgaccaagattctgattcagagaacacagtaactcaagaaccactcattgcaagtattgatctcagcaactatcagttagctagagacagagaaagaagagcactaaacccacctcagaagatggttgactatactcactttgcttttgcattggttatggctgaagaaaattgagtcagaagaacctcagtgctatcatgatgcaaagaaagacaaacattggattaaatggaatggaggaatgaaagaagaaattgattcattactcaagaatggaacatgggatatagtttacaggcctaaagagcagaaagtgattagctgcaggtggttgtataaactgaagccaggtattccaggagtcgaagctcagaggtataaggcttggttagtagttagagggtttacacaacataaaggaatttattatgagaaggtgtttgctccagtagtcaaacacatttcaatcaggattctcatgtcagctgttgtgaaagacgatatggagctggaacaaatggatgttaaaacagcatttctacatggagagtgaaaggccccgatccggactgcctaaagtccgggcgagttctctcgacccaagccactaagtgactcggccctaaccgtttatgaggttctttcctagtctaatccgtttcatatgattccgagattcaatatatgagacgaatagagtaaacaaacaatcggacactttattaattaagcaaaggattcgatacaacctatgagtttgcatataagctattacaagtcatataatcgatccctagactatctgaactatcaccacccatcatcccggccttgagtctctcgcgcctaagccaagtccttcccacgatcaccattcgttcctgaaagtcatagagccataagtaatcttatttacttaatcatatgtatgcaagtccatgcaatgctctatatgccatacactactccgatccgtggagagaattcagagaggggaagatcgcgcatcagtccggccgattctcggcaggtcagttaagacccgccggtcctccgccgagccgcgtccccgcctcagccgatccctacccggaccgagtcttgtgtaggatgcacatgacccggatactactcagccctctagtcggtcctttcaaggatccgactactaattcacatcctagaacccttagactcaaagtctaggatcccttaccttccttctcgaggttaggtcgatccgaccttccttctttattgccggccacagcccggctaccgaatcctaagactatttattctcccaagagggagagagttttaatggtgagttttcttgtgttttcggtgtgttgtggtgagtggaatggtcctgggcgcccttccttatatagggggcgaatggatgcttcccgaatcaacacatccgttccttgcacctttccgaagagttgcacctttccgaagagttgcgcccttccgaagagttgcacctttccgaagagttgtatctcttcgcccataaccgcccagttcgtccgtcactcgcccatctacctcgagctcgtccgtcactcgtccagctacctcgagttcaaccgtcactcgtccagctgcctcgagctcgtccgtcactcgtccagctgcccgagctggactgtcactcgacctga

SEQ ID NO: 171450 - DNA, 1983 bp, Arabidopsis thaliana landsberg
accacattggaagtccaagggtctttgccttgacttatatggtgggatttattccacttaacttgagaagtcaagaaatggacaagggcgtgccacacgcgcgcgccgccgccgccggccgggccgggcgtggcgtggcgtggcgaggcgaggctggcaagcgagcgggcgtggtgtggttgtgttaatttttagcactcactaaccgcgtacgtaagccgagtgaccctgtctcttcgtctgccgagtgaccctgtctcttcgtcaggcaagccgagtgacccttctccttcagctgccgactcatggcgtgactcggcgagagctggccgactcatggcatgactcggcgagtgctgcccgactcatggcatgactcggcgacctttctcctagagctgaccgacttttggcgtgactcggcgacctttctccttcaacttccctctgcgagaggttaaatagaggagcacccatgtcactcggtacacgcgagaaacactttcagtctcacagtccagccgcccgagtgagggtatttccatctcgtgactctgcgcgcacagagaagcgagagggcaggtgcctccgaagccggtgccgttcgagaccttgcacgggggatcggcaattaggtttttggggagcgtcttcgcgactgcccaacatctgtcttcatcgctggttcttggcgtcttcatctcgatcggatgacaagagaagttggacaaggatcaggatcctcggagcgcatgggagggtatgatcaattcagttcattacagttttatattctgcatattatatatgtcgtatgtagctttgctctatcatattataatatgttatatctgtctgtcttaatcttacagtcatcctgtttatattgttatctgtttattttcagttgttccgcaataatccatgaaccatgtttatatacttattttatttatatgatttacatgcttcatatgctttgtgttctcatgatccatatttttatggatatttttgagagcatgttatctatgtttgattatctattatatgtcatcatcataatattaatttatggaattaaaatggtacggaaaatgcctatatttctaacaatccaaaaacctaatgttaggcatttttctgtcagaggttttgttgttgtgctaaagcctgatccttacgatggtaaaaacttcttgatttggaaagctaagaaagaattgtggctactgacaatgtcttgttatcatgccgctgagggcaaccctttcatcttacctcctgaggatgaggctaagtttaaggctgatgacaacctctttcgaggagcagtgattagcgcacttgatgcaaaaattccagaaaagctatatcatccttcccacagggaaagagatgtgggatgcacttgttggaaagtttgagtaactgacgctggtagcgaggagtatctcatggagcagctgtgtgactacaagatgttgagaaccgatctgtagtggaacaggctcatgagtttcaggcactagctaaggaactcgaactttttccttgtcctttgcctgacaagtttgtggctggcggtataatcgccaagttaccaccttcttggaaggactttgctacctctctcaaacataagagacaagagttcaatgtggaagagctcattggtactcttgatgttgaggaaagggctagaacaaaggacagtggaaaaggtgttgagacctctactgctaatgtggtgcagaagagaaacttccgcaagtttaacaagaagaaaaaccagaacaagccagagaacgcgaataaacctgttcaaacaacacagtttaaaaagaagaacaacaataacaagggaaagggaggatgctttgtctgtggcagtgatcaacactgggctagagagtgccctgatcgcaagttcactcaagacaagaaatcagctaatgttgtaaccactgaaactgaaggagg

SEQ ID NO: 171451 - DNA, 1333 bp, Arabidopsis thaliana landsberg
  unsure (1)..(1333): unsure at all n locations
cggttttgtatatgcgtcctaacgttctttgtgttcgttcttctgtcgccgaccaccgttcactccataatccgacattacaaattcaatgtaagtctaattcctatatatacatatgtttatatatgtaaggtgtgtattcgcacacaattgtattttgcgaagttcgattaccaacaatggaaaaaaagacaaatcatattatatttgtctccggtatatgagcagattttgcgcttaaaacgtatagtacttttttataacctatagttctgcatgcaaaaaaaaatgtctctacgtacgcttagatgatcttatctaatagttgtcatcgcataatattgatacatgcatgaataagtaagatcatgcagtatgtattgagcgcatgattgaaatgtgtgcactaggtggtgatgacgaacaccacgaagctgtgctcgtcgaagcctatagtcaccgtcaatggacaatttccgggacccaccattgttgcaagagaaggcgacactattttgatcaaagttgtgaatcacgtgaagtacaacgtctccatccactggtgagcaacttcaaacaaacccattttaagatattagtgaaatcagtctctttctttgattaactttaacaatgttagacccaacaactaaaactaacaataacggtataggcacgggattagacaattgaggacaggttgggcagatggaccggcttacataacacaatgtcctatccaaccgggacagaattatctccacaattttacattgacgggtcaacgaggaaccctatggtggcatgctcacatcttgtggcttcgtgctacggtgcacggcgccattgtcatcttgcctaagctcggtgtcccataccctttccctaagccctacaaagagaaaaccattgtccttagtgagctactacccaaaatccaaacatacctttctttaaaggattatctcagcaattacaattattcttgataatatataggtgaatggtggaaatcggacgtggaagaactcataaacgaggcttcaagaataggaacagctcctagtgcttcggatgcacataccatcaatggtcattcaggctccatctctaattgtccttcccaaagtaatcatttaccaataatcctaaattcataaccacttttaattaagtaattatttcttctatattatacttttataccatcaaaattatgacaccaggatgatcatatactaatacaaaatgntccgtttctcttttgataatattggncttttcacttgtaggtaagtaccgtttaccagtgagagcaggaaagacatacatg

SEQ ID NO: 171452 - DNA, 378 bp, Arabidopsis thaliana landsberg
gtaagtaaaatagcgattctgacttccggaggagatgcacccggaatgaatgccaccatccgggcagttgtacgtaccggagtgtatttgggactggaagtttatggtattatgcgtggctatagtgggatgatggaggatgatatctttcccatgggctccaaaacagttgcaaatatcattcaaagagggggaactattttaaaatcagcacgttgtagagagttttatacagaagagggccgggcgcaggcatatgccaatttaaagaaacgaggcattgacggactggtggttattggcggagatggcagttttacgggggccatgaaactgcaaaatgaatttggattacctgttattggactacctgcacca

SEQ ID NO: 171453 - DNA, 589 bp, Arabidopsis thaliana landsberg
gcatggtaacaacgaaaaggcggtcgcttgcctacatttacttcaaaacaatctaacattcttaattggatcatatgatttcattggcatcaattattactcgtcttcttatgcaaaagatgttccttgctcaagcgaaaacgttacaatgttctctgatccttgtgctagcgtcacaggcgaaagagatggagttcccattggtccaaaagctgcatcagattggcttttgatatatccaaagggaattcgtgatcttatcctctatgcaaaatacaagttcaaagaccctgtcatgtacataacagaaaatgggagagatgaagctagtactggtaaaatcttacttaaagatggcgatagaatcgattactacgctcgacatctcaaggtggttcaagacgctatctcgattggagcaaacgttaagggcttttttgcatggtcgttgctagataactttgaatgggcatcggggtacacggtcaggtttggacttgtttacgtggatttcaacgatggacgtaagagatatcttaagaaatcggctcactggttcagacatttattgaatggaaaaaaagagaat

SEQ ID NO: 171454 - DNA, 562 bp, Arabidopsis thaliana landsberg; identical to SEQ ID NO: 12245
  unsure (1)..(562): unsure at all n locations

SEQ ID NO: 171455 - DNA, 2517 bp, Arabidopsis thaliana landsberg
atgcctttactttctatcttgacccagctcgccggaggagaggttacagctacaatggcgactgaaagagagagagtccgacgatgagaggagagcgctcgagctgagagagagagagagagagagacgacagagagagacgagagagagcgttttttttttctttcccgttttcagtttttttttttctgaaactaattaatttaaaaagagaaatgatctcataactccctttctgcaaacaataaatctctcaactcctcttattatctctatatccctttctctgttaatgagatgtgtagagaccaatttacccctcctccttctttctctaatattcattttaaaattaaatacttttagaaaagaaaaaaaaattgaaaaaaaaaaaaaacagaatcccccaaaactctctctcctctcctctctctctcctctgaagctcgagctcactctctctactcgctcaatcatcgctctcttgccggaattcgctcacaattgttgccatatccttatctccggcgagctttgtcgacatagaaagaaaaggtaagtttctcgagctgaatggagcttaaaattgaagattagaattaagagattttgtcaattagatttgagattaagcaaattgtgtttggatatgcacattggaagtttatgcatactgattgggttgaatagatttttaaatgggtaagaaatggattccaacaactgaatcatagtgaattgtagttttgaacccgaaaccattcgattgagaaagaatgtctcataactccctttttgcttgaagaaaatctcatatctcccctgaaaaaacagaacctatttttgatttaatttaaatgcgtaaatgaaggattttaccaagatatcctatgagaattgtgatatttacatagtgaacctggatctattcgatccagacccgacccatttatctcaaatggataattttgctggatctctcattttttaatttgaaaacgaaaaaaaacaaaactcactcattgaaatcttttctctttctcttcgatttctctttcactcaaagaaagaaaccgctctctcctctcctctctcgattctctgtggaaaactcagagaaaactcatctctttcacttcaatcttctcccttctctctcaattctcaacaagaaccctaattttctctcttttctctcagaatcgtttctcctccttctgtaaccctaaccctaatgccgccgaaaacaatgccgcctctaaagaagaggaagagaggagttggaacgaaggagaagcctgcaccggcaacgaagccaatcgttgctgtcacgaaggcaacgatggagcctccgacgacgacagaggagccatcaacgacagagcaaaatctggtcctgaccgtagtggaagaaggagagaagtctgacaacaatgatgaggaagaagagagtgaaaaagaagagagtgaagaagaagagaaagaagaagaagagaaagaagaagaagagaaagaggaagaggagaaagaagaagaggagaatgttgccggagaagagtcctcagatgatagtagtagaagcttgggggaagagacctcctccgatgagaatatggacgatgagactgtagtggaaattccagcggctatggtaaggatttctcaagtatttgaatggtgtaaaactggtagaacagggtaatactatgatttgtggagaatactatcaatactaggaaacaactacgtgtatgatttctggataatactgttattactaggatataactatgcgtttttgggtcatactgtcaatactaggaaacaactacatgtatgatttctggataatactgtcattactaggatataactatgcatttttgggtcatactgtcaatactaggaaacaactacgtgtatgatttctggataatactgtcattactaggatataactatgcgttttttggtcaaactgtcaatactaggaaacaactacgtgtatgatttctggataatactgtcattactaggatataactatgtgtatgattctatgtaccatcggtagtaatatgaatgaatgtctgttgcaggagatcgacgaggaaacagaagcagtaccacccttgagtatgtatttcccgccctcggaatatgtgaagaaaatcaagctttcaactcggtgctatattcacgaagtgttgactacattcgataagttggagccgccgatgagcaagtccgagaggttatggtttgagaaccatcctagtttccaacatatcttccacatgccaagagacccgaaccaccgacttatggggatgtggatgctccttcttcgcacggcgtgcattgaaaggaagaaagaagtgtggttcatcgtcaatggcgttccaatccgatatagaatattggaacacgcattgatatcgggcttcaattgcaagaactataaacttggctacaaaaatacggggaatttggatttcaagaggaagcatttcaagg

SEQ ID NO: 171456 - DNA, 594 bp, Arabidopsis thaliana landsberg
cgggcgctgtggttcgcgaccgtcgacggcgacgccgcgcgcgccgggctgcgctcggccggcttcgtctacgatccgcagaaggtcgccgacacgatcgacgagttgcgcaatgcgcggctggtgcgcgctctgtccgatgccgacgtgcagaagatgatcgcgctgctcgcgacgctgttcgaggcggcgcgcgagcaggcgcagccggagctggcgctattccgcacgttgcgcgtcgtgcaggcgatcgccggccgctcgacttatctgagtctgctgcacgaccatgccgagccgcgcgcgcagctcgtgcggctgtgcgcggcgagtccgtggctgaccgagctgatcgcgcagtcgccggtgctgctcgacgcgctgttcgatgcgcgcacgctgtacgcgttgccggatcgcgacgccttgcgcaccgacctcgtgcggcgcatcggcgaactcccgtccggccacaccgaagccggcatggatctgctgcgccgctaccaaaagcagatgacgctgcggattgccgccgccgatctattaagagcgcgctgccgctcgtgcaggtcagcgaccgcctgacctggc

SEQ ID NO: 171457 - DNA, 880 bp, Arabidopsis thaliana landsberg; identical to SEQ ID NO: 608
  unsure (1)..(880): unsure at all n locations

SEQ ID NO: 171458 - DNA, 1208 bp, Arabidopsis thaliana landsberg; identical to SEQ ID NO: 16336

SEQ ID NO: 171459 - DNA, 709 bp, Arabidopsis thaliana landsberg
gcatctttctagaagtatcacttggttttcaatgtgatcattattggtttttggtaccagaactttgatgatgtgctagtccctgctgatcatgtaagcagaagtcttaatgacacgtactatgtagactcacaaactgttttgagatgtcatacgagtgctcaccaagctgagctgttgaggaaaggtcatagtcgtttccttgtaaccggggatgtttaccgaagagattctattgactctactcattatccggttttccatcaggtgttctattcttgaggtccctgtgtttttcttttactttggctgttttgctcgacaggtgtattatgttttttatctattacagatggaaggtttttgtgttttctctcctgaggactggaacgggtctggcaaggattccactttgtatgctgctgaggatttgaagaaatgtcttgagggattggcacgccacttatttggtacattaagatccaataaacaatctatattcttcagcaagtgtaaataacttcaaagatggtttattaagagttgtttaggatgattatttcattaatttaagaagaagttggggaaatatacatgaaataatttgatctgagcttctttttttggctgccaggttcggtggagatgagatgggttgatacatatttcccatttaccaatccatcttttgagcttgagatatatttta

SEQ ID NO: 171460 - DNA, 403 bp, Arabidopsis thaliana landsberg
ccctcttcgcctccctccaatcccgcgccttccgaggggaactctgatggccttcgcggtaatcgatttcgagacaacagggttcgtgccggagcgcgctgaccgcgtcgtcgaggtcgggattgtgctcaccgacgaccagggcgcgatcgaagacgagtggacaaccctaatcaacccgcgtcgcgacgtaggcgcctcgcacatccacgggatcactgccggggatctgctggacgcacccgaattcgccgacatcagtggccacgtcctcgacatgctcagcggtcgcacggtcgttgcgcacaatgccaccttcgacatgcgctttctactgtgcgaactgcaacgggccaactacgccatcgtcgaccgcccggccgcgctgtgctcgatgaaatgg

SEQ ID NO: 171461 - DNA, 1204 bp, Arabidopsis thaliana landsberg
agtgagagtcatataaactctttgatgctgtttgttatgttactcgcagggcaacaaactgacaccaaaaaccatgaagaacagtgttagatcactttgtaactcaaatgttgcccaaggcttcagaattgggaccgatactgctttaccggtaacatatatacgctcttccgaggcccctcttgagtatctcggtggaaaaacttcgtccgaaaggaagattcttgcattctttgctggcagcatgcacggatatctccgtctgatactagtgaagctttgggagaataaagaacctgacatgaagatttttggtccaatgcctcgtgaccctaaaagcaagaaacaataccgagaatatatgaagagcagcaggtaaggtcaaggaaaggccttttctatcatcatcctctataaaccatattgattttggttgtgagaagtttagctcccatttcaacaggtactgcatatgtgcgaggggttatgaagtccacactcctagggttgtcgaggctatcattaatgaatgtgttccggttatcattgctgacaactacgtgcctccctttttcgaggttttgaactgggaggaatttgctgtgtttgttgaggagaaagatataccgaatctgagaaacattctgctatccatacccgacgatagatatattggcatgcaagcaagggttaaagcggtgcagcaacatttcctgtggcacaagaaaccggtgaagttcgatcaattccatatgattttgcattctatttggtacagccgagttcatagaattaaaactaggtgaaaacattcataccatggaacccaagacaacatataggtgaatgcattgtatagttatctgttatcaccactccctttataaactgtattgaactccgttagtggattctgttgatcctttatgttaaatgtgttgaatattcaacgatgtgtttagctcccatgtactagagatgggagctaaacacgaaaactcttaactgattcaatgagaaacgagttctcaagccaatcagagtttgtcacatctcctccatggatcaacactttactagtattgtcttcttcaaccttactaccactaagctgaagagaacaagtcctgcttcaaagagtccatcttcttcgcctcactcttctttgatttcccattagacttcccttcacttcatcaaatag

SEQ ID NO: 171462 - DNA, 517 bp, Arabidopsis thaliana landsberg
aactatttctatttctatccttccgtgttcgaacatatttttgacaaaggatcaagatatacgccttggtgtgacgattatgaaatttgtcacactatatcattttcctagtcagactaacaccgactaaatgtaacaaaatcggctctatgatctccgcaggcgattttggactcgctaaagtcttaacatcagatgacctcgcgtcttcagtaattatagtttccttcaatactttacatatgatttttttccgaactcaggtttgatctttacccttcttgaaaaaccaggtggttggaacaccaagctacatgtgtcccgagctactagctgatataccctatgggtccaagtctgatatttggtcgctaggcaagtttctcatcaatggataagattcttaacctttagctgtagataacaaaagaatatattcatctgaatctttatcttcttttcttcaggatgttgtatgtatgagatgacggctatgaaacctgctttcaaagctttt

SEQ ID NO: 171463 - DNA, 531 bp, Arabidopsis thaliana landsberg
agacaagattgctcgcgtagaacgcaagctcggccagagcccaaatcgggataacgaccgctgcttcaacattgaaattgcagccgagcttatggcgatttttccaacccgcgaccttttgaagatcgtaagcgacggcatcgaagcgtcgtcgttctccatatcgaccgagggttaaggcagatgctcgagcaattcgatattgacctgccgccttggacagatgacgtatccaagcacccgttcgtaacggcgcgcgtcaaagatgtggcgacgatattgttccaacgtgtggcgaagggcgaatatccattcggcacccgccttcctgcagagcgcgatctcgccgaggaattcggagaaacacgcgcaaccattcggcaggttttggaattcttggccgcctacgacgtcattagccgcagggcgggaagcggcaccttcgccgcttatcagcgccccgcatcttctcggcgtgccagcgtccctttcaccggggttctcgacacacatgcgttggctgagacggct

SEQ ID NO: 171464 - DNA, 429 bp, Arabidopsis thaliana landsberg
caagatgatgaatacgccaccgcacgagacttcacgcaggaggactggagcgtgaaaacagctacgcgaaacgaggaactcgaaggcaaggcagcgccgatgccacgccacgtgcgccccatgctcgccaacacggcggatgccgccttcgaccgcccaggctggttgttcgagctcaagtgggatgggtatcgcgcgattgccgaggtggaaggaacgaacgtgcagctgtattcccgccgcggccaatcgtttaacgaacagtttgcgccgttggttgacgacctggccaagctcgggcgtcgctgcgtactcgacggcgaggtggtgatgctccacaaggatggcgtttctcgatttcagtaactgcagaactttcttgataccggcgaaagcaccggcctgttggcgtacgtggtagtcaacctg

SEQ ID NO: 171465 - DNA, 1501 bp, Arabidopsis thaliana landsberg
gtcctggatgtttattcccgacgagctttacgcagctgctcaggcttatctctccactaagataagtccaaattctgtcaggctaattatggctagagaccctgcggagaagaaagtcaagttataccttaccgatggagaggttgtctccgatatctacaatggcattaagctcaagtggaggtttgttgctaaaaacaagaataatactatggttgaagagtatggacaaagctatcagggaaacattcaacgggaatctttggagctgagcttcgacaagaaacacagagacttggtcgtgaactcctatataccctacgtggagagcaaggcaaaggaagtcaacaacaagcgtagaatcctaaaaatgcattgctactcgcacatggctcaaacatggcaatccgtgaacttcaagcacccttcaacattcgacacgatggctatgaacgacgatctcaagcgttctatgatcgaagatcttgatcggttcgtcggaagaaaagatttctacaaaagagttgggaaagcttggaagaggggttacttgtcatacggtccaccagggactgggaagtctagtctagtggcagctatggctaactacctcaagtttaatatctatgatctccagctcgcaagcgttcagggagacgcccatctacgaagcttgcttcttgccactaataacagctcgattcttcttgtagaagatatagactgctccgtggatttgcctacaaggttgcaacctccaaccgaaacgagccaaccgctaggtgctgtccaggtttggtctccacgatggatttagttttgagttttatatcattatttttcgtacaaacaatatatgagccgatcttaaacattttttatgtgaataggtatcaaaaccattgacgttatcaggacttttaaattgcattgatgggttatggtcaagttgtggaaacgaacgtattataatatttacgactaacaacaaggagaagctggatccggcattgctcagaccaggccgtatggatatgcacaatttacatgggacattgtagttttgagggatttaacacattggcgtcaaactatttaggcctgtctggcgaaaatgatgatactcaccctctctatccggatataaagcatttgattgatggaaacgtgttgactccggctcaagtcgctgaggaactaatgaaggatgaagatgttgatgcggcgcttgagggtttggttaaggttctcaagaggaagaggttagagtcagagaagtgtgatgatgaatctaagatgaagaaactgaaagagggagaggaggcaatagccgacgctgaggaggcattaatggaattagcagtgttgactccggctcaagttgaggacaaggaggaactagttgctagcgaatatgctaatgtgatgcccgaatggctcccgagatcgaggttggcgatggttccgccagggttctatagagcaagaggaataagaagag

SEQ ID NO: 171466 - DNA, 768 bp, Arabidopsis thaliana landsberg; identical to SEQ ID NO: 13468
  unsure (1)..(768): unsure at all n locations

SEQ ID NO: 171467 - DNA, 501 bp, Arabidopsis thaliana landsberg
  unsure (1)..(501): unsure at all n locations
gaatcaaatttgtgctacatgtcgtaccacaattcctgacaaaatggctgccaatcctcgtggtaactcgtctcgtgtgtctgttatccgttatgtaaaagttgctaaaactgctggtgttggtactgcaaatttttttccttttacaagcaaccaagacggcccagagaatggctttagaaccaagcgtgctaaaatcggggaggagaatgctgcaaggatatatgttaccgtaccatttgatcactttggtcctataccagctgaacatgatcctgtcaggaacaaaggtgttttagttggagaatcctgggagaatcgagtagggtgtcggcagtggggggttcacttgccacatgtttcttgcattgctggagaagcagactatggagctcagtctgtagttatctctgaagaatatttgtattaaaaagcnccatggagaatggtttctatacacaggaagtaggaatgcttttctataacacctagctttggtcc

SEQ ID NO: 171468 - DNA, 1456 bp, Arabidopsis thaliana landsberg
  unsure (1)..(1456): unsure at all n locations
tccttatcatcgctgctcacggtgtcaccgtgattctcctgaaacgggtcaacccggttccgacccgatcaattacatccatatcattcccagacgaactaattacatccaaatcgttctccttttctgaagatagatcaattgagtccttagttgattcaattacgtcgcttgtatcaatatcccctctaagctcagcgttcttttccacatagctggatttctcaccgacatcaaatccatcggaagaagaagatgnnnnnnnnnnnnnnnnnnnnnnnnnnnnnnnnnnnnnnnntgccgactttcgccgccgtaagagagacgaaggttgatgggaattggaacgaatcggtaagcaatcgtagtaaaattcgtcaggtgcgtcgaggaatcgatcgaattcgtccgtggtgctagggtttgactcggactcggactcggagtccattgatggtgatgataacccagaagaagaagaagagattgcgtgagtttggggaatttctaaagcatcggtggcgataagcgtgatagctcacaaacggcgtgaccgagttttttttatttaattttaaatttatttatatacgtcactctttggcctttgcagtcaataaccggagcggaccatcaaaccggataattgataaccgaagataaaaatgaaactaaccctagggaagttactatttttttttttggtcaaacaggaagttactattaatttctactaatgaatacagatacaaggtatctgaatctgagagctgagattagaaaatgattgtttggtgggttagttagatagtcttccacaaagatatgagtgttggactgaaatttatctcactaatcaacttttagtgataaaataataaaatagtttacaacgtttatataaatgtttgttctttacttattttcccattcaatcatagcaatatactttacttattattttttaattaattaattattttacttaactatttatgacaatgttactgttgatagagattgtttcgtgttactttatatttaatttcttttcttaaattaaataaaataacagatttttttataggattagtcattaatcgaaacaaatctttggggggtgtactatggcctatattttgcgtgggcgagacggatacctcagttggagttagaggtggattcggagatagtggtgggttttctcaagaccgggataagcaacacacatcccttgtctttcctagtacgtttgtgttatggctttctttcgaaggagtagagagtatgaattacacatgtgtatagagaagttaatcatcttgctgatgggttagctaactatgcattttcgctccctttaggtttgcatttttatgatgtatgtcctgacggtttgtcgtcttgtttatctgacgatgctcgagggtctgcgtacccgcgtagagttcttttg

SEQ ID NO: 171469 - DNA, 498 bp, Arabidopsis thaliana landsberg
  unsure (1)..(498): unsure at all n locations
ccactccggcctcgttaagaacatcacgccttacggtgtgtttgttgaacnnnnnnnnnnnnnnnnnnnnnnnnnnnnnnnnnnnnnnnnnnnnnnnnnnnnnnnnnnnnnnnnnnnctcagaatacacgaaagtgggtaatcacatcgacgtgatcatccttggaattgataaggacaacaggaaacttcaactgggtcacaaacaactcgaagaagatccatggaacacgcttcaggatacattcgctccgggcagcatccatgaaggaactgtgatccgcaaagatgataaaggtgcaatcgtacaattgccgtatggtttggaagggttcgcgccaaaccgtcatctcggaaaagaagatggcaaatctgtaaatgccgatgaaactgcgcagttcatggtgatcgaattcgaccgcaatgaaaaacgcatcgtagtatctcattcaagaatctgggaacaggcaagagtggataaaaggaaacagcgaagaac

SEQ ID NO: 171470 - DNA, 521 bp, Arabidopsis thaliana landsberg
  unsure (1)..(521): unsure at all n locations
atgaggaaaatacggataccaaagtggataaccagcttgttttgatggacgttggcgccgagtatcatggctactctgccgatgttacccgcaccttccctgcaaacggcaagtttaccgatgaacaaaaggctatttacaacgctgtttatgatgcgcaggaagaagtttttaaactgtgcaaggaaggtgttaactacagcgacctggaagtaaaaacccgcgaggtgttatcgtcccgcctgatacaactagggatcatcaagagcgccgctgaagtcggtcgttattatccgcatggggtgtcgcatcatatcggattggatgtacatgataagggcgcttatggcgtaccgttaaaaagcggcatggtcattaccgttgagccgggtatttatattcctgcgggcagcccgtgcgacaaaaagtggtggaacattcgcgtgcgtatagaagacgatgnnnnnnnnnnnnnnnnnnnnnnnnnnnnnnnnnnnnnnnnnnnnnnnnnnnnnnncagg

SEQ ID NO: 171471 - DNA, 1079 bp, Arabidopsis thaliana landsberg; identical to SEQ ID NO: 32651

SEQ ID NO: 171472 - DNA, 989 bp, Arabidopsis thaliana landsberg; identical to SEQ ID NO: 8493

SEQ ID NO: 171473 - DNA, 471 bp, Arabidopsis thaliana landsberg; identical to SEQ ID NO: 70609
  unsure (1)..(471): unsure at all n locations

SEQ ID NO: 171474 - DNA, 399 bp, Arabidopsis thaliana landsberg
tccaactgaatggtttagaatagtcatatgaatatagtgccatatgtcttctttatcgtacttggggtgatcatggggagctttctcaacgtcgtcatctaccgccttcataccgggcgatcgctgggcggacggtcgcactgcatgagctgtgggaagacgctttcctggtatgaactcctgccggtcgtctcatatcttgcattacgaggcagatgccgaggctgcgcgtcctatatcccatcacggtatctcatcgtggagatcctcacggccctcctctttgtgctcgggtggcgcacattctcgcatgatccccttatgctcgtattctcaaacgttctaatcgcattcttcatcgtgatccttgtctatgacatccgtcacaggatcatcccg

SEQ ID NO: 171475 - DNA, 893 bp, Arabidopsis thaliana landsberg
  unsure (1)..(893): unsure at all n locations
cggcttcgtagtgcttacatagctcttcaagcttggaaacaagctattctctctgatcctaataatatcactgttaattggatcggatccaatgtctgtaactacaccggagttttctgttctaaagctcttgataaccggaagatccgtaccgtcgccggaatcgnnnnnnnnnnnnnnnnnnnnnnnnngtatttacctgaagagcttggtttgttaacagatctagctttgtttcatgttaattcgaatcgattctgtggtactgttcctcataagttcaagcagcttaagcttttgttcgagcttgatcttagtaacaatcggttcgccggaaagtttcccacggtggttcttcatttgccgtcgttgaagttcttagatctccggtttaatgagtttgaaggaaccgtaccgaaagagctttttagtaaagatctagatgcgattttcataaaccataaccggttccggtttgaattaccggaaaattttggtgattcgccggtttcggttattgttttggcgaataaccggttccatggttgtgtaccatcgagcttggtggagatgaagaatcttaacgagatcatcttcatgaacaatggtcttaattcttgtttaccgtctgatatcggacggttaaagaacgtgacggtgtttgacgtcagttttaatgaacttgttgggccgttaccggagagtgttggtgagatggtttcggtggagcagcttaatgtggcgcataatatgttgtcggggaagattccggcgagtatttgtcagttacccaagcttgagaatttccctcacccctacaatttctttaccggagaagcgcaagatagagtttgaggttgccggagtttgatgatcggagaaattgttggcgg

SEQ ID NO: 171476 - DNA, 2117 bp, Arabidopsis thaliana landsberg
  unsure (1)..(2117): unsure at all n locations
caagaccttgctactcactttctggacnttacaacgcgtttccgaatgaaagatatggccaagttgactacttcctgggaatacaagcgcaatttcactcaaggggactgttcctctctcaacagaaatatgcagaggatcttcttgctgttgctggtatgcttgactgtgctcctatgccaacacctctgcccctgcaattaaacaaggtatctcatcaagaagaaaattttgagaatccaacatatttcagannnnnnnnnnnnnnnnnnnnnnnnnnnnnnnnnnnnnnnnnnnnnnnnnnnnnnnnnnnnnnnnnnnnnnntcaaaagatgcatatgcccactgtagcagacttcaatctcctgaaacgaatcatcaggtacataaaaggaactatcacaatgggaattactttcaacaaggatacggactgtaccttaagagcttatagcgacagtgattatggaggatgtcaaacaacaagcagatcaactggtgggttctgtacctttcttggaaacaacatcatctcctggcaatcacagaaacaaccaacagttgctaaaagttctacagaggcagaatacagagctctatctgaagcagcttcggaaattacctggctatgtaagcttctgaaagaactcgacattccacttcatcaaacaccggagttgtacggggataatctatcatcggtttacctcactgcaaatcctgcctttcacaagaagagcaaacacttcgcgaatcattaccactatgtgcgagaacaggtagctctgggaacactgcgagtctctcatatctcgaatcaatttcaacttgcagatatcttcaccaaatcacttcctcatggtctgtttgcttctctccgattcaaacttggcgttgatgttccacccactccgagtttgagggggactatcagtgaagatacaaagagatcgatggagaatgagattgaaaggtcaacaaaaggtgaagataacctaatcgagcaaaaggacaagagacttaggtcaaattcagacacaactctaaacggtgtagttccaccaatgttgtctaaagattcagataagcccaagcccaataacatggtctggaagcccaagacgaaacaaatgtccagtcagcctgttagtgtgcaacggtcatctgcaaaagaacaagaagacaaaagtgatgagctggtgattaaggcagctcctaagaagatgctcaatagctccagctgtctcagtcaagaccttatcttgactaataggttcaagtgtttagaggggttaacctaatcctctatgactatataagagaggctattgtaatcgaaaatattaagagagtaataagatgaagaacacttcaatctccttcatactttacctttaaatctctctgcttttaggcacgatttcgaagaaacggagggtagatggagatacaccaaaccttgaaggtgagggttctattaaggtcgtcgaaactcaatcttcagcggcaaaagtttttgacgacgtcgtctacagattgtactctaaggggttggtgagtacggataatgtggcggctggatttggggttgccatttgtgatcagatggatgagttgttgtttgagatgaaggaatcagtgagtgacgttgaaggagttaaggttagggctttgattcgtgggttaagtgaatcactcgacttagggatcagaaagatcgtgatctattgtgatgacaatgagctttaccaaaacgtaagtgtttactttactttggtatacctttttcgtgaatattttggcactttcataataatatatgctttctcaaatttttttatctatatcatctcttgttttgtgacaacggtttccattgtgatgttttggtttaacaaaactgatactgatttacaatgtagataacaagtggtaaatgtaaacctaagcagaaaaaagttgtcaaacaacttataaaagaagttcaacgccttagggagaaatttgcttctagcgaagcaattctggtagccgaaaacgacattaagtttgcttttgaacttgcaagagaagcaattgtttctcaaaccaacagtgccgatgatgatggacatgac

SEQ ID NO: 171477 - DNA, 594 bp, Arabidopsis thaliana landsberg
gtgtacattttccctcattccttgagtttaggagtctccacccgggtcggaaacgagcttggttctaaccagccaaaaagagcgagaagagcagccattgttggacttggtctcagcatcgccctagggtttacggctttcgcgtttactgtctcggttagaaacacatgggcgatgtttttcactgatgacaaagaaatcatgaagttgactgccatggctctgccaatcgttggtctatgtgagctcgggaactgcccgcaaactacgggatgcggtgttctcagaggctccgcgaggccgaagatcggagctaatattaatggagtggcgttttacgcggttggcattccggttggagcagttttggcgttttggtttgggtttggatttaagggactttggcttgggatgcttgcggcgcagatcacgtgtgtgattggtatgatggcggcgacgtgtaggaccgattgggaacttgaggcggaaagggctaaggtgctcacaacggcggtggattgtggcagtagtgacgacgacgccaaggaggatatggaggctgggatggttgataagtagggaggaatgagtcat

SEQ ID NO: 171478 - DNA, 1769 bp, Arabidopsis thaliana landsberg; identical to SEQ ID NO: 29860
  unsure (1)..(1769): unsure at all n locations

SEQ ID NO: 171479 - DNA, 587 bp, Arabidopsis thaliana landsberg; identical to SEQ ID NO: 64419

SEQ ID NO: 171480 - DNA, 473 bp, Arabidopsis thaliana landsberg
gtatcataactcaatgcataggccgtcaggaggatatggggacaaatatgattacgaaggccgctatggagacagagatgaagggcgaagtagttatgggaaagagagagaatatggttacagggatgatgatagaaatagtcgtgatggcgatcgttattctagagactctgaagaccgatatggaagagatggtaacacggatgacgaataccgtggaaggagcagaagtgttgataattacaatggatcaagaggtaggagctcggacagggaacggcctattgaggatgatggccaatcctcatcgcggtatgttgattaaatttataatctccctctttaaattggaccgacaaatcaaagatattttaaggcgacaaatcaacaatattcggatgtgcgattgcttagatgtcctcgaagtaaaaaaagactcgtcttgcgtcctgcggatcataccaaaaatttga

SEQ ID NO: 171481 - DNA, 530 bp, Arabidopsis thaliana landsberg
cctctgtgggaatccttgtgggtctgtctggtcacgtgcttagcaggcgaggaaactccttaccgatgcaacggagatgtggcaaggggtaacctcttgtcctccgtctttatgatcgcggctaataagtcatctgttgagccacgtgccacgaaggtcagtttacacttctctggctattatactacttctgtttatagaccatgcatatgggtcgttgttgtatgggatcttctagtaaaacaatgttggttgggttatactgttgtgggcaggcgatgtttgagagaatgaaggccgaaaaggaagaaggaagaggaggagagaggacgagtgagcaggagctaaggcggaaattggagcagctgagtgagaggctgagcaagctcaacacgtactccctcttggttgaatatattgacgcttatgtctctaacctggcactttgtttatctcggtcagagactcggcgccgcttgttgatcaatgcttttgttgtcttttacgtctcttttggtcccaaaccctaa

SEQ ID NO: 171482 - DNA, 1721 bp, Arabidopsis thaliana landsberg
ctgacgtgagataccaggaaggaacgttcgcgactgcctttcaaaggtacgaagcagatccggagatggaggagaaggtttctaaatggagaagagctctcacccaagtcgctaatctatcacgcaagcattccagaaattggtaaaatctctctttcttttctctacttttatagagtactaagtacaatgttctgctgatttcttgatctaaccttagccatccacaatctggttgatgtatttttttgtgttgcctatgttagcgtggatgaggcagatatgatagccgaggtagttggaggcatctcaagtcgactgccaaggatgaagtcgacagatttgattaatttagttggaatggaagctcatatgatgaagatgactctccttctgaatattggttgtgaagacgaggttcatatgatagggatctggggaatgggaggcataggcaaatccaccattgccaagtgtctctatgatcgattttcacgtcaatttccagctcactgttttttggaaaacgtgtctaaaggctatgatattaagcatctacaaaaggaattgctttcccatatcctctatgatgaagatgtcgagttatggagcatggaagctggatcccaagagataaaggagagactcgggcatcaaaaagtttttgtcgtgcttgataatgtcgataaagtggagcagttacatggcctggcaaaggacccaagctggttcggtccagggagccgtatcatcataaccacacgagacaaaggtttgctcaattcctgcggagtaaacaatatatatgaggttaagtgcttggacgataaggatgcgcttcaggtttttaaaaagttagcttttgggggaagacctccttctgatggttttgagcaactctttatcagagcttctcggcttgctcacggccttccttctgcccttgtagcttttgcctcccatctcagtgctattgtggccatagatgaatgggaagatgagctagctctacttgaaacattccctcaaaaaaatgtccaagagattttgagagctagctatgacggtttagatcaatacgacaagactgttttccttcatgtggcatgtttctttaatggtggccatctccgatatatcagagcatttcttaaaaattgtgatgcaaggataaatcacttagcagcaaagtgtctcgtcaacatatcaattgatggatgtataagcatgcatatcttgctagtacaaactggaagagaaattgtgcgtcaagaatccgactggaggccttccaaacaaaggtttttatgggatcctacagagatccattatgtactggacagtaacacagtaagttctttcaaaaagtaaatcttagaattgctcttgttttccactctaatcttgatggtttttggatatacatgcctttcttcagttgttgacgcttttatcaacagggtactcgaagagttgaaggcctgtcactgcacttgtgtgaaatggctgacactttattattgaggaatagtgtttttggccctatgcataatctcacatttctcaagttcttccagcacttgggtggtaatgtgtcgaacctgcagctaatttcagatgattatgttctttctcgtaatctgaagttactacactgggatgcctatccattgactatattgccacctatctttcgaccacacaccattattgaactcagt

SEQ ID NO: 171483 - DNA, 508 bp, Arabidopsis thaliana landsberg; identical to SEQ ID NO: 57829

SEQ ID NO: 171484 - DNA, 344 bp, Arabidopsis thaliana landsberg
  unsure (1)..(344): unsure at all n locations
aatcattcgccatgccagacccaaacaatccgactgaggcgcccctctccacaaaatctcacgtcctagagaccgctgccgctgcaacccagaacttcacaccagtcaaccagannnnnnnnnnnnnnnnnnncttccacgtctacgctgacgaccccacacgctgtgtcgatgcgaaccattactgtacgcatttgacagagggtacgtctcccggcctcatctaacttttgatcagcttttgaacaaggctgttgtgctgcgcagatatccgccaatgcctcatctacgacagcccgaacaagggcgccccgctaatcggggtcgaatacatggtcttcccc

SEQ ID NO: 171485 - DNA, 577 bp, Arabidopsis thaliana landsberg; identical to SEQ ID NO: 81056
  unsure (1)..(577): unsure at all n locations

SEQ ID NO: 171486 - DNA, 939 bp, Arabidopsis thaliana landsberg
agaaatgaatgatgagtacggtaaggacctagtccagctaggtgggagactaatgtcgataataatcgaaaaatttatggctaagagcagcacttcttcaagaagcatttggtggagaagacgttggtgcatgtttgagggttaattattacccaaagtgccctcaaccggagcttgccctcggcctctcccctcattctgatcccggcggcatgaccatcctcttgccggacgatcaagtcgtcggccttcaggtccgtcacggtgacacgtggatcactgtcaatcctctccgccacgcttttatcgtcaatatcggcgatcatattcaggtaacctcttctcctgaaaatttattctttttttcttttcctttttacgttatatacttacatgaaaatgttgacataaaaggtaaaacactaataattgtcatgatatagttggtactgaactactgatagaggatcatattccttagttgtagttccacgttttagacatgacttagaatagcaataaaaggttaaccgtttcaacttcaggccaaaattttaaataatactaagtttttccaaaaagttgtaatgacttatgtcattttcgtatcgtcaagccatcaaaatgatttgattttatacaagactaaattaaatataaataaatgcagaaatatattttgtggttttaacttttagagtaccatcgtagacaacaatcatgttgcaaaagacaaattgtccgaaagtgcatgcacaaattgagcattattaacgtttaatgaagtgcaatatatgttagtcatgcaatagatgcaattttcaatactaacgtatatgtttctcttttgaaaaccggcagatactaagcaattcgaaatacaagagcgtggaacatcgagtgatagtgaattcggaaaaagaaaggggtttcactagc

SEQ ID NO: 171487 - DNA, 579 bp, Arabidopsis thaliana landsberg
acgccatacttaggatgatcagttttcagaatgaggaagtgcttgctaaaaagttcagaattagactaaggttaaacactgttccactctagagagaacctcatattcaatcaaaagctatatgtagagttaaaaatttggaatgaaaatgaatcagcggaataaattcaccggagagcaaaatgccgtatggaaaagaggcgcatgatgagctactcaagatggttgaagggaaatgcttgaaggtgttagtatatacagaggatcgttatggaagatgtgtaggagatatatactgcaatggaaaatttgtacaggaagtaatgctaaagaaaggtcttgcttggcattatgtagcctatgacaagcgtgcagagctcgcaaaggcaagcttttataaacctttgtgcttttcatttacaattttctttgattattccttctgatgtttaacggtttgttttggtgttttgaattcagtgggaaaatgaggctaggcaaaagcgcgttggcttgtgggcatcttctaatccagagaagccatgggagtggagaaagaacaaacgtggaggcaattaa

SEQ ID NO: 171488 - DNA, 309 bp, Arabidopsis thaliana landsberg
agcgcattgtctcgactgatggtggtcagcgagaactacccgcagctcaaggccgacggcctgttccagaacctgcaggcgcagctgtaaggcaccgagaaccgggttaccgtggcgcgcaatcgctacgtgcagtcggtgcaggaatacaactcgatgatccgcaccttcccgaacaacctcaccgccaagatgttcggctacaaggtgaagccgaacttcagcgtggagaatgagaaggcgatctccactgcaccgaaggtggatttcggcacgagcgcaccggccgcgcccgcctcggcgcattga

SEQ ID NO: 171489 - DNA, 503 bp, Arabidopsis thaliana landsberg; identical to SEQ ID NO: 71815

SEQ ID NO: 171490 - DNA, 469 bp, Arabidopsis thaliana landsberg
atgaccctgtggggaaagactgggacagcagttttactatataatacgatacgcatgtttgtacaagaagaaatgaaccgatacagccgccagctgatgctgcctgagctgggcatacagggccaggaaaagctgaagcaggccagggtactggtgatcggcgccgggggcctgggttgcccggtgttgctgtacctggctgctgcaggggcaggcaccctgggtattgtcgatgatgatacggttgacgaaagcaacctgcagcgccaggtgttgtacaccactgcggatgtggggcgtggtaaggctgcagccgcaaaggccaggttgcaggcattaaacccttatgtctgcatcacagcatatcccgggcgcctgacggaacagaatgtgcaggcgctttttgcaggctatgacctggtggttgacggctcggataatttttccacccgctacctggtcaatgatg

SEQ ID NO: 171491 - DNA, 1419 bp, Arabidopsis thaliana landsberg
gaatctctggatttgcaggcattgatatagagtctcattgccagagctccacatagtgaactatctaaacggtttcagcataattgctttatggacaaccttcatgaaagctataagaatggtcttgttgagtatggtttgagggtgcggttacaagagcaacttctttcaaagattttgaacctcgatggcattaggatagcccatttaggtgtgatacgagaaaggctacatgaccaaaatgttcttatcattcttgatgatgtggagagtctagatcaacttgaggctttgactaatgaaactagttggtttggtcctggaagcaggattattgtaaccacggaagatcaagagcttttggagcaacatgatatcaacaatacataccatgtggatttcccaactataaaagaagctcgtaagatcttttgtagatctgcttttagacagagttctgcaccatatggttttgaaaagcttgtcgaaagagtgttaaaactttgcagtaaccttcccttgggtctccgtgtcatgggttcatcattacgcagaaagaaagaagatgactgggaaagtatattacataggcaagaaaatagccttgatagaaagatcgagggagtacttagagtcggatacgataatttacataagaacgatcaatttctttttctcctgattgcattcttcttcaactaccaagacaatgatcatgtgaaagcaatgcttggtgacagtaaattggatgtcagatacgggttgaaaacccctcgcatataaatctctcatacaaatatcaatcaaaggagatatagtgatgcataagttactacaacaagttggtaaagaagcggttcaaagacaagatcatgggaaacgccaaatcctaatagactctgatgagatttgtgatgtcctcgaaaatgattctgtaagttcatcttcgttttttttaaaatctatctgtttaaccatgtcatttcgaaaatactctgcatatcttattaatggtgctaacatttacttttattttgaaatttgtttagggtaatagaaatgtgatgggtatatcttttgatatatccacactcttaaacgatgtgtatataagcgcagaagcttttaaaaggatccgtaatcttcgttttctcagcatttacaagacaagacttgatacaaatgttagactgcatctatccgaggacatggtttttccacctcaactaaggttattacattgggaggtatatccaggaaagagtcttcctcatacatttaggccggaatatcttgtggaacttaatttgcgagataaccagctcgagaagctttgggaagaaatccaggttggtataaatttttgttttgtccagatgaagtaattacttgtcaccatgagctgaggatctttactcc

SEQ ID NO: 171492 - DNA, 900 bp, Arabidopsis thaliana landsberg
gtaacagaattggtagatggagtgttcattggattttcattgaatcacgctgtgggagatggaggttccttgtggcattttttcaactctttgtcggagattttcaatgcacaagaaaccgataacttgcttctcaagaatcctccagtcctttcacgttggtttcctaaagtgtccggtcctatgtacaaccttcctttcactcactctgatgaattcattagtcaatcagaacgtccggtcttgaaggagaggatgttccatttctcatcagaaacagtgagatcgctgaaatcaaaggcgaatcaagaatgcggaacaacaatgatctcttcttttcaggctctgaccgcattgatatggagaagcattacaagagcaagaaaactaccaaatgatcaagaaactacttgcaggtttgctgctggaaacagatcaagaatgaatccaccattgccgacgaatcaatttggagtttacatctctcttgtgaaaacgactactaaaatcggtaatctactggagaatgagtttggatggattgctttgaaactgcatcaagctgttaccgaacacactggcgaaaagatctcttacgaaatagatcaaatgttgaagtctcctttaccgttgcaagcatatcgactttccaatttgaacatagttcacatgggaagttctccaaggtttaacaagtacggaagcgagtttgggatggggaaagcagtggcggttagaagcggttatggtggtaagtatgacgggaaggtatcagcttatccagggagagaaggaggagcaagcatagatttggaagtatgtctacctccagagtgtatggaagctttggaattagatcaagagtttatgtctcttgtctcttcttcttcttcttcttga

SEQ ID NO: 171493 - DNA, 1813 bp, Arabidopsis thaliana landsberg
atgtctgaagaccaagcaagggattaccctccaagactttacccagagggggattctaatctggaggttaaagccattaatcacaacataaagctcggagatttccctggaattaaagaatcaataggacaagatctatgggatgaactgaaagagacaccgcttggattaattgctaagcttgttgatagtcattttgtatggtctcgtaagactctacattatctactatgcagatagttgagaatactgaagaaggagctttggtgtctcgtggctggtcaacccatccggtttggattgaacgaatttcgccatatcacgggattaaacacagatccactacctacaaaaaagtttgagcctgaagcggactacaaagcgttctttagggaattgcctgtgccaaccggtgaaggtcctaagttagaagaacttacggaaggcttagtaatgtgcagagcatggcctcctaaaaagcgtagatggtttgggttattgactcttttatccattggactttatggcttgcatcctaactctaggataccattagagagtgccaaaagagtttttgatgatgaagccatgaagacttatccatggggtcgggcagcatttgaagcccttgttgtttctataaagttgctgaggcctattggcaagacgtacaccgttagtggtatggctttcgtgttgcaggcttgggcgtatgattcaattatcaccatcggcgagcattttgggaacgtagttaaagcggatgagattccgttgcttagatggggaggcaacagtactcgtgcaataatagaatcggccattgctgaagataagtgaatggtggtgaggtacggttttggctctgttatgatagttattgactgagttatgttctgtttttttatcaaatatttatgttacggctgagttatgctcttttatcactgagttaatgttttgtttttttgtcaagtatgttatgtgacggctgagttatgatctgtgaaggctgagttatgttctttttttttttggcaaatatgttatgtgacgattgagttatgttctataatggctgagttatgttaagtgacggctgagttatgttctgtaatggctgagttatgttaagtgatggctgagttaaacatactgatgggttttattatctcttgtgttgtagctgcgtgttcgtaaaatggttgaaaaggctgagttaagcaagctgtttcattcttggccagaccaattagaagacccacactcgataacttgatccaagacttacacgagcttacgcttgttaaaggttattgggatgtgaagacgagtgagaagaaaaagaaactcgtaaaagataaagaagcggatgtgtctgaatctcccgcaaagaagcagaaagtctttcacagtgagggtgttcattctcctgagaaagatgcacaatagatgaagaagaataagaagaaggaagtggctgtcgaatctgatgagggcaacgaagagcaggatgttcagggagaacagcagtcgctcgtggatgtggtctccaacttgatctctcccttaaactcaaggtttgacaccgttgataatagcatcaaagaaatgtcctcgcgtctggatgtgattggagttcaagtagaatcgaggattgatgcaaagtttgaaacaaggtttggatctaatgagaacgatgtcaaacaaattaaagagcatctgaagggcatatctgactcagaattaaactctactagttatattagagatatgtttttacccaaaacacagcaaggctaccctaagcccc

SEQ ID NO: 171494 - DNA, 447 bp, Arabidopsis thaliana landsberg
  unsure (1)..(447): unsure at all n locations
tttccatagctaaaacactctctctcgttctaatgacgtttgtagattctgatatgtatgaacttttcatctctggctgccctttgcttgaggaattcttactacgtaatgatgaaattgaaattcccccggtttggaatgcgctagtttcgagtccttccatcaaacgactaaccatcgttcaccattttcccaattaccgtgaggcacacgatggttgttggttccggacaccaaatctcgtgtaccttgactattctagctatgtcccggattggtatgaggttgatttaggttcccttgtagaagctggtggttatggtgactgtgatagtgtttatgatgaggaggaatatccagatgnnnnnnnnnnnnnnnnnnnnnnnnnnnnnnnnnnnnnnnnnnnnnnnnttaaaacccttcacttgtctcctgattctctcgagg

SEQ ID NO: 171495 - DNA, 499 bp, Arabidopsis thaliana landsberg; identical to SEQ ID NO: 61608
  unsure (1)..(499): unsure at all n locations

SEQ ID NO: 171496 - DNA, 647 bp, Arabidopsis thaliana landsberg
ctaacctttacactgtttttttttttagaatccaagaaagctgtttctttttttagaattgttcagcgaatatattgtctatttgcagcttcaaccaacaatagggaagtgtagagaaacaatgaattgtattacacttaaactgttgtctcaaacgcgttgggaaagccgcattgatagtcttaaaccaataagatatcaagcttcaaagatacgagatgcacttttttatttggcagaatacagtgataatccaagacacaggagtgatgttgagtctcttgcagagagtgaaacacatggaattggagggtttgaatttttatttggaatggtaatttggtacgatttgctagctgctgtgaatatagtaagcaaatccttacagtttgaggatatggatcttgaggttgctatttttcagttaggagggcttgttacttatttgaaaaactactgagaaagccaaagctgaagctacacatattgccattgagatggagattgagcaggtctttcctataaaaccgaagcgcttggtgaaaaagaagaagcaatttggtgaggatgttgagaagattgatgaaagtaagactgcaaaggagagttttagaattcattacttcatgaatataatggatcaagct

SEQ ID NO: 171497 - DNA, 274 bp, Arabidopsis thaliana landsberg
gctatggctgatcggaaaatggtgaatctggcaaggcttggatgtcacatctgaggagaatcgtttatggagggggaggcagcggcgatgaggattatcgagagtgtcttgagaatatggagaaagactggcgattgtgtgcgcgatgaaaacgcttaacggtgtattatacattttaactccaccggaatgcgttgtgtttgtggcagcggcggctacgtttcaggttcagttacgtcggtggggaaaccgaagacattatgtttctcacttc

SEQ ID NO: 171498 - DNA, 249 bp, Arabidopsis thaliana landsberg
atgcgcattgcagtcatcggcggcaccggcaaggaaggcggcggcatggcgctgcgctgggcacatgccggacacgaggttttcatcggctcgcgcgacggcgccaaggcacaggctgccgccgtggaactcggcgccgcagccggccgcacgattcagggcggcagcaacgcggacgcgatcgccgccagcgagatcgccgtgctcagcgtgccgtatgccgcgcacgccagcacgctcaatgagctg

SEQ ID NO: 171499 - DNA, 2653 bp, Arabidopsis thaliana landsberg
acagttgtacaaatgttgcaaacacgcaagaccaagtctacccttcacagcagcagaatcaacccaagccctttattccatacaaccaaggtcagggttatgttcctaagcagcactatcagggcaactatcagcagcaacttccaccacctgggttcacacagcagcaacaacgaccagctttaacaactccagattcagacttgaagaacatgttacaacagattcttcagggacaagctgtaggtgcaatggatctcgccaaaaagatggcagaaatccacaacaaggttgattgcactttcaacgatctgaatatcaaacttgaggcacttacctctaaggtcagatacatggaaggacaaacagcgtcaacttctgctccaaaagtaacaggacttccaggaaagtctatacagaacccgaaggaatacgccactgctcacgctatcaccatccgtcatgatcgagagctgcctactcgacatgtctccacatcaatcaccgaggacagtgatgttcaggacggggaggcttctactcagattgaaatttcagttgttggactcgacctttcaactggatcccgttttcaaactcagtccaacctagacgagaaagcagccatcattgagattttggtggggcgattcaagccagcaccattaccttcacgtgctcttccatcgaaattcaggaaagcatggatagaaagatacaactctcttgcagagaagcagcttaatgagatggaagcggtgatgcgtctaatagaagttctcaaccagatcccggatcctcacaaagatgtgagaaagtcaattctggaaaggatcaagatttatcaagattcagaagacgaatgtgatgttaatccgtctaggaccactattaagaggagtgctcaagaaaaactggaagatccaggaactttcactctaccatgttccatcggccaattggttttcagcaattgtctttgtgatttgggagcttcagtaagcttaatgccactctcagtggcaaggaagctggaatttactcagtacaagccttgcgacctgactttaatccttgctgataggtcttcaagaaaacccttcggccttctacaagatctgccagtaatgattaatggagtggaagtgcccacggatttcgttgtgcttgatatggaagcagaacctaaggatcctctaatcctgggaagacctttcttagcctcagtgggagcgatgatagatgtcagagatgggagaataagtctcaaccttgggaagcacatcaagctgcagtttgacatcaatgaaacttcgcaaaggtcagctgtagaagaaaggataaaggctcaacctcagccttcgaattcaatcaccagaccaagcacagcctctacacccgacttgcgagatctcaaaaagaaatctgatgagcaagaagagaccatagagaagctagctcagacagttgaggaacttaagagtaaactggatcagatgcaagagatagctcaatccaaatgcgagaataacactatcccgagaaaaaagattacttcaagatggtctgaggagatagatcatccaccagaagagtaagaggcctatttcgaggaaagaagaattgagtattcggctcctcatctctcaagagaggatgctgaatatgatgatgagatcagagaggactatgcagaccctctctatcacccattttcttcttaatgagtgtgaggagtcaagctagagactttaaacaagctcacttgggaggaattctcaagactgtttctgtaaataaaacttttattttctcgttatttttgatttgtttttggttgtgtttgtgattctcaggaacagagaaacaacatggaggtagagtaaaaatttaaaaattttactctacagagcaacagcggatcgagtattccagaaattcaagaatttgaaaaaacctctgttgcactcagaagccatgaggtcgagtaaactggtcgagtattagtgatgattctaaaaaccaaaattttgaaatcatatctatgctcgaccaacagaagctacagagacttacagggagtttaacaagtttacagatgattacagaaggttctagtcaactgaaaacagtgcttcaggacaaatagacagaacgtggcccaccacctctcacctttgttcccccacgcgttttaagagataacaaaatctcttccttccttccccaccactcgatctcaccttatcctctcccaccgacatcatctctctccctctccaaacactcgaccaagaaaattcactctacctcacgtttctcacttgaccaaacctcaccatctctcttcctctccaaacacttgaccgcaccatcacactcgacctcaccattcactcgatctctcccctccggcttcaccatccctcgctgctttgtcaccctcttactcgaccaaacctcactcgtcatctctctcaccgcctcccattcactcgattgcaacgccctcttctccattcgccgcttactcgacctcaccgttctcttccttctcaccactcgtcgttcactcgaccactccgcccattacatcgccggaagcttcaccgtctcatcgtcgtctccttgtcactcgacctaacacgacgtc

SEQ ID NO: 171500 - DNA, 621 bp, Arabidopsis thaliana landsberg
attgttaccaaagaagttggagttgagaagcaaagcctaaaaccattacttgaatcaagcgttgagccaatgcactgtaagtcttctaatctttcaaaatccagaggagtcacttgttataactgtcgtaagaaaggacatttagttgcaacttaccttgaaaaacttgagctaactaatacttcattagaatcgaaactgagctcaccaaactcaagtagtgaagtagttagtcaaggtttagaaaattctagttcttgtgtcatgcacttgttcttgtcaaaagatgttgattcaggtcatattatggagcatgaaaatgacaaaattgaagaaagcacaaaagaggagaatcatcatttggtgtcaaccacttcacaagcttgtcgactggctatgtttcaaaaatcaccatcttgaacaagaaaggaccgccatatgtatcccaaccagttctaaaccgagatttacctaaagaagaaccacgtcaattaggaggattcactcaagttgaggccgtcatttgttcacaaacattcacctatagctgaatgcaatattgtttccatggataaaccaccagattgctcaccatcattaatacttgatgtctgttcacct

SEQ ID NO: 171501 - DNA, 669 bp, Arabidopsis thaliana landsberg
acaattcagaatggtcaagaagagaagcttgggatagaagaagttacagatgaatgcaaaacgttctactttgcagctaaggaaacaactgctaaccttatgacgtttgttttagtcctcttagctatgaaccaagaatggcaaaacattgctcgggaagaagtcatatgcgttctcggacaaaccgggcttcctactctagacatcttacaagacctcaagactgtaagtcctcaagccccactcaaaaatggtttcaggaaacactgtttcttagcaatttcttgtttttgttaacagctaagtatgataatcaatgagactctccggctctaccctccagcaatgacattaaaccgtgacactcttaaaagagctaagctaggagaccttgacatccctgcaggaactcaactctatttatcagtagtcgcgatgcaccacgataaagaaacatggggagacgacgcagaggagtttaatccgcgtaggtttgaagatcctaagaaacaatcagctctgcttgtaccgtttgggttagggcctaggacttgtgtgggacagaatcttgctgtgaatgaggctaaaactgttctggctacgatcttgaagtattacagtttcaggttgtctccaagttatgctcatgctcctgttttatttgtgacg

SEQ ID NO: 171502 - DNA, 764 bp, Arabidopsis thaliana landsberg
ttgatcattcatctcaacaggaagtgtctgaaacgattatataatactaatgtagtgatgttgtcaatttacacggggtttaccggattttatacaataatttagcgcatatttaagaatcctctctgggtttatgcagtggttttgctgcatatttccagtgtcacaagtgttacgagcttctaaattgtaaaacaaatgtcataagtacttcaaaccattggtacaccttctgattctaaaaaattgccgctccatggatcaacagaaagagatttgttttgtctttgagtattgtttggaccacacaatgcagaaataagacaatagggcctgattagaaaactagaatcatcggcccattttgtattgggtcttctacatacactatagattgacatgaagtgtctggaactggaacagtacagaagacccttgaattctcaaaccaagcttatgtgtagaccattctcaatttctctgtcaagaatctgtgtcactattcacttcattacacgcatatatatattcaccagagacttgcaccttaaccttcatagagaagaaaactacaacaaaggtcatcaccagaggcttgataatgtggatctggactctgtcaaggccaaacttgaaaacggtgcctcaccattaccatcagtaagctttcccaagacaaagtcaaaggtccaagggttgttgatattgcgttcgaagaggatcaaactggcaaagtcagttctgcttagtcacaaaagaactat

SEQ ID NO: 171503 - DNA, 698 bp, Arabidopsis thaliana landsberg
  unsure (1)..(698): unsure at all n locations
caagaaaaagatgtaccggcgaaattttgagaactcatgaagctatacagtgagtgagacaatcttgagtttgttttttgtttcttgtaaatcaacttgctttctctatttatgttgtagctttttttctatgtctttgnagggatgacaggtcgttggataagtcagtttctacactttcttctacaaggagctctcaagagatggttgatggctcggaaacaaacccgaggaagaaagtgtttatggtaatgggaatcaataccgcatttagcagtagaaaacggcgtgattcagttagagaaacatggatgcctcaaggttttgttttaaacttaatgatcttatatagctacagcttcttgcatctagttaagagctgtggatttttcacaggtgagaagcttgaaagactggaacaggagaaggggattgtgatcaagttcatgattggacacaggtgaagcttcctctctttctctcagaggttcatgtattctataaatttcatgtatcttagattgagattgcctagtgtatacaaatgtggtggcagtgtgccgtccaaaagtatattgaatagagctattgattcactaaatgctcggctcccatccttccttagcagtttagcgcgcttgaacatttagtagtactagagccggtgtccccctgttcagcccgcgtgttgctcccac

SEQ ID NO: 171504 - DNA, 180 bp, Arabidopsis thaliana landsberg
gccttatttttatctttaacaaccaacacgattggtcgacatttgtagcggaattgacttcctaccgatctttagtttgtttttcccttatttttatattagatttctttctcgtagttttactacctcgagttgattgtcagctaaaaaagctcgggttcaaatagttttttctttcgt

SEQ ID NO: 171505 - DNA, 384 bp, Arabidopsis thaliana landsberg
tatggcgataagttcggaatcccaagtccccctttcgctcccgatcatcgacttctccaatccagatctcaaaccggaaacccccgagtgggacttggtgagatcccaagtccgaaaagccttagaagagtacggatgttttgaggccttattcgatggagcttccatggagctacggaaggccttgttcgagtcctccaaggaggttttcgatttgccattggagaccaaactgagtacaaagacagacgtacattacgaaggatacttgacgattccgagggtccctatacaagagggcatgggcttttatggtatagataatcctaatgttgttaatgacttgactcacaagctttggcctcaaggcaacatcttcgtcgg

SEQ ID NO: 171506 - DNA, 239 bp, Arabidopsis thaliana landsberg
aaataataaaaagtactcacatgtatcgggttcggttcggataatacccgatacccacatttatttgaaaacagaatatgatcgggtaattagccgaaaccgaagtataacaagtttggatatttcaggtcgggttcagttcggttctacggatttgggtattacgcccagacctaccctggaacatattaaatgtaatattttttcctttttttagtttttaacataatagctctttt

SEQ ID NO: 171507 - DNA, 770 bp, Arabidopsis thaliana landsberg
catgcaattatcctatatattctaactcattctacagttgcatggaatgtgatgatttcatccttcataaaaaatgtgctgacctcccaaaaaagaaaatagatcccttctacaacatgttgactactttaatcacaaatgatattcgcataagcatttgcaatgcttgtcaaaacgtttctcaaggttttacttacgtaagtgatgatcataagattatcttggatgtgcgatgcggttctatttcggaaccttttgtccatgaaagtcatcctcttcattcgttatacatcagccgctcaacagaagaaaagttttgtattgcttgcggagataaggctactatggttttgagttgcgaggagtgtgactttattttagacattaaatgttctaatttgccaaagatggttaaacacaaaaatgataaagaccatttgttgtccctatgttacggagaaaaaacaagtgagcagtactggtgcgagatatgcgaggaagcactaaacgcaaagaaatggttttattcatgtgatgattgtgacattacttttcatatcaaatgtacgcttggagacttcgtagggatgtatcaggaagctaaggatgagtcattccaaacttatatgattcttaataatcatataaatcgaccagtttgttgctgttgtgagtctcgctgtcaattctcttccatcttaaggttttatggaaaattaatatgttctttacaatgtttgcaaaagaagttccaagaattacatgatgat

SEQ ID NO: 171508 - DNA, 300 bp, Arabidopsis thaliana landsberg
atggctcaagtttgtcacacatgtagacatgtaacagccgtgatccattgtgttacagaagctcttaacttctgccttacatgtgacaaccttcgccatcataataacatacatgcaggacacgtacgttaccaactttgcgataactgctcgatgtatccgtctatacttttctgttatgatgacgggatggttctctgtcaatcatgttattcgcacccttacaattgtgccactaatggccatcaaacctcagtcgtctttcgctaccttgcatcatctaccccatgatcatgccca

SEQ ID NO: 171509 - DNA, 498 bp, Arabidopsis thaliana landsberg
gactcggagtcgattctgatttcgccggacgccaagtttttttatcgtgttgcggcggcgatggcggagcgcgtgacgactctgccgcgcgagcagatcatccgagcgtcgattgccgggcgtggtgccttgattctggtgcgggatctcgacgaagcctgcgtggtctcgaatcagatcgcgccagagcatttggagttggcggtcgatgcgccgcgggcgctgatcgccaaggtccgccatgccggggcgatcttcgtcggccgctacacgccggaagccttcggcgattactgcgcggggccgaatcacgtgctgccgacgtcgcgtgccgcacgtttctccaatccgctcggcgtctacgaattccagaaacgcagcagcttgatcgaatgcacggtcgacggcgcgaagaccttggctcggattgcaggacgcatcgtggacgccgaaggcctgcacgcgcacgcgcagagcgcgcgcgatcggtcgtaaaca

SEQ ID NO: 171510 - DNA, 488 bp, Arabidopsis thaliana landsberg
gacatgtaccgcaagctgctgtccattcccgacgccctcacctggcgctattacgaattgctgagcggcatctccaatgaagaactggtggaacgccgggcgcaggccgagcggctgggcagccctcaggaagccaaaaaagccttcgcgctggagatggtgacccgctttcatggtgaagaggcggcgcaaacggcgccgtcctcggcgggcaatctcacggcgctgggcgcgattccggacaatgtgccggaggtggaagtggccctggaggacggtaacgaaattcatgtggtgccgttgctgcggctggccgggctggcacagaacggcaaggcggccaaggacgtgtttgcccgtggcgcggtttacgtgaatggcgaacagatcaccgaggatcgcactttcacgcgcggcgagagcgcagtgatccaggccggcaaaaagaagatagcccgagtggtgattcggtagtagattggtgctcc

SEQ ID NO: 171511 - DNA, 530 bp, Arabidopsis thaliana landsberg; identical to SEQ ID NO: 14367

SEQ ID NO: 171512 - DNA, 521 bp, Arabidopsis thaliana landsberg; identical to SEQ ID NO: 79486
  unsure (1)..(521): unsure at all n locations

SEQ ID NO: 171513 - DNA, 225 bp, Arabidopsis thaliana landsberg
cggatttacgttttcggaaggaaaattacgggtttatgtttttggtggaaaatcacaggtttacgtttttgacgataaaatcatgcgtttacgtttttggcgggaaaattacggaaatacgttactggcaggaaaattacgggtttaagttttttggtggaaaattacgagtttacttttttctcaatttcatcgcttgtatatttaagaaatttggaaaaatat

SEQ ID NO: 171514 - DNA, 620 bp, Arabidopsis thaliana landsberg
cttgggcattgtctacagccagggagttctacgccacccttcaagttccacgggctcgccgaagtccatgagacagtggcgcaaagatgtcgaccgtctcctcagcatggcgcattctggctcggccatgcccaggcccaagcctcggtcattccggcatcaacacaaggcatcgacgtatgtgcactcaccctcagtgaagggcgcacggactgacaacctgcgggcggagctcaaccgcaggcgtgcgtgcgaagatgctccaatctctttggagaggcctgatgacctgtgggcagaactcaaccgtaggtgtacgggcgaggacacacgagtctctctggagagggcgcgtgagtgctggcaaaacttcgagggtcgcaacctcgatcaagacttcgctctagttgcgccacaaactccaaggggcgcccaaatccagtcgggcgtcccattgttcggcgtgggctgtgccgcactagcggatcatctccgcgcggcgacttggccacccaagttccggccacacctgccagagaagtacgacggtacatcaaacccgtcggaattcttgtaggtctacgtcaccgccattacggcagctggtggaaacactgctg

SEQ ID NO: 171515 - DNA, 718 bp, Arabidopsis thaliana landsberg
ttgttttgcatatttaggcatttaggatgatcttgcattcgcattgcatgttttggtgtgttttcaggtgcaaaaggagcttaaaaggactctactcgactcattcactcgatccaggcagctacagaagaggcatcattctactcaacctctttactcgatccaggatgccacataggaggctgtagtttactcgatcctcgtactcgatcaaggcaatctgagatgaagcagcagattcatctactcgcccctcttattcgatcaactactcgatccatatactcgaccaaggtgaccatctctacaagacttgttgagctatcaaagcgtcttcgatcctcctcattccccactcaaccagacatctgagcatacagataggagaggatgaagcatctagtcgaccaattgatcactcggagcatagacacaaaggcgcagactttttgcagcaccctctttactcgatccccaaggtcgagtattcgcccaaaccgcctcaagtctcttgtcttctagtgaatctagggtttcaacattttagtataaatagatcactttgggatttgtccaaaggatctatgctttatctattagtttttctttgtgtttatgaatcttgaaactttaattactcttaatctatttcgtttttgcatttgattgtttaagtatagttgtttagcttgtttagatctacattttggtataattt

SEQ ID NO: 171516 - DNA, 834 bp, Arabidopsis thaliana landsberg
gcggagaagaagaggaaggcagcgaagacgaagaaaccatctcttaagagaaagaagaagaagctttcgctgcaattgacctcaattcattcacttcccgatgatgtgctattgacgtgcttagcacgcgtctctagattgcactacccgactctctcccacgtctccaagagctttcgatctctccttgcttcaccggagctacataagagtcgatcctctttaggccgcaccgagacttgtctctatgtgtgctttgggtccttcctgaacctgaccctaaccctcgctggttcactctctgcctgaaacctaataagaaaaagaagacaagtgggtatgtattggctccaacctcatttcccattcttcttatgggatatgggactatgataatatgaccgtacaagcagtggttaatgaaaaggtgtcgacatgtttggattaactaatggtttggcttacatacctaaagaaggacaatgggaaacattatggggtcagatatcgagttggggatggttttctttttgcgtgattgaaaaggtattttaccattatcgttgttcaaatggtatgatacaaagggaggatgttggatagagttgaaggctttgacaggattgccaaagtttgaaagttatggttgtgttttgttggtggattatggtggaaagatggtggttttatggtctgagcttgtgcttactaccaatggctgtacgaaactaagaacaagatgatggtgaagagatttgggggatggtcgagtggtgtgacgcggtgcttaccgtcctaattcttttgaatcagagtatgatcttgctgcaactg

SEQ ID NO: 171517 - DNA, 464 bp, Arabidopsis thaliana landsberg
gacgcttctggcgaggcgcgcgcgaggcgctgatcactgccttcgccaccagctcgagttcggcgaccctgcccgtcaccatgcgttgcgtgcagacacacctgggcgtgcggcaggatatcgcggggttcgttctcccgctcggggccaccatcaacatggacggtaccgccttgtatgaagcggcggcggcattattcatcgccaacctggtgggggtcgacctcagcctgtcgcagcagctcatcgtctttttcacggccatgatcgcctcgatcggcgctcccggtatccctagcgccggcatggtgaccatggtcatggtgctgcaatcggtcggactgccggccgaggcgatcgccatcctgttgccgatcgaccgcctgctcgacaccttccgcaccacggtcaatgtcgagggcgacatggtcggcagcctggtggtgcagaagctcgttcgatcg

SEQ ID NO: 171518 - DNA, 2114 bp, Arabidopsis thaliana landsberg
atggcatcatcacaaagatatttcgctctcctagctcttttcgcagtctcactaaaattttgttattgccaaaatgagactatagatgtagctggatggggaaccgccggagttacttggtacggtgaaccattcggcgccggtagcaccggtacgtaataatattacatatttctaataatatatatacataaattcttagaatagtaaatttatttatatgatgcttaaatgtgtgtatatatatatatacgtgtgtgtgtgtaggaggagcttgtgggtacggttccgcggtggctaatccaccactatacgcgatggtttcagccggaggtccttcgctgttcaacaatggaaaaggatgtggaacatgttatcaggttcgtatgaatgtatatagggcaagagcgtttgtaatatatgtattgttgatcagctttattaatgctttttaatttctgtaatgtattatttagtaatttattatagtatgttcatctaagaggatacaattttttttatatagctaaacttgttcataaaacatgataaattgagtatatataattatatattcaataaaatgaccagttattatatctttgaaaaatggtaaactatgtttgacatatttaattaatcagatagaatgaacattaactatttggtttggaaaaaaattgacgtagcatgcaagatcggaatgtatatatatattatatggttacaacaagattttacttgtatcaactaatatagtatactagataaggcccgcctaaataggcgggtgtatgatataaatttatttaaatatttatcaataatatttaaactttatatagtaaatagtaatctacacactttttttaatatttaatatagtaatttttgtattacataaaattttaatcatacacattcaatttcacttatattttaactatctatttcatcataataaactattttgttatttataacataaaaactacattcggacactctgtggaaacgacatcccgtttgtatcctctaacaatgtcggacttacaactgttggacaaacatcaaataaatataaaccgagcagtaattaaaacgcatagtttgctaatccattcactatgcgattagctttactatacacatgagtaactcggactatgcagtccctatacactccatcttattaatgatatttgaattttaaatagtaacgtaactctcatactttttcagtatgtaatttagtatttctttaaaccaaatttcaatcttacaaattcgattttgcaatacaatttaaatacctattttatcataataaaatatataatttaatgatatacactccatgttattgttagttttttatataatttaattatatacactccatcttattgttagttttacattttagataagaaaattgtaagttaaatatttagatataaacatattaattagtatatataaataagtatatataaatatctttgttttttagtttcctattttcttttaggaaaaagtaaaaaaaaatatcaaacacatgtcaaaatctaagatcgttcaaataaccacgtgtcatgatctcgtgagttagtaactttcaaaactgtactttatataataagatatattaatattaacgatctcaataaatgattttcgcagttgtgtatggttgtgttttatcgcaactttttagtttagtaaaaacaaaattcaatcataacaatctcaataaatgatttttgaagatgtgtacaatagtgttttatggcaactttttgttaaaatacatatatttttaattcacaagttgtatttttagaaagttgcaatccgaatctacgttttgcaacttttataataactctacataaacggttgcaactatttaattgaattactgtaatatttactttatttgaaaaattattgcaaatttaagtttatttatgaccgttaaaacattttactatctacagttgctcctttcgatgtaatgttttacaaaattattaatttattttttaattactaaaatacagaagaatgaaatagtaaccattaaattaaaccgttgcaacatttagtttatt

SEQ ID NO: 171519 - DNA, 631 bp, Arabidopsis thaliana landsberg
tcatcactcgtttcatgtatgatagttcgacacacctaccaggttaaatctaaacccacatcgatgattatgtttctctgtttttgctgtttgattttaattctgtctcatttttaacgtttttgatcatcgaaacaacattttagaggctcgattttgcctcactttatctcaacattcattaatcctagttattacattatcgtcgtcaatcacgtaaattaaagactaccggtagaatttatctaccacatagatcatgtagatacaatgctgaatgtaaatttcttttagttgtagtaatcttcacaaaatttatacattagtctcataaatctttgtttcattcacaggctactattggaattgacttcttatcgaaaacaatgtaccttgaagatcgaactgttcgtctgcagctatggtaagaaatgctgttttttctagggcttctcgcaatgtaatattcgcaatgaggaagctaataatgtgaattttcgtttttagggatacagctggacaagaaagattcaggagtttaataccaagttacataagagattcttctgttgcagttgttgtttatgatgtagccaatagactctcatttctcaacacatccaacgttaga

SEQ ID NO: 171520 - DNA, 2511 bp, Arabidopsis thaliana landsberg
tgaatactgaatactgaatagataaaaagaaatcaagattacaaaaggtctagaacacagtgtctacggaataaaactagataaaaacttgtttgcgaaaatgttaagtacatgctacttatagcaaaatattccgaaaccctaatacataaaacgacgcagtattgggacggattaagaactgtactcgacccaggtggtcgagtgggaggtcgagtgaatagctggagtcttcttttcttccttgtgttcgagtgtctggttgagtgcggaatgaagaagactctgaagctcgcaatcgagtatgtagtcgagtggtggtgatggtgatactcgacttcaaggtagagtggtgagatcgagtggttgtctggtaatggaggtgaagacactcgacctcggggtcgagtgaggtgatcgagtgatggttaggtgttggagatgaagacactcgacctcggggtcgagtggtgaggtgaagtggtgatgtcctctacttgaccagggggtcgagtggtctgctgaagtcgtggaattatctactcaaccaggggtcgagtgttttgcatgatcaactccgcttctttcaattagctcgccaatagctccgaatcacctgaaaacaacacaaatatgcaacatgcatgcaaaattatcctaaacatgcaaagtgatgacaaatgatataaaacagtgatgatatgatgctaaagtgatgacaaatgaatgctcaaaatagataatatgcacacttatcagcaactatacatcgctcgggaattcgtggaagtctttgtgttggtggtctcttaacgccaatactgggagctgtggggatgcaatttggaacccctgacgtgttctccaagttctttaacctcgaatatctcaaggggaaggattttcttgacaagataactccagcggatcgctatctcttcaagttcaaccatccggagcttggaccctctttgttactcctaccatgcggaaccggacctcagtgaagacaaggcgcaacatcaatttaatgccatctccctctgccctgaacatcgacataggaggagccagagaagatgaacaagactatactcaagttgactatgagcaacatgagtattatactcaagctgactatgagcagcaagtcgaattccagttacgtagagagcaagaagaagttaagaacaatggagaagtcgccgaagagtatggctgctcaaatcaaggaattccagggcaagccaaggccaccgtctcccacccccgaagtaagaagaagcggttccacgagctcagctgcaaagagggctgaaaggatcgatcaaccccaagctttatcatttgagcctcgggaagtgatctccaagttgagagagcaaaggagtaagcagagatgagcatccacacgctcgaccaactactcgaccggacagaatcagccccgcctcaacatcagcccttgtttatactcaagagagtatggacgattacatttccatctacttcacttgaccgctgaggtaacaccacctcaaccattatacataccatagcatttttatttttctttgtgtgttttgtgttttggtcttgaattctctttcagatttttattacacaagggactgtgtaatttaagtttgggggagggttcaagacatgtttaacattgtgttctcttttcttatttcaaattttgcatcatctaaggcatagaaaaaaccataaaaatttgaaattttttgagaaaatgatttcacaaaaacagagtgtcatgtagattgcatatcattttaggattgtatattgggtgtttgcatttaggattgctcatttgcataggggataatgatgatttcaaaccattaagcatgttttgattcaatgaagtaaggtcaattcccaggtagttagttctctgttgcataaccgattgtatctctgaagtaagactgcaccctgctttgaatttgtaacttgactatactactttgatcaaaactcgcttagctgatgccattccctatctatgagaacctgaactgaatttgaaattatcatgtctatgcattgtttatgaactcatggctaccatatacatacttggatcatattattcacttcatcaccctctgttaatccaagtagttgtctctcatctttagagcagttttccatacccttagcgtagccttatttcaagccaaagatcatttgtgtgtgattgtgaggtctttttcaattgagcttggtataacgtgttaggtatgagccgacaagagcactctttcatgtagacgtagcccacgctttttgggttagctaagactaggtggagacttgtatttttgggattgggattgtgtatggaatgaatgggaatgagagtgagaatgaaaaaaaaaagaaaaaaaaaagagagagagtgagagtttagagttctaagggggatacaaaagtattaagtctagtaaagggtttggaattcaaagaagttaggcattg

SEQ ID NO: 171521 - DNA, 454 bp, Arabidopsis thaliana landsberg
tgaggtggaatctgcgaaacgtatattcgaaagacactcagacatggcactggagtttcgagcaaagaaccaatatgtgaggacatcatgtatgaatgtactcctcagcctaatcgatacactgtgccagtcactgcaagatttttccattgatgacctcggccaagcagagagagcactaacatacctgaaagattcagactttaaggtggattggttggagcgtaaactggaagaagtaaaggaaaagaagatagaagagcagattggtaagactgggatgcaagaattagaggaagacctgaaggtcctcaagcagaagtgctctgacatagaagctttgctggagaaagagaatcaaaagtgctcagacattaaagcgttgctggagaaagagaagacaaaggtgttggctgctgccagagctcctcctctaacattggatgatgttgtc

SEQ ID NO: 171522 - DNA, 429 bp, Arabidopsis thaliana landsberg
gaagtgtggagacaatgggtatcaatttcgaggaccaaaccacattgttcaatttcgtggtcagagaaggtaacggcgtgaaaggaatgatagactcgggcctctctagtgttccacggcccttcgtccagcctctctctgagcgaatcccgacccaaaaagcccttacgtgtgaggctacccagccaatcgatctttccaacctagacggcccacaacacaaggaggtggccaagcagattgtcgaagctgccgagacacttggcttcttccaggtaattaatagtcgacacatagtattttggttggtgtataaaccagctatacatgagcgtgaacatgtaaatttgacgcggatattacttacaaaatgacgttatatatcttggaaaaaaagagtaaactgggcttataagattgagaatattt

SEQ ID NO: 171523 - DNA, 1390 bp, Arabidopsis thaliana landsberg
atgcattgcttgattcacgttccagaactaatgaatgttaaagggatttgtagatttgaaaacttgtgtaggtcgagcatatgagtcggattgattgatgatgaggcatggctaacatttttaagtagaattcgatcttgccgcttagaactttcaacttggacattgatttcatctggtttatctggtgctttggctctgagtccccgctttcaaacctcacctccagcttgttcttgattgtttgcttgagagcaagcaaagactaagtttgggggagttaataagtgtgtattttgcatgttttgagcatccatttgtcatcattttagcatcatatcatcactgttttttaccatttcacatcatttgtcatcatttgcatgtttaggatagttttgcatgcatgatttcacaaacctagactttctttcaagccctatatcactcgtgagtgtttgtgaggtcttattccgattaaggttggtagaaagtgttaggttcgtaacgacagagatagtgtctcatgtagttctagtttgcattttttcggactagataagactaggtgggcgcttatactttgggttgggatgtgtttaaaaaaaaaaaagggttgattcagtgatgagaaaaggtaaaagactctaggtgaagtaagctaaagaagcagaaaaagtctagtaaaggttttaggatttgtaaagaaaagaaagagttcttgttagctattgaagatgggcaaaagccctcggttttacaatgttaaaaataggaaccttagttgttaaagaaatccaaatccgctagatgtatcaaagtgttgaggaagcttctactagagttaagagaaaagaaaagaccgattagaaaaagggcttaaaagattcatgaatgcaaagggtagagtccgagacttcgtcggtgaagtgaagtggtcgagtgagaggcggtgatttgtggtgaagtagaaaaaattggagtgtcggtggcgtagcggtcgagtgattcacggtgaaccagaatcggtggttgagtgaaagttggaactcgattgcggcggctgaggtattctttccaatggtggtcgagtggttttagtgaggtcgagtgcagcttaggtttcagcggattgcttcttgcggtcgagtggtggaaaattgaagagaggttggtcgagtgaaatttcaaaaggagtggtggagattgagtttgagattctctctccatcttatctttagcatgtggtccacactctgttgactgcaaaaactgcagaaaatctactatcaacttgacaaaatcctacaagtctctgtagctcctattggtcgagtataatcatgatttaaatttttttgggtttaaaacatcacatatactcgactga

SEQ ID NO: 171524 - DNA, 581 bp, Arabidopsis thaliana landsberg; identical to SEQ ID NO: 75487
  unsure (1)..(581): unsure at all n locations

SEQ ID NO: 171525 - DNA, 644 bp, Arabidopsis thaliana landsberg
tgcctcattaactagtgccaattgttctagataactaaaatcattctttgatatcttgactaatggttcagccgatagggcaagctagtggggcacaaggaaccggggaagagaaacgaaaaaacacaactaagaaaaagaagaaaaccgggcgtgcaggtaaccggtttctaaaatgtcacgttatgggttacttagtgtggagggcagcttatccgtttgttcattgctaatatttctttatgccattagttatagacatggtcatctagtaagctgtgtgggagatgtgacctcttggaatgctgttttgatagagttgattgcgtagttaggcgtgtagtaacatttttttaactcacatctctaaaattgtggtgggggatccaaatgacttttattataacatggcattgatgtagattacctgttctgcattgagtttgatttcagaagctagtgtcaaaatgagccgaatatgtatggttttgaatttgcaggtgtatagtgaggagcaactatgggagacgatggagactttgaggaaagtagtaggatacagtgttgcaaggagtgccacatgtgcagaggagttaaaggctctctatgtcttcaccggtgtagtggagccacctcgctcaagc

SEQ ID NO: 171526 - DNA, 512 bp, Arabidopsis thaliana landsberg
gaactatacggagataattatccaagattcttcacatattggacggtaagatcaatcacgacttttttcaaactttttgcttgaattatttatttaatatcatgagggaaaaataatatattgaattgaaaatttggaaaagcagactgatgcataccaagcaactgggtgctacaatttactctgctctggattcgtacaaaccaacaataaaattgcaattggtgcagcgatttccccgaggtcctcttataatggaagacagtttgatatcggtttaatgatttggaaggtcagtcttcatttccttccatttatttccacgcttctaaccatatttttatcatattcaattcgcaaagaaggactaaaaaatcctaaaaatttaaaatacttacaatttgtgcatacttgggggttttggtccaacaacatcccccggatgctcatagcatcatttgatgagggaggtgatagaatcacgatgaagattgatacgtgcgtgatgtttt

SEQ ID NO: 171527 - DNA, 497 bp, Arabidopsis thaliana landsberg
atctcgagctgccgttgcagctgtccaatccgcagctgtgcgagatgcatgagcgcgttgccgctgagaagctcgagcggctggcacagcatctggtaacgcggcaagtccgctccgaggtgcagcgaaggctcagcgatggcgatatcagcgtcgaggctgttgccggcgcgctgcgcatgagcgagcgcacgctgcgccgccgcctgcaggcggagggcacgcgctatcaagacgtggtcgatctgacacgtcgcgaactggcgacgcgctatctgcgcgacgcgcggctgtcgatggcgcatgtgtcgtttctgctcggcttcgccgatcagagcaatttctttcgcgcctgccggcgctggttcgcggcctcgccgatgcagtaccgccgccgccccccgccggacaccgccgcctccccgttaacggcctgaggcggcggcggaaagaaaggcggccgcgagcgcggtgtcgatcgcatcgagcaggcccgg

SEQ ID NO: 171528 - DNA, 2234 bp, Arabidopsis thaliana landsberg
tggtgggtaatcttgcttctttcttggccttgtactcctccatgagcttcgcataatttggtcctggatctggtccttgaatcatagaatccctaaacttgtccaaacttgcactatacagagccgttgtcctttccagatactttatagtcccagaaatgaacactaagagtattgttacccaaaggctattgggcagagactggagaaccacatagacaccagcaattgcctgaaagacaagcccaaaaacatgtcggagccaaagagcgttatcttcaagcgcgaaagctgttatagtgtctggtccaccaagatgtaagagcaagaatggtgcccataaagccatgagctttttgtcctgtggagggtcatcaggtttgagatctttaccttggttcttagagatgagaccaacagcgaaattagcagaccaatctgctaagagataagaggaccaaatgacgataatcaagtgccttcttggtgttcgtttccttaatggagagaagcaaatgagaaaggcttgaagggtaagacttagaaagattgttcctctaatgttccatctgtcccacgcatctttgatatgttttggtatcacgtccaccatttttgctctcacttgaggaaaagagataaagcctctctctctgtctctctctctttgttattcagatcatgagatgtttttttctttctcagatttacttgagaactttggggtttgggcaatgtttttgggaagccattgatgttgttgttgtttttcttttcttttacctgggagtgagaaagacgactcagcaacttgtcttttcttttctttgttttcggagcaacttatgttattttaaagattgtcccggattagtctttcagtcgagtcattatttaataaatcaagaaaacaaattttccccctagctcgttttcttgtcactaaataaacaatttgattttgaggttcattatatattttagatgaatttggtgtttttggtactctttcattaatggtggattcaaagacattgagagagcttatatatattcttattcgatttcttctattggtttactgattttgaatgatcttttgaatcagaggaatcagtcaagctcacataaaatgaatgtatcagtgacagaagaaagacatgagtaatacaatgcagatgagtattcaagtatatatgattgctggcaatgatatgaaagcaacaaccagttcaagatgaaataataataaataaataaacgcaatagaagaaaatgttgggaactaatttttttttttttttggtttagtgtgggaaactaatgttgtttctactttcgttgcttattcgatgatgatcacttgcaataatgagtttggctctgggatctccttggttgatctggaattgatctgctagtctcaaatggaccatcaatagccaaacaaacctgatgagttatcctcctttgcttagctgagctgcgtgttctatagtggctgggaactatgcagatttggttttaaatgttcatgacttactgttttttcattttccactaagaaaatgttggtagtagtggaaagtcttctttgaaaatgtaactagatgatccgacattagatatgaagacttcttagagtttggatattttgaaatattggaaagaaatactcaacgcaatggagaattggtttccattgcttgcgaccttcttcgtatttcaatcacaatagtagcttctgaattctctttaagtattggatcttcagttttgaacaagtataaaagccgtcttctaatatggtgccgcatttggataaaatgttttgaagcatatgaaaatggtaagtaaatagttttcataatttttacacttacaaaatcataaatcatgtattgattatgttacttttatgtgatatatatatatatgtagaggcggacgaagaatttgctaaagattggacgttacctactttccaatcaatgttgacgatgaaatttgatattgttatagaaggatcttgagtttgagattgatgtttttagctttcaatttcagtttaataatttagtttaatgcttcggtttaaacaccattgtgggatacgggctttgccctccatgcccaattcggcccaagcacaaataaaacaagtcaagaaggtttctaacaaggaggaacggcccatcagaacaacggcccatcagaatgactgctcggcccat

SEQ ID NO: 171529 - DNA, 688 bp, Arabidopsis thaliana landsberg
cagtcaataaaccgaaattatagaattcaagtgctatcacaatagtctataccttcataaaattgaatctatatagactttgctgatataatagtttttgagcctatatatactacaaatgttcttaaacagtatcacaagcaccaaatcacaaagtagtaatcacctcaaaagacgaagcaaatctcacatctcgtcaacgacattctcttcagattggatctcaaatatctcttgcgatgatgtgatgcacgaatctatcaggttctaggctcttgctctggccttgtcttactttttggtcaaggtctctgcgtcgcaaatcacttcacgaagaagtttcgattcttggatcactttaggtcaaatcttttcccaaaggtaactaaacgtgaagttgttcattaggggaaaaaggtgtatataggtttcgcagttaatcagattgatccaacatctcaaaaattcaagattttctgcataaacgattgtcaaactaatcgaaatccaaattaaacaatgttccgatttgagattaacgaaggagattcatggagattgtcaaaaaccgcagttacttacttacttgctgctcaagcaaattcgacgactagctaaaaataaaattgaaaatattcgaattttatagatattttggaggagtttacgtagatttagaaacaatttt

SEQ ID NO: 171530 - DNA, 405 bp, Arabidopsis thaliana landsberg
acccatctgcggcagcgcatatgacaggcttcgttacgtaaagggcgtcggcccggttctggccagcaccctgctggcagacctgcccgatctgggcttcgtttcggccaaggcaatcaccgcgcttgtcggcgtcgcgccccatgcgcgccaatccggggcctccaatcggtcggggcgatgctcgggcggccgaaaacatctgcgcgacatcgcctacatggcggtcctcagtgccatcaaggcaaaggaccctgtcctggcaggcttctatcagcgcctgcgcggcaggggaaaaccattcaagctcgcaatggtcgcaaccattcgaaagctcatgacaatcctcaatgcaatcgcccgatcccaagcagccttctctcaatgactccacggttgcttacc

SEQ ID NO: 171531 - DNA, 427 bp, Arabidopsis thaliana landsberg
accaattcacgttgtagctaatggctatactaatatttgttatttgtgcttgtgttaaagaagagaaacttgggggtgtgtttcagcaccatgaacgatacatagatgatcttgagatatagattacgactaagattgaggccgaaatggtgttgaagagcaagttctgactctgacactgaggattataccaaactagttattaatattaatggagaggctggatacttcaaaaactttagatatcagagtacctgtagataataaacgttggccacacccatgcatatactcttattttccaagtttgatccaaatcgaggaacctgcgctaagcaaaaggaaaagagaaagcactttagaaaagcatcggtgtgatcaaaacatgttgtgacttgccgcagttgaaaacctaatgaaatagata

SEQ ID NO: 171532 - DNA, 1502 bp, Arabidopsis thaliana landsberg; identical to SEQ ID NO: 68422

SEQ ID NO: 171533 - DNA, 344 bp, Arabidopsis thaliana landsberg
ctgttttgttgtttactttcccgagagaaaacaatggctctcagagatttatcttcttcttcttcttcaccggagttacatgttcttgccgttgatgatagttttgtggatcgtaaagttcttgagagattgcttaagatctcggcttgtaaaggtgaaacgcaaaaacgtttccgtttctgttttctgcttttcttttgtttggtttctgattcgttttttggataaatttggtgggtttgtttatatagtgacgactgttgagagtgggactagggctcttcagtatcttggtttagatggagacaatggatcttctggtcttaaggtattattcattcatt

SEQ ID NO: 171534 - DNA, 1432 bp, Arabidopsis thaliana landsberg; identical to SEQ ID NO: 19042

SEQ ID NO: 171535 - DNA, 1458 bp, Arabidopsis thaliana landsberg
aggagaacagtccggtcggtgtattcatacagagcgtggatggtgtctaaaggtacatggtcttctacatggaggagcgttgtcgtgggtctgaaggaggtggttttctcgggtttgagctgggttctaggggatggtgttgatatcctcttctggaaagataggtggatgtcgcagaccccgttatgtgaggtggtaacatgcgaattaccgacgaactgggaggcggttaaagttgtggatgtttggagagatggagtgggctgggatttacagaggcttacgccgtatatcacagaaggtatgaagctcaagttactatctttggtggtggataatgtgacaggggctagggatcgtttgtcttggggagggtgttccaatggtaaatttacagtcaagtcagcttattcttttttaagcttggactggagttcgaagcagcagatggcgcgttttttctctagaatttggcgtgttgtagctcatgaaagagttcgagtgttcatatggttggctgcaaatcaggtgttgatgacgaatgttgagagacacagacggcacttatgtgattcgagcttatgttcagtatgcaagagtggggaggagacaattctacacattttacgggactgtccggcgattgcgggaatttggacccgcttgttaccagcacggaaactctcttctttcttttcgaaatcgctgttagaatggatctatgcaaatttaggagaggagatagagattaatggttgtccatgggcggtcactttttcgcaggccatatggtgggggtggaaatggcgttgcggtaacatctttggcgagaacaggaagtgtcgggatcgggttcgttttattaaggatcgtgcgttggatgtttggaaggcgcatgtgcacaaaatgggagtgacgacgcggacagctagggaggagagattgattgcgtggtctccgccaagggtgggttggtttaagctcaatactgatggggcttcgcgtggtaacccgagactagctacagcaggtggagtagttcgagacggggatggaaattggtgttatgggttttcgttgaatattgggatttgttcggctccgcttgcggaactatggggagcatattacggcataaatatcgcttgggagcgcggtgtcacacagttggagatggagattgattcggagatggtagtgggttttcttcggacatggattgatgattcgcatccgctgtccttcctggtgcggttgtgccatggcttactttcaaaggactggtcagtccggatttcgcatgtttatagagaagctaatcgtctcgcggatgggttagctaactatgcttttcttttaccgttaggttttcatttgtttaattctactccggatagtgttatgtcgattgttcacgatgatgtagcggggtctgcgtacccccggaacgttcaagtg

SEQ ID NO: 171536 - DNA, 1507 bp, Arabidopsis thaliana landsberg
atgacgtacggagagctagctcagaaggtgaaaaataaacttggctttcgtggaaaagacattacaatcaaaatggcataccaatatccagagtggatggctatagattaagggaacgactctcctcctcaataaattagtgaatagtgatgttacaatgttcattcaaatgaggcggcatatagaggaggtgaatctctttgtcactgtcgtccaacatactattccaagttctcatgttgctgtagctgacaagaacttcaattcagaggacactaacgagtcaaattatgactcagaggaggaacttcaccaatttgcatttgatagtgccttggttgggcctactcaagagcaaacagctgctacaacagagacagagcaacgacataaaaccaggcgggaacttttcccaagaggaggcatcaatattagagagcttgaagactgcatccgactaaaaagctctgaatgtccacctactgacaaagagaaaggaataatggacccaattgggaaggcagggaaggctggtccaaggagagccagtgtgacagatagctctagcgacaatgactatgacttgctacttgttccattcaccatgccacctatccacccgctatcaccattcgggaaaatgcagatatcgaaggcgtagattccttaaggggagcagtcatgtttctaatattgtcaatgatgtggaaaaaactgaacttcagcggcagaacattctgttttgggggtgggcacccgaagcattaaacacaatactctccgatttcagtgatgatcttatactttttggtcgtgacgccccagcagtctttaatgatggaaaaggtgaaggtataacttgtattccagatctacttattgacttgttttgatgattggttttcagaacttggaattggattaagtgttaaaatagataccttatgttatacaattatatttatgatcgtcgtgggctatttaacttgcatactacattcatcttgctgaaagatgttcattttatttcaggtgtggacttcgccttctttgatgttaaatattgataaaaacctatttttacttattttatctatgatttaggattgtttttatagagtctcttgagtcctttatagtgcttttggagtgtttttggtgtatttacaagtctcgtacgttctggggttatgaggcgattatgggacactttggagcaaaacgaagcagaaaaccagtcttgaatgtagtgtccatcgataccaaacttgtgtcggtcgacacaggtccctcacgaagtttgcacgaaaattgtacgaaatttgcacgggctcagtttcgccataaaagaccctgaagttaatatttaggccaaagacgtgttttaaacatataattaggtttttaagatcatcgttagacctaagttttgttttgatattaagatacacttttggagagaagaatccaatctttgcatagaggattatgaaactccattcactcg

SEQ ID NO: 171537 - DNA, 1268 bp, Arabidopsis thaliana landsberg
tacaaattatggtgtcgagcaacctactaattttaataatgatgcgaattatggtcagcatgtacctgatcaatttggttatgggcataatcaggaaaatagatttcatgatatggttacgaatgcatttcatgaaactattgcttcatttcctgaaaatataagtgaagaacccaacgtagatgctcaacatttttacgatatgttagatgctgcaaatcaaccaatctatgagggatgtagagaagggcattctaagttatctttggcatctaggatgatgactattaaagctgataataacttaagtgaaaactgtatggattcatgggcagaattaattaaggaatatttgccatcggataatttatcggctgagagttattatgaaatacagaagttggtttcgagtcttggattaccatcagaaatgattgatgtatgcattgactattgcatgattttctggggagatgatgtaaatctgcaggaatgtcggttttgcgggaagccgagatatcagactactggcggaaggacgggagtgccatataaacggatgtggtacttgccaataagtgatagatttgaacgcttatatcaatcagaaagaactgcgacgaaaatgagatggcatgctcaacatacaactgcagaaggagaaataacgcacccatcagatgcaaaggcgtggaaacactttcaaaccgtatatccttactttgctaacgagtgtaggaatgtgtatcttggcttatgtacagatggatttagtccattcggtttgtctgggcgacaatattctctttggcctgttatcttgaccccatacaatcttcctccagatatgtgtatgcaaagcgaatttctgttcttaactattttagtgcctgggccaaagcatccaaaacgagggcttgatgtcttcttgcaaccgctgattcatgaactcaagaagttgtggtatgaaggtgttcatacgtttgattactcgagcaaacaaaatttcaatatgcgggcagtgctaatgtggacaattagtgacttcccggcatatggaatgttatcggggtggacaacgtatggaagataatcttgtccttactgtatgggtcgtacagatgcgtttcagctaaagagaggcagaaaaccatgttggtttaattgtcaccgtcggtttctttccctgcatcatccgtattggaggaacaaaaaactttttaggaagaataaagtagttcgtcttcctccgccatcttatgtttctg

SEQ ID NO: 171538 - DNA, 292 bp, Arabidopsis thaliana landsberg
ttcacaacaatctctctggtgctttggcacattatagtggtggaccgcatgctttatattacggaggtccggtttcttctctttcgaagtttttatcatatttctcatatccttagttatcgaattaatcgaccattcaacactttcttacaaaaaaaaatattggtctggatctgcagctgggtatgtagatctgagagatatgtttagagtcgggttcgtgatggctcttgtacaagcgatcatctggggaggtgttggatctttctggtggaaatttttgggtctctac

SEQ ID NO: 171539 - DNA, 508 bp, Arabidopsis thaliana landsberg
gaccagcgagggatatgcaagtatagacagcgcctttgttttatgtattttattgcacacaagttggcttgggactttgggcagattgtgtatgagcatatcgtgcatctcgctttgaaagttgaggcaaagttctattctgcagcttgctttgaaacctgaggcaaagttctacattccgcttccgagtcctgtgtatcaacttcttcagatgcagcatcctgtgaagtttgttgagaagccagagcccttagtccagactaagaagaagactgcaaagaagccatcaacccaaggagtgcaacgctggtgactccactgatggttcagaacatcgtagagcaatgaaactggccattgaagttctgcagactgctttagatgcaagtaagtgttattctgttttcctttgaaatattatatctcagctaatgatgtttgcgtgatttttgactaagtcatgccctaagcaggaggagatatgtctgaatctgatgatgggagaaac

SEQ ID NO: 171540 - DNA, 200 bp, Arabidopsis thaliana landsberg
cttacatgccgcatttgagcctgctttacgctgagttgacagaggaagagaagaagaatgcgcaggagaaagcttacacgctcgatagcagcctcgatggactcagtttccggttaaaccgacttgctctatgcaaaaccgataccgaggacaagactctagagacatgggagacagtggctgtatgcaatctcaatcct

SEQ ID NO: 171541 - DNA, 1431 bp, Arabidopsis thaliana landsberg
tcaaggttgagaaaaaaggagtgatctatatctgtggatgtaacgaataaatttaagtgttttactttgtttttcgttccctctcaaaaactcatgttagagaggttcttttggtttttgattttctagattttggttggtctaacataagttctctttacttggacatctatttcatgatcttattgaccttggtggtagatctgtgtagattttaaagaaatatctatataaaattcaaaaagagaaatgattcaatttactacagaaacagatttcagacaccctttcgaatattttctttagtttagaattgaagttttgtgtagattttgaaaacaaaaagcggttgttagtgtagagaaattttgatttaaggattttgaaaacaaaaagcggttgttgcgtttacaagaaaactagtgggagcgtgattgcatttcttgtattgtatgtagatgacatactactcattggaaatgacgttcctttacttcggtttgttaagactttgctaggaagttgtttttcaaggaaaaacatgggagaagctgcatatattcttggaattcggatctatagagatagaccgagcagaataattggactaagtcaagacacttatatagataagatctagcacatgttcagcatgcatgattccaagaaaggcttcttacccatatctcatggcataactctcagcaagactcagtgtccttcaacacatgatgagcgagagcggatgagtagaatcccatatgcttctgctataggttctatcatgtattccatgctttgtactcgtccagatgtggcttgtgctttaagcatgacgagtagatacatcctgatccaggtgaaagtcactggacagctgacaagaatatccttaagtatttgagaaagactaaggataagttcttggtttatggaggaaatgatgagcttgttgtgagtggttacactgatgccagcttttagacaaacaaagataatttccgatctcaatctggatttaccttttgtcttaatggaggagcggtgagttggaaaagctccaagcaaagcaccatggcagactcaacaactgaagctgagtatattgctgcttctgaagcgacaaaagaagttgttcggattaggaagttcactgctgaacttggtgtggttcctagcatttgtggtccggtggatatttattgtgacaacaatggagccatcgctcaggcgaaagaacccagatcgcatcagaaatccaaacacattctaagacgatatcacctcatttgtgatattgttgatagaggagatgtgaagattagcagagtttcaacagatgcaaatgttgcagatcctttaaccaagcctcttccaaggcctaagcatgagagtcatactactgttgtatgcattagatatctaaagatg

SEQ ID NO: 171542 - DNA, 1292 bp, Arabidopsis thaliana landsberg
  unsure (1)..(1292): unsure at all n locations
atgcatgccttgctatgtaggcagctggtaacaaagaaaaagtgtgagctgtggacagtatttggtggataccccctgagatttgcattacctgaatttgcttgcgtgactggattgccctgtggggagttttctgaggattatgatccagatgatgatccggtttatgttgttggcatgaagagttactgggacaagttaattggtccagacaagactgttaccttaggggatgtttctgacatgctaaccaacaaacgcaagacattgtcatctgaccacagacttaagctcgcgtttctacttattgtagatagtgtcgtcatagcatcgaaccaaatcggtaggcctacatttaaatatgtagagatgttggcagatctagataaattcttttcatttccttggggtagagagtcttttctgaagactgtagtagagatgagacccgacaaacgaaatctcggtaagtccactggttaaagacagctgacaactgaccctatcaagagtttggtgaatcaacttcagcagaaaatattccgtttgaaaggttttcccctagagttgcagctcatagcatttcgtaacattcctggactgttagatttgttgttagatgactcaacctctaagacaatcctccattggaaacgattaactcatccaaaataagttatatcgcttcctcagattcatgctttggaaagaaacctaaaggtattcttttccacctaaattatctatattgtgtctataatattctctttctataaatccagtcttatatactattaataatcttatatttttggacagctgccagtggatccgcttatagttggagacattaatgctgaccaaagttgggtaaactaggacgatgaggtaaaagatatgaaagttgcatacatgtatgatttgataatggcatctcatcaattcaaaaaaagcgattggccaggaggtgatgacacattgcctccaatttcaatcccaaagaagaagctatctggtgttcataaaaagcacattatggaccgtaagaagaaattaggtgtgaagtttgaggctcccaaatccaagcaaaggtattcaacttgtagtaaaccggannnnnnnnnnnnnnnnnnnnnnnnntccaggctcctcattgaactacaaactaaggtggaagatgttgcatgttcttctagatcaaagcgcaaccagacaatgaatgtgcctatctaatctcaaacccatgaggtattcaagatttcaaactgttttaaatatttgaacatgatcat

SEQ ID NO: 171543 - DNA, 282 bp, Arabidopsis thaliana landsberg; identical to SEQ ID NO: 66226
  unsure (1)..(282): unsure at all n locations

SEQ ID NO: 171544 - DNA, 753 bp, Arabidopsis thaliana landsberg
tgaagaagtttcagttccagttgttgatgatctaatcctgatctctgacaaggcttatactaggacagagattcttgatatggtaaaatccttcactaaatcttgtcctgattataaccatggatgctctgttttatatgtggatgatcattattgtgtcttgcaggagaagttaatggcgaataccttgcaattcaatttctgtctgccaactccatatgtgttcatgagacggtttctcaaagctgcacaatctgacaaaaaggtttgtgtaactttgatgataatcttctgtcttatgtgatatataaagaatcaaaacatgatcataaggtttggtttttcagcttgagcttttatcattcttcatgatcgagctttgtttagtggagtacgagatgcttcagtacactccttctcagttggctgcatcggcgatctacactgctcagagcacacttaaaggatacgaggattggagcaaaaccagtgagttccactcaggctacaccgaagaagcgcttctgtaagaacatcaaaactaagtagctttttctactgatataatttggaatttctaaaagtgttgttgagttttgatgatcaatctctcacagggaatgttcgagaaagatggttggtttgcatcacaaggcagggacagggaagctaacaggtgttcacaggaaatacaacacatccaaatttggttatgctgcaagaattgaaccagctgggtttcttctgctgtga

SEQ ID NO: 171545 - DNA, 2230 bp, Arabidopsis thaliana landsberg
  unsure (1)..(2230): unsure at all n locations
atggacaacacattacgaacaccttttctttcaatatttgggacgattggttcctttgtgtgctcgggatttgcaacaggagcaacgtggactactctctcgcggacgtggctgagcccagtaagccccatcgatttgtacccatcctctttcttctccataagtctccatccataaactagctccatccatgtggattggtggccttaagacactttgtaaagaagtgataatagatggagtgcgacattgaccaccacataaaataccgagatctgtccaggcggacacaactaattgaattgtttttgacaaaaaaaaaagtttgcagttttactagaggttataatcgtgtcgatgggaaattttaccgctataaaacagtttttcaattttccggagggaactcaattctgaagcggngtaatgtgatctactatattatttgagacgtacacttaatgaggtgggcatgaagttttcaggaataacaagtttgccattgggttaaaattttatgtcatgaaaaacccgtttagaaacgcgcagatccttttgacccggattttaaaataatgggtaataacttctaatcttggccattcaattgaattgtttttagccgttcggtttcgtagtttcacttaaaaaaacacgcagattattttacccggttttaagaatttaggtactcgcgtttaatcttggccattgaattgaattgtttttagcattttgatttcacatttcacataaaaacacgcggttctttttatcccgtttaaaaaaatcggattctcgcgtctaatcctggccattgaatagatttattactagccatacgattttttagtttcacgcaaaaaatcttccgactatatttcaggcaacgaatcgcattaatttcatttaattcattgcgtatattcgtttccagctttcaaatatatcacttctccataattatacatctaatatttcgtttggatcttcatttagaattatcataaattttccacaagtattccatatatatacataaccacttttacggtaaatgctaaacattttcctataattatgggatttgtgatatggaataaacttgaattccacgaataatatcttctgcgcatatgtttttgacctaagcatttattcttataaatatcggacgcctcatgtcaatctactcactcatcttcacctcatacattcatttctaaaatcgctcaagccttacaagaacgcttggcgtattcaggttaaattgcttcatgtttggaggcaatattctgtaaaggctggtgaatccatcgaaatgattttggttgatgaagtcgtacgtattatatttttaacattacattttgtccagccttatagtgtgggcaagcatcatttgtcacttattaatgtagatttttaattcatatagggtgataagatgagtgctgctgtgagaaaagagcagatcaagaagtttaaaaggtgcttaactgatggtgtttggaaaatcattttggagagcctttcaggcagagatgggtactaaggctacagattagcacggcttatcatccacagacagatgggcaatctgagaggactatccagatacttgaggatatgttgcggatgtgtgtcttggattggagaggtcattgggcggatcacttgagtctggtagaatttgcttataacaacatctatcaggcgagtattgagatgactcctttcgaggcgttgtacgggaggccatgcaggacaccgttatgtgttggggtcggatttgacccaagatagcgagccgacctatgagtcaccgcctcgggagccatcggagaattatcccgaaccagactaaaacacctcggagttctcgtcaagaacccataccgaggtgatgtcgagaacgcttcggggcagtctcataaagtgatcctcgacccgacctcggacgcctcggggataagacttgaaaaatcatcccgaggcgggctccaaaacacctcgggagcttgccttcaagtaccgcagaccaagcatcccgatcatgacccgaggccagcttaatcacggctcggaaagatctcgttttagacagaaaaacttcgaaagacttagccgataatcttcaaagatatcaccggatacaaaaatcccagaatcttcggaggataaagacaaatctctctcaacgagatgaagataaagagggatttccgag

SEQ ID NO: 171546 - DNA, 1542 bp, Arabidopsis thaliana landsberg
ctttattctccgaaataaggacgtcttcacctggggtaccgtggacctgttcggagtcagtcgctccgtcatcgagcacagtctgagcattgacccttcggtgcgcccaaagaagcagcggctgtgcaaaatgtctgatgaaaaaacagaagccgccaaagccgaagtacaccgcctgctggaggccaacttcatcaagccaatcgcctaccctacgtggctcgccaacatagtcatggtgcaaaagaaaagcggcaagtggtggatgtgcatcgatttcaccagcctcaacaagtcctgccccaaggataacttcccgctgcctcggatcgacaagatcatcgatagtgcggccggatgcgaagtcatgtcactccttgattgcttctccgactaccaccaaatatatatgaaggaggaagacaaggccattaccagtttcataacacccttcgacacgtattgcttcatcaaaatgccggagggacttaagaacgttgggtccacattctctcgcctcaccaaaatggtgctcgagagccaaatcggtagaaacatatttacgtatgtggacgacatagtcgtcgccagtaaaagcaaagaagaccatctggctgacctcgcagaaacattcgcgaacatgcgggatgcacgacttcgcctaaaccccgaaaagtgcgtcttctgcgtccgccaggggaagatactaggctacctggtgtcgcaccgagggatcgaagccaacccgaccaaaatctaggccatcatcaacatgacgcccccgcagtcagccagagatgtccagcgctgacgggcagattgccaccctcaacagattcatctccaaactccgcagagcgaagtctccccttcctcaaaactctctgcggcgcaaaagacttcgcttggggaccagagcaggcggcggccttcgcctcattaaaacagtacctgtcggaattggcggttcttacaagccccgactcttcgctacccctgttgctttatgttgcagcctcgccgcacgcggtcagcgcggcgctggttcaggagctgacagtagagggcgtgatcaggcagtatccagtttattacgtctccgaaatgctcacaccatcaaaatgtaacatgacggaactggaaaagattgcctatgcagttgttatgtcttcgcgcaaattgcgccactattttgaagcattcaaggtccgagtcacctcagataggggactcggcgaattgttcagaaacccggaggcatcggtacggatcgccaaatgggcggccgaactctccggctaccacatcaccttcgagcccaagacagccatcaagtcacaagttctagcagacttcgtcgtcgactggactgggccaataacgcaaccggacccatccgcagagaaagtttggacaatccattgcaacggcgcatggtgccatgtgggggcaggcgctgctgcagtcatcacctcacccgccggggtcaagcacagatatgcgacacgcttaagcttcgctctggaatctgacagatgcaca

SEQ ID NO: 171547 - DNA, 251 bp, Arabidopsis thaliana landsberg
gagatggcttagacatccttgccgggataaaaaggtggctttcattctcaaattggcgtaccaagcttcagtttaccacatctggcgagagagaaatattcggctccactctaataaatctttcccttaggcttagggaagaagttggtgacagtcacctctccaccagagaggaaatttattgaatagacaaacccaaatcagaaaatcaaaaatcctaatgtatatatacatttttagagatatttgga

SEQ ID NO: 171548 - DNA, 409 bp, Arabidopsis thaliana landsberg
atggatcgaagagacgcaatggcgttatccgggtcgggttcttactatatccaaagaggaatccccggttctggtcctcctcctcctcaaactcaaccaacgtttcacggatcacaaggatttcatcatttcaccaattccatctctccttttgggtcaaacccaaacccaaatccaaaccctggaggtgtctctactggattcgtgtctcctcctttacccgttgactcttctccggctgattcgtcagcggcggcggcgggagctttggttgctcctccttcaggtgacacgtctgtgaagcggaagagaggacggcctagaaaatatggacaagatggtggttctgtttcgttggcattgtctccttctatctccaacgtttccccgaactctaacaaacgtggcc

SEQ ID NO: 171549 - DNA, 238 bp, Arabidopsis thaliana landsberg
  unsure (1)..(238): unsure at all n locations
atgtcgtcgcttgtttctctttgccaagttatagcattattggtcttgttctatttcggggtgtctcttgccggtaaagacattccggcgaattttgtgttcggagattcattggtggaagtcggaaacaacaactacttagccacattggcaaaggctaataattttcctaatgggatcgattctggatcacctactggtagagtcaccaacggangaaacatagtcgatatcctat

SEQ ID NO: 171550 - DNA, 491 bp, Arabidopsis thaliana landsberg
taagaacggccagccaaagtacacaaaacgttgcaaacataattcgattgtaccaaaacaagaagacaatgacgggagaaccttctttatgcattagggggtgtggcttcttcagcacgtcacagacgaagaacctctgttctaagtgctacaacgatttcttaaaggacgagtctgccagatacttggccactttcaacgtcaacacgaaagccgctgaagaggtcacggcgcaagaggcgacggtactcggtagtaaaggcggttgtggtgaagaagaaggataagattataagaagagtagtagtagatgcaaagcgtgcaagaagaaggtggggttgctagggtttcactgtagatgtggccacttattcttcgcgtctcaccgttacccggaagagcattcatgtccatcggattataaatctgccgccattgacgtcttagcaaaacaaaaccctgtcgtcaagggtgataagctcttcagactt

SEQ ID NO: 171551 - DNA, 906 bp, Arabidopsis thaliana landsberg
ctttagttgggttttacgctaattgtggtaaattgagagaagctaggtctttgtttgagagaattagggaacctgatttggctacttggaacactcttcttgctgcttacgctaattccgaagaaattgatagcgatgaagaggttttgttgttgtttatgagaatgcaagtaagacctaacgagctctctcttgtagctttgattaaatcttgtgcgaatttaggtgaatttgtgagaggtgtttgggctcatgtgtatgtcttgaagaataatctgaccctgaaccagtttgtgggaacttctctgatcgatctttactcgaaatgcggatgtttgagtttcgcacgcaaagtgttcgatgaaatgtctcagagagacgtatcgtgttacaatgcaatgattcgtggtttagcagttcacgggtttggtcaagaaggtattgaattgtacaagagcttgatctctcaaggattagtcccggacagtgcaactttcgtggtgacgatatcagcatgttcgcactcgggtctagtcgacgaaggtctccaaatatttaactcgatgaaagcggtttacgggatcgagcctaaagttgagcattacggatgtttagttgatctactaggccgatccgggaggttagaagaagcggaagaatgcatcaagaagatgccggtgaagccgaatgcgacactatggagatcgtttctagggtcatctcaaacacatggtgactttgagaggggtgagattgcgctaaagcatttgttggggttagaattcgaaaacagcggaaattatgtgctcttgtcgaatatttatgccggagttaaccgttggactgacgtatagaagacccgggaacttatgaaagaccaccgtgtcaataaatctccggggatta

SEQ ID NO: 171552 - DNA, 598 bp, Arabidopsis thaliana landsberg
catgtatttgtaggatttatactttttcatgtttaagaacaaaccaaagcttaaggcatgttttggtgcagatatgggaaccatcaaatctttgaggcgctgagagaataccatccggtatcattgcatccgaatcagacttgtacttgcgtagattatggggaaccctgatgaggtttgtcctcactcttttgatattacagctttcatatgtgatcaatgaacattagcttcaattttattttctctgtttcctcaggatttagtgaaacaaccgagatatctagcaacaattacagtgggttataatcagagacacaatatagatgcgtgtgttagcaaggttgcttgatataacactttttgttttctgttttgctttatagtaaactcattatgatttgtctactcaagtacagttttcagagaactttactattgttctgtttcattacgatggggtaacaagtgcatggaatgatgagtttgagtggtcgaggaatgcaatacacataagtgtcaaaaagcagacaaaatgagtatcaatatctttgctttaaccacttttttttatctggtttcttactgctctcatatt

SEQ ID NO: 171553 - DNA, 1635 bp, Arabidopsis thaliana landsberg
gttcggcccaggtgcagtgacttccgcgcacatggctcagacagggggatccactctcaccgtatatgttcatcattagcagcgaagtcctctctgggttgtgcaggaaatcccaacaaaacggcgctctatccggattacgtgtatcaaaaggcagcccccgagtcaatcatctcctttttgctgatgacacaatgtttttctgtcgttcagaccccaaaagctacaagactttgttgcgaattctcaagaaatatgaagaagcgtctagtcaaatgatcaatatatcaaagtcagcaatcactttctcaaggaaaacacccgaccatgttaaaacagaagctcaacaagtccttcagatacaactaactggaggtctaggaaagtatttgggcttacctgagatgtttggtagaaagaagagggatctcttcaatcagattattgacagaataaggcaacgttccttgagctggtcttctcggtttttgtccactgcgggcaagactactatgcttaagtctgtactagcctcgatgcctacctacaccatggcctgtgggaaactcatcttcaatgcccacttacacaatgtccggtgggaaactcccaaacacgctctgcaaaagaattcagtcagctctcacccgcttctggtgggattcagctgcagacaaaaagaagatgtgttggatagattggttaaaaatggctaaaactaagaaagaaggtgtgactcgggtttaaggatatcacaaattttaatgatgccttacttgcaaaggtgagctggcggatcctgacttcaccatgttgcttgctggctcgcattctgctgggaaagtattgtagatcttcctccttcttagactgcactgtagcttcatactcttcacatggttggagaagtatctgtatgggtagagatcttatcaagtctaatctggataaagtcattggctcgggttcagatacactcttttggaatgaaccatggatctcgctttcttccccgacaactcctatgggtccatcacctgaacttttctctggtatgacagttgatcaccttatctgcccggtattgaaaacttgggatagagagaaaataagaagtatccttcccagctatgaaaaggatatcctttctctgagacctagtaatcttggtgctcgggaacgttatgcttggctactcactaagtccggtgattattcgacaaagactggctatcacgcagcagctgctctcgctaaacaaggaccccaacctccagatcctccattggagttcagttggaataaggagatttggaacttaaaatgccctccaaaattgaaatttcttctctggaaatctatgaagaacgctcttcccgttggcgaaaacctgaggattcgaaacatcaaccctcttgctaattgccctcattgtggtgaggatgaatcgtgccttcatctgttcttcctgtgcccttttgctcttcggacttgggaacaagcaccattcaggaccactctgttggcttcccgaattgctagtatgaagcatcttgattccttatcaacataacaccatttggatagaccaagggcttctcatctcttggattatgtggaatttgtggaattgcg

SEQ ID NO: 171554 - DNA, 371 bp, Arabidopsis thaliana landsberg
  unsure (1)..(371): unsure at all n locations
tggatatgtatatatatgtgtattttctcacacattttttgacaagaagaagtaaattttgaacttgaagtatgcatgtgtatattttttgaagagatgtatttttttgatgtttagtgtttaaacgtgacagggatgaagtatattgtgttggaaaggttatttgagagttttgatgtggaggagaataagctttggcattgtcatgaatatggggttaatttttattttttataacctttaattaagaaatttatcatcatttaaaatggggtattgtgtggattcatggtttaaatataactgttgtcgttgttgttgtnatgtgcattggagaaaagataaagagtatggatagctctagaacaaac

SEQ ID NO: 171555 - DNA, 538 bp, Arabidopsis thaliana landsberg; identical to SEQ ID NO: 19006

SEQ ID NO: 171556 - DNA, 537 bp, Arabidopsis thaliana landsberg; identical to SEQ ID NO: 6230

SEQ ID NO: 171557 - DNA, 580 bp, Arabidopsis thaliana landsberg
gcaatagagtgtctgctcttcctgtgggttatgacgttgtcagtatatctagtacagtttatgtcagccgttatcagttgcatgtagccgcacagtattttcagctttgtactcatcgtacgcattaagtgctgagcatccaaattttgagcaagcgcaatctagatcagacctgagtttgtgagttttagcatgagacatatatgtcttattcacttgtcaggtgtgtagtaattgtttagatcattacataagtcctgcatcgatctggcatcaacgggttccggagggagtcgtctcttttgaatgtggtgcagtggttggtttcatcgaatcagagctcaacgcagtgtattgcatgcggacgtctttggccgagcagcgtgagtttgaatatcagaaggggtggtctgcacctgactcgggtccatgggcttgtcacatttaccaagttcgaagtgatgcactccactttatggctctgcgacagaccaaagaggactctgattggaaagcaattagagttcgagatgattacaggtccatagaatctgaatcgggaaagaatttgcgtttagaa

SEQ ID NO: 171558 - DNA, 302 bp, Arabidopsis thaliana landsberg
ctgcaaactcgtactctatactagactgtatctttcactaggaggtgatttgttactgttttttatgcagtcggatcagacatactatgtgattgatatggtttgttggagaggttactcgctttatgaatgtacaacagagttcatgttcttttggttacaatcgaaacttgttgagactggtgcttgtgatccgccttccttttaccacaagttcaggttcagtgtagttcctttttacaactgcgaccaaagcggacttcactcagcttatacaggatggactgttgttttataacaaa

SEQ ID NO: 171559 - DNA, 761 bp, Arabidopsis thaliana landsberg
aaacattaactcttctctgaataataaccgttagatcgattttctctccaaaataaacgaacggctgagattaaaaacatgttaactatagttagcggagcagctgacgtcatcaggggtagaattgtattgatttttattaaacagtagaaaatctccaaaaaagtgtctactcccttcaaagtgctctaaatgggcttaaaaacttggaaagtgccccaacatagaagaaacccttaaaactataacaaaaatcaaaaacaaaataaactaaaacttgaaaaacaaaataactattaatatgtttaatttatttagcgactatttagcgactatttacaaagttattgggctaatttaatccgcaaaaccaagcccaactatttttgacccaataattttagcccaattgatcataaaccctaagaataaaacgtttctctttcgacgcctctctcattctttcttccccaaattctctcgatctaaccctaatctcccaatttttccacaaatctttcattcaatcgattaagatgactggccggcgaggctggaagagaaagaacgcccccaacgcgtctcaaagagccgttggttccaccattttaaaccaaagaccgtcgaatctaccttctcagtacgccatcagaactctggaggaggatacgacagcagctttgcatcagctgcttatggtacctggccgacacttgtatacaaccgttctatctccaatatcgttgccagagacgacttgg

SEQ ID NO: 171560 - DNA, 347 bp, Arabidopsis thaliana landsberg
  unsure (1)..(347): unsure at all n locations
aagacgatcaccgtcgcggaagatttcaccgccttcatcgtcagccgcatcctgctgccnnnnnnnnnnnnnnnnnnnnnnnnnnnnnnnnnnnnnnnnnnnnnnnnnnnnnnnnnnnnnnnnnnnnnnnnnnnnnnnnnnnnnnnnnnnnnnnnnnnnnnnnnnnnnnnnntttcatcggcctcgatacctgtctttnnnnnnnnnnnnnnnnnnnnnnnnnnnnnnnnnnnnnnnnnnnnnnnnnnnnnnnnntgctggtgaaatatgtcgaagccggctggctggggcgcaagacgcaacgcggcttctacgattaccgcggcgagacgccgataccgacccgc

SEQ ID NO: 171561 - DNA, 1082 bp, Arabidopsis thaliana landsberg
attgacttcaaaggagattaaacccaaacttaaaaggggttgtgaaaaaagagatacttaaattattagatgttgggttatctaccctatctctgataacacttgggtatctctagttcattgcgttcctaaaaagggaggtataaaagttgttaaaaacgctaaagataaacttatacccactaggacaataactggacataggatgtgtattcactataggaagttaaatgctgcctctaagaaggaccatttcccattgcttttcattattcagatgctagaaagattaacaaactatctttactatggcttcctagatggatatagcggattttttcaaatctcaattcacccaaatgaccaagaaaacactacttttacttgtcctaatgggacctttgcttacaagcgtatgcctttcggtctcggtaatgcacctgctacctttcagtggcgtatgacttccattttctcggatttgatataggagatggtagaggtattcatggatgatttttatgtgtatgcctcttccttctcctcgtatatgttgaacttgtgcagggtactcaaaagatgtgaagagacaaacatggttctgaactgggagaaatgtcatttcatggttagaaaaggcaaaagttttggggcacacaattgcctaagagggaatagaggttgataaggctaagtgtgatgtcatgattcagctgcaaccccctaagacagttagggatatcaggagcttccttgggcatgcagggttttactggagattcataaaagatttttcaaagattgctcgacccctcactagattgctgtgcaaggaaactgagttcaactttgatgaagattgtcttaaagctttccatttgataaaggaagcattggtgtctacacctatcgttcaagcactcaactgggaccacccatttgagatcatgtgtgatgcatccgattatgcagttggggctgtcgtaggccaaaatattaatggcaaacttcacgtcatctactacgctagaagaataatggacgaagctcaacaagatatgcaccatagaaaaggagtttta

SEQ ID NO: 171562 - DNA, 450 bp, Arabidopsis thaliana landsberg
ttttccaaagagacattaaaaatgttctgttttctaccatgtaaggcgaagaaaagtactactcatactcgtatcctctctatttacaaaggagatcggttttcagtgatggaccaatgcaaaagaacaagggagattgagatttgggtgacaaagaataaaattggtaatggggatgatggaaacgatgttgtgtggattaagttcatgactgtctcaatacctaacttccccatggtactttgtcataattctacaagttacttcgtcgatgatagtatctctgggaagagcttcgttttatgtttttctaccaagaaacctaaacaagcttgggtctatattgtgaggggagatctgtgcaaaaagattaagatagatgaagttgtatgtacgttccaatcctgtgcctatgttcccagtttgatcgccattccttgagagactttt

SEQ ID NO: 171563 - DNA, 339 bp, Arabidopsis thaliana landsberg
  unsure (1)..(339): unsure at all n locations
atcatatagatgtaagattattaattcttattttgcagggcgtactataggtgcacccaccaaaagctatacaattgcccggccaagaaacaagtccaacgctttaacgaccgatcctttcaccttncgggtcacataccgtggctcacacaccttgctacaacttcaaccgctccaaccgcatcctctgccactccaagtaccattccaatctcatccgtcaccactggtcattctgttgactacggtcttgctgtcgttgacatggctgatgttatgtttggtagcggcggggtcggaaccaacatggatttcatatttcctaaaaacgatccatct

SEQ ID NO: 171564 - DNA, 1620 bp, Arabidopsis thaliana landsberg
ttggttttgacatagtatttaatgcaattatagagagatccaaattccaaattctatacaaacgttacaagactattaaaaacaattaatcgcgcgccgacaaaccgggcagaactatgcaacttgagccacgcatcaatacattcggtatggaagcaatgttcacattcaggtaaacacctaacagtttctttggttgcgtattccgacaaacaaatgggacatacaacatcactggacccggtcgggagtctcctactctcccctagctcaactttcttgtatgactcaatcgtagactcatcgagacctgtcctcgcgacttcctcgcttggctgcggcattacggatccagagaggcgtgcaaccactgcgtgttgtatctgggaagagactctctaggactttacaatcagggcaatagtaattgttgtgctccagttccttaaaacgataaccaaattacaactgtcagtcattcggcagttgtcctaactacttagaatcaaaagttaagaagcacggagatgtataactgcaccttaaagcgctcattcgtaatgatgtcgcacccagcatgaacccatacgttacgcccatcacaacacacgtaatacatcaaatcacgtcagctacatattgtagatgtaatagtttataactcaggtcagtatttcaccgagcatggtcaaagagactcttgcagatgccacaatactgattggatttccacaactgaaacaaaaaaaattggattcaactctttttggccaaagaaaactgaagagtgaggaaattttggtaagaacctttgaacagtgtctgaaccatgcatagtagattaatgagcagaagttgagaaaaaaggatagtagaaataaatggatatgaggcccatattatttcaagcccaattgtgtgggcctcagattttgtttgaagctcattaatttaggcctaatgtggtaagcccacatttattctcaccaaattttgccaaacacatatatttcctgatattacctattctgattattttaacaccaattgccaaacacatttatagaatcctaaacttaccagaaaaaataattcaaataataaactagaattaatgtgaacaaaacttgtaatatataaactggcattgatgcatttaaatacaaaacaattaaaatggttatattgaaaccataattaaatgttcatacaaaacaaagatttgtaaatttagactaacaaaagttaggtgttgcaactgctttgacgaatgtcttttatagtgataaactaagtgttctaactaataatatgtgcttagactaaattttggctcaaattcaaatatttatatgagttgatggctcttttcatcgcccgtggtgaatactagaaaggactacttttcattttcaccgtaaaggtaaaagattcatacacccttggcatcatctgtaaactttgttattttggttttcttactctttgtgcagactccatggttagataacatgcattgtgtttggacaagtcattgaaggtatgaagcttgtgaggacacttgaatcccaggagaaaggttgcagaatctatgcctgcggagagctcccgatggaagct

SEQ ID NO: 171565 - DNA, 546 bp, Arabidopsis thaliana landsberg
cctccttgcatgcattggaggaaagtggctcggcgacgaaacgcaccggttggatgccataccatctgctttttgaggacgctcatggcgaacttgccggctgcatgcccctttacctcaaaggtcatagtcgcggcgaatatgttttcgatcatggttgggccgatgccttcgaacgtgctggcggcaactactatcccaaactgcaatcctgtgtccccttcacgcccgcaacaggtccacgcctgcttacaaagcccggagcaggacgcgacgccgccgaagaccaattgctcgccgccgcactggaagtcgcaaaccgcaccggcgtctcttcgctccacttcacgtttctgccggagcgccaatggactcgcctcggcggacacggtctcttgcaacgcaatgaccagcaattccattggcacaatcgcggctatgcaaacttcgacgaattcctggccgacctttcttcgcgcaaacgcaaaatgatccgcaaggaacgtcaaaagcatttggaaaaatgggtgtcgaaagtcgaaatgg

SEQ ID NO: 171566 - DNA, 687 bp, Arabidopsis thaliana landsberg; identical to SEQ ID NO: 62876

SEQ ID NO: 171567 - DNA, 457 bp, Arabidopsis thaliana landsberg
gcgatctcgcagatcgagaaggcgcacgggaagggttcgatcatgcggatgggggtggacggcccgctggtgaaggtgcaggtgattccgacgggggcgatcaacctggacgccgcgatcgggattggtggggtgccgaagggtcggatcacggagatctacggaccggagtcgtcggggaagacgacggtgtgtctgcacgtgatcgcgaatgcgcagaagctgggcgggatcgcggccttcatcgacgcggagcacgcgctggacatcggctacgcgcgcaagctcggcgtggacgtggacaacctcctggtgtcgcagcccgatacgggcgagcaggcactggagatcgcggagacactggtgcggagcggggccatcgacggatcgtgatcgactcggtggcggagctcgaaccgcgggccgagatcgagggcgcgatgggggacagccacgt

SEQ ID NO: 171568 - DNA, 291 bp, Arabidopsis thaliana landsberg
atgatcatgtgcgacaaaattgtaagtattaacttagagtattcattgaatctaatcttttaatattgcatgagttaaacctttcatattttattaaggagacaattattgatgccatagctcctccttacatctatgaacataatattcctagagttctctaagaaggaagttggtacttcatggaaaacatttatgtcattaaagtatccggcggatctccttcttttaccgactttaagttcaaaatcaaatttctttcgaacaccaaaatgtcacttgggggtagat

SEQ ID NO: 171569 - DNA, 1578 bp, Arabidopsis thaliana landsberg; identical to SEQ ID NO: 2919

SEQ ID NO: 171570 - DNA, 503 bp, Arabidopsis thaliana landsberg; identical to SEQ ID NO: 77002
  unsure (1)..(503): unsure at all n locations

SEQ ID NO: 171571 - DNA, 1280 bp, Arabidopsis thaliana landsberg
tacgcgattctatgcagaaggctggtctgttttttaatgtgaggactgtgaacataatggttgatgggctctgtaaatcccaaaaacttgatgaagcatgtgctatgttcgaggagatggattataaggtttgtaccccagatgagattacattttgctccctcatagatggcttaggaaaggtcggaagagttgatgacgcttacaaagtctatgaaaagatgttggattctgattgtcgtactaactctatcgtttacacatccctcataaaaaacttcttcaaccacggtagaaaagaagatggacacaagatatacaaggacatgattaatcaaaactgttctcctgatttacagcttcttaatacgtacatggattgcatgttcaaggctggagaaccagaaaagggaagggccatgtttgaagaaataaaagcccgtcggtttgtcccagatgctcgaagctactcgattttaattcatggactaataaaagcaggatttgcaaatgaaacttatgagttgttttattccatgaaagagcaagggtgtgtcttggacacacgtgcttacaatattgtcattgacggtttctgcaagtgtggaaaagttaacaaagcttatcagctgctggaggaaatgaagacaaaaggttttgagccaactgttgttacgtatggttcagtcatcgacgggcttgcaaaaatagatcggcttgatgaagcttatatgctctttgaggaagcaaaatcgaagagaatagagctaaacgtggtgatttacagtagtcttattgatgggtttggaaaagttggtaggatagatgaagcttaccttatcttggaagagcttatgcagaaaggattaacacctaatctttacacatggaactcattgcttgatgcattggtcaaagctgaggaaatcaacgaagcgcttgtctgttttcagtcgatgaaagaactgaaatgcacgccaaaccaagttacttatggtatcctaataaatggtctttgtaaggtcaggaagttcaataaagcctttgtcttttggcaggagatgcagaaacaggggatgaaacccagtactatttcttacaccaccatgatatcaggacttgcaaaggctgggaatattgcagaggctggggcgctcttcgatcggttcaaggcaaacggtggtgttccagactctgcttgttataatgccatgatcgaaggtctaagtaacggaaacagggcaatggatgctttttctctttttgaggaaacacgtcga

SEQ ID NO: 171572 - DNA, 303 bp, Arabidopsis thaliana landsberg
  unsure (1)..(303): unsure at all n locations
agtagctgttacaagaaaggaggagttagattcagaataaacgnaagagactacttcgagctagtgaatattcaaaatgtaggaggagcaggttctattaaatctgtatccatcaaaggatcaaagactggttggttagccatgtctcgtaactggggagctaattggcaatcgaatgcttatctagatggtcaagctctctctttctccattaccactactgatggtgctactagagtctttctcaatgttgttccttcttcttggtcttttggacagatttattcttccaacgttcagttt

SEQ ID NO: 171573 - DNA, 2355 bp, Arabidopsis thaliana landsberg
actctcagccgcttctcccgccggcgttatctccaccgtcttcttctttcatctccaattccaaaagccgtcctttatctcctctcactccccattccttttctacaaccccatcgaagcccaagctaccacgaacaccgtcgtcgctttctggattttactctccgggaccttctttccgatcatcgccgcgtgctttctcggaacggtggcagctccaccgccctaaccggattcgacccgaatccgaaccagaaccaagttccgatttttctgttgccgggttcgggtgtttcccgtcgcctaagtttaggttgaggaaagttaagagcggtggtagtcggagaaaatccgggtcgagatcggagaatgattattattgctccgacatggagacgatgtcgccgtggactgtttcaagccgtagatcggtttctccgagatggtaatcacccaagtcgtcgttttcttctctccgattctcgccacgattcgccaacgaagctgaatgggttgggtttggactcttttgagcacattttcaatgaaatggctcgcgatcggttctttagccatccgaaccaacggaagcctcttgaatcgcgcaaatcaaattaaagcaagggttgggctaaaatgggatttttcaaaagtttagggtcctatatctaatgtgctttagagttttcacatctgtgtaatataaatttgtggatctgtggatgtctaaagacaattcacattttgaattttgaagttttgagtgtggggaaaaaagattgtaagatatgaaaagtaacattagtaaatgaatttagaaatcacactaaaaagttaacatttttttgctacatacaacttcttaaactatggaaaaagggtcccaataataaaatacaaaactactatcaatctaattaaatattcaattttccaattaagtatatggccgaatcagtcaatttaaaagtatagggctcaatggaaatttaaaaaacagtttggggttcctgggtaaaactttaaaaagcgatcctgagttgacgtcactgttaaagctttcagctttgtaatgaaaactcaaagtaggaggacaccatgaaaccgtcgcaaccgctatgtaaccgcattgttgatcagcttattactgccatgattcagaaccgtccattagacgccgttctcgcttcttcaacggtggcgaaaccatggactcagcagctcgtctccgatgtcctccgttctatccccagattcttctttatctccccacgatccatcggtcggcaaaagggttttcgtcaccgttcaccgttaaagcagagaaacctcagtgatgaatcacaacgacgtcgttctgaagttctagttctaggtcccggtgcgtatatggatcctaagaaagtctctatcgggttgcagaaagcattggagttcttcttttggatcgaaacccacttcgggtttgatcataatgagatcacttgcagagatatggcttgtctattggccaaaggcaatgactttaagggtctctgggattttctccggcaagtctctagaagagagaacggtaaaaatgtggtcacaacagcgtctataacctgtttgatgaaatgcctaggagaagaaggttttgtgaaagaggcattagctacattttataggatgaaggaatatcactgcaaacctgatgtttatgcttacaatacaattatcaatgccctttgccgtgtggggaattttaaaaaagctcggtttctattggatcagatgcaattaccgggttttcggtacccaccggatacctatacttacaccattttgattagctcctactgtagatatgggatgcaaaccggatgcagaaaggcgataaggaggagaatgtgggaggctaatcgaatgtttagggaaatgctgttcagagggtttgtacccgatgtggtgacttataattgcttgatcgatggatgttgcaaaacgaatcggattggtcgggctctggagctgtttgaagatatgaagacaaaagggtgtgtaccgaaccaagtgacttataattctttcataaggtattatagtgttactaatgagatagaaggtgcaatagagatgatgaggacaatgaagaagttgggtcatggtgtacctggttcgagcacgtacacgccgctaatacacgctcttgttgagaccaggagagcggctgaggctagggatttggtggtggagatggtggaggctgggttggttccgagagagtatacatataagttggtgtgtgatgctctgagctcagaaggactggcaagcacacttgatgaagagctgcataagagaatgagggaagga

SEQ ID NO: 171574 - DNA, 535 bp, Arabidopsis thaliana landsberg
atgtttgatttaaaacctattaccccaattggtcctcttgtttctccatttcttttgggacatgatgaggacaaaacccttagatgggaaaaacctagatatgtggaaagctgatgattattgtatggagtggcttgacaagcaagctaggtcttcggttgtttacatatctttcggaagcatactcaaatcatcagagaatcaagtggagaccatagcgacggcattaaaaaacagaggagttccatttctatgggtgatacggcccaaggagaaggccgaaaacgttgacgttttgaaagatatggttgaagaaagtcaaggagttgttattgaatggggtcaacaagagaagatactacgccatatggcgatctcttgttttgtcactcattgtggatggaactcgacgatcgagacggtggtgactggtgttccggtggtggcgtatccgacttggtttgatcagccgcttgacgcgagattgcttgttgatgtgtttggaatcggagtacgggtgaatagcgatgaagtc

SEQ ID NO: 171575 - DNA, 332 bp, Arabidopsis thaliana landsberg
gcaaaactcatgatcttgtgatcgagtgtgacactagtctcagtgatccttgtctcattgttcgtgtcgatggaaagatcttgatgcaagtgcagcggcttcattggaagttccgtggcaacgataccataattgtcaatagaatctctgtggaagttctctgggatgtccacagttggttctttgggttgccatcatcaccaggaaatgcagtgtttatgttcaggacttgtcaatctgttgaaaagacctggtctttcacacaggtccccacgagctcaaaatctcaaagttttgggttttcattgattctgtatgcttggaagaacgag

SEQ ID NO: 171576 - DNA, 330 bp, Arabidopsis thaliana landsberg
cacttgcttgtgacatgctaaacaactgtttcacggcaagatgggagtcacttcttcccttactctccgtctcagctactccaagtcttcacttgttcgtgttgcgatatgtgtttcagcttacaacctacagtatttggtgagagaggaatggacgaaggcacaaagatactccaacaccagcctccaaactcacccgccactccgccagcctctaacctcacccgcttgatcgagaaaagtgttagaaattggctgaatactttagctctgtcggatccatcagactatgaaagtggtttacgctactggttccatacctatagccaa

SEQ ID NO: 171577 - DNA, 490 bp, Arabidopsis thaliana landsberg; identical to SEQ ID NO: 57391

SEQ ID NO: 171578 - DNA, 105 bp, Arabidopsis thaliana landsberg
gcccatctccctaaaggtaaaaaccgtctttccaacccaccaagaatggcaaatccacaagccaattcaataattggcatatccacatattttggaccaacaaat

SEQ ID NO: 171579 - DNA, 570 bp, Arabidopsis thaliana landsberg
aaaaatgcatgcccacttcgaataatgcaaagggacctcgcattatgagttctcaatattttacgcaaaaaaagcacgacctactctctcgaatccaaatcatggagcttaccgagcacggagagtacgctgccgtcgaagtcactcatcccagcgagcttgacagtggaacatttcaactacatcagggactgcagaggcgtatctgcattgaaatttcacatagctcgggaaatgtcttgccatggggagatgttacctctgtccgcgtaggcaaaattcgaactgttgacactgctggcaaatcccccgacatggtcacagatcgcgacatcactctcaagcttgcgtcgaaccctgtcttccgtgagaatcccaacggcacgcgcaatatcgtggtacacgcccagtgggactccagtcagcacaattcacttctccttgatcgtgtaacacctgaaaaattccgtgttcagatacctatctcctgggggttttcttcaaagaagctagcagagcccatgtgattttcacaaaaagtcatcttgcaaatgatgtcgcgcccctttg

SEQ ID NO: 171580 - DNA, 1975 bp, Arabidopsis thaliana landsberg
caaatctcaattaagctatccttagacaacaggttcaacaatagattaattcactcccgtgatagaaatcctcaagcatagctagacatagacctaatttccattagcgatctctaactaagcaggcaataagaaccgactgttaaagccaataaccgctctaaacgtccaatcccttgggatagagacgattatcactgaaattagtagatccaacgttccattaaacgccttctgggcgctggaacgtctgggattggattccagttgatcagaaaggaataagcaataaaaacaactaatccaggagggattcaataaatctacacttaaccaacagattcgaccaggggttccataactactctatcccatcctcagaaatcctaatcactactcagacaacatgcttaaagacaatatcatagaaacgaaagatgaccaagcaatgaaagcaaaatctgaataacttaggagaaaaatcaaaatacaaatttgcaggaatgaaaagcggctgctgaatagtagtgcgaaattcgtttctacaaagtgcatgtcttagggcgaaacccttagagacttatttatacaaaaataaaaagcgggcttcgagcccacttaacggcccatggacggcgtgatcaagagtgtcggctcaaagtgggcttcctgatgggcttcgaatgggttttgaatgggcttcgaatgggccttctcttctcttctcttttcgatgctcatgttgtctggttgagtgcggattgatcagagggtccaggtggtggtcgagtaggttggttgacagaatggtctgggctgcttcttggcctctatgatcgagtaagtgtgtcagctgtcaggatggactggttcttctcctctgcaatcgagtataactggtggactggcaaagtggactgcctagtcccctctgcgatagagtacaattgcataatggactgcctggtctcctctacgatcgagtagaagtgtctggatagactgcagagctgactgcttccctctctgctactggtgatcgagtatgttgatggaagtgtgactttctgttctgtttcccctctttttgagcaccaatagttccaaaacacctgaaacaactccaaaacgcagaatgtatgcaagactagtcctagactcgactaaagatgcaaaatatacaaaaatgatggtgaatgctatgaaagatggatgaaactagactcaaaatggtgataaaaggatgtgtaaaacatgcaaattatagacacatcagcgaccaattctagcaaatgaaggaaaagcttgtcaagatcagcaacgcccttcttaaccaacaagacgatatccaagaccacaacacaagaatcatcagtgtcgaatttgccattgattcggttgaaggtcatctagattggaagattgaagaactagagaagaagctcactaactcaaacgagttttcggagtggagaagtaaccaatcttaccaagaagaagaacattttcccaaggcccaagcccgatactaggtggaaacaaaaaaggaaattggattcctagtgaaaaagggaaagatctatgttgctattccgaaaaaggaaattttgaccctataaaaactctagggatttcgatccctaatgtttctcaacaagatcaaatcgaagaaggatatcacttagaagaagaagcagcggcacgcctagaagaaaattcaatggccgagacctactcttgaagagagagctacgatcaagaagacgattctcactttgagaatttggagaattggattgaagactgttcaagaggggatgatgacctcaccgaccgttctaaagaagaggaggattatgaagagttcaaagacacctactcttgcatgacaactagactcctcgatgaagatactccctgaaaccctagtttcaaggcaactaggaagctgtgctacctaaggccatctccaatg

SEQ ID NO: 171581 - DNA, 538 bp, Arabidopsis thaliana landsberg
  unsure (1)..(538): unsure at all n locations
nnnnnnnnnnnnnnnnnnnnnnnnnnnnnnnnnnnnnnnnnnnnnnnnnnnnnnnnnnnnnnnnnnnnnnnnnnnnnnnnnnnnnnnnnnnnnnnnnnnnnnnnnnnnnnnnnnnnnnnnnnnnnnnnnnnnnnnnnnnnnnnnnnnnnnnnnnnnnnnnnnnnnnnnnnnnnnnnnnnnnnnnnnnnnnnnnnnnnnnnnnnnnnnnnnnnnnnnnnnnnnnnnnnnnnnnnnnnnnnnnnnnnnnnnnnnnnnnnnnnnnnnnnnnnnnnnnnnnnnnnnnnnnnnnnnnnnnnnnnnnnnnnnnnnnnnnnnnnnnnnnnnnnnnnnnnnnnnnnnnnnnnnnnnnnnnnnnnnnnnnnnnnnnnnnnnnnnnnnnnnnnnnnnnnnnnnnnnnnnnnnnnnnnnnnnnnnnnnnnnnnntggtgttctgcctgtggggtgagggggtattcgggtttggaatatgaccgctctctccgagatctttggngttgattaataaataaaattcggtgggggnnctttagcccnccct

SEQ ID NO: 171582 - DNA, 594 bp, Arabidopsis thaliana landsberg
atgatgatgatgatcatacttctcttaggctcaatgatactaaccattctctttttcaaaaaacagtcgagagggaagaaaagcaacgcacctccatcaccaccgagactccctctaataggaaaccttcatcagctcggccgccaccctcaccgatcactacgctccctcaaccaccgttatggtcctctgatactcctccactttggcagtgtccctgttcttgtagtctcctccgcagatgcggctaaagacgttttgaagacgcatgaccgcgtttttgctagccgtccacggtcaaaaatctttgataagattttttacaacgggtgagatgtggccttgggctccttatggagagtattggaggcaaatgaaaagtgtgtgcgtcctccatctctttagtaacaaaatggtacgatcctttcgagacgttagacaagaagagatcagcctgatgattgagaagatccggatatcaagttctttgcgggtaaatctaagcgagatcctggtgaatcttacaaacaatgtaatatgtagagttgcttggggacggaaataccggcggtaaaccgatttaaagacttaatg

SEQ ID NO: 171583 - DNA, 689 bp, Arabidopsis thaliana landsberg
gggatcccaattcgcatcattatatattgacaatttgaatattgatgtttttagagacacttggtttttttccggaaaaaaacgtgtttaataaacaaaacgtatctcatgacaacatgttctttgtctttttgtttccgattgtagaatgttttttttgtacaagagttcgaattatctagtagatgtataatattcatacacaaaaaaaactcacgtctactttgaccaggtcaaaatcaaagtttaaatggaaatcttctacatatgcgataaattaaattgtttacttgtgtttcgtagcttcgaggtctctgcctctggtcaaataaggccatcttctcttttcgatctctatataaaccagcgactgtctgattagaaacatcaatctctaactcatagatcttaagacaacaacaacaaaaaaaaagtcaacgtaccgataattcttgtctgaatctttaaaacatcaatggaaggaagctttgaaggcatgttaatgaaagtgagcatttttgctctgattcaagggcttgtgtatctcatactcagcaaatcttcgagcgttttctctacgtcaaagacgatgaagagagcttacagtttccggtcagcgagatccatcagataaccaaaggattctagctgttcttcaagacatgccagcaggcggcgggatgtctcct

SEQ ID NO: 171584 - DNA, 629 bp, Arabidopsis thaliana landsberg
aatggacaatgacggagcttattagacatccggaatgcatgaagaaactccaagacgagattcgcggtgatgcgacaaagcttactatatatagatcacatgaagaagttgaagatatgaagtacttaaaagcggttattaaggagggtcttcggttgcatcccccttttccattactagttccaagactattgactcaagatgtcaaattaaaaggatatgacatagctgcaggcacacaggtattggattttttttaaaattatgaatcataaatacgcatatctaaaagtctattttaggtaataaccaatgcttgggctattcaaagagacattgtgacatgggggatagatgcagaagaatttaggccagagaggctcttagattcacctctggactttcgaggaacaaatttcgaatacattccatttggatctggaagaagcatttgtcctggaattggatttgctatggctttggttgaggtgacactagccaaccttgtgaaccgatttaactggagaatggatgctcggctttcgggggatgaatatgatctagctgaagcaacgggaatcgatgtttgccgcaaatttcctcttattgtatttccatctaatgcctaa

SEQ ID NO: 171585 - DNA, 1122 bp, Arabidopsis thaliana landsberg; identical to SEQ ID NO: 10699

SEQ ID NO: 171586 - DNA, 524 bp, Arabidopsis thaliana landsberg; identical to SEQ ID NO: 72747

SEQ ID NO: 171587 - DNA, 434 bp, Arabidopsis thaliana landsberg
taagcccgtacacttatgtatagataataacgtaccttttcgtggtactcgtcttcaactaagtgatccatggtggattgagacaaaacttgtagtcacagtaaccggaaacgtactcgaggttagaaaaatgtggacggagtctagaacctgttccttcagtgttcaaaagatttcttcatcagggttgtttaagaaatatgaaaaagttgattctttgggtgacgaggcaatgctttgggatctaggcatcactgtgccggccaatgacattgaggtttttaatagaaattgcatctatttttgtggtagtcctagaggttttcatgaaaagaacacaagtaacacggaaggtggagctactgcacaaatttgattgttcgtcccttcaactctctagagctcgatggttcttaccaagtttgactcacaca

SEQ ID NO: 171588 - DNA, 1207 bp, Arabidopsis thaliana landsberg
ggattacaaatctctcaagctcagattcttcgacataattcaacaagaaccttcaaacaccgcaactaaaaatcaaaacatggttgatcatcccaagccaacgacgacggatttgagttcttttgaccaagaacgcgagcttgtatcgctttcactagggagaagaagttcttccccaagtgatagcgtccccaaaagggaagagaaaacggacgcaatcagcgcagaagtcaacgctgacgaagagttgactaaggccggcttgaccttagggatcaataatggcaacggaggtgaaccgaaagagggtttatctatggagaatcgtgcaaattctggctcggaagaagcttgggcgccaggtaaagttacggggaagagaagctctccagcaccagcctccggtggcgatgctgacggtgaggccggtcaacaaaaccatgttaagagagctagagtttgtgttagagcaagatgtgacacaccaacggtacgtcctttaaattatacattaaataagttgatctataacgttaattaaaagatttgattatttatatgtgactaatgttgattcggacatgtttattaattatgttgtatagatgaatgatggttgtcaatggagaaaatatggacaaaagattgcgaaaggaaatccatgtccacgagcatattatcgctgcacggttgcacctggatgtcccgttagaaaacaggtatatttcgtattctatatagtctattttaagaatggaataaaaaatcggtgtgaatttttcgtctggttttattctcatttccgtttgagttggatctgattttagttgttaaaatgtatcattcaatttaaactgaacaacataatttaagataaaaatgtatcattcagtttattttattttttgcgtttgcctttgcgtttccatggtattatagaaagtaagaaacatttgtgaccagtgtacacataaaaagaaacgatctaactatttgtcctcgatgatgtatgttttaggtccaaagatgtgcagatgacatgtctatactaatcacaacctatgaaggaacacacagccactctcttccactctcagccaccaccatggcttccaccacatcagccgctgcctccatgctcctctctggctcctcctcctcaccagccgctgaaatgatcggaaataacctctacgacaattcaaga

SEQ ID NO: 171589 - DNA, 413 bp, Arabidopsis thaliana landsberg
actgtatttcggcatcgcgcatctgctggccaagcgcgtgtcctacgacagcatgctgtaccgctttgccgactacaacgcgggcttctacgccagtcgcaacgccgcgttccagaatgccgtcaacatggtctccgacagccatctggtgctggacggcgacttggtcagctacgccgaccacgccagcgccaccgaaaaagccgtgcgccgactcgggctacgcctgggtctttccgacggcgccattcacgacgcgctcaagcagggcgaaacgttcgccttcgaacgcacggcgctttaccacggcgtattcgaccttgccgaccgcgcccccggccccccgctgccgcgcgccatcctccgaagcatcacaaaggaaagtcccaagatcacgcgccggctcaccaccg

SEQ ID NO: 171590 - DNA, 1304 bp, Arabidopsis thaliana landsberg
atgcctaaacagtctaccaacccctctactgaagaagaacaccttattcatgattatgttgctgaagaactcctagagctctgggttggatacaaagctcaagaggataccattggggagctaacttacaagatggaaggactgaaccatgcgatcttggaacttcaagaaatagttaaaggtaccccagttttgaattgaggattggtcaaaagagccttgttcagaagaagaagactactctgttgatcagaaggaagcttattttgaagaaaaagcaaatgagtactcatcctaccatatctcaagagaggatgcagagtatgattcaagcactttaaattcaaccactgaagatgaggatttctctgttcctctcttcaacctcttttctcactaagctctgtaagagtcaagtttagtgacttaaaacaagctcacttgggaggaagtcccatgtctatccatgtatataattttctatttttcttggttattttgatatttttgtttaagtgtttcaggtttgttttagtgaccctaagggagtcaacggtcgagtaaattcaaaccaagtcaagaaagatctcaaccgtttatcgagtcgaatgaggaggagtatttttagccattgatttggatgatcaaatgagaggtgcatcaccaccgtttgagcgagtgacttcctgaggtttattttggtccgtttgatctagtgattaaaagcaaagcattctccaccgtccgatcgagtgaagaaaccaaagaggttggaactggtagatgaagactctgaggaagaaatggcttcaccagaggaagctgatcaaaaagagagaggagatggtgatgatttggaatcaaagaagtgtgcaactcgaaacaagtactacaagcttctgaaccgcaatgagtttttaggaactcaatactctcatcccgagaccattgagagactcggcatctatgatgatgtagactacatgtttaattagtgcagcctgaatattcacatgtttcggccaatggagggtatgaggaagagaccatccagtttctttcatccgtggaattgttctaatatggagagtcagaagacgttgaaatcaggccagacggaagtttgggatacctggagttctgtgtgtatgacgtagagtatcggcttccaatcgagcatctcgaactgatgtatggatttccaagcgaaaagacaggagtcatcgttttgacaagatagagtttcagtcattctggatcacacttgggtctaaacataggttttcatcctctagaaccaagag

SEQ ID NO: 171591 - DNA, 1973 bp, Arabidopsis thaliana landsberg; identical to SEQ ID NO: 17060

SEQ ID NO: 171592 - DNA, 450 bp, Arabidopsis thaliana landsberg; identical to SEQ ID NO: 31994

SEQ ID NO: 171593 - DNA, 435 bp, Arabidopsis thaliana landsberg; identical to SEQ ID NO: 81260

SEQ ID NO: 171594 - DNA, 448 bp, Arabidopsis thaliana landsberg
atgcggactaaaaaaaatacgaagacacctatcacggtgaaagatattgcgcgtcaggccggcgtatctgtggccacggtgtcgcgggccctgaacaacccgacgcgcgtcaatgcaaaaacggccgcactggtccgcgccgcggcagaggcgctcgactacattccctaccgggcggcggggtccctggtttcaaagcgcttcaaggccgtcggcgcgctcatgccgaccatcgacaatccaatattcgccaaagccctgcacgccctgcaagccaggctcaatgatcacggctacagcctgctcgtggccagtacccactatgactccgaactggaggccagcgcactgcaatccctgatcgaacaccgcgtacacgctatcgtcctggtaggcgcacaacatcacaccggggtcgagaagttgcttgcgcgtaccgacatgccct

SEQ ID NO: 171595 - DNA, 430 bp, Arabidopsis thaliana landsberg; identical to SEQ ID NO: 78600
  unsure (1)..(430): unsure at all n locations

SEQ ID NO: 171596 - DNA, 304 bp, Arabidopsis thaliana landsberg
  unsure (1)..(304): unsure at all n locations
ttgttgatcgaagaacctatanaaagcacaaatacccacaattttgtctttctccattattcagttatgcaatatataaagttgtctcctatgtgattgttaatttgatctcacttctagattcatctgcaatatctttccttccaacgctgttatcttgttcacattatcatacatgtaacttcttctttttatttcttttgtatagattgtgaacccaaacaacaaagacattcgcgacataccgggtgtgggcctagctccaccagccatgaacagacgtctgctctggaaccattactga

SEQ ID NO: 171597 - DNA, 263 bp, Arabidopsis thaliana landsberg
ccatttttacctgtttactattattgactattactttacatgtgtaaaatagggctagactttctgatttggagaagaagatacgatcttcagatcctaaggtaaatgttttgatttttctaatcattgaattgtggtgtttacttctaacagcaaagtcctggatggaatttgctattgcgagtttgtaacgattttcattttttcacttttagactcttgatatggatagtggtggaattgtctctctttcggataaggag

SEQ ID NO: 171598 - DNA, 440 bp, Arabidopsis thaliana landsberg
ttttgcgaacatcgagagttcagtggaatatgacccttaagtgctaacgacgatctcttatttgagggagtaagcttaaggcaatttgagctatatcaaatttggcgccattgccgaagttctctttgtttcaccattagactaggtgtcggtttaagtctagactcttcttttctttcattactaattcagtttttctcttctttttctttttcttgtgtttcaggagctttaggaattcaattgcaacacaaagatgttgatagtaatacctgatgctgcaagagtgttaagggacagagctggtctggcatacaatgagtatggtcagaaaatcgatgagcaaggaaacctgctacctaattttgtcgagggtgtcgatcgataccaccagggtgtcgctcgataccaaggcggatatagagctgcagctgttgtag

SEQ ID NO: 171599 - DNA, 1306 bp, Arabidopsis thaliana landsberg
gagtcgctgttaccggttccctcgtaatttctagatctgttttttcattttcttcaccttttaatttttttcctagtccgatgatatatatgtatataatttagctccgaatagaccgtgatttccatagaaacttctacagatttgaaatctttcttcaagggatttgaaaggtcgtcagaaagaaaaaaaaggatgggaaacgcaaggaaagtggaagacgcgacaacaaacaacaacaacaagtcttcatcatcggtgttaatagcagcaactatgtgtataatcggattgcaagttcatgttcacgtcaaggatggttccgtcttttctgggattttcttcaccgcttccgtcgacaatggctttggtaaatgtttcgattgttttcatatgtttttgagtgatttggttttcgagctttcttatcggaatttgttacctattagagatctgaatgggatcttttactattgaatcctcctaggttctgttaatttcaactcaaacagacagtttataacagtctatgatttggacaattatggagttaggcttgtccacatcaaggacatgtacagttttggtatagtttcttaatatgtctctgtgtgatacaggcattgttttgaaggatgcaagaattactaagaaggggacaagtatatcgaatgtagcaagcgggagtgtggtcgatacacttgttattctgtcttccactattgttcaaataattgcggaagtgcgttcttttttccttcagttacttaccttttttagagcttcattagtaacaatctgtgtgacatgcttgtggatctctgtttcatagggagtctcgcttccatcaaatgttacaacagccaataatgaggtcggatcagccacagaaacattaccttctgagcctcgtttatgtgctgcaaataaatccacaaatgtttccactcaaggaaggggctttaatcataagaggtaaattgctttaagaaatcgccagatgataattgtgaaaatctcttaacttccgaaaacaggattacttagaatttttctgaaaaatgaagtaaatatgttaacagaaccctgatttccatctcaatatttgcattctgtgacaaattttctttttccatgtcaatcttagcaatctagtatagtttagcataccaatgtctaaactttgcctagataaatttcttccttctctctgattcttgtatgcttttgttgacaggcaggctggagctcagatttgaagcgtagtgtacaattccagaggtttatcaacaggataatgttagtc

SEQ ID NO: 171600 - DNA, 774 bp, Arabidopsis thaliana landsberg
atggcgagttataatcttcgttcacaagttcgtcttatagcaataacaatagtaatcatcattactctctcaactccgatcacaaccaacacatcaccacaaccatggaatatcctttcacacaacgaattcgccggaaaactcacctcctcctcctcctccgtcgaatcagccgccacagatttcggccacgtcaccaaaatcttcccttccgccgtcttaaacccttcctccgttgaagacatcacagatctcataaaactctcttttgactctcaactgtcttttcctttagccgctcgtggtcacggacacagccaccgtggccaagcctcggctaaagacggagttgtggtcaacatgcggtccatggtaaaccgggatcgaggtatcaaggtgtctaggaccggtttatatgttgacgtggacgctgcgtggctatggattgaggtgttgaataaaactttggagttagggttaacgccggtttcttggacggattatttgtatttaacagtcggtgggacgttatcaaacggcggaattagtggacaaacgtttcggtacggtccacagatcactaatgttctagagatggatgttattactggtacgtaccacgatctttttcacacagagattaaaaaaaacagtaatagtgattttaacttcgtacgtttctgatacacaacaaagaacttcgtacgtttttcgaagttttttcgtctttttcattttagatctgcgcggccatttttggttatgctattgttt

SEQ ID NO: 171601 - DNA, 448 bp, Arabidopsis thaliana landsberg
tgcaccggctggaaggtcggctcctgcactcgcgccggcggggctgactgccgcattccgcagggtccaccagtacatcgtgttctgcaccttcaacccggcgcagcatgccttagccgaaatgatccgcgaggaacccgggcactacgaggaactcggtgcattctatgaagccaagcgcgaccgcttccgcgagcagctgctcacgaccaaactgcgcccgctgccggtgccgggcgggtatttacagctggtctactattcggcggtcagcgacctcgacgatgcggaattctgccgctggctgaccatcgagaagggcgtgaccgcgatcccgctgtcgccgttctacgaaaccccgccgcccgggcagcgcctggcgcggatgtgcttcgccaagaacgaagcgacgctggacgcggcgatcgagcggttgcggacgctatga

SEQ ID NO: 171602 - DNA, 471 bp, Arabidopsis thaliana landsberg
  unsure (1)..(471): unsure at all n locations
atggacaccggggctgtgtacatcggggcagacaactttaaattttatgctttcaaaagaaagaccggtgacctgatctgggaatacacgaccacggcgcccatcacttcctcccctgtcgtctacggcggcaatatcatctttggcggggacgacggcaaattatacaacctcgaatataccaagggcgtaccccgctggatcatggataaggctaccgaccgtatccgctcctccccctatcttcatggacagactgtgtatgtaggcagctacgacaagagtttctatgcggtcaatgtactggacggctccctgaaatggacgttcaagactaccgggctgatcgcatcctcttctgtagtgtacaaaggcaacgtgtactttggcagctatgacaatatatgtatgcgctggatacagccaccggnaagctgatgtggcaatatgccatcaaccggctgatggact

SEQ ID NO: 171603 - DNA, 1271 bp, Arabidopsis thaliana landsberg
gtccaaaagtgaactttgttaaggtttggttcggttcttgatgtctaagggtctggttctgttcctaatttcttagggtttggttctattcttaatgtctagggtactggtcttgttcataatttattaggagtttggttctgttcctgatctcttaggatatgatatgttcagcttcaaatctgattccttaattcttgatgtcacgttagtttggtttccttgtcactaagtggaacatttaacctatgtgtgtgccattgtcatttcgtaggtaatcccaagaagctacaacaggtattatccaaaccctctccctcagacagctgttctcaagaatccggaaggaagattttggaatgtccaatggacaaaaagccaagaggtgattattagcttgcaagaaggttgggtaaagtttgtcaaagacaatggtcttattgacagagactttctcttattcacctatgatggttcccggagcttttgggtacgcatccaccggaatggcctccccttggagccaaccgctcctatcaaaatacaagagatatcggatgatgaagatgagaccaatggtgatggtgatcctcatatggaagaagaaggagataccgatgagaacatgatagtttctctttctctcggaagcagcgatgaagttggtgatgatgatgatgatgattatgatacagcgatttgtgatgaagttaacaaagctagtggaagttccaagaaaggtaaaccaaacttgtctagtttttgtttgtattgatgctaaaaatacttattgagtgatcttcttcagcaggaagggttacaagaaagcatcgtgatgattctcttgcttctattactccgcaaatttttcttgctgatcccaataacccgttcttcatttcaacttcatcgtgttccaggcgtatattggtaataaagccttttgaactttatgttgctttgttgtgaaaaattaactatgtatttactagtcttatgttggttgatcgtaggtaattgctaggcaagtaataaaagactatggcttaaactttgacggcacggtcaatctaatcgatggattcggggaattaacgagaaaggttgggaaatggaaagatcgtgttgtgatatacaagtggaacgaaatgtttacgaggaacaaagtaaagcaaggagacgtaatcatatgtgagattatacgcgaagaagatgttgttcgctccatcaaagttcattcgtgaagaattgaggggatccgcatagagtcg

SEQ ID NO: 171604 - DNA, 532 bp, Arabidopsis thaliana landsberg
  unsure (1)..(532): unsure at all n locations
gaagagataatggcccgcaagcttttcggcaccgacggcatccgcggtaccgccaacaagttcccgatgactcccgagatcgtgctgaaggtgggccaggcgctcggtctgatcctgcgccggactccgcgccgcggaaatcacaagcccatggttctgatcggcaaagacacgcggctgtcgggctacatggtcgagcaggccttggcgagcgnnnnnnnnnnnnnnnnnnnnnnnnnnnnnnnnnnnnnnnnnnngcccacgccgggcatcggctttctggcgcgcaacatgcgcgtggacgcgggcgtgatcatctcggcctcgcacannnnnnnnnnnnnnnnnnnnnnnnnnnnnnnnggcgccgacggcttcaagattcccgactcgatggagcgcgagatcgagcgtttcgtcgaagaggaggacatcgtcaagcatctcgccaacacgcgatgcgatcggccgcacccgccgcataaacgacgcagccggccgctacatcgtttacgcgaagaacgcgttctcg

SEQ ID NO: 171605 - DNA, 3039 bp, Arabidopsis thaliana landsberg
  unsure (1)..(3039): unsure at all n locations
tgttcattgcaggaaggtgaacatcaaaggttggaaaaaaaatttgcatttaagggtcttaaggatctatcagaaattttgataaggcacatttttcttactcacacaatgaagctatggatttatgtgtcagtcttgcatctttttctcattgaatgaggttttttaaattctttcttcaggttattacctgatcgcaagctgaagtcacttttacagcgacctttaaacatcattccggaaaataaggatggttactcgcttttgctgttttggtactgggaggattgcttgaaacagaggtaaagatctcaaatcatgccatgagggatgtgtttaatcacactatgtcaaagatctgtgtcttctatccgtaattgttctgggtcgatgattcgtttaacagcttagcatgctgactttgtaggtatgagcgcttcgtcacagcccttgatgaatcatctaaagatatgcttccagagctgaaggacaaggctttaaaggtatatatcctatcaccactctgctcgtgctagcttgtttagtagcactggtctccaggttttgtaagattcttgatgagctttaatattagagatttgagtatcatcaatgtaatccttctctggatgatgcataacggcatggtccgtggttttcttttagctacagtgagtttttttgcttggtaacgtgattcggatctttccttcagtaaaatttttcttgtttggtttcagacaatatatttcatgttgacaagcaaatcagaacaagagcggaaattgctagtgtcattggtgaacaaggtattgtttgttgttcattcaaatatttgtatctaatttaaatttctcagttgtgatccctttaattgttccatggattactttatattatagttgggggatcctcaaaacaagagtgcatctaatgctgattatcatctgacaaatcttttggctgatcatcctaacatgaaggtacggctattcaaccttcctatgccagtttcagtatttcgtttattaattggttgtttggattcttctctttggctcatgtaatgttattttttttcaggctgtggttatagatgaagttgactcctttctcttccgaccccatcttgggttacgagcaaagtatcatgctgtatgtccattgttctactctaattatgttcacgagaaccatttttctttattttcttgctcttctttttaaactgattcacgcttattgtcgtctaaagtattgtctttgatttgaatgggaaacaattttactaagactttagaaaagaaaagaagcataaacttatccatgtttagctttctaaacaatgctcattaatctttgtaaatttcacaggttaactttttgagtcagatccgattgagccacaaaggagaggatccaaaggtggcaaaacgtctaattgatgtatattttgccctgtttaaggtaactggcattgaagtcaataaatttaacatttccttatgatcttcttaaaatttagtccctccacttccaccttactttcatgatctcagagacttctgctaccccttagtgttttcttttggggtggcgtttgtcataagtcataacatgaaatctttcactagttggatattcactacagaagtgtgtttgcattcttgtaggttttaactacagaagcaaataggaaacaaggtgcagatgacaaaggagccgctgataagaaaaaatccaacccaaaggacacaaagcaagaagtgtcaactgattcacctattgagttggattcaagaattctatcagctctactgacggttagtctggatgtgtttttttggtgtacatgatgtatgtaattttaaagtattgagacttcacagatcaacttatgctttagtactccgtaagtgcagggagttaacagagcttttccatatgtttccactgacgaggctgatgatataattgaatcccagacgccagtgcttttcaaactggtaaccatttaaagcttcattatagaagtttagtttcatagttacaaccgaaaattgatatagaaaatgggattttgaatatgtaggtacattcggcgaatttcaatgtaggagtccaatcactgatgcttcttgacaagatctcatccaagaataagattgttagtgacaggttttaccgtgcattgtactcgaaacaactactcccctccgcaatgaattcttccaaggcaagctaaactttgaaccttctgtttttccatgttccaatcacgtcantttattcttagtttatgtatgggttataataacccttacaatttggtagagcccggaattggtttatgaatgttggcataagtacattcatttatttataatcttgtgaaagcaacttatattgtgacaaaaacatcaagatgtctgcccctggcatgaaccatagcattttcttaatgaccgagtttactaagttgccgttcttaatttgcaggctgaaatgtttattgggcttcttctcagagccatgaaaaatgatataaatatcaagcgtgtggctgccttctccaaaagagtcttgcaggtcggtaacatgaatcatataaaccatcaaccccgtcgtttgtagctctagtttcattgacaatgatgacaatattcgcatcattgatcctatacaggaatcttgattcttttgttattaaattttcgatgtcgacacactgtatagtaaatttttttgtcatctctcaagtgtactctttaacgatttgagtaggttgcgcttcaacagccaccacagtatgcctgtggatgccttttcctattatctgaagtcttaaaatcaaggccacctctatggtaagctttttttcgttctgttaaccacatatccatggtttttagtttttttacccaatgatacaatgggtccttctatttacgttgcaggaagatggtggtccagagggaatcagttgaggaagaagaagatgtagaacattttaggatgtatagagggagatatgttctg

SEQ ID NO: 171606 - DNA, 495 bp, Arabidopsis thaliana landsberg
ttctcttctttcttcaattgtttggttatcgatctttgttgttattgattgttgttgttaatgcaggtttatcaactatctattggagctgcttgtggactctcatggccttctgatcgaatcgttattcaagttcttgatgattccactgatccaacgatcaaagtaattttctttttgattcttttccgaaatgggttctcaattacatcaaacctaaaccgttacgtttgttgtggcaggatctagtggagatggagtgtagcaggtgggcgagtaaaggagtaaacatcaagtatgagatcagagacaacagaaatggatacaaagcaggagctttgaaagaaggaatgaagaagagttatgtcaaaagctgcgattacgttgcaatcttcgacgctgattttcaacctgaagcggattttctatggagaaccgtaccgtatctactccataaccctaagcttgctcttgttcaagctcgctggaaattcg

SEQ ID NO: 171607 - DNA, 1893 bp, Arabidopsis thaliana landsberg
atgaagaagagcaaagagaaagagaactgtgtttccggcgacgttggaggggaagccggtggttctaacattcaccggaaagttctccaagctgactccgtctggctcagaacttaccttgcggaaacagacaaagaacagaacaaacacgcgattgcggttgctgctgctacagccgcggctgctgacgcagcggttgcagcggctcaagctgctgtggcggtggtcaggttaacaagtaacggaagaagcggaggatattccgggaacgcaatggagcggtgggccgcagtgaaaattcaatcagtcttcaagggctatttggtaaatttcttaaaaacctccaaaacactttttttttttttggtgtgtaatcgatttcgacgcaaaaagattgaattttgccatgtgggtatcgtttagattcgacaaaactaaaagaaagtatgtctgtactttacttgctccttacacatcttcgttaatgaaacagtacaacacatctttgctaatttcaagaaagttagattcttttctgattaaacactaaaatgtggttatttggtctaagtattttttttttttgttataggcgagaaaagcgttacgagctttgaaaggtttagtgaagctacaagctttggtaagaggatacttagtccgcaaacgcgccgccgaaacgctgcatagcatgcaagctctcattagagctcaaaccagcgtccgatcgcaacgcatcaaccgcaacaacatgtttcatcctcgacactcacttgtaataaccattctttttcttttgtcttatttctaacataatctctatagtcaaaacttatgttttgatggattgatttgattataggagaggttggatgattcaagaagtgaaatccatagcaagagaatatcaatctctgtagagaaacagagtaatcacaacaacaatgcgtacgatgagaccagtcccaagattgtggagattgatacttacaagacgaaatcaagatcaaagagaatgaatgtggctgtatccgaatgtggagatgatttcatctatcaagccaaagatttcgaatggagttttccgggagagaaatgcaagtttcctacggctcaaaacacgccgagattctcttcatcaatggctaataataactattactacacgcccccatcgccggcgaaaagtgtttgcagagacgcttgttttaggccaagttatcctggtttgatgacacctagctatatggctaatacgcagtcgtttaaagctaaggtacgttcgcatagtgcaccgagacaacgtcctgatagaaaaagattgtcacttgatgagattatggcggctagaagtagcgttagcggtgttaggatggtgcaaccacaaccgcaaacgcaaacgcagcaacagaaacgctctccttgttcgtatgatcatcagtttcgtcagaacgagactgattttagattctataattagtaagaaacgttattttcgtccttaaagaaaatatcgtcatagcctttgacttttcatttatgacttttccttttctttttttgtgtaaattattgctttgctttggaaaaaatgtgaaatttgcttcttttcctcttcatgtacgttggtcttgggtgggacatgtgccctgaattcaataaattttatataaatttgcactaggttgttaacaatgtaagtagtgtagtggtttttacttaatggtgtcccacattaacccaagtttaagtcttactaatgcctttttattgaaaattttttactgagtggaatgctttttgttgatcccgcataagagcagtaagaaacttatccataattcaaaattaaaatgttcttcaacagtaagagattacttgagtttagatatt

SEQ ID NO: 171608 - DNA, 767 bp, Arabidopsis thaliana landsberg
cattttaatggttcagtcaccaacaacgagaagtacgtatgtcggttccgggtttctgtcttccgatggaggttagttaaaacttatataataggtgattatttgcaatactgataatactgtagaatactatttgtattagatattgttttcttattctgtagcttcttgcattcgaggcaatcccacagttgagggaaaaatttatggaggacattgcaggagcagatgagggatgtcctaggatgtgcaaggtgaggttcaagaagaaccatttgaaaggctttcctcttgataccatttatgcagaattgggtataactcaggttagttgtcctagatttactgttttatgaaacgtttgctattctaattagttataataattcattcatactgtttatctttacaggtcattgattgtatcatcacacctggaattgaggagcatgacctcatgaaaaaaaatcacggaagaagaagactacgttgacgtggctgatgtggtggcttgatcatcaacaacaagacgagagagatttcgagttcgtgattttttttttttttggtctttgacggctttagagagaattttagtattaaaaaagttgccagaaatacgaaggggaagacaaattctccagaattttggtcaaagaagaataacacggtagcgtataaagattccaaaacggtagcgttttaaactatcctaaacaatcagatatctaaatttaatagtcaacttaaacacaaaagcgtttgta

SEQ ID NO: 171609 - DNA, 799 bp, Arabidopsis thaliana landsberg
atggtgttcaagagaaagttagattgcctttccgtgggatttgattttcccaacattcccagagctcctcgttcatgcagggtaaattttgattcatctggatctgttagctcaatgtcatgaatttgccttctgatgaatctttttttccagaggaaggttctaaacaagaggattgatcatgatgatgataacactcagatctgtgcaattgacttactagctttggctggaaagattctacaggaaagcgagagttcctctgcgtcttctaatgcatttgaagaaattaagcaagagaaagtagaaaattgcaagactattaaatctgagtcttctgaccaaggaaactctgtgtcaaagcctacttatgatatctctactgagaagtgtgtggtgaacagttgtttttcatttccggatagtgacggcgttttggagcggactccgatgtctgattacaagaagattcatggtttgatggatgtagggtgtgaaaacaagaatgtaaataatgggttcgagcaaggagaagcaaccgatcgcgtgggtgatggaggcttagtcactgatacttgcaacttagaggatgcaactgcgttaggtctgcagtttccgaaatcagtctgtgtgggtggtgatttaaaatcaccatccaccttggatatgacccctaatggttcctatgctagacatgggaaccatactaacctaggtagaaaagatgatgatgaaaaattctatagttaccataaacttagcaataaatttaagtcgtataggtctccaacaattcgaa

SEQ ID NO: 171610 - DNA, 849 bp, Arabidopsis thaliana landsberg
gaaagctgcgtccgagttcaaacctgaaggcggttacaagcagtttctgacaactagtggcctcaaaggtaagagattagggattgtaatgaagcattcttctcttcttgatcatcacatcaaaacattaaggtaaaatgcgttataagaaaattttcatcatctgagaacaccatatctaattctagttctggttttccttggataaagacgagaaggcgctattgtcattaacaatctgacgataccaaacatcgaagtcattgtgggtgggactgatagtggtgaagagatagcacttttggctgagttcaagatgtctctcaatgcatatcttaaagagcttgtgaaatcaccagtccggtccttagcagatgttattgcctacaacgaggaattcgctgaacaagtaagtactaagcttcaaacgatttcgattttttcttgtttggtagctgaacaaatgtgatcattgaactgaaaaaaacacaggaaaaagtgaaagaatggggacaagaggtgttccttacagcagaagccactagtggaatgggtgagaaagagaaaacagcgttgcagaaaatgaaagaactatcgaggaatggaatcgaaaagctaattgaagagaacaagttagatgcaatagtgacacttggttcagatttgagctctgtcctagccattggagggtatccaggaatcaatgtccctgcaggatacgatagtggaggagttccatatgggattagttttggaggactgagattctcagagccaaagctcattgagattgcttttgcctttgaacaagcaactcttattagaaagccacccaagttcatagcttga

SEQ ID NO: 171611 - DNA, 436 bp, Arabidopsis thaliana landsberg
gtcaaacccatgtccgatcaagaaacctcccccaatccggctccggctcctaaagcctcctccaatcgcggccgcctgttcctgatgttcggcggcgccgtcgtcgccatcgccctggtctggggcggctatgaactgctgttcggcggcaagaccgtctccaccgacaacgcctatgtcgatgcgtcgtccgccaccatcaccgcccagatcgccgcgccggtcgcgcaggtcgatatctacgacaccaagccggtgaagaagggcgatgtgctgctgaccctcgacgacactgacgccaaactggccctggccgccgcgcaggcccagctcgatcaggtcaaccgtcaggtctcgaccatctgcgggaatgacaacaccttaccgcgcaggtgcaggcctagcaggcccaggtcgcctcggcccaggccgacct

SEQ ID NO: 171612 - DNA, 481 bp, Arabidopsis thaliana landsberg
ttcttctgaaaattcgtgacagatggtcagaagaagattttggaaaccctatttttattcacaaagataatgcaaaaacgcacgttgatccgagagataaggacttccgagaagctgcttctcgttatgattttgatattcgtttgatgtgtcaaccaccaaactcagcggacgtgaacattttaattattagatttttagtgtcatctaatcactacagcaccgggtgaatccaaagacgatagaagatcttgtttttgcggtaaaacaatcttttgatgaatacccattgaaacaagtgaaccgaacttttttgactttgcaatcatgcatgcaagaaattataaaaatccgaggcctaaacaagtacaaaatcccacatttgaagaaggccatcttagagaaagaaggaaatctaccttcacaaatggcttgtgatcctattttagtacgagatgtaataagttacttagcaacttaa

SEQ ID NO: 171613 - DNA, 1407 bp, Arabidopsis thaliana landsberg
aagtgtcataaggcactacgatgttgatatcaaaggagaaaattcttcaaaaaagatatcaagatttgagctagctatggtcaaagaaaagctgttcaaggacaataatgactttcctaacgccatgacagcgtacgatggtcagaagaacattttcagcgctgttgaattacctacgggatcatttaaagttgatttctcagaaaccgaggagatcatgagaggtagaagctatacgttcatcatcaaacaagtgaaagagctaaagttacttgacttgcaagcctacatagatggacgttccacttttattccgcgtgatgtgttgcaaggaatggatgttgtgatgaaggaacatccttcaaaacgtatgatcactgttggtaaaagattctttagtactcggctagagattgactttggatacggagttggagctgcgaaagggtttcaccacactctcaagcccacagtacaaggtttatcattatgtttgaactcctctttgttggcgttccgcaaagcaatttcagtcatcgaatacctgaagttgtactttgggtggagaaatatacgtcagtttaagaattgtaggcctgatgacgtggtacaagaattgattggtttgaaagtcactgttgatcatcgaaagaccaaacagaaattcatcattatggggttgagtaaggacgacacaaaagatatcaaattcgattttattgatcatgctggaaaccagcctccaaggaaaatatccattgttgagtatttcaaggaaaagtatggaagagacattgatcacaaggatattccttgcttgaatttggggaaaaagggtcgggaaaattttgtacccatggagttctgtaacttggtcgaggggcagatttttccaaaagagaaattgtatagagattcagccgcgtggttaaaggagctttcactagtcactccacaacaaagactggagaatataaataagatgataaagtctagtgatggacctagagggtatgtggacaaaagatttttatatttattttttagtcttatgaccttaatcttatccttttatgtatatttatgacagtggagatatcattggaaacttcggattgagagtggatccaaacatgacaacggtggaaggtcgtgtactcgaggctcctacactgaaattgactgatcggagaggcaatcctatccatgagaaactcatgagcgagagcaatcaatggaaccttacgacaaagggagtcacaaagggttcaataatcaagcattgggctgttcttgacttcactgcatccgagagtttgaaaaaaaagatgcctggttactttgtaaataaactcatcgaacgttgtaagggacttgggatgcagatggaggctcctatcgtttgca

SEQ ID NO: 171614 - DNA, 592 bp, Arabidopsis thaliana landsberg
atggtggatttacaatacttctccgtaatcatccttgtatgtcttggaatcacagtcttgatccaagctattactaacagattacgtgacagacttccactcccaccaagcccaacagctttaccgatcatcggtcacattcacttctttggtcccatagctcaccaagcacttcacaagctctcaatccgctacggacctttgatgtatctcttcattggctctattcctaatcttattgtctcatcagccgagatggcgaatgagattctcaaatccaatgaactcaacttcctgaaccgtcccacaatgcaaaacgttgactaccttacttatggctcagccgattttttctcagcgccttacgggcttcactggaagttcatgaagagaatttgtatggtggagctcttcagcagcagagctttagatagctttgtttccgtaagaagcgaggagttaaagaagcttctaatacgagttctgaagaaagcagaagcagaagagagtgttaatcttgcccaacccctaaaggaattgccgagcaacataataaaaagaatgatgttcaggacaatgcaatcggatagtg

SEQ ID NO: 171615 - DNA, 1392 bp, Arabidopsis thaliana landsberg
ttaataagaaggtcaatgagctgcaagatgaacttaccagaataaagcagagacaagaacctgaagtgggtgaaaactctgctgctgccagggtaagtgattccttctccctttattccatcagttttggaatcacttctttttattaaagtttggccttcttttgtagagtgtaaacagaagaacaaaccctaaatgtctgttggttaattggtctggtcctgaggatatcattggtgaggggcgaattctttcttctgatcctgatgacgtggttaatgactgtcgtctaggccctgtggacttgaaggtgttggttgaagctgctaatacaccagatgcatttctatggcgacctgcacctaacatgtatactaccacgcacagctgttggacagatgattgcatggcctgcatctaaatgtgttcttgtagagaaggatatcgaaatagaggacattgtgcctttggtaaactgcagatttcagcacattcttagtcagctttttgatgagttcatgtttgatctagtagagacagagttaatttgattttttaactgaatgtgtttgacagggacttagaggaaattctcagaacaaatgtaagctattggatttgtcaacagatgaagtcattgttgctgagggtcgatggcagacacaagagcaaaatgcattggttaatggacttcctcttggaccgagcgcagttaaagtttttgtggataaagtgctcatgccagaaacatttgtatggaggcctacaatggaaatgacgtaccttgaggattgtttgaaggcttttatatcatggcctgtgcataaagtggtatttgaaaatctcccatctgctagtggtaatcagaagtcatctcttcagccctcaggatcaacttccaaatcttcagcaggggcaaaatctgcagcttctaaatccacaagttctaagtcttcagcttcaggatctgaaactcctttggagaatgcaaatgctccaagctctacaagtcagaaaactctacagaaatctcaggtaaatgtttccttagtatcttgaaattgcttctgtcatattgaatcagtctttggtttattaatgttatgaacatggcagtgtttcaatcaaggcgtttcaaaggaaaataagaagtgcatgttgatagacattacagacaagaatcaagtagttgctgaaggacgatgggcaacaaatgatccaaaccagaaggttcactttgttcctttgggtcctaatgcagttaaagtgtgggtagacattgttaaagttagcgacgtagaagtttggaggaaatcagatgaaatagagattatggaagatgccattgggacagttattgcttggcctgaggacaaagtgatcatggcatga

SEQ ID NO: 171616 - DNA, 1447 bp, Arabidopsis thaliana landsberg
  unsure (1)..(1447): unsure at all n locations
gttgaatcaggttcncttttcttttcctcgttaagccctcttctattttcagcaaagaggtctctttaactagttcatgaaggacatgtacattgattacacagagtttttgcgctgagccactaattttcttgctaatgttgttggtacaggacggaatgcagaaggagatatttgataagtttatctctaaattggagaaacattgtgaaataatctcaattggaagtgaagtagattaccgccgagttgcagcaaaaaattcggttgaaaatgtgtgaatcacagactctttacatcgtttaatgttgtgttcttttttgcttctgttgacgaaattgtaaacgtccatttataggttcactacttatggcctttgaatgatgctgttctggaagagtttgagaaaatgtggcgtcaggtcactgaccagtacggtggagaaataacttcggcgactctcccagtgatgtttggaaggtactaatgatagcaatggtttttcttttttgatgggttaaatcaaaccataatggtctttgttgtgtgtgtatcatcagaacagtggaagttcctgaaagctgtagtggagtggcaaggttcacattcgagtatctatgtggtcgaccggtaggtgcagcagattatatcgcagtggccaaaaactatcatacaatttttatatctgatattccagcaatgagcatggagatacgcgacaaggtataactaaaatcaagatttatggcttttgatgtttgctgattccttcctctaaggacttttgatgttatcaggcacgtaggtttataacccttgtagatgagttatacaaccatcattgttgtcttgtctcaagcgcggagacagcaattgatgagttgtttcaaggaactgcagagggaacgctctttgacctggaaaggtaagaacacataattgacaatctggtttacggtatgattctgttcaggtttagtgggtttcccggtctttatttctgtttgtttttaggtgaaatttggttcgttttagattcattttgactcagtaatggttttatcatttcgatttggttttggcttaatcattatgattcagtttgatttacatatgccaatccgattacactagaatcagtttttgtttggggtcagctttaaagtaatataaccaatcggattataaacacatttcgatatggtatcggcttgatcattttgattcagtttgtttacatgccaatcctttaaattgcaccaagatggtttacttttgtgtggttatcacataaaaaacttgcagcttccagtttgagactgagacggaagattcaagattaaggcgagatgtgcttgcagaaggtagcataagtgcagctggctcgccttcttcgatcgtatcaatgctttctggtgaagaggaaatgtctgcttttgctcgagcc

SEQ ID NO: 171617 - DNA, 1539 bp, Arabidopsis thaliana landsberg
gttggcttgcctgctcgaggaaagacttttactgcagcaaagttgacaagatatctacgctggttgggacatgatactaaacattttaatgttggaaaggttagctattttgttgcaatgattcttgattttttttagcttctcctgtcattacgcgacccttgttggaaagattgactcaaacattgctccgtttctttgcagtaccgacggcttaaacatggagttaacatggtaaggcttggttcttaaaactgagttttatatgtttctgtcctccttttagacgatttttgattgacaacgcatgagccttttgtagagtgctgatttcttccgagctgataatcctgaaggtgtagaggcacggactgaggtaaatgaaaaatcgaataatttagttaagccattttccgacagtctcttctaatttgtgtgtgtaaatcgtttttatgatattttaacttaaattcgtcatattttaattcagtggtaatgttaacactgtttatcttcttctttgcacatagttttaatgtatcacatgccactaggtagcagcacttgctatggaggacatgatagcttggatgcaagaaggtggtcaagtaagtatctttcggtttagatgtaagttcctggtttttatatcttgcattgtaaatagtttttagctgtaggttggaatctttgatgcaactaatagcacacgagttcgacggaatatgttgatgaaaatggctgaaggaaagtgtaaggtattgaagctttgatatactgtgatgttgtttctcatttaatggcacggttattcttctgcggaaagcatgcttggttagcagtttctattttcaaagaattgctttgatgcagcgcttgtaatgctgcatggctaccttcgactaatatcggatttggaattatcctcctaactgatttaccttttatctcttatgcagatcatttttctggaaacactatgcaatgatgagcgcattattgaaagaaacatacgtcttaaaatccagcaaagtcctgactattcagaagagtactatgctcgctctataactaatattttctcgtcctctttcacgggtcaactgagtttatgctactctgcagaatggattttgaagctggagtacgagactttagagaccgtttagccaattatgaaaaggtcggtacacaaacctgcactttctaaacgtgtcctaattactttttaaagcttagttaacttttctttgatgcaccatcgtcttggtacttaagacaaatgttgagcttactctttttttttgccaggtttatgagcctgtagaagaaggttcgtacatcaaaatgattgatatggtcagtgggaacggtggacagatacaagtacgtctctgtctgtttctgtaaaattaaattggcgtttcacatggctatttcatctagtcttaatctcgatatggtacttgatcggttcgactgttcatgactgttattctacttttgttgcaggtgaacaatattagtggttaccttcct

SEQ ID NO: 171618 - DNA, 1598 bp, Arabidopsis thaliana landsberg; identical to SEQ ID NO: 21248

SEQ ID NO: 171619 - DNA, 872 bp, Arabidopsis thaliana landsberg
atgtacggacgtgatccatggggtggtcctctagagatcaatgcggcggactccatgacagacgacgatcgtagtcgaaacctacaagaccttgaccgtgcgactccttcgcggccactcgacgaaacgcaacagagttggcttcttggaccaaaagtgcttaagaagaaaaagtacgtcgatcttggatgtatcttagtcagccgtaagatctttctttggactcttggaaccattgtagtaactgctcttctctctggattcataactttgatcgttaaaacattgccacaccaccaccacaaggaaccaccaccggataattacactatcgctctccgtacagctctcaagttcttcaatgctcaacaatgtaagcactaaaactttgagattttttcttcatgtctcaattttgatttcttatgtgatgttgatgttgctttgcagctgggaaacttccaaagaacatttataatgtatcatggaggcatgattcttgtctacaagatggtaagggagatccaggacaatgctacaaagatttggtaggaggttactatgatgctggagattctatcaaattcaacttcccaatgtcttatgctatgactatgttgagctggagtgtaatcgaatacagcgcaaagtaccaagctgctggcgagcttgaacatgttaaagaactcatcaaatggggaactgactactttctcaagactttcaatagtagtgctgataacatctatgttatggtggaacaggtaagaaaaaaaaaacagagtttagaaaaacttacttacttcgctgtttcagctactaacgtttgctttttcataggtcggatctggagttagcggtagaggaagtct

SEQ ID NO: 171620 - DNA, 565 bp, Arabidopsis thaliana landsberg
  unsure (1)..(565): unsure at all n locations
nnnnnnnnnnnnnnnnnnnnnnnnnnnnntccggggctcgaccgaggagaaggcccggcgcaaggcggccgaactcgacgagtggatcgactacgacgcgcaactgtcgcacatgtccggctcgatcggcatcgacttcggccacgaggacctcgacacgcccgtcggggaactcaggaccgagggcgtgcagagcgtcctcggctggatcagggacctggttccggaccggcccgccacgctgcgcgatgtcgcccactacaccgccaccaacagccggatcgtcggcacccccgagcagatcgccgacgggctggcgcgctggcgggaggccggcgtggacgggatcaacctggtcaacgccgagatcccggggtcgtatgaggagttcgcggatcacgtcgcccccgtgctccagcagcggggcctgatgcagcgggagtacgcggacggaacgctccgccacaaactgttcagacgcgcccaccgcccgcccgagcggcatcccgccgcccgcaaccaaaacgccttcgctcctcggcccacctcaccccagcccgcttgg

SEQ ID NO: 171621 - DNA, 789 bp, Arabidopsis thaliana landsberg
  unsure (1)..(789): unsure at all n locations
cagcagatanagagtcgaatgagaagtttgaagagataatgagcagtgtgaggaagaaagtaagagatttccaaanagagacatgtggttttctggaagtggaggcaatggatagagacaacgggaactgtgatcctgacgccaagaattcaggtgaacagagataaacagagatgtgagagacgtgaccaaaggcttcttgaacaaaagccaaagagatcagaacaagacgcgggggtcaaggtgaaaaaaccagctagaaggacaggtacaggaggttacagtagagaagattccgtgattcttggtcataccataacaaaaccggctcatcagtgggaaaagctcaaggaagtcaaactaagagaagtgaagctgaaggctgaccaacagaggaaatctctgtacctaaaaagggagctaaacagaataggaacaaaaggaaacaacaaagttagagttttttcaccaagagcatctgaaaaatgcagagttaaagctattgaagacttgaaaaaggccaaacagagagcacgggagcacgagcttctgatagaaacagcagatggaggaatggagaacgaaagctttgcagtagtgaaatgctcaagtgatcctcagaaggattttagagattcaatgattgagatgattatggagaatggtatcaaccatccagaagaactcaaagagcttctggtttgttatctcagactcaatacagatgaatatcatgacatgatcatcagtgtgttccagcaggtgcataatgattttaattttcattaa

SEQ ID NO: 171622 - DNA, 1158 bp, Arabidopsis thaliana landsberg
atgtctggttttgtgggtgttattgtttcggatccatggttacaaagtcagcttacacaagttgagctaaggagtcttaattccaaggtataaagttactctctttctcattggtttagcttccgtggatgcaatctaaagagaagcttgttttgatttgtggttttttagtttgttgcgttgaagaatcagagtggtaaggttacattagaggatcttccatctgtgttggtcaaggtgaagtcacttagttcatcatttaaggagaaagaaatcaaagaaatcttgggaggtttgggttctgattatgaaagtgatgatgatcttgatttcgaatcgtttctcaaggttagtttgatctttttctgtgttgcgtcgagttttgtttgttcttgtgaatctcttttgatgaatgtgatgtgtaatgtgtgtaggtatatctaaacttgcgagataaagctgctgataaagctggtggtggtcttaagcattcatcttcatttcttaaagccggcactacgactcttcataccataaaccagtcagagaagggttcttttgttcttcacatcaatagatatcttggggatgacccgtttttgaagcagtttcttcctttagatccggattcaaatgatttgtatgaacttgtgaaagatggtgtgcttttatggtaatgaacttatgtgaaaatttgtgttttggatttcagtctcaacattagtacattttggtttctggattttgacttgtactctctttttcctttgttggcacagtaagcttataaatatagcagttcctgggacaatagatgaacgagcgatcaacacgaaaagggtacttaacccatgggagagaaatgagaatcacacgctctgtcttaactctgcaaaagctgttggctgcagtgtggttaatatcgggactcaggacctggctgaaggacgagtatgttatgcttgcttagttttcacttttcagtatatcataatatattggttgagacgaatatagaagattctgactgcagatgtttcattgtttttgcagcctcatctggtgcttggattgatctcacaactcataaaggtccatacttgtttgctatgtgcactgtcttgtgtttgtgcttgatgatttactaaccaatgctgg

SEQ ID NO: 171623 - DNA, 1142 bp, Arabidopsis thaliana landsberg
cataaagagaagaaaaagatgggaaaaccaaagaagacatataatggaacatatggtagattgttggcttatgctgctcatgctttggctgaggtattatcctttccgctttcgacatttcgaattcttaaaccgaaaccgaaaagcctactgaccgagacattgtgtttgttaggggcaaaacaagcttgaaccaaaagagttgtggagagaaccaaaggaccaagctttggcttggaagccttgtgctgatcaacgttcctggaagcctagtggtctcttactcttactctctgtgagtttacttctcgtgctatgtaggtatttataagttatcctgattttgtttttttttatgtgtgtggagtttagatgggaaaaatggatatctaatggttactgcaaatggtggggtcaaccaacagagagttgctgtaagttgcgattgcgttacacattactttgtcatgtcccactctttatattgactaaccgttggattccgcggggacattattaaaacaggtttgtaacatcgttgttgttgcgcggatgctaaatgcgacactcgttgttcccaaattcatgttcagtgatgtctggaccgatgcaaggtaactattgtaaggtccctccgttctctgtctccttctcttataattgatgctttcttgaaaacatcaaaatttgacactcttgattggtacgtatatgtttcatagtcagtttggagatatctatcaggtggaacattttatcaagtatctctctcctgatatccggattgtaaagaaacttccaaaagagcttcagtcactagatcttgaggctataggcagcgtcgtaagtttcttataccgcttagtgagaaaaaccggtttcatcttcgtaatttttctaatgtagttctattttatgtcgtttttaaggttacggatatagatgtcatgaaagaagccaagcccgggttttatatgaagcacattcttcctcttctactcaaaaacagagtcgtccatttcttcggattcggaaaccgtttggccttcgacccgataccgtttgagttgcaggtaaaagactttcttttcaccgtgcttattgatatctaacctggattggatccaactttgttttgggga

SEQ ID NO: 171624 - DNA, 807 bp, Arabidopsis thaliana landsberg
agtgcttaagatttctaaatctacaatcttggatttagggttttgatattagagattgattttgctagtgaaatttcgtgtatagtgtgttgtttgatgaagctgaagagaatttgagatttggtttttggtttttggcaggtggtaccgaatcgagtgcttacggaatcagtatcgtttggtagatatgcgaatgaaacactagcgtgggcgagatggtcagcttttactcagaatcgttacttggaagaggttgagaggtttactaaacctggttctgtagcagagaagaaagctttctttgaagctcatttcaagaaccgagcttcagggaaagcagcaacacagacgaagaggattgaacaagcaaaggttaaagatagtgttgagattgtttctgatatacctaaggatattctcgttgattcagaagtaccactagcggtgagtagagaggtgtctagtaatgaggcggactctgttgttccatcaatttctgtaatagatgaaactggtaaagtggagaacttgaagtcagtggttgctcctgatgaggtaaatgcatcaaaatcatttctgttacattgcaatttcctgttttatttttactctctctacaagaccaaggtgttttcagggcaattctacttctttgagcaaagaaagaccttctagttctttcagatccaaagtcttaagctcaaaactggaaacttttcgctgctattaaaactgggatcaattcacctttaaggaaccccacagaaaaaaaagttcatccctcctaggtaaggcaaaaaaaggggg

SEQ ID NO: 171625 - DNA, 710 bp, Arabidopsis thaliana landsberg
agctgcttgggtggacactcttcgcgaatttttcatcttctgaggtaagagtttctatggctaccaaattcttatacaaagttataaaccaaataagtgttcttagttatttttgttttgttttggataagtatgatgttgctccatgggctatagaagctgtcttggagtatgtaaagcagagctatggcaatcctcctgtctacattcttgagaatggtctctctctctctctctctcattctctctacctctctctcgttttagtcggttaaatctcttgttaaatgtcaactaataggtcgaccgataaatcgagattcgcagttgaaagaaaaggacacaccaaggattgagttcttacaagcttacattggtggtgtgctgaaatccattaggtgagtaaagtttcttattgcatattttcgtcacttctcttgtcagtgtatgaaagaaaaaaaaacattactacatgtaggaatggatcagacacaagaggctacttcgtatggtcatttatggatttgtccgagttactgagcggatacgggagtagttttggattgtactctgtcaattttagcgatccccatctcaagagatctcctaaactctctgctcactggtactctggttttctcaagggaaaatccacctttcttggttcccaagtcatcacccaattgcatagcaacttctcttctttctca

SEQ ID NO: 171626 - DNA, 1829 bp, Arabidopsis thaliana landsberg
atggctgcatctacttctttcttttcttcatcatcttcttcttcttcttcttcatcgtcatcatctggtttatcttctccttcaccttgcacatggagatacatgactttcacgagcttccatggaccagatgtccgcaacacatttcttagtcatttgaggaaacagtttaacaccaatggaattacgatgtttgatgatcgaaggatggagagaagccaaacccttgcccctactctcaagcaggcgattagagaatcgaagatctacatcgtcttgctctcgaagaactatgcttcatcgagctggtgtcttgatgagctattggagattttaaactgcaaagaaaaaagaggacagagagtgatgacaatcttctacggcgtaaatccatctgatgtgcggaaacaaaccggagaatttggaatcgctttcaacgaaacttgtgctcgtaaaacagaggaggagaggacgaaatggagccacgctttgacctgtgtgggcaacataaccggagtacacgtccaagacaggtttgtattttcattaaattacattttgtctttcttctgatagaatagaattgaaatcattaaggggattttttttgaacgagtattagaatttgtggttgaatgaatgatggatattagagatagatgattaaatatcccgaatttacaaattagaaaacttgtatataactttttatatattaaacgcattgtgtttttttttttcagttgaagaaaacaaacaatataaacatatagtttatgcattttaagtctaaaactgcaaatccttaagtctaaatttaaatgaatgatgtaaataccattttttttataatataaatcattaaaatatttaaaatttaatttgtaagtttattatagactaactcgttttttatcataaaatttactcgtacgtgacacagattcttacctagtgatagtaattataagtccaataaaattttgtaatgatactattattaatcactgtcttttagggacaatgaagcggagatgatcgagaaaattgcaagagatgtatcggaaaaactgaatatgacaccgtctagtgattttgatggcatggttgggattgaagctcatttgaaggagatggaggttttgctagactttgattatgatggagttaagattgttggaatctttggtcctgcaggtattggtaagacaactattgcgagagctttgcatagtctactactctttaagaagtttcagcttacttgttttgttgataaccttagaggaagctatcccattggtattgatgagtatggtttgaagttgcgtttacaagaacaccttctttcaaagattttgaaccaagatggtatgaggataagccatttaggtgcggtaaaagagaggttatgcgacatgatagtgcttatcattcttgatgatgtgaatgatgtgaagcaattaatggcgttggcgaatgacactacatggtttggtcctggaagtaggattgtagttaccacagagaacaaagagcttttgcagcaacatggtatcgataatatgtaccatgtggggtttccatctgatgaagacgctgtcaagatcttatgtagatatgcttttaaaaaaaactctctttatcatggttttgaaaagcgtttacaaagagtatcgaagctttgtggtaagcttccgttgggtctttgtgtcatgggttcatctttacgtgggaaggaggaaggagaatagacaccccccacaccagcttgtaactattcttaaaaaaaatattgaggatgtgtaaccctggctatacagttaggg

SEQ ID NO: 171627 - DNA, 1482 bp, Arabidopsis thaliana landsberg; identical to SEQ ID NO: 24328
  unsure (1)..(1482): unsure at all n locations

SEQ ID NO: 171628 - DNA, 1313 bp, Arabidopsis thaliana landsberg; identical to SEQ ID NO: 29847

SEQ ID NO: 171629 - DNA, 755 bp, Arabidopsis thaliana landsberg
gactctgtacatcagtatctagtaccagttagtttgatagagagatggggaaacgcaatggacattgtttaccctgattcaaagagatgttgttgtttcacaaagagttattatcgatacgtgaagggcacaggttccctattggcaactgtccaggtacgttcttccatggagtatacaatattactttcctctgtatttgcaaagtgaaaagaaatgcttatcgtgaatctgtgatcacgcagccaaaaatcaagggtaaggaatcttgtttgaaggagcaacggcttagatacttcacccctagagaggttaagcactgtcctttacttttactaccaatgcctcactgaaaaagtcagctttatttcattgaaagatgatgttcggtttctatttgtttaggtagctaactttcactcattccctgaagattttgagttccccaagcacataagccttcgacaaaggtacgctgttcataccgtcaacaccatctaagccagaaaagctactgtctatatagattatgtgcatccaagtataacagaggcaccgttttgattcgaatatagaatttaacccataatacccttatttctcccgtacttcctgtttgaaatgtggaaatagttgaacacaagaacatgaatctcatgaactcctctttgtgcagatacgcaatgcttggaaacagtttaagtgtagcagtggtggctcctctgcttcggtatctattcgattcttgactacac

SEQ ID NO: 171630 - DNA, 1702 bp, Arabidopsis thaliana landsberg
  unsure (1)..(1702): unsure at all n locations
ataactaattataacttaaaacatgtttttctacacttttgaagaagggagcatctgtagctgtattggttcagttccaccagtagagcatattacaccagaggacgaagatgtgcttgaagaggagattttagttaaacaacaagcaatggatggaagagttgatcctaacattgcagttcagatacatggtcttgcaaagacatatcctggaacaacaaagcttggatgctgcaaatgcaccaaaacttcgccttttcatgctgtaaaggtatattatcttccgatggataaatctttccgataatgtatggcttttgccaaagatgttcctagctcatgtgacttgagataaaagtgttacaacagttacatttattattcaactattgattcattgaaaaaatttcagggtttgtggatgaatattgccaaagatcagttgttttgtcttctcggacctaatggcgcagggaaaacaactactattagttgtttgactggcataaatccagtcactggtggggatggtaagaaaagctttttgtttcagtctgaatgaagcaagattttggaaaaatttaactattctaataagatccattttgattgactaaattaaaacagcaaaaatttatggaaattctataagaagctctgttggtatgtccaacatccgtaaaatgattggagtttgtcctcaggtgagccattttttgttgctatctgcttctggcatttgctttaattagttacagatatttgttatgctttcaatgatttatgacattcctgttccacagtttgatattctttgggatgctttgtctggtgaagaacacctcaaactctttgctagcatcaaagggttgccaccttcatcaatcaactcggtatgtacccaaatggtagaaatgagtcggttggttagtcggttggttacttcaaatcaagaatacttttcctcatttgtcgcttaaaatgttactttctcgtcatatagatggttgagaagtcactggcggaggtaaaactaacagaagcagggaaaatcagggcaggaagttacagtggaggaatgaaacggcgactcagtgttgcagtttctctcattggtgatccaaagctggtcttcctggacgaacctgtatgtaacatttattctgttgatgtttatttatttaagtccctcttccttttctcatgcgtacttgtcatacatgggttacagactacaggcatggacccgatcacgaggagacatgtgtgggatatcatacaggaaaccaagaaaggtcgtgccattatactaacaacacattcgatggaagaagctgatatcttaagtgatcgaatagggataatggttaagggtaggctccgcnnnnnnnnnnnnnnnnnnnnnnnnnnnnnncgctttggcacaggtttcattgctaacattagctttgttgaaagcaacaaccacaatggcgaagctggttcggattcacgcgagccagtgaagaaattctttaaagatgtgagtctgttttagcacccggtcactgtttccattttacaatgtagttaacttaatccaacacccttccgaactttgatattttcttgcagcatctcaaagtcaaacccatagaagacaacaaggccttcatgactttaattatacctaacgacaaagagaatcttttgacagtaagca

SEQ ID NO: 171631 - DNA, 404 bp, Arabidopsis thaliana landsberg
gaaagccatgaaagacaacaagccaagctcggactcaggaagcaaatccagaaatggcactaaggttcacaaaataaggagcctcctttcttcttttttgttatctggtttccctctttgaaatcaaaaatcgtaattagcagagatcaatagacgggcagacaaagagctcaacaccgaaactaatggaagagagctatgaggaggaggaagaagaagacgagcatggagacactctctgtggaagctgtggaggtcattacacaaatgaggagttctggatttgctgtgatgtttgtgaacgttggtaccatggaaaatgcgtcaagataactccggctaaagcagagagcatcaagcagtataaatgcccgccttgctgtgcaaagaaaggaagacagtga

SEQ ID NO: 171632 - DNA, 644 bp, Arabidopsis thaliana landsberg
ataaattcatggtacggatctatgtatagatttggtaatagggtacttgtagaatcctaattgggtaacaaaataatgagctggttctcattatggtatcgacacttgttcgaagaatagtggcttctcaagattgtttccgtgattgaggaagtctagctagtaaaaaaaaattatgattgacgaggctaatgataatgcatatgctacatggttaactatagagtctataagtacatgaaataaaatatttagaatcaaaacacccacaaaaagtaagaagtgactgttgtcaagcatataatagagatccacatactatttatatccacacgcacatgttcaagcagagacaaagatatagaaaacatacacatagaagagcaaattaagcaacagtcttacacagacagaagttgtagaattgatttgtgagtgaaaaactatttaagactgaacaagtatgcttgattggggagttcaaggtcatcatcaaaagcatgatcatgatatttatcaacaacaacatcaacaacaaggatgtaggaagggaccatggacacttgaagaagacaagcttctcgcagagtatgttacttcgcatggtgaaggaagatggagcactgtagctaagtgtgcaggta

SEQ ID NO: 171633 - DNA, 503 bp, Arabidopsis thaliana landsberg
gcatgcattgaaagtactctttgcgatgttcccacataaattacaggtcaagtgatgttgtttctaatcgcggctgtctgtttaatatgcttttacgtctacaagtccgtgaaaccgcgccgccaattccattgccggagaatgtttctgagatatctcaaaataagctcaacgatggcgatatttagcttacaaagaattagggtttcctaaagataaagccaaaaataagattatcattctcatggattcgggagttcaagttagtggatttaaaaatcacacaggtattaataatattaggattaaatgaaatgattacatgcatatattgcaaactagcttctttaaatatcatgataactggagctactatatatgttcctatggctttcaggaaatgatcgacgaattcgagatatactttttgttgttcgatagagctggttatggagaaagcgatcctcatccctcacgaacacttaaaacggatacatatgaca

SEQ ID NO: 171634 - DNA, 1153 bp, Arabidopsis thaliana landsberg
atggagatggatgaagatatggaaatcgagccaatggtgtttgaggttaaagagatcgatctggagtacgaatttgatgcggcgaggtggtacgattttactcgggaagagttaccggaggagtctcaagccgctgagttctggtttcactctgctccgtcgtacgctccttctcgtgagttttaatcacactctctcggcctcaagttttcattttcgttgactcatggttctgctctgattacaattcacaattatattttgaatcctacattttcaattttgtacttgatgtctctaaatcttagctccttttagtcagcattgtgtgaatttgttaggataaaggtgaatttgttgatgatgttttgtgtgtttcagcttttgtatcaacactgttacttagagaggatgtttatgatgacaagacggaggcatctacgagatcagaggatgaggaagtcgttgcagatgtttgtgataagtataaaggaatctttccgcaaccgaatcatttagccacagattttaataagacaggtgaatttataatctcttaagtagtttaccagtttgattatggttgtgagattggataactgaggtagaaataaaagcataatgttgaagaagactacaagatatgttttagattcttaaaatgatctgtgccttttcaggaagtagaatccgttctgaaattaaatcctcccaccaacaacaaggttgtaatttatatgaagttccatatcaggcccatatggaaaggtgatttttttgctataatagcatcgtggccttgcctgtggttcgattacattttggctctttatatttgtgcatcatcgattacatttttctttggccttcaaatgtggtccatctttgcttctggccgtctttggtatatactttgttgttctagcgtgttgccccctttgtgatctgatgtgctctgtctttcttctttgctaattggtgtctactttactctgtctttcttatttgggggccgtcgggtttagcaggtcactagttctcacttgcttgaccttaggttccggtgctaatgtcaagcggtctgaccgactccaaggagctcgtcattaatgaggcctcctgctagccagtgggcgtgcagataaagtgaaag

SEQ ID NO: 171635 - DNA, 655 bp, Arabidopsis thaliana landsberg
  unsure (1)..(655): unsure at all n locations
ctctacgtattcttcggacggcatgcgctggatgaagaaggacatgggcggctccgcccacgcgatcgcgctggccggcctggtgatgcaggccaagctgccggtgcgcctgactttgctggtgcccgcggtggaaaattccgtggccggcaacgccatgcgtccgggcgaagtcatcgtcacccgcgccggccacagcgtggagatcgacaacaccgacgccgaaggtcgcctgatcctgtgtgacgcactggcttacggcgccgagcagaagccggatctgatgatcgacttcgccaccctcaccggcgccgcccgcgtcgcactcggccccgacctgcccgcgctgttcagcaacgatgacgcactggccgaggccgctctggccgccggtcgcacaaacaacgatccgttgtggcgactgccgttgtggcgtccctacttcaagatgctcgactcctacctggccgacttcgccaacgccgggccgtcgcgccacgccggcgcgatcaccgncgcgctgtacctggaacgcttcgtccccgacacccagcgctggatgcatctggatacctacgcctggaacgacgccgaccgtcccggccggccgcgtggcggcgaggcgctcggcttgcgcgcggtgttcgcgatgctc

SEQ ID NO: 171636 - DNA, 1057 bp, Arabidopsis thaliana landsberg; identical to SEQ ID NO: 22511

SEQ ID NO: 171637 - DNA, 563 bp, Arabidopsis thaliana landsberg
agcgtcacgtgatgtagccatggctacagcagctaaagccaagcttctcctccgtgaattgaaaacggttaaagccgatttagctttcgctaaagaacgttgttctcaattggaagaagaaaacaaacggttaagagataaccgggataaaggtaacaacaatccagctgatgatgacctaattaggcttcagctagagacattgcttgcagagaaagcgagattagcacacgaaaactctatttacgctagagaaaaccgattcttgagagaaatcgtcgaatatcatcagttaacaatgcaagatgttgtttatatcgatgaaggtattgaagaagttgctgaagtgaatccttctatcactagaacgctttctatggcttcgtattcggcttctgaattgccttcgatctcgccttcgccttcttcccctgcttcgccttctcggctttcggtttctacagacatttatccgattttggttcagcagagttcgactaacgatattacggttgagagtcctaaaccggttcgaccaccttctttgggatacacagatgatg

SEQ ID NO: 171638 - DNA, 912 bp, Arabidopsis thaliana landsberg
cttacgttgcctgaagtggtgacgtttcctgattttcttgtggaaagaagtcggtatgaagcagcaatacagaggaactggacttgcagggacaagtgtaaagtttggtggagagacgaaggcgaagaagatggtagttggtgggaaggacggattctagctgtgaaacccaaatcacctgattttcctgatagtccgtgggagaggtacacagttaagtacaagagtgaccctgccgagacacatcttcacagtccctgggagctttttgatgcagataccaagtgggagcagcctcacattgatgatgagcaacgaaaccgtttgctctcggccttaacaaagttagagacttcagacaagagaacccaggtatgtgatcctaatgaatataatatctcatggtgttaaatctagcctatcctcgccaccaaattcagacttcacccaaagagcttaggcccatgtttacattagcttagttggtttatagatcacattctaaagcttagtggattaagacacaacattatcccaagaactaacaatattgatataatgtgggctaatttgtttcaggattcttttggcctccgaaaactgaaccagaccgtgggaaattccagctactccaacaggtaaatttctacaaccctggaagagtctttggtggagccaaagctgacatggttttgttctatggattcattctgcaggttcccagttcctttgtctcttgaagtaatcagatcaaggcttgagaacaactattaccgaagtgtggaagcattacgacacgacgtatcagttatgttgtccaatgcagagactttctttggtcgaaataaaagtgtagcagccaaaatctcaaatctctctaactggttcgaccggacgctaccttcttcgtag

SEQ ID NO: 171639 - DNA, 579 bp, Arabidopsis thaliana landsberg; identical to SEQ ID NO: 69075

SEQ ID NO: 171640 - DNA, 227 bp, Arabidopsis thaliana landsberg
ccattctagcttcattgcacacacttgagccctgtttttttgtttcctctctgcagaaactagacgatgtacaagagtttctgaaggtcccgaaactagatttaaagagtaggcaagtgaagattcatcatggtccgttgtcacaacacgtacaaaattgggaagaggtgcaaaagacactgaaagggaccggtttcgaaaactttctacttgaagattaccgcagg

SEQ ID NO: 171641 - DNA, 765 bp, Arabidopsis thaliana landsberg
tagctcgaaaaaatggtgtcacgatctgcttttttactcttctgtgtgctatttctagctacagaggagactctagcttccttattctcatcaaggctgattcatcgcttctccgacgaaggaagagcgtcgattaagactccgagttcgtcggattcgttgccgaataaacagagcttagagaattatcggttactggctgaaagtgatttccgaagacagagaatgaatcttggtgctaaggttcagtctcttgttccatctgaaggaagcaaaactatatcttctggaaatgactttggatggtacattgtttctttcattttcactctaaaattagaaagaaaaaaaattcctctttttttcttcaagtttctaaattttgtacctttagattcgattccgaagaaaagtcgtgttttgactaactcaatctgctacatagtcttttcctttgggtttacttcttttttggataattatgctaagttcttgaattttatagattagtagtgatttgttgccttatatgagttttgtgtttgatgttttactcaggctacactatacatggatcgacatagggactccaagtgtatcgtttcttgtggctttagatactggaagtaatctactttggattccttgtaactgtgtgcaatgtgctcctttaacatccacttattatagcagcctggtatgtgaaatataatgataagcatatgttacttaaatatagagttaagatagtgaaatgatgaccgg

SEQ ID NO: 171642 - DNA, 1276 bp, Arabidopsis thaliana landsberg
tctgctcttgtcgataagcgtggcaagcgtagaacaggaggcactggcaaagattcgcttcgagagttttatcgagttgaagatgaaggtaagcagaaaactgacgaggaatctggggatgagagcgggagtgagacagagatcaatgatttgaaatccgaaaaatctagccatgtagaatctgaggaagagagtgagagtgagctaaaggttgcttctttggatgatgaatctgatgagaaagcagactctgaagagttatcctcgcaggaggaggaagaagaagaggatgatacagatgaggacgatgaagctatgtatgaagatgagggaccagaaattccggtaaattgctcaactttgattcatgtgccttgttcttctactagtttttgacaagtaattgattttctcatgttgcaaatttggtaatgatgatgatgatggcttctaggaagagaacataccgcttatccaagaagaaactcatagactggctatcgttaacatggattggagacatgtctctgtaagttctctcaatctatgatgttttgtttcaatttggccttctttgacgttaatatctttgctatggttatggaacgaatctaagattaagtagagcttgtttctttctctgccttgtctagactctagagtcactgctctgtgatttttgcagttgttcttatggatgatatcttattttgttacttaggctaaagacttgtacgtagtgttgaattcgtttctgccaaaagatgggcgcattttgtcagttgccgtctatccatctgagttcggacttgagcgaatgaaagaggaggaaatccatgggccggtaattgatggcgacaaaaagaatgacgctagtgatgatgaagatgaagaagaggaggaagatgaggatgtcatcaaccagaagctacgtgcctatgaaataagtagattaaagtaagttcgaatctgcccgtcttaagctatatgtggtggagagggactattactgaaactctgcttttactattgcttcaggtattatttcgctgttgccgaatgtgattcaagtgctactgcagattacttgtacaaatcatgtgatggaattgagtttgagagatcatcaaacaagctcgacctaagatttattccggattccatggaattcaaacatccacctcgtgatatagcatctcaggtgtgttaccgctacttcctttaataaaaatcttttggtttcattgtgaatacttgtgatgttatagttgttata

SEQ ID NO: 171643 - DNA, 1385 bp, Arabidopsis thaliana landsberg; identical to SEQ ID NO: 27269

SEQ ID NO: 171644 - DNA, 444 bp, Arabidopsis thaliana landsberg
  unsure (1)..(444): unsure at all n locations
ctccccacactatcgccacgggtggcgatagtgcacgactggctgactggtttcggtggtgccgagcgagtggtcttggccatgcacgaagcttttccagaagcaccaatctacacttcgatccacgagccggactcannnnnnnnnnnnnnnnnnnnnnnnnnnnnnnnnnnnnnnnnnnnnnnnnnnnnnnnnnnnnnnnnnnnnnnnnnnctgtaccgcatctttccttggttgcgcgtcaaagccttccgcgacctagacctgtcagaatttgacattatcctgtcaagttctagtgccgagagtaaacaagtccgtaagtctcgaccaggacaaatacatatctgctactgtcatacgccgattcggtattactggagtcactacgacgaataccggcgtgatcctgggcctcgcgcttttactggctggccaactaat

SEQ ID NO: 171645 - DNA, 560 bp, Arabidopsis thaliana landsberg
  unsure (1)..(560): unsure at all n locations
atggtatgtctcgtcattcgctgtgtggctcctcgtatatgaagccgctcgctacaattactcaaggttttagaatatgaaggtacttgtcatcggcggtggtggccgcgaacacgcactagcctggaaactggcccagaacaagaacgtcagccgcacctatgtcgcgcctggcaatgccggnnnnnnnnnnnnnnnnnnnnnnnnnnnnnnnnnnntcacgacggtgccggaactggtcgctttcgccgagaacgaacagatcgcgctgaccatcgttggccccgaagcgacgctgtcgcaaggcgtggtcgatgccttccgtgcagcggacttgcggatcttcggcccgacgcaggccgcagcgcagctcgaatcctccaaggatttcgccaaggccttcatgctgcgccacggcattccgaccgcggcttacgccactttcaccgatgccgccgcggcccatgattacgtcaagcaacaaggcgcgcccatcgtcatcaaggcggacggccttgccgccggcaagggcgttgtggtcgccatgtccctcgatgaag

SEQ ID NO: 171646 - DNA, 859 bp, Arabidopsis thaliana landsberg; identical to SEQ ID NO: 11398

SEQ ID NO: 171647 - DNA, 568 bp, Arabidopsis thaliana landsberg
atggcttatgcaacttctacctatgcccgaacctcatgcattatcctacccaaaatccaaaacggcgcgcatttcacggataacacgaaagcatttagaaggataacagcaagaagagtgacgcgtatatcgtcacaaggcccgactaaaccgccaaaaccatctccaggagtagacacaagaatccactgggaaagcccggacgaaggctggatcggaggaagatccgacccggccaaatcggttgatgaggacaaaaccaatctccttagtgacgaaaaatttgcagaactaatcaaagactcttttgattctcattaccagtgagcaaaacaaacattctcattacatatctttttatttttatttttcaatatgtattgtaacatgtaacaataatcattttcagattcttaggtgtttcaacggatgctcatctagaaaagataaaatctgcgtaccggagattatctaaagagtatcatccagatacaacttcactaccacttaaaacagcttcagaaaaagtccatgaactaagagagtgtcaatgtttgagccgatgaga

SEQ ID NO: 171648 - DNA, 1009 bp, Arabidopsis thaliana landsberg; identical to SEQ ID NO: 12519

SEQ ID NO: 171649 - DNA, 394 bp, Arabidopsis thaliana landsberg
aaaatattcctctgcaggccactgtggtagcttctcatgggcatacaacctttcatatacccgcgcagggaatgacagcccagttgggcgatggcgctgcgctggccgccgaaacgggcatggcggtggtctctgatcttcgcgcgatggatgtgggactaggcggacaaggcgcccccatcgtgccggtaggcgagcagctccttttccccgaatacgatctttgcctgaacatcggcggcatcgccaatatctaacttcaccgggaaaataatatcacggcttttgatgtatgcccggcaaacagggtgctgaacacacccgcttcgatgctcaataaaccttataacgatagaggcgcctgggcacaccaaggaaagttaatgaagagctt

SEQ ID NO: 171650 - DNA, 1102 bp, Arabidopsis thaliana landsberg
ctcgtcttccgccctaaatttggtcactcttacccgtttcccaaacctcacaaagaagttcccatcttatttggtacgtcaatatagtaaaatcttttaccaaacaaaatacacacaatttctgagtatatacatataattaaaaaaattgtatttcataattgatctgattttattttttaaattgttaatcagacgacacgttagtatttcagttggtgaatgatattgaaggataaggacgttggtccttgtcatttaaaattgaaacttctatatacttcagtagtaatattgaccaaattaagtcttctatgttttaaattattatatagtactgtgtaataatatattagtaaacaggtgaatggtggaacaccgatgtagtcgcgttagaggaggcagcaatcgccaccggagttcctccaaacaattccgacgcttatacgatcaatggccgtcccggaaacctatatccatgctccaaagacagtgagtccaaagaaacctaatctcatgatatttttttcttaagtataacatacatggcatttttttttttttttttctctaacttcgctgcatgaataaatattaagaattaaattcacattccaaacttattagtttgcaaattaacctttattttcttaatgaatgaaaataggaatgtttagcctaaacgtggtgaaaggaaagagatacttacttcgcatcataaacgcggccatgaacatccaactgtttttcaagatagccaatcacagactgacagttgtagccgccgacgcagtctacaccgcaccttacgtcaccgacgtcattgtcatcgcaccgggccaaaccatcgacgcccttctcttcgccgatcagtccgtcgatacctcctactacatggcagctcacccttacgccagcgctcccgccgtccctttcccaaacaccaccaccagaggcgtcattcactatggcggcgcgtcgaaaacagggcgatcaaagcccgtgttgatgccgaaactaccttccttcttcgacacgttaacggcttacagattctactccaacctcactgccttagtcaatggacctcactgggttccag

SEQ ID NO: 171651 - DNA, 461 bp, Arabidopsis thaliana landsberg
atcgattccggctcttccgcgtgtatgctcgcgagcaccgcgctggggttgctggtgacccctgggctcgccttcttctacggcggtatgacccgcgtgaagagcgtgctcaacatgatgatgatgtcctgggcggccatcatcaccgtgaccctggcctgggtgctgtggggtgactcgctgaccttcgccccggggaactggttcatcggcgggctgaagtacctcgctgaaaacggcctggtcaacgacgcgtccagggcaccgggcatccccgacctggtcttctccgcgttccagctcaccttcgccgtgatcacggtggcgctgatcagcggggcgatcgccgaccggaccaggttcggcccctgtgtggtgttcaccgtcgtctgggcgacgctggtctacttcccggtcgcccactgggtgtggggcggcggctggctgagctccctcgcatc

SEQ ID NO: 171652 - DNA, 540 bp, Arabidopsis thaliana landsberg; identical to SEQ ID NO: 20357
  unsure (1)..(540): unsure at all n locations

SEQ ID NO: 171653 - DNA, 854 bp, Arabidopsis thaliana landsberg
ctaattaactcgtttttagttgtaatatagttgtgattagagcaataataaatttactttttaaaaggttactggaaaagcactgatgttggatgaaattataaactatgtccaatcattgcaacgacaagttgaggtaattactcattagattattggtctactttaaactctttccattatttcataatcactttttaaaacaactacacgacttcgaataatttttgtttcttaattttaatttcaaatatggtgcagttcttgtcgatgaagttatcgtcagtgaacaccaggctggactttaacatggacgctctcttgtctaaggatgtaagtcaccgtcacaacatttatagtcattttaattgacaattattgtaataataattacttttgtgtctttgtgaaccaatcgtgtgtttgtttaaactaatttctttcttttgttttctgacagatatttccttcaagcaacaatctaatgcatcatcaacaagtacttcgattagattcttcagcagaaacgttattgggtgatcatcacaataaaaatttacagttgaaccctgatattacttctaataacataataaaccctctggaaacttttgataccagtagaagcttcattcacttaccaacacttgctcatttcagtgactctattctcaggtttcttttgttaaaacaaattcttctaccactattcttatttgatttttttttttcaatgtgaagcgatcttaaccctttttggttttgtttttagtattcaacattttccgaagatgatttacatagcattattcatatgggttttgcgcaaaaccggctccaagaattgaaccaag

SEQ ID NO: 171654 - DNA, 896 bp, Arabidopsis thaliana landsberg
atggtatgtctttgtacgtagtttcatttattcgtgaaaaatcttgccaagaagtacacttatgctcatgtgttctgcttttgtagataccaaaagctctattgggtctgattttggttgagaaaatgggacgaagaccacttctattggtaagattttgctatctgatcttttggtcaaatatcaaatgaagcaacaaaatttagcatatatcttttaacagatgaatgatctttatttacaggcctctaccggtggaatgtgctttttcagcttgctcctcagtttttccttctgctttcgggtaattaacattaacgattcgctttctaaccaaagatatatacaaactttttttgctgctgtttattggagattcttaccagttatactaaaatttttctacttttgttcttggacagtcatatggcatgcttgatgagctcactccgattttcacatgtatcggtgtagtggtacgtttaaagtcatttcttagacataataaacaagcaacttaaagtatagctcttgtataacttgatctgaatttgacatcatattacagggtttcatctcttcatttgccgtaggcatgggaggcttaccatggatcatcatgtctgaggtaaacaaacatgaacattaacattaactcctcaaaaaccgacatatatatattttttccagctctaaaaaatgttacattttttattttgcagatattcccaatgaatgttaaagtttctgctgggactctggttaccttagccaactggtcctttggttggattgttgctttcgcctaaaacttcatgctagagtggaacgcatcaggtataaatacatactactatataatatactatagagtcattaaactctcaaaaaaaaat

SEQ ID NO: 171655 - DNA, 636 bp, Arabidopsis thaliana landsberg
attgtaattcgaaccatgctgaaataaactaatgtaattgttggaatgataatggaaaataaggtgattacagaaatgacagatgtaggagctgactacagttttgaatgcattggtttagcttccttgatggaagaggcattcaagagtactcgcccggtacggttttaccggtttctatttggtttagcatcattacatggataaaaccgaaaccaattttcttattgatttccttgtagggatcgggtaaaacgatagtattggggatggaacaaaaggctttgccaataagcttgggtagttatgatcttctcagaggcagaactgtatgcggcactttatttggcggtttgaaacccaaacttgatattcctattctcgtggatcgttatttgaaaaaggtatatattagttatatatagtttgtgttatcatttatatataaaaagttgaaagttatgattatttgattttagtatgcgatatgattttttatatatatatatatataaatggcaggagcttaatctagaggatctgattacacacgaattaagctttgaagaaattaacaaagctttccatttattggctgagggaaactctataaattgcattatatggatggataaa

SEQ ID NO: 171656 - DNA, 1870 bp, Arabidopsis thaliana landsberg; identical to SEQ ID NO: 7422

SEQ ID NO: 171657 - DNA, 2445 bp, Arabidopsis thaliana landsberg
atgtggaactcggcggagaacgcattctcgcgttcgacgtcgtttaaagacgaaatcgaagacgaagaagagcttcgttgggcagctttacaacgtcttccaacttattcacgaatccgccgcgggattttcagagatatggttggtgagcctaaagagatccaaattggtaacctagaagctagcgaacaacgtcttcttctcgaccgtcttgtgaattccgttgaaaatgatcctgaacagttcttcgctcgtgttaggaagagattcgacgcgtaaatctctcaattctctcttacaattttagttcaaaatcattcagttttggtttaattgagtgaattttttttgaacagtgtggatttgaaatttccgaagattgaagttcgatttcagaatctgatggtagaatcatttgttcatgttgaaagcagagcattaccaacaattcccaatttcatcattaacatggcagaagtaattacaaacaattgactcattttttttcatcttcttaagttgttgtgagcaattatggtaattaagaagatttttgttacagggtttgttgaggaacattcatgtgattggtggaaaaaggaacaaattaacgattttagatggtatcagtggtgttattagaccttcaaggtaatttatatacatctaattttgctgctttttcattaatatttttactatttttggtctagagattctttgtgttgctctttagattgacactactactaggtcctccaagttcagggaagacaacattactcttagctttagctggacgtcttggaactaatcttcaggtacaccgtcggtgaccgaattcaattagtaaccattagaagattgttttgtttcttggttttgagttatttttggttactttgaagacatcagggaaaataacgtacaatggctacgatctcaaagagataatcgcgccaaggacgtccgcatatgtgagccaacaggattggcatgtggcggagatgacagtgaggcagactcttgagtttgctggtcgttgtcaaggtgttggattcaaatatggtaagtactaagaagcattatattagttttggtttgagttggtgtttgacattatacaacaaactgaaaccacagatatgcttttggagttagcaagaagggaaaagcttgcacgaattgtacattgtccaaaacgggggatatcaatccaatgaagcaaagaaaattatgtatgcaacatattccattctgtttctggcaccaaacatcctcttgattcggaacggtttttccaatcctccacagtctttagctctcgggggaatggagacaagccttgtcgtggagtatgttatgaaggtattctccatagccttttaacttttggtcatatatcaaacaatatctttaaaacaaagaaaacagtattgaaaaatgttgtaatgcttacttgttagaagtataggcaaagtctatcaggttaatgtcctatttcttcaattcaaactctttctgaaattctcatacatccaacaaagattctaggattggacacatgtgcggacacattggttggagatgagatgattaaaggaatttcagggggacagaagaaacggctaacaacaggtttgtcttcccattcttgattttgtttatgtttgaccatttaaccagtagatactgaccagtgctaattgaattcacaggggaactattagttggtccagcaagagtccttttcatggatgaaatatcaaatggtttagatagttcgacgactcatcagattataatgtatatgaggcattctactcatgcgctcgaaggaaccaccgtcatttctttactccaaccgtctcccgagacttacgagttgtttgatgatgttatccttatgtctgagggacagattatataccagggacctcgtgacgaggttcttgatttcttttcttcgttgggatttacttgccctgatagaaaaaatgttgcagatttcttgcaagaggtaagatttataaaagattatgaagcagaaaatttaaactgttttttttttttttttttaaatgagtttctgttgataggtcacctcaaagaaagatcagcagcagtactggtcagtccctttccggccttatcgctatgtacctcctggaaaatttgctgaagctttccgataatatccaactggtaagaagttggcaaaaaaacttgaggttccatttgataaacggttcaatcattcagccgcgttatcgacatcccaatatggtgttaagaagagtgaacttctcaagatcaactttgcctggcagaagcaactgatgaagcaaaatgcatttatttatgtgttcaagtttgttcaggtttgactcccaattatatgtctctagttcttttcttttttgttggaatggtaagtgccttatt

SEQ ID NO: 171658 - DNA, 339 bp, Arabidopsis thaliana landsberg
atgagagataggaatgtaatacatctgcttatttcttaactctaatgtaacatctgattcttactaatatatcttgttcctggctcaatatgcattttaataacattattggtcttctttgcgtacttgtagattatggtggggagagatactgggcgtccacgtggttttgggtttattacattcactgatcgcagaggagctgatgatgcaattaagcacatgcatggaagggagttgggcaataaggtcatctccgtgaacaaagctgagcccaaagttggtggagaagatgtagaccaattaaagaaaggtggaggctattcatctcgagggaag

SEQ ID NO: 171659 - DNA, 683 bp, Arabidopsis thaliana landsberg
  unsure (1)..(683): unsure at all n locations
ccctgtattgttgaagaaagacagtgtataaatctgattgggtatattttatacagactgatggtgttgagcaaatagccatcaatatgtcccagttacccaaagcctctggaacatacaagaggcctactgtgattacacaaggcgcagatcctgtggttgtcgctgaggatgcaaaagtgaataagtacccagtcatccctctccccaaagagaagnnnnnnnnnnnnnnnnnnncaggtatttgttaagaactcaggcctcactaactgcactctaactaagtcacagcagctcgaatttgctacattccgtcctagattagatacagcttaacttatagctaagagttaaaagcttattattgtttgatgatatcaaccactcatctaattatagcataaaaactcttatccaaatccaggtttaccaaaccgtttgctttgttatattgtaataagaagattatcatacattttgtatcagtctcaagtaaactaattccggtggtttaaccctcttggttctctgtgttcataggtgatgcatttgtgggagggtttctgtcccagctggtgcacggaaaggggattgaagagtgtgtgagggcaggatgctacgcgtcaaacgtagtgatccagaggtctggttgcacttaccctgagaaaccagacttcaactaa

SEQ ID NO: 171660 - DNA, 1063 bp, Arabidopsis thaliana landsberg
atctcgtaggaacgaaaaagactttctgaagggattagattcctctagcgagtaatagtatccaggcgagggtttgacaggggagcaagtttattacgagcggttggctagtgtaaatccaccaaaaacgaaagacgttggtgggaccgatcatgaaaagaagatgcgaggctatgggaaggaacataattggcataaggaaagcatcttgtgagagttgtgttactggaaggaccacaatctttgacataatattgatgtgatgcatatagagaagaattttctggacaacatcatgaacaccctcatgagtgttaagggtaaatcaaaagacaatatcatgtcaagattgaatattgaatttttttgttcttggtaaaacttacatattgatagtaagggtaaaacttcatttccagcgtatacattgaaagaagaagctaaacatagtttatttcaatctgtgaaatatgaggttaaatttcgagatggttatccttcagatttagctagttgtgtagatctggagaatgaaaagttaatttccaggcatgaaaagtcaggattgtcatgtttttatggagaaacaacttccatttatctttgcagaactccttgaccaaaatgtccaccttgcattatcaggtaaaataagaatataatttactctttatatcatatatgcacttgagatgatgcatttttttttccaggggttggcgcattttttaaggacttatgttcgagaactttgcagaaaagtcgcgttcaaattcttaagcagaacattgttttgatcatatgcaacttagagaagatctttccaccatcattttttgatgttatggagcacctgcatatacatctcccctacgaagcagaattgggcggtcctgtccaatagaggtggatgtatctttttgagaggtttttcaaaaagtttaaaggaaaaacaaaaaataaaagatatgcggccggatcaattgttgagtcatatatcgatgacgagattttttatttctcagagcactactttgccgataatatacaaacaaaatcaagg

SEQ ID NO: 171661 - DNA, 1076 bp, Arabidopsis thaliana landsberg
ctgtttcttaataatattttacttttcgtaatatttaagggatattcgtagggcagtgttggcgcagagccttgagaaattatgtgtagagagacatagcaaatatgatgttgagagaatgaatcaggacgtcttcgaggccaagattatgaattggatccattacattcgaatatctgtacaaaaactcacttccaaaaaccataatataactatatacctttatagatatagattgtaatgatatccttgttgatttgttgacgttgagacaggtgaaactgttatttgctgcggagaaggaaatctgccaccaaatacttgatggtgttgagccatttagagatcaatcttttgctgaaatcactactattagttttggtatgcttcttagtttcggatatgctatcgctatcagcaggagatcgccggaaaaagtgtttgttatcttagatatgtatgagataatgatagagcttcaaccagaggtaacatgtacagtatcatacaatactgcgagttcatacatagcatatatgggtaaatgtaaacgcaaaacaattgagaacatattttggtgtatccaaccaaatttttatagttgaatgatttcgatcgttatgaaatttagttctttgtactttttaactaggaaaaattcatgtaccattttggagtatattaaaaatgcttgaatatattccaatatcgatgtttattcaaatcactaggttagtaacattgatttctacaagactttattagttatttattttcctttgattgaaacttggaagcatagtttgagttgatctttggaagcaaaccttgtactgagataaaagaagatgctctgaatctgacaaagctattagctcaatctgtgaaagaaactattgctgatttcgaagttgctattgaaatgtatgcgactgaaaccgttgttatggatggatctgtacatgcgctgactagtttcgttgcaagatacgactaaatcttgtccccagtaagtccttttttcatacacaatttcagagtgataaagcaaagcagaacttaaagttgcttctgga

SEQ ID NO: 171662 - DNA, 561 bp, Arabidopsis thaliana landsberg; identical to SEQ ID NO: 14154

SEQ ID NO: 171663 - DNA, 964 bp, Arabidopsis thaliana landsberg
tatttgattatgtttgcttttattgttgtagcattaggtgagatacttttggttccagaaactgataaaggaaagagtaaagattacattgaggtttcagaggatgagaagattacaagaactcgttctagatctttaaagaagaaagctattaaagcttcgaataaattgacacatagtttaaggaaaagagggaagcgtgtcgctgatcaatatgcaccaattgtgattgaggatgtgagagatgaagaagaggagaaagcagtgaatgtatttagaaaagctttggtttctttagatttgcttccaccacggcacgatgattatcataccatgttgaggtaatgtgatactactgcaggatcatgtcagtgagtattttggattgtgtcatgatcagtttcaggtttgttgttgcagattcttgaaggcgaggaggtttgatcttgagaaaacagttcagatgtgggaagaaatgttaaagtggaggaaagagaatggagttgatactataatacaggtgaaggataagaaccttccttgagttagtaaagatattgttgttttatgagtgtgctacaaagacctttaaagtttagaattttgctaagaatctttccacatgggttttgttttgctgttttcctaactggcaatgatgacatattccttcaggattttgtttatgatgaatatgaagaagtacaacaatactatccacatggttatcatggtgtagatagagagggacggcctgtttacattgaacggcttggtaaaattgaccccggcaagctaatgaaggttaccacattggagcggttcttgagatatcatgtacagggttttgaaaagactttttctgacaagttcccagcttgttcgatcgcagcaaagaggaacataaattcttcgacaaccataatagatgtgcatggagtggttggtccgtctacatgccttt

SEQ ID NO: 171664 - DNA, 1389 bp, Arabidopsis thaliana landsberg
tgccatgaatgatgctaaaagaattctgcggcactatccatggaaatatgttgtgattgatgaggtaaattccgagattggtcaatgtactaggctttgaagatcaagatgatctctctaactgataattttgttcttgtatattatagggccacaggttgaaaaaccacaagtgtaaattgttgagggaactaaaacacttgaagatggataacaaacttctgctgacaggaacacctctgcaaaataatctttctgagctttggtctttgttaaattttattctgcctgacatctttacatcacatgatgaatttgaatcatggtacaaacatggtccttttctactattatccctaactagtcttcttttttttttttttttgttaacactggtggcagctttttgacatttattcctttcttagtatctaactgatagatgagtctctacaggtttgatttttctgaaaagaacaaaaacgaagcaaccaaggaagaagaagagaaaagaagagctcaagtatgtacaattatatcaattttactttatttctttgattgtgtttatgtcttatgctaagggtacatcttgtctaggttgtttccaaacttcatggtatactacgaccattcatccttcgaagaatgaaatgtgatgttgagctctcacttccacggaaaaaggagattataatgtatgctacaatgactgatcatcagaaaaagttccaggaacatctggtgaataacacgttggaagcacatcttggagagaatgccatccgaggtacatgatctatctttttttttaatactttgtttaattatgtcattttttgcattgatttgttcatcccctatacttcaggtcaaggctggaagggaaagcttaacaacctggtcggtcaacttcgaaagagctgcaaccctcctgtccttctccaggggcaaatagatggttcatgtatgtcagtttcttctaagaaacgtaagaaaaacttctgtcagactgttctgtctaattgtttcatttcgtgacagatctctaccctcctgttcaagagattgttggacagtgtggtaaagtccgcttattggagagattacttgttcggttatttgccaataatcacaaagtatgtttcacaaacccatggctagtagctcatttccctgtgagaacttctatgatccatttgctgatgaccaggtccttatcttctcccaatggacgaaacttttggacattatggattactacttcagtgagaaggggtttgaggtttgcagaatcgatggcagtgtgaagccccatgaaaggagaccacaggtttcacctgtgaaaatgctgcttttagaattgcttttaagcaatattctgaccaa

SEQ ID NO: 171665 - DNA, 1465 bp, Arabidopsis thaliana landsberg
agaagtcagcacttgaggctgaattcaagaagttggtaaacgagtggtctgttgacattatcaagcaccaaaatgaacaagataagaaggtagaactcactcctctttatgtttacctaaaaccaaaaaagctcgtaacctaaaccatgtctccttaaaaaaacaggacgtagctgcatcactgaaatctgacatccctgcaatggtcaatgctttggtaaactctggtttgagagtaagagtggatttaaatgagttaaacaagaatgaagctcttcttacctgatgattggattgatccattttaccgcaactagaagatcagttcaagacagaaacaaaacatttctgttcagttccgtgcatgctacattagctgtttcctcgttcttttagggtttgtctttaggacactcaaataaccaaatttgaaaagaagaaaaaaacaagaattttgattctcaaagagacctttgtactttgatcaacgaagcaaactctcatttccttgaaagtgtacttttttataagtcaatattattacaagactagcgaagagtgttttttttttggtcacagtgattgatgaatttggaggaacatttatcgttaggtgagtttcatgtgtcgaatcttataaagaatcatatatctagaggatcaccaatacaagctctggttttgtacggaggaatccgccgcagaggagtgtattttccgggatgggttcctttgattttaagggcatgtgcttgcgttgttccacgtgttgttcttgggaagctgttgcattctgaatcaatcaagttcggtgtttgttctgatgttatggtgggaagctctctgatcagtatgtatgggaaatgtggatgtgtagtttctgcacgtaaggtgtttgacgaaatgcctgagagaaacgtggctacttggaacgctatgattggtgggtatatgagcaatggtgatgcagttttggctagtggattgtttgaagagatatcggtttgtagaaatacggtgacttggatcgagatgattaaagggtatgggaagagaatagagattgagaaagctagagaattgtttgagagaatgcctttcgagttaaagaatgtgaaggcttggtctgtgatgcttggagtttacgttaataatcgaaaaatggaggatgcaaggaagtttttcgaggatataccggagaagaacgcctttgtatggtcattgatgatgtctgggtattttaggataggtgatgtgcatgaagctagagctattttttatcgagtttttgctcgtgatttggtgatttggaacactttgattgctggttatgcacagaatgggtattctgatgatgctattgatgctttctttaatatgcaaggacaaccgtatgaaccggatgcggtaacggtttaaagaattttatctgcttgtgctcaatctggtcgtcttgatgtggcag

SEQ ID NO: 171666 - DNA, 594 bp, Arabidopsis thaliana landsberg
  unsure (1)..(594): unsure at all n locations
ggcaaattatgtgctgataacagcctgacggctgacatctctttggtgaaagcctgnaaggcagacacttctggaaacctcatttatcgccttacagcgcgtaacttcaacccggaatgcgctgtggccaacgaattcactgtggctgaagtggagtaaattgtcnaagtccgcgcgcttgatccgaatttcattcacacgcccggcatttacatccagaagctggtgttgaatgcacatcctgagaagcgcatcgaaaagcgcactgtttccaccccagctgcttgaaggagagtcgacatggcatggagtcgcgatgaaatggccgccctggcagccaaagaactacaagacggtttttacgtcaacctgggcatcggtttgcccaccttggtgtccaatcacattcccgagggcgtcaatgtgatgctgcagtccgaaagcggtctgttgggcatcggcccgtttccttccgaacagtaagtggacgcagacctgatcaatgcgggcaagcaggcagtgaccaccatccccagacacgcattcttttcgagttccgaatcctttgcgatgatccgcggcgggcacatcaac

SEQ ID NO: 171667 - DNA, 611 bp, Arabidopsis thaliana landsberg
agttcatgaatctcatgactgccattggtgtatctcttattatgtagattactctgtacaattgtctcggagatggtgccatatcagcattgcaatcctatgctgatgaagatgtaaggaagcatacatattagcttttccatcaaattaaagtaagtgatgtttcactgaggccatttggttatattttgactatgtcctctggagagcagaaggaagagtcgttttacacggtaagttgggcgtgtggcgttaatgggaacccatatgttgcggctggaggagtaaaaggtataatccgagtcattgacgtcaacagtgaaacgattcataaggtattattgcatttttatggatgttctatgtatcctagcaaatgattctatatctttcttgtataatctgtgctcgcaaatgtgcagagtcttgtgggtcatggagattcagtgaacgaaatcaggacacaacctttaaaacctcaacttgtgattactgctagcaaggtatatctcttggctttcttttcttcctaaagtatcctgacttcttttttatttgttggtgattaagagctgttacgttttaattgaataaggatgaatatgttcgtt

SEQ ID NO: 171668 - DNA, 1751 bp, Arabidopsis thaliana landsberg
catatgctgtctcctatgagtacatcccctttgatacgcctgatggaaaacctcgtggaagttacgatgaaatggtttataatgtgtttcttggggtaagttactctgatccctaaccatttgaaaaaacaattcctcttttttttttttctttcttatatacatacataatcatgagacctgtaaaagtttttttttgtttttgatagttaaggcgtctacaatagggtggagagccaatattgagctaaaatgttaatatcttttttacaaatgatgttgacaggagtttgatggagctgtaggtgatacaacaattttggctaatcggtcgcattatgttgatttcgcgttgccatactcggagaccggaattgtattccttgtaccagtcaaggatgggaaagaaaaaggagaatgggtcttcttaaagcctttaacaaaggagctatggttggtcactgctgcttcttttctctacattggaatcatggtttggatttttgagtaccaagcagatgaggagttcagggaacagatgataattgataaaatatctagtgtgttctacttctcgttttcgactctctttttcgcacacagtgagttaatctctgtcacacacaacttcagctactaaccattaccaatttacttgaaaatctttgaaacaagaaaactgatctacaaacattttctttatagggaggccatcagagagcttttttacaagggttcttgttgtggtttggtgctttgtgttgctaattctgactcagagctacacagcaacactgacatcgatgctgacagttcaagagcttcgaccaacagtgagacacatggatgatttgaggaagagcggagtgaacattggatatcaaactggttcgtttacattcgaaaggctgaaacaaatgcgtttcgatgaatcgaggttaaagacatataattctcctgaagagatgcgtgaactttttcttcacaagagcagcaatggcgggattgatgctgcgttcgatgaggtcgcttatatcaagcttttcatggctaagtattgctcagagtattccatcatcgagcctacctttaaggctgatggctttggctttgtaagtggagctgattgctttttatttagacttttaatggtggcagcagaagagaggtacaccgcttgtagtcaaaaccacttttagctaacattcaaacgttttggcctgtacgcaccaaacttgtgaacgatgaactaaaagcagctttctacactggcaccattcagaagtgatactaaatctcaatgatttttgcaggcatttccactaggatctccattggtgtcagatatttcaagacagatcttgaacataacagagggagatgccatgaaagctatagagaacaagtggttccttggagaaaaacattgtctggactcgactacatcagattctccaatccagctcgaccaccacagctttgaagctctatttctgatcgtctttgttgtttctgtgattctactcttactcatgttggcttctagaggataccaagagagacaacacaatgcttcacccaatctaccaaatgatcaagccaatgcagctcaagaagaagtcaatgaagaaggtaatgttggagatcatattgtggaagtcgacacagctttggtccgtcgtaagaaactgacctcaaacactatacccattagaagagttgcgccactatcaaggctaaagtcagcatag

SEQ ID NO: 171669 - DNA, 533 bp, Arabidopsis thaliana landsberg
  unsure (1)..(533): unsure at all n locations
atggttgtcggtttgtcggagtgtcggagtttcatcagaatggtcattgtcgaaatctttgcagaaagtgatgaaccacaattctcagtttctgatcggacatttcttagtttgttcattgaacagcgtatggcagtaaagctatatgcacataatatatttagacacatagattcacgtcgacttcggtaaagagcctttgtcaaatgtcgtctctaagcaccgcaaaaatcggacctgttccacttgtgggacttggtgtatatcgttctccaccgggttcggcaacatacaatgctgttttaagcgctcttgagctaggatatcgtcatatcgataccgcggaattttattctaacgaagaggatgtgggaagagccgtgagagattcgggaattcctcgagaggaaatttttatcactacaaagctatggacggngcaggcatcgccaggaggtgatggttataagcatgcaattactggtgtcgacaaggcactcaagaaaatgcagatggattacattgatctaatg

SEQ ID NO: 171670 - DNA, 338 bp, Arabidopsis thaliana landsberg; identical to SEQ ID NO: 81028

SEQ ID NO: 171671 - DNA, 2476 bp, Arabidopsis thaliana landsberg; identical to SEQ ID NO: 1886
  unsure (1)..(2476): unsure at all n locations

SEQ ID NO: 171672 - DNA, 1521 bp, Arabidopsis thaliana landsberg; identical to SEQ ID NO: 28593

SEQ ID NO: 171673 - DNA, 417 bp, Arabidopsis thaliana landsberg; identical to SEQ ID NO: 81067

SEQ ID NO: 171674 - DNA, 1418 bp, Arabidopsis thaliana landsberg
attgccattgccactttggatcagtttctatgggtttttgagaaaggtagtttttgatgttttttttatgtgtagctaagagtgtaagactgattagaacgagattaaagaatgaaaataaagttcactttgagaaatttcggttttgttatttctgtcctctagcactagtgttaataagcaactacttgagacattatctagaacagaacatcggtagtgatgtgaaagagatcgttgatgaagtatcatgtagattatattacaggttgtaactttgagtgtctgtacttaggatttgatagtaaagtgaaggtgaagtatttgaatcgagtgttgtgtgaatgttaaatctcgttgactttactgttgctttataaatctctaatagaaagtttgctttatatgaattttatagactatgttgtgtattgatgattttggcaggtgcataatgtctgaacacaatctaatggctcagtctatgattacaatgtctcctactagatatgggaaataagattgcaaaataagaggatcaatcaacaatcattcaaaatttagttatttgaagactgttaaagaaatcctctctgactcgttattcactaggctgaaaactatttttcttggccctatcatcaaagaggtttaggaaaagtagttggtaataaaaaaaagagttgattgcttgggttttttggtcagttggttcactttctggtagtaaaacagctcgtgccgtcaaggaaagacgagatgtggttttgcatcaacaacaagccgatgagattctcattgatgagtttcatcttgtcacgggattaccatgctggataaaagaggataaagtcccaatagattttgagtgtgattggcctttgttgcctgacaaactccctatcaaggtggatgatttgatagcataactgaaggtcttggatgatgaggaatgcaaggtacaacttgttatgttgattgttattttgatcgtcttcatgctgccatatggcattacaaaatactcggtttcgaaagattatttggccaatgcgaaaagaatatccatgcgtatccctagggaaaagatgcatttgatatgctggtgtcgtcggtaaaagatgatgataagaagaaaaatgttacgaagattgatgttaaagggtttcccatggcattgcagctatggctgttgggatttgtgtcagaattagaagtggcttatgctcggctcgatgataaatcagaccgttttcttgtttgtgcaaggtatttatctactgttcagccttcttatgaacaaatcatgagtaagagagaagatcttgaggtaatcatgaagaagaagatgatgatgttcttatgcacttgttaaagagtgattacctaattctttcgattagattggaatgagatgt

SEQ ID NO: 171675 - DNA, 668 bp, Arabidopsis thaliana landsberg
tctaacccaccaagccaaaagctaaagccaaatcagtaagtagtttgattggttctatatttctcgttgttttcattatctgcattttctatcaactcatacctttaaattattctgcaactcactatggtaagcaactttgtcttttgcagatcatccaagacaccttttgctatctacgcagatgcagtttcagacaccacatcagggaatcaaccagagtcagacaagtcaagaccagagtttggtagttggctcatgcttggaggcagagcagagaggaacaaagaaaacaattctttacctagaaaatgggcatcattcaaggttttccctctaccctcctaaacaaaactatctcacttggctcatactatctctataaattgatcactaactgcatttatatttattgtcacaggttcctcagaaacccattgtgagaactgttgcagcagcatctgcttccacctttgaggtttttgtcgatgaagaagaatgtacagagtaagtttgactaatttttcagaagttttctgaacaaaacatgtttccaccattaacatgattctgaaatgcagagaggaagaagaaaagaagaagaatgatgaaactatctcatcatcatcaaacgttctgccccttaatggcggccgtgagataaaaaa

SEQ ID NO: 171676 - DNA, 682 bp, Arabidopsis thaliana landsberg
ctactatcaacacagctgaagaccaagctcacttggtatgtttctttaaattatcttgtaaattcgtttgatgaattgatgtttttttgtgattttgagctaatagaatctttcctttgtttggttaaactgttcaggaattctatatccggcataaggatggatcaccgataagttcggaagcagagaggcaacgagtgattcaatgcttagaggctgcagttgaaagaagagcactagaggtataataacactatactgagattgattgatttttctgttgtttaatcggaaatctaaacatttttttggtttggtttgtcttcagggagtgagattagagctgaggcatccggacaaacaaggtttactagcggaagtaacgcggacattcagagaaaacggtctgaatgttacaagaacagagatatcaacgagtagcgacatggctacaaacatattctatgtaactgatgcaaatggagacgaaccggacttcaaattgattgaatcggttagggagaaaatcggtttggagtgtttgagagtgaaggagatgccaacaatgtatcataagaagggagatggagaagaacaccaacaaaccaaagcagtgttggtttcacttggaagtttggtttggagaaatctattcaactttggtcttatcaaatcatgttct

SEQ ID NO: 171677 - DNA, 525 bp, Arabidopsis thaliana landsberg
  unsure (1)..(525): unsure at all n locations
tgcatagagagatcnctgaatagagtaatgtttgtgtgtntgttttcagtattgagatttatacacatccgaaaaaagagcgaatagcgagaacttggggtacgactgcaccgggtctgccttatgtagaacagtcgatacccaatgctggagactggctcattgggggtgatcttgaggttttggaacctgttaagtacaatgatgggcttgaccggttcaggctttcaccgtttgaattacgtaagaagctagagaaacgtggtgcggatgcggtctttgcgtttcagcttaggaacccggttcataatggacatgctcttcttatgactgatactcgtaggagacttcttgagatgggttataaaaaccgtatccttttgcttcatcctttgggagggttcgctaaagcggatgatgttcctctaagctggcgaatgaaacagcacgagaaggtattaatggaatcaaaaacaattttgtgcgtgttgtttactagttcatataggagatctgaatggtttc

SEQ ID NO: 171678 - DNA, 886 bp, Arabidopsis thaliana landsberg
atggaaatcgactccgagaaaattcacgaaagaaagcaatccgattacaattcgctggtacgaactctattactttatcgacttgtagtgaaagacaaatgtaatcattcgtggtggtgactgtttctacttataagtgtacgggctagggtttgttatctgattctgagtttttgcaattgaagcaggatgagagattcgagatacagaaggagatgtacagaggtcagcaatacagtcagatttactttgctcgtcttcatctcatgagaacacttctctactctcttgctcctacttggaaatctcatttgcctggtcagtgcttttgtttctctcatatttagcacaacaacgaagagcagtttttgagaattttcttgggttagatataattaggtgaaatcagtgatttttagggatttttgctatcttatggattacagttgagaaagattgctagtattgtttaaattatagatctgaatgtgaatttcatttttgcagtgtgtaaggttttgggacttgaaaaaggaaaagaatgcataattgtgggaaccttgttcaaacacatgaagcttaaaccttgtgttctcgatgaatattctaaagaggttggtttttattaacctctactgtttttttgagctatgtctatgctgaatcaatctgagtatatttaacataatgcagaggtcagttactccgcttgttaaaccacataactttatgcatcctgatgataatctgatcctcgaagacgagagtgggagagttaagcttgctggttccgcactttcacctgcgatttatgtgacaggtattgcaaatgggttcttactgtttttactgtatgattttttccttctttacaatgtggcaaatc

SEQ ID NO: 171679 - DNA, 490 bp, Arabidopsis thaliana landsberg
gagtgtttccattttttactatacaagcagctaagcgacgaagcataaatagagaagcggtaatgttggaattgaaaccgatggtctccatcaagagagaggatataaagagatgcttgattgaaaaagtgatttcaaaaattcgcgaaaagtggtcaagagaagattttgggaaaactattttcattcaacaagataatgcaagaacgcatgtggatacgagagatgcagaattttaagcaattgcttcacagtttgggtttgatatacgcttgatgtgtcaaccactgaattcaccggatttgaatatattggatcttggattttttagtgctatccaatcagtacaacacaatgtatgtccaacaatggtggaagaacttgtgtcggcggcaaagacatcatttgacgaatatcccgcaaacaggtgaatcagatctttttaactttgcaatcttgcatgttagagatcatgaaagtcaaaagctca

SEQ ID NO: 171680 - DNA, 6053 bp, Arabidopsis thaliana landsberg
  unsure (1)..(6053): unsure at all n locations
atgcacttatggatccccttgtccctgttgaagaaaccttagattttaagggtgtacctgaagattttcgagttactttagtagccacacgttttcgtggtcatgcattgtctttgtggcaacaactaaagacaacgagatcacgcacaggtaaaactcccattcgctcttgggagaagctgaaaaagaaactacgagacacgtttcttcctcacaattatgatcgcacgatgtacaatcgcctacagaatctccgacaaggctctagatctggtgatgagtatgcagaaaaattctatcttctttgcacaagaaacgaaatttatgactgtgaggttcaattagtttcgcgttttattggaggattgcgtgttcagattcaaaatgccttgtctcagtttgatccatctactgtatcagaagctcataggcgcgcatcatcatttgaataacaattccgtactgctacaagctcaacatattcacgctcacgaccaacagatttcaagtctaacttcacgggacttccaccacgagaggaaacagagcagctcaattcagtcactaatcgcccgatggctaaagaagacgattctcaacaccaattgcgacgttcaactctcccaaatgccttgcgttgttttgcttgtggagatccaggtcacagacaaaccgcatgtcctaaccaaacacatcgtggtctattgattgaaaacgctggcaaagaaatagacacaggttgtgaatcttctgaggaggacatggatgaaccgtttcaagaaacacatatcactaaaggagatgaaggacgcatgttggtaacaaggtttgttgggttaactccgcaacaacgagaagaacattggctgcgcacaaacatatttcgctctacttgcaccatcaaaggcagtttgtacttttgttatcgattcaggaagttgccgtaatgttatcgcaaaacaagttgtgcgtaaacttgggctaccatttgaagaacatccaacgccttatgcgatgacatggttgcaggatggagtttcttttcgcgtttcgcatcgatgtctcgttcccttctcaataggccaatattacaaggaccgtacatactttgannnnnnnnnnnnnnnnnnnnnncatctcattttgggaaggccatgggagtatgatcgcaagattattcacgacggtgctgcgaatacttatgagtttatttgggaaactcacaatattgttctacttccatcaccagatactgcactgactccggacccgtcaccaccaacagctcgcaaacctcttctcaagccgcacgtaacaaccaccggtcatgttcacgctcctctattgtgttcgttctctgtgtttgaaaaagaattaaaaaccgaaggattcgctctagcactactaccttcagtttctataaacgtttcttccccggagcgcaccgccttcgacaacgtgcttacagattttgcagacgtgtttcctacagagctacctcaaaagcttccacctctgcgagacattcagcatcacatagatttggtccccggagctacacttccaaacagaccatgatatgtctataatttgcatgttttcagtgtccattcatcatcgttttgagtccagtttcgtatcattcatcactgttttatatcatttctcatcattcttgcatactttgcatgattaggatagctttgcatacatattgcatttctgagttattttcaggtgatttggagctgtttgcgagcaaattggaagaaacgagccagaaccagaagacatactcgaccaccaggttgtggcatccagcaccatcatcgaccccctggtcgagtgactttggagccattcttcccatctactcgacccccacgtcgagtaacctcagctcagtccactcgatgacgcacnatcaccccctggtcgagtatcactttgccacaccacctgaccacactcgccgttcactctaccacgttactcgaccccctgaacgagtatcatcactcaccaccaacaccatcactcgaccggacactcgatcacatcttcatagtctactcaaatctgtactcaaccaaacaagctgagcacaaggaagagaagaggagaagacgaagtgtctggaagcggcctggacctccatcggatcacgaagcccatctcggcccattatcattctatgggtcgggcgattaggttattggcccgtttactatcattttatttcgttttgtataaatagatgtcttagggttttgtcctgagacatctagtcgacattgagtttttgcttcagttttattttctgttttactctgttgcgccgcttttgcttttgcaacctgtaattcgagatttttcttcaataaacgctccaaacagccaatcccttgggatagagacgaatatctcaggaactggtagattaacattccatcgaacatcttttgggtgcgagaatgcttgggatcgaattccagttgatcagaaagaaataagcagtaaacacaactagtcctgaagggattcaatcaattctaaaactcaaccattctacagactacggattccacaactactctatcccatccttaagaattctaagtcactactcagacaacatgctcaaagacataaacgcaggtaaataataatataacataagtaaagagataaagagtagatgacagatgaaatcaattgcggaatctgaataacttggaaaaatctcgaattacaggttgcagaagcaaaagcggcgcagccagagtaaaacagaaaataaaactgaagcaaaaactcaatgtcgactagatgtctcaggacagaaccctaagacatctatttatacaaaacgaaataaaatgatagtagacgggccaataacctaatcgcccggcccatagagtgataatgggccgagatgggcttcgtgatccgatgaaggtcctggccccttccaaacacttcgtcttcttctcttctcttccttgtgctcagcttgtctggttgagtgcggatttgagtagactatgaagacgtgatagagtgcccggtcgagtgatggtgttggtgttgagtgatgatactcgaccagggggtcgagtaacgtggtagagtgaacagccgagtgaggtcaggtggtgtggcgaagtgatactcgaccagggggtcgagtggcgtcatcgagtggcctgagctgaggatactcgacctgggggtcgagtagatgggaagaatggctccaaagtcactcgaccagggggtcgagtatggtgctggatgcacacgacctggtggtcgagtatgtcttctggttctgcctcgtttcttccaatttgctcgcaaacagctccaaatcacctaaaaacaactcagaaatgcaatatgtatgcaaagccatcctaatcatgcaaagtatgcaagaatgatgagaaatgatataaaacagtgatgagtgatacgaaactggactcaaaacgatgatgaatggaaactgaaaacatgcaaattatagacatatcaactcccccaaaacttagtctttgcttgccctcaagcaaataagaagacatagttgaaggagaggtttgaaggtggggactcagaaccaaagcatctgatagagcaaataaaatcaatgtccaagttggtagttttaagatgcgatatgattgaattttactcaaaaacgttagccatgccttgttatcaatcaatccgtctcttatactcgacctacacatgctttcaaatctaccaatccctttaacattcattaattctggaacgtgaatcaagcaatgcatcatcaaagaactcatttggctaaggtaaaaggtcaagagacaaagatggtcccttacagaataggcttcagtaacaggggatctctcaaaaaatgattaagctttagtagaatgctaaaggtaagtcacaagctatgcatacagagataagatcccatctacccagagtatatcaaatgaagctctaatggtaatcccatctccaatcccaatataagaactcaactctaccctttgcattcatgaatcttttaagcctttttctaatcattcttttcttttctcttaactctaggagaagctttctcaacactttgatacatctagcggattttggatttctttaacaactaaggttcctgtttttaacattttaaaaccaagggcttttgcccatcttcaatagctaacaagaactctttcttttctttacaaatcccaaaacctttactagactttttctgcttctttagcttacttcacctagagtcttttaccttttctcatcaatgaatcaacccccttttttttttttttttttttttttcttttcctttaaacacatcccaacccaaagtataagcgcccacctagtcctatctagtccgaaaaatgcgaactagaactacatgagacactatctctgtcgttacgaacctaacactttctaccaagcttaatcggaataagacctcacaaacactcacaagtgatatagggcttgaaagaaagtctaggtttgggtttgggttaactgctctaataaggagagtcagctacttgaattaacaagagtgatcaaaatgaataagaaaatccaagtattttagggtatccatgagttcaaatttgatgcagacatgataattaaagattagattgaggttcaaattgatagggaatgcatcagatcatgacagtgtggtcgagtagagcaatctaggcatggttcagttttacttcaatttcactgactacgcaacaaataactagcaacgagggcactgagtttattcggtgaaccaaaatgcttacaagaatatctcatcattatcccctatgcatatgcaacaatcttaaatgaaacattctagactcgatcctaaatgtaatgcaactacatgaacactcagtttttgtgaaatcattttttgaatttttttaaaatttttttcgtttttctatgccttagatgagtgcagactcaagagtataaacaatgcaacactcacttcttgaaccctcccccaaacttaaatcacacaatccactgtgtgactaaacatggaagagagtattcaggataaatccaatcacagaaacaaaataaagaacaaatcacaagagatgatataatacaatggtgaagtgaggcgcttacctcagtcaaagaatgaacgtagttggtcgtcaatggatgcctgtgattgctcccaggctatagacgaaccaccttgttctgtatcagctccagcaggtgggtactcgacctcatcagctctctggcggccagcaccgctctgaggatactcgacctctctccttcttctgcggccagcaccgcggtcgagtgatctcctcgagtgaatgaggcgtgatctgctgctagatcgagtgagtgtagccttccttcttctcttgtgctctcgggattcgaatgacgaatgcctagcctggacatgtgggactctctgctcgctaagcttaggcctgtgcgcaggtacattaaatcccttcgatggcatctccagaggaggctgtacctgtggaatagcagtggtggaggaagagcaactcagcttatctgtcagaagcttgaaacacttggcgatcagcttgtcctgcttcttgcaccacttctgcaatttactgttattcttatgagcttcagtcaagctcttgctctgcctcgctggaggtacatgttcaccaaagtgatacatgctagtgtcgaactccactgctctatcttcatccaacccatccgaagcagcttcttctagaagatcatcctcatccaatggcggagcgttctcatagtagaggcgtccaacctcaggccgaaaatcaatattatctccctttattatccgtgtaacctcaggccaaaaatcaatatgctagctctcctgtctgtagagtgctcaaacctgaacctgtggaagtcgtcaaccattgcaaactccaggaattcgtagtgacgtaggtgctcgatatccattgctcgcg

SEQ ID NO: 171681 - DNA, 1374 bp, Arabidopsis thaliana landsberg
tctaagggcagatggagacggagagatccaatggtggagatccgtcgcgtacgaagagaggttagatcaacaatccgatctgttttctcaaatctccaccaccgacgacaaaataacattttcaacctcagccgctgcgatcactgtcgtggaggagtttatctccggtgagtcatcgagttccggtagcgagtttttcacaaactcatcatcggaggttgtacagtcttcttcctcatcgttctcttcttcgtcgagtggtgaatcggaggaagtttccagcgagatcgacgccgtggaagacgggaaggagagcggagatagtttaaaggcacatgacggtgacggatcatctgtcaaccgcaacaacagcctgtgtaacagaaaggttagttagttaaaagctcgttttcaatctttattacaactgtcacaagtgttgaaagcatttggttttgtcttttcgtatattaaaaattgaggagattttgaaacttgtcggggaaagcgtgcgagtcacgtgaggtgtgggatttagagtttaatgggttataattaagattcttcgacgtagcttctaatgcgtattatacggcacatgatcccgcgagagttcatggtacttcacgtaccaaattattttacagacgatgaaaaattatcgtacacatttaaatataatttacatatatattattagatacgcagatcttcacacatttatacgtagtagtacttttaacattataattaagagttaattttatattatcacccatgttcatgaaatttgtactaaagtaatgaaatcgttggttatttttattcttggatttgtataagaaatattctcaaataattaattaagtaaccccacataatctcaatcaaaacaaaagtgaggatacgatcattaattagataggggcagaaacaggtagatagataaatgatgttgtcatggggttggttgacttttgtcaacttattagtatcgctattatttctcatatcgttcttgttgagaccacttttagtttagttattctttgcggtgttgatcacatgttaaacagatatgatttctcatatttgattaattgcgatattctttaggaatgtgtgaatgaagagaaagaacaactcagtccagtatcgatcttagaatgcccttttaaagacgatgaagatgatgacgaagacgatgaaatcagtgaccaaaatggtaattttatcaaatgactactcaataatatttagcaagtcgttatacatcacaagagaaatgtgaatttaacgttataagctattaacatttaaagatacatatgagaaaattgctagaaaaagcaggagattaaatgggttggtacg

SEQ ID NO: 171682 - DNA, 389 bp, Arabidopsis thaliana landsberg
gtgcacggacctctttagaaataagggaaagtttctgggatcatcgattcccatatctgggaaacgatgtgtgcgatctgtgatactgaagaaccaatcacaaagagtctgacatattccaaagctcgcatgtttgaccgtaatgggctcggtcctcacatcaatttatcgttcgtatcaacaaatccaatcagaaatggtaaataacttcttgttctctctgttatttgttttacatagtccaatgcaagtttagatgttgtcttagtccttgttcatttttaacattgcaggaagaggaattaagaaggacggtgggtcttggtgaggtctttgtcaagaagcataccaaactagatggcacttatgtcgataagaaggcggagaag

SEQ ID NO: 171683 - DNA, 539 bp, Arabidopsis thaliana landsberg
  unsure (1)..(539): unsure at all n locations
tttcccccggatcatctgatgccaacgaagaggtctccggcgtgcgtgaagctgccgagcagacggcggcccagggcttcgtgacgaccctcggagtcatgccgcattacnccgcgaccggctacggctatatcgaagtgagcagcgaggcgctggccaaggacaaagacctcgaggctttcaaagtgaagggcttccgtgagaagcccaatttgaagaccgcgcagggatacgccgattcgggccggcacttttggaacgccggcatgttcgtgttcaaagtttccgagatnnnnnnnnnnnnnnnnnnnnnnnnnnnnnnnnnnnngagcaagatctcgcagatggacgcctcgatgaagaacgccgaatacaactacgcgatggtcgacggcatctcgctcgattacgcgatcatggagaagctcgccgcccaggcctgcgttccgtgcgacctgggctgccgcgacgtcggctcatgggacgaaatggcgcgactgttggacgaaagcgcgcccgtgcagtcgcagtggcgcgcg

SEQ ID NO: 171684 - DNA, 1260 bp, Arabidopsis thaliana landsberg
atggatgttcatgatctatctgaagaagccaaaagaggagtaatacacacgtcggaggaatcattggacgatctttgtgttgattttcgaggtcggccatgcaggccaagcaagcatggtggtacaagagctgccctctttgttctaggtatccttgtccttctctcgtaaacattaactatgtatatatcggctagaccaatatatatgctgcttatggccgaattagtccatgttatgcattttgaagccatgtagttaaattgattggttgtgcatacatatatctatgttcaggcttccaagctttcgaaatgatggcgatcgcagctgttggaaacaacttgatcacatacgtattcaatgagatgcatttccctttgtcaaaatccgcaaacctcgttactaacttcataggaacggtgtttctcctctcgcttcttggtggcttcctctctgattcataccttggaagctttcgtaccatgctcgtttttggcgtcatcgaaatctctgtatgttcctctacctctctacctctcttttctcctttctattttagatgctcttgaatattatacttcacttttcatctctaactagtaacttgtgaataaaacgggatatttaaagtatattatagacaaaagttcaaaactttaacagaaagttgtaattaaagtgagttatgaattaaatctttcggttctttggaaaagcaaatgggttatataatttgttagtatagtgttcttttttgagcgtggttaacgccacgcaatagtatagtaacgaaatttacggcttcataatacatacacctgacttttaattccttggttataggtaaaaatattagtgaccaaagactaaaataatgtggtcgacaaaactaggagaagttttggctgacaaatgtttttgtaaattgataaaacagggtttcatattattgtcagtccaagctcatctcccagagctaagaccaccagaatgcaacatgaagagcaccacaatacattgcgtagaggcaaatggttacaaggcagccactctctacaccgcactctgtttagtggccttagggagcggctgcctcaaaccgaacatcatctctcacggtgcaaaccagtttcaaaggaaagatttgaggaagctctcgagtttcttcaatgcggcttacttcgccttctcaatgggtcagcttattgcactcacactcttagtttgggtgcaaacgcattctggtatggacgttgg

SEQ ID NO: 171685 - DNA, 514 bp, Arabidopsis thaliana landsberg; identical to SEQ ID NO: 7016
  unsure (1)..(514): unsure at all n locations

SEQ ID NO: 171686 - DNA, 478 bp, Arabidopsis thaliana landsberg
gaccatcgccaactccaatgcccaacaggctcttcaggttggtgttctagtctggagaaaggcaacggatctgcccaccctgtttgccaatcccgcatccaaactcggcaagggtcaggtcagcgacgtgatcaaggcgggcacaggctttcccatcctcaaaatgctggatgaacgtggcggcagcagccgcgaacaggtttcggaaacccacgcgcggcacatcctgctgacccccaacgagctgcgcaacgaagagcagacccgcgccctcgaccgcgacctgttcgaacagctcaagaaaggcgcggactttgccgaactggcgaaaaaatattccggcgatccgggctccaagaacagcggcggcgctctgggcttccagccgcccggcgtctttgtgcataaatccaggtgcgtctggaccagctcaagatcggcgaaatcagcgaacggtttcaccccaagataggctggc

SEQ ID NO: 171687 - DNA, 1544 bp, Arabidopsis thaliana landsberg
ctccttgctacagagataattaaggtagtataaggaatcagtctctcctagatgcgcgatgaaaattgatatatcgaaagcgtttgattcagttcaatgggggtttttactcaacacgctggaggctctagatttcccggagaagtatattctttggattcagacttgtgtcacaacagcttccttttcagttcaagtgaatggcgagctagctggatattttggaagtgaaagaggactcaggcaagggtgttcgctaagtccttatctctttgtaatatgcatgaacgttctatctcgtaagatagacaaagcggcatatgacaaaaggataacatatcacccaaaatgtaagttgttgaaacttacacacctctgttttgcggatgacttgatggtgtttgtgaaaggtgaaaagaaatcaattgagggaactttagaggtgttcaacgactttgcaaagcactcgggactacagattagtcttgagaaatctactctctatatggcaggtgttccagatacacaaaaggaagagattctccaacagtttccttttgaatatggagccctaccggtgagatacttgggtctccctttacttacgagacggatgacagcttcagattatctaccattaatagaaaaaatcagatcacaaataaactcttggacggttaaagctctctcctttgctgggcgtctacaactaataatctcggtgatttttagtctcacaaatttctggattgcagctttcaggctgccaagcgcgtgtattcgggaaatagataaattgcgttctgcttttttatggtcaggtccagctttaaattctcgaaaggtgacagttgcatggtctgaagtatgttctccaaaacaagaagggggtttggggttacgctcgattgcagaagcaaataaagtctgtgttttgaagttgatttggcgcattctctcagctaggcggtcgctttgggtggaattggttaagaaatatcttattcgaagaggctccttttggttagtgaaagagaatacaacttgtggttcttggatatggaaaatttttttgaaatacagagacacagcaaagagtttctatcgagtggaagttagaaacggcgaagcttcttcttttgggtttgacagatggagtgagatgggttgtctttatgacagattgggtgcaagagggtgcattgatttgggtagcccgatgactgctactgtgggtgaggtaatggcaggggcaagaagaagaaaatatcgggtagctattttgaatcaagtcgaaaacgaaatagtaaaacagaagctcataagatcgaatgagaccgatgtagcattatggaatggaaagcatgaccactatcgaaaagagtttcacaccaaagagacgtggctgcagattcgcaccgcaaagccattgatggagaactacaacggaatctggttcaagcactcgactccgaagtactcactcatcacatggctcgttcaaaaaaatagagtagctacgggtgacaagctgattaagtgga

SEQ ID NO: 171688 - DNA, 554 bp, Arabidopsis thaliana landsberg; identical to SEQ ID NO: 40801

SEQ ID NO: 171689 - DNA, 657 bp, Arabidopsis thaliana landsberg
  unsure (1)..(657): unsure at all n locations
tatgaatgaaagatccatcccattttgtcctgatgcttncttctttnnnnnnnnnnnnnnnnnnnnnnnnnnnccttgtaggttccgttattttccaatgctgcctcctccacggacgatcacggcatcactctgccgcagtaccaagtgttcatcaatttcaggggagacgagctgagaaatagctttgttgggtttcttgtaaaggccatgagattggagaagatcaacgtgttcactgacgaggttgagttgagggtacaaatctaaattatcttttcaggaggatcgaggaatcgagagtcgcggtggccatcttctccgagaggtacacagaatcatgctggtgcttggatgagcttgtgaagatgaaggagcagatggaacaaggcaaactcgtggtggttcccgttttctacagattaaacgccaccgcgtgtaaaagattcatgggagctttcggagacaacttgaggaatctggagtgggagtaccggagtgagcctgagagaatacagaaatggaaggaagctttatcatcagttttcagtaacataggcttgacgtcggatatacgaaggtataatttgataaacaaaaatatggatcatactagtgaatttctgtatatagtgttgattctcaacttcttctctg

SEQ ID NO: 171690 - DNA, 643 bp, Arabidopsis thaliana landsberg; identical to SEQ ID NO: 43732

SEQ ID NO: 171691 - DNA, 1413 bp, Arabidopsis thaliana landsberg
  unsure (1)..(1413): unsure at all n locations
agatttgngnggaatggcctaagcgagtggctaatcaaagacggtaacggtctaaagctgatgatattagacgaaatcttcaagaaagaggaaatgtgatgatgagaacaagtgtgaagagaatgagaagaagcagaggagctctgttaaaaagagagcaactacatggaaagaagaagaagttgttgttgatgatgaaaagaaatgcgaacaacaactccaactagttccttccagcaaggcaacatctcgaagcaggagcaagaaatcagtcagtgtggatacttggttggttaacaacgagattgatgttagcgctttgagttcgcgttctgagtctgaactttcggattcttatctgaaaaccgagtactttaatgactgcagaagcatgacaaggagtttaaaggtagcatttgttcttacacaatgagaaaacatcatgtgatgaaactgtattcaacttttttctgatttgttttcttccctacacaggcaaatttgggagagcttgcaatttgccatcaatgctctaaaggggaaagaagatatcttttcatttgcaccttttgtgaagtgaggttgtattgttttccatgcataaagaaatggttagtttctgttcttacattttaatgacactgcctataggtttcaatatcgtcaattacaatcttatgatttgtgacaggtatccccatttgtccacggatgatatccttgaaaaatgtcccttttgccgaggaacttgcaactgctgcacatgtttgcactctagtggtttaatcgaggtatgagttgcattcttaacaaaatatgtggtggttgtttatatagatcaagaaccgcaagttcgatttttgttttggtgtgaatagagatgtatctatttgtcttgcagacatctaagagaaagctcgataaatacgaaagattttatcatcttcgcttcttgattgtggcgatgcttcctttcctgaaaaagttatgcaaagcacaagatcaagaaatcgaaaccgaggctaaggttcaaggtatatatggttctcccttttactactaagacaagattttttcttgctacaagataacatattgatatgtttatagattcaatggcttctcaagttgatatatccgagagtctatgctcaaatgaagagcgtgtcttctggtaagtatcatccttttgttgcatgtgtttgaagagttacatgacatctatcttatatatcactgaaatgtctttgttgctctagtaaccactgtgcaacatcaattgttgacttgcatcgaagctgtccaaagtgttcatatgaattgtgtctgaactgttgccaagagatccgtggaggttggctttctgaccgcccggaatgtcagctacaattcgagtacagagggacccggtat

SEQ ID NO: 171692 - DNA, 1187 bp, Arabidopsis thaliana landsberg; identical to SEQ ID NO: 18381

SEQ ID NO: 171693 - DNA, 513 bp, Arabidopsis thaliana landsberg
aacgcttgtgaaattgaatcttatgggcaagattcttgttgatgttccttccgcggcttgcctcccgtcccttcaatcgctgctccttgtcaatgtggtgtataaagaccaagattctcatgttaggcttttattgagttgccctgttctcagatatttgttggtgatccgaaataagagtgacaatgtgacaaggttcattgattcgcaatcacttgaaaaaaatggttctggtaggtcattggttatagattccccgggattaaattaccttagcatcattgactctttaggaggcaatttctccatccagaatatgccatgccttgaaaaggccatcgtttccctctgtggtttttacccgaatgacaagtttctgacatctttctcctctgtcaagtatctctatttggctcatatcaaggtaattaaccaaccattttgatacccttctctcgtaatatatctaaatttcttcgagatactatcgctgcgtttaattacttatgttgt

SEQ ID NO: 171694 - DNA, 5854 bp, Arabidopsis thaliana landsberg
ccgcatcaactcatattccaaggcaaaatatcttattgacattttaatatcttgtatgggactcctgagctacaacttctgctccagtctccgcttgggtctcttttctcccttcctgtcagatactgttctttgtctggtcaacttttgcatcagttattatgtaggcagctgtttactgaggaaatagatgcaacatggtttgtcttcgctggacagccattacgcttttccctcaaagaatttgaggaaatcactagtttgtgttgttctgagtacccatctgctgctgaagtccgtttttctacttcatatgctgatggtgaatctccttactagtacaagctcattgggggccaactaggatcaacaactgttaaatcactcgttgcccgtctcaaatctgattgtggcatgctgtatttgcaaatcccaaagtctctcgacttgaggcccttttctgcacctccactatatttggtacctgctaatgggaagggggcgatgctaccttccccccccccccccaacctaaaccaaagaagcggagactcacagcccaggctggtggaagtgggaaaaaagaaaggagaacctgcgtcaaagtaaacagtcgaccgatggcctatttcgtattttaaaatcctccatattagatgatgtctacagagttcagccggattatgtccaccaagatgtttcttcctctacatctacttcaactaatgaccagcacaccagtcctcttcaggtaactcaaagccctgttcaaactttgttttgaagccatgtatactgtttgacattttccctttgttcctccttctgtttcatatcttactctttctatatagttatgtaaaactaacatatttttttccaaaaattcttctcttatgttggaaaccccacctatatttatacatttatctctctatctttttctttcagggtcagttatcacaacctccgacgccggccttattagaagcttatattcttggtacatcacttgtccacccacaaacacccctctacatggtgactgctatgtgaacaagtgtgaacctctttttcctaacacagaaactgatgacacttttgtaacttcagccgtggtatgtcaatcccaccctataaatgacaattgcgtatgcaattgctgcttaatgaaaaattatcactccatctatttacattatggattatggctccatgttcccccaactatggactcaaatatttttcatggccctttttcagtttcaacttcaacatccacgcaagtctgtgttctcccacccacatgcagctcttctttgcctactaatcctcgaaacccgcatatgatgatcctgcgcaataaaaaaactctccatggtaagtgttactccacgacagaagacaaactgacgcaccccactcgttgccgtgtcactagacaatcagctctggctggcacaccttttccatcttccaagcaaaccaaccctggacgccctattcctcttctctctactgttgctgcctctctcacagctcctgaccagaaaaaagttgccaagttaaaagcacagcttgcaaaagcaaaaactaggtcactttcccttcatttttacttctctcaccatattctgtctttcgtactaatccattttgcattgttttagtgagtacatgattctcggacaaccagttcgtccgtcctttttcactgagattttacaacctcaacaatggctttctactccggtttgtttctccctatacttctttccccccatctcattcttgcttttacagaaaacagctaactcttcccaaatctatgtactgcagcatattgatgtactcttagctttcatttggggaaaacatgagacctttttccggcagcagcggataacaattcttgattcccttttcacctctataattgccagcagctatgccaccttcaacagatgtgctaatcctttggactttgtctggcaccggctgcttattttgtctataacaggttccctaccaggtaggcaacccccacagtgttggcttgaagatgtcgacacagtttacattccaatgaattggggcagaaagcattgggttactctttctctggatcttcgggttgggcacatttccatacttgacccatttcctgactgcaattcagctcgtaaagttctttcttacatgtctcctgttgcgaagactttgcctgacttggtgcgttctgtttttggtaaaagcccatcccagtggccagaatctggtttcacctttgcgagacttgaggggttagcacagaataaacgtggaggcgactgtggtgccatctgtgtcaagttcctggagctgcattcccatgcactacaagaccaactcattgctcttactgatgcagaagttaataatctccgttgtaactacgcgcttgccctatacgaagagtttgttggaaagctttagtctgaatctcattcgtcatgttatctacccatcaaactcaaacttgttttttcatttaacactttacatgaatttataacttactcatgcattgttcatactgcaacattccacacttgttgtcattttaattcccattttaaaaataagtctacatttgtaaactctcttactttttattgaagccatttgagatttactcaactatcttctctctttcaaatacaggaatagataactgcctttatgccccataattgtctccaaccaacttctcttgtttcaccctatataaatcccttctgtcaccaatatacttacaaaaaaaaaacatcatggaaagccttgatttaaacattgctctcgatattgcatctcgtgttggtagtgattcctttgctgatctagctggtatgcttgcaaccttgaggtattatcactttatttcatgccatccagatgtcctcaagagcgtttctctgctacctttccatcaaaatgctgctcgtattaatctcacctctgtctaccggccattcttttcccgttgcttagaagctggcaaccctaccgctatataccttgagagccttcgcctagctaccaccgaaggccggattgacgaaggttttcatatgttacgtctcttccaatggacagacgcctccatttgccccccagaactgttcttcactttgtcactatttcagatcatcatagatcattacgatgatgccatcgcaacctcagatttctttgttgacttagttagctcttatgctgctgccgatgtccttgcaacctctgtcttccgtaatattctacagattggtcctcttaaaatccgttctcactccaacacatggcagtttgatgagttcccggattgtattgctaatggatgtgcaattgatactcgctgtaggacttgttttctctattggtattctgttatgtaccttatactttgctaagcccttgtaatatcgtcttctgtttccgagtaaccttctactcacctatcatttcattctgttcactttagaatgtgtttttctttatgttcttttcttctattacgaatccactaaagttctatttcttttaacaaaccataatgtcttcgcactaaagttctctttctttgaacaaacaataatgggttctccgtaaatcttatttaaatggaacatgtgtacaccctttttagtctgcacttggcaacacctacggacttacaccaagttgccaaattcccatttatggccacaactaccttccctttacttcaagtttacgccacgcctcactgtcacacctcccacatttatttacctcttctttacttaccttttactgtggcaccaactccatttattcacctcactaactcttctccactttcacactctaatactcctaatacgtagatactatatataggttgtgtatcttttgtaatgccctcacctctacaacactctactcatattctgcaaacgaacatggcatacatcccaaaaccaatcctcactgacattgtccgtcgtgttggtcgctctggctttcgctaccttggacctttcatagccgctggtagctttcggcagtccattgttttcagtagtgaagttctgtctgaagtcaatcttgacgactttgttttcaatagccgtcttgctaatcttcagtctcaatatcgccccttcctccttcagtgtttgagcaaagacaaccacacagcacagtatgttgaaggccttcgtcgccttgcacaagaacccccatcccaggactcacttgatatgcttggtactacagggccacacctcctatatgcacgctttgcctttgcgatcttcctgctgtgttgcggttcagtagaccaaggtttcactgttttagaaacctttttacagaaagctggaagctttgacatcgttgaagctcagattcgcaacatgggaaccagagaagttcgcccctacgcaaggtacatgcatttcaataggatcccctactgctgccttgatcactttactgagatcgacgtttgtagccattgctttggcttcacctacgcatgtaacatcgaaaaactttgttgaatgtgttttgctttatttcgctttgtctttgtttcttctttttgtcactagtacttgttgttgttttttagcaatccttttgttgtactctgttctctctagtacttttttgttttgtagcaaacctttcgttgtcagtagtactttgttcaatcttttttgctttgtatgttgtatcatcttttcagtaacctgaacccaatgtatgaaaccgtcttcctgttttaaatggcactttctttccgtgtaacctaagaagccatatttacaagcaagccagttcattaataatgtaacatttaactttagttccttacatccaacatacaaaatgaaagtgaaacataaattatcaaggtttgatggttaatctgatacaaacagagtgatataatagatgaaccgagtgaagtacaactaatacaagcctgcttcttttatcatctattccactgcttccagcctcttatgacaaacaagagttgctggatcccatcgccattctaccgtttcctccgaaagagatcatagtattccatttataacaaggaacaaaaactgtcttcactatgacctaatgctgccaatggatccaaaagaaaaaattatacgcccatcagcttcctagattatcattgtgaagtgcttactccgagatttgcctattcttcacccaaatcataccgtctgctaatatattgatgcatacaaacaccaaaatggctgcaacacatactttcgcttgcttactatgcccaaaaaacagattccacaccttactatatagaaaacaacattggctgttaaaaatgtcaacgctaatatacatattccaatgcagacaataagctattatttcaagttaatttgcataccttttcatccaacagagtcgcaaatggccctgttatgaccactttgagaacacaatgagcacttgtttcggccaagcctctgtcttttagaaccctgagatgaacaaaaactttcttcgcatgaccaatcttattgtttatatgcaaactgtatgtaaataagcagatatgacataacattaccccaaatctcttgcctgatgaagggattcttcttttcctgcggcgcccaggaccaactctcacagaaggtggcacaaactgagtatcttcaacaacagcaggaatatcttcatcagcctggtttggcacagggtaaataaattgctcatactgttttccaaacagctctaccatataaggctcgccaacaagcgttggaatatgcacattgtt

SEQ ID NO: 171695 - DNA, 928 bp, Arabidopsis thaliana landsberg; identical to SEQ ID NO: 16137
  unsure (1)..(928): unsure at all n locations

SEQ ID NO: 171696 - DNA, 482 bp, Arabidopsis thaliana landsberg
gtgggcatggcgggtacgcggcggatcacggtggcactgttcctcgtctggggtgcgagccgttccgccctgctgctgtgcctgctgaaggtgtgggtgttcccgggcccggacgtcaccggcgatgtgtcggtgatctaccggggctggtacgacgtgctgctgaccggcggcttcccgagcggcgacgtctcctggcagtacccgcccggggccgccctcgcggtcctctcccccgcgctgctgccgttcctgtcgtacgcgcacgccttcttcgccctcgcgctcctggccgacctggcggtgctggccctgctcctgtacgccggggcgcgggacggcggcggggcgcgcgggccgtggctgtggacgctggggctcgcgctgctgggtccgacggtgtacgcccgctacgacgtgatggtgacggcggtggcggtggccgcgctggtcgcgggcgcccggcatccgcgcgcgctggg

SEQ ID NO: 171697 - DNA, 340 bp, Arabidopsis thaliana landsberg
atggacctctaccgggagcgggcgagcaatatccgccggacctggctcctcatgctcggcttccttgccgtcgtgacggccatcggctacgcggtggcgtggtactaccaggacacatccctcctctggatagcggtcgccatcgccgtcgcgacgaacttctacagctactggttcagcgaccgccaggtgctctcgatggcgaacgcgcgccccgcgacgcgcgagcggcatttcgacttctataccgtcaccgagaacctcgacatcacggccggcgtaccgatgcccaagctctacgtcatcgaggacgcgtcgccgaacgcgttcgcgacgggcc

SEQ ID NO: 171698 - DNA, 578 bp, Arabidopsis thaliana landsberg
tctctctctctctctccttgtatgttcttagttggaagtgagctcttgtgcaatggaatcattgtataatattgatctcatctctgagaaaatacctgtgatcttggatgactcggaaacatggcacataatgctatcgacgagtatgaaattgaaagaacgtgggagtgcgcatgtatatggggcaaacaggcatgagctaaatgactctagcgactttacaaatcttttgctcattaaccgaaccgcaagcccccttgcatggtaagcattgctgaggaaattgtgtttccaatagattgggaagttgctgctccttgagcattattttcttatcttgtttgtgttaggcatcatcattatcagatcatatatctatcttcattgtaggtttgttgaatgcaaggatcgaggtaatcgtagcgacgtcatgcttccttattcatttctccagactatggcagcatcaagattgagagatgctgcagaaaggtgaaggagttgcacataatacgccccaggaaagagtgccagatggtaatgaactgaagacgccttatagcttatttatgaccagt

SEQ ID NO: 171699 - DNA, 666 bp, Arabidopsis thaliana landsberg; identical to SEQ ID NO: 55707

SEQ ID NO: 171700 - DNA, 1260 bp, Arabidopsis thaliana landsberg; identical to SEQ ID NO: 35082

SEQ ID NO: 171701 - DNA, 1453 bp, Arabidopsis thaliana landsberg
  unsure (1)..(1453): unsure at all n locations
atgcctcaccggactacttacttctttccgcggcagtttcccgatcgtggattcgattcgttttcgcttaagaatgatcacgacaagaagaaatcgtcgtctaacgttggagagagttttggatttcaaagagataataaatctaatggagtcggagaagattctaacaaggagaaggagagtactgtgttctcctctaatcctctgctttctaaaagctcagccgtttcagatctctttagcgatgatcgcaagtcggagaagaagcatcagcagcaactagccgctttctatgagtggttggcggagaagaaggctaatctctctaggtcatcatctactactactactcatggacgcggggtgaagcccacgcgcttctctatgtctagcgacgccgatgaggagagagagcttctgttgtcttctccggctgatcccgctccgcttcctgctacttcttcgccggattctatcattgattcggctaggacggttaacatacatgaacgaaacattgatcggagctttgacagagaggtttcgcttccccgaatgtcgagtgagagcagcttcgcnnnnnnnnnnnnnnnnnnnnnnnnnnnnnnnnnnnnnnnnnnnnnnnnnnnnnnnnnnnnagacgcaagggaaacttcgaccaccacgcttgtctcagtgaacaaagaggaagaagaagttgaggttagggaacagggcaaagagcaaagcttagcgcagaagtcaagagaaggctattacttgcaggtcacgcttgctaagtggctaagttctcaagcaaacctagcatgtgagtctgttcatatacagagcacagaatctatctcctaccgtttttgggtatgtagtcgtacgtatgtctcttttaacttttgtctcaaatctaggtcggaattgtgatttttattctgtttttttttttctttcaggtaagtggttgtttatcatacagtgacaagatatcagatggattttacagtatattaggaatggatccgtatctttggttgatgtgtaacaattctgaggatggcaaacgaattccatctcttttgttactcaaggagactgagccgaatgatacatcaatggaagtggttttgatagatagacgtgaggactcacgtcttaaagaactggaggataaggcacatgagctgtattgttcttcagacaacatgttagtgctcgtcgagaaacttggcagacttgttgcggtctatatggggtacgtacacttcttgttcttgtttccacaagtattcttcatagttgtgcatatatatataagatgtgtatgctgaggttatggagcttttagggggaatttccaggtggagcaaggtgatctccagaatcgatggnngctggacagcaataaactcaaggaatttcggaaatgtatcattcttccagaggtagtctacaatggcct

SEQ ID NO: 171702 - DNA, 1738 bp, Arabidopsis thaliana landsberg
ggcaatttgagttatataagatgttatgggtcaagtggttaatattggtgagcttgagactctcgaggctaacaacaaacctatcacaaagcttgacttcgaattaagggacgacacgtaagtctatgtacctagttttttttgtttagagcaaaagaatgcaactattgtttcaatctctctaatatattgtttggtttagtgatgagagaatgtcccgtactttgtggggagcatttgctcagagtatttttaatgcatgtgaatctgctgatggtctttgcaaagattaagtcttacaaaggtacatgtctgttatcaactttattgacattactcaccaattctaacaattattacctgaaataaatgttatattttccgtgtatgtaggagttaggagtttgtctaactcctatgatgcatctcaagtccacatcaacccggatttccctgaagttcaagcttttgtttctcggtctgttttctttgatcatttgtttatttgctaatggtttttaactcacattccgtttatatgatgttattgaacagtttacatgctgatggtctttctctcacttttcgtgagagtgttccaaagtctcaaatggttactgtgaaacaggatgatgactgtaagcaatatgagagaaagtcaatctgtgatctgcttcattctatggaggtttgagttcttaatatacatgtactataaatttgaagttatcatatacttatttatataaatttgtaatttcagattggaaaggttagggttgtctgcaccatctatgctcttgacttggattggtcatggtattactttagttgtcgtaattgcaacaagaaagtgattcacattcatgctggtgttaacacaacttcactgaagtcataaaaaccaaggttttggtgtgatgtctgcaagaatgatgtcactaatgtgcaagccaagtaattatacctcatagttcatgtcctttactaactcagctagccaatgcacacataaattgaatgtgagtaattttaggtacatgctttatgtgaaagtcatggatggcactggtgaaactaaatgcctcttgtttgataccatctatgctgacatggttggtgaatcatgtacatccatgttaggtggctcttttaatgaggtatttatactatcaaaatagtttgattatagtgtttggctgaatctaacatgttacaagagtataactaacaatatatggtctcactatttagactgaggatccaaatgatgtccctaacggtttaagaaatttggttgggaagactttcctatttctggtctctgttgagaaagaaaacatatgggatagtaaggattcttttaaggtcacaaggctattgtttaacgatggtctatgtggtgatgaggtcctggaagactcagaatactctgtcaaccctgcatccattatttctagggaccaggtatgattctacacatgttatccttacaaagtcaggtgtaaatgaaacttgatcaatgaaacttttctaaactatattttcgtgttaccagtgtcttatgtaaactttgagttaggagacttcagactcagtgactccattatctaagcgtgtttatgctacaaagttgtcagactcagaacaatcatccagttccaaaaagttttgtgatcacccgttcgatttgaagaaatctgaacctgagtttaatgatgaactcgctactaaggag

SEQ ID NO: 171703 - DNA, 548 bp, Arabidopsis thaliana landsberg
  unsure (1)..(548): unsure at all n locations
gatgttctgtgactcgaagaacgatccacatgcggnagaacngaatgcgcatgtgtgtccgatctgcatgggtcatcctggaacgctgccggtgatcaatgaagaggctgtacatcatgtcctcaaggtaggactcgccttgggaggtaccctcgcttcatatactgaattcgatcgaaagaattatttctatccggatattccaaagggatatcagatcagccagtacctttaccccttagtgagcggaggttctttgaatggtgtcgcggtcacccgtgtacatcttgaagaggatactgcccgatcgcttcatgatcagggtgagggaagtatcgtggattacaaccgggcaggggtccctctcatggagctcgtcaccgaaccggtcatgcatgatgcaaagactgctggcgactttgcccgggagctgcaactccttctccggaccctcgaggtgtcggacgccaatatggagaagggagagatgcgggtcgaagagaaaatatctgtaagtagtactgatgcctttggaaccaaggtggggg

SEQ ID NO: 171704 - DNA, 2395 bp, Arabidopsis thaliana landsberg
cacattcattgtgggacttgggttgtgtgctttttcccaagcatctcttctcagcccagaaagtttgtgacaagcttctttccatcattctacaactcattagggatcaaaggtaaatttctgttacattagggtggataaatataaagttttgtatacaataggtgttgatagatttggatttactgataactcttttgctgtttcattgttaccaccagatcattcatgtctgttgacatgactcagctaaagaataccaccagaccagtcatgtctgttcacatgactcagctaaacaatcttaggggtttgttttatggacagtctctctacaagtcgcccttcttcaagaaaccctatatcgactgcgctgatgagttttactcagcagaagcaatgcagttcaaggagcagtcagacattccactgtatttgaaacgtgtcgagtatatgtggcgtgaggagaagaaaaattgcagacacggactctacttctttaaagagtttgaggaatcgttgatggaagctgttgagagaatacttctcaaggatcatgtttctgtcattcttgaaaaggtagctctcttttccctttgatatctttgatttcttgtgaacaatagctttctaagcacttgtgtgtttgtagggttttgtcaagtttatggatgagagaagccatgatgaccttagtaggatgtactatatgttctctgaggctgacttacttgggcatttgaacgacgctttgaactcttacatccggcaaaccgggcagaagatcttaaaggaagactcattatctttggaggagttgaagaactctgttgacaagatttgccttacttgtttctcagaagatgcttcgttggagaagacagccaaacaatgttttaaggatcttggtttggcttgggaggaaacaaaaacagagtctcttgaccttgacaatgattggaaagattccacaatttggctagggtgattatattattatgtctgaccttttgttatgattgttataaaagacttcatcgtgtactcgtcatggaagttgtggttgctataaaacaaataaaattgcggagattctgaggcgatgtgtgtttatatgttgacgcagcgaaaaaaatgcaagaagtagtagatgatttatagactagcattacctatttgcatgtaacatcttgtatggttatagatttgaacatggttcaattcatatgaaacagttagtcttaagattgtggtccctgtgttgagccttgttctttggaaggaagctttgtagccatggtccgtagttcgttcacgatctcagtgaagcttggcctctctgatggttctgcagaccaacatctctccatcagcaatttccagtccatgtcacaaaagtcgggaatctgcggccgtagcgtattactaactataccacctgatttcaatttttggttagaatagaaaataaagcatacaagcccgcacacaagaattatggatcaagggtttcacctatgatcgctccatagtgcaagtcggcgtaaggttcttcaccggtgaaaagttccctgtagcatccagaattccagataaaggtatcagatagaggggataataacataatagagacaaataaccaagctgattatgatttttatactaatcaccatctttacagaatttctcaaattccatctttgattctctttttacctatattcaactttataaattagaaaaatattacagcataacagatggattttaaaattgaattatttattcataaacaacttaaaaatgttcataacaaagctatatcgttttttaatttcttgagttccccaacttcttttggtgtgttagtttagtaaactacgtaaataccatttttactttattctatgtttttactgtgattataaatgttatacatattgtttaaatctatatatatacatataaaaagtacgacaaaacaaagtacattatatataacatatttatttaaataaatttttgaggtctgaacatattaacttaaactagattttaacccgcgggacgatttattttttcaaagtaatatatattaaaacttgaaaattttatttttataaaatatttatattttacagtttataattgttattaagtatttatatatattattttttattaaaaataataaatcaaagatttaacctgtattgaaacggtggattaattatattttactttttattaatgttgattcaaaaacccgtccctccaaatccgtcttgccaaaaagccatttattttattaatattgattttatttatgatataagtctgaattataatctaaacattttagctaataacataggagtgcaccatataaataaag

SEQ ID NO: 171705 - DNA, 434 bp, Arabidopsis thaliana landsberg
catttgtcaggctagatactttgtcgatgaagtgagggataagagtgaagtagaccttgatgtaagtcgatggagacaagaatttgtccaggaccttccaatgcagagaaatgggtactgtcttcctaataaagatgtcagctactactagttcatacattcataataactttgtctccgatttttgtagattcgattgtggaatgtttatggtgaaatacatcgacttctatagcagaggtctggatctttgtttcactcaggtaaaatagcagaaagatactaaacctgccattgtctttagtaggtgagtgtcattttgaaagacgtaagactgcttataattgaaactgtttgtatgatttccacaggaacaaatgccatatttccgggctaggacagcaaaggagattctgcaactgaaagccgagtga

SEQ ID NO: 171706 - DNA, 842 bp, Arabidopsis thaliana landsberg
actgaagcacccttatgatgtagggattcgcgaggcatatggtggagtgcacaagcaagctagtggtgaggttgaggaaggaagttggggaaggagcaaatgaggtggagataggagaggagatgcataaactcgcggctgatattatatcgaggacaaagttcggaagcagctttgagaaaggcaaagagcttttcaaccacctcactgtcctccagcgccgttgcgctcaagccacccgccacctctgctttcccggcagccggttggttttcttcctcaccctaaaaatcgtaattaatctctatattttcagtaatggtggcagcagacagaccgcggctgccaccatacaaattcttaaacattaagttatacataacaaaatttagtttttctatttatttgttgtgatcctcggtgaagctttaaaacgtatattgttttaggattaaactttaactgtggtctaacattgacttaataacaaatcttttgtatatgtaggtttcttccaagcaaatacaacagagagatcaagtctctgaaaaaagaagttgagcgtttgttgattgagatcatacaaagcaggcgagactgcgctgaaatgggtaggagtagcactcacggtgacgaccttctcgggcttctcttgaacgaaatggatattgacaagaacaataacaataacaacaacaatcttcagttgataatggatgaatgcaagacattcttctttgctggccatgaaaccacggctttgctcctcacatggacaacgatgctcctcgccgataatcccacatggcaggaaaaagtccgtgaggaggtcagggaggtct

SEQ ID NO: 171707 - DNA, 1280 bp, Arabidopsis thaliana landsberg
caccgcgtctgtctttacttggcttctcaagtacttacacgaccaccccaatctcctccaagaagtctccgtaagcaactttctctatgttttttttttcaagtttatcttctgcatgcatgtgccgcacatgatgtgcgtataatgcgaggatcatttagaaagaaatatgttaaatcttatatagtaaatattttatcgaagcaaaggccaaagggtgtgagaaaattgttatctcttggtccattacagaattcacagtacatattttatgaaactcgattttatatatgattacattacttatttcaatcaaatgcaaatcatgtattatttatctatggttttgttactgcatattcccccaatattaatgaaactttttggggttctagccaagaagccatttcatttttcttatgttaatttttctttttctattttactagagggagcaattcagcattcgacagaaaataaaaaaagaaaaccgaagaatctcatgggaagatacaagaaaaatgccactgaccactagggtatacaccatttcaatatattgataaaacaaatttgtaatgatgatgtcatattacttgatcgtacaatcaattaatggttactatacgtactttaatttggtaggtgatacaagagacactaagagcagcaagtgtactgtcctttacatttagagaagcagtacaagacgtcgaatatgatggctacttgatcccaaagggttggaaggttcttcctcttttccggcgaatccatcactcctccgaattcttccccgatcctgaaaaattcgatccttctagattcgaggtatatctaaacatataatcaaatttatcgatgcttagattatgtatatgggtagataatgtatatgggtatggttgacctactacaagttaatgttggtgaaagataggagaatacatgaatattataaaagtaaaacattgatggaactcaaatccaaatctaggtttaagtcaactatgtggggactttgatggacttacactgcatgtagatgacatcttgtaatgtcgacaggtggcaccaaaaccttacacgtacatgccatttggaaatggagtgcactcatgtccaggaagtgagctggctaaacttgagatgcttatcctccttcaccacctcactacttccttcaggtattttaattgttttctattaagaaaacctggatttgtttttttaatttggcttcaatgtctaaccttattttaattttaattaacacaatt

SEQ ID NO: 171708 - DNA, 908 bp, Arabidopsis thaliana landsberg
gaaaatgcgatatgacatttaggtaatgaaaatggatcagcataatgatttgtgaatcactattggcagaaaaccagaaatttttacattacagctctcatcataccaaagcaggaatcgacatctgactcggtaagctcagtcttttttcgttatatcaacccagtttcctcgtatacattcacttactcctggctcgctcttttttagtgtcaggccacgaacgaagaagagatatttgaagtacaggacaagcaatcccttttcccactcggatggattcatgtgagtaatatatgattttatttcactagcttttattgctttatgcttgaatatcagttctttggtaatacggtatcattcttttcatttatttctgtactgactcgttaatcactgtcttcatttcaacagacgcatccgacacagtcttgtttcatgtcatccattgatgttcacacacactattcataccaggtacggacaacatctttctatctactttcaaaaattagtatataatgcatatagaacgatatcaaccgatggagttacaatgttttcagattatgttaccagaagctgtggcaatcgttatggcgccacaagactcttcaaggtactaaactagcaaaagaccagaagtatcagaaatgaaattattcgagaaagtataatgcctaagaagattcttttcgttgatgtaggaatcacggaatatttcggctgacgacgccgggaggaatgacggtgataaggaattgtgaccggcgtgggtttcatgcgcacagttcaccggaggacggaggaccaatttacaatacctgtaaggaagtttacatgaacccaaatctcaagtttgatgtcattgatctcagatagcatcacttgcgcgtttgaaagtg

SEQ ID NO: 171709 - DNA, 1068 bp, Arabidopsis thaliana landsberg
tatatctgtgatgaggcacttgtgtgacgtcgctagatgctatagatgcgatcccaagcccaagataatcaagccggccaaacccctcgtgctacaaggtgagttccaatggcaccttgcatctaccatcctttaaggtagagcagaaaacagtgttatttatgttttttcttgttattgcaggggttcttttaggtttaatgggactattgttcttagttgttgggacgcttgggttgattatatttataaaaaagagaaggaggatcatcagtagcaggaagttcttcaaacgtaatggaggcttgttgttaaaacaacaactaactactacaaatgacggtaatgtagacatgtcaaggctatttagctcagaagagttgaagaaagccaccgataactttagcgtgaagagggtgcttgggaaaggcagtcaaggaactgtgtataaggggatgatggtggatggcaagatcattgcggttaaaagatcaaaagttgtcgatgaagataagctcgaaaagttcatcaatgagatcatccttctttcacagattaaccataggaatattgtgaaactaataggatgttgcttggaaacagaggttccgatcttggtttacgaatatattcccaatggagatatgttcaagcggcttcatgatgaatattatgattacatgatgccttggaaagtgcaacttcgcatagccgtagagattgcaggagctctttcgtacatgcactcagctgcatcttttccgatattccatagaaatatcgtaactaccaatatactgttggatgagagatacagagcaaaaatatctgatttcggaacttcaagatcggtagcgtctgatcagactcacttaacaacattagtggcaggaacttttgggtacatggatccagagtgcttcctgtcgagcctatacactcacaaaagctatgtatatagtttcggtgttgtgttggtggagctcataacggtagaagaaccaatgtcacgtgtccggtgtgaagaaggcataggtttggcagcatatttcctcgaggcaatgatag

SEQ ID NO: 171710 - DNA, 484 bp, Arabidopsis thaliana landsberg
cgtcgcgcctgacagtgcgcccgagactgccgacgtgaagtccctgacctatctcaccggcgtcgtccacgagacgctgcggctctacccgcccgcggtgatctcggcacgcaaggtcgcccgcgacctgtcgtttggcggacgacgcatccgggccggacgcaccttggtgttcagcccatacgtcacccaccggctgccgcagctgtgggccgacccgctgcgcttcgacccgtgccgctgggaccccgccaccccggggtaccgccggccggccccgtatgagttcctgccgttcggtggcggcacgcatcgctgcatcgggtcgagtttcgccaccgccgagctgacggtgatgttggcccggctgctggcccgaaccgagctgagccttcctgaccagcacatacgcgccggtggctacgcggcgctgcagccccggggcggcctgatcgtgcaggtcagcgccgctcgttaaacccgc

SEQ ID NO: 171711 - DNA, 188 bp, Arabidopsis thaliana landsberg
atggcccaaacttgttcgattctctacatgctgcttctctcgtctctgtttgccgccggaatagccacaatcaccgagggggaactgctttcctcgatgatcggagtccaaggtctcatctactgcaaacgaggatctaagcttacacctatccaaggtaaatctcatcatgtttatattgtaaacta

SEQ ID NO: 171712 - DNA, 1744 bp, Arabidopsis thaliana landsberg
cttttgctaatgcatagacggagttcttggaatacaagggatcagatcaccgaccaattcttgaacatattaatgattcagcggcctcaagtactataactgttccgtttcgataaacaaatcctaaatataccaatctttaagcaaactgttcacacaagctggaaatccacaaccactccccatcacatgccgataacagaacgcatcgctagttgtagaagggcaatggcacggctaaaacacatgtctaacatgaactctgatgagcgaataaaaacactccaaggtagattgaacagagctatggcaagtactttagagcataacggaggtttattccacatatccaataagcattgtcaaaggcttatagtgatgaggagagatactggaaacagaaaagttgcaaccaatggatgagagagggagatcgaaacacgggcttctttcatgcgtgtgcaaaaacaagatattcacaaaacataatgagttcaataagggatgaccacgaacatatgtttacggctgataaagagattggagaacatgcacaagattttttcactaacatattcatctctaatggtattcaagtttctccactgaactttgcggatttcaacaaaacagtcacacaaacggctaatctagaactcacgaaagattttactgataatgaaatctatgaggctatttgccaaatcggagatgacaaagccccgggtccagatggattgactgcaaggttttacaaacaatgttgggatattgttggagttgaagtggttaaagaggtcaaaaatttatttgcgacatcaaacatgaggtctaatataaatcatacaaatatttgtatgatccctaaaatcaataatcctctaacgttgtctggctataggcccattgctctgtgtaatgttcagtataaaatcatctcgaagtgcttagttaatcgtttaaaagttcacttgaactcgatagtttcggactctcaggctgcgttcattccggggagaatcatcaacgacaatgtaatgatagcagatgaagttatgcattcacttaaagttcgaaagcgagtttcgaaaacttatatggcggtgaaaacggatgtcagtaaagcatacgacagagtagaatcggatttcctggaaacaacaatgcgtctttttggtttctgtgataaatggataagctggatcatggtggccgtaaaatcagttcactactcagtattgatcaatggatcaccacatggatatataaagccaacaagaggcatacgtcaaggtgatcctttatcaccatatctttttattctctgtggggatatcctaagtcatctcatcaaaaaaaaagcaacaagcggggaactacagggagtttgtattggtaatggagtaccggccatcactcatctacaattcgcagatgactcattatttttctgccaagctaatgcgaagaattgccaggctttgaaggatgtttttgatgtctatgaatactattcaggacagaaaataaatgttcaaaaattaatgataacctttggatcacgggtgtatggttctacacgagcgcgattaaatgacattcttaacataccaaaccaaagaggcgggggaaaacacttaggcttacctgaacaatttggaagaaacaagaaagaaatgtttgaatacatcatagaaaaagtcaaaaagagaacatcttcatggagtgcaaggttcctctcgcc

SEQ ID NO: 171713 - DNA, 482 bp, Arabidopsis thaliana landsberg
  unsure (1)..(482): unsure at all n locations
tgttgatcgccgtcattggcgctcgattccgcgacgttcctcctgctgtcgcaagcgtcttgcaagtcgctttttntgcgacccctattatatgggagccctcctccttgggttcgcatcattgggtaatagtgctcaacccgttcttccatcttgttgaatgtgtgcgcgagcccctgctgaacggcactattccgctcctctccttcgccattgcattctgtctgacgatgtttaccggcgctctagccctcatcgcctgtatgaaggccgagaccaggctgattttctggatatgaccctgctcaccacgccaggcgtgcgactcgacaacgtatgcctcgacatcccgatcttagacagcagcagtcgttcgctgaagcggaaccttctgcgaggcatggtcggatctcgcatcgacgaggccaatggccgccggatcgtaagatctctcgatggcatcaacttggacataaagaagg

SEQ ID NO: 171714 - DNA, 1388 bp, Arabidopsis thaliana landsberg
cattgaaatgttgaaaaatgaggatgaggtatgggtgtcagatgcggctgagcttgagcagttggcaatacagtattataagcgacattactcgctagacgacgtggagctggtggttgataagctccctcaggaaggatttccgcgtcttaagtatgaagagtgccgggagcttaacagacagttcattgcggtagaggtggttggtgctgtgaagtctatggaaaagttcaaggctccggggcctgatgggtttcagccagtgttctaccaggattgttgggaggtagtgggcgaatcggaactgaagtttgtgctggatttttttaatacaggagttttgccgcgggatacaaataatgctttgctagtcttgatagcgaaagttgcgaaaccggaaaagattacacagtttaggccaattagcctttgtaatgtgttatttaagatcattacgaagactatggttgggcggctgaagggtgtaattgataagttagttgggcctcatcaagcaagttttatcccgggaaggttaagtgtggataatattgttgttgtacaggaggcagttcattcaatgcgtcgtaagaaaggggtgaaaggatggatgctcttgaaactggacatggaaaaagcatacgataggatacgttgggatttcttggaggacacgttggttgttgcggggttctcggaacagtgggtctcttggattatgcagtgtgtatcgggtccgtcgatgaatcttctatggaatgggggtaaaacagaagctttcaaacctttgagagggctaaggcaaggtgatccgctgtctccttatttatttgtgttgtgtatggagagactatgtcatatgataaaccggtcgattctggataagaaatggaagccgataagcatttgccgcgggggcccaaagtttcgcacatttgctttgccgatgacctgatcctctttgcggaagcctctgtctcgcaaattcgtatcattcggagagtgttggaaactttttgtagagcgtcggggcaaaaagttaatttggagaagtccaaaatttatttttccagcaatgtgtcacgagatcttgagaagcttataggcgacgagagtggtatcaagtcaactcgggatttggggaaatatttgggtgttcctgtccttcagaagcggatcaacaaggacacttttgcggagtctcttgagcgaatgtcgtcaaggttatcggggtggaaaagggcactttttgagccttgcaggccgtgcgactttaacaagagctgtcttgacatctataccggtacacactatgagtacgatttgtttgcctaaatcgattctagccaagttcgataaagtatcacaaatcgctttctctggggaag

SEQ ID NO: 171715 - DNA, 1565 bp, Arabidopsis thaliana landsberg
gtcgcttcagtactcagtgaaggatcctctgtttccagacgacccttttagacaatttaagaaccaaaatgcatcaagatcatttgtgttaggcctcagatacttcctaccgattttggaatgggcaccacgctacaatctcaagttcgtcaaatcagatctcatcgccggaatcaccatcgctagtctcgccatccctcagggcatcagttacgccaaacttgctaacttgcccccaattcttggcctttgtaagcgctacacatcttttattttaagtagcttccttaacaattaacgggttttttgtgtgtgtatatacactattttttgaagtagcgtttgtacttattgtaactgtttttttgcgtttagattcgagttttgtaccgccattggtatacgcggtgctagggagttcaagggacttagcggtgggaacggttgcggttgcgtctctgttgacaggtgcgatgctgagcaaagaagttgatgctgagaaagatcctaagctttaccttcaccttgctttcaccgccacttttttcgccggcgttctcgaagcctctcttggaattttcaggttcttttttactttatttctccttaattatttttgtccttttaatatggttttacttatgataaaagtgtgagtaatatattcggtccaatgcatgtgggaaaagattccggcataaaaaatatcaaccaaatagtaactttttccttaccttgattcttaagatctaaaaattcataagcactatgtactatgtactatatgagagtgaaatgcgtcatcgcgagttacgtcacgtgaaacaagatacaagagctgagacaacaaaccaatagggacaaagctagataactattagaaaatcacaccgtggtatgctcggtttaatacatatatactacatgtaacagtggagaatcatactagaataatgtaattactttactggtaagttgggtataatttaatacatatctggccaagtttattttgattccccgtatcataatcatagtgtgattgattcaaaagcacaagagagatatatatagtatattataggtagaatcttttattttggttccacaaaatttcggtatatctagccagaactggattgaagcataaggtattaactaaggttggtgagtttgatgatgatgtgagtttaatagtgcaaactgataaattgattgtttagtagctttaaaaataaaattaagagaagaaagaaatgatgaaaagggaattgcaggttagggttcatagtggactttctatcgcatgcaacgatagtaggattcatgggaggagcagcgacggtggtgagtctgcaacagcttaagggtattttcggacttaaacatttcacagactctaccgatgttatctctgtcatgcgttccgttttctcccaaactcacgaggtgtctctcatttccgttatgttgctaatacatccaaaatatcattttcaatgtcgatgattgttctcctaattaatactatgaatattcatagcattattaaacagtaaacgtct

SEQ ID NO: 171716 - DNA, 1314 bp, Arabidopsis thaliana landsberg
ccattgatccgatgtgagtattggtttcataataggaagtttgtgttggaacttaggtctaattaaatctcttgcaggttttatttgtatgcgcagcaaacgtgacagataccattccgggtcctctgctagacagaatggaggtgatcactctctcagggtacattactgatgagaaaatgcatatcgctagagactatttggagaaaaccgcacgcagagattgtggcattaagcctgaacaggtctcactcacaactatatgctgttttctttattttattacggtttgaatgttataaaagattttgctcaagttgttaatttgtacctctttccaggttgatgtgagcgatgcagcttttctttccttgatagaacattactgcagagaagcaggagttagaaatctccagaagcagattgagaagatttttcgtaaggtaagtttgtttacaagtacactgaacattccaaacttcttacttggacccagaggatctgaattgattgattttcttacagattgctcttaaacttgttcgcaaagcggcatccaccgaagtgcctagaatttctgatgatgttactactgacactgaagaaactaaatctttggccaagactgatttggaatctccagagacctctgcagaaggatccactgtgttgacagatgagttggcaactggggatccaacagaatcaacgactgagcagagcggagaggtagctgaaacggttgaaaagtatatgattgatgaatcaaacctttcagattatgtaggcaagccagtattccaggaagagaagatatatgagcagacaccagtcggggttgtaatgggtctagcttggacatccatggggggctcaacattgtacatagagacaacctttgtagaagaaggagaaggcaaaggtggtcttcatataacgggtcggcttggggatgtgatgaaagaaagcgcagagatagctcacacagtcgcgagaagaataatgctggagaaagaacccgagaacaagttgtttgcgaattccaagcttcatctacatgtacctgcaggagccacaccaaaagacggcccaagcgcaggctgcaccatgataacttcattgctatcacttgccttgaagaagcctgtaaggaaggatcttgcaatgactgaaaaagtctctttgaccggtagaatccttgcgattggcggcgtaagtgaaaattcacaccccaataactctccctagccccttagttaccaaattcttgtaaaaagcagtgtaatacagaaaatatctattaatctcgctttg

SEQ ID NO: 171717 - DNA, 1518 bp, Arabidopsis thaliana landsberg
aataccttaccaacaacgtgtattgtctgcatccatcggagtttgtgattgttcacgatgggaagtttcatgatggcggggggtgcatcttcgctaacaggacttgaggtgtaaccgataaatgcaatgaaggttactggaagattaagcaccgtgagaagctgatcatgtcacggtacgggcagaccattggttggaagaaagtttttcagttttatgaaacggagaaagaaagacattttggtaatggagaagaagtgaaggtaacttggactctaaaagagtataggcttaccagaaaaatgaagaagaataaagtggtgtgcgttatcaagtataaggtaaagtgtttgccgaggataacgaaagatacagagaagaagaaagaagatgtacgtaggcgaaggggaagctgtgaaactaactggaatgctagggacttctactcttggtttcatgatcgatcatctcgaacatggtcatgattcatgagtctttgtgtttcattatcgatcattcctctgttcaatatggtttaaagactagtatgcttttttttcttttcttgtggtttgtggttgtgaggagaggctttttaatctgattacaagagacgagagcatcgtagttgttgtgttgatctgcgatgttgtgtgtgtgctcgtgtaagagatttaagagagaaataatgttttcttctatttttaagaatattcaaagaatggtataaaaaatgtgctaaaaaaacatataataatgttagagaagcacagaaccagcttcgcagacgaacctttctctatattgccactcagaagcatatatataacgcaataaatttacaataatctttaaaatcttattatcactcttctgaattttctcttctccaacagaatcaaacacctcagtaatatgtaaccaaaaagtccaaaaccaatgaaaaacgcaacacacaaagccacagattatccggttaaatttaacttctgtttccaagttattagatcatatagttgtcttaagtcaagcatttttgctattggagaagatttatctaaccgaaacttgtttgagtttgctatatgattaagtcaagtttctggtgagattcttgttttagtgataactggaccatagacatcgataacatgcaagtttctgttaacagttttaatattgacagtcttttcagttcgttttattttcagcaatcattcaagaaaccaacagaaattaaatatgaagacatgataacaagaaagaacaaaatgctaggccaacatagcgataaaactcacacaaagcctgtaaaatgagagaagttacacacttatccaaaatagttatagattcatcagaaccaatcctcactccagattaactaactaataaatcgtactcgtttcgcaggaacgacttggatctttgtcggatggttgttcatctcagggggagaagagttacagaggtcctgagatgtttgacgtagttgttatgggtttggcctttgcgtaa

SEQ ID NO: 171718 - DNA, 392 bp, Arabidopsis thaliana landsberg
atgggttgctacagcagtaagaacctaaaacaatcaaaaagaaccattcttgagaaaccattcgttgacatcggaaaggtatacatcctcggtgatgaattgggtcaaggccaattcggtataactcgaaaatgcgttgagaagacttcaggtaagacttacgcctgcaagaccattctcaagatgaatctaaagagtagagaagatgaagaagccgtgaagagagagattcgtatcatgaagcatttgtctggagaaccgaacattgtggagttcaagaaagcttacgaggacagagattctgtacatattgttatggaatattgtggtggtggagagttattaaaaagatcgaagctttgccaaagatggaaagtcttactccgagaaag

SEQ ID NO: 171719 - DNA, 424 bp, Arabidopsis thaliana landsberg
atgcttcggttagccgaacttcaaaggaagatcgatgaagcaactgaagaaatgtgccacatcgcgcaggacgatcaaggacgagggcctcaacacagagagttttgtcaagaaactccaatcaacgatgatggatggtatgatgatctgtaccatggtaattttgcttttgatgatgcttctcccctggcagcagagttgtaggctaccccatggccaccttcatacaagccaccacagctccccatgtatgatggacacttcgacccgaagcaattcctcatgagctacgaagcaaccatatcatcatatggtggcacactgctgtcatggcaaagtctcatcatggtagtcaggagtgtggttcagaattggtattctctcttcggccgggacaattcatcatggcagaagttgaggacgg

SEQ ID NO: 171720 - DNA, 733 bp, Arabidopsis thaliana landsberg
cttaccgtgaaaacatgttcacgaccgagtcgaaaaagcgcgattacgcgctgaaacccatgaactgcccgggtcacattgaagtgttcaaaatcagaccttcggtcttatcgcgatctgcccctgcgctacggtgaatttggcgcgtgtcatcgcaacgaaagctcaggcgctttgcacggcatcatgcgggtccgaggctttacccaagacgatggccacattttctgcactgaagaacaggtgaaggcagaggtgactcgcttcaaccaggacgccatgcgcgtgtacgccgattttggctttaccgacattgccgtgaagctggccctgcgccctgcggtgcgcctaggcaccgacgacgtttgggacaaggctgaggcttctttgcgtgacgctttgactgcatgtggcgtgcagtgggaagagttgccaggcgagggtgctttttatggccccaaaattgagtaccacatgaaagacagcattggccgttcatggcagtgcggcacaattcaggtggacttcatgttgcctggccgtttgggtgctgaatacgtcgccgaaaacaacgagcgcaaagtgcctgtgatgcttcacagggccattgttggttccatggagcgtttcatcggcattttgattgaaaaccacgccggcaacatgccactttggcttgcaccggttcaggtggtggttgcaaacatcaccgaggcccaatccgattacgcgg

SEQ ID NO: 171721 - DNA, 647 bp, Arabidopsis thaliana landsberg
catgcggtgggatatgtaaccgggagacaatattacggggcaaaagcaagtattaacgtgtggtcgccacgtgttacgagccaatacgaatttagtctttctcagatttgggttattgccggttcgttcacacacgatcttaataccattgaagccggttggcaaattagcccggagttgtacggcgatacttacccaagattctttacctattggacggtaaatgttaccttcaactttagtatccttagtttacggtaaagtttttagttttattgaattaacattttgttaacaatggtagtgatagtgattttcagtccgatgcatatcgaacaacgggttgctacaatttgctatgttccggtttcgttcaaaccaaccgtcgaatcgcgataggagctgcgatttctcctagatcttcgtataaaggtggacaattcgatataagcttattaatttggaaggtaatttttcttcttctctcatatacatatttatgcatatcatcaatgaaaaaatactaacaatattttacaacatactatacctataataattcagctgtattctgcaaaaaattaccagtcacatttctaattaattataatcttttaagaagatttcacatgggtcacatcaatgtt

SEQ ID NO: 171722 - DNA, 1556 bp, Arabidopsis thaliana landsberg
tatgcaagcagtggagctaataagattccactagctgtgggagtaaagaagaccatcggatttccgagagcatacaacacataccttaactctcttggagcatacgttacttggattgttccaactaaattgaaagcaaaaggtggaaaagtaggcaaggagtggaacgatggagccgaccataaaggtattacaaaaatatatgtacgaggtggttatgagggtttacagtacgtcaaattcgattatatcaaggatgggcaacaaatatatgggtcaccccatggtgttaggggtagaggttttacagagctggtatgtgtgacttaaaatttgattcaacaggcttattattagctgttaatccagttattgtttcattaactctacttctttttttcttttttttttttttgcagtttgagattaaccatctcgacaaggaatatttgatttctgttgaaggctactatgacgaaggggaatccggggtcattcaaggaattcaattcaaaactaatatcaggacttctgaattgatgggagacaacagaggtaggaaattttcccttgcagccaatggaaagaagattatcgggtttcatggatatgctgagaagaatctaaactctcttggagcatatttcacaactctttctcctcctaaattggaatgcaaaggtcctagtggtggtgatacaggtagccattgagatgatggtgctttcgaccgcgtgaaaaaggtgtccggttctttttttttgaaagaatgtaaaattttattcaatcaaaatcctttgtacaatgaatgcaaccgtgtgttgagtgttttaaaagaaaaacagaggatacaaaagctgaaattgcaaaagcagaaggtacaaaaacagaggagactttagagaagttgcagagatgagcgtggccgtgtggagaaccataactgcaggcatgtgttgtagctatggtttccggtgtctcgtattgaactgattctattgcggacagtcttatcaatgagcttgatgagcctgtttgatggtaagctgagttccccatgacgtcttgcatttctctctcaccaaatatgggagatggaagcttgaaagacataccggaacaggaagagcagattctttggcaattagatgattccagtcactcgagtagtcagtggagaggaggcgttgagccaaattttcccaaacctcagaggaatacctgcaggaaaaaaagagatgattccttgtttcctcggcatcgttgcagaaattgcatgcgacttgttgaccggagttccatgttttgatgcgatctccggttgaaagtctgttgtgtattgcgagccacaaaatgaaggagtacttgggcgtggagtaggggaaccaaacgcccttgtaccagcttctctgtggttgaggcaatctaacattattacaggtgactttagttataaactggtttctgaaatcatttccctaagatctccaaagtgatacatctttacccgcttcttgtacatgctgttgtaatctctgaatttctgcatctagtct

SEQ ID NO: 171723 - DNA, 426 bp, Arabidopsis thaliana landsberg
tttggtctttgaaatacatgtaaataaaagtgtgatatttacaggtgttactatcggtgtacctatgcaaaagaccaaaactgcaatgctagaaagcgggtgcagatgatccaagataaccctccagtgtacagaactacttatttgggaaaacatgtgtgtaatgcttttgcagttcataatgatacgtatggttctgaaatgataaaattcgaccaagttgtatctgaatcggttatgcctcaactcgcaacaattgacgaacaagcaattatcatggaggacgaagccatagaccatatcatgaaccaagaatgtgatattaatgatttttctgtggatgatgacccattttgggctagtcaatttcctccattttcatcggaagacatgatgttttttgaaaacattgctaatcttgattag

SEQ ID NO: 171724 - DNA, 543 bp, Arabidopsis thaliana landsberg
atcatttcgctgttgcggccggcgaggagtccgtatcgtggcggactcggactcccctccgaaatggcgccgcctgtctccccccccggacatccccggcggcgcacctaacggcggaccgcaaggttcgccgtttttattgcgtgctttccggcaacggcgtctccagagcgcaacacggcgtttgcgccgcgttcgagccgcgcagcagcttacggcgactttccctaagctcggaagatcttcatcacgagtctgctcatgccgatcgaaacgctggcgccaccatcaaaatccctgctgctcatggagagccggatcggcttcgagctggcacgttttgcccttgcgatgccacgactgcggcgagaattgccacgcggcagtggtcaagccctgatcattgtgccgggcttcggcaccaccgacgcggggaccgcgccgctttggcaccttctgggccagctcggctactcgccgcacggttggcagctcggccgcaatttgggcatgcgcagcggcgtgcgcgacgcgctcaatgca

SEQ ID NO: 171725 - DNA, 1478 bp, Arabidopsis thaliana landsberg
  unsure (1)..(1478): unsure at all n locations
accaccagaaaattgtggcaggtttatctcatttctactcgtcacactggctaactttgcaaatctggttttgtgacattgctattcataatttgcaaaactaactcacatgtcttgctattttagcctctcccaatcctacttggaagctatgtggagcttacttaaaacacctcggccaggaaagttcagtgtgagtcattattctggcgcgttcgcttctttcttaactgctaaagattgccttcccctatatttttatagtcaattagattttgattggtgtcttatcattttgttttagggtgaacaaagacggcttgctctctatgctgctatgtttctcccttttaggaaaactgtatacaaggacactaagggcaaatcggtacgcactcccttatttattttatcatcttttcttgggctaaataaatctgagtttagttgtctacccgaatcaaccttgcgccctttttcagattcctattgtcaaccacatttttaaattctccatgaagaggaagaccagtgacgctgaaacagtgagttctgattattatgttcaatatcttaggccttaatttagtaactatagggtgatacttgtgctgttttctttggcaataacggaaaaaaaacaattaactgtgtacaatcagagcctttacctgtgacattagattataggtgtgatcttgtttaatagcagtgtatctcgttttaccataccttttaagtttgcctgctatacaacataacagtttcatcactaacatgataatgaattccatcttctctaggttatgaatatacatcagaccacggagagatttcgttcgttgattccttcccttgaagtgaagaaagatgtagaactggacgagnnnnnnnnnnnnnnnnnnnnnnnnnnnnnttggaaatccatcacccttaatgatccagtgatcccagcaacttcgaaaataagagtactcacaggttctcttctatagcctttgtagtattgtattactcccacttttaaaacttgagcagataaaaaaaaaatcactagtaaatattagttagtcagtgtcattggtaatttctagacgacggagtattataacacttgtggtataatgaccatattatatctgaccatatgtatgtaactaaaatgttttgttttacaactattacagggtttctacttagagatattaaagacttctggcgtgtttctctgttaacatctttgttattgtctgctacggttgacggtagcaacgatcatcaagatatcgggcagctggacttccaactggaaaggatgcgagaaacttatctgacagttgaggccaccattcatgaactgggtaagcgttagaatgtttgataaatggtagcatataagatagaaattgctaagaggagatagaagaagtaatggctgtgactagttaccaaggctccccacgtttttgtgcttacca

SEQ ID NO: 171726 - DNA, 1017 bp, Arabidopsis thaliana landsberg
ccttgcatatttcatatacaaaaatcaagtaagtgtgttctctgatttctggtacataatatcacagttaatctctccaaaagcatcataatggacttgtacctaatttgtaaaagtttagttactttgtgacctgcatgttttagatggaaattggatttgtgcttttcggaattttgcttctgcaatgtttatagtcatgtacaatgtgataagagccattagtagtgccaagctcatgcattgagtaaaaagaactcttgatatatatttttaaagacaaccctttgtagatgctcaacagaattgtttctatttgcagatactcaacgtgtatattacaaagtacgaaagcggtggacaatactggcctattttccacaacacaacaatcttttcactgatcttgacacagattatagctttggggtttttcggattaaagctatcaacagttgcttcgggtttcaccataccgttaattcttctcactttactttttagtgagtattgtcggcagaggtttgcgcccattttcaacaaaaatcctgcccaggtatattaaatgtaaccaaaacctttgatgttcctactgcagtttatgcgtcttctcggtgcttgattgatgtgtttcttttcaggttctcatagatatggacagagctgatgaaatatcaggaaagatggaagagttacataaaaaattgcataatgtatactcgcagataccattacactctcagaaatcatcgagtaaagctgaatgtagtaatcctttcaaaaagcaggagttaccagatcctgaaaaattgaagccaggtttcgagtttatatcactgtttgtgtatgattatagatatcacttgattagagactaatgagatttatatttttcagaggagggggatgcgatagctaaagagttatggggattccaaggcaatgaatctggtcaagaacatgacactaagtcctgagcatctttctccaaagaagatcgaacttcacaaacggaac

SEQ ID NO: 171727 - DNA, 547 bp, Arabidopsis thaliana landsberg
ccctttatgcggtaagtccacatacatatactatgatcattagataccaatcttaagctaaaaatatatgacactagtataaaacacggatcatgcagggagtggtggcgtctgcgttagctttctgcctaatgtcatgggctatgcagaggaaaggtcctctgtacgtctctgttttcagccctttacttctcgtagttgtcgccattttcagctgggctcttcttgaagagaaactctacaccggcacgtatgtttctatacatctttatctctctctctctgtgtttaaacattatataaacgagatgatgatgatgaatttatatgatatatgtatattaggtttatgggatcagcacttgtggttattggtctctatggcgtattgtgggggaaagacagagaggtgagtgagaaggaagaagaaagggagaaggtgaaacaacaaaaccataaagtcaagagtgaaagtaatgaagatattgaatcgagattaccggtagcaagtagtggaaatggttccacaaggtctacatcgccttag

SEQ ID NO: 171728 - DNA, 1496 bp, Arabidopsis thaliana landsberg; identical to SEQ ID NO: 17145
  unsure (1)..(1496): unsure at all n locations

SEQ ID NO: 171729 - DNA, 2095 bp, Arabidopsis thaliana landsberg
atggtgaataaacattggaagataattccaaagccgcttctagaaacagttctcaacaaccatgtccaacgccacggtgttcctcagcctctcatcctccatggtcctcgtggcgtcggcaaaaccacattgatcctcggccgtaaaatcctctctttgaatccctaatttcgccacttttgttcaaatgatcgtgcctttgattcgttcccgatctcgttcttattaggtctactcggagattggaacaaagggccacatctcgctggctatgtagattttgcgcaatcgataacggaacaccatccagatcaccaccaatcatatccatggacgtcttggaccagtgttgacccaccattgttgtccaattgcaaaacccagctcgagaattgtcttgaatctatgagtcacaaagctatcaaacttgggagtataagctcgcagcagattttcactactatgaacaaatggtatggtcttaatactgcacttcgtcgtatacttcagggttataacattgctgttccagagagcgctatttgttcgacaaaatgccgaggagatattgatggttgctaatgttggaattgttgtcacaagctgcagagattggtttctttcagtaatagaatggataaagtactctctttttttttttgtcttaggtcattagatcttttaagtagtaaaacagtggcagctgtatcatctagaaacatttttgccagctatcgatgttgctttctgccttaagtaatgttggcttattagttttgtttcttgtttcacttgatcaagtatgcttacactgatcacttgaaattactctcagagatttgttgccacgtgaaagtgaccgttaatctgctacaaacattgtatcggttctttactgatacaggttgctgtggtttatcatgcaacggaaaaggctttgttgcggcttcaactgtatgcatatgatgcacaaaagagaaccgtttctgatgacaatttacgttttggtgctccatgaaggcatcttccgcgtattagggatctcagagggagctaaaattcagctgattgatttttcccaagttctcctcaaaacagaattagttgggtgacaatagccttgagatcaaagttgttctttgttttaccttaccagaaaagaaaccaacgatcatagcatcactgaagaataaactggtcttagccacatggcccacatctacttttagcaaagccctaatcatgatctatgtggtttttgctgtgacttggagtgaactcaatcctctcagaacaacaaatctgttttattagatgtacgtagcaagtgttttctatcattcatgaacagagtacatcgtaagcaaatcttgataaacaaatctggtttgactcaaactcagaatagtacaaaccaaagcagattaaccagttttagctaaaaacccatcaagaatttaagtataggcattctaaacacaatgagagaacaatcattcctcaacgaaattgacttaagcaaactaaacaaaagactatacaagtatgaaaactcatacgtgtcagtcaagaaacaaaataccaaaagtgtaactgaagcatcatcttcactggtagtgaccggaatcacgaatcgagccatcatcgttgaagccaaagtcttcatcttcgtcgggaagatagccttgactgtcttcttgatcaaagaacaggtggtttaactcgtaagactcgtcgaaaaaagagctaggttcaacagaatcttgaggaagattgtcgttgtggccgtcgtgaccagaatcttgaggaagattgccgtcgtgaacagaaacttttgcaggaaccagaacaaaacagagactgccttgctccaaaccgtcaacaacagagtcggcgtggccacccgaaagattgacgccgtcgtgaacagggttcactcctccgcaacggaaaacccagagagagaaaacgtcgcccaccttgaacgttttgtcgttcttatcaaccaccttattccaacctttaacaaaggcatagctcttggtccacttatgtaactcaagcacgtactgttgcgattcaggatctataaaag

SEQ ID NO: 171730 - DNA, 1329 bp, Arabidopsis thaliana landsberg
gctcctccacgttggggctcaatgcgacggccacgtttaagcttgctattgcggcgagtgcataacttgagccgcggcggcagcagcagaagagtgtcggtggtccatagccggacaaatatacttagaagggtgccacgtcggttatacatatcacccacatgaacttcccaatgattcataccacggtacgtacagttattaaagaaaactgaaccaaaacaaatatcagttgattatgtacttaagttgcgaattgtttcctttgacagaaggaggttccaaagtaaacacggggaagtcgttggcgaatgttgtaggaggagtagcggcattggtctttgttgctatcttttttatgttcctaaaaagcttgcggaaaaaaggagatggtaagttattactattagatgtgatatcgttttactctattttttttttaatttgaaaagaaaacattataatgtagagacatgctactagatgacaaaaaaataaatagaaacatgctaattataaacgaaaatattagaaacttaattatatagatcccatgtttatgaagtttgttaaaactatttaattatgtacatacaaaattgaattgactaatttatcctattgcagattgttgaagggtacatgatcagagagatgttgggaaaataattctgttccttgtatttgttctaccaaccaaggaaaacctccttctttccatttttcgattgtggaaataaaagtggtaggatacgtaattttaatcatgtaaatatttgtactgaaataaatatttgccctaaaagttatataacatcctttaataactacgacgtttgctttaacaaaaaaaaaaataactacagtacgacgtttgaagtaagaagattatatatttatgttttgtaacccccagaactaatacatatcaggttatagcccataacttttatttaattatgctgtgctttttagtcaatgggcctattttaatggacctacacaatcatggaaataaatctggaaataaatctgtccacgacggaaaaacaaaatctataaacaattgtatgtatactcagttactcacgcacgacgcagtgaaacagagatactgtgaaaaagtgtgtttaaaatggatctgttttagggtatttatcaattcgaaaattgattaatttattaatttcgtaagctttcacagaaagttcgaactctttgcatgcaatcattcgccgtcttcttccacaattgtgtgtttttaccggcggcggctggattcgagaagcttccgattgttctgtataatcaatctctccggactaacca

SEQ ID NO: 171731 - DNA, 2668 bp, Arabidopsis thaliana landsberg; identical to SEQ ID NO: 3166

SEQ ID NO: 171732 - DNA, 1476 bp, Arabidopsis thaliana landsberg
gctctcctttttattctacatccatctgaatctgcatcagggcaaaaaatcaataatcaaaagtcagcgatttctttctcctccaaaactcaaatggagacaagagataaagtgaaaaaggagcttaagatagaaaaagaaggagggcatgggaaatatctaggtctaccagagttgtttggctgtaagaagagagatctttttagaatgattgtggaaagaattaagcaaagagcattaagtcggtatttcctcttcctctcccaagctgggaaacgtctcctcctcaagtcagttcttgctgctatgcctacatataaatgacatgtttcaagctgccaaacaacctctacaaacgtatccagttagcactcacacgattttggtaggatggcaatactgagagaaaaaaaaatgtgttggctatcatggaagaagcttaccaaatccttaaaagatggcgggttgggtttccgtgatatacaaaagtgtaacgatgcattacttgcaaaggtaagctggcgtatactctttaatcctgattgcctccttgccagagtattgcttgggaagtatagtcactcatgtcaattcttggacagtaagacgcccaaatatgcttctcatggctggagatgtattgtaataggcagagacttattaaaagctcaattgggaaaagtaattgggaatggtaagactacccagctgtggaatgaaccgtggctatcccttgaatgccccaggtcgccaatggggccagcgcctgagtatgcaaaagaatggacagtctcaaagctcatcaatcaagaaacatcaacttggaatatagacgttataagagctttggtacctgaatatgagaaggagatcgtcctgataaagtcgagcaggtttggagcctaggataaatgggtatggctaccaacagcaacaagatagtatacaccaaaataaggttattttgaagctttaaagcttcaccctaactcccaagagatcgatcaagccccaatggggattaattagaaagaagatatatagacaatcaaatgcttccctaagacaaaaatggtgatgtggaaaaccctccaaaatgcctttcctgtgggtgaaaaattgaaacacagaaacgttaaccctacgactcaatgtcattgttgtagtgaagatgagacaatggtgcatctcttcttcacttgctctgaggcagcaaaggtatgggaacaaaccccttgcaaaacatctctgaaccttagtcatatatcctcctttagatcatgattcgattctaccaaatccctggtatgtctccctccaactggtatcgaagcaggaccaatatcaccatggatcatttggtcaatttggcatgcacggaaccaaagaatcttcaatcagtagcagatacaacctgaggagataatgcttcttgttattttaatagcaaaaaagtggcaagcagcaaaaaggcaa

SEQ ID NO: 171733 - DNA, 421 bp, Arabidopsis thaliana landsberg
atgctcgtcggcgttcctagcgaaatcaaaactcatgagtatcgcgttggcctcaccccggcatctgtccgggagtatgtccagcgcggtcacaaggttctggtgcagagcggcgcaggcgaaggcattggcgccgccgatgacgtctaccgccaggccggcgcctcgatcgcgaattccgcggaagaggtgttcaagaatgcggatatgatcgtcaaggtcaaggagccgcagctcgacgagtgcgcgcagctccgcgaaggccagatcctgttcacctatctccatctggcgccggatccggaacagacggcagctctgatcaagtcgggctgcaccgcggtagcctatgagactgtgacggacgagcgcggcggcctgccgctgctagcgccgatgagcgaagtcgctggccgtctgt

SEQ ID NO: 171734 - DNA, 3362 bp, Arabidopsis thaliana landsberg
  unsure (1)..(3362): unsure at all n locations
cataatacaaggtttagcttttgaaaggctgaatatgcaatctggaaatgctgaatgtgtatcaatatgaggcgataatcccacaccagatgggtactcatttacctaatattcacaagaattcctcagccttcaatgtagttaagaacaattttaacagaatcttaatctatatatgagagtctgatgatataccgttaactggtccaaattcaagcatgacgggtcgatgtcaaggttcgggaacaaagagattctttcaagtataggagaaacaaacgatggaagctcgccgagacgctttttggtatcaacatttctagtcccataacaaaactcatatcatagtgttgaacacgccgtttagcaagaccaatccaatgtcgagtatcaacagctgcaagcaattgctgataaagacatgaacagtaagtaacacaagaggtaggctaccacaacataagcacattacaaaataccatgtacctgttcttcttccacagtgacaaaatcatgtaacaagaaaagccctggaatattcaacatgtgaatcaatcaaagacactggaacacaatcattcacctgcgtctaagcaaaaacataaaaaggctcattgcaagcagatacccaacaaacataaagtttctgtcttttggtaaagatcaaaactttgaaacatagagatctaacattacataaagatcaaaactttgaaacattacataaagatcaaaactttgagatccatggaggaatctaatcataatatgataagacccattaattggaagtacctcggaaggtaattgaagaactgaatatcgaatatgcaaagaacgtccttgaaggtcagggcatggtcgaccactcaaagcttctagagctgctttcgcggagaagggatcagcgaaagagacgataacacgaacgccgctatcgtccgccgcgtagacgccgtttacttcaccgaactcagcgaacaccgccgcgattgcgtcgtgtgatagtccaaccgccggtccacaattcgcgacgtacagatttgatgaatttggttctccgaaattggaagatggcgatnnnnnnnnnnnnnnnnnnnnnnnnnnnnnnnnnattctcggaataatagactgtacactttctcggagaaagtttctccgatcgtatcttcgccgttaggttcaatgaaaaaacgacggcgtttagttgtgttatgggcctcattaggcccatttgacgttcacatgggctgactaatatattaaaaaaaaaaaattagaaatttgagaaaagaacatctagggattcgtcaggaacctccatgaaacgcaaggacgtacaggttttgtagcagccgaagtaagttaggtctgatatcgctacagtgactagaatgcgtgcgaagtctgtaataaagagccacaaaaaataaagtcatttgcggaatcgaatctagggtttggttgggaggcgtcatcaagcgtaaggagcgagagtgtaataacgataacgaggaggaagatgagaaagaagacacaaacgcaagtaagttaaaattagattcgctccctcttgatctaaatatggttatactagctagattgtctgccaagtctcttatgaagtttcgattcgtgtcaaagatgtggtctactggtcttccatcatccgaagccgagggttcattgatttcttcttctctatgtcctcggagcaatcgcagttaaatagtcgcttctgagaaacttaccttcttcttctcgttttcacacgacgagggataggggtcttcttctttgcttcccaacttcgagatggcaattcccaaatgcagctttactggcttaattatcacactctttggcttctttacatggcattctcgctgttcaagcagactctaagtggttaatgtgtaaccctagcacggagaaattcgttaagttacctgctaccactgctttcgtgggatacgatcctattgatgatcaatacaaagcattatccttgaagagaaaaaggtatgatatctagtggtcatcttatgaacattgggagatggtgaagtatggatacacattaaagatacccctttaatttttcaatttttcaacactaaacaagctacagtttgtattgttaatcttttgggtttgctgagacgtgtgttcattatttatgttcatgtttttacttctttagtgtgttcatttgctcgttatataggtaggtgtgggaagtaaataaactatggattgagaaagagatatacagagtattgatgtttttgccaataatgtatcaaaagtaagattttctttgaaccaaatatatctgattttggcagatctatttagttatgcattttaagaacaaaaagctcgtaaaaaataatttgtgaccaaacagaaatgacttcattgaaatagaactgacttaaaggtaaaaccttcaactcttacaacaactaattgaaaaggaaaagcataattaaatactggtcttttaaaacaaacaaaacacaaaatgcacactactgaaacacatcacacattgttgttgttgttgttgttgttgttgttgttgttgttggtggtggtggtggtggtggtggaaggcatgtgaccggtggaagtaagaccaacggttggtggctggtggtagttgtagtagtttccgtccatgaaagggatgtgtgcatgctctccaacataacccgcttgttcataaggatattctgtcaacatattcatgaatggatcattttgaaacggatactgatttggatccaaactcatattctggttcaaattcatatcatagtttccatgttgaatctgatgattaaaatcaacaggggcttggtattgaaccggctcctgttgattttgattcaaattcatattctcaaactgaaaatgatcactaaaaccagtagggacatagggctgaaccggctcatactgattctggttcataggaagaccggcacctgcaacaccaagagcttggtagtgaaccggctcttgttgattttgatacaaattcatatgctgatattgaacattatcactaaaaacagtagggatatagggctgaaccggctcatactgattctgactcataggaagaccaccacccgcgacagacagactctggtagtgaaccggctcatactgattctggttcataggaagaccggcacctgcaacaccaagagcttggtagtgaaccggctcttgttgattttgatacaaattcatatgctgatattgaacattatcactaaaaacagtatggatatagggctgaaccggctcatactgattctggttcacattcatgttatgaaatccagtag

SEQ ID NO: 171735 - DNA, 1319 bp, Arabidopsis thaliana landsberg
  unsure (1)..(1319): unsure at all n locations
aaaagccgtgatagaagagcaatgcattggatttcctggaagaggatgagcttaccaaaaaatgaagggggtcttggatttaaagatattgagaagttcaatttagcactgttagggaaacaagtatggaggatacttcaatcaccaaacagtctcctctcaaagctactaaaggcaaggtattttcccaacaccaatattttgaacgctggaccaggatacaaggcttcttttatttggaaatcattgctggaaggaagagaactactgaagaatggtttgaagtatctaattggaaatggtcaaaacacaagtgcttggctagacccatggctaccgttgcatccaccgagaccaccaaatcgattggcgggaacaccggaaaatcactaccttgtgtgcgacttgatgaacgaacaaaggaacggatggaatcttgatcggttgagagaaacagtgatacctgaagacattcacacaatcctcaacatcaaacttagccctacaaattcaccggacttactaggatggcactacaacgattcgggattttatactgtgaaatctggatattggctcgcaactcaccttccaggaaacgaaacgaatatcattccacctccgggactacacgagttcaaatcggccatatggaaaatgaagacagctccaaaaatccaacacttcatgtggagaatcttgtataatgcgttggcagcaggtaccattcttacgagaaggaatatcatcaccaattcacaatgtaaacgatgtggcatagcggaagagtcaattgaacatctattcttcgactgtaactatgttcgtgacatatggaggcacaatgttggactacaaaggagtaactttaacccatttggaacgttcacggaaaaattcagagccatcattgagtgttacaacaatcattacctctctgagatagaccgacaattacctctttggctactgtggagaatttggaagagcagaaacctcctagtttatcaacacaaggatgggaactggcaggaagatatcatcaaggcagagcaagaagcgagagaatgggtggactgctggttagacaatccgagaaacagcattacgaccacgagaacacgaccgttactatcaaactggcaaaaaccgaagagtggatatgtaaaatgtaactttgactgtaagtttcactcgaccgacaacccctctcaagcagcatggatcatgcgctattccaatggtacgtttctatcatgcggacacagtattggacagagatgcttcacaactctggaagtggaactcangcgctagta

SEQ ID NO: 171736 - DNA, 367 bp, Arabidopsis thaliana landsberg
  unsure (1)..(367): unsure at all n locations
ccggtgttagctatggaagcttctccatctcctatttactccttctacagcacctgctattcttggaggcatagggtttggctatgtgatgtatgatattactcattactatctacaccatggtcaacctaaagaaccaacctttaaacatcttaaggtaagaaaacccatctctagacatctcctcttttttcgcattcaagcttattcctctgcatttctgatgaggtttttggtatacgttttacagaaataccacctgaatcatcactttaggattcaggacaaaggatatggaatcacttcctctctatnnnnnnnnnnnnnnnnnnnnnnnnnnnnnnntaaagccgccgcgaagaagagc

SEQ ID NO: 171737 - DNA, 937 bp, Arabidopsis thaliana landsberg
  unsure (1)..(937): unsure at all n locations
ttacctccagatttacgccgtgaaatccaacgtcatctttgtctcgcccttgttcttcgggtacatacatcaactcattcatcaaaaactgttatggatttgattgtttttcaattcagaagtcacattgttgtggtaagtgcaggtcccgttcttctctcaaatggatgatcaacttcttgatgctatatgcggatgccttgtctcatctttaagcacggccgggacatacatattccgtgaaggtgatccggtgannnnnnnnnnnnnnnnnnnnngaggacaaatagagagctcaacaacaaatggaggaagatctggtttcttcaactccactactctacgacctggcgatttctgtggggaagaacttcttacatgggccttaatgccaaactctacacttaatcttccgtcttcaacccgaagcgtccgtgccctctctgaagtagaagcctttgcattaagcgcagaggatcttaagtttgttgctcatcagttcaaacgtcttcaaagcaaaaagcttcaacacgctttttggttctactcacatcaatggagagcatggggagcatgttttgtccaatctgcatggagaagatacaagcgaagaaagcttgcgaaagagctcaaccttcacgagagtagcggatactattacccggatgaaacaggttacaatgaagaagacgaagaaactagagagtattactatggaagtgacgaggaggatgaggaaggcggatcaatggacaacacaaatctgggagcaacgatcttagcatctaaatttgcggcgaacacgagaagaggaacaaatcaaaaggcttcaagtagtagtactggtaagaaagatggatcttccaccagtttgaagatgcctcaactattcaaaccagatgagcctgatttctctatagataaagaagacgtttaa

SEQ ID NO: 171738 - DNA, 514 bp, Arabidopsis thaliana landsberg
atgacagctgcaacgatcgtgaaatcgatagagaacggactatccaattctgtacaggatgcagacaggtaccgctcttttgcggtgttattttcgcatttgttccgatcccaatttattgccttcgcgggaaacgtgttcgttgcatttccggtcgccatgttgcttatctggtctttacagggactcgcagggtttcatattgttgatgaacacaaaagtgaggtgttaatgacagatttgaatccgcttgcattctgggcgattctgcatgcggcgattgcaggagttttcctgtttttgtccgggattatttcgggatcaatttccaataagatcaaacataaaaaggtttataaccgaatcaaagaacaccctgttttgaagatttctctggggaaagaaaatgccaaacgttttcccgaatccatcgaagcgaagtgggccggtgtaaagacataaaacttttggtttggagtgttcctgggttctacggcatccatcgggttttgtc

SEQ ID NO: 171739 - DNA, 781 bp, Arabidopsis thaliana landsberg; identical to SEQ ID NO: 5544

SEQ ID NO: 171740 - DNA, 624 bp, Arabidopsis thaliana landsberg; identical to SEQ ID NO: 11989
  unsure (1)..(624): unsure at all n locations

SEQ ID NO: 171741 - DNA, 3439 bp, Arabidopsis thaliana landsberg
  unsure (1)..(3439): unsure at all n locations
caaaagatagatctcaatgagataaacaagtttgcagaagaaatcaaatccaaattctcaacagaacaaccagaaaatgcaaaagaaaatcaaagaaccctaaaaaccagcggacaaaaacgaagatctcttgggcaaaaacataagaggtctatttataggcaatcctagattgccctaattgggaataagacaaaaaagataagtcggcgcaggagagctcggccctaggccgagtagaaaagccgagtggcttggtcttggtcacacagctcggccttaggccgagtggcttggtcgagtagcttctcttcatcctttagtgcacaactcggcctccagccgagtgccttggtcgagtaggctccttgttcttcacgtgtgctccactcggcctccagccgagtacataggccgagtatacttcaaatccttccttaggtaccccgaactcgagtctgtctatcccttgtgctagaaacctccaagttgagtccaaaagtacctgattcatctgcaaaacactccaaatgcaagtatgctatgcaatgcaatgcaaaatgtgcaaaagaaggaaaagagactaagaatgcagaaaaaggggaatgaaactaagctaaatgcatgaaaaacaagggcttaaaaaggttaaaatctagtgttatcaacacccccaaacttagctctttgcttgtcctcaagcaacaatagaactaggctaggagtgaggtttgaaggtggggattcagaaccaaaatatgcatgtaaaataaatagtctcaatgtccatgttgctagttctagagtgctaggttgaatgatctctacttaaaaactttagccatcttcttcacaacacaacctaatctttcacttagtctattcaagcattcaaatcagcatattccctttaacattcattaagcaagagccatggatcatactacacaatgcatattaaactcatttggctaagggcaaaggatcaagagacaaaaatggtctcttacagaataggctttagtaacgagggatctctcaagaatgattaagctttagtagaatggtaaaggtaagtcccgagtgattcatacaaagataagatcccatctacccaaagtatagtcaatgaagacctaatggcaatccaatctcccatcccaattaagaacttaactctacccttttgcattcataatcttttgaactctttcttaacccattcttttctttttctcttaattctaggagaagctttctctttttatttgatacttctagcgggtttggctttctttagtactaaggttctgttttgaatctctattaagcttanggctttttacccttcttcattagctaacaagaactctttcttttctttacaaattccaaaacctttactagactttttctaacttctttagcttacttcccttagaattctttcccttttcttatcaacaatgaattcgcccttttctttcttttaaacatatcccaacccatgatataagcgcccacctagttctatccaatcctgaaaacgcgaactagaactacatgagacactatctctatcgttacgaacctaacactttttaccatgctcaatcgggataagacctgacaaacactcacaagtgataaatggcttgaaagaaggtttaggtttagggtcggggttaactgctccaatgaggggagtcagctacttggactaacaagagtggttaaaatgagtaaggaagtccaaataatgtagggtctacatgagttcgaattcgatgctaagacatgataattctaaatcagattcaggttcaaattgattgggaatggtatcaaatcatgacagtgtggcgagtagagcaatctaggcatggtgcagttttatttcaatttgattgactacgcatcagacaactaacaacgaggacactaagtttatctagtgaaccaaaatgcttacaaggctatctcatcattaccccccatgcatatgcaataatcctaaatgaaacactctagactcgatcctaaatgtaatgcaactacatgaacactctgttttttttttaaatcattttctgaaatttttcaatttttttgttttttttttctatgccttagatgaatgcagactcaaaactatatacaatgcaacacacacttcctgagtcctcccccaaacttaaatcacacagtcctctatgtgaccaaatttagaaaagagtactcaggacaaaacacatcacagaaacaaaataaaaacaggagatggtataatacaagggtgaagtgaggtgcttacctcagtcgaagaaggagcagagttggtcgtcaataactacctatgattgcttcaggccattgaagaatctccctattgtgtctcagctccgccttgtgggtactcgacctcatctccttcgtggcggccatcaccatattttttcaggtgattactgatgaccccatggatgtctttcatactccacttgaatcacatgattcttataaggatgatgcaaaagaaggcaatccaatttttgacactggtgtcaaagatccaaatggtaatgatgcagatgatgagggaaaaatccaggtacttttataaatacaaacacaacacatcaaacattttatttaacattttatagattcttacacatttgactattgtactttacaatcagtttgattcaagtgcaaacctaagcaacaaaaaacaatctcctcagtccattcttaaaccaaattatggaggtaagctaatatataaaccaaattattgtcagtccaaatctcctcagtccattcttaaaccaaattattgtcacagtcctgaagatatattcgtttgtaattcattattcaggacaccttggagacggttgaagcttctctttcagtgttggagaaacaacccgaagaaaacattgacgatgatcctatgcggggggtaagctaataaataatttgttggaacacatcggagagggtttctgcatcccactccttaaaccaaattaatttcacagtccttacttcttcttcctctgtaattcataattcaggaaaccttggagacggttgaagcttttcattcagtgttggagacgcaacccgaagaaaacattgacgatgatcatatgacggaggtaggctaatacataatttgatttaacacattggattttgtccttaatataaataatggcacttgtgcatagttattgtggacatgattttgtggatacttactagtgtacttcaacattcaggtcactttggagtcagctgcaatatctcactcagtggaactaccgcaacccgatgaccctatggaggtatacattttaaactagttccaaaactttatttgacactggagagggatgcttcttctatcagatcttttccaaaacaacat

SEQ ID NO: 171742 - DNA, 1547 bp, Arabidopsis thaliana landsberg
agatttagtggagatcgagtaagagaatggttgtttaagctggaacagttcttctctcttgattttacaccgaaggagttgaaagtacgagtcgcatcgagtcattttgatgtagttgcaaagaagtggcaccaatcgttgttggacactgattttggggttaaattgttgagtaattggaaacgtataagcttgtgttgcaggaacgttttgctgaagttttaaatgatccaattgttgagttgaatcaattgcaggaaacagatggaattgacgagtatcatgctcgttttgagttgattagctctagagtgaacttatctgaagagtccttggttaatgcatatttgaaaggattgcagttggatactcaaataaatgttagaatgtttcagcctcattcaatccaccaatgtttgatgctagggaggggatatgagaaggctcatcccaagaagaacagtctaaacaattgttgtgttgctaaatggagtgaaaataacagtcagtctaaagggattttatcatctaaaccagagcatgttcataacacagttcttcttactagcatggagagacctaaggatcctacaacacaacctcacaaagtcttgtccattgaagataggagtaagaataatcaaaaactttgttactttggtgatgagaagtacaaagaaacacggtttgaagctgaagaagatagtgggaaaatggaagaagtacatatggagaaggttgaattggagaaaacaggcatagtagctcatatttcagttaatgcaatttcaggagtttctgattaccgcacgatgagggtgaaaggtttatatgagaagcaagtattgtctatactcattgacccggattctacacacagtttcatggattccaaagtagctgagaagttgaaatgtgttttaaaacctgcaagtatggctcaagtttcagtagctgatgggagattgttgggacttaatgctaaaatagataagttccaatgggaattaagaggtacacaacttcaggctgatcttatggtaattaccttgagagggtgtgatatggtattaggtgctcaatggttggagacattggggccaataacttgtgattttaagaagtcggtgatgcaatttcacataggacagaaaaaggttcctcttcagggtattaggcaaggctccgtcagagatgtgaaagcaattaagcttaataagctgagcgaggatgaacttcaactttccatgatgtctgttcctgaagttcctactgaggaacatcactctagctaagcagattttgaaggggagcagttggtggaaagttgcttgcagcaacatgtagcgatttgtgccacaaaatcgattaaaatcttggcattggctgatgcaagttaagcactgaaattatacaaggttgttggttcttcaaaacgacaaatcacaggtttggttttgaaaatgactgattggtgtgaacagtcaaatattgtgaagcatgaacattgtttagatcaactatttgataattggcctcctatggta

SEQ ID NO: 171743 - DNA, 1344 bp, Arabidopsis thaliana landsberg
atgaaacaacaatggcagttcttgatcctctgtttgctcgtcttgtttctaacagtggactctcgtggcagacggctactcagcgacgacgttaacgacacagctctgctaacggcgtttaagcaaacctctatcaagtcggatcctaccaactttttaggtaactggagatacgggtcgggtcgtgacccatgtacttggcgaggcgtctcttgttctagcgatggtagagtcattggacttgatctacgaaacggtggtcttaccggaaccctaaatctcaataatctcacggcgttgtctaatctccggagtctttatttgcatggaaacaacttctcctccggagattcttcttcttcttcaggatgttctctcgaggttctggatttatcttcaaactcgcttacggactcttcaatagtggattacgttttctccacctgtttaaatctggtttctgtcaatttctcgcacaacaagctcgccgggaaattgaagtcttctccttcggcgagtaacaagagaatcacaaccgtggatctctcgaacaatcgcttgtgcgatgagattccggagactttcatcgccgattttccgaattctctgaaacacctggacttatccggcaacaatgtcaccggcgacttctctcgtctcagctttggtctctgtgagaacctcaccgtattcagcttatcacagaacagcatctccggcgacagatttccgggtagtctctcaaattgtaagctcctcgaaacgttaaacctctctcggaacagtctcatcggaaaaatgcccggagatgactattggggaaattttcagaacctggggcagctctctcttgcacacaacctttactccggtgagattccaccggagctttctctgctctgtcgaactctagaggttctcgatctctccggcaacagtctcaccggtcagcttccgcaatcattcacctcttgtggctcattacaaagcctaaatcttggaaacaacaagctctccggtgatttcttaagcaccgtcgtgagtaaactctctagaatcactaatctttacttaccattcaacaacatctcaggctctgttccgatttcgctcaccaactgtagtaatctgcgagttcttgatctgagctcaaacgagttcactggagaagtaccatctggtttctgctctcttcaaagctcttcggttttggaaaagttgcttattgccaacaattacctctcaggaactggccctgtagagcttggtaaatgtaagagcttgaagactatagatcttagcttcaatgctctcactggtctgattcctaaggagatatggaca

SEQ ID NO: 171744 - DNA, 529 bp, Arabidopsis thaliana landsberg; identical to SEQ ID NO: 78971

SEQ ID NO: 171745 - DNA, 823 bp, Arabidopsis thaliana landsberg; identical to SEQ ID NO: 11067

SEQ ID NO: 171746 - DNA, 511 bp, Arabidopsis thaliana landsberg; identical to SEQ ID NO: 21260
  unsure (1)..(511): unsure at all n locations

SEQ ID NO: 171747 - DNA, 289 bp, Arabidopsis thaliana landsberg
actgcccgagcccaggcccaatcgcgtcaagatcgaccgccatctcgttctgccgttcctgaagagcgagacacagcggcggctgatcggctcgctgatcgacattgcccgcacgctcgagatcgaggtcgtcgccgagggtgtcgagacgctggatcacgcccgcctgctggccgggcttggcgccgatacgctgcagggatacgccttcggccggccgcaaccggcgcaggtgacacaggcggtcctggagacggccgctgcccgcaggatggagaatgccggctga

SEQ ID NO: 171748 - DNA, 744 bp, Arabidopsis thaliana landsberg
atgaccgaatagtgagtgcttacaagcacagactattcgaaccttagttagatcctttttaccataacatagttgtacccccatagcttgtttacttctatttctttttaacacaaaactaaacaaaagaggagtagaactacagaagtagtgttgctgttctggtgttgtaaatatgtaatactggaattgctatagcattatcttgcaagacactacaatgtattgcttctatatgttattaccattgacttactcttcttttgtttgataatgagaatcctctctttctcttcaacaagatttatattcaatgttttcaacctttttttctctcttgtttctgtatgtagtagtagcgtgatgaagaaggtagaaagtttaagagaagtttcagaatgggcaaatctaaacaaagacatacttgaacttattttcaataagctcgacgtgatggacattaccatgggagcttcacgtgtctgcatctcttggttccttgcttctcacaatagaactttgtggaacacggtcgacctcaccaatctccaagagttagatttctcccgcattttcaactttaaggataaagaaagaccaatttttttctacaagcacccggttgatcataaacaaggccgtacgaatcttttgactaagatcatctctcggttctttcttgacttttttgaagtagaaggcagcataagtctcatgaatctattagttgagatcagcaagttg

SEQ ID NO: 171749 - DNA, 2231 bp, Arabidopsis thaliana landsberg; identical to SEQ ID NO: 36802

SEQ ID NO: 171750 - DNA, 598 bp, Arabidopsis thaliana landsberg
tgtaataatctgtcgtcttcaacggtcgaattgaatccaagagatatgagagagaaaaggggaaatcggaaagccctagatcccgtcggtgaggatggagtcaccggaaaagatggaaaaggcttcttcgcctgttatctcttgacctctcttagccctcgtcataagggtcaaacctatatcgggtacttgtttctctcatctctgattttggaattgaagattctgttggatcaaattcgattgagaaaggatttacattttctgggtttatctgattgaatacttaaatttgatcaaataggagattttgagtgtttaataatcagactatgagatgtttagtgattgattgcataaactgggtttggttggtaggttcactgtaaacccgaggcggagaataaggcagcacaatggagagatcactagtggtgcttggagaacaaagaagaaacgtccatgggaaatggttctctgtatctatggtttccccaccaatgtctctgcccttcaggtccttttgctcccctaaagcaaaagattccttgcaaaaagattaaattttaacttcttttgttctccagttgtggcctcg

SEQ ID NO: 171751 - DNA, 2597 bp, Arabidopsis thaliana landsberg
tgctggagcatctgcctcctgcgcagatctccaactggacgacctgtcaaacgtttcgccgcaacttccaggcacatatgtgcgccctggaactcctgggatcttcgaagtaccgccagcagccgggagaatccctccaggactacatctcgcgattttcgaagcagcgcaccgagctgcccaacatcaccgactcagatgtcatcggcgcgttcctcgccggcaccacttgtcgcgacctggtgagcaagctgggtcgcaagacccccactagggcgagcgagctgatggacatcgccaccaagttcgcctctggttaggaggcggtcgaggccatcttccggaaggacaagcagcctcagggggccagccgaaagacgtccccagaggcgtcgctcagcgcggcaccaagaagaagggcaagaagaagtcgcaagcgaaacgcaatgccgccgacgcggaccttgtcgccgccgctgagtacaagaaccctcggaaacctcccggaggcgccaatctcttcgacaagatgctcaaggagccgtgcccctatcatcaggggcccgtcaagcacacccttgaggagtgcgccatgcttcggcgccactttcacaaggccgagccacctgcggaaggtggcagggcccacaacgacgataagaaggaggatcgcaaggcaggagagttccccgaggtccacgactgcttcatgatctacggtgggcaagtggcgaacgcctcggcttggcaccgcaagcaggagcgtcgggaggtctgctcggtgaaggtggcggcgcagtctacctagactggtccgacaagcccatcacctttgaccaggctgaccaccccgaccatgtgctgagcccggggaaatacccgctcgtcgtcgaccccgtcatcggcaacgtcaggctcaccaaggtcctgatggatgggggcagctgcctcaacatcatctacgccgagaccctcaagctcctgtgcatcgatctgtccttcgtccgggcaggcgctgcgcccttccacgggatcatccctgggaagcgcgtccagcccctcgggcgactcgacctccccgtctgcttcggaacgccctccaacttccgaagggagaccctgacgttcgaggtggtcgggttccgaggaacctaccacgctgtgctggggaggccatgctacgcgatgttcatggccgtccccaactacacctacttgaagctcaagatgccgggccccaacgagtgcatcaccgtcggccccacgtacaaacacgcgttcgaatgcgacgtggagtgcgtggagtacgccgaggccctcgccgagtccgaggccctcatcgccgacctggaaagcctctccaaagaggtgccagacgtgaagcgtcatgccggcaacttcgagccagtggagacggttaaggtcgtccccctcgaccccagtggcgacgcctccaagcagatccggatcggttccgggctcgaccccaaataggaaacagtgctcgtcgactttctccgcgcgaacgccgacgtcttcgcgtggagtccctcggacatgcccagcataccgagggatgtcgccgagcactcgctggatattcgggccggagccgaccacgtcaaaatagcctttgcgctgattcaacgaggagaagcgcagaggcgataggcgaggagatcacaagctaaaagaagcgaaaagcgtcaagctcaaccctgagaagtgtgtcttcggagtcccccgaggcatgctcttggggttcatcgtctccgagcggggcatcgaagccaacccggagaaaatcgcggccatcaccaacatggggcccatcaaggacttgaaaggcgtacagagggtcatgggatgccttgcggctctgagccgtttcatatcgcgcctcggcgaaagaggcctacctctgtaccgcctcttaagaaagaccgagtgcttcacttggacctccgaggccgaggaagcctcgggaacctgaaggcgctccttacgaacgcgcccatcttggtgccccccgctgtcgaagaagccctcttgatctacgtcgccgctaccactcaggtggtcagcgccgcgatcgtggttgagagatgagaagaagggcatgcattgcccatcgtagaggtcggtctacttcatcagtgagatactatccgagaccaagatccgctatccacaaattcagaagcttctgtacgcggtgattctgacgcagcggaagttgcgacactacttcgagtctcatccggtgactgtggtgtcatccttccccctgagggagatcatctagtgccgagagcgctcgggtagaattgcaaagtgggcggtggaaatcatgggcgaggcgatctcgttcgcccctcggaaggccatcaagtcccaggttttggcagactttgtggctgaatgggtcgacacccagctcccaacagctccgatccaaccggaactctggaccatgtttttcgacgggtcgctgatgaagacaggagcaggcgtgggcctctcgtcatctcacccctcgggaagcacctacgctacgtgctacgcctctatttcccagcgtccaacaatgtggccga

SEQ ID NO: 171752 - DNA, 323 bp, Arabidopsis thaliana landsberg
aaaacaaaataacgcattatgaatgaaactttttacttgaatcttaaccacaacacctgttcaaaaaacgtcttcctttttaactgtagaatatttgtttctattttctctattgttgcagccttgaccgaacatttgcacgtagaaattgaaaggctaaaagctgtattaatttcgaacgaaaagggaatgaaaaagtccaaaatctagggatgacaacatgtgaagtattgcagaaccgtcgcgaattcgacaaatcaaacatgcaagtaatggacccaaacgtgttcaattggtcggaggcaaaccctggttttaatgga

SEQ ID NO: 171753 - DNA, 1495 bp, Arabidopsis thaliana landsberg
  unsure (1)..(1495): unsure at all n locations
attccaatccaattattcttagtatagctgttccggtttaagttctgacttccgagtaactggggttgttgtgattgattaaatcgtagaaattataataaaattatttattatganccgcaattataagcccaatcagggcccattagaaaaccaccaaaggagtttggttataaatagtggtagcctaggggctagggctcacagttgatttcttcttcgtcgcttccttcgtttccaagctttaggtctccaagtcacaggctgaggtacggtgtttctaatctctctccgattcctcttatatgtttttcttaatctctctctctctctcactcagtagttgtcccttctctctgaatctgatttttaatgtttctctggttgtagaaaaaaaatatgtacacttcgatgcacaaggatttgcgatcgaggcaaaacaattcaaatcaagttggggcggattcagaaagcacgcgtcttgttaatataaggaacttggccaaaattgtgaatgattcaagattcaggagcttaagtcctgacactccagctactcatgatgcacaagactatctttggcctccatccttggatatgcctctgctggctccacctgtcaacttctcacaccttcctctagggatcactttcacgcgaaaggagcttgagcttatcaagctcacagcgcagtttgtggctgtttatgggaagtattttcagagggaactgacgacgagagttgttgagagtcctctgtttgagtttttgaaaccaactgacagtaggaacagtttttacacgcggattattctcgggtatcagggtgtgttaatgccttcccaaaagctgaagacgaagagtgaagtttttgatggcttctccaagcttatttgctcaagtgcctgtaaaggatgaggatgacgtggagatggctatgactgatttgcatgcttatgaatactttgctaacatgtccattaatgatttacgagctccggctcctgtcaagtttgcattccttactagaggggtaacgttcacgcgcaatgagcttgatactattaagctcacagcacagtttgtggcagtttatgggaccctttttcggacagaattgatgaagagagtgtttataagccctaaatttgacttttttaagtcaactgatagcaagtgctctttttacttgcggcttgttgatgggtattcaagagtgttaaggcgttccagaaagaatggtgctggtttgggggaagttgttgttggttttctcaagcttcttgatcaagttgttgaaaagaaagatgcagtggagatggctttgactgatttgcatgctttagagttttttgctaacgtggacggtggcgtgttgcaaccacgacctgaacaataccatccaatgatgccaacagtaccaccgctaattatgcctcaactgggatctcagtttactcaacttcaagttcctcaaccttcatgttctcctcca

SEQ ID NO: 171754 - DNA, 902 bp, Arabidopsis thaliana landsberg
atggtggagaaggtgatcatatattttaattggaaatatcaagcgtatagcttgatgatgaatacatcaaggggaaaaataactctctccatgttagaaggtaggatttgcacgaagcttgcattagatgaaagtaaggttaaattgcaaatgaagtacaatgcagtgatgttgggaccaactcaagagatttacattagtgatgatgaggatgtcagtgtctatatatctttaggtgaaatggttagtaaatatcctttgactgttgacgtcatcactccaccagaattgcccgagaaactatcgagagtggaggtgctcaataaaagttctattggtaagaactatgctgatttgggttcgcatgaggatgaaataagagataatgctgccatcgtgatgggcgaattggaggaataaggaatagaacaaaatgaggcaatggcaatagtggaggttgatgatactcaagattctgagattggatcacgtgatgaatgtgatgatagagatggtgatgataggggtgatgaatacgttgagccaccgcctgttgtagaatctagtcagtttaagaaagaatgggaagacggtattagtttgtttttacgacaagaatttccaagcagggcaacattgcaaaaagtgatggacaaaggtttatttgctaaaagttttggttatgttattgaaaagtctgataaggagcggtatgtccaaacgtcttttaaaaaaaaattgtggttggcgtatacgagtttcaactattcggaatacaagtatttactttattagaaagtacaacaagatgcatagttgaacccggattagtaagagtagaacaaggttgagtaagaggaaaggtaaccgtgaattagaagcagctcttcttcatgatattt

SEQ ID NO: 171755 - DNA, 537 bp, Arabidopsis thaliana landsberg
cgcatacgcgacgaagcacatcgcttcgcgatcaccggccatcgcggtcgccgcgacaaggccaggctcagctccgatctggagtcggtcgaaggtctcggaccgacccggcggcgggccttgctcaaggccttcggcgggctcgcgcagatcaagcgcgccaacgttgacgagctcgcgcgcgtcgaaggcgtatcgcggactttggccgagcgggtttacgctcacttccactgatcgctactatcgacgcaagtgccgctccggacggcgacaaggatgccaaggattgcgcctgaacctgccgctgatattgaccatgctccgcgttgcgatcattccggtcgtgctcggccttttctacgtgccctgggaatatgcgcggcagatcgccaccgtgctgtacgcggccgccgcgattaccgactggttcgatggctatctggcgcgacgctggaatcagaccacgcgcttcggtgcgtttctcgacccgggcgccgacaagctgctggtcgcgatttgcctcgtcatgctgct

SEQ ID NO: 171756 - DNA, 540 bp, Arabidopsis thaliana landsberg
tggcctttctctttgaaatactctgagaagaatataattcaaaagtttgagactttgaaacgtgttggtctaacgaaagaagaggtctgcttagtggttaagaagtaccctgaatgtgtagggacttcagaggagaagatagtgaagtcagttaaaacttttcttgagctaggatttacgaaagacgaggttttgatgatcattaagcgacatcctcagtgcattggattagctgcggattcggtgaagaagaagaccgagtttcttgtgaagacaatgggttggcctttaaaggttgtagcttcgactcctattgtacttggtttcagcttggagaagttcgttttaccgcggtgtaatgtaatcaaagctcttatgtcgaacgggctgatcggtgaaatgcctgcgatatcgtctgttttgacgagtcctaagctgaagtttttgaagctttttgtggagaagcatcaggatgtgttgcctgagttgaactctatcttcaccggagatagcattctaataaataagatagcattgtga

SEQ ID NO: 171757 - DNA, 554 bp, Arabidopsis thaliana landsberg
gttgcgcgccgattgaccgatcgtctgttggttcgcaaagttctcgatggctcaccggctgctatggcgggaatgaaaaagggtgaccagattgtggcgatcaatgggcattcggtgggaatgcttcttccctcgcaagtggccgaggcttttcgtatgcgtgaacaaaaccgcatgggcctgaccgttgagcgcgacgggcataaaaaatacctggagatttttaaattcgaaaaagtttacgccagcgtgacgtccaagcttttagaaggcggtatcgatgggcaatctcgagttggactgatcactctcaataagtttgggaaaaacgcttgttcgcagacgcgcacacagttgatcggattgattgagcaaaatatttcaggcgtggttttggatttgcgggataatccaggcggtcaggtcgaagagaccgcgtgcattatcaatctgtttgtcgccaaaggcacttatgaatttcaaactcgctatttggatccaaaaagaccgccggatttttatacggcggaagatgaaccagtctatagcggtcc

SEQ ID NO: 171758 - DNA, 479 bp, Arabidopsis thaliana landsberg
acctatgctcactttccattagtgacacatctcttcaaaccccttgccattgaccgtggtttcgagatttttgatcgtatggttagttcggggataagtcctaatgaggcatctgttacttcagtggctaggctggctgctgctaaaggtgatggtgatcatgctttcaaggttgttaaggactttgtttctgttggtggtgtgtcgattccccgtctgaggacctatgcgccggctttgctctgtttctgtgagaagttggaggctgaaaagggttatgaggtagaagagcacatggaagctgaaggtattgcattggaggaggcagagatatcggctttgttgaaggtaagtgctgccacgggccgagaaaacaaggtttatagatatttacataagttgagggaatatcctggctgcgttagtgaagaaagttaaaaaataaatgaggaatggttctgtggagagaaagctggtag

SEQ ID NO: 171759 - DNA, 1988 bp, Arabidopsis thaliana landsberg; identical to SEQ ID NO: 28605
  unsure (1)..(1988): unsure at all n locations

SEQ ID NO: 171760 - DNA, 752 bp, Arabidopsis thaliana landsberg
atggctccaggattggatctgatctggatggtaatctcctttcttcttctgattcatctgtcaagtcaacaagaaactggcttcagcttcaacggttttcgccagggagatcttcatgttgatggggttgctcaaatccttcccggtggacttctgcggctgactgacacttcagagcagaaaaagggtcatgctttcttcaggcagcccttagtgttcaattcatctgaacctctctcgttctcaacgcatttcgtgtgtgctatggtgcgtaaaccgggagttaccggtggaaatgggattgctttctttctatctccttccatggatcttacaaacgcagatgcaactcagtatttgggtcttttcaacaccacaaccaacaggtctccctcatctcatatctttgctattgagcttgatactgttcaaagtgcagaatttgatgacatcgataacaatcatgttggtatcgacgtgaacagcctaacctctgttgaatctgctccggcttcttacttttcagacaaaaaaggtctcaataagagcataagtctcttgagtggagattcaatccaggtctgggtggactttgatggaactgtactaaacgtttcattggcgcctctagggattcggaagccaagtcaaagtcttatatcaagatccatgaatctttcagaagttatccaggatagaatgtttgtcggattctctgcagcaacaggacaattggctaataaccattacat

SEQ ID NO: 171761 - DNA, 478 bp, Arabidopsis thaliana landsberg
  unsure (1)..(478): unsure at all n locations
tagtatcaaattgtctttattagtctggnatgaatattgttgtaacaaaaagtcaatcttagaactgttttgatttgcatgcaaaaatgtaaatgctctgttgatgcttaaagttttgtgtggaaaccgtagggttcttgtcaacgagacatacagaatggaccgcatccttatacatccgccgtttctcataacactcgcttgcatttacattgcttctgtacacaaagagaaagacataaggacttggtttgaagagctttctgtcgacatgaacattgtaagtccatgcactctgttattactaaaaaggcatggtcttgtttagttgttcatcggaacgttgtgaacatattggcaggtgaagactattgcaatggagatattagatttctatgaaaaccatagaccgttcacgccgccttcaacaaacccataaagttacgacttgtctgtgtgttttgttcccttgagaaaa

SEQ ID NO: 171762 - DNA, 540 bp, Arabidopsis thaliana landsberg
ggatctgcgtggatgatgttatctagaccttttgtggattatttcatatggggatgggataatcttcctcgaattgtgttaatgtattacgcaaacttcctttcatcgccagaaggttacttccacactgtgatttgcaatgctcgagagtttaccaacacaacggttaacagtgacttacatttcatctcatgggacaatcctccaaagcaacatcctcaccatcttacattagatgatttccagagaatggtggacagtaacgctccttttgctaggaaattccgtagagatgagcctgttctcgataagattgattcggaactattgtttcggagtcacgggatggtcactccgggtggttggtgtattggtacgagggaaaacgggagcgatccgtgtgcggtgattggtgatacgtcggttattaaacctggtcttggagctaaacggatcgagaaactcataacttatttgttatctactgagaatttcagaccacggcaatgccggtcatggcaaattagagttttgtcatag

SEQ ID NO: 171763 - DNA, 432 bp, Arabidopsis thaliana landsberg
aagaatttcggcctcttccgcgagcgcctcggcgccctgtggatcaaggtcacccatgcgcaagcggcgctacgtgcccgcgctacatgcatgaaggtcggccggtccatgtggtccatgcctcccgatcacggcgcgtctgtggttcgcaccattctggaatcacccgaactgaccgcaagctggcaggccgaactcaccaccatgcgcgcccgcctgaacgccatgcgtgcggaactggcgcgagccgtgccgcaactcgcctcggtggcgcagcagaccggcatgttcgccctgctcccgctcagccgggaggccgtcactgagcttcgcgtccgagatggcatctacatgatcgaaaacggccgcatgaacatcgccggaaagtcctatgaaaacctgccgcgtttcgccgcggccttagccccgtcc

SEQ ID NO: 171764 - DNA, 516 bp, Arabidopsis thaliana landsberg
ggtaatgttgcagcataggtagcctcggagtccacaactcgcaggcctatgtctcgaacataacagtgacaaactcaaccatatggaactcagacaacggtgttcggatcaagacatggcaaggagggtcaggctcggtttcaagaattgtgttcagtaacattttgatggtcaacgttcgtaaccctataatgatagaccagtactactgtcaaaccaataactgtgctaaccaaaccagcgcagtcattataagcgatgttctctatgcaaatatcaaagggacttacgacctgagaagcccacccatacattttggttgcagcgactctgtcccctgtactaacctcacactcacggaagtcgatctgtttccttccaaaggccagcatttggaaaacccgttctgctggaacgcgtatggaagcatgaagattacagtaccacctgtttattgtctactcgatgcacctccggacttctaacagaaaaagatatgttcatcgcagttcacca

SEQ ID NO: 171765 - DNA, 2352 bp, Arabidopsis thaliana landsberg
  unsure (1)..(2352): unsure at all n locations
ggtcgtggccaagaatcctatacttggacaaagaaccaacccgcaggaaacgagcaggagtactgcgagttgcataaaagctacggccatcatacctccaggtgttgtagtctcgggcgaagtttacagctaaattcctagaaggcagaatcggtggaggcctgaccatcgaagacttagaagcagagaaggccaaaaccgagcaggtaaatgctatggcgaacctcgagcaggtagcccccgcgacaaaccctgaaggaccgaagagaggtagaggcaaccgcgaggtagatgacgataaaccggaagctgctcggggaagaatcttcacaattttaggagattcggccttttgtcaagacacaacggtatcatgatgaaccccgaggaccaagaaaaaaacgctttctacacagagcaaggaatcttttgctaccgagtgatgtcattctgacttaagaacgtcggggtaacttaccagcgtttcgtcaacaagatcttcgcattatagatcgggaaaacaatggaagtctacatcgacgacatgttggtaaaatccatggaagagaaagaccacatagcccacctgcgcgaatgtttcaaacaactaaacttatacaacgtcaaactcaaccccnnnnnnnnnnnnnnnnnnnnnnnnnccggcgagttcctcgggtacctggtcacccaccgcggcatcgaggcgaatccaaagcaaatcgaggcattgttgggaatggcatcgcctcaaaacaagcgagaggtgcaacgtttaaccagaagagttgcggccctcaaccgtttcatctctcgatcaacagacaaatgcttagccttttacgatgtgctacggggaaacaaaaagttcgagtggacgatccgatgtgaagaagcttttcaagaactcaagaagtacctagcaacaccacccatcctcgccaaacccgtaatcggagagccattatatttgtatattgccgtatcagatactgcagtcagcggagtgctagtccgagaagacagaggcgaacagaagccgattttctacgtctcacagactttcaccggcgcggaatctcgctatccacaaatggagaaacttgctttagcggtcgtaatatcggctcggaagctacgaccctattattaatcccattccatcgtagtaatgggatccatgccactccgcgccatcttacacagtcaaagccaatcaggacgtctagctaagtgggcaatcgagctcagtgaatacgacatcgaatatcggaacaaaacatgcgcaaaatcgcaggtcctagctgattttatcgtcgaattacccaccaaagaagctcgggaaaacccactcgacacaacttggctcctacatgtagacggctcgtcatcaaaacaaggctcgggtgtaggcatccgcctcacctcgccaacgggtgaaattttcgagcagtcattcaggttaaactgcgaagctaccaataatgtggccgagtacgaagcacttgttgccggacttaatctagctcgggggttaaagattgaaaaaatccacgctttttgcgattctcagctcgtcgcgaatcaattcaacggggaatatacagctcgggacgaaaaaatggaagcctacctgattcatgttcaaaagttagcaaaacatttcgacgaattcaagataacaaggattccaagaggagaaaattcatcggtcgacgccctagctgctctggcctcaacctccgacccgaacctgagaagaatcatcccagtggaattcattgaaaagccaagtattgagctcggcgaagaagagcacgtcctcgccatacaaatcagcgcggatcaagatgacccagacgaatgcagctcagaatggatggaacccatcataagctatatatccgaagggaagtcgccctcggacaaaatggaaggctcgtaaactcaaagctcaacgtgcgcgtttcgtcttagtagatgaaaaactttacaagtggcgattatccggacccttgatgacctgcgtggaaggagaagcgacttgtaagatcatgaaggaaattcacggcggctcatgcggaaaccattctgggggaagggctttagccattaaaataaaacgccacggattcttctggccgacgatggtcaaggattgcgaaaaattttcaaaacgatgtgaaaagtgtcaaaggcacgcgccaacaatccatcaaccggccgagctcttgtcatcaatcacctcgccatatcccttgatgcgatggtcaatggatataattatacctatggatccctcgaagcaaaaaaagttagtcctcgtcctgaccgactatttctctaaatgga

SEQ ID NO: 171766 - DNA, 345 bp, Arabidopsis thaliana landsberg
tggacggcccaccaggcccaccactcctcggagtacatgaacttcggcaccgccctgcgacagaagtggaacccctggttcgagttcttcttcttcctcccgctgccgttcctcggcttcgccccgtgggcgatctacctggcgttctccgtcaatctgatctggcagttcttcacccacaccgaacaggtcggcaagctgtggcgcccgatcgagctgatcttcaacacgccgtcccaccaccgggtgcaccacggctccgacccgatctacctggacaagaactacaaacgggatcctgatcatctgggaccggatgttcggcaccttccaagaagagttgca

SEQ ID NO: 171767 - DNA, 433 bp, Arabidopsis thaliana landsberg
tgcgctatggcagaacgctcgtacaccatgaaggacggaatttctccggagcccacaattatcttgtttatatacatcgaggccgaggacgaggccggaaccgaggtcgcggacgagattcctacatctggacgaaggaccaacccgcgggaaacgaacagaatattgcgaattacataagagttacggcgatcatacttccaaatgtcgtagcctccgggcgaagttggcagctaagttcctagccggagaaatcggtggaggcataaccatcgacgacttagaagcggagaaagccaaaaccgagcaggtcaatgctatggaaaaatcccgagcaggcagcctccgcggcgaacatcgaaggacccaagagaggcagaggcaatcgcgagcttatcagaggctgctcggggaaggatcttcatacttttag

SEQ ID NO: 171768 - DNA, 818 bp, Arabidopsis thaliana landsberg
atgtcgaagctcaagaaacctatactagaatctaagtgtgtcgccgataagctctgtgactcgttgaatatggaagataataacaatgataaaccagatactattaatgtcgatcttggatcaccaattacaccgcttcagactcagccgagtggactctcttcttccaccagtagtttcagttctagctcttctggatcggttacaggtcatgccggacatgctcctccggttacaagaaaaccagattccgttcagcccgttccctccgcctctaagtctaaatctagcaatctctcttccgccgcgaaatcttcaaagtctccctcctccgccgctcaatttggtgggtctcatagtcctgcccgttctcaatcacgtgcaagcagtcacgttggtgctaaaaacgggaatataataagaccattatcaaactctgcttcggttacgacaaaaccatcttgtaataaaagctctgtttcgtcgaaacagagcctcaaaatacttcccgccgggaaccttgtcccatcggggaaggtacaaattacagggatgactcaagaaaaaccaagaagcctggttcttggaccaggtgctaaatcatacggttacggtagcattatacgaggaaacaacttagctccggtgaaaccaacgatgatgtctgattcttcctctgttttgcctttaactctcagtaataactctaccggtggtcctgatgcatatacatcgtggaagatagctatatatggttctaatcctgaagaagtaaagagatttggtaacgaaatgttcagaaaaggttgtttcgctga

SEQ ID NO: 171769 - DNA, 1506 bp, Arabidopsis thaliana landsberg
ttaggtcttacaatgctcaagaatctaatttcactcaattttatcagtctaaagggattgtcccatttcactcttgtcctgaaacaccacaacagaattctgttgtggagagaaaacatcagcacattctcaatgttgctcgatctcttcttttccaatcacatatcccactctcttattggggagactgtgttttgtctgctgttcatctcattaatcgtcttccagctcctgtgttagatgataaaagtccctatgaagttctaactaaaaagacacctacatatgatgaacttaaagtctttggttgtctttgttatgcttcgacttctcccaaaggtagactcaagtttgatccccgagctcgtgcctgtgcctttcttggctatccttctggatttaaaggctataaattgttggatcttgaaaccaatgatattattatttctagacatgttgtctttcatgaagagctcttcccttttgctaaatcagacttatctcaggaatctcaacatttttttcctgatcttcttagcaattctcctatgtcacctattatatctgatgcaggatgcttctacatcctcatcttctatagagactatgccttctgctagtcctatcaatgtccctgaaccttctgttcaaacatcacataggagaaccaaaaagcctgcttatcttcaagattattactgtaattcagtaacttcttcaaccctccataaactctcccaatatctttcttatcataaaatttcagaaattcatcttgcttttttgacttgtattgacaaaaccaaagaaccttcaacctacactgaagcaaaagatattcttgtgtggtgtggagctatggatgatgaggttgttgctttggagactaatcatacttgggacatttgcactttgcctccgaataaaaagcctattggttgtaaatggctatacaagatcaagtataattcggatggttctattgaaaggttcaaagctcgtctcgttgccaaaggttatacacagcaagaaggcatcgacttcaatgatactttctctcctgtctgtaagttgacttctgttaagctcattttagctctctctgctatctatggctttactctccatcagttagatatctctaatgcctttctgaatggggatttggatgaggaaatatatatgaagcttccacctgggtatgctaaaagacagggggactctcttccacctaatgatgtgtgtagattgaagagatccttatatggactcaaacaagcatcacgacagtgttttctgaaatttaaagcgactctcactggtttgggttatgttcagactcattctgatcacacttgtttcttgaaaatatctattgacatttacttgtgtgttttagtttatgttgatgatatcatcattgctagtaacaatgatgcagcagttgatattctaaagtcacagatgaaatcattcttcaagcttcgtgatttgggtgaattgaaa

SEQ ID NO: 171770 - DNA, 346 bp, Arabidopsis thaliana landsberg
  unsure (1)..(346): unsure at all n locations
atgccgnnnnnnnnnnnnnnnnnnnnnnnnnnnnnnnnnnnnnnnnagtgcaagcctctgccggaagccgatgtgaaggcgctgtgcgatcaggcgagagcgattctcgtggaggagtggaacgttcagccggtgaagtgccccgtcaccatctgcggcgacattcacggccagttctacgatctcatcgagctctttcggataggaggaaacgctcccgatactaattacctctttatgggcgattatgtagatcgtgggtactattcagtggagactggcacgcttttggtggccttgaaagttcgttatagagatagaattacaatccttaggggaaatcatg

SEQ ID NO: 171771 - DNA, 394 bp, Arabidopsis thaliana landsberg
gttgaaattcaagtgtgcctctaagttttggtcatctctcttgtcctccacatatttttgcagctgtttccttaagctctcatctcaacctcgtctttacatgtctttattggataccaactactactccaagtctcggctcctatccgccgctccaagctcgttgtcttcagctaccatagtattcgaccaagatctgaccatccgtgggatgggtggctacgacccacgttttcttcatggctttatttgcttcatgtatgagctaaacgtgcggatctataaccgcagcaccagacaactttatatcatacctgctattaacgaatctgtcatcagagctgaggatggcgaccttaatcccgatccttatacaccatccaatattatatag

SEQ ID NO: 171772 - DNA, 1431 bp, Arabidopsis thaliana landsberg
gcatatgaatgtatcgtgcgatctggattacttaatccagttaacatcttatctgacgatgaaatggatcctgcacagcaagcaaagaaaccacgtaatcaaaattcaacctcctcttttaccatgagagaagaaccttcttctagagcacaagcatgcatgatctttagcaagcatgtgatcttctaatatctttagtgatgtgtctgttaaatgttgtatgcttcatcttatgaagttttagctacacatacaggtcaagttgatcttgagggatctcgtgctaagaagtttcgttcttgcaatgttggatccaccttaaatccatgttcttccagtatgagccatgccttgaaagcctgctcatctttgtatgtaaccatttgagttcagtagattgttatctatatgtttataatcacaagcaactagattgctaatcagctttagttgttctttatggttacaaagttggcatctgatggaaccgaaggagtagcaactattccacgccttcctcctcttacatttggagaagcctttcaggaattatatgatgtaatcttgatactggatgttcgagaacaggttgctactaaggggtttgtggaacactactctctttttcttcgatttgagtgttcttagtactaacacatagctccttattcacagatcacgatccatagttgataacatatgttctgtattcatagatcaagattgaggtttgcatttgctttcttggatagaatgtcaacagattcctacttacaaaaaataattaactggagaaagtgtgttgaatcggtaggttagaagattacgtgtcggtgattgaatatggaatgctcgacataagtaccgccaagatgaatatgttctagactttattgtagacagaaagaacgttgatgatatgcgctcggcaattatggataatcgctacaagaaccaaaaacttagacttcaggtgtgtgtgtactctcaactcctaagttttccagcttgctttatctttcactgacggttgtttttcattgtcttcttgatttgtaattttaaatagagattgggaatcaagaagttggtatacattcttgaaggggacccaaaccagtctaatacagcttaaagaaaaattaatctaccacaacgattgtttagggagaatgaatcaaagtttagaaagtaagtcgccggttcaaccaacggaccgtattgtcagcggttcgagattagaccggtccgaccggccggtccggcccaggttgtaaacacattgggttttcttcgcttcgttcattcattccggcgagcgcagcttaaatccgtcgtcgcctctcaaagacgagtcgttctcacattctctcactttgtaagccctaaactttctctgtgtagcttctcttaagccctaaactttctctg

SEQ ID NO: 171773 - DNA, 785 bp, Arabidopsis thaliana landsberg
catcatcagatctcattctcagatacaagcttattcactctctgtcaggtctctgtcattcctataaactacaacttggaaaccaatccgtagaggtatatatgtgaacacacttgcacatacttacaccttcttcttcttctgcaatttgctctttgcttcatagttttattactaatgttgtgacagattttgtcgagtaagaagggactattaaagaatcatcttctaccgtttcacaacatgagattcttggaactgcaaacacgtttgaatagacacaatgttcaaacactgtcatgtctgttcaagagctgtccaatgctaaacatacttaccgtcaaaatcattgatgatcaaacaagtgaaagaagggtaagtagtcaaataaataaacctttttctttgtttctctttctcagtttaactgaattgtctttgattttgcttatgttttgtagcaatggaataaggatttgtgggatatgtcaaactcagagattcagtactgggaatctcaagcctatgaattagaatctttcttgaaccacttggaatttgtggagattcacggattcgtagagtgcgagaacgaaatgagcctcgcaatctttttgctgagacatggaaaggctttaatcaagatgacgcttcggtctagtttcctctgtagagactctccgcagacaaatgataaggtcacagctaacgggattctccatggcttcttccaaagccaaaatctcatttcattgaaagtttctctgtttcaggacttaggttga

SEQ ID NO: 171774 - DNA, 2930 bp, Arabidopsis thaliana landsberg
  unsure (1)..(2930): unsure at all n locations
aacaagcaacatggactgcacgaaactgaagagttgcttgttcgacttcacatgcgctttgcttgacgccggtattgggagattggccgtggatgagattgagacgaaaagtctggaaattatcaatctccctaagggcgccccaagaagaagggtgccctaatctacaaggtgacgattgtttctttgtaattatgtccctaatctccttagttgattttaactaactcggaaccaccgcttcagatgatgttacaggagctctctagtaagctagatccgggaaaatctgcactcattcggggaaagcttgaacctagcatagtcacgttcatcggattacgaggtcggttagtcattctctgttttttgtttttcttagtaaacatgtttgagaaaacgtatttatgaaatatgagtgtaggtgttgacaagaccaaaacgtgtgccaagtatgctcgttaccaccggaagaagggattcagaccagctttagtgtgtgctgatactttcaagttcgatgcttttgtccgtctcaacaaggctgccaaagatgaggttccagtttacgcaaggtatatatatattgagtatttcaagctgaagcttttgtcaggagtctcttgagtaagcaaaattccttcatgtcttagccttgtttgctttggtttctcattattgatgagtatggacactcatgattggtccacttttgtgcaggaaacccatgggataagccatatgcatatactttgagaataatgtatcgttattataagcgacgattaggattggagaaacatgtatagtatcatctctcaataaactcttgtttacttactatagcgaatacaagacatcgtaactcgtaagtttctaccaaattcattgtagttgctttcccgccttggtccttgtacttcttcaaagctagaccacgagaagattaggctgcacacgacaataatggagtccatgacagatgaaggtaataataagttatggcatgtttatgcatggtttattgatcaaaacttgtttttcactcgattgaataatattcttggtctatttatttggcagagcttgataacccaaaagtaacgcaaatgagcgaggaacggatgatggagatagctgaagcatcaaaagtagatgtgaaacaagttgtgcaaatgatgaaagcgttcaagacgaaggtcaagagggatacggagatggagcttaaggagaggattcgcaatgattatcatataccgtacagattgcgcttttccaacgtctgaggttacaaattatgcctcatatgccttccaacgtatttatatcatatacttatgtttaaaacaaataattttgtataactatgtgttaatttggcttgtatggatatgatcggaagacaagtactgcatgcactatacgtctagtttttggtactgtcgaatgtttttcaatgttcatgctaaatctaaatagttttttgtatccaaatttatataaaatgatctgaattttctttgttttttgtataatacagaatgatctgaatttttgtgtaagacaaaagcctctctttgattcagaagggtccgattttgtaagcttaatgacaaaaatttcctgagacgcagaaaccctgtaaacccccaaataaccaaccggaggcaatgttgagcaatctctctcggaccttttcccgtcataatttccgtttccggcgacaacaatgtcgctgttacaagcctccgaagtctccaccgcctcctccaccaccaccagcattaccaaaaccgccgaagaagccnnnnnnnnnnnnnnnnnnnnnnnnnnnnngggaggatccatacagttggatgtctaagctggaagataaagtggcgatgaggcatatggatatctatatggagcaagaggagaagtataccgaagccgttttggctgatactgatcggattcagaccaagcttcagtctgaaatggcttctcgtttgtcctttgagctctccacacctcctcttcgttggggaccttggtgggtcaattgaattatactgattctcttgtttagcatcgttttatgatataaaaagcttggatttttctatctgtaaactcgtcgattagtttgaaagtttcgtcctttttgctgcaattggacattgatttggttgagaattggtggaattaggttgtattatagaagggttgaagaagggaagcagtattcagggctgtgtaggaggctagcgagcttgcacgaggagttcatttctcataagtctcctgctgcagggtttgattacacatctgggaagaggattgagcagaagctgcttgattacaatcaggaagctgagagatttggaggtaaataagcatatttgaggctcttatacttggggtggattaagagggataagcaattttggtgtctcttttgtaggttatgcttatgaggaaatgtcagagatatctcctgaccataaatttctagcatatactatgtatgataaggataacgattactttaagttgtgtgtgagaaacttgaattctggagctttatgtagtaagcctcacgcagatcgtgtctctaacatagcgtgggcaaagaatgggcaggctttgctctatgtcgttactgatcagaaaaaacggccatgcaggtttcgtatgataagttttggttgttaggttcttccaaaaatggcctgtatgaatctttttcttttgttctgttatcaggatatattgtagcacgatcgggtcaacggatgaagatgttttgcttcacgaagaattcgagggcaatgttcacgttaacataagacatacaaaagatttccactttgtaactgtaaatacattctctaccacgttttcaaaggtgaaagctccaaattgatctgctaaaagctttagttttt

SEQ ID NO: 171775 - DNA, 2743 bp, Arabidopsis thaliana landsberg
accagatgatgagattgtgtcgggaaaagacgaagaaacaatccctgccccacctactttaagtgatgcggttagacctgatactctgtattgttagtttgtatgatgtcatcttaccacatatttatgttgtgggtttgatgtttgttttttggttttccagtttcaggcagatgagaatatcaatgataaatccaccccacacccacaagatgatgagattgtgtcggggaaagactaagaaacaatcactgccccacctactctaagtgatgcggttagatctgagtctctgtattgttagtttgtatgatgtcatcttaccacatatttatgttgtgggtttgatgtaggctaatttatccaaaccagagggtggaagcattgtttttgacagagatgcacatagaatagcagatactcctgctttaaatgatgaggtaagagctggattacataaaaaaccttagatgcgctataatgtaccacattttaatgttccccccacgatgtaggccaatttatccagctcggtgatacaaaattcttcggccgcaggctccctgccaactgaagtagtggcccgcgatgacatggttgctatgaatgagttagagtcttagtagatatgaatttcataggttcttaggggcatcattgttagaactcagtttatctggttatggttttgtttttaaaatagcggattttatttccacaacgttccatatttctaaagttcacgtggttttgttatagaactaagggacatgctttataactatataacatacattagtttatattagttctcgtcgtagttggtcatgagttttttttaaaacacggttgatttaagttggataagattttatattcttgaacagcatgtgttaattataaagtgcatgtttaacatttgcttatgaggacaaaatatcatgcattatataaaacatgaaagtgctttttaataaaaactcgtgaatttagtatatatgtcagattatttctaactaatcttccatctttctcagctcaaacctgtaacacttatttcatcctccaagagtagtaggacggttacatttggtcatgatgttagccgcattgctaagattaatcgtttatatgcactgacttggtattctttcctcatctttgttatgctatgataatttaatttcattttaattaacataattataacctatctacccggtgttttaggcccattgattttggtgctgatcggaccttgtcttcatcggaactccaggatattgtagaattgaaggcagtcgtgcctagtttggtattatatatatttatatatatatatatatatatattatatgagcagatttaaatatacatctatttattttcattcatgaagagtccttaaacagcgtaaatccatttactctttctcaagttatggacatattcatcaactgcataaagattgattggagagcaaaaaatatcatagaaaagcagcaggatgtagcattcattgattctacatttgtcaatgaattatgcaagcattaccccaaattctcgaagacagctgacaagggaatgtacgggtttgatcatgatctactagaatgcactccctctggttttgaaagggtctactttccctttctcgtcgactcaaagcattgggtggggctatgtcttgatgtgaattcaaaggtcattactgttctagactgctatataggattatggcgtgaaaccaagttgaagaatatccttttgcccttggctgaaatgctaccttacctatttcgttttgctgcaaagaagggtggggaaaagaaacttcgattgaaagcttttgttgttaacagggaaaatgaagttacacaggctgatgctgtgcaatattcgggtgtttttgccgctcatttaatagaagtgtatgccgagggtgtgattcagtcatgcaaggaagtgacccacgttgctgtggtgactgctgcaaaaaaatattttattgctgggtatgagttggctaatgggacgctcgcaaactgcacctagtttcttgtattactatcacctcattctgtaattttgcagagatctttcctacgatattaatgttgtttcgatgtatcgttattctgtatgtttatataattactacctgatattgttttatgtagcatagaatttactttgatgacatgtgtttttaaaatacatatgcattaaaactgatgcatctacgataattacgattttgtactctctggatatctaaacctaacaattgttaatatatatgcttgtaaacaatcatgtttaatcgaaattgcttgtttaaagtttatgacatgttttgttagcgtacaactagttatacataattacatttttaaattatttgatcttaaacaagcattcttaattaatattaatatatatgataagtaaatgaagtttttatttgtaggatgccttttattgttttgacatgttctgttagcatacaattagatcttgactgttgcaaatggaactatttattaatatttaactaatataaatcaaacaacgagacattagacataacaatcataacacaacatacatacaacatgtaatatcagcaaacatcacgttattttttagagttacccaactggtgacacgtttcatagatactaaaacattagacatacaacaagtaaaacccgttcatatcatgttagcggccgattag

SEQ ID NO: 171776 - DNA, 794 bp, Arabidopsis thaliana landsberg
cacgtgttgaaggcaactcgcacttgctcatagttgacttattaacaagtcgtgttgatcaagcggatagtccggttcctgaatccggttacccgattgtgacgtcggaggagatggacagtgccgcgtctgcaccgttctcaaacgcagatttcaaccgtacgatcaactctcgtggagttaatctaacggacgtgatttgtatcccaatctctagtggctggtttggtaataaagacgacaacaccaaaagggttactaaaattcagtgtttctcaactcaagatacccctaatttctacatgcgacctatcgaaggtttgactctgctttttgatttagacacgaagcgaatacttgagataacagataccggtcaatcaatacccatacccggttcaactaataccgattatcgatattctactcttccaaaccatgacaaaaccagacccctcaatacaatatcactcgagcagccacgtggaccaagcttcgttatcgaagataaccatttagtaaaatgggcaaattgggaatttcatttaaaaccagacccgagagccggtctgattatatcccaggtcaaaatacacgacccggatacacaagaaacacgtgaagtgatgtacaaaggtttcgtgtcggagctttttgttccgtacatggatccatcggaagcttggtactttaagacttacatggacgcaggagagtacgggttcgggttacaagccatgccgctggagccgcttaatgattgtccaagaaacgccgtttatatggacggaaca

SEQ ID NO: 171777 - DNA, 443 bp, Arabidopsis thaliana landsberg
tgctagagaagtgagacggaaggattactgagtttacaatctgatcttaagagaagagaagaggagatcaacaatggttttaaggagatgtcgattgagaaagagaccttagagcagcaactacaggttattgctatgaatactgatgttcttggctcttggattagggagaatcaagggaaagccaaggatttgctagtggatttggatgttgatgattcatttgaatgcattgactcattgtctaagcagatgttagagtgtactgcattggatttagctattgaagatgttgtttattccatggataaatcgtttagagatggttcgttaccgtttgatcagtatttgaggaatgtgaggttgttgtcgagggagcagttcttccaccgagccacggctgagaaagttagggagatacagatggatgctcaggttgcttc

SEQ ID NO: 171778 - DNA, 398 bp, Arabidopsis thaliana landsberg
taagatggatcgcatctttcgctgcattgtcagtcatatgtttcagatttaaaatattttgatcttatgtataagtcttcttcttattttttaatatatttattgcttatattttgttttgggagtcttttgatgatactggatcaaacgaaatggaagtactcaaacaatatgttaacttcgctattagctccttacctcttctgtagccttcctttagttgttttccaattcttgaggtaacaattcatacacacaaaaaataccttttgttgttgttcttgagtatgtaacaatgatcggattatgtatttgatttgtattttcaggaccgggtttgggacatggatcgctctcctcagtcattctcaggcttttcctcccaaaccgtttttctg

SEQ ID NO: 171779 - DNA, 495 bp, Arabidopsis thaliana landsberg
tgctctacagtatttgatatctaacagtgaaaccaaatttattctgttatgaatactttgtccagtctgctttgcttattaataattttcttaggaattgcttcctttgcattttgattaggttgtatatggggaaggtgaaatagcatatcaaataggcgagacaacatcaattctgtcaagtggttatctttgtgctacacctcattgtgttcgggtaatattcttcataccttcgcggatggttacattctattgtactcagtttcggaactttgcaccaacacaacctataatttcttgtttatgtgttcaggcgccacaaggagaggagactcgtggtctagagcgatcgacattcgcattgttcatgcaacctgactggtattattctgaactaagataacttttgattgatattaacattgcaacatctgtgaagaatttgttcgttatacaaaagttaataacgacgaaaagtgtgaatgtggttgt

SEQ ID NO: 171780 - DNA, 604 bp, Arabidopsis thaliana landsberg
tgtatgatctgtatggacgaaaaaccttcctcagacatcttccgaggaaccactaactgcactcacgcctattgcaccgactgcactgtccgttacgtggcaactaagataaaagaaaacgcatcgaggatcaaatgccctgacgtggagtgcacgcgactgatagagccttacacgtgtcgagatctaatccctaaggacgtgttcgaccgttgggagaaaatcttgtgcgagtctttgatctcctcgtgggacaaattctattgtccgttcaaagattgttcggcgatgatggtgaacgatgaaaatggagatgctaacgtgacgcagacggagtgtccttcttgtcatagactgttctgcgtgcagtgtaaggtgacatggcatgcggggattgggtgtgatgagtttcaaagatttgggaatacgaagaagaagagtagtgatgaagacgatgctttgttgattcagatggcaaaaaataagcagtggagaaggtgtcctagttgcaaattctatgttgataaagtcgagggttgtcaacatataaaatgcaggtttgtttttaatcattgcaaatattttgtttagtactaagttttga

SEQ ID NO: 171781 - DNA, 412 bp, Arabidopsis thaliana landsberg; identical to SEQ ID NO: 11348
  unsure (1)..(412): unsure at all n locations

SEQ ID NO: 171782 - DNA, 308 bp, Arabidopsis thaliana landsberg
attgactatcattttgtttggcaacaaatcattttttttttgtatatcttaaatcaatttacaaaaatattcacgcttataatatcgacatgaacaaaccagtgttaataaaattttgtttatgtaatgtaaaactgaaaaattggcagatgggagttgtgggagagaaaaaagacatagattttgtgatatcagtaggagataatttctacgacgacggattaaaaggagtcaatgatccttcctttgaagcctctttctctcatatctacactcatcctagtctccaaaaacaatggtattcatgt

SEQ ID NO: 171783 - DNA, 334 bp, Arabidopsis thaliana landsberg; identical to SEQ ID NO: 71071
  unsure (1)..(334): unsure at all n locations

SEQ ID NO: 171784 - DNA, 1019 bp, Arabidopsis thaliana landsberg
taaaagcataatgaaacaaattgtaagcaactgaggactcaggacgggaaaggatatgatccgcctccggttgataagctaagggctacaatcagagatccagatactcagatcaaggtgtcaaaacactccaatgatatccatctccaaaagaaatcgagactcttcatgaccaagagctgtagcctcagcttcttgagctcgttgaagggtaacaacaccaacaacttctttttccttctcttcggtttcgcttttaagcctcagactgacaaatggtaatcatgatcataacagattaacaaggatgtggaaagtaatggcggataagtcaccagatacagaaacgaacactagacgaagccaaactgttacttgcaggcacaccggtttcaaagcgtcacaagaagagacaacctccaataatgccagaggctattaactctcaaagattagctcaatctgctttgaatcttgaagctcagcttcgaaactggagaacctgttttgaattctggatcacctctcagagatcctacatgaaagcattatctggttggcttctaagatgtttcagatgtgatcctgaccccgaaaaagttagattatcctcatgtcttcacccgatataccgagtctgcattcaatggtcaaggttgcttaacagcttgaatgaaaaaccagttttggacaaacttgagttctttgcctcagggatgggttcaatatatgcaaggcaagttagggaagatccaaactggagtggaagcgggtcaaggagatactccgggtcagaaagcatggagcttgtagtggctgataagggagaagaagatgttgtgatgactgctgagaaacttgcagaggttgctgtgaaggttctctgccatggaatgtctgttgcagttagttcactagctgagttttccatcaactcggccgatgaacactcgaagcttgttagccaaccagcagacgatgcgtcggagcagcagcccccggatgtaaatttcaattcc

SEQ ID NO: 171785 - DNA, 411 bp, Arabidopsis thaliana landsberg
cattcacgcgcgcatcccaacacgcatctggtcatgcacggatcgtcgtcggtgccgcaggaatggctcatgatcatcaacgaatacggcggcgacatcggcgagacctacggcgtaccggtggaggagatcgtgcagggcatccgccacggcgtgcgcaaggtcaatatcgacaccgatctgcgcatggcaaccaccggcgccattcgtcgcttcctgggccaggacgagcacagacgcgagtttgacccgcgcaaattcctgcaggcaaccatgctcgccatgaaggatatctgcaaggcacgctacgaagctttcggctcagccgggcaggccggtaaaataagcgtggtctcggtcgagcgcatggccgagcgctacaagcgcggcgagctggacgctattgtccgc

SEQ ID NO: 171786 - DNA, 714 bp, Arabidopsis thaliana landsberg
gaagattttgatttgggatctcaaatggagaacgttgatgtgtctaagtacatacacagctctgtgcacaaagctgttgcttctaaagactatgttggtctcagagcaatactgtcttctcttccaaagcctaaagatccatgtgagattcaaacagaagcagcttcattatccgaggaagcaaaatccgataccatttcagctgtgattgatagaagagacgtcccaagccgcgacacgccgctacatctagcggtgaagctctgtgattcaacatcagtagaaatgctaatggttgctggagctgactggactttgcaaaacgaagacggttggaacgcgttgcaggaagctgtttgcagtagacaagaggcgatagcgatgattatagttcggcactatcagcctttagcttgggctaaatggggtgggagactacctcgtttgatagctacaatgagtaagatgaaagatttttacttggagatgagttttcattttgagagctctgttgttccttttgtatctaaggttgcaccgtctgatacttataaggtttggaaagtgggatcgaatttgagagcggatatgactatggctggttttgatgggtttaagattcaacggtctgatcaaagtatattgtttcttggggatgggtcaaaggatggtgaagttgctcgtggatcgctttaccatgggggaaatcataag

SEQ ID NO: 171787 - DNA, 895 bp, Arabidopsis thaliana landsberg; identical to SEQ ID NO: 21983

SEQ ID NO: 171788 - DNA, 423 bp, Arabidopsis thaliana landsberg
tgggttagccacagaaaccacaggggaaatatttgcggagttgatttcatatggctctgtaaccctagtgattcaagaaaaccattgagaacaagttgggtggaagctgttttcagcattatcaaggtgagatattcggaaaactaagatattaagcactatacctttacaaaatgttaaagtcacatcatacttaccatgtcttgtctcattctttccaaatttactttttcctaaacgatattttcatgttcattttgtctatttctgatttctcttgatggtttcttccagtatcaactacacaaagcttccatagccgaggacgatgcctttacttttcttggggcaaaaaatcacagtgattcactaacctactctgacttttgcctagcacttcaaaaggtaaatacattctcttca

SEQ ID NO: 171789 - DNA, 1203 bp, Arabidopsis thaliana landsberg
tgtcagatcaaggagtggatgcaagctctagagtgtatttctaataagatgggtttgtccttgggagacgcaaggtattttctaatgcttcttttgttttcctataatttgtttttcaaaaacatgtaatatcctatatatttaattagtgtatagaaataacccagtttccaatatgggatattctaaaattttaataggtttcattgagatgtgaatgagaaacgatccaacgtacacagtccaaactcattaaaaaccgcccaatttctttctttttaactaaggtttaacaacaattatataataattaatccccacaaagacggccagatataataactaaggtaattttagttaaatttgtttagttaactgatttttatcgtttaatttgggctgcttgttctgaaagctagaaagattatagtagtttaaaactttaggttaaatcgttttgtaaatttgttttcaatggaattttggttttgaaagcttgcatgagtagacgaatacccattattttttggtaaataagaatgcatggagtcatattttggttcccgaaggcttaaaagaataatattaggtgaatttccaataggttttatctcatctatagtttgtcacattatttttgtcgacttgtggatcacattttaatactactattatatatatatttttttaaaatcgaaataatgtttgggagaaaagtatgccaatggatttgaatctccagatctgatttgtctttgtgtgacagagatgatgtaaaagatgtgtggagcttaggaattatagaaagaacattttctgtagttttatgtttaggatagaatgtatcaccctttttgtacttatatctacttcattaatttctttcgttgatcctttcatcttgtggttgagaattcctcgattatatcacgtgaaaatatttagtttctctgcactttagaaaatatccattaattgagttacaatatatatatatggcaggtctgaagccgattttattaaggaaatcgttaaagaggttgagaaagttctagccacatttacaagcgaggacacagaagatcatcactgtgtcaattgttgaaattgtatccttgattgaacctgcagaaagagaaaagaggtcaagatgagcgaaatcaagaatctcctgattctcgtcgtggatgcagcaaaccgtta

SEQ ID NO: 171790 - DNA, 140 bp, Arabidopsis thaliana landsberg
atggccattgtttcgcccagctcgtatttaaccctcacaaaaggtaccagtagatggtactgggccccccctccagagtctgcggtaaagataagcgtgctacaaacttctccgcagcccgggggatccattagttccta

SEQ ID NO: 171791 - DNA, 1004 bp, Arabidopsis thaliana landsberg; identical to SEQ ID NO: 44914

SEQ ID NO: 171792 - DNA, 563 bp, Arabidopsis thaliana landsberg
  unsure (1)..(563): unsure at all n locations
cagctggatattttcaacatgtaatggaccagatcttattctttacacaaagagagaaacttttgcctgagctggccacaccataatcacaagtcactaatnnnnnnnnnnnnnnnnnnnnnnnnnnnnnnnnnnnnnnnnnnnnnnnnnnnnnnnnnnntgatcacctaaagaacatgtttttggaacaagcaagttcgacagaagaaacaatagaagtttatcagccaagtggagaaaagattcaacaaacagacaagaagcttcacgaccaaaaggcactcgccgagatctatctccttagcctaaccgatgaacttgtgacaagcacaaggtctacatttggatatgtagctcaaggtcttggagggttaaagccatggatactctacgagccaagggacaagaaaactccaaacccaccatgtgttagggccatgtcgatggagccttgttttcttagagctccgctccatggttgtcaagctaagacaatcaaaatccctccttttgttaggatctgtgaagattggaaaacagggctgaagctagttgatgtttca

SEQ ID NO: 171793 - DNA, 491 bp, Arabidopsis thaliana landsberg
aagattacagagagctcgtgaaaataagagcaaacaagctttcaaagaagcactctcgttgtatggctgatggcaacgagtttcttgggttccacggtacaactctttcttgcactctcggtttcagtaacagctcttcaaacctctgtttctcggatcactgtgaagtttgtcatattctaagacatggtttcagtcctaaaacaagaccagatgggataaaaggagttctcacagcatcaactagctctacagctcttgaatctatcgaaaccgatcaaggaagaaatagaggttcattgatagctgttgtgctatgtagagtgattgcagggagggttcataaacctatgcagacgtttgaaaattctttagggttttctgagtttgattcactagctttgaaagttggacaaaattcaagaattgaagagctttacctgttgagtacaaaagctttgttaccttgctttgtgataatcttcaagcca

SEQ ID NO: 171794 - DNA, 586 bp, Arabidopsis thaliana landsberg; identical to SEQ ID NO: 6361

SEQ ID NO: 171795 - DNA, 514 bp, Arabidopsis thaliana landsberg; identical to SEQ ID NO: 5419
  unsure (1)..(514): unsure at all n locations

SEQ ID NO: 171796 - DNA, 584 bp, Arabidopsis thaliana landsberg
atgaaagcaataatgaacgttgactttcaaaactgtttgatcttaatcctcctctgcctcctttccttcctctgttactctttcttctttcaaattattcatgaatttgccaccgagccctccctctctaccgatcattggccatcttcatcatctcctctctctttttatgcacagatctttgcaaaaactctcctccaagtatggacctctcctctatcttcacgtcttcaatgttcccatactccttgtctcgtctccctcaatagcctatgagatctttaggacacaagacgtaaacgtttcctcgcgcgactttcctacgaacgaagggtctctcctcttcggatcctttggcttcggcaccgcaccgtacggagaatactggaagttcatgaagaagctcattgtcaccaagttcctcgggcctcaagcactcgagaggtcacaaaaagtccgtgcagaggagttaaaacgattttacttaaacctattagataaggcggtgaagaaaaagagcgttgagattgctgaggaagctatgaagctggtcaacaataccgtttgccagatgattatggggg

SEQ ID NO: 171797 - DNA, 1399 bp, Arabidopsis thaliana landsberg; identical to SEQ ID NO: 29348

SEQ ID NO: 171798 - DNA, 849 bp, Arabidopsis thaliana landsberg
  unsure (1)..(849): unsure at all n locations
acatgatcagagttcttttggttatatggtcttgaggttggtctctgctaataagttcatagcagctgaagatctgattgttagaatgaagattgagaattgtgttgttagtgaagatatattgctttcgatatgtcgagggtacggtcgggttcataggccgtttgattcgttaaggttttttcacaaaatgaaggattttgattgtgatcctagccagaaggcttatgtcactgttcttgctattctcgtggaagagaatcagttaaatttggcatttaagttttacaagaatatgagagagattggtttgcctcctactgtggcatctctcaatgttttgattaaagctctttgcagaaatgacggaactgtggatgctggtcttaagatttttcttgaaatgcctnnnnnnnnnnnnnnnnnnnnnnnnnnnnnntatggaaccttgattagtggtttgtgtaggttcggaaggatagatgaggcgaagaagttgtttacggagatggttgagaaagactgtgcaccaactgttgttacctatacttctctgattaacggtttgtgtggatcgaaaaatgttgatgaagctatgagatatctagaagagatgaaaagtaaaggcattgagccgaatgttttcacatacagttctttgatggacggtctttgcaaagatgggcgttctttgcaagccatggaactatttgagatgatgatggctagaggctgcaggccaaacatggtaacgtataccactttgatcactggtctctgtaaggagcaccaagactccaagaagccgttgaacttcttgatagaatgaatcttcagggtttggtacct

SEQ ID NO: 171799 - DNA, 631 bp, Arabidopsis thaliana landsberg
ttaacaaatattcttattcgtcatctcgttgttcgctctgttatcaggtaaagtattttctcatttcttatcttacaccgcaaaactttgaaaacgttttcttttaaagcaaaagaatgaaagtgttctatatgttttgacagtgctggtgtatcaatcggaagcgaaatgtctggtggaatatctaatgtgacgatcgagaaccttctgatctggaactcacgccgtggaatcagaattaaaacggctccaggacgaggcggttacatcagaaacataacctacaaaaacctaacactagacaatgttcgggttgggatagtgatcaaaacggattacaacgagcatgcggacgataattatgatcggaaagcatacccgatactttcgggattcagtttcgcgggaatccacggacaaggagtgcgagtgccggtccggatccatggaagcgaacagattccggtaaggaatgtgacgtttcgggacatgtccgttgggttaacgtacaagaagaaacatatattccaatgttcgttcgtgaaaggacgagtgttcggttcgatatttcctcgaccttgcgagaattttgatgtttacgacgaggaaggtcgtctggttaagcctgcag

SEQ ID NO: 171800 - DNA, 2207 bp, Arabidopsis thaliana landsberg; identical to SEQ ID NO: 24068

SEQ ID NO: 171801 - DNA, 504 bp, Arabidopsis thaliana landsberg
  unsure (1)..(504): unsure at all n locations
tattcagctttacctcgaccagcttgaccacaaatggaccgtccagtacccgaaattcgactacgttgttatctctgnnnnnnnnnnnnnnnnnnnnnnnnnnnnnnnnnnnnnnnnnnnnnnnnnnnnnnnnnnnnnnnnnnnnnnnnnnnnnnnnnnnnnnnnnnnnnnnnnnnnnnattactcctaccgcaaaaccctaaaccttctccgtgacttcgtcctaaactcaaaccacaaaccgctggttctgtttcgaacaacaacgcctgaccatttcgaaaacggagagtggaacactggtgggtattgcaacagaacgatgccgtttaaagaaggccaagcaaatatgaaaactgtagatgatgtgatgcgtgatgttgagcttgaggtgtttcagaaatttgggaaaggttttggcttaggttccaacatcaggctattagacaagactggaatgtctcttctccgtccagacgggcatcggggaccggcaggacatcc

SEQ ID NO: 171802 - DNA, 397 bp, Arabidopsis thaliana landsberg; identical to SEQ ID NO: 45914

SEQ ID NO: 171803 - DNA, 313 bp, Arabidopsis thaliana landsberg
atgtctcaacaccaaaaaatctatccggtccaagatccagaagccgcaacagcgcgtccaacagctcctttggttcctcgtggttcctctagatcagaacatggagacccatccaaagtccctttgaaccaaaggccacaacggttcgtgccgttggctcctccaaagaagagaagaagttgttgttgcagatgcttttgctacacgttctgctttcttttgcttcttgtcgttgcagtaggcgcatccattggtatactataccttgtctttaaaccgaagctaccggattactctattgaccggttacagc

SEQ ID NO: 171804 - DNA, 469 bp, Arabidopsis thaliana landsberg; identical to SEQ ID NO: 13976

SEQ ID NO: 171805 - DNA, 537 bp, Arabidopsis thaliana landsberg; identical to SEQ ID NO: 56093

SEQ ID NO: 171806 - DNA, 929 bp, Arabidopsis thaliana landsberg
gagatgtatctcgggagtgttcttcaggagatcggaagatttcttcctggtcatcagtttgcttctgttagtctcacatcttgtgtagttgatgctaaagttgtgattttgagttaaagttcaaattttaggcttacattggctttgatctttctctcaaggaagaaaataagaaagttgtgaaatgggtttaggtaagagctgggatggagatggctatgattgatgctgcagctaagagcgtaggagtacctttgtggaaactatttggtggagcttcaagtaccattactaccgatataacagttcggttctaaccttagctcttcctggtacaattttcgattcatgttctgtatgtttgcaaacaaacagtgaagtaactatgagtattacttagattatatgtgtgaacactgcatgcgtagtttttgaagatggaattgtagaatgttaatggcttgaaagcactggaatttgagtatcactcaagtatgaaagtttgtgtgattttcaaagatgtgggtctaaaagatgtttgtggttttcagattccgatagttgctccccaggaagcatcaattttggctctacagtatagaaaacgaggttttgaaaccttgaagctcaaggtggggaagaatcttaagactgacataccagttctccaggctagacgtgcagtccacccaacgtgatccttcattttggatgccaatgagggttatcaaacagaggaagctgttaaagttctcgagacgctgcatggtaaacaggtttctgaattatttttggaattttctcagtaagggtattgagcgctagaggtttaaaaaaaggattggttttgcaaaactcccagcctgttcaaacttaagtagctggcgtttcttttctcggttaaaatctgacttgttgtgaattttttg

SEQ ID NO: 171807 - DNA, 287 bp, Arabidopsis thaliana landsberg
gctttgggctttaacttagaaacatggaatttctatcaactggctaattcaagtgagtagtagttcactgtaagttcaacttgattttgctttctcaattcttcttcctctctttaccttgttcgttcgttgcttatatggttattggtgcacttttcaaatttgatctgatgcctgagactctctacctagcagtgaacttgttagattgctaatagaaaggaaatgtgtagttgatcggtctcactgcatttttgctcgcacctaagtaggaggactatggcatc

SEQ ID NO: 171808 - DNA, 180 bp, Arabidopsis thaliana landsberg
gaacaaaatcagtaagaatttgagaaagagatgattgagcgaattaagaagatggagaaagagatgattaagaagattaataaggtgaaggttattgggaagagtgtaggttcagctgtgaagactgtaggtcttagtattgtaattgtaagatcaattgtatggctttggggaggagtg

SEQ ID NO: 171809 - DNA, 964 bp, Arabidopsis thaliana landsberg
atggactagttcatcatttctccggaccctcccgcgtttctaggatcaactccgtcagtaggaccagaggcgatagtccaacaccggcgatgggcaacgggatcgatcgaagtccttttcaacaaacaaagtccgttgatgcggtttccgccggaaaataaaattccgacaaagattagcttatttttgggttctcatgtgtataaggtcaatccctgagctcgtttactgtctcttgcctgcttattgcctactcaacaactctgccttgtttcccaaggtgtctttctctctctctctctctctctctgagtatagtaacattagtttcattaaattaattagaggaaaaaattaatatttgcttatatattgtatgtggatttagggaccttgtctaggcataatagtcacacttgcggggatgcattgtctctacactctatggcaattcatgatccttgggttttcgataaaatcgtggtatgtctcccaatcactttggagaataatagccactagcagttggttatttagcatccaagatatcatactcaagcttcttggaatctcgaaaatcggttttatagtcgcgaaaaagaatatgcctgagactaggtcaggatatgaatctaaaccatctcaaggagacgatgatggtctaaaattagagttaggtaaatttgaatttgacagctcgtgtcatttcattcccggtacatttataatgttggtaaatcttgccgctctagctggttttttggttcgtctacgactttcaagttgtagtcatggaggaggtggttcggctttgacggaggcttgtggatgtatctcggtggttgtgttattccttccatttctaaagggtttgtttgagcatggaaaatatggcatcccattgtctactctttctaaagctgcgtttttaacagttttatttgttgttttctcggtgggaaaa

SEQ ID NO: 171810 - DNA, 263 bp, Arabidopsis thaliana landsberg
caacacattcttcatatgctgctctcgatggcgtcctttactgtaaggtccacttcagccagcttttccttgagaagggtaatgacaatcatgtcctccaagccgcggctaaccaccgtcgctcgacggctgaggaagacaaaaccgaacccaaagaagatgaagcaaaccctacagaagaagaaacttctgatgcagcagctgaagaacatgaatcctaagaaatatccgggagttccttttgtgaaatatatataatcata

SEQ ID NO: 171811 - DNA, 642 bp, Arabidopsis thaliana landsberg
atcaccgtattattcgttcaaaaggtgagacacatcttttatgttgccacatggtttcttaattttttcttgaaatatttgtttgtcgaatcaagattttatattccgtgtgatgttgctatatgcgatctcaatcttgactttggctctaattattggtgatggattttccagtttatgaagtatagtaatcaaaccgaacaaacatctatttcgaatccgtttggtacaagtttgtttctataacagtaaatttaaacacgtaatatttttactcgttgacgtttgcaaaaattaaatcctttatttttaccattcataaaaattattaaagtttatgttgtcatgttttccctatagaagttgactttttttttttgtctaaactctatagttgattggcgagttcgtggggacattctctatgatatttgccggctgctcagccatcgtggtaaatgagacgtacggtaaaccggtgacacttcccggtatagctttggtatggggactagtcgtaacggttatgatctactcaattggtcatgtctccggtgcacatttcaaccctgctgtttctattgcctttgcctcttctaagaagttcccttttaatcaggtgaaccaaagatatctacaatt

SEQ ID NO: 171812 - DNA, 701 bp, Arabidopsis thaliana landsberg
cgttgcatgacaagtgatggtattcttcctaacactgtaagctttgattgtcttatcaatgggtatggaaactcaggtgaagggttaaaagcgttctctgtatttgatgagatgaccaaagttggtcatcacccaacattcttcacatatggtagtctcctcaagggattatgcaaaggtgggcatttaagagaggcagagaagtttttgaaaagcctccatgctgttcctgcagctgttgatactgtaatgtacaacacactactcactgcaatgtgtaaatcagggaacttggccaaggctgtctcactttttggtgagatggtgcaacgaagcattctgcctgacagttatacatatactagtcttatttctggattgtgtaggaagggcaagactgttattgccatactctttgctaaggaagctgaagctcgaggtaatgtacttccgaacaaagtgatgtatacctgttttgtggatggtatgttcaaggctggccagtggaaagctggtatttattttcgggagcaaatggataaccttggccatacccctgatattgtcacaacaaatgcaatgatagacggttactcaaggatggggaaaatagagaagaccaatgacctacttcccgaaatggggaaccaaaatgggggtcctaatctgactacctacaatattctcttgcatggatattc

SEQ ID NO: 171813 - DNA, 603 bp, Arabidopsis thaliana landsberg
aatacaatatcttcttctgtgactgtaataagattgatatggagacgatttcattgtaatagtaaccatggagctatgatcagaacttcgtctgtgttaaactccaccaagtacttcaactctcacattaaccatttatcatctcatggcgatcacaagcaagttctctcaacattctcttccatgctcgccaataaactcttacctgatacttttactttccctagtcttctcaaagcttgtgcttctcttcagcgcctctcttttggtctctcgattcaccagcaggttctcgttaatgggttctcttcagattcctacatatcatcttcattggtcaatctttatgcgaaatttggactcttggctcatgctcggaaagtgttcgacgaaatgcgtgagagagatgtggtgcactggactgcgatgattgggtgttactcacgcgctggaattgttggagaagcttgttcgttggtgaaccagatgagatttcaggggattaaaccgagtccggttacgttgttgaagatgttgtgtggggttttagagattacacagttaaagtgtttacatgccattgcggtgatttatgggtttgag

SEQ ID NO: 171814 - DNA, 641 bp, Arabidopsis thaliana landsberg
gaggatgcagaaggtactgaggatgagatcggtgagacagatgaggagaagtatcattcaagcatgtattatttcatttagcacgtacctctagcgagggagagtaagagcttgagtgaagctcatagaaacaatagcaagttgcagaagtggtgcaagaagcaagacaagttcatcatcaaatgcctaaagactatcaagtctctgaaggccatgctaagctactccacttccactacaactattctgcagggacagcctcctcaggacatgccatcgaggagatttgacgagcttgagccgagtcaacacaggcctgagcctagtgagcagagggtctcacatttcccagctagacattcatcattcgagtctcgggagcacatgaagaagaagaaggctatgctcgttcgttctagcagcagatcacgccttatcaactcgaggatatcactcgaccgccgtgctggccgcaacagaagaagagaggtcgagtatccttgtggcggtgctggccacagaagaggcgatgaggtcaagtatcctcagggagttggggctaagacagaacagggcgacactttcattgcttgggagcaatcacaggcagccattgatgacaactctgttcatacttcaac

SEQ ID NO: 171815 - DNA, 280 bp, Arabidopsis thaliana landsberg
tccgaagagaagatggagaaggaaagtaagaaactcgcttccagagagaaggtggaggtggttaagcgtttgtttagacttggagatattaaaataaatcgcgtggtttggaaaagcagtgtaataaatattctttctatctactgtacctaactgtcgtttgtcaaatcgcttcctaatatttgagctaataactaacgtgtcttacttaggacatggtaattcgccgaggtcatacgttcgttttcgccagagatccttttttttttttttttttttc

SEQ ID NO: 171816 - DNA, 407 bp, Arabidopsis thaliana landsberg
agcccttcaagagccagtacgccccgatcgtcgtggtgtccgattgcgctttccccgccgacggcacagggatgacggtgcaggggggcgagaaggacgccttcggccacgtccggctgggcggcatcggtgaccggctcgccgcggagatcgagcagcgcaccggcaaggagtcgcgcgcggtcgtgctcgggcacgtgcagcgcggcggtacgccgagcgcgttcgaccgctggctcgccacccggttcggcctgcacgcggtcggcgccgtccacgacggcgacttcggcacgatggtcgcgctgcggggcaccgacatcgttcgggtcccgctcgccgaggccaccggcgagctcaaggtggtcagccccgagcagtacgccgaggccgaggtcttcttcggc

SEQ ID NO: 171817 - DNA, 1121 bp, Arabidopsis thaliana landsberg
ggcacagccttgggtactatcttggctgagatagggcgtggtatgtgcagatcaacttattcgcgggcagttaataccatccggttcaagtcaaacattaatactttgaaggatgctctcaatggccttatggaagttcataacaaagtgaagaaagacctcaaaatcttggaaatcaaaggggaatccttgcctgtgcaactgaagagatggctaagagatgtggaggagattgtctctgaagcaaattcaatgcaggaaaggcgtgtttcatgtgctccattcatgaaatgcaggctgagcaaaaaacttgtggtaattcttgggaaagtcaagaggcttgagaagcaaggtgtagagattctcgacatgttctctgtggaaggtaaatctgaactagttgagaaaatccttggaccctcaattcctgatcaaacaatagtctcagagatgttagccaaagttctaagctgtttaaagagcgataaggttcaaaagatcggtgtatggggtatgggtggagttgggaagacaacactagtcagagaactgaacaataagctatggaaagaagctgctacgcagccttttggtatggtgatatgggctacagtttccaaagagtttgaagtgggaagggtccagaagcaaatcgccgagaggttggaaatggaaatcaaattaggcgaaaacgaggagaatctggcgagaaggatttatggaaggcttgagaaagtaagtagctttcttctcattcttgatgatgtctggaaacccattgatttagaccagttggggattccactaacagatggacacaactgttcaaagattgtcttgacttctagattcttagaggtttgccagagcataaaaacggatattgacttcagagtggattgcttatgtgaagaagaagcttgggaattgttttgccaaaacgctggagaagttaccagatcagatcgtgttagacccattgcaaaaaaagtttctcgggagtgtggtggattgcctttggctatcatcacggttggaatggctatgcgtgggaagaagatggtcaagctatggaaacatgcccttaaggaactcaggagttcggttccttatgcaagagt

SEQ ID NO: 171818 - DNA, 301 bp, Arabidopsis thaliana landsberg
aagatggattggataagcctgtcgaggaaataacatctagttatggattctaggacagccacattccgagatggaaagatagagttggtgaattcagaattccaaattttgagattgttttgaagcttcaagagttttcagtgacatggatcttaatgttttgattgagatcgatgaagaaagtgcagaagctgcggctgctactgctctagcttgcacagttgcacttgtgtggctgcagcgctattatgccgcctcctcccatagattttgtggcagattatccatttcttttcttgat

SEQ ID NO: 171819 - DNA, 3556 bp, Arabidopsis thaliana landsberg
tccactgcccacttggccaatcttccggactgacttggagtatgaagaattgttcgaagtggctggttggttaacacttcgattggatgagactggaaatatggacgcatcttccgggtagaggttaccaccgcaagtgcgagtttttctatcattgtgtacttggtctctggatctgtcatagacttgcttatgtagtaaatcggtttttattcgccacgatccccctgtataaagactccgctaattgcatggtttgacaccgaaacataaaaatagagcttttcatccacttcgggtttggacaatacaggtggactggttaggtacgccttaagctgtccaaatgcttcttcacatttctcatcccaaataaattctttgtttctttttagaatttgataaaaaggcaaagatttatcagttgatcttgacataaaacggttcaaagctgcaatccggccagttaaccgctgcacttctttgaagtttcttgaacatgacatgttaagaaaggcattgatttggttcggatgggcttcaattttccttttggtcacaatacaaccaaggaactccccggatgggactcccaacgtgcacttcaccggctttagcttcatttggtattgattgagaatctcaaaacattcttctaaatgcttaacggagtcctctttctttaacgacttgactgacatatcatctatgtaaactgccatcgtctttccaagatgctcgtggaacattttgttgaccaatcggtggtaagtagctcctgcattttttaaaccaaaaagcattactttataacagtaaatacctctatccgtgataaacgatgtttaatcctgatcttcgggattcatcattatttgattataacccgagaaggcgtcaataaaagttagtaactcgttcccagcggtcgattccacaagactctatatgcagaagcggaaaactatccttctggcaggctttattgaggtctgtgaagtcgatgcacactctgtcttttccattcttcttcttgaccacaacggtgtttgctacccaatctgggtatggcacctcccttatagaccctatctttaaaagtttatctacttcgtcatttaccgcctttgctcgttccactccaagttttcttctttttggttttacaggcttgaatctctgatccacgtttagcttgtggcagattatgcttggatcaatgccaggcatatccgctgctgaccacgcaaacgatgctttatttttcttcaaaagttctattatggcttcttttaatttgtcggttgatatggttcaaattacctagaactactctctcaaataagagatcaattgcagtattttaggatcgaattcaaggagttcttttgttcaaacagtgatttaaatgtctagattaagctagcagggtatgagtgaaatagtaagaaaacaaaataagaaaatagcagattgattgtgttgtaaacgatttaataaaagagctaggaacatggtcttctcaggaaactattggttagtagatctaattaaagctaggttgttatcgaaccattcttaaactcaaactctaattatggaagaaccagtgggcgtgccgcgaaactctctatatctatagctaatagtgaccggagaagccgagagactatcaacctaaatatgcattcttaacgagttcaattgttcatcttagtaaataggccgattcttattacacacctatagaccaaactgatcaaataatagattcaactacaaatacgtatggcgggcatatctattgtctggattcaagatctagttaattattctagatataacattaggtataattaaagatgaagaattctacagataacttagcaaaatgggcaatctactaaaccatatgaatccctaatgagaaaccctattcctaacaagcagattactcagacatattgaatgaaacaaacaacataattgagataaaaaagcataaacacaatgaatagagaaggggaaagaagggatctcttcactgtatatagatctgaatgaaactctgaataacaatgaatgaatagcttatgtcttttacaatagggtttgcaaagaagttgataaaagacttgataaatgaaacttaggtctaaaaacaatatatatagaccctaaaaacgtccagggactaataatgcaaatagggaaatcttctggggcaaacttgagcttctggaaactcgaaagtgtgtagggtttttgctgggccgaaactagtgtcgatcgacaccaagagtgtgtcggtcgacactcgttgctgattcttgaaccaaagtcgtccttagcttccttttctttagtttttgctacaaaatgtctctttatctccattggttttccactacatagaatacatgaaaagagactaaaaagactcgagaaataacataaagactcaaattcctatacctaaaacatagataagatcagtgaaaatagggatatatcaattttatccaagaaattggaagatccaggatcttttactctaccatgctccattaggtaattgacttacagcaattgtctatgtgatctaggaccctcagtgagcataatgccactctctgtggcaaggaagctgggattcgttcagtacaagccttgtgatctaaccttgattcttgctgataggacttcaaggagaccttttggtatgtgagaggatgtgccagtaatgattagtggagtagaggtccatactgattttgttgtgcttgagatggatgaagaatctaaggatcctcttatctcggaaagacctttcttggcttcagttggagcagtcatagatgttaagcaaggaaaaattaatcttaatttgggggacgatttcacaatgaagtttgacatcagggacactatgaaaaagccaacaataaaaggacaaaccttcttagttgaagaaatgggtcagctagctaataaactctagaggagcttattgacaaagatcaccttcaaactgctttgacaaaaagtagtgaagctggatttctctccagtttgaccttaagttatgagatgtcattagactcacacaacaaagtacaaggatcagagatctttaaagctgtcattgcgttagaaatagaggatgttccattgaacatgaaaggctcaattgatactcgaccaaagtgctcaaccaaacagttaaagtcaagtatgagggcattaaatgattggttagaactcaaggagaggtctaaatggcacgacagaggtataagagagctaacacacactgtgagagagatgaaggattaaatcaaagagctccatgggaaagccaaccaagcaccactcgacatcaaggacgtcccaaatgatcaaacaactcctatggttagaaaagaaggatttgcattctcattagaacagtctagaaaagacgactatccacatcatgaaaccgaagcttaccaagaaagggccagaaagtaaacaattacaaacctatcacgagagcatgttgaatttagtgttg

SEQ ID NO: 171820 - DNA, 928 bp, Arabidopsis thaliana landsberg
gttttccaattccaacaaaatgatgtttatctgtttaataaattaaaaatgtatacacattttagttgaaacatcgccacgcaatcaggagatccagatgttctgatggtgtctgtatttcctcaccatgttataaacccgaccatagaatctttaagaacattgcagttgggttcatcatcaacgttcaagatccctactccttgggagaaggataacgtactgtacttagtttcacatagtagttgtgacggtctcgtttgtctttacaatcacgacaaatccggttatgtggtcaacccgaccactagatggtatcggcctcttcctctttgcgattatcaaaaactcatgatcgacttacgagatggttactacaagcttaaacgcaaattctttatgcttggattcggtaaagacaaattcaggggcacatacaagcccgtttggttatacaactctgcagaaataggcctaaaaaacgctactacatgcgaagttttcgactttagtaccaacgcttggaggtatgtcactcccgctgctccttatcggattgctgcttaccccgcacctgtgtatctagatgggtcgctttattggttcaccgagtgcaaagaaaccaaagttttacctttcaatcttcacaccgaaacttttcaagtcgtctgtaaagctccctttgccaatgtagatccttacaaaatcgtcttttacaaccttgacaaccgcttgtgcgtatccgagatgaagtggccgaaccaagtgatatggtcgtttaactcaggcaacaaaacatgggacaaattgttttccatagttttggatttaaactttgttactggaatatgcgcggtcttgccactagcactttttgatgggaagaagaagaagaagaagaagaagaagttgatgttttgtggtcgtg

SEQ ID NO: 171821 - DNA, 727 bp, Arabidopsis thaliana landsberg
atgtcccgaccaatctcgcttgaaggtaaaaacataactcatgttgtgtctgatgatctctttatatcattatgagtttcaagttttaataattttctcattctgaacagaaatggtgagcctgttcaaagtacgtcacgcaacagctcacatgttcaagatagaccattttcttttactcagatagcatggaatcaccacggtcgaatcctctgttttcgatctcgctggtcacaaacggtgaagctttttttaatcttgttattatgcatgcttattgacatacaaaagaaaacaaagatgttgttgatcctcctgttaacaacatagttggtagcattgcgtaacagtacactctctgtgcacccagatgggcatacaaatgctggggggactcattatgtctcccgctacttaatgagtcaggctccggtatatgatacgcttacatatgagcttcttgccgtcagtccacatgagcgctcattgttctcccatggtttataacactttgttctatgtctgtagtgtgatctttgtaacatgccacaatatgtgtgtatataggttatgtgaggtggccatatatgttaatgagcaggcagacgtaaatagcacgtcactacatattcggcaatatggtcatagagagtacagaaatattgttgatcttaacaaaaatggcttcttatttgacctgatgcatgtatgacaggtgtcaaggccc

SEQ ID NO: 171822 - DNA, 672 bp, Arabidopsis thaliana landsberg
taaataaatgagaatttacacaaattaacacccctaattagccattagtaattaatattcccatctacacaagcaataaaagaagttaatattcaacacaccaaaataaaataaaatagaagttattcattttttagtatttatatttccaagatatatctaatcattttgtttttgccggtttgcagggttaggcttgttaatcttcattggtggagtatattggttataaaatttagtagaaaacaaatgaggctaaaccaaaagagaaagttcttcaaacgtactgggggtttattgttgcaacaacaattgacttcaacagaaggcaatgtcgagaagacaagagtgttcagctcgagtgagttagagaaagccactgaaaacttcagcctaaatagaatacttggtcagggtggtcaaggtactgtgtacaaagaaatgcttgtcgatggtagaattgtagcagtaaagaaatccaaagttgtggacgcagacaagctagaagagttcatcaatgaggttgtaattctttcgcagattaaccatagaaacatcgtgaaaatcttaggttgttgccttaatgagacaaatgtccctcttctcgtctacgattttattcccaatggcaaccttttcgagcatcttcacgataagctgatgatttcacga

SEQ ID NO: 171823 - DNA, 174 bp, Arabidopsis thaliana landsberg
  unsure (1)..(174): unsure at all n locations
ggaacagatcactggtggtgtgtcaagacaagtttttgtgctataaagctccagaagataaggcctggggcgggtaacgagatggagagnnnnnnnnnnnnnnnnnnnnnnnnnnatctcaatacattaccacatattgtgcagagaatgaagacagcatttaacataaccaac

SEQ ID NO: 171824 - DNA, 1049 bp, Arabidopsis thaliana landsberg; identical to SEQ ID NO: 11057

SEQ ID NO: 171825 - DNA, 900 bp, Arabidopsis thaliana landsberg
gaagtgcgatcctagctccgatgcaatgaacaagaagctgaagctgctgttcaactgcttagatttttcaagaagaggtcattaatcattcttaagctatctattcacacatgttttagagagttatatgatattattttactcacttgctatcttgatgcttacaggtacccctcagaatttgttgctggaaggattggcattataaccccttacaagcgtcagcttgccgttttgcgttcgcgtttcactggtgcatttggggctcaagtaacagcagatatggaaatgaatactgtggatggctttcaaggcaaagaagttgacatattagtattatccactgtaagagctacacattcggctcctgatggggtcaatcaaagtcggattggttttgttgcagatgttagacgcatgaatgttgctctcactagagccaaactctccctttgggttttgggtaacacacgaaccttgcaaagagaccataactggggtgctcttgtgaaagatgcaaaagaaagagaagtcatcataccagttaagcgaccgtacaactacatgtttggtgagaatgtgatggaacaaaaccattctgagaatcttccaaagaattttcctaagcctgaaaaacagcattcacgccgcaaagaacagagagcagagacatcttctgatagaaaactgaggaaaactgatggagatgttgtgcctatctcatcaaaaggatcagagagtaagcacaccagacgaaatgcgaaagaagaagcttcatctcaaagggaaaaactagttgcaagctgtgagaaagtaacatccgaagagactctgagacggagccatgaaaagaaagaaaaaatgaaaggcagagagaaaagcagtatccagagattcaga

SEQ ID NO: 171826 - DNA, 636 bp, Arabidopsis thaliana landsberg
actcaacatacgttggggatgattcagaccttgttgactcacatgattcaacaacagcaacaccaacaacagatgcacgaaagccagcgtgccgaatctccttcggctaagttcttaaagttggttatgatgatgaaggatctaggtgttcggaagattaaaggagagcagaatactgtcttagcatataagtggttgaggaacctggaaatgaattttgaaacttcaagatgcccaaaagactttaagggccacatagcggtaaactttctagctgaggatggtcgagcttggtgggatagtgttgtttcacgataccgcgaccagcctatcacatgggaaatgtttaagaaggagtttgagtccaagtattttctaccagaggcacgtgatcgtctggagttgcagtttatgagtttggaacaagcgcaaaagagtgtgtgggcgtaggagcgaatttttacaagactttggagatatttgtacaacagaagggatgatgaaggtatgatggtacaaaggctgtgacttataccgacgtgagtaaattgactgaaagggtcatgaatgttgaagaaggaattgagttaaaagaaggagagaagttacaggagaacgaaaagtatggtgttttag

SEQ ID NO: 171827 - DNA, 242 bp, Arabidopsis thaliana landsberg
aaagtaatccttgtcaggacaagaatgtgacgacgattcttaggcttgcccatcatgcatcggtgtacacgatctggaaagaacgaaatgctcgacttcacgcttcggcttcaagacctgcagctgctctgattttggagattaagtcagttattcggtgtcacttggatccgctttcaagagctcaaagattaggtcctaatggagttttcttcctcgccacttggtttggtctctttgat

SEQ ID NO: 171828 - DNA, 1928 bp, Arabidopsis thaliana landsberg
atgacgccgtcggcggcttctccgagccgccggaggggaagtctgtcaccgggaaatggtttggtgtctcccgtactttcaggttctcagggcgatgagtttccagttctgatgatgaaggtgaagggagtgattccagagagttctttggaggaaataaggaaaatgaggtcagtcaatcaagaggatcgaaatcaggaagcttcgtcttctgttcaaactgttggggtgcagaaggcaaagagatcttttctccaagcagcgcaaaagcgtgttttttctcagcaaaagtttgtagtttcagaagtggatggatgtgaaaaagttattgttccgaaagaggtgttcatcggagcaaaactgatttggtaggatttcgtgattgggaaatttttaaacgcaaagtcacctcatgtggggaagatccacatgatcgtcaacaaaatatggagattgggagaccgctcttctctaattgacgtttttgaggttaacgaatctacggtgaaatttcgcattcgaaatgaaggaatgagacacagaattttaaacagaggaatatggaatataatggatattcccatgatagtctctaaatggactccatacgcaaaggaagctcagcctgcgatgaaatccatacctctatggatcactttaactaatgtaccaccaactatgtttactgacaagggactggaatttcttactagtgtagttggtaaaccgattaggctgcaccctaaaacagaggcgtgtgttagttttgatgaagctcagattctagttgaagcggatttgactaaagaactaccaaaggaatttgttcttacgggtgaggaggagggagaactcgattctattgtcaagtactattttccatggcttcccccgcgatgcagccaatgtaagaaatggggtcatttacacacctcttgcatctctgttactataaataaggatttggagtcccaaaaaccagagtcaatacctgaagcttcaaaaattgctatcgactctactgagaaagaaactgtttctgatttagtcatagtttcagtggttaaggacacagacgttgttgagcatcaggaagtcgtaaaggaacagactgttgacacggctgggggttggagctctcctatcacaggccgtacaagtccaattaacaatcaaaaacgtttacaatatggtgaggtgtccattttgtctaatgcttattctgttctggcaacagaagatgatggtgttgaaaaaacagaggaagagaaaacagaggatgtaaggcctgtatcagaagctgcggattcagggcggattcaggggacctttcggatgagaccattcgggctattgggtttacaggaaaaactcgtccaccaaggaaggagattccaccgcgtcaatccttgccaagagggtccaaaacagcccataagactgtatctcaaccttctgcgcattcgactagagacccctctagagatcagagtaagcaggctctctccaaacatcataactgtcaagttttttctgaatgttcgaggactaaacaaaacttcaaaacattccgttattaagaagtgggttgaagagagtaatttccagtatggttgtttattggaaaccagagtgagagaaaagcattttcagattttaagtcgccagttgttctcgaactggtctgttttgccaaactatggacacaatccaaggggacggatatgggttctgtggaagaatgatgtgagattgacccctttttttaagagtggtcagttaatcacatgttcagttaaattggcaacccaaggagaagagtttttttgttcttttgtgtacgcttccaactttgtggagcatagaaaaggtttatggcaagaattaaaggatccctataactccccgattatcaacacaaagccgtg

SEQ ID NO: 171829 - DNA, 825 bp, Arabidopsis thaliana landsberg; identical to SEQ ID NO: 43045

SEQ ID NO: 171830 - DNA, 844 bp, Arabidopsis thaliana landsberg
  unsure (1)..(844): unsure at all n locations
atggcgtctcatgctgttacaagcggacaaaaaccacacgtagtttgcatacctttcccggctcaaggccacatcaatccgatgctcaaagtggctaaactcctctatgccagaggcttccatgttaccttcgtcaacactaactacaaccataaccgtctcatccggtcacgtggtcccaactcccttgatgggcttccttcttttcggttcgagtccatccctgacggtctaccggaggaaaacaaggacgtcatgcaggatgtccctaccctttgtgagtccaccatgaaaaactgtctagctcctttcaaggagcttctccggcggatcaacaccacaaaggatgttcctccggtaagctgtattgtatctgacggttgtatgagctttactcttgatgctgcagaggagcttggagtcccggatgttcttttttggacaaccaagtgcttgtggcttcttggcttatctacactttnnnnnnnnnnnnnnnnnnnncttatgtccgctaaaaggtacgtattcttacattgattattgatttaaatgacgttatgatattaaatttaacgtaagaacccttaagacacctcgagcagggtgagtttttaatctgagatatatcgtttgtatattggataaaaaatatccatttagctaccatatttagcgaagccatagactatcctaatcgatccacccgcacgacgagaccggtcaagactcaagatggtcatgttgtaatatatactcaattttatacaattgttacattgtagcctaggtttttgagcattactaaatatatagtatcaagagaaatgtccatattttaatatat

SEQ ID NO: 171831 - DNA, 180 bp, Arabidopsis thaliana landsberg
  unsure (1)..(180): unsure at all n locations
cttgtgccgcgtttggttcttngttccctttttttggcgttttgcgggttcgtggcngcgttgctnccgttctttggggttatttccgcggtggtnggcgcgtttgggtttttcccnctcgntttcgtgctgccnntgcttctntgcnncgtggccttttngccnnccngncggngcttc

SEQ ID NO: 171832 - DNA, 371 bp, Arabidopsis thaliana landsberg
gagttgatttgttgccgagggtcagtgattccgtctatcgtcggatggaagctgaacgcaagcgtgtggccaatgatctacgtgccaccggtgcggccgaatcagaaaaaattcgcgctgacgctgaccgccagagggaagtgatactggccgaagcctacaaggatgcacaaactatcaaggggcagggtgatgccaaggccgcttcgatttataatgctgcttttggcaagaatccagagtttttctctttttaccgcagcctggacgcatacaagcaatcctttgcgtccaagtctgatgtcatggtgatcgaccctgcctcagatttcttccgcttcatgcgaagtgcggaaggaaaataaggcggg

SEQ ID NO: 171833 - DNA, 418 bp, Arabidopsis thaliana landsberg
atgacgacgaaagagaagaagaaatcatcagactctccacctccgacgtcgttttcttcgttaccggacgacatcgttctcaactgtttggctcgtgtctctagattccattatccaactctatccctagtctgcaagggtttccgatcactcctagactcccgtgagctccacgcaacacgatcttgcataggaaaaaccgagagtttcctctatgtctgcttagacctgcataggaattgctatccagactgtcctccacgatggttcatagtttccccgattaccaaacagaaactgaaacctatcccttcgattacttgtcaatcctcaaccgctggatcaatcggttcaaagatttacataatcggaggcttcgttgatggacatagtagcaggagattgatagtactcgatt

SEQ ID NO: 171834 - DNA, 335 bp, Arabidopsis thaliana landsberg
ttctatcagagaagtattatctggttgattttggctacccaaacaaaaaataatttctagctcctaatagatcgtcacgaaatcgagttgtgaaatatcatatgtctcaattctattctattccttttcttagaaacaaacatgaaatgtttaaccaatgtcacacatatttacagtttatctagagaacttttggagtttgaaaaaacaaattgaggattccttctgagtttccaagatataatgttcacgttcaaaaaagagtggtaatggttacagtgggattatataattttatcagaatttcaaacctctcaaatgcagattttgcagat

SEQ ID NO: 171835 - DNA, 372 bp, Arabidopsis thaliana landsberg
acaccaaagagaaagagggaaaactaactcagaagatcttgattattcgatgtaataaagttttgttttctggttgtgtagccgtaccttcatgagtctcgccatcttcatgctttaaagagagctagaggctccggtggacgtttcctcaatacaaagaagcttcaagaatcatcaaactcactgtgttcttctcaaatggcaaatggacaaaatttctctatgagccctcacggtggtggaagcggaatcgggtctagttcgatctcaccgagctccaattcaaactgtatcaacatgttccaaaacccgcagttcagattctcaggttatccgtcaacacaccatgcctcagctctcatgtcagggact

SEQ ID NO: 171836 - DNA, 474 bp, Arabidopsis thaliana landsberg
tggcaggaaagctagcaggaacacagatctcttctttctctatgtgtgaaggagttggaagaacacttaaaggaagagatctaagcaaagtgagaaatgctgtcttgtcaaaaactggtttcttggagtaagtaggataaaatatctcatcatcatcatcaccataattatcatccatgtgcatggaatatgaatcccataactcttgtttaacattatcatcatgaaaaactcaactttatggtatccacatcatcatcattatcaatgtcattgtcgtcatcatcatgtggggatcactataccaagagtctttttgttaagttttttttttctttattgttgttattatttttcaatgtgttatttagagtagataagtatcatagtgatgatgatgacttgtcagccccatgcatgggtcccgttttatgttcttctgttgtttttggtttctctttgaaggtttttgta

SEQ ID NO: 171837 - DNA, 716 bp, Arabidopsis thaliana landsberg
atattaaggatggaatacaggttgatcatattcttgcaaagcatatccgcgttcacgagcatcgacacactcctaaaagacctccagatcaaacactcagagtttgggaggatagccctctctggggctatggtgactgacatgttggcttttggtgtaacattttttaatgcaatctactacgaaaaattgtacggcttcatgcaaaccgtaggtttctgcctctttgtcgtcgttatgatatgcgttgtgcggccggctatgtattgggtgatcaagcagactccagaagggaggccggtcaaggatttctacctctactcgatttttgggattgctttcgcctgcttcactttttttaacaaggttattcatctttttggacccgcgggatcatttgttttcggcttgacggttccaaatggatatcctttaggtactactttgattcaaaagtttgagagctttaatcttggctctattttgccactctttggatcattaaccatgatgcaagtagatctcttacggttgttcaaagagagtggagatttaatacggatggagggtcaaatctatgaggtcatttcctttattcttttggtgaataccacaaaattcgttgttaccaccataaccgcgtatgcttttccaatgcccctgagagactcttttgcttagcacttgtaaaagtataaggggatcttgagctgcct

SEQ ID NO: 171838 - DNA, 285 bp, Arabidopsis thaliana landsberg
attttttcggccgcgaacgtcttcaaacggttcggcggcgtccgtgcggtcgagaacgtctcgctgaaggtgagtgccggatcgattcaggcgatcatcgggcccaacggcgcaggaaagtcgacgctgttcaacgcgctttcgggcttctaccggcccgacagcggcaaggtgacgttcaaggacgtcgatatcacgcatgcgtcggtccatcggcgcatcgcgatgggcatgggacgcacgtttcaaacctcgagcatctttccgaatctttccgtggcgaca

SEQ ID NO: 171839 - DNA, 414 bp, Arabidopsis thaliana landsberg
aatccgttcttgttatacgatgctgatcagcccggtcaaagccttgtaggagacgaggttcttactagttctaattaccatatttggctccctctaatgacattatttttaagagtcaagaacaagattggttttgttgatggaacgcttccaaaaccacctgccaataatcaaacatctgctatgtggtcttgttgtaatagcatggtgatgtcgtggattacgagttctgtatctgacgatatcagaaagagtataatctaccataacactgctcaagcaatgtggtcagcgcttaaagataggtaccacatgctttagaatttatcagatcaagacacagttatggaacttgaagcagcaagatatggatatcaatatatatttcacaaggttcattacattgtggaacga

SEQ ID NO: 171840 - DNA, 121 bp, Arabidopsis thaliana landsberg
atgcgtggtcaacgaactgtcttgagtacgattgatggtgtgattgtggaggctgtatacaaatgggttcctggttctcttggactagaattggatggaggaagctgtggatatttttcac

SEQ ID NO: 171841 - DNA, 358 bp, Arabidopsis thaliana landsberg
atggcgtcctcatccctttcccctgctactcaggtttcactcttgatcattcgaactgaaacaattgggtctctttgtcacaggaatttgggtttttgaaagtttggttttttatttggtggcagcttggttctagcagaagtgctttgatggccatgtcaagtgggttgtttgtgaagccaccgaagatgaatcatcaaatggttagaaaagagaagatcggagtcccaattgcttgtctagcgtggagtattccagccgacagagttccagatatggaaaagaggaagaccttgaatcttcttcctcttggggctcttttctacctactggctacatgcttgccccttacgctacc

SEQ ID NO: 171842 - DNA, 1106 bp, Arabidopsis thaliana landsberg
tgccagcgacctaaacccatattgcttgataccggtgaaatgaaacaaccatacgactgggcggtgagagcataatcttgtactgtgatggataaaaattgaatcccacttagctatttgtgatggaaaaactgtttcttaatccattttcagccgtcaatattaccagttcagatcctccgcattggccagctagtgattctctgcgtccctggaggtatatcgatctcccccagaaaacaaaattcgtttctggactgatgtagaacattactaatctccgttctctttggttctgcttgcaagaattcacaacaatggcagggagacgactacgtgatgctgtgaaaacagtacttaaagaaggcagcaatggaagagaattcagcgtggtaatagccgggctaaccaattcgtattcgcagtatattgccacatttgaggaataccaagttcagagatatgaggtcagaggcttagataagaaggaagagcttgtaggatctttcttgatttcctgctcttaaaccaactctgtttattctttccgtcagggtgcatcgactttgtatggacctcacacgctaagcggatacattcaagaattcaagaaactaacaaatgatcttctatctggtcaaaccactgacccgggtccccaaccacctgacttacttcacaagcaaataagcttactaacacctgtggttgcggatatgacaccaattggaactgcattcggagatgttacatcggatgttcctcggttatccaaattcaggaagggaactgacatagtgacggttcaattccggtcagctaacccgagaaacgatctgatgacggaaggaactttcgcgcttgttgagaggtggctcgaaggaagagagacatgggtacctgtttacgatgatgatgacttttgcctccggtttaagtggtcaagaccgttcaaactcagcacgcagagctcagcaactatcgaatggagaatccctgaaaccgcatcacctggcgtttataggatcactcactttggttcagctaaaacacctataagctccattcaccatttctctggttcatctagtgcctttgttgtatat

SEQ ID NO: 171843 - DNA, 927 bp, Arabidopsis thaliana landsberg
atggagaattcgttggttgattctggtgaaactatggagattgtcactacacaaaaaatcgaggaaacagtgaaggccatactcagagaatctgatatggaccaaatgacagagttcaagctccgacttgacgcttcggctaaactcggtttcgacttatcgggaaccaatcacaagaagctagtcagagatgttcttgaggtctttttgctatcgactcccggtgaagcactcgtaccggagacggtggctccggcgaagaatgagataggttctgttgctgctgctaccgttggtggtgaagatgagcgctttatttgtaaggttgcgactttgcctattgttctatgtttgattcactgtatacagtagagattgtgctcatcttgattttgagtttttcagtggtcactgtagaaattgttggtctttaactgtagttatcggagaagcaaaatgcgacggttcaaagatacagaggccaacctttcctatcgattggttctcagggacatggaaaggcttttagaggtaatttgaaacacaacttggtgtcttggtcttgactatgaagctataagtagtcatttttgttttagatatgctcctgttgatttcaattgtaagtgtttctgcttctcttatggaattatgcataacgtttctttcctctgctaatatcgacttcatgatgcaactttggtgctgaaaaagctttaatgtttcttctctatcaggagctcatttgtcaactaaccaatggtctgtagtcaagaagaattttgcagcgatagaggacggtattaagcagtgccaatcaaaactaaagtaagaatatgtaccttattttaagtctataaagattcatgttccctggcattgcttttagtgttttatggtcatataatcatcgtggcatagggcatt

SEQ ID NO: 171844 - DNA, 1223 bp, Arabidopsis thaliana landsberg
tgttagagtttatcagtatttttttttgctatgtgattttacaaaagttgattaagacaagtttggagttgaatctaatcatagaattatttacatagggtttcacaaaggtgaatggggatcggtgggagtctgcaaacgaagggttttttagagggcaagagcatctcctcaggatcataagtataaggaggggcgcgtactgatagtaatcaaatgcatcctcctcgaggttctgaacaacattctctagccaataaaagcatagaaaagggtaggtgcggtctagatggagagatggacagcctaaggcgagacaagcaagtgttgatgatggagctagtgagactaagacagcaacaacaaagcaccaaaatgtatctcacattgattgaagagaagctcaagaagaccgagtcaaaacaaaaacaaatgatgagcttccttgcccgcgcaatgcagaatccagattttattcagcagctagtagagcagaaggaaaagaggaaagagatcgaagaggcgatcagcaagaagagacaaagaccgatcgatcaaggaaaaagaaatgtggaagattatggtgatgaaagtggttatgggaatgatgttgcagcctcatcctcagcattgattggtatgagtcaggaatatacatatggaaacatgtctgaattcgagatgtccgagttggacaaacttgctatgcacattcaaggacttggagataattccagtgctagggaagaagtcttgaatgtggaaaaaggaaatgatgaggaagaagtagaagatcaacaacaagggtaccataaggagaacaatgagatttatggtgaaggtttttgggaagatttgttaaatgaaggtcaaaattttgattttgaaggagatcaagaaaatgttgatgtgttaattcagcaacttggttatttgggttctagttcacacactaattaagaagaaattgaaatgatgactactttaagcatttgaatcaacttgtttcctattagtaatttggctttgtttcaatcaagtgagtcgtggactaacttattgaatttgggggttaaatccgtttcttatttttggaaataaaattgctttttgtttaacccaacataaattcctatataatatatataaaaattattaaaacacatattcattatagacatatttgtatgattattagactgtgtaaatggtgatagaaaaga

SEQ ID NO: 171845 - DNA, 634 bp, Arabidopsis thaliana landsberg
catggaatcattggcaatgagtggtatgataaacggcgcataaggttgtgtattgcgtggccgatggtacatggtcaataagtaagacaggagtggggcttgtttctccattcaggctcttgtcaaccacgatcaccgatgaattgaaattagcacggcaaagcgtttcaaaagttttaggcattcaaataaaagaccgcggcgctgtactgccagcgggacacatgccgaatgctgcttattggtatgattacgttaatggccgtttaacgacgagcgcttactatatgcagacaatgcctgattgggttgagaaattcaacaagaaaaatcttcccgatcaatacctctcacaggagtggaaaaccttgcttccgatagatcagtatgtagaaagcggtcctgatgatagtccgtatgagagcaagctggctggtaaagacaaaccggtattcccttacaatctcaaagagcttagaaaacgaaatggtgattttggattgttgccgtttacgccatttgcaaatgactacctcgttgaatttacaaaggctgcaatagcgggagagaacatcgatgaggatgaatggactgattttatcgccctgtcattttcaacaccggacatttagga

SEQ ID NO: 171846 - DNA, 304 bp, Arabidopsis thaliana landsberg
gtatgttttgtagattcatgcatctttaagcctttttgtcagttactaacgcatccacaatttcggttttttgtgactttggactcgctaagattctaacttctgatgaccttacatcctctgtaagttctgtacaatgaaactaatttaaattttgtgacactgttattataagtcagtatgtttataggttgttggaactccaagctacatgtgtcctgagcttcttgctgacataccttacggatcaaagtcagacatttggtcgttgggtataacaacaatacattcttctttgatattt

SEQ ID NO: 171847 - DNA, 472 bp, Arabidopsis thaliana landsberg
gtcaatgcgtataaaaggttaggctttgatgtggaatatgtatgtacagtgtcaagaggtggccaaactctctgacacactcgagaagaagatattgaacaccattgaaacatttctaggcctagggttcagcacagatgagtttagcgtgttaattaagcgctttcctcagggcattggattatccgcggagatggttaaaaagaagactgagtttttggtaaagaagatgaattggccactaaaggctctggtttcaaaccctgcggtgcttggatacagcctacacaagaggactgtcccaaggggtaacgtagttcaagctctcatctccaagggattgatcggaagtgaactcccttcgatatcgcgtgtcttcgtatgtaccgatcaggtgttcttaaacaggtatgtcaagaggcatgaggacaagcagctgtagcctgagttgatggctatctatcgtgcttaa

SEQ ID NO: 171848 - DNA, 554 bp, Arabidopsis thaliana landsberg
atgtcatggtactggattccccctttctcctatttctgtttttttctcctgtctgtatcattgaagttagatcctctcttctatgttttggcctcaggttatgaacatgcttgggcctagcttatgggatttatggaatacttcagggcaagcgtgagtctccattacacatccttggggagctcttgtctctttttcaattagcgttgtttccatacatgagtatcctaagttaatttggattcttttggaattgtgacttgaaatgtggtgttactccctgttttaaaaaaaatacataagtccatactgagtaacattttgcttttaaaaaatcgacttccctaacaattcttctccccctttttgctttgcagaatgtcctcggaaatggtagcttgcattgcggttgaatcactttccatccttccaacgatgcatgcaaaagggtttgtagttgaactttacccctgttcccgtatttaattaggttgtcagaaaaatcttaagatatcctgtttgaagtcccggcacctctaagttcttatgttttt

SEQ ID NO: 171849 - DNA, 1018 bp, Arabidopsis thaliana landsberg
  unsure (1)..(1018): unsure at all n locations
atttgccattctgagagttttcagttacttcaagttaatttcgcaattagagttcaaatggttttattttatctctgttttaacagcttgagatcttaagcaaaattcgacatcctcacttagtcctcctactaggggcgtgtcccgaacgcggctgccttgtctacgagtacatggacaacggaagcttagatgaccggttgatgctagtcaacgacacaccaccgatcccttggtttgagcgtttcaggatcgctttagaagtcgcttcagcgcttgtattcctccacaaatccaagcctagaccaatcattcaccgtgacctcaaaccaggaaacatcttgcttgaccacaacttcgtnnnnnnnnnnnnnnnnnnnnnnnnnnnnnnnntggttaaccaagacgatgtttcatctagaactatcttcaagcaaaccagtcccgtgggcacgctctgttacattgaccctgagtatcagcgaaccgggattatctcacctaaatcggatgtgtactccctcggagttgtgattctgcagctaataaccgcgaaacccgccatagcgattactcatatggtggaagaagctatcggagacgatgctgaatttatggcaatcttggataagaaagctgggtcttggcccatcagtgatactcgtgagttagccgctttgggactgtgttgtacagaaatgagacgcagagacagaccggatcttaaagatcaaatcatcccggctttggaacggctcaggaaagtcgccgacaaagctcaaaacttgctttcgagaactccgtctggtcctccatctcatttcatttgcccacttttgaaggttcaaaataagccctaaaaccatgattagttacttgttacacaagaaaccttgtttcctcattgattttaacctaattatatttggtgttggcaacagggagtaatgaacgagccgtgcgtggctgcggatgggtacacgtacgatcgggaagctatagaggaatggctgagacg

SEQ ID NO: 171850 - DNA, 1535 bp, Arabidopsis thaliana landsberg
  unsure (1)..(1535): unsure at all n locations
attgatgaggacatctatgctttnatgagcgagagtcaccgcgcatgcccacgaagctactgaacaaactcgacgaggttacagtggaggagtatatcaaattctttgagatgaatgacttctggggaacgcggtatccgtgttatgagactttagcccagctggggttactggaggacgtgcaacatctgttcgagaagtgtcacctggagacactcatgtcttacccttaccctgcctataaggaggagacaatcgagtttctttccacgctgcaagtggagatgtatgcggcactcacagactttgagctggataccatggggttaggcttcttgacgttctcagtgaatgaacagtggtatcagctttcgatcaagaagttagaagaactgtttggtttccctagtggaaagggaactaaacccagatttgacagagaggagcttaaagatttgtgggccactatagggaacaatctaccgctaaactcggcgcggtctaagagcaaccaaatctggagtcgtgtgatccgctactttcagcgatcggttgccaacgtcttttactccagggagtctacaggcaccgtgtctaacacggacatggagatgatagattatgcgtttacagggattctgcgccggacgaaggggaagaatgtcttgagaggcgatctcaacaacgcaccaccagtaatgcctctgttgatctatctgtgtggagacagaaagtgggcgttgacgaacaggaagaagaaggtgagaggagcactatgcgtgggtggcgttgtgacgccaattctggaagcttgtggagtaccgctcaaggaaccagggttagcaccgaggatgatggacttggatcatttgcgcagatgtgagttcttggagtttgacatggctggcgactttcaccgctacaggttcgagcattcatcgattaaaatcgccaacattcttctcccctgcattgacgctactaggattctcgagggcaggaacattgacttcaagcctgcgcttgaagaactttatttcgaggagtttaagcgaagctcacaggaacaacagcaagctgcagaagtggtgcatgaaataggacaagttgctcgccaagtgcctcagggctatcaagtttatgaaaaacaagctcagctgctcctcttccactacagctattccgcagggacatctccctcaggacatgcctttgaggagatatgacgcgcccgagccaagtcggcgcaggcctgagcctagagagcaggagattccgcatgtccctgcgaggcattaatcattcgagcctcgtgaatctgggaggaagaggaggaccacactcactcgatctagcagtaggagcggacgacttctgaagtctcgtagtttatgcaaccgcggtgctggccgtagtagaaggagagaggtcgagtttcctcagagcggtgctggccgccacagagctgatgaggttgagtaccacctgctggaactgatacagaacaaggtggttcgtctatggcctgggagcaa

SEQ ID NO: 171851 - DNA, 591 bp, Arabidopsis thaliana landsberg; identical to SEQ ID NO: 3394
  unsure (1)..(591): unsure at all n locations

SEQ ID NO: 171852 - DNA, 488 bp, Arabidopsis thaliana landsberg
  unsure (1)..(488): unsure at all n locations
aagctatctgattttcccggagatttgctggaggagattctttctagggttccggtgacatcatcgagagcagtgcgatctacttgcataaagtggaacactttatctaaaaatgagagctttactaagaatcacattgctcaagcaaaagcagcggcagcaagggagtttatggtggtcatggtaatggattttcaggtttatttgatggacatcaatctccataaggtcgttgacgcatctataaacggtcaaggtaaggttattgggttagacgattacaatccccccaataaaccnagcgtctatcactgcgacagtttagtcttatgcatcccaaaagactgcgctaggctcgttgtttggaatccgtattggggccaaaccttatggttcaagcccactagtcttcgccattttccgcactggtatatgtatgctattggataccagatgcgaagaggaaactgagacgcgaaaacttcaag

SEQ ID NO: 171853 - DNA, 619 bp, Arabidopsis thaliana landsberg
tacctgctgcattgatacgtcagcagtcacaaacgaatgggcaatggctgaagcgatcaagctaccgttagtgatgcgtgaaattcaagaagaactcgataatgtcgtaggatcaaatcgaatggtcgacgaatcggatctagtccatttaaactatctacgttgtgtggtacgagagacgttccgaatgcattcagccggaccattctagatccctcacgaatccgtccgagcaacaacgatcaacggctactacatcccggcaaagacacgtgtcttcatcaatacacatggattgggccgaaacactaagatatgggacgacgtggaagacttcaggccagaacgacactggcccgttgaaggtagcggacgcgttgagataagtcatggaccggattttaagatattgccgtttagtgccggcaagaggaaatgtcccggagctccgttaggtgtgacgatggtgctaatggctttggctcggctcttccattgctttgaatggtcttcaccgggaaatattgatacggtggaagtttatggcatgactatgcctaaggctaaaccattacgggcaatcgctcaaccacgattggcagctcatttgtacacataa

SEQ ID NO: 171854 - DNA, 1062 bp, Arabidopsis thaliana landsberg
tcttccgatggcttctttattgtgaagaatatcccctatcggaaatccagtgactactatgactttgtggtcgtcgaagtagcgacggagcttgcatgcagttagaagtactgcttcgtacagtaccagccctttgacatcaccttgatccttgctgatagaacttcaaggagacctttcagcattctagagaacgtcccaataatgatagatggagttgagatacctacagattttgtcgtgcttgaaatggatgaagagggaaaggatcccctgatcctaggtaggccattcttagcttcagcttgagcagtcatagatgttaagcaaggaaaatttattcttaatatgggggaggatttcaaaatgaactatgaaatcagggacactataaagaagccaacaatagaagggcaaacccttcttagttgaagaaatgggtcagctagctaatgaactgctagaggagcttactaacaaagatcaccttcaaactcctgtgatcaaaagtagtgaagctggatttctctccagtgagaccttgagctatgagatgtcattagactcacacaacaaagtaccaggatcagagatctttaaaggtgtcattgcgttagaaagagaggatgttgcattgaacgaggaaggctcaattgatattcgactagagtgctcaaccaaacagctaaagtcaagcatgagggcatcaaatgattggctagaactcaaggagaggtctaaatggcacgacagagctataagagagctaacacacactgtgaaagagctgaaggatcaagtcaaggagctccatgggaaagccaaccaagcaccactcgacatcaaggaagtcccaaatgatgaagttattcctatggttagaaaagaaggatgtgaattcacattagaacggtctagaaaagacgactatccagatgatgaaaaaggagagtaaaagctcgagagtgcgatctagtggttttgggacaacatctttctcaacgacaatgtcataccactcgatcgcaacattgcaatggtgtgatcaagtggtcttctagt

SEQ ID NO: 171855 - DNA, 625 bp, Arabidopsis thaliana landsberg
agggctgacgaaaaaacggacccgataaccaacctaatacccgaaccaaaaaactgggttagagcgggttaaaattttaggaaatttccttattgggtagagttttagtaaacccgtggatatccgattggtccagaaattatccgttacccaaaaagagtatccaaaaacccaaacattaatttaatatcgaaaatattaattatatttaatcgtaatattatctaattatctaagattataattataaatctaaatatgtcaattaattttggacctaaatatacaaaacaactaaactattcaaaaattatttgttatgtttgtcaaaatttagtaaaatatattcaaatataattaaatttattaaaacttaacaaatttaaaagttttttttgtttggagacccgctatctacatacaaatttctcgtttctatttttttgggtatttttagggtctgaaactttttatccaaactgacccaaacccaactggatccgaccctaaccagaaccgaatatttagaattattctattgggtagtaaatcatatatccattaatcccaaacccgaacgggttctacccgaactcgaatgggttactcatatgcccaaccctat

SEQ ID NO: 171856 - DNA, 362 bp, Arabidopsis thaliana landsberg
ttttcttcatggatagggcacccccgacaagatatgctccggacaatgtttaaagggctgagagtgaagaagtggaggagatggattgggagaactacaatgtaagtaggttccattttgaggaacacaaaccactaccaagagtgagtaagagtctgagtgaagcgcacaagaatattggttcgatgagtgcttggagtaagtttcaagacaaaatgttggaaaaatgtggtaacgccatcgccgcaattcatgctgtactgagctgtttttcttcagacgccaccatgataagagaaaactgaccagaagaagtggttacaagaaggcacaaagtttcaccgtcaaggcagtctgcatat

SEQ ID NO: 171857 - DNA, 155 bp, Arabidopsis thaliana landsberg
aaatagagattgtcaagaagacaaagggacaacagcgtttcaatggaggcggtcacgaggcgtcggtgtttacgaatagggtctctttggtttcttcacttgatcggacggtgagaaatcctccatcctcaatcactcgatcaaacggaccagaa

SEQ ID NO: 171858 - DNA, 347 bp, Arabidopsis thaliana landsberg
  unsure (1)..(347): unsure at all n locations
gctggtcgcaaccatcgtcgtgctgccgctcggtgtcgtcgatgcatgggacggatctgctgagcggtccggcccgcnggatgggcgcggggatcgccgtgctctcctcggtgctgccctattcgctggaattgatcgcgttgcgccggttgccgccgaaggtcttcggcatcctgctctccctggagccggccgtcgcagcgggagccggcctggtcatcctcggccagcacctgtcggcggtcaaactgctcgggatgcttttcgtcgtgggcgccagcgccctggtcctcggcgccgcacgcagcaccgaggaccaaccaccgacacgcgacgcatgacgcaan

SEQ ID NO: 171859 - DNA, 522 bp, Arabidopsis thaliana landsberg; identical to SEQ ID NO: 65030

SEQ ID NO: 171860 - DNA, 428 bp, Arabidopsis thaliana landsberg
ctaactttttgggactccagaactaataatggatcccataaaacacatctctttaccagttcttgtcttgtttctactattatccgtgtcggcgggtcaacccggaaccccggaccagagacatgacccgtatgcttacagcggcagtctaagtccagccatggctgttgtcgttgtagttgtcatcgcagctctcttcttcatgggcttcttcaccgtctatatacgtcactgtactggcgcagtagacggtagcgttactcctgcaggaggagctaggaggagagtgacgaacgcaacggttgcgcgtgggttagacgcggagacgatcgagacgtttccgacttttgtttactcagaagtgaagacacagaagattggtaaaggagcgttggagtgtgcgatttgtttgaatgagtttgaagacg

SEQ ID NO: 171861 - DNA, 305 bp, Arabidopsis thaliana landsberg
agcatcacagcatttacggcgccgccaaggccggcgtggtgcaattgaccaagaccgcggcgctcgattacgcgcagcagaacatccgcatcaattcgatctgcccgggcatgacctggaccggcctggtcaaggcctcggtcgaacatccgctgccgccgcccgatgccaaaccgccgttcggcgtgccgatggatcgctggggactggccagcgagttggcgaacgcggccttgtttctcgccagcgacgaggcctcgtacatcaccggcgtcgcgctgccggtcgacggcggctacgtgatc

SEQ ID NO: 171862 - DNA, 578 bp, Arabidopsis thaliana landsberg
ctcttgaagcttggtgattccaaaggagcagagaagatatactacaatgagtgtgagtgctccggtcttgagtttgataaccgaatccccgatatgttggtgtcgggttatcgcgaaaagggaatggtgatgaaggcagataaactggtgaacaagactttgtggatcagaggattggctacaccaatcactctgttgctggaagaaatggataaaaaggggaataaagtgagtccgtcgggcttgagagacctcatcaagaatctacgtgattcaaatcagttgtccaaagcacttgaggcatcaacatggatgtgtcaaaaaaaggtgtttaatctcttttcagaagattatgcaacaaggcttcatctgactgagaaagtgttgggtttggaggaagcagagaagtttttcgaaagcagcatcccggagaatatgaaagattactctgtctacgatacactcttaagctgttatgcaagatctagcaacactcaaagtaaagctgaacccgttttcgagaagatgagagagaaaggtttactatccaaactttccccattcaactcgttgatatc

SEQ ID NO: 171863 - DNA, 1922 bp, Arabidopsis thaliana landsberg
tttgttcatattaatcatggcagactgcaagaaattgcactaggaattgaagatgaagcgatcaatctcccttttgatttgtgtgaagaggcgattagctaaacccgctatagtctaattgtgaaaccggtgaatcgaaggaagcagaacttacgagcaatggcgagtgccttaccccgtctatggggtgttggtgaggaagtttcaagtcgtattctggactcccgtaagatccaattcctcttccaatctgaagattcgatggcgtcggtcctgagacgcggtccttggtccttcaatgaatggatgtgtgtggtccagaaatggaacccaaatcacaccgaccaagatctgaaacgaattcctttttggattcagataagaggaatctctctccacttcctcactgaacgaatggtcacgtccattggaggacgcttaggtcatttcctggaaacggattttagcgctgatggaacgactctcgttgatttcgtcagggtcaagctcctttggaacattgatgatccgttacgcttccaacgcctattccaattcgacgataaggcatgtatactcaagttccgatatgagaagctccgcaatttttgctcaaactgtggaatgattactcatgaagcgaccgaatgtcccctcggagccaaccttcctccgcctccaccatctgatgatgaggacgacgaaccagacgtccacccaggatgaatgacggacaatcttaatgcagaccaagaacaacaacttaaccatctcacagatagtggtgcagaagaagaaaatcaatcttcctctaagaagagaaagatggagcctactccttcagcagaacacatctctgtgttcccacttgtgtgttgtgagatgaaacaaggttatggtacaaaggaaacagaacataaggttgtcaaaagacagaggagggaatcggaggcacttgaactacgtaactggtttctgatgcaaacgactacaccaacacaatcatcatccacagcagggagattcactcagaccccccccaacaaccaaccgagaaggcacggtgggccagaagccaccggagccgccatgaatacagccttttggaactgtcggggcttaaaagggtccctggtagttcgacgcctaaagggaatcaaggcaacttattccccggacttactctttttgatcgagacaaagaactcgaatgacgtcgtccgagatgtggcagctcaacttggttatgattacgtgaaatgtgtttcccctttgggaattgggggtggtttagccttgttatggaacaagtctatttcagtttctttttatgatgttgatgcaagactcattgattgtaagataagtaataaagatgtgtgtctttttacttctcttgtgtttatgggcatcccaatcgcaaattaaggcacatcctttgggaacgacttcaacgaattgctctaaatcgattcgatccttggttattatgtggcgacttcaatgagatattacatcctaatgagaaaagagggggaagagtaagggagaattggagtttgttggatttcagaaacacagtcaaaatatgcaaagttaaagatctccctttcaaaggaaataacatgacgtggatgggtaaaagaagatctcacacagtggaatgttggcttgacagagcaatggcaaatgattattggcgcgcaacgtatccggcttcagaagtggaatacttggagatgatcgaatctgatcataggccagctatcatacgcattcgacgcacaaccgaacaaggcttcaaaccttttcaatttgatacaagactcacgggaattccagaatttgagaaagtatttgtcagagttggataaacatatgcagaataatgagggaacggtctatgagcgaattaaaatatg

SEQ ID NO: 171864 - DNA, 434 bp, Arabidopsis thaliana landsberg
gccgtgcatagtgtgcttatcgacgatgcctatattgttactatggtgcagcccgtatcttgacatccaaaaagcagaagagtgttctcgtcctcaacagaagcagagtaccgtgcgttgctaacacggcctcggagttgaaatggatctgctcattgttgtccgaaatgggtattacgttatcacgggcacccgttatttactgcgataacatgggcgctacatatctctgtgccaacccggtattccactcgcgaatgaaacatgttgctctagactatcacttcgttcggggtcacatacagtccggcgcacttcgggttacacatgtctctaccaatgatcagttagcagatgctctcacaaaaccacttcatcgtccaaggtttcaagaaatcaattccaagattggagtcaaggaactgcctccatct

SEQ ID NO: 171865 - DNA, 1571 bp, Arabidopsis thaliana landsberg; identical to SEQ ID NO: 24635

SEQ ID NO: 171866 - DNA, 476 bp, Arabidopsis thaliana landsberg
acccatcgtctcgaaaaaagccatcctcgccgatgactacgcccgcaccaacattcccgacatctacgccgccggcgactgctgcgccatcttcgatcctctcttcggcaaacaccgccacctcgaccactgggacaatgccgtccagaccggaggacttgccggcgcgaacatggccggcgccgacaaaaaatacgacgccgtcaacaacttcttttctgatgttttcgatctgatgctcaacggctggggcgaagcccgcctggtcaagcgccgcctcatccgcggtgtcaccaccggcgatcaggccgactttgctgaaataggccttgatgaaaacaaccgcgtggcacaggtgctctgcctcaaccacaccaacgaggacgacgctctcaaaaatctcgtggccacgagagccgacctcaccggcaaggaggattccatcaaagaccccggcaggccgctgtaatatcaat

SEQ ID NO: 171867 - DNA, 591 bp, Arabidopsis thaliana landsberg
  unsure (1)..(591): unsure at all n locations
gttgaatgggnacaagagtaatgcgattctcttgcatacgggggtatcggcgtctagccatgcacacagcacggtctcgaatccgaagcccggttggtgggagaagtttattggtcccggtttacctctggacacggataagtactttgtgatttgcacgaatgtgctgggtggctgctacggtagtacggggccctcctcggtggatccgtcggatggacagcgatatgcgacgcgcttcccgatcttgacgctggatgatatggtgcgcgctcagttccgtctgctggatggtctgggcatccagaagctggcagcatctgtcgggtcgagtatgggcggtatgcagagtttggctgcgggcgtgctcttccccgagcgcgtgggcaagatcgttagtatcagcggctgtgcccgtagtcacccatacagtattgcgatgcgacacacgcagcgccaggtactgatgatggatcccaagtgggcgcgcggtttctactacgatgcgatcccgccgcacataaggaatgaaattggcgcgcgagattgcgacggtcacttaccgtagtggacctgagtggaaaatgcgat

SEQ ID NO: 171868 - DNA, 188 bp, Arabidopsis thaliana landsberg
cagcataaagaagagaagaagactccagctaatcactcgaccaatcactcaaccacctgggtcgagtaccgttcttaatccatccctatactatgtcgttttgagtattagggcttcagaatattttgctataagtagcatgtacttgattccgcaaacagtttgtgagttcttcacttttgtaatct

SEQ ID NO: 171869 - DNA, 284 bp, Arabidopsis thaliana landsberg
  unsure (1)..(284): unsure at all n locations
tgtgatatacactacactacatctcaacttttctgaaattgacatgagatcccatcatgaattattacaaacctttgcaggcagcaaagaatctcgaagagaagctgaaagcgtctggagtagcacatgaagttcacatctatccaggtaatggacacgcgttcttgaacaggagtccagaaggagtgagcagaaggaaaagcatgggnnnnnnnnnnnnnnnnnnnnnnnnnntggagcttgcttggtctcgcttcacctcctggatgaaacagtacttggct

SEQ ID NO: 171870 - DNA, 493 bp, Arabidopsis thaliana landsberg
atcaagatggtgagtatgttaaatccgtggagggaactgtcgacaagacgacaaagatggattcatctcgtctttaactttcaaaacatcaatgaatagaagttctgagaaatttgggaaaccggttggtacaaaattccaacttgaggcaaaagggttcgataagattgtggggttccgaggaaggtcgtccgtaaatcgtatcaatgcactcggagcaaattttgcggtggtggtagttcctccggtcaagaaactaaatgcaaaaggtggtgtccttgggaacgagtgggatgatgggattcacgacgatgctcgaatgataacagtaagatacaatgacaaattagtgaaatcggtcaagtttgagtacatcaatggacctgtaatcggagacgctcacggagatgaagacatccatagagataataaggaaaaagagttatatgctttaatctagaattaaatacatacgctaacattatatatatac

SEQ ID NO: 171871 - DNA, 598 bp, Arabidopsis thaliana landsberg
ctctggtgctatccctgcgaacatattcgaggctatcacaatcaccaatgccgagaaaaggctcgaagtcgactggaatacgaaagccaagacgaagacggcgctgtcctacgtgtggctgcgcgataactgtccatgcagtcgatgcatagaacctagttcaaggcagaagcttcattcatcagctccaatcatcagtgaaaagtctactctgcaattagtctccgcagcacacgtctcggcatcgaagcccagcattccaaatcccaactcgacgttgctgccttcagccaacgacactgaagaacggtatgattcaattcaattccgatactttgagacatcgatctgatggtgacgcttgagtggtggctatgatgaccagaactgacattgaatgatttgcaggattgttctggagtggcgaggaggtcacagctctgtaatctctgctaagtggttgcgcgcatttggaggtgataggtaagatcactttgcatcgacattgcgattgatctaagataaaaagcgagtacgcggcacaagcattgtctcttcctcctccaaaactatgaataacatcccgactgagacgtgc

SEQ ID NO: 171872 - DNA, 837 bp, Arabidopsis thaliana landsberg
  unsure (1)..(837): unsure at all n locations
cagggatttccgctgaatgtggtattgaagacatctctcgttgatttctactcgcagttttctanaatgaaggatgctgtgagggtgttgaattcgagtggagaacaagacgtgtttctttggacgtctgtggtatcagggtttgtaaggaacttgagagccaaggaagctgttggcacgtttcttgagatgcgaagtttgggtttgcaaccaaataacttcacatactctgcaatcttgagcttgtgttctgctgttcgttcgctggattttgggaaacagattcactcacagacaattaaggttggcttcgaggatagcactgatgttggaaatgcacttgtagatatgtatatgaagtgctcggcatcagaagtagaagcttcgagagtctttggagcaatggtttcaccaaacgtcgtctcttggacaacgttaatcttaggtcttgttgatcacgggttcgtgcaagattgttttggactgctgatggagatggtaaaacgagaggtagaaccaaatgttgttaccctatccggtgttctccgagcctgtagcaaattgagacatgtaaggcgggtattagagattcatggatatctactcagaagacacgtagatggtgaaatggtagtagggaattcacttgtcgatgcatatgccagctcgaggaaggtggattatgcctggaatgtgattaggtcgatgaaaaggagggataatatcacatacacgagcttggtaacaaggtttaatgagttgggcaagcatgaaatggcactgagtgtcatcaattatatgtatggtgatggaatcagaatggatcagttaacgtag

SEQ ID NO: 171873 - DNA, 354 bp, Arabidopsis thaliana landsberg
atggtaagaacaacggcgtcgtttggaaccagctcaagctttgttcttcgtctcggacaaactctgttttcctctgcttcgcttcttttcatgtgctttaacgatgacgaagatttctacgcttacaccaccttctggtaataaatcaaatcattcatttaaaaattagaaaccaagtgtcgaaacaagagacttaactatgaatgttatggaacagttatctagtcacagtcatgggtttagtgacaccttggagcgtgacgttagccctaatggaagcttactcaatcctcgtaaaaaaacttcctatgcaagcaacagttatatctgtcatcgtcgctggagattttgtaa

SEQ ID NO: 171874 - DNA, 1113 bp, Arabidopsis thaliana landsberg
caatcttgctacaattgacaatacgatgaataacgtggagtggacgatcgcggagatgttaaatcacccagagattcttgagaaagccacaaatgaactggacatgatagttggtaaagacagacttgtgcaagaatcagacatatcacaactcaactacatcaaagcatgtagcaaagaatcttttcggcttcacccagctaatgtgttcatgccccatcatgttgcaagagaagatactaccctcgcgggttattttgtccccaaaggtaaaacagttaatgatatagggttgatgagttcgaagtagctcaaatattatagatattgaaagaaaaaaagttagcaatataaaaatcaattaacttatcaagtaaataattatccaactatgaataaattaaaccttaaatagctaacgtaatcttacattataaaataattataaaacgagagaggcatttctgacgtaagacatccatggacaacttatatactagtactctgcatgagaaaaagaatatttgaaaatgcagcgaatgtttaacttttattttaaacaactaatatttttttattttggtaaaaaaaataccccaactaacataggaacggcgggtgttaactttatattggatattagattgtaatcggatctaggcatctagctagtcaaataattatgttatttattctaaaatggtttagtctaacattggcatatgtacgatttcaaatttgcaatgataggcagtcaaattcttgtgagtcgtttggggcttggtcggaatcctaaaatatgggacgagcctaacgcgttcaagacaccttgatggccatgacgaaaagtcattgggcgtgactttgatggaaccggacatgcggttcgttacattcggcaccggtcggcgtagctgtccgggaactaagattgggacatctataaccatcatgttgttagccaggcttatccaagggttcgaatggactctccctagtggtaaaagttcagtggagctcatttcagcggacagtaacttgtttatggccaagcctctactcgcatgcgcgaaacctaggttggctccgagtttatatccgaaaatccagatc

SEQ ID NO: 171875 - DNA, 542 bp, Arabidopsis thaliana landsberg
atttgccttccacccaaacttgctgaaaaaagcatttcattttcgccggagctaccctcagatgtgaaagcgactatgggctcagttcatacctggatggctggctcgacgaaattcgtggtggaatacccgacgccattctggcgcgaaaaaggttattcgggcgtattgtatgcccataccggccttgtaaatgaaatgtatgaccagagcgatgcccaagtccagcagttcggattggcaggttttttgtctccgaatgcgacgaaatacagccgcgggcagcgtagggagctggtgctggaacaacttgccgcttattttggagaagaagcgaaggccgctacgtattacaatgacaaaatatggacaggggattttgttacaccggatgggccgccatccgaacgcccgcatcagaataacggccatccgcacctccgtgctgcctatatggatcaaaaactgtatttctccggatcagaaacgtcaaccagccatcccggttacctgaaggggccgtcaccgcggccgagacgcgg

SEQ ID NO: 171876 - DNA, 365 bp, Arabidopsis thaliana landsberg
aacaaaaaaaaggggaggatgaaggaggaaaaaaacggcgcaccccacaccaaaaggaggggaaagcaagggaggagaacagaagaccaaacggcccaggaccaacggcaggccaaaacagagagaaaaaagacagaaagggggagcagcacaatgaggagaaagaggagccaaagcacaaagcaaacaggccagaaaaacagcggaggagaaggagcggaaagccaaaaaagggcgcaggaaagcccaaccaccacaaggacgaacgagcaggagcccagaaagaacaaaaggccggacaacaaaccaaaaagaggaggagcaagaacagaaaagaaagggcaaaagccggaaaggacaagaaa

SEQ ID NO: 171877 - DNA, 718 bp, Arabidopsis thaliana landsberg; identical to SEQ ID NO: 46094

SEQ ID NO: 171878 - DNA, 616 bp, Arabidopsis thaliana landsberg; identical to SEQ ID NO: 6438

SEQ ID NO: 171879 - DNA, 366 bp, Arabidopsis thaliana landsberg
aaagcatcaaattgatcaataagctatattaaaaagtcagtctagccactaatcatcatagtcgacaatttccaaaaagaaaatgcaggaacaaactataactttgtagaatgaaaatcaaatgcttcgacatgtcacatgtatatgtctctctcaccatttcttttgttaaatcactcatcaatgatttgcttcagtttgagattaagatcattgtgatttaagagactgtcacaatgtaattttaacggttatgattacgaatgtgttaaatgttcaagtttttgtttatatctgcagattcttaagaacacaatggctaataagaaggtaggtggtgctggttctaatcctgagtcttcttga

SEQ ID NO: 171880 - DNA, 790 bp, Arabidopsis thaliana landsberg
atggagcaattcagacaaataggcgaagttcttggaagtctaaatgcactaatggtattacaagatgatatcttgatcaaccaaagacaatgttgtttgttgttagaactcttcagcttagctttcaacacggtcgcagaagagatcagacagaatctaaagcttgaagagaagcatactaaatggagagctcttgaacaacctttaagggagctttatagagtttttaaagaaggagagttatatgtcaaacattgtatggacaatagtgattggtggggtaaagtaatcaatcttcatcagaacaaagattgtgttgagtttcatatacacaacttgttctgttatttctctgcggttgttgaagccatcgaggctgctggtgagatttcgggtcttgacccttctgagatggagagaaggagagttgtgttttcaagaaagtatgatagagagtggaatgatcctaagctgtttcaatggaggtttgggaaacagtatttgctctcgagagatatttgcagccggtttgagcattcttggagagaagatagatggaatctagtggaggcattgcaagagaagaggaaatcggatagcgatgatattggtaaaaccgagaagcgtttagctgatttgctgttgaagaagttaaccggtttggagcagtttaacggtaaactgtttccgagttcgatacttcttggttcaaaggattaccaggtgaagaaacggttagatgcagatggacaatacaaggagattcaatggttaggtgatagttttgcac

SEQ ID NO: 171881 - DNA, 1118 bp, Arabidopsis thaliana landsberg
aagaagtagagaatagggaaaatcttcagatgaaagaggtatttgtctatatatatagagatgtatatttcaggttcttgagtgctgatatgcttagtgtgtttcatagaaaactttgaaacggaagtacaaaagagagctgaagaagagttctaagatcaaagaactagaggaccgcatgataaaagcaggccaaatcaacgatgagcacgaaagagagctgaagaagaagtgttctaagataaaagaactagaggaccgtataagaaaagaaggccaaatcaacaatgagcacgaaagagagctgaagaagaactgaagaagtgttctaagataaaagaactagacgaccgcatggtaaaacaaggccaaattaacgatgagcttcgagaagcacgtcaagaattgattagggtattattatataataatatcatgttcatgatttttgtatttgttaacttgtgttgttggtttcacatgtctatttttatttctgcaagggattggaagattatacggttgaaggatctaccatgatcggattgaagaagttgggaggaacaaggaaggaagggaagcaacactaaaagaagtgattacttacataattcaacagaacaaaaaactcaaaaccattgttgacatcttttgttagtcagtgtttctcattttgtagtctccaatctaacattagaatgttctcttctgtgtttcttgaaaatactcctagtgtcttttgaaaatctggtacattaacaattatttattttagctcgttcaaacttcaaacttggatcggagtgtaggttggtagtggtaagggaagcttgggcttgggcttgggattgggcttgggcttgagagcatgataatggtgacaagagaagactaatcaacccaacagacttctggaagtagacgaccaagccttcttaaagaaacatgaccaaaaccccttgaagtaattatatttatcttggaataataataatttagctataaatgataatcttagtaatattgttgatgatgaacctttgattaaacctgaaaacgagaaagcgtcaagtgagaagaacattcttaacagaacatacgcaaaagaagaagtacga

SEQ ID NO: 171882 - DNA, 333 bp, Arabidopsis thaliana landsberg
gagtggggctggtgctgaatcggttccggccgatcagcttgacgcccgtgtcgaggcgcatgccgatcgcatggcttccgttccgaccaatcacctcgccatgcagaagttgatgatcaatcaggcgctcgacaacatgggattgcggtcgacacagaccctggcgacgctgttcgacggcattacgcgccattccgccgaagggcgctggttcaaggagttcgccgagcagcgcggcttccatgccgcggtcgagtggcgtgactccggcaagccgatgccgaacggcggcggtccgatcccggaggtctgatgatgtcgctctcctattgg

SEQ ID NO: 171883 - DNA, 2806 bp, Arabidopsis thaliana landsberg
  unsure (1)..(2806): unsure at all n locations
aataaacttgctcctctgttaaagactccggtggatactcgctagaagcatctcttcctttcaaaaagtcttttctattcctacgggatggatgaccatgaggaagaaatctacggtgacaatcaaaccagcatgtcttccgtccattgggtagataaaaagactttgtactttccatggaaactggacaagacaacttaccatgagtagtccatcctgataacatgctatacgccggaaagtccctaatcgtccagagtagtactgcttttagattaaaattctgacttaatgaaacatcgtacgcatcaactccagtagaccacaactcttttaactcctcaataagaggttggaggaacacatcaagactacctcgaggatgatttggtctagaattgagaatggtaagaaataagtactttgtattcatgcacataccagggggtaaattatatggagtcaagatcacaggccataacgaatgattacgagacatcccaaattgattgaacccatcagtacacaacccgagataaacgttacggggttcttcggcaaaccggggatgtaactcttggaaatatctccactccgctgcatctgaaggatgattcatttctccctcctttgattggtgctcagcatgccatcgcattgccgcagctgtcttatggctctgatacattctcttcaaccggtccccaataggtagataccacatacgactatatggtactttggttcttcgacggtcgtccttaggcttccatcttttcgcgccacaaaatcgacattgatcttctttttcgtcttctttccaaaatagcatacaattgttctgacaaacatcaatcgtatgatatggaagtcctaaattgcgcattaacttctcggtctggtaatgtgaagtggtagcctggtttccttctggtaaaaaatctgtaaacatttcgcaaacggagtccaccaacttttcactcatattatacttcgctttgttgtgcatgagtcgagatgctaaggataattgcgactgcccttcacgacaaccatcgtacaaaggattatttgcaccttctaacaagtcgtagaacttattgaatggttacagaccggttcttccacattctgataactatcatcatgacgatagttatcatcataccccacgttaaaattaaatgcatcggtcaccatatccacatatggatcttctacaatattacccacttcttcatgattctcactaaaatacgtcttattcgtgtaactcgttcctatattcatattcatttcttctccatgcttataccaaacataataatcaggcataaatccatgactaaacaaatgactactaactcttctacccgagatgatgtgtttttcattcttgcatacactacaaggacaatgaaatttacctcgactactctgtactattggctgactattagcgaatgtcatgaattgctcaactcctgcgacgtattcggctgacaaattccccgtcacttcatcaaatctcttgtacatccaatctcgatagaaaccgccagtaccgccataattgtagcgttccctccattatacaataaagtaactaatatattttttttctctttgatgttgttgttgttttgatttgttggtgaaagaagagttgtcgtgaacgtttattatatagacgaatttttatgactaatttacgactacaacaaacaaattaggtgtacctacttggcaatgcggaaaacgttttccaacaacttaatgcgactactctgcgactcagttgcgactattttacgattacagaaatgtgtcgtattttagtcgccgatttggcgactaactgtcgcagtcggaaattgtagtcgtccatttgcgactatgtaacgataaacgtctccgttcaataatataatcgttaaatagtcgttactatacgagtatttgccgactaacatatttagtcgtaaaataacgactatttgactactaatgttcaggttgtcgtatatgtgtcgtactaatgttcatgttgtcgtatatgtgtcgtaaaacggtcgtgacttagtcgccaaaaacgacgactacatctgttgttgctttctgtagtcgttgtttgtctgttttcttgtagtggattgggaacaacattgactttgatcctcctcaatcgatcttagtcaatgtccttgcgcccctacaagcagagccgagcataggaagtgagtctcaagaagaaggagcagagtggaatgaagaagaagctgagcaggaagcctatactcggccgagtaacttttagcaggccgagtatagccaggccgagtttgaacaagctgagttcagtcaagctgaacagttgaatgaacaagaagattcgtgcgaagctgcagcggagcagtttttctttgaggattatgctgagtccgatccagagagagatcccggtcaagttcacaagaagttgggaatgctcaaaggtctgggcaagtttcagaggaagttgttcagtgggttgaagaagaaggtgaggaagatgaagagagcaatggatggcatggcggtnnnnnnnnnnnnnnnnnnnnnnnnnnnnnnntcaccaccacctcgacccgagtttaggagaagtaactcaacgagtgtggcaccgcgaagggacgctcgtttcgacccgccaagagcctcaaattacgagctcgggaggagctccaccttctcagatcgccgtttcaacagccgcccacccggtccagtgaaccagttggttttgaacgctgacccaagccgagag

SEQ ID NO: 171884 - DNA, 454 bp, Arabidopsis thaliana landsberg
  unsure (1)..(454): unsure at all n locations
gagacacagctgtcgattcatcgacaatttctccgccggtacccgtggtgctacatccgcagagtacttccttgagcaagggtatgcagtcatcttcatgcaccgccagtacagtctcctgccctactcgcggcattacagccactccacgaattgtttcttggattttatggacgaagcccctcccacctccgagtctgagaatcccgaccatggccgtatcgtcgtgcgcagcgagtaccaggatgagatgcgcgatgtgctgcgcaagtatcgcttcgcgaagcagaataatttgctccttttgttgcctttcaccacggtttcggaatatatgtttgagctgcggtcattagcgcagctgatgcgcccgttgggcccgaatgcgcttttctatctcgctnnnnnnnnnnnnnnnnnnnncaaaccacggggtcgtatggctgagcataag

SEQ ID NO: 171885 - DNA, 480 bp, Arabidopsis thaliana landsberg; identical to SEQ ID NO: 76751

SEQ ID NO: 171886 - DNA, 535 bp, Arabidopsis thaliana landsberg
  unsure (1)..(535): unsure at all n locations
gtatccgnnnnnnnnnnnnnnnnnnnnnnnnnnnnnnnnnnttcatggtggccgaacaactgcgccagttcggttgtgcgcctgcccgattcctgcttgagccggtgggccgcaacaccgcaccggcaattgccgcagcggcgctggccgccaccgccgagggcgatgatcccctgctgctggtcttgccgtcggaccacgttgtcaccaataccgccgccttccacaccgccgtgcgcaaggccgctgccgccgcggcggacggttcactggtgacattcggcatcgtgccgaccgggccggaaaccggttacggctacatcaaggcgtcaaccggcgatggcgtccgcaaggtcgaaggattcgtggaaaagccggacgcggcctccgcgcaacagtacgtcaagcagggcggctatctctgaaacagcggcatgttcgtgttccgcgctagccgttacatcgaagaactgtcacggcaccggcccgacatcctggccgcctgccgcaaggctttcgcggacgcgaagcgcga

SEQ ID NO: 171887 - DNA, 369 bp, Arabidopsis thaliana landsberg
acgttggtgactctctccaggtctgtcgcgttattctttaagttccttctccggttcctgtttcagaacagaagatctaagctttttttatttattaatgttttgcaggtgatgacaaatgggaggttcaagagcgtaaggcatagggttttagctaactgtaaaaaatctagggtttctatgatttacttcgctggaccttcattgactcagagaatcgctccgttgacatgtttgatagacaatgaggacgagaggttgtacgaggagtttacttggtctgaatacaaaaactctacctacaactctagattgtctgataataggcttcaacaattcgaaaggaagactataaaaaatctcctaaat

SEQ ID NO: 171888 - DNA, 403 bp, Arabidopsis thaliana landsberg
tactatcaaggcagcagctacctcaaccatagaggatgaggtactcgtcgacacaaccaccaagtgttcgatgagagtactcaaccgcggcgtctatcttcgacgagggcttcaagaacaactgtcggcccgtcaccttcacctacaactccgtcgacggcgacatcaccgtcacctacgacggatactccagcgacgtgttggtgcacgagcggttcatggtccggttactggacgcgatgtcgctggaccaggatgtgactctgctgtgtgcaggcatcaccgtgtctcaccccatgaagtaccacggcctgaacaagccgaggaagcacatctgcttgatgaggctgggaggattgggccacgttgctgtcaagttcgccaccgcgttccccaatcacag

SEQ ID NO: 171889 - DNA, 1412 bp, Arabidopsis thaliana landsberg
atgcctcgacttcatcattatctctcaaatcaagcgttcctcgtccttcttctcttctcttccattgcctcagcagctgttgtcgaacatgttctccacgtatttactcttataccactttctctcccttttttaataacctaaccaaaattttcgaaatattaactattaattttattactgtgggaactatattatattaccaatttccattttatatactagtcatttatttcttaaaatcggaaagttgttgaattgcgtgtgtttgtgttttcttttcctcgatttcagaaattaataccgtatttgatggatctctaatctatgagccccgatttttagtttttaactttgccggtaaaaaacatttaatagtaacacaatactaataacgacgtctaagaaacaggttaaagacgtcgtggtgaaaccgttatgcaaggagcaaataataccggcagctaatggaagtcttcccggcccaacgataaacgttagagaaggcgacactcttgtggttaatgtcattaacaactcaacttacaatgtaaccatccactggtaattagataacttattgatctcattactattgttttttttctttataatggaagtcgatttcaatatcatttcatcaactaattactgactttttagatgttaataaaagttatttcttaatttcacacatatatgtataggcatggagttttccagttgaagagcgtatggatggacggtgcgaatatgataactcaatgtccgattcaaccaggttacaacttcacatatcaatttgatatcactggacaagaaggtacattgttatggcacgcacacgtcgttaatctacgtgccactcttcacggggctctagtcatccgtccccgatccggccgtccttacccttttcctaaaccctacaaggaagttcctatcgtttttcgtaagtatttccctcttttttttgcaaagtcgaaatcaattttgtgacagcgacaattctcgattatagtgattcaatataatagtaaaagcaacatatctcaaaaaaaatatagttttttcaaacagctgtcttttacaagttgatacaactttctcgatctacgccacattctgacgagtattatgaccaagttggttcggttttaataaatatccactaaatataaattatatatatatacaatataaagaaattatgatatataggattcataattatcaattaattttgtttgaatttttttattatgcaagaacaatggtgggacacagatgttagacttctccaattacggccagctccggtttctgatgcttacctcatcaatggcctcgccggagattcatatccttgctctgagaatagtaatactcactctttacttgaatcaaaagtt

SEQ ID NO: 171890 - DNA, 3917 bp, Arabidopsis thaliana landsberg
  unsure (1)..(3917): unsure at all n locations
tttctcaacagtaaccgtagatttgattgaggatgatcattttccgcttcagtttctagggtttggtttagatttttcattgttttgctcggaggtttagtggctttctcttcaggttttatctctatgaatgcatgtctattaggagttggcgtacctggaaagggccgtgtatgtgagagaatgttagatgtgttccttctgggattcttttgatttgtgaaatttgatttgtgactcttgggtttgtagttgtttatggaaggagataaccatcagaggtagcatttatccatgcatcccaagcgatcaagtcaaggagatggttcagttactaagccagttagaaccagtgataggcttaggaggaggcccaaattgcatggtcgctcatacttgtactactcttcaccaaacatgttacataatcggaaaagaaacacaaagacaagaacggcagcctctcagatcgcaaagatgctgcacaaaggaaaccgtccagcgagggcatcaaatgccgcggtaagcattacatgtttcttcctatgatattgcatcaatactctaatatctggcacttcatcttttatagttttatccttcagtacatcattggtaagtggatatacatatgatcatctgtttttatcttgtcttgattttctacttttacttgttactgtgtctgcggagggtattaggggaacaacatgaaagtagtctaatcggttcttttctttgtaatgcataccgttttttttttgtctcattaaaccagaatgtttatacatttgctaatgacgtacagccaattgcatctgatctccggcgttccacgaggaagagaagaatttctgtaaacctggaggactatacagacagttctggagcggaggatgaggatatgatggtcagaatatattcctgtttaatatggcacttcgataatgtaatgtaaagctatctcttaagtactgtggtatgcctcttgaaaataagtttctgatctttttcagagtccagcatatcgaactttgaggaggagagttcataaaaacttctcaacttcaaaaagtagaaaggacatggatgctgaattgnnnnnnnnnnnnnnnnnnctccgtcctcgtcgttcaacaacaattgctaataaacgactgaaaacagaatctggcgctgaccaagatacatcagaagagaaagatggccaagatgaaactgagaatgggaatgaattagatgatgcggatgatggtgaaaatgaggttgaggctgaagacgagggtaatggagaagatgaaggcgatggcgaagatgagggagaagaagatggtgatgatgatgaagagggtgatgaagaacaagagggaaggaagagatatgatctgcgaaaccgtgctgaagtccggagaatgcctacgggagaaatcaacaagcaacaacaacctagatctcctcggagagtattgcatcagggcatgggcaccagggttggaagagatggtaggagaggtgggtctcggcctcacaagcgccatcgctttacaagaacagatgattcagatgattctcttcttgtggacgagttggaccagggccctgcaattccctgggctcgaggtggaaacagatctggagcaccttggctatttgggggtttggacacgtatgggtcaagttcattggggttgaacgttggagcttctggttggggtcaccagagtgatggtttggctgcattaacttctggtgttcagactgctggcccaagctctaaaggaggtgcagatatccagccactgcagattaatgaggatataaattttgatgacattggtgggctgtccgaatacattaatgatttgaaggaaatggttttctttccgttgctgtatccagagttctttgcaagttacagcattactcctcccagaggtgtactgctgtgtggtcctccaggcactggtaaaacactgattgctcgagcattagcatgtgctgcttcaaaagctggacagaaagttagcttttatatgcggaagggtgctgatgttcttagtaagtgggttggcgaggctgagagacagctaaagctactctttgaggaggctcagcgaaaccagccttccataatcttttttgatgaaattgatggtcttgctcctgtaagatctagcaagcaggaacaaatacataattctattgtttcaactttactggcgctgatggatggcctcgattctcgtggtcaagttgttctcattggagcaacaaacagggtagatgcaatagacggagctttacgccgccctggcagattcgatcgggagtttaatttttccttaccaggttgcgaagcacgagccgaaatattggatattcacactcgtaaatggaagcacccacctactagggagctgaaagaggaactggcagctacttgtgtagggtattgtggtgctgatctaaaagctttgtgcactgaagctgcgattcgtgcttttcgtgagaaatatccacaagtttataccagtgatgataaatacgccatagatgttgggttggttaatgttgaaaagagccactttgtagaggcaatgtcagctattactcctgctgcccatagagggtctgttgtgcaatccagaccattctctccggttgtgttgccatgtttacatcgacacctccttgaatccatgagtttaatatcagatatttttccctcgtcagccacgtcatcggagttgacgaagctgtcaatacttacatttggatctgcaattcctcttgtttatcgacctcgacttttgctgcttggtggtgaaggagttggactggtaattgcttgtcgtttcttgtgattatgtcttaaagctttattattatgaactgaattcacgtacttgttagtcgaacaggatcatcttgggcctgcaattttacatgagctagaaaagttccctattcattctctgggacttccatctctcctttcggatcctggtgcaaagaccccagaagaagcgttagtacatatatttagtgaagctagaagaacaacaccttcaatactttacataccaatgttcaataattggtgggaaaatgtaagtgtgtttttttaaaaccaaattccactttactgcagttacttttggagatcatgtttacgtgttcacttaatataatgtattaggatgtcctgttggttgttttagattgccagtctaatgatttgatactgatgactgcaggctcatgaacagcttagggctgtatttctgactttgttagaagaattgccatcaaatctacccatattattacttgctacatcttatggtgaattgtctgacatgnaagagcagtcagtatttgacaatcgatctgtgtaagttcatgttctacttgtaatcactttgtccagtaccatactacagctttattattagcttttcttttgttatcccataaaagctggtagggcactttctttgaaagtcggtcatccttgcaatataattatatactgtacaaacttgttctgaaagtcggtcattctttcaaagtcaaaaggcatgtatcagtagcctgcgagttagtatatgaagctgtagatgcttacgtatgttttccaagttgatgtttttggtttttctaaatttgtttggcaagtaatgatcagatttaattatgaacttatacaatatatttgaccaattacatgaaagttcagagaaaaattccagtgaaatagcattgcctatttattgtgtcattccccaacttagctactttttccttggttctcgttacaaatttaattttcttcatcctactggttgatggtcctcacgcttatgaaatataaatcagtttcccatattgtgtacatttgttttcagctatctgtg

SEQ ID NO: 171891 - DNA, 699 bp, Arabidopsis thaliana landsberg
atggataatctcgtatttactatggtcggtgagtggagatacaaagaagaaaaatggaaatttgaaccagaggaaaacatgtttggtcgctgtgtacgtgttaaggaaaacatgacgtacacggaatttgtatgtacactaagcgagactttcagtttgaagtccatagagatcaatcccataattagttactggataccgggagagatgttagtgatgatagatactgaacgccctcttgtctacattgacagtcaagtgagggtgggatacgatttttattcgtggtgggtatccttctctcaacttgtttgtctctttcattacaaccgtcaagacactcgggaataatgtctctaggactcatggtgacgatgctgaaagtgactgtgtgtgtgatagtgttttaaatgttgatgaaaataatgaggccatagattagcaagacgagattgaagacgataaaacagatgaggatgaagatggggggacaacgaagatggtgatgggtatgatgattatcagggtgacgatggatctatgggggaagtaccatcgatcctactattgatggtagtgaaagtagtggcgaagattatgattacaacaagtggaacgatgaaattgtagaagaatatggaataaagaatgttgaggagaacgtcattctcacacagctgactgttcaacatccgaggg

SEQ ID NO: 171892 - DNA, 678 bp, Arabidopsis thaliana landsberg
  unsure (1)..(678): unsure at all n locations
tcctctacgcaagagagaagaccggcccgattaacaatggcgagatagagctgcttgatattgtcataanagatatcctactctataccaagaacaaagtacctataaggggtgacaccaatgatgcttcaccatcaatgcgtttattgaatcatctttgtggtttagcgaataagcagaagagaaccatttctataggaggagtgataacacctatactaatggcttgtggagtgccactttagtcgactccctttgcccctaaatggatcgacattcctcacctgagatgggctttgtttgttgagcatcagagtcatgaggggatgcatattctcaagtttcagcataggacggaaatggatgccaagcttctcttacccaaccaagagctaacaaccatcacagtgagaggtaacatcaatttcaacccgcctaatgaagaactcttcttcatggaaagagcacccccgacgagagaggcttcagacattgaagaaagggttgagagtgaagaatgagctgagaatgaagaaccagaggagatggattgggagaactacaatgctagtaggttccattttgaagaacacaaaccaccaccaagagtgagtaagagtctgactgttgcgcataagaacattggttcgatgagtgcttggaataagtttcaagaca

SEQ ID NO: 171893 - DNA, 196 bp, Arabidopsis thaliana landsberg
gagaagaaaacatggtgaagatcttcacaagtggcttgaatctgctgaacaggataagttcaataagcccattgaggagcttacgcttgaggaactcaaggaatttgaggctaagattaagaaaataagctgtgggatccaaagtaacattagtcatatgcaggcttcgtcttctctcatgtttctctctaatgat

SEQ ID NO: 171894 - DNA, 1090 bp, Arabidopsis thaliana landsberg
  unsure (1)..(1090): unsure at all n locations
gcttcactgttccatttatggattgaagcgagcatctcggagttggaatgctcgttttaatcaggcaatcaaagagtttgatttcattagaaacgaagaagaaccttgtgtttacaagaagactagtgggagcgcagtcgcatttctggtattgtatgtagatgacatactgctcctcgcaaatgacattcctttgcttcagtctgttaagacttggcttggaagttgtttctcgatgaaagacatgggtgaagctgcctatattcttggaataagaatctatagagatagattaaacaaaataattggactaagtcaggatacttatatagataaggtcttgcacatgttcaatatgcatgattctaagaaaggctttataccaatgtctcatggtatacactcttagcaagacacagtgtccttcgacgcatgatgagcgagagcggatgagtaagattccatatgcttctgctataggatctatcatgtatgctatgctctgcactcgcccagatgttgcatgtgctttgagcatgacgagcagataccaatctgatccaggtgaaagacactggatagtagtcaagaacatccttaagtacttgagaagaactaaggataattttttggtctacagaggaagtgaggaacttgttgtgagtggttatactgatgccagctttcagacagacaaagatgatttccgatcacaatcaggatttgtcttttgtctcaacggaggagcagtgagttggaagagttccaaatagagcactgtgnnnnnnnnnnnnnnnnnnnnnnnnnnnnnnnnnnnnnnnnnnnnnnnnnnnnnnnnnnnntggattaggaagttcattactgaacttggtgtggttcctagtatttctggccccattgatctttactgtgataacaatggtgccatcgcgcaagcaaaagaacctagatcacaccagaaatccaaacacatacaaaggcgatatcacctcattcatgagattattgatagaggtgatgtgaagattagcagagtttcaacggatgcaaatgttgctgatctttttacaaaacctcttccgcagccgaa

SEQ ID NO: 171895 - DNA, 358 bp, Arabidopsis thaliana landsberg
aattcctgaccacagcaacgttgatctattgttgcagattgatggtgtcacaaaacaacaagggaatacacgcgacatgattttcaagtaggtataccaatcttgaacaatctatttcatgcagagccttgaaatcgaaactgacatttgtatcttgtgaatgcctagtattcctactctgatcgagcatgtctcttccattatgaggttggaggagggtgatgtaatcctgacaggaaccccgaagggtgtagggcctgtcttgccagggcaaaccatcacatgcgagctagctttcggaggcaaaaccctgtcacagctgcgatttcctgtgattgagcgccccaagctctgatga

SEQ ID NO: 171896 - DNA, 273 bp, Arabidopsis thaliana landsberg
agcagatactaaaagtttattggtccagatactaaaagtttaaaagcgaaaactcggaaagtacattgtcctcccaaattacgttaattcttgtggcaaattttagcgggttgtgtaccggtgacaaacaagttgcagaaaagaggaattaactatgacacagggtgtttcagatgtggtgaggtagaaaaaacaattaatcatacacttttcctttgccaccctgcacggcaaatatgggcactctcagaaataccttctgttgaaggaaat

SEQ ID NO: 171897 - DNA, 1934 bp, Arabidopsis thaliana landsberg
ttaatatattataaagatcgaaagcttttggacgtcaccattttaaaaatcttctgctatcgatttcgatcgtgacaagggctatgtacgttgtgtaagtatatctcaatgtagggacatggttcaatgagatttgtatcattgtctggtgtttaagacaagagtcacagagagagcatttgagtccgattgctagatgtcgttgttcaccactggttttattttctgctctgtgaaaagtttcgagttttttgattgttcaaagattcaatcttttcaacggtcttgattgtgatggatttggtgggtctctttggttctttatgtgtctccttagtgttaaaaatacatattccactttttttttataaaaatacgatagttggattattagtcatccattggacgactactagttaatcaatcattttttttatttcatttttttttgtgaagatactactaagcctagtcggctgatattttgacaactccaacttttcgtaatttccggaaaatctggctgagctatgcagttgttaggtaccaggatttagaataatgaccatctttgataaaatacatagaagattggaaaacatatactaacgtttagagccatatttatatgcataatctttgtaacaagcattgttttcctcattaagttactctcatgcctttgtcacaaaatggatcattattaagggggtcatcatcgttcaaccttatccttgctaattttagcacccactaactcacatttgctatatccatcaatagcattgacaaaaagacaaaataaaggaacaaatcctcccactaccatcaaatttggacttttttcactagtcgaatcatctacagttatagagaatatgaccattgaccaatcttattaacgttcgtatattttatcccttatcaggcattttcacggcggctcttgcgcttttcaccgacctaaacgtcctcctaaacctcgtatccattggaacactatttgtcttctacatggtcgcaaacgctctcatcttcagacgttacgtcccggtcggacccaccaaaccatggcccacactctgcttcctcacactattctccataacctctctcgtcttcaccctcatctggaaacttgtgccggaaggtaagcctaaagctttcatgctcggtgccagtgcggtggtggctatagccatcgtgctgagctttcagtgcgtggttccccaggctaggaaacccgagttgtggggagtcccgttcatgccgtggaccccgtgcgtgtcgatattcttgaacatttttttgcttggttcgttggacgcaccctcttacgtccggtttggattcttctccggtttgatcgtgctcgtgtatttgttttatggcgttcatgcgagttctgatgctgaagcgaatggatcttttggtgtgaaagatggacaagtcatgaaagagctaattgaagtgtgaaaagtatttatttagtttagttttctaaagcatcatgaaccaaaatgtaattaaactctctaatcttttttctacatgagggggtttgaaatattaatgagaaaatattaaatacaactttaggaaaaaaaagaatatgtattttggtttaacgaacgaccaaaatgaaatcggtcatatgcaagtcaatctgttgagagaatagagaaactgatgatatttttgttttaccgttgtgtacaattcacaacacacaatatttaaatatagtacaaactattaggttacaagtttttgagattgaaagataaaatctttgtcaaacctataaggcaagatcacgtatgaaatatacatgtgatagataacattaataaatggaaacgttagatagacataggtctctcataaatacgagatggcgtacaattgaaaacgatgggtccccatctttctca

SEQ ID NO: 171898 - DNA, 559 bp, Arabidopsis thaliana landsberg
aaagtatcagcctgagctaaagtttgttgatgacaagtaatcatcacttcgagtgacaatatgtttgatgttttacaaaactttaactccagtgaaaagaaatctatgtgcaggttttaggggcactttctggtttgcattatatatcttagtgtaaaatgaccctagctttgtttagtggcttgtattgtcctctggctacccttttttgtgatctttaagtttcattccccattactctttacccaattttgtagatcgcagcatctagtttcctgttagatttcgatattgatcactgtttcttaatcttttggcaggagcatctctgaatacgattaaaagaacagtaaagttcctatgcccagcagagattatcccaccatatatagaagtagatctaagccaattggatatcgggcaaaagctagtaatgggagacctcaaggttcatccggctctaaagcttataaagtccaaagacgaacccattgttaaggtcgccggaggacgtgtcactgacacgcaaaagaagtcgtctgacacgcaaaagaaataa

SEQ ID NO: 171899 - DNA, 968 bp, Arabidopsis thaliana landsberg
agcctgaccgagccaagcttgtgtacatgattatttaaaatttgccatttgactttggaaggatgggttttgagcacattcttcagctggctctgaaaacggacacgaaactcttcctgccgttccccaatctgatctatcagttgatccagacgcaatgcccggttcagattcccgtcacccctcctgcctcctcagcgtcgaccaagcagaagaaggtgaagcagagtgcagcagcatatcgcaaggaatcagccaaccgaagggcaatgaggattgccatcgaaatcctgcaggctgctctcgatacaggtaagtgttctgtgcgatcttcttgctttatactacatatgtctgattgtttacatgatttttgactaagttatgtgctcaagcagggggagataaggccccttcggagtcagatgatgctgggggagattaacttgtgggggagctgtgtttttgtttcgtttctcttgttaagctcggttgtatttcagaccaaaacaacttctcttttgtttttgtttaaaccgatgattgtatcatcgtaaacatgggtctgtaatattttttccacacattgttcactttcagactaatcgttttatgatatttatactagatggtatttctacagtatgcctattagatgtgtggtgtgtctctcatttgagtttaaggttatatcaatgaaggaatgcttgagtatcaaactcagtcaaaaagggggagattgaagatgcagagttcaatcaatcagctgatggcgatcacagcgttgatggatttcaggaagctgcatcgagttttatcaaacgcttgagttgcagacatggatgcgagagcacacgtggcaagctaaggcggatgatgtggagagccaaggatggaagctgacttggcgtggtgtcaaagacaagaatcaccgagaagatatggaagatatcgtctcgaacaattag

SEQ ID NO: 171900 - DNA, 893 bp, Arabidopsis thaliana landsberg; identical to SEQ ID NO: 14427

SEQ ID NO: 171901 - DNA, 1200 bp, Arabidopsis thaliana landsberg; identical to SEQ ID NO: 9987

SEQ ID NO: 171902 - DNA, 1466 bp, Arabidopsis thaliana landsberg
tcgagaatgtcttaggcccttcacttcttctcttgcttctctccgagctccacctatgtattgttttttgtttttattctcttcttttgggcgaggggttgtcatctgatgtagattgctgttgtcaaaactcaatttatttcttttttcgtattattctgtctaggggaccggcaacaggttttcaaggaaaagtactccttgcgtttgaaggcaatggatcttcaaaaatcggggttagatttgatagatcgataccagatggcaatgatcttggtggtctatgcgaagaagaccatggttttttttgtactggtaattttcgtgctaatatctactacacatttgcgtttaaaaggtaattgtagtaatgacattcttcctgtgcagcgagttctcttcggttagaaagttcttccagtgacgatgctgataaacttgccattaatgaaatctttgaggtagttctaccactttttgttgcctatattaaatctttgttttcgtagctacagaaaccctttaatctttttgaatgatcttgtaggtagcttttaatgaaagtgaaagagggtcattgatattgttcctcaaagacattgagaaatctgtgtcggggaacactgatgtgtatataactttgaagagcaagcttgagaatttacccgagaatattgttgtcatagcttcgcaaacccagttggacaaccgaaaggaaaaagtaggagttctatttaatatctctttttgtatgcttaacctgtcttgatagacttaagttcttctcaacatggttagtttgattgttttgatcgtttcattttcagtcccaccctggaggtttcttgttcacaaagtttggcagcaaccagacagcactgctggaccttgcatttccggtatgataatcttttataatttctagattataagacatctaatattctttcccctggattgtaacttgtaaatgacgatgcattatatttagagtgatttttcatgtcatctacaggatacttttggtggtagacagcaggataggaacacagaaatgcctaaagcagtgaaacaaatcactaggctatttccaaacaaagtgaccatccaattacctgaggtctaagcctgtactattgtatttttttgtttacaatttgcttctttttatttcattttcgtttgtccttaaaacataacattatgatgcttcgctggtcgactggaaggataaacttgaacgtgatactgagatcctgaaggctcaagctaatattacaagcatccgtgcggtgagcatctttcagtgaagtcctatgtctatctaaatacgcctgcctttttgtgtttccttatgtctttgttaatggttcttggcaggtccttagcaaaaatcagctagtctgccctgacattgaaatcttgtgcatcaaagatcaaacccttccttctgatagtgggcatct

SEQ ID NO: 171903 - DNA, 1458 bp, Arabidopsis thaliana landsberg
acaatcttcattcatcccaacgctagcagtttcatcgatgttagacgccagggctcacgaagattgacaagcaaagatgccgaagcttggacagtattttgcgatggttcttggggagcttcggtgcaggagtagctgcggtcctagtagcaccttcaaaagtcaaaacatgttatgcagtcaaactggatttcagttgtacaaataatattgctgagtacaaagcacttctattggggcttcggaaactaagggcaatgggaataagaagggccatcctaaagactgattctcaagttattgctggccacgtggacaagagtaacaaggcatgagatccgaagcttgaaagatatttggatgtagttcgaaggttggaagcttccttcgaaggtttttctgtcaagaatattccaagaggtgaaaatgaacatgtagatttgctagctaaatcagcggctcaggggctccctctaccctcagaagtattttttgaaacaataaaagcaccttcgattgagctcatggagagagcagtgcttactatttctctagtacacagtgaagactggagaactgaaataatatctttcctccaaggcaattgtctttcaagtgacgaagcttataacaagagaatggaggcaaggacaagaccatatgtgataatagaaggggaattgtataaacatggagtttgttcccactcctcaagtgtttatcaagagttgaaggtattgaattaatgaaagagatacacgcaggtctgtgtggatctcacattgggtctaggcccttgctgggaaaagtttttcgacaaggattttactggctgaaagcagcttcggatgcagtagagctagtccaaaaatgtgaaggttgtcaaaaatgtgcaagggaccagaagcaaccttcatctctcactcagttaatacaacccacttggccattgcaaagatggggcctcgatttgctaggcccacttccaccatcacaaggcaatttaaggtatgttgtggtggcagtagaatatttttctaagtggattgaagcgaacgctttggccacaataacttcggtcacagtccagaaattcatctggcaaaacattgtttgtcgcttcggcgtccgaaggctataactgtggacaatggaacacaatttgatgccgaaactttcaaggaattctgtgatcaaattggcacgaagattcattttgcataagtcaggcatccggagtcaaacagacttgtcgaaagagcaaatgacattataatgatgggaataatgaagctaatcttcaatcagcccagaggaaagtggtcagatgagttgattaaagtggtgtggagccacaatacaaccatatcaagatcaacaggttttacgccgttcaagttattatttggtgatgaagctataaccctagaagaagctaaagcggggtcaataagaata

SEQ ID NO: 171904 - DNA, 407 bp, Arabidopsis thaliana landsberg
gatggatttgctggtgcgcgtgttttgccgaccgggccagtacgccatcgccatctgcccgccgacgttcggcatgtacgcggtatgcgccggcgtgcagggcgcggacgtggtgagtgtgccgctgaacgcggatttcggcgtggatgtcgaggctttactggcggccgtcacgccggcggtgaaactggtgtttttgtgttcgccgaacaatccgaccggtggcgtggtgccgctggaagacatcgaggccatcgccgcggcgctggccgggcgcgcgctggtgattgtcgacgaggcgtatgtcgaatttgccgacggcggcagcgcggcggccttgctggatgactatcccaatgtgctggtgttgcgcaccttgtccaaagcctgggcattggccggtgcgc

SEQ ID NO: 171905 - DNA, 520 bp, Arabidopsis thaliana landsberg
agatcaagctctctcactgtcggagagcaattctgcgccgtctttatacctttctttgccattatcgatgtcctagtttcctccgtcggacaatgcttcgattgccgcagcacatcgcctcggacatgtcagcacgcggatctggaacgtcttgctcgtgaatctcaatgttggttttctttttgtttttgcctctctctctctctctctttcattccatgtccaatgtgttgtatacgttcttggatcaatgggtcttcgaaatgactctgtttggaagttgataagtttgaaaagtttgtttcttttttgcagtttcagtcaatgaagttgaagctttgtatgagctattcaagaaattgagctgttcaattattgatgacggcttgattcacaaggtctgttttttctctctcagatatgtctagttggtgaatttttcataggttgatgatcatcacttgactccttttcctttatgtgtgtgattcattgctttcaaggcattaagtttgctctt

SEQ ID NO: 171906 - DNA, 1029 bp, Arabidopsis thaliana landsberg
ggcgaaggtatacttgaacttgtaaaactatataaaaatgttgtttagactgcactactaataatgctgaacttggttcatcagttagcagattttggacttgccaggtcttctttagacactgatactcatgtctccactcggattatgggaaccttcgggtacgaaacactcttttctatacgcaaccataaccataataagttcataacatactaacaatcttttaaacttctttcttgtgatgcagttacttggctcctgaatatgcttcttcagggaaacttactgagaaatcagatgtcttctcaattggagtggtgcttcttgaactgataaccggacgccgtcctgttgataaatcacagccttttgctgatgatgatagcatcgttgattgggttggttatcttgtttcccttaccaccacttttaataagcttttaaactttacctcatgctctaggcaaaacctctgatgatacaagcgttaaacgatggaaactttgacggtcttgttgacccgcggttagagaatgattttgatatcaacgaaatgacgagaatggttgcttgcgctgctgctagtgtccgtcattcagctaaacgtcgcccaaaaatgagccaggtactaactatcacatcaaaaccttttggcaacattcaatctaacactaggataaaaaatgaaactttgtgagttcaatggtgtcattgttctttggacaattgcagatagttcgagcattcgaaggaaatatatctatagatgacctaacagaaggagctgccccaggacaaagtactatttacagcttagacgggagctcagattatagctcaacacaatacaaagaagacttgaagaaattcaagaaaatggcgttcgaaagcaaaacatttggtagcagcgaatgcagtggtttgactagcgacaatggtcagaacccatcaggctcgtctagtatcaccgaaggccaacgtacaacgcaggagatcgaaccggagaagaataccaaggacacatga

SEQ ID NO: 171907 - DNA, 1638 bp, Arabidopsis thaliana landsberg
cgtctctttttattttttaacattaatgtaagcagtatcaacattacagctccaaacagtttctgatctttacctccgtactgctaatcctctgtttttgtcttgacttgcaaggtgaccgacgtacggaattgggctcaggtatgggctcatatgttagctgtgttcttgagttagcctttattgtcttcaggcctttttgcgatttgacgtcgttttgaactgtagtgtttataagcaggacgtatcccaacttcgtatatttagggtttcaattaacactaagaattacaaatttctctgcaagaactttgtctttcaattagcgaagcaaagcctaagaaagcgttttgataagatatggggaatcatatgcagaacagtatctcacgtaagtctcttgatttcttttgattaaagttttttttttggttggtctgagagtaacaaataagtttatgagaaattctgtttgtccctcaaagtgtaagaaaaggctaataaagcgttttgaacagataaagggaatcatgaattgctaacgattttcacgtttgaaatcaataacttctcccagaagaaagcttcgtttatgtctccaacgtttttaggcggtggctgtgaatggtaagctagtaggatcaatgtttagattctaataaaattgactctcaaggtaaatgtcttgctaaaaagggtctctaatctttgatgttttattaaaaatcttctcaggtatgttctagttcaaccggatggtggttacttgagtctgtatctatgcgttgggaaccctaaatcattgcaacctggatggaaaaggcgagccagtttgcacttcattgtattaaatcaatccgggaaagagctctacagagcagctggtaatgatatatgatcacatccgttttctgaatctttatgatgatagaagaagacaatttaatttttgtttgtcttacagaaatatcaagcttgttctgcgctaaattcagagcgtggggtgataggacattgcctcttagcaagcttcaagaggaaggatttttggagaataacaaactgatcattagagtggaagttaaagtagctgaagaaggatatttaactgggaaggagatgtttgaaatcaaaggttttgaagttccttcttctcaggtaggttaaggagcttcacgtattctttttctttctttctttttctggataaccagatgttgttgttgtcggtaggttgtttctgtgagccagcttttcatgaaacacccagacattgcaactggtttcaaactaaatggcaaaggtctgaagacagcatacatgagtcttctcctcagcctcatcgagacgttgcgaaggcctccactgagcttttctgatattgagttaagcaaggctaacagcacgttgagggagctgacagaagcgggctttaagctggattggttaaagaaaaagcttgaggaggtttccttgaagaggaagaatgcagtagatgatggttctcgtgtcaaacaagtggaggaacgcatcaaaattctgaaggtgacattgtcggatctcaaagatgagttgcaatttgagaagactagatctgctgctgctaatcaacctttgtcgtttgatgacattgtttaa

SEQ ID NO: 171908 - DNA, 803 bp, Arabidopsis thaliana landsberg
ctttatcattactgcactttaaagtctgcgaagttggccacaacatccgtagtctaacgaaagaaacttgtgtggatcatttttaaatgagatgaaatccagttgtcagttattctcaattacacaattttgtgttgactttagattctgttagttctcaccgtctctttctcgattctacatgttaggccaaggaggtctctctagacaatgcatattcagaccaagaaatagaaaagaggtcatcagttgtattgttcaatgcctcaaagaaagaagtgaaacaagaatcaagcttcaagcaggaaccattattatgtgaaccacaaatagaagcaagggttaaccccagagttttcagatacaacccaaaattcaaatcaccttcgacgaacaacacttctctacatgagttgagaccaatacaaatccaagaatccatctccatgaactccaacagacaaaagtctccagtagaccaagaatcatatgacaaggaaaatgttgacggccatagtactgaaactggatttgtgacgctgaaaaaggcaagattcacagaagcaagagaccgatgttccatggcaaagccaaatgtgggagttctggtgaagtgttcgagtagtaaagaagacaaagaagaaagaaacaagaagagacgagttttggaggaaatgacgaatcaccagtcctctagagccgaggagatcgcaggaaaatggcgttgcccgcagaagaacaaaaggaatatagttccaccattgaagcagcttcgacttgacgcatggatacataaagtctga

SEQ ID NO: 171909 - DNA, 549 bp, Arabidopsis thaliana landsberg; identical to SEQ ID NO: 78293
  unsure (1)..(549): unsure at all n locations

SEQ ID NO: 171910 - DNA, 1269 bp, Arabidopsis thaliana landsberg
gatttctgcaaaaaacatctatcccttattgtgaaggaaatgcagagctttaaaatttgtgtggttgatctacctcttaagacagagcgggtaaagcttactccacttagttactttcatcgattagattgatgctctgttaataaatttgaccatgcttgttttcttatacacaggtacctgtccatctgagagatattaaacctcgttatcttcctcttccaaagcatgtttctcaaatctttcctggcacaaactacgacttcaattctccaacaatgcggtttacaatttcttctctggtggtaggagaacaattcctcatgctatttctgcttctgtagatagttttttttttttgcgttttagatacttttgtcctgcagatgcctgatgcagtggttgattacgatctattaaatggaaaatggaatatagtacagcagcaaaacatgcttcacgaaagaacacgggttttatatggcactgcaaactccaccgagagccctaatataccctcaggcaccagaactgtcagttttgatactgaggatactactgccgagaatgacaacttgtggaatgacttgactgagttttacgcttgtgattaccatgaagtatcttctcatgatggagccatggttccattaagtattgtttactcaagagctcagaaagaggagaatcaaaaacctggtctacttcatgttcatggtgcttacggtgaaatgcttgataagagatggcgtagtgaacttaaaagcctcctagatcgtggctgggtactcgcatatgcagacgttaggtcagtatcatctttctcttctcgttcagaacattcaacagcaagaagctaagacttccttcatgtatccattgttctcggtttttagaggtggaggtgggaaaggaaagaagtggcatcaagacggaagaggcgcgaagaaacttaactccattaaagattacattcaatgtgccaagtaccttgttgagaacaatatagtagaagaaaacaagcttgctggttggggatacagtgctggaggactcgttgttgcttcagctatcaatcattgccccgatctcttccaagctgcggttctaaaggtaataaaaaactgcggatcaaaaagatttgaggcattgattgataaggaaaccttaaaattcatatattatttcttctgttccaggttccttttcttgatccaactcatactctaatatatgcaaaactaccattaacggcagaagatgacgaag

SEQ ID NO: 171911 - DNA, 556 bp, Arabidopsis thaliana landsberg
  unsure (1)..(556): unsure at all n locations
atgaacctcgtgatgcatcacgcggatttaaagaaactggaaagcgcgtggcgcgggctgcactacctcgtcaacaacacggagaccgaccagcagctcaagatncngggtgttcnacatttccaagaaggaactcggcaagaacctgaagcgttacaagggcaccgcgtgggaccagagcccgatcttcaagaaggtgtacgaagaggaatacggccagctcggcggcgagccctatggttgcctggtcggcgacttctacttcgaccacagcccgcaggacgtgtaaatgctgggcggcatcgcccaggtggcggcggccgcgcatgcaccgttcctggcggcggccaaccactcgctgctcggattcgaaagctggaacgagctgtccaatccgcgcgacctggccaagattttctcgacgccggaatatgcctcgtggcgggcgttgcgtgaatccgacgattcgcgttctctcggcctggcgatgccacgcacgctggcgcgcctgacctatggcgccaagaccgacccggtcgaagagttcgactggaga

SEQ ID NO: 171912 - DNA, 653 bp, Arabidopsis thaliana landsberg
gaatctaacaaggaagaagcgaaaagagcatggcatattgctgagaaggggctatcaaagaatgattacatcagagcgaaaagatatgctaagaaggctcatcgtatgtatccaaatctcgttggtttggaacaagtgttgataatgatcgatgtttatatctctgcatcaatcaagatcaccggagaagctgattggtacagagttctcggtgtagatcctgtagctgatgatgaagctgtgaagaaacgtcacaggaagttagctcttttgcttcatcctgacaagaacaggtttactggtgctgaaggtgcgtttaagttggttctagaagcttgggatctattgtctgataaatctcagagaagttcttatgatcagaagaggaaatcaaatcaagttaaacagagaacgagtggaatgcagaagactaagagaagttctacgcctaaacctgagcctaagcctaaaccaacagagccagacaagccagcttcttcttatggacctacgcctacacctgagcctaggcctaataataagcctgagtctaagcctaagcgttggcctagacctaacatgcctgagcctatgcctgagcctgatattcctatgcctatgcctactaggcataaacctaagtctaagcctga

SEQ ID NO: 171913 - DNA, 530 bp, Arabidopsis thaliana landsberg
  unsure (1)..(530): unsure at all n locations
aagaagaagaattgttggaggtatatcacctgntcggaatacaaatacggctttgtgactgatattgaagcagatgaagctcctgcgggcttgaatgacgacattatcaggtttatctcggctaaaaagaacgaacccgaatggatgttgcaatggcgcctgaaagcgtaccatttgtggctaaccatggaggaacccaaatggccgaacgtgcattatccgcccatcgaattccaggctatcaaatattactcggcgcctaagaaaaagaaggctgtcgagagcatcgacgacatcgatcccgagttgcgcaatactttcgaaaggctgggtatctccttaaatgagcaaaaaagaatttccggcatcgcggtggacgcggtaatggactcggagtcggttttcacgactttcaaggaaacgctcaaagaaaaaggcatcattttctgctcgatcagcgaggcgatccgtgagcatccggagcttgtgaaaaaatacctgggcttcgtggtaccgcctaaggataacta

SEQ ID NO: 171914 - DNA, 519 bp, Arabidopsis thaliana landsberg; identical to SEQ ID NO: 72944
  unsure (1)..(519): unsure at all n locations

SEQ ID NO: 171915 - DNA, 1420 bp, Arabidopsis thaliana landsberg
tctgcccatcgtccttgggcaagatgcgctacagtggctacgacatctaccccgacactgcatcgacgactggggagacttcagtcgacgtttcaccgccaacttccagtccctctctgacaagccagcgcaaccatgggacctcaaatccatcaagcgccggggggatgagactctccggtcgtacctcaaaaggttccagaccatgagaaaccgcatccccgaggtcacggaggcggccgtgatcgaggacttctacagaggatccaatgactcggctttcgtccgagccatactacaaaaggcgccaactacctccgaggagctgttccgggaagccgacctctacatcaccgccgacgagcgggcccaggatctcatcggaggagcaaagcctgcaccagcagcaccacgacgcgacgcgaaccagccgcccgacaaacgctgggagaagaggcctcgtgaagaagtacacgccgccggaccacccgcctctcgcgcccgaggaggacctcgtggaggtgagcgcacgctggacgacatcctcgacgcccagtgcccgtaccacaaggacatgcgccacacccttcgaaactgccggatttcaagcactccgtcggcacggccgacccttccaacctctaccgcctcctcctccgaggggaggaccagatgaaccacaacagccccatcggcaggaggaggggggaggaggagctttcccgcgcgttgacagggaggtcaacgtcatcttcggcggacatgggtcgcaggagaacaaaagacaacaaaagctcaacgaccgccagatactggtggcgaccaccggtcctcccgccccgtaccggtggtcggagcacccgatcactttcactcgggaggatcagtggctcaacttcgaccatccaggcaaatacctgctcctcgttgatccggtgatccgagagagccgggtaaagaaggtgctagtggacgggggagcagcatcaacgtcaccttcccccgtacactccaaggcttgggagttcacctcaaagagctccacgagtcggacactcctttcttcggcatcgtgccgacggaaggggaatacccgctgggccacatctacatgccggtcaccttcggaactccggagaactacagaaccgagttcctgaggttcgaggtggcgaacttcgactgcgggtacaacaccatcatcgggaggccgggactggccaaattcatggccattccgcactatacatacatgatactgaagatgccgggaccatgaggaatcataactgtgcgtgccgacttccaaggcgccgcagagtgtttccgagtggccattcaggcagccctcaccaccaagccgtcgacggttccttctacatcggcgaactctaagcctgaggaaggctcacggtaccgg

SEQ ID NO: 171916 - DNA, 356 bp, Arabidopsis thaliana landsberg
attatcgtggcgctgctgtattacggtattgcactcatctacaaatatgccccctcgctcaaaaagaggtggaagctcacttcccccggcgccatcctggccaccacgcttaccctcgccaccattatcctgttctcttactgggtcaataatttcagcagctacaataaggtatatggctctatcggaaccgtgatcatcatcatggtgctcgtctacattaattcgttaattctgctcataggctttgaattaaacgtaagtattgtgtaccttaccagggaggccgaagcaagaatgctgaaggaaaagatggcgctggcagcggaaagccagaaggaaaagccaacagctga

SEQ ID NO: 171917 - DNA, 1460 bp, Arabidopsis thaliana landsberg
  unsure (1)..(1460): unsure at all n locations
gcttgcctcaaatgctcttaggcgagttgtccaagttaaacaatcctcacgtagacaatctcaaagatccatacagtcatctgcatgaacgcaaagtgcttgttgtacttgatgatgttagtaaaagggaacaaatagatgctcttcgtgagatactagactggattaaggagggtaaggagggaagcagggttgtcattgcaacaagcgacatgnnnnnnnnnnnnnnnnnnnnnnnnnnnncttacatggttcaaaatttgaaccacagagatagcttacaactatttcactatcatgcctttattgatgatcaagccaatcctcaaaagaaagatttcatgaagctgtcagaagggtttgtacattacgccagaggccatccactagccctcaaagtattgggtggagagcttaataagaaaagtatggatcattggaattggaaaatgaagaaacttgcacagagccccagccctaatattgtcagtgtcttccaagtgagttatgatgaattgactacagcgcagaaagatgcatttctcgacatagcctgtttcagatcacaggacaaggattatgtagaaagtctactggcttcatctgaccttggttcggctgaagcaatgagtgcagtcaaatctctcacggataagttcctgattaatacttgtgatggccgagtggagatgcatgatctattatataaattttcaagggaagttgatctgaaggcatctaatcaggatggtagcagacaacggaggctgtggctccatcaacacataatcaagggaggcataatcaatgtattgcaaaataaaatggtgagaccagaagttcctctagagttttattggtaagaacttacatttttttctcttcactgatgtcgtgtttgttattggtgcttagaaagctgccaatgttagaggtattttcctagacttgtctgaagtggaagacgaaacgagcttagaccgcgaccacttcataaatatgggaaatctccggtatctcaagttctacaattcccattgtccacaggaatgtaaaaccaacaataaaatcaacatccctgataaacttaagctaccattgaaagaagttcgatgcctccactggctgaaattcccattggagacacttccaaacgatttcaacccaattaatcttgtcgaccttaagctgccctacagtgaaacggaacaactttgggagggtgacaaggtgtgtctctgaataatctgttgattgcttttgtgaatggttaatttacctggataggttttgtttgactggtggctaaactttgttttcttctttttctgtaataggacacaccatgcttaaggtgggtcgatctcaatcactcaagtaagttgtgcagcttgtcagggttatcaaaagctgaaaagcttcaaaggttgaaccttgaggttgcacaacacttgaagcgt

SEQ ID NO: 171918 - DNA, 474 bp, Arabidopsis thaliana landsberg
  unsure (1)..(474): unsure at all n locations
gatctggagccctggccaccgcaatcccgaaggcctgaccttcgatccgcgcactggcctgttgtgggaaagcgaacatggccccaccggcggcgacgaagtgaatgtgatcgagaaaggccataattacggctggggcgaaatctcgatgggcctgcagccgggcatcaccaaacagcatcaggaagggatggaagaccccatcacctattactcgccgtccatcggccccagcggcatgagcttctatcatgtcggcaatcgctatccggggtggaagaacagcctgttcctgtcggcgctggccggacaaaggctgatccgctacgaggtgaaagatcgcaagatcacacacgaggaagcggtgttccgcggcttcgggcgggtgcgcgacgtcatcacgggaccggannnnnnnnnnnnnnnnnnnnnnnnnnactcccagagcctggccaattcgcccggcatgggtgg

SEQ ID NO: 171919 - DNA, 244 bp, Arabidopsis thaliana landsberg
actcaggtgacaccagtctgtctacgttgccaagacctcgtttccatgacagacaagcacatcgggtgagtaccactttatccgtgactggttggcagaagagagcattaaggcgtggtacatcaacaccaaggatcagcttgcggacctgctcaccaagccccttgggaggatcaagtttcttaagctttgctccaggtccgggatggcccaactgtccaacaagacgatgcacaagacttag

SEQ ID NO: 171920 - DNA, 256 bp, Arabidopsis thaliana landsberg; identical to SEQ ID NO: 41344

SEQ ID NO: 171921 - DNA, 584 bp, Arabidopsis thaliana landsberg
cgacatggacggattgcggatagtcccggacaacgtgcggaacaaggagatgctggcgctcgatctcggcaagccgctgaccaaggtgcgcgacccgttcggcacccatccgagcttcggcgagcacaacaatgcgcggctgcgtgccttcctcgatcatttcggcttcgactacgaattcctgtcctcgacccagtgctacacctcgggccgcttcgacgcggcgttgctgacgctgctcgcgcgcttcgacaaggtgatggcgatcatgctgccgtcgttgcgcgaggaacgcgcctcgacctattcgccgttcctgccgatcgatccgaagacgggcatcgtgctgcaggtgccggtgacggcgcatgacgcgaaagcgggcaccatcacctacgaagatccggagaccaaagagagcgtgacgacgccggtcaccggcggacgctgcaagctgcagtggaagccggactgggcgatgcgctggtgcgcgctcggcgtcgattatgaaataaccggcaaggatctgatcgattcggtgaagctgtccggcgagatctgcaaggcgctagacggcacgcggt

SEQ ID NO: 171922 - DNA, 511 bp, Arabidopsis thaliana landsberg; identical to SEQ ID NO: 78491
  unsure (1)..(511): unsure at all n locations

SEQ ID NO: 171923 - DNA, 745 bp, Arabidopsis thaliana landsberg
aagaactcgttgactgtgacagaggttttgtcaacgctggatgtgatggaggtatcatgaactatgcttttgagttcattatgaaaaatggtggtattgagacagatcaagattacccttataacgccaacgatcttggcttgtgcaatgcagataaggttcttaaaccaaacataatgactttagtttagttatgactcaatttggtgtgggaatattaacatttcatctgtgactgatattgcagaataacaatactcgtgttgttacaattgatggttatgaagatgttcctagagacgatgagaagtctttgaaaaaggctgttgctcatcaacctgttagtgttgctattgaagctagtagccaagctttccagctttacaaatccgtaaattttcaatcacttaaaaagcttgattgattctttattcttgattcgattattggtttttctttaaaccacaaaattatatgttttgtgttcatttttcagggtgtgatgacaggaacatgtggaatatctttggaccatggtgtagtagtggttggatatggatccacaagtggtgaagattattggatcattcgcaattcatgggggttgaattggggagatagcggttacgttaagctccaacgtaacatcgatgatccatttgggaaatgtggtatagcaatgatgccttcttacccgaccaaatcatcattcccatcgtcatttgatttgttgtctgagatttga

SEQ ID NO: 171924 - DNA, 490 bp, Arabidopsis thaliana landsberg
caggcccgcatcctgcgcatgatcacgggcaaggtgctgatggaccgcaactgccccgaattcttgcgcgacacggccaagagcggcgcgcggaactccgccgacctgatctcgaagtggcacaacaagggccggctggcttacgccatcacgccgcgcttcgcgccgacctccaccaaggcgcaactggcagcctgcggcgaactggcgcgcgcccatccggacgccttcatccagacccacgtggccgagaaccgcgacgaggtgaaatgggtggccgagctgttccccgacgcccgcagctacctggacgtgtacgaccgctacagcctgctgcgccccggcgcgttctacggccatgcgatctacctcgaccaggacgaccgccgccggctggccgacagcggcgccgccgtggcgcattgccccaccacgaaaatgttcctgggcagcggcttctatgacttccaccagtccgatgcccaccgcc

SEQ ID NO: 171925 - DNA, 803 bp, Arabidopsis thaliana landsberg
ggtatatatactgatcttcagttacacttactatcttgaaacgtgatttgattttaggattaagcatctgacacttcttcattgatgcaggtaatggattctttaaagaacaaaagtatccagaggcagtgaagcattattcagaagcaatcaaaagaaacccgaacgacgtgagggcatatagcaacagagctgcttgttacacaaagttaggagcattaccagagggattgaaagatgctgaaaaatgcattgagctggacccaagtttcacgaaaggatacagtagaaaaggagctattcaatttttcatgaaggaatacgataaagctatggaaacgtatcaagaagggctaaaacatgatcctaagaaccaggagttgcttgatggtgttagaaggtttgcaaattttggcattctctctttgttgtttaaccttgcaaagatcggtctagtgaaagtgttgttgttttcagatgtgtggaacagataaacaaagcgagccgtggtgatctgactccagaagaattgaaggagagacaagcaaaggcaatgcaagatcctgaagttcagaacatattatcggatccagtgatgagacaggtaaaagcagtggcaagcattgtgttctaactcgtaagctgtctgtgagacttgtgtgatgatgtctattgaatgaattttgtaggtactagtggactttcaagagaatccgaaagctgcacaagagcatatgaagaacccaatggtaatgaacaagattcagaagctggttagtgccggaattgttcaggtccggtaa

SEQ ID NO: 171926 - DNA, 614 bp, Arabidopsis thaliana landsberg; identical to SEQ ID NO: 81229

SEQ ID NO: 171927 - DNA, 510 bp, Arabidopsis thaliana landsberg; identical to SEQ ID NO: 39433

SEQ ID NO: 171928 - DNA, 1366 bp, Arabidopsis thaliana landsberg
atgtatgctcagcttgtcttgttgagtgcagaatgagtacatgggcttcatggtgatcgagtgatgaagagaggttgattcctccggcttcgctatagagtgaaactgagctactagcatctccagggatgtgatatagctatttggcgtgatatggctctaaggttgcgatcgagtactttgggtgaaggtgtgatttagtatcttgactttcttctatgtatctcctctgtttgaacactaaaagcatccaaatcccctggaaacaacccaatatgcaatgcacatgcaatcctaatgcaaaatcatcttaactatgcaaaacacactaaaacgactattaatgagatgaaatgcaggtgaaacagacagtgccgaccgacattacctaggtgtcgatcgacaccaactacatccagatcttagaattcttcaaatcccgatttcagctgcagcaaaggtaacaaaacccaaggttccttttcctatagagtcctaggaagtccaaacaggagctagatgatgctagatgcaaagctatgatggataagttgattgtaaagatgccacttatagatgctgtgaagtcttctcctatgatcagacagtttgtgaagaggatggttactaaagatttgcttactaagaaagctgtgatgaagatatctacagaggttagcgacattattcagaacaagattccacagaaacttccagatctaggtagctttgttctcaattgtggtatccttaacgagagttttgatcgatgcttgtgcgatcttggttctagtgtcaacttgatgccttgttgagttgcgctccggcttggtttgacagatttagagcctacgcaaatcactcttgttcttgctgatcgatctgttcgtagatccgatggtatcatatgcaatgtccctgtacaagtcggtactagctacattcctacagattttgtggttttatcttatgagaaagaacctaaagatcctctaatcttgggaaggcctttcttagtcacaactggtgccattattgatgtaaggaagggcagaataggcttgaatgtaggtgatcttacaatgcagtttgacatgaataaggtggttaagaagcctaccatcgatgggaagactttctatttggatactatctcttttttggctgatgaatttctcatgaagatgacacttgctgttcctttgaagcatgctctgattccctcaatagacaaagttcccaaagggtatggtaagctgctggataggattgagcatgtaatgcaattgagttgcacaagaggagttaattggcacatcttcccaagcagcaacaattggcgattggagcctagaaaaagctcctc

SEQ ID NO: 171929 - DNA, 595 bp, Arabidopsis thaliana landsberg
atcaacttctccatatttgcaattaggttctaagccttttttgctctgacatagcttttctagttgttacttatgatgttgagtttatcgtaaaaggtttctctgtttggactgctctgttcaacagctaggaggaacttctcttgatctttgttttatcgcagttattgtctgtctctagtactataaaatgagaacatattttactgtttgagaaatctgatctagagttgtgtgattcattagcattgcctggtgttctctgggtgctgccggattcctatctcgatgtaccaaacaaagactacggaggtgtgtaacgtttgtagattttgtctgaatgattgggtactgagatatggttcttaatactgataccatctgtctttggctctcatgttcaggtgacttgtacgttgaaggaaaggtcatacccagaccacagtacaggttcacggaacagcgtcatactagaccccgtcctaggccaaggtatgataggcgccgtgagacaatgcaggttgagaggagagagccatccatgggtcttcattctccagtaaatccgggagagttcaacaagcccagtgcttaa

SEQ ID NO: 171930 - DNA, 289 bp, Arabidopsis thaliana landsberg
ataataataatggtgattgatcaaacagacccgatctatgttttgttccacgacgaggaatggggtgttccagttcgtgatgacaagaaactcttcgagctacttgtcttctcacaagctttggctgagtttagctggccttcaatcctacgcagaagagacgactttaggtaaacttaggacggtgaatttggtattttgtgttttggtttggtgtgatatcagaagttttggtttcttttttgtaaaaagctatttgaagagtttgatccttcagctatagcagaat

SEQ ID NO: 171931 - DNA, 501 bp, Arabidopsis thaliana landsberg; identical to SEQ ID NO: 19033

SEQ ID NO: 171932 - DNA, 263 bp, Arabidopsis thaliana landsberg
gacatgattgagtacctgcttgatccccagacctggatggcgctgttcacgctcaccgtgctcgagatcgtgctcggcatcgacaacctcgtcttcctcgccatcgtctcggcccgccttcccgcgcatcaacaagcctccgcgcgccgcattggtctgaccgcggcgctggttctgcgcgttggccttttgctgacgctgacgtggattgcgcaggcgaccacgcctattttacggtgtctggttcgccgtgagctggcgcg

SEQ ID NO: 171933 - DNA, 540 bp, Arabidopsis thaliana landsberg
atgaaatatctgctgcttgccggcgcgctgatcgccgccactgtcgccatgcctgctggcgcgcaggccatgtcatcgcaagattggccgatgttcatgggcgacgcccggcacacgggccttgtatcagccatacccacggatatcgccaatctgaaacccgtctggcggcaccgtctggcttccgaagtcagcgcttcgccggtcgtggccggcaatctgctctatatcgccgctgaaaacggcaatctgtacgccttcgatctgacgacgcacaaacaggtctggctttatcatgccgagggcggcatcggctccacgcccgccgtcgccaatggcaagctgtatgccttgagccgcgatggctgcctgaccgcgctcgatgcagcctccggcaaggctctgtggcaattcaaaaccggcggcgaagcccgattcggtgtctccggcggttacggtatgcccaagacggacggcatcacgccagacccgtgggatttctggttgtcctcgccgctggtgcaggacggacgggtgcat

SEQ ID NO: 171934 - DNA, 1132 bp, Arabidopsis thaliana landsberg
gataaatggtcggaaatgttcttccccatagtctcaagcgccaaaacggctcagatcatttcttctggagcttctggaccaagtggtactcttcttctggtaagtaatttgcaattttacaatagatagagtgttcacattaattggttttaaggtcactgaatcttgtctctcttttcaaaaaagatgtttgcagagttacaagtagtgtctccattggtaccaacaagagaagcttattttcttcggtatgtggagcaaaatgctgaagaaggaaaatggatggttgtagatttcccgatcgataggatcaaaccagcatcagctactactactgatcaataccggagaaaaccttctggttgcatcattcaagcaatgcgtaacggatactctcaggtcacatgggtagagcacgtagaagtagaagagaagcacgtgcaggacgaggttgttagagagtttgtggagagcggtgtggcctttggcgctgaacggtggctatctgtgttgaagagacaatgtgaaaggatggctagtctcatggctacaaacatcactgaccttggaggtatatatataacttgtttcacaagtaaacctcaaacttccacaaccaatgtgattagttatccgttttctcgtgttttttccttcagtgataccttctgtagaagcgaggaagaacttgatgaagctgtcacagagaatggtgaaaactttctgtctgaacataatcaattcacacggacaagcaccaacaaaggacacagttaaaatcgtaagcaggaaagtttgcggtggtcttgttccttgtgccgtgtcagtcacgcttctcccttattctcatcaaaaagtctttgatcttctccacgacactcaacgtctctctcaggtaaagaaagtaaaaccagaatcttcttcctctgttcttttgatccaaagattctgaaaatcgattctctgcagctggagatcttgttcatgggtagttcatttcaagaagttgctcatatcgctaatggctcacatcttggaaatagcatctctcttcttcggatcaataatagtgattgattcaaaatcccaacaaaaaaaaaaatcgaattttgattttaaaacttaaaaagtt

SEQ ID NO: 171935 - DNA, 866 bp, Arabidopsis thaliana landsberg
gaaactgatcactgaagcagatggatatcaacctcatctcatagctcctgaacaaggttatcgccggctcatagaatcatgcttagtctccattagaggccctgctgaagcagctgttgatgcggttcattccattctcaaggatcttatccacaaatccatgggcgaaacatctgtaagaatatctctgctcaaagtcataaacccaacaacaacagtaacacttatgagttttgaagcatgattatgtgttttcatcatgactacaggaactgaagcaatatccaacactcagagtagaagtatcaggtgcagccgtggattcattggatcgaatgagagacgaaagcaggaaagcaactctgttactagtggacatggagtctggttacttaacggtcgagttcttcaggaaactcccgcaagattctgaaaaaggtgggaatccgacacattcgatattcgacagatacaacgatgcttatctccgaagaatcggctcaaatgtgttgtcatatgtgaacatggtctgcgctggcttgagaaactccataccgaaatccattgtttactgtcaagtccgtgaagcaaaacgaagccttctagacatcttcttcaccgaacttggccagaaagaggtaacaataaagatatactaaaaaacctatatgagcaaattgacaattgtataagatatgagtaagaatgttaaaatggtttggtgttaaaaattatagatgagcaaattgtcgaaattgttggatgaggatcctgcggttcagcagcgaaggacttcgattgcgaagaggctggaattgtatagaagtgctcaaacggatattgaagcagttgcttggtccaagtag

SEQ ID NO: 171936 - DNA, 1647 bp, Arabidopsis thaliana landsberg
  unsure (1)..(1647): unsure at all n locations
agacaagaaccaaaaataggggaaaactcagctgccagagtaagtaatttatattactcatgaagagtttctttgtattgtaatttctgatgaggtgtttctgatcaactattttgtagagtgtaaacaaaagatcacaacctaagtgtgtattggttgattggtctggtggtgatgaagacgttggtgagggacgtattctatcttctgatcctgatgacttagtcaatgactgtcgtctaggccctacagatcttaaagtgttggttaaaacagctactaaagcagatgcatttctctggagaccatcaactaagatgtttactatggaggaagcagttggacatattattgcatggccagcgactaagtgtgttctgttggacaaggaaatccaaatagaagacattgcgcctttggtaagtttcttatcgtttcttcgatgtactcagcctatttatgagttggtattggaggagctgttttctaaatgtttgtgacatggcctacgagcaaactctccgaataaatgtaaactgctggatttgtctaatgatgatgtgattgttgctgagggtcgatggcagacacaagaagaaactgcaatggttaatggactacctcttggaccaaaggcagtgaaggcatttgtggattcagtgcttcaaccagaaacatccatatggaggcctacaatggatatgacctaccttgaagactgtttgatggcttttgtatcatggcctgtcaacaaagttgtcctcagatacctcatctacaactcagcattctggctcaactgataaaccagctcaatctaaatctgcaaaaggagcaaagtctacagccacagtttctaaatcagcagaaactacctctaannnnnnnnnnnnnnnnnnnnnntctcctattgaggatacaacatgtccaatctctaaggtagatattttcagttgtaagatgtttcgttctttctgttgttgcattgtatccctaattcttagtatttgttgcaaacatagcagagtatcaatgtcgatgcgtccaaggtaaataaaaagtgcagattaatggacattaccggaaagaaacgggttgtagctgagggacgatgggcaacaagcgatccagctcacaaggttcactttgttcccttgggtaataatgcagttaaagtgtgggttgatatcgtgaaggtaagcaaggcagaagtttggaggccatcagaggagatcgtcatattggaggatgcacttggctcagttatagcatggccagaggataaagtgataatgacttgatttggagtgaaacttgtcttgaaactacatgctgcttctaattgtttggattataagtgaaacttgtcttgaaacttgtatgattaaactattgtgttgtatgttttgaattacataaaacaggatttggcaattttataaatcaggctttttgtcaattcaaattaacaagaaaccatcgcatctaataagctgctataaaaatggcacatgttcaaaatgctatcgtagagtatcatagcaataaaaatatgtaattaaatagttttaaataaataattaaacgctataacatgctataatatagcacaatctgaagcaacaagaaaataacagagcacactga

SEQ ID NO: 171937 - DNA, 527 bp, Arabidopsis thaliana landsberg
ttttatgttatgtcagatatttacattgtcggcagtgcttaaagaaagaatgccgagagctatcaaggaatgctttgctgtgctgaaacctggtggtctgctcttatttagagattatggtaaggtcactattaagagctgtatcacatatgtttacaaataaagagaaactaataggctaaacaccttgacaggattatatgacatgactatgctacggtttgagccagagaaacgtgtaggatttagggaatatgtgcggtctgatggaaccctttcctatttcttttgtctcgacactgccaggaaactatttactgatgctggattcattgaggtaaactttcttttttcagtttttctattctttgttgtgattgaatgaataacaaatcttatgatattttgattctcgtgtataggttgagcttgaatattgttgtgtcaaagcagtaaaccggagaaagggtaaggacatgtaccgagtttgggttcatgggaagttccaaaagcccttctataattaa

SEQ ID NO: 171938 - DNA, 1130 bp, Arabidopsis thaliana landsberg
gtaatggtaatgccaggttcccaaacgatgcatatgatcgaatatgggtcttttaccttgactcaaactggaagatgatttctaccgagaccaaagtgaacgacactggtagctttaacttgcctcatgcggtggtcacaaccgcagcaatacctacaaacgcgagtgaatcaatgacatacactgactttctcccctttcctagtgataaaattttctatttcctccacttctctgaggttcaagttttaggggccaatgagaccagagagtttgacattctcttgaatggaaaatttattgccgagagttataggcctgaatatatgcagccgaagacggtattgaactcatatccagttacttgcggaggagggaaatgcatgttcgagctgagaaaaactgacaggtctactctcccacctatacttaatgccgttgaactgtatattgttgtcgagacaccacaggctgaaacaaatgaaaatgatggtacgttattaagttagcaagagttattacatgttttcatgtatatatcaaagctttcatcttctaacatatgttaactctaacatactatcgaattcatgctagtgcgtactatcagaaacattaacgccacttacggattaaagagaatcaaatggcaaggagatccatgcgttccacgagagtttatgtgggaaggtctaacttgcaacgttgtagatgcgtctacaccaccaataataacttccttgtgagttctatctacatcatagttttttttgttttttttcaaaatttctttgaaacgattcctcaagtacataattacttttataaacagaaacttgtcatcaagcgggttaacaggaaccatagcagatggaattcaaaatcttacccatcttgaaaagctgtaagtacgatcattgactagcatatatcaatggaatattttttttataattaatgacttcttatttcttccgaattacagtgacttgtcaaataacagtttgataggaccagtgccggaatttctagcaaacatgaaatttttgacgctcatgtaagtttcatgacatatgtattttttggtatatagtattactcttgatcttgtctcatatatttaacgattc

SEQ ID NO: 171939 - DNA, 1015 bp, Arabidopsis thaliana landsberg; identical to SEQ ID NO: 11481

SEQ ID NO: 171940 - DNA, 994 bp, Arabidopsis thaliana landsberg
aagcttgagtggggaaaggagtggtgagagaacggtaaagagactaaggttgtgtaaggctcttactgtaccagatagcacaactttatttgaagcttgtcgaagaatggctgctcgtcgcgttgatgcgttattgctgactgattctaatgcattactttgtgggatcctaacagacagggtatacatgttttcatgaacaggattctaaatgcaaactggatttttcacttatgtttttttttatctcttttggtttttttaaggatatagcaacaaaagtgattgctaaacaacttaaccttgaagaaagacctgtatctaaagttatgaccaagaaccctgtttttgttttgtctgatactattgctgttgaagctcttcaaaagatggttcaaggtttgttatttcttgttctttcataatttttgttggtcatcatggtatttgaactgactagtggatatgcaggcaagtttagacatttgccggtggtggagaatggagaagttattgcgcttctcgatattgcaaagtgtttgtatgatgcaattgcacgcatggaaagatcagttgaaaagggtaaggctattgctgcggctgttgaaggcgttgaaaagaattggggaacatctattgctggtatgtttaaaaatatggaattaagtatctccatttgaatccatcacaaatgtcttcttgcctgcctctgatgacgtttttgttggatataggaccaaacacttttatggagacacttagagaacgaatattcaagccttcactttcaactataattccagagaatacaaagtaggtaatatcatctctatatttattatcatctttgaaatcattttgatcttatacttgttttattgagacaaatgcaaagcttaacgagtaaatttggaatgaaaacgtacagggttttaaaggttggtttggatgagactgtgttaggagtaaccatgaagatggtcgaatatcagtc

SEQ ID NO: 171941 - DNA, 528 bp, Arabidopsis thaliana landsberg
ggcctgacctcggcctacctgccgctgggggcgtgcatcttctccgagcgcatctggcaggtgatcgccgagccgggcaagggccgctgcttcacccacggcttcacctacagcggccacccggtgtgctgcactgcggcgctgaaaaacatcgagatcatcgagcgcgagcatttgctggcgcacgtcaagcacgttggcggctacctggagcagcgcctgcaaagcctgcgcgagctgccgttggtgggggatgtgcgctgcatgaagctgatggcctgtgtcgagttcgttgccgacaaggccagcaaggcgctattcgccgacgaggtgaacatcggcgaacgcatccacagcaaggcccaggccaaaggcctgctggtgcggccgatcatgcacctgaacgtgatgtcgccgccgttgatcgtcacccatgcgcaggtggacgagatcgtcgaaaccctgcgccagtgcatcatcgaaaccgcgcgcgaactcacggcgcttggcctgtaccagggcaaatga

SEQ ID NO: 171942 - DNA, 1012 bp, Arabidopsis thaliana landsberg
tgcatgcatgcaggatcattccatcaacaaaggagaagagccacaagcgatgtacaatcggctcaagacaatagtgaaccaagtgtgcaacctcgggagcaccaaacgggatgaccgtgaaatggtcaaggttattctaagatcccttgtttttcgtaatcccactcaagtacaattaatacatggggatcctagatacaaactaatgtctctcgaggaagtgattggcaagtttgtgagctttgaacttatgatcaaagactccaaacacatcgtcaacttggagcaaggtgccacctctacacccgaggtgcacccgtcgcattcaaagcgacagaagaaaagaaggaggagtctacaccaagtaggcttccagtcgatgcctccaagctcgacaacgaggcaatgacgctcatcatcaagagcttccgccaaatcctcaaacaaaggaggggaaaagattacaagtcccgctccaagaaagtttgctagaagtgtgtaagcccggtcatttcattgctaaatgtccattatcaagtgatagtgacaggggcgacgacaagaagggaagaaggaaggagaagaagaagtactacaagaagaagggcgacgatgcccatgtttgtcgggagtgggactccgatgagagctccaccgactcctcctccgacgaggacgccgcaaacatcgccgtcaacaagggtctccttttccccaacatcggccacaagtgcctcatggcaaaggacgacaaaaagaaggtaaatctagagcctccactaaatatgcaacatctagtgatgaggagaactctagtggtgatgaggataatttgcttgccctttttgccaacctcaacatgcaacaaaaagaaaagtataaatgaattgataggagctattcatgagaaggatgaactcttggatagccaagaggacttccttattaaagaaaacaagaagcatgttaaggttaaaaatgcttatgcttaggaagtagaaaaatgtgaaaa

SEQ ID NO: 171943 - DNA, 428 bp, Arabidopsis thaliana landsberg
ttttgatggttctggttcaccactcacttttcttcttttttttttagatactccagattcatcaaaagcggctcttccctcttcttcagcattcagaacattgacaagtctttgagtttccagatctactgatctcatgtcgtaagaatcatgtgactcttatcaataagaaaataacaaaaactatgtcaatcacctctaccttgccgcaaattcatttgtttgtgtttcagtatgtttttcagctcactatacacagtttttggaaagagtgaaacgggagacggcatggtgagtcacccattccagctcccaatctcgccaaacaaatcgataaaaatagatagaatcagttgagtactttggttgcttctggatcacccgtcttcgagggcggactgcgatattggttcaacacccatgggcgt

SEQ ID NO: 171944 - DNA, 227 bp, Arabidopsis thaliana landsberg
ggttttaaatgatagcttgaaaaatgtctctgagtcttttgtgtcaaaagcggaaatgcagaaggtaatagtctcgattcctgggagactaatttgtgaattatgtgaaactccctttttcttacttgtgatttttgtatttgcagattgaaatgattcaagattcaaatttatcgaaatttaaatctgaagtcaaaagttctcaggtaacatgtacattagtggtt

SEQ ID NO: 171945 - DNA, 1152 bp, Arabidopsis thaliana landsberg
aaacagagaagctgagacaatgattacttgttcataaagaaactgaatcagaccagactctttagaagttttcacttggattgttctatatgcctctctttctcatgtcatggaggaaaatggaaatgttgaaccttttcctgcaacagcgttgatcaaatctcattttaatgggtctctaaagactgtgttgtgtccaaaggcagcaacagaaagaagaaacacgtacaatctatgatgcaaacacagatcaatgctaagccaacactctaagctctcgtttttctgctaacgaaaacaatgaaatcaaccaaaataaaaaagagttaatgttgcacttacttcagctacgcgcagaagttggaagaccgcttattggcaacaaaaccatttcaatgtcgtctaaccttcgactgcctctattatcgtgacgtgaccttccgctacaagcagaagttggatgcggtgtaacatcttgtgagcttctgctgcaagcagtagtataagtattgtcaacacgttgtggccttttgctttggattcaactcctccacttcgtgttcatcattaaccgagaggttgaagaaactcatacctcaaaataaagatgagattctcaccttaccttggatgattcttgctatggaattacgttatgatacacataatgatataaacattatcatcactgatctcaagcttcatgatatgactaattcggagcaggaatattggtttgagaattatatatatgaacataaatacaaaatgaagaaaactatattaccattcattgaaaatgagatcagaagatactagtgtaagtgttcattattaagttattaatgtaccactgtaccagtacgaagggttttattgttcagtacataaagagattacaacactgagagaaaatgggtaaaattgaaaatcttatatatccaaagttatattgtacaatcgaaaagaagatcatatagggtcatgagttcaatttatttgtttcaaaatagttccaaatggatttaatgtatatatatagtattagaggcatcgtctaaagataaagaaaaaatgagatttaatcatatatgtatggtccatgagttaactccctaatcattgaatcaaataaaccgtcacgaatgattc

SEQ ID NO: 171946 - DNA, 877 bp, Arabidopsis thaliana landsberg
  unsure (1)..(877): unsure at all n locations
cggagacagccccgttgctcaaagttatgcgaagaacatgggactctatggataacgttttggagctctcagcattgtaagaacctgttgcattgcaagaaatctatttaagaaacgcgtaagaaattctttctgacataaaagaagttgttgtaggtatgcaaatcagcagatgttgcggggagagttgaaagccaactgaaactagtgataaggccaatgtactcgagtcctccaatccatggtgcatcaatcgtggctgtaatcctccgtgacaagaatttgttcaacgaatggactctggaactgaaggccatggctgatcgtatcatcagcatgaggaaacagcttttcgaggcattacgtactcgaggtaagtaaggtcttattgatttgtataaggaatgtaaatggacatagctaatgaaatgaaattcaaaatcactgtgacaggcactcctggagactggagtcacatcataaagcagattggtatgtttaccttcacagggttaaacccagctcaagtctccttcatgactaaagagtaccacatctacatgacatctgacgggtaagcgcctgcctctcttcttcatctattaattttcttgaattttgtctaacttagtgtgtgatgattgatataaatgaaccaaaggaggataagcatggctggtctgagttcgaagactgtacctcaccttgcagacgctatccatgctgttgnnnnnnnnnnnnnnnnnnnnnnnnnnnnnnnnnnnnncaccaaagcttcataataaagattttgttcttttctttctattatagcatttccggcagtgacaagataaatgtcgttactattattattgtttcatcccagtatcaataa

SEQ ID NO: 171947 - DNA, 473 bp, Arabidopsis thaliana landsberg; identical to SEQ ID NO: 58831

SEQ ID NO: 171948 - DNA, 520 bp, Arabidopsis thaliana landsberg; identical to SEQ ID NO: 69834
  unsure (1)..(520): unsure at all n locations

SEQ ID NO: 171949 - DNA, 2988 bp, Arabidopsis thaliana landsberg
tgtacaagaccaaattcagtagtgtctttgctcaaaggtttataagatgttatttgttactcattagttatttagatgtgtacttgtgcagaaaactgtctctgctagagttacgtccactttctcaacattttatttgttctgcaattttgtttagaggaagtagttttccttcttgctctctgctgaaactctatgattggcaggccaaggtggtttcggccacgttgtgttgtgcaaaaataaactggatggaagacaatatgcagtgaagaaaattcgactgaaggacaaagagatacctgtcaacagtcggatagttcggtaagtgagaaactgttcatagtgagtacatttggaccaacatatatacttaaagcaatttaaagatctctgtgccatcttggggtgtttttctgtgttaatattagctaaatgttatgccacctggcaagggcttcttggaaattatctatgctctttaagcaagtggtggagatctggattaacatgttcttcatctgcgtatatatgtgctctatactttttttacttgcaactgtgtttgctgcaaaccaggctttatggcctcggctttaaaactctagtgtaggctgtatctggggaggataagatactctataactgatggtttagatcggtttagagtataatgctaaatctgtttttacatgtgctcgttatgaggtactcagagaagtagcaacactttcccgtttgcagcatcagcatgttgtacgttactatcaggtaaaggtcctttctgctcttctgaactttctactgattaatgactacattcagtgagatatcttcaaattggataccagccacgtgtacctacatattgtcattgaatttctgctgcttagtgctattccttttgcctatgttctgtttgttaatgatattaattttcatgaaaataggcctggttcgaaacaggagttgttgatccctttgctggcgcaaattggggatcaaaaactgcagggagttcaatgttcagctactcaggtgcagtgtcaactgaaattcctgagcaggacaataatcttgagtcgacttatctatatattcaaatggaatattgtcccaggtaaagattttaaaagccctatctaaactcattatttcaccccacacatatagtgagctgttaaaacacagatgtagcgtcattgatttttgacattgtgagttataaattatttctaacttctaagttcccctgtgtcccacgcttgtccaagaaaaacttagattaaaatgatccaaaatgtctgatattttcatgaaatcgcggatcagtacatttctcctcgatctgtatagtattgttattttttgttgtcttagctttgggttctttcttgtcttctcttcttactttttttgttcatgttatgttcaaggactctccgccaggtttttgaatcatataaccacttcgacaaagactttgcatggcatttaattcgccaaattgtggaaggcttagctcatatccatggacaaggaataattcatcgggattttacacctaacaatattttctttgacgctcggaatgatattaaaattggggattttggtcttggtatgcttccctacctaatgctattatttgcttcaatttcttggtatgtctgttgttcacatgcttttctgaatagacttaaacctctctagtaacataacgaaggtaggttccttgccatgcttgatttctgctttttatcattttaaagtcgtgagggtattttgatgcatgaattttactatgttgttcaagtctttaaataaaagaatcaatctaatcatctcattatactgtgagtatttaactgtggtatggaaaacaaaaacgaaaatacatgcattttcttactttatcagcaaagttcttgaagctggaacagttggatcaagatgggggtttctctacggatgtggctggaagcggagtcgatagtactggtcaagctggtacttacttttacacagcacctgaaattgagcaagattggcctaagattgatgaaaaggttagtagctgttggtgccttaaatgcttgtatataccttttcttttggtcctcaggtttttattatttcttcttatatctgtgtgtttctaaatgatgtgttgaattgcaggccgacatgtatagcttaggggttgtgttctttgaactttggcatccttttggaaccgccatggagagacacgttattttaactaacctgaagctgaaaggggagctacctctcaaatgggtaaatgaatttcccgaacaggcgtctctactgcggcgtttgatgtctccaagtccatctgatcgtcccgctgccacagaacttcttaagcatgcatttcctcccagaatggaatctgagttactggacagtgagttctttgcagttctctatttgtgtcaacttcatatgaatgttcttggtcgtttgaggttttcatctgatctgtgatgtttttctagtaaggctaacaacacatagtcttgttctgtctccattccgctaaagttacaattcgtaaactggctgactacaattgctattaattcggacctgtcatttgctcataacgtatacaaattttgagttggtgttagtagtgtgtatgttctcttttatttgatgaaatgctgattctttcttaacaagtaaccctttcttttctaaatttcagatattctaagaataatgcaaacttctgaagattcaagtgtttatgatagagtagtaagtgtgatatttgatgaagaagtattagagatgaaaagccatcagtctagtagatcgagactctgtgcagatgatagttatattcaatacgcagagataaatccagagcttcgtgattatgttgttgaaataacaaaagaagtctttaggcagcattgtgcgaagcatctagaggtcataccaatgcggcttacttag

SEQ ID NO: 171950 - DNA, 3904 bp, Arabidopsis thaliana landsberg; identical to SEQ ID NO: 1241

SEQ ID NO: 171951 - DNA, 1437 bp, Arabidopsis thaliana landsberg; identical to SEQ ID NO: 35471
  unsure (1)..(1437): unsure at all n locations

SEQ ID NO: 171952 - DNA, 685 bp, Arabidopsis thaliana landsberg
agtctgatacagaaagtctctatcttttcagtatcttttgatgggagcggttccatttcgtaaggatgttccgagactaaaaaagttaggtgtcggtggggtaatcactcttaatgaaccttatgagactttggtaccatcttctttgtacagtgtaggttcaatgccaccaaacttgtgtttctaattttgttgtctacttgtagagtagtttgatgattgtaagttgtttttaggcttacgaaatggagcatctagtgataccaacacgggattacttgtttgctccttcaattgtcgatataaccttagctgtaaacttcattcacagtgagtgatggtgtgcttgctttttaccttcatttgcatttactctttctgttacttattatgcagtccttttatgttacagagaatgctttacttggtaaaacaacatatgtccattgcaaagctggtcgaggaaggagtactactgttgttctctgttatctggtaagttcattgatcaaatcatatcggttaaattacatttgcagttggtcctttgttgaacttccttctcactaacgttttctctctctttgtttttcagattgaacataagagtatgactgtggctgcagctttcgaacacgtgcgctcgataagaccccgggttttgttgcatccttcgcagaggaag

SEQ ID NO: 171953 - DNA, 339 bp, Arabidopsis thaliana landsberg
  unsure (1)..(339): unsure at all n locations
cacccacaccacttgcaccacccacatccaccannncnnatataccgttatatgancncgagaaaaccccgacggaaggggccgggcggagcccagcgaaaaatgcaacgtccccgccaccgccttctttttgccccagaaggtaaagactcagaactctctgcgcctactgcaccatcagaatctgcagttcctctccgacgttacaatcggcaatctgatctactgactgacatgggtatcatcaactactctatcgactacataacattccgctcatgtccctactacctacaagcaggcagcagaactcgcatgttggcgcaaagccatagatga

SEQ ID NO: 171954 - DNA, 1099 bp, Arabidopsis thaliana landsberg
tctatgtgactgattccgcaaaggacattaaaaacatggtaatttctgtaattctttttgttctttccatctatgataacaagccattctgggtttccacatcaaccttgtaggctttcacacacattcatcgtctagattggttgctactcgagtccttccactcgtttttttcttttgctggtgtaacggcatctgaaacacgttacagaacattaaataccagtcctaataatgaactcagacactttcgtccagcatttaaacttggtatggtttcatatgcagataaacagatatgcgtttagtggtgggcaagactccattgagaagcaccgagaacttggagcaaatctcgaggtaccaaattccttgtatcctcttcgtcccttattctgtattatgtagtggcaactctcagctgtgttccttatgcggtaatatccggttgaaagttaagaatgaatattcactttgtttagattgtgttcctcagagtactagcaagccaacaaaaactaacccctaactcagctggaaatgtagaaggacttgctataaactaattgactaggaaagaattttaaatcagttgcggattcttgatagttgatcttatcggatctggtgctttaattgttcttttggggtaatctcccttctacgttttataggttgacatacccgtcaagtatctgagtttcttcctcgaagacgattctgaactagaacacattaaaaaggtaataataacatcacacttagtcgctagcttgttatacagagaaggaagaatgtgttgtgtggatttttcataaaagtaaaaacacaatgattataatgtttcaggaatatggagaaggaagaatgctaacaggagaagtaaagaagagacttacggaagtgttgacagaaattgtggagagacaccgcagggctcgagctgctgttactgatgaggtaaaaagatcaactaaatttgttggtgtcaatcatcaagattcaaaatatcatttgtactaagtgattcgacaaatttatgttccagatggttgatgcgttcatggcggtgagacctctcccaagcatgttcgaatag

SEQ ID NO: 171955 - DNA, 458 bp, Arabidopsis thaliana landsberg; identical to SEQ ID NO: 6825

SEQ ID NO: 171956 - DNA, 393 bp, Arabidopsis thaliana landsberg
agatgctccccgagtgcgacttcgtgtcggtgaactgtccgttgacgccaagtacacgggcaatcatctccgccccggagctggccttgatgaagcccacggcgtatctgatcaacacctcacggggcggtacggtagacgcggacgcactgctcgccgcgctgcaggagaagcgcatcgccggagcaggcgtcgactgcaccgatcctgagccgctgcccgacggccacccgctctatgacctccagaacatcgtcatctcgccgcatatctccggcggcgccgatgacacgatggcgatgctcggcaccgcatctgccacacaggccctcagggtcctgcgcggcatgcactcatcacgtgtgctcaatcccgcggtgctcccggcgctgc

SEQ ID NO: 171957 - DNA, 366 bp, Arabidopsis thaliana landsberg
atgcagccaaatatacaagcacttactccgcaacattggaaagattacgaactgatagactgcggagattttgaaaagctggaacggtttggcgatttaattttgataagacccgagccacaagcggtttggagtaagttattgcccgaaagcgagtggcaaaaaatgcatcacattaaatttaaaggcaaatctgcaactagtggcgagtgggtaaaaaagaatccgaagacaccggaccgttggcatatcgaatacaaaaatgatgacgttgctataaaattccgattggcgttaacatcttttaagcatgtcgggatttttcccgagcaatcccgaaactgggacttcatttcttcatctatc

SEQ ID NO: 171958 - DNA, 210 bp, Arabidopsis thaliana landsberg
  unsure (1)..(210): unsure at all n locations
atgatacaggaagtgttgagctgaactgcgctccgcaatggaatgtacgatagaagcagcgcaagaagacttcgcaactgttcgtaccgaccgcgcaaacccgggcttgtacgcaaaagtgatggtcgaatactgcggatccttcaccccgcttcaggggatggcttcattccaggttaaaagatgaccncacccccttaatcaatgtgt

SEQ ID NO: 171959 - DNA, 1725 bp, Arabidopsis thaliana landsberg; identical to SEQ ID NO: 35668

SEQ ID NO: 171960 - DNA, 881 bp, Arabidopsis thaliana landsberg
atgaaaggtaaaaacatatacacactcttatgtttcaacaaataagaagcttagattctttcataaaatttcaggaaaccaatatcaatactacggaaacaacaacaacaatgcttcacagaattatccaaattggcacctaaattcacaaggccaaaaccaacaatctactggtggttggggaggcggtggaccatcaccgcctcctcctccgcggatgcctacaagcggagaagattcttccatgtactcaggcccatcacgcccagttttacctcctccttcgcctgctctagccctcggattcaacaagagcacttttacttaccaagagcttgcggctgccacaggagggtttacggatgccaaccttttgggacagggaggattcgggtatgtccataaaggagttttgcctagcgggaaagaagtagcagttaagagtttaaaagcgggtagcggacaaggagagagggagtttcaagctgaggtcgatatcattagccgtgtgcatcatcggtatcttgtttctttggttggatattgcatagctgatggacagaggatgttggtttatgagtttgttcctaacaaaactttggaatatcatcttcatggttagaccacttaaaaactttgagtactaagtttattttctctaatctatatattcaagaaagttgtaaccttaatttgttgttgtagggaaaaatcttccggtaatggagttctccactaggttgcgtatcgccttaggtgctgcgaaaggactcgcttaccttcacgaagactgtaagttttaacattcaccattctcattttcttaaccaagttgcataaaacagagaaagctctgtctctgactagtgttatctttttgg

SEQ ID NO: 171961 - DNA, 453 bp, Arabidopsis thaliana landsberg; identical to SEQ ID NO: 56172

SEQ ID NO: 171962 - DNA, 1867 bp, Arabidopsis thaliana landsberg
cattacaggacttctcatttcggggttgaaagagaagggtattacataccatgtaaccactaatccgattcagagatccattgtgtggacaatgacacttccagaggatattgctcaggtaccataattcagtcaaattttgtagtataggccaattttaatcaattggcttgcatcttgaatttcataactgcaatatctttgaggacaagtggttcttagaacccagtactcgcaactgttatcaatgccccaatctggtctatatttctgtttcctatgtggataagcttgttagttgaacatgtgttttttccctgacttatgcatcattctcttctgtgttgcgaatgtgatttcatcatactctgattgatggaagacaagctatgattcctctctcgtgattgtcttctaacagcacgaggtttgaaatatccgtgtaaagtcgaatgtgctctctttttgtgtgtttcagatccaggcatatgggcattgagtgtgtgctctcttttgtgtgttgtcaaaattattttgctcgagtgtttctgttagaattgttttttcaaacctccatctttaagaataagatatgtacctattagaagttaatcgatctaatataacttcatacaacctgtcatggaattgggttacagattatgaaatattaaatgaagtaaagaaatgaatcgcttgtgcgttggcttgaagggccttagaagattattatgtaaatcagctgtacccagtatttcttatactcttcatttaatcttcttttatctattgcagacattgcctctagggtccaaggttccatatgttttactcgtgtatgaggctgaagacttttgtaatcttgttgctaagaaagaacttctagaaaacgtctacagagttcgtgacgaatacccatcttatacaatgtgctacctcaccaataagttactgtcctacgtaaacaaaaagtgcgtttgagaaagtacatttttgttgcattaatgtttccatattgaagctaaaaactctatcttctagggagagggttgagtacaaggaccctgtaaatggctgtggttggagaaagcctcctattgatgaggtactacagttcctaatcaaaatgtgtttagagggaaaaaaagaaaaactccttaatgctccttttatgtccttaataaagctctgatgtgttacaggcaattgcgaagttaactactcactatattggagtacattcccggcattgtgtagacgaggctgaggtggctgaccatgttgttcggttaacaagtagtctagcccattgccaagtcaggtattaatatctatgctatttcaattttgttcccaaagattttgattcgatatgatgcccagtggatgttccattttcttgatgaccttgattctgaagcaaactgtctgatgcgcaggaagaagttaactcggttatcagtatacgctgatggtacattaatgtccaagaatgcaattgataagcacttgattagagagagcctatggtagagatttaaacccagtttcaataatctttttataaatcacatgctttgtttaatatgcattgggtcgataggttgaaagtgttggtagcaataccaaaggtacagccaagatacgctgtagcagtgtcgaagaaatacccatccttgaagtcccttcttaaggtttatatggatcctaacatatcggtgagttaacacaaactatggatatggatattgacttcttgagttgttgttactaatggcttctgatgcaaattgtgtggtgttggttaacaaaactggggaccaggttcatgagaaggagtttttactgaaagacttgaaagtggaaa

SEQ ID NO: 171963 - DNA, 517 bp, Arabidopsis thaliana landsberg
  unsure (1)..(517): unsure at all n locations
gggtttttagttaacccaaagcactacatctgcgcaaatttatccgaggaaacatctntgcggaatggagattatgatattgtggaactttccaaaaacatgcggaaggaaaagaagatagcagatgttgtaaattcgtatcaatgctattctccaaatcggaaagctgttgtcttcgcttgcgatgttgaacacagcaaaacgcttgtgaaaaaatttaattcacatggaataccctcagctcatctcgatggttcaattgacaaagttgaacgtaaaaatattgtagctgattttaaggccggccgcttaaaagttttgtgcaactacgacatcatctcagaaggttttgatgttccggatattaaagctataattctcgctcgcaggtcaaaatcgttgtcatactacgtccaagctgttggacggtgcttgcgacccgatgtgaagactaaaaaaactcacgggaacgtgctcgattgttccggtcaatggcttgaccacggtttacaggtat

SEQ ID NO: 171964 - DNA, 1136 bp, Arabidopsis thaliana landsberg
tgcaggggatgatgctaaaaggtcaaaagattgctgtgaagagactgtcacaagcatcagaacaagggcatgaggatcttgtcactgaagtggttgtgatttctaagttgcaacatcgaaatctggtgaaattatttggttgctgcattgcaggggaagaaaggatgttagtctatgagttcatgcccaagaaaagcttagacttttatatatttggtaacttatcactcttttttgttttcaaactctggtgcagtgttatcatcaggtcaattaacagaagcaaatttgttgttcagatccaagggaagcaaaacttcttgactggaagacgcggtttaaatatcaatgaaatatgtagaggtctcctgtaccttcacagagattctaggctgagaatcattcacagagatctgaaagcaagcaacatcttgctagatgagaatctgattccgaaaatatctgattttgggttggccaggatattcccggggaatgaagatgaagcaaacaccagaagggtcgttggaacatagtaagtaactccattcaaccatatgtttacatctttttttccattaagagtcctaaaaccgagaaaataaatgtatcgtgcagtggctatatggcacctgaatatgcaatgggaggactgttttcagagaaatctgatgttttcagcttaggagtgatactcttagagattatcagtggaagaagaaactcacattcaactcttttggctcatgtgagtctactttaactcgtaaagtttcttaactctcttgagattgtcatcaagccatcaaagcttctatgtttcataggtgtggtcaatctggaacgaaggggagattaatggtatggtagatcctgagatttttgaccaactttttgagaaagaaatacgaaaatgcgttcacattgcgcttttgtgtgtgcaagacgctgctaatgataggccaagtgtttctacagtgtgtatgatgcttagcagtgaggttgcagacattccagaaccgaaacagcctgcttttatgcctagaaacgttggtttagaagctgagttctctgagagcattgctcttaaagcctctatcaacaatgtcaccatcactgatgtctcaggacgttaa

SEQ ID NO: 171965 - DNA, 1060 bp, Arabidopsis thaliana landsberg; identical to SEQ ID NO: 54362

SEQ ID NO: 171966 - DNA, 650 bp, Arabidopsis thaliana landsberg
aggcgtgcgcgtgctgatgagcggcctggacaccgagcgcttggtgctctccggcggcccgatcggcttgatgcaggcagcgatggatatcaccctgccctacgtgcgcgagcgcaagcagttcaatgcgccgatcggcaccttcgaaatcatgcaggccaaggtggccgacatgtataccgcgctgcagtcatcgcgtggttttgcctacatggtggcgcagcagttcgacaacggcgtgaagtcgcgcgttgacccggccgcctgcctgctcaacgcctccaccaacgcggtgaaggtagcgctggaagcaatccagtcgctgggcggcaacggctacatcaacgagttccccgccggtcgcctgctgcgcgatgcgaagctgtatgagatcggtgccggaaccaacgagatccgccgcatgctgatcggtcgcgagctgttccacggcaaagcctgagcgatacgcatcgctgaattgaaaacggcccgccatgcgggccgttttcacaggaatgcagcaagtgcgcattccgtcgaacatcatcaccgttccagtaaaccgcagtcagcatgctgccgcgatcacgctcgatggcttactgtccgtcaaggactggaataaccagaagcggacgttcaatgcctaa

SEQ ID NO: 171967 - DNA, 843 bp, Arabidopsis thaliana landsberg
cccgatgaatatttctcttggttatcgcgatattactgaagatgctatgactccttctagattgctaatgagctaccctgtccaaccaatggccaaactaaattacaataatgtggttacaccaatagaagaaaatataacaaccaatgcagtcgctagttttaggttgtttggagtctctctggccactccttcggtgatcaaagatcccgttgaacaaattggcttggagatttctagacttactcaggaaaaaaagtttggtcaaagccaaattttgagatcaccaatagagatccaaagcaagcagttaagttctaccagaacttgtaccaaagtaagtataagttcaatatattcttattctttatatatgaaattttttctcattatactcaactcacgcaatcttaatatggaataggttcaaatgcaaggtgtaacaataggaagagctgtggatttaagtgttcttaatggatatgatcagctaatactagaattggagaagctctttgatatcaaaggtcaattgcaaactcgcaaccaatgggaaatagctttcacaaatagtgacgaagataagatgcttgttggagacgatccatggccgtaagtttcctttctatttctatcgattgaaagattagttaacatcttgagagacattgatatttcattttttgtgttgtttgcatgtagtgaattctgcaacatggtgaagaagatattcattcaaaagaggaggtaagaaatttgaagtccaggaagagtctctcaagttgaattaagaatcaaaacatatgtaataaaaagggatcgaaaatgttaccggtgtctcgt

SEQ ID NO: 171968 - DNA, 1523 bp, Arabidopsis thaliana landsberg
ttatgtgcttccatcaaccggtcttagtgaaggactggctattttttggaccaacactgtaaatattgactttgtgcatacaccctccttaaactacacgaacatgtacatatccaagcatggtagtccatccttttttctcacctacatctatggagacccagatcaacgtcatcgcaacgttatgtgggagaaaatgatcttttaggctgatatgggaatgtacagaagcaaaccaaggttagtactcggtgactttaatgatgttaagagtaatgatgaaaagatgggaggtcctaagaggagtgaagcttcgttcaatctgtttagaaggatgctctctgtttctggactacatgatattaaaacgatggggggtaaatatacatgggctgggcaacgataatcacatgctatccaaactaggattgatcgtgttgtggcttcagcggactggttagatatataccccaaagcttatgtacagcttttagagtggattggatcagatcatcggcccctctaagtgcacacaagagaccgcaaatggaagggctactctacattcagatatgacaatcgatggagatttaatgatgggctcaaaaaggatatgcagaacacctagctctctgaatgtcagaatttacttggaaataagttccatttagccttgtaaaaatgcagatcttgttgttctaaatggaaaaccagaaattctacaaacacggagagaaagattcatagtctgaagcatcaaatccagaaagcgtatgaagccaaacctcttgattttgttaagatacaatctttaaaatctgagcttgcttttcattacaggatggaagaggagtattggaaaaccaaaagtagaattcagtggctccatgctggtgataagaacacaagattcttccatgccaaaaccaagcaaagacggagttataaccgaatcaatgcaatcatggacaattctgggcaaataagaagtaatgaagaagagatacataaggtgattgtcgattactttgagcacctgtataaatctgattcgatagaggctacatatatagtggtcaacaacatcagccacgagttacttaggaaatgaatgtagctttaatttgtccttttacggaagaggagttatatcaagcgacattcaatatggcaagagacaaagctccaggaccagacggtcttaatcccggcttttatcaagaccattggtctactatccgctcaggtgtgcttaaatttgctcaatctttttttgagacaggcaagattgattctgcaatgaaccatacttacatatgcttgatccagaaaatagatcatcctatggatgtgaaagattatagaccagtcagtttagccaatgtggcttataaaattttatcaaaagctttatctgaaaggcttaagccatggttgaactctattatctctaataatcaatccgcattcattctcgggcggtttattacagacaacattctcattgcccatgagctgattca

SEQ ID NO: 171969 - DNA, 534 bp, Arabidopsis thaliana landsberg; identical to SEQ ID NO: 75389

SEQ ID NO: 171970 - DNA, 828 bp, Arabidopsis thaliana landsberg; identical to SEQ ID NO: 8333

SEQ ID NO: 171971 - DNA, 1020 bp, Arabidopsis thaliana landsberg
tccaagctcgacaacgaggaaatggctttaatcatcaaaagcttttgacaaatcctcaagcaaaggagagggaaggactataagccccgctccaagaaggtttgctacaagtgtggtaagcccagtcactttattgccaaatgtccaatttctagtgacagtgacaggggcgacgacaagaaggggagaagaaaggagaagaagaagtattacaagaagaagggcggcgatgcccatgtatgccgtgagtgggactccgacgagagctccaccgactcctccgacgaggatgccgccaacatcgccgtcaccaagggcctcctcttccccaacgtcggccacaagtgcctcatggcaaaggacggcaaaaggaagaaggtaaaatcaaaatcctccactaaatatgaaacctctagtgatgagggcaattctagtgatgaggaggataatttacgtaccctttttgccaatcttaacgtgccacaaaagaaaaaattgaatgaactaattagtgctattcatgagaaggatgaactcttggatagccaagaggacttccttattaaggaaaaccagaagcatgtataggttaaaaaggcttatgctctagaagtagaaaaatgtgcaaaattatctagtgagctaagcacttgccgtgagatgattgacaaccttaggaatgaaaatgctagtttaaatgctaaggttgattctcatgtttgcattgtttcaacttccaatcctaaagataataatgatgatttgcttgctaggattgaagaattgaatatttctcttgctagccttagagtagaaaataaaaatttaattgataaggctaaagattatgatgtttgcaaagttacaatttccgatcttagagataaaaatgatattcttcatgctaagattgttgaacttaattcttgcaaaccgtctacatctactattgagcatgtgtctattagtgatagatgtagagatattgatgttaatgctattcatgatcacatgtcttta

SEQ ID NO: 171972 - DNA, 525 bp, Arabidopsis thaliana landsberg; identical to SEQ ID NO: 77670
  unsure (1)..(525): unsure at all n locations

SEQ ID NO: 171973 - DNA, 590 bp, Arabidopsis thaliana landsberg
aaaacgtcgattgattatgcggtagccaaatatatctctattcgcaaaggtgagggaagttctaaggttggccaatccaacctttgatacacaaagttgtgtggataatgtagtctacaaattgtacttcaagggtttggtgatcggttaaaacggcgtcatacaagaaaacgattgtgaaagttggttttggagtcgcaatatacaacgaggcggataacttattctatggaatgaataaatcacttaatgaagctgtgattaaccacgaagaagcagattttctagcactaattactgggttatatgaatcaattcaccgtggggttaaaaatatcgtgatttgttgcgatgaccgtcaaatttaccaaatcgtaagtttttcatagctttgttatttctttggttatttttgtgataacaagtagtgctactctgacttagataatgcaaaatattttttttgggatttgagtagtccaagttttggtagtaataatgagtggtacataagagaaaaagccttgaattagatagcatatgaaatctttttgtggtattatgaatttttatattcattaattatctta

SEQ ID NO: 171974 - DNA, 560 bp, Arabidopsis thaliana landsberg
agtgtataaatccatttaatttattttcaaaatcatatatataaaaaaaaaacataaaaaccgcaaatatccccaaaaaaataaataaaaaatacacattccaagaagaaggtaacaaatcgtgaagtgctttttgagttgaaatctctaccaatctattttttttttttgttagagaacctgaaattttttctgataatggacatagcgactaccaaccggtttaagaagaagatttgtggtggttgcagtgaagctatgccaactgggaagaagcggaagaatgaaaggacgttaacgaacaaagatgtgaatgccaaaagattgaagaaagatgtgaaaaggtgagttctcaaaggttagaatggagtgaggaagactggatccgtgtgctacaaggtatgatggatttcaaagctgtaacagtacaaaatctttctaatgatatgaatgtaacttacgaattcttccaggaatatataagcgctgacgtttgtagctatgcattaaaagagaaaatgaagagtttggaaaaaacattaatggagaaaatggggttt

SEQ ID NO: 171975 - DNA, 632 bp, Arabidopsis thaliana landsberg
  unsure (1)..(632): unsure at all n locations
ggcttgcgtcaacccgactttatgacaattttggtcttctgggtcatttagtcatctggtcatgaactggagggcggaacataagaatgttcaccggnaagaccgcggtagtcaccggagcgtcaagcgggatcgggcgggcggtcgcgctgcgcctgggggagagcggcgcgcacgtgttcgtgtccgggcgccgggcggacgcgctcgccgatacggtcgaggcggtgacccgggccgggggcgcggccaccgcggtggaggtcgagctgagggatcccgccgcggtccaggggctggtcgaccgggcgatgaccgataccggacggctggacatcatggtcaacaacgccggggtgtcgttcctcggcccgatcgccgacggcgacccggaggcctggagagagatgctcgaggtcaacgtgctcgcactggccgtgggatcgcgggcggccattcacgccatgaggaagtgcggagccgaggggcagatcgtcaacatctcgtccagctccacccgccggaagtcgcccggtttctacggcgccaccaagatggcggatnacaaaatcncggcctcgctgcggcaggaactggaaaacgacacgagccgcgtggtcaaagtgatcccc

SEQ ID NO: 171976 - DNA, 453 bp, Arabidopsis thaliana landsberg; identical to SEQ ID NO: 75797
  unsure (1)..(453): unsure at all n locations

SEQ ID NO: 171977 - DNA, 917 bp, Arabidopsis thaliana landsberg
tggggctcatgatatcgagttccgacctcgcactcccatcaaaactcaagcactggtcgatttcgtatcagagtgacagaacagcaagtgccggataatccagaaaccgcagaagtatggcgaatgtattttgatggctcgctgaagttgcagggagcaggagcaggaattcttttcactgcacctggaggcgagcacctcaagtatgctctccagttgctattcccggcctctaacaatgctgccgagtatgaagctttgatacacggattaaacatcgccatatcactgggtgtcaagagactgatggtgtacggagattctctagtagtcatcagtcaaataaacaaggaatgggattgttcaagtgattcaatgggaagatactgcgccgccgtccgaaagctagaagataagttcgaaggtctggagtttcatcatatagaaagagatcggaacgcggcggctgatgtactgtccaagctcggatccggtcgactcaagtcccgcccgggatcttcgtgcaagaaatccttcagccgagcatctcgacggatcaaatagaagagtgcaacatcataggccaacccgagtcagaccctggcgactggaggcaaccgattatcaagtatataaagaatgaagaagagccagaagacaagaactcggccgagcgcattgccagacaatcagcccactatacactcattggggaggtattataccggaggggcgcgtcaggcgtcctcatgaagtgcgttcgtccgtccaccgggaaacaacttctggaggaagtccatgcagggcagtgcggggtacatgcagcatccaaaacattagtcgggaaggttttcaggtcaggattctatgtgcgcgacggcaaagaatgatgcagccgagctagttcagagatgcga

SEQ ID NO: 171978 - DNA, 1142 bp, Arabidopsis thaliana landsberg
tggaactaacaactttttacaaattgataaaataggatttcaatttcaaagagttggatgaagtgacaaggcactatcctcaagggtatcatggagttgataaagatgggagacctatttatatcgagagacttggaaaagctcatcctggtaaacttatggaggttactactatagagcgatacttgaagtaccatgttcaagaattcgagaggacacttcaagagaagctacctgcgtgttcagttgcagctaagagacgagttactacaactactacaatactagatgttgaaggcctggtatggtaaactcatgtagatgctttaaaggaaccacatggtttttcttgaattataatattgctcttgtggttgttcagggtatgaagaactttactcctaccgctgctaatctcctggccaccattgctaaagttgattgcaattattaccctgaggtacttaactctttgatgaatacactttttgtactagaagctctactccaagtataaaaggggagcactctctgggatgaatccaatgagccaagaggacatggatgtttcggttgctctaaaagtttgtaatcatggtctctgactcttgcagactttgcaccgaatgttcattgtcaatgcagggattggattcaggagttttctttggcctgccgcacagaagcttcttgatccgatgactattgcaaagatacaagtaatgactatcgctctggttttacttttaagtatatatcctcgtttctgttattagcaaccacttcattacttgtgttacttaggttttggagccaaggtccttgtcaaagttacttgaagcaattgattccaggttaattttttatagctcacctcatagagtttttgttttgtagatagcctcattcaagttttggttatggcatgctaacattagtatttattgcttttctttcctctctgtacagtcaacttccagaattcttgggaggcttatgcaaatgtcctaacgagggagggtgcttgaggtctaacaaaggaccctggaatgatcctgaaatagttgaggcatgtccctttttgtttttgcttataagaatcaattatcttggtaagttgagttaatattattgttgtcttg

SEQ ID NO: 171979 - DNA, 719 bp, Arabidopsis thaliana landsberg
  unsure (1)..(719): unsure at all n locations
actcatcctcacccctttcccntaaactcagcaaaaacactaagtccaattgctttacatgcgggaagcaagtatccacttcttctcggggtttccattaccactgcaccatctgcgatgtggatttccacgaagaatgtgttaatattcctagaaaaatattacatccttttcacctccaacatcctctctttttaacctatggaaagcatgacaatatcatcgacggcagcaatatgagcgaacaaggcccttatgaagaccaaggcacatcggatcctggtaagtctggatggggtaacatatttgataactgcacttggtgtgggaaatacataccaacaccaagttcacatccaagaatgacagttttctatcggtgttctatttgtaacttttgtttggatactatgtgcacacaaaccaaaccccctcttactattgaaaacccaaaaggccatcaccattcactcgtccttttccctcgtccactcttagttccttgtgatgcttgtggtttggtcaatgcgtcggaagcaagttatgcttgtttccaatgtaattatgtggtacatcaatattgtgttgatttaccacgcgtcataaagatcacacgtcatcctcatcgtctctctttttcatacattacattccacccccaaattcgttatgccgggtctgctacaagacagttgacattaaatatggtcagtattcct

SEQ ID NO: 171980 - DNA, 434 bp, Arabidopsis thaliana landsberg
atgggtcagatcattgagcgttttgctttagagcgtggtcatgagatcgtattgaaaattacgattgacaatcaggaagaccttaccgaaaataatttgcgtaaggcagatgttgcaatagattttagtacacctgatgctgcaatcggaaacatttatatgtgttttgatgctaatgtgcctgtggtggtaggtacgacaggatggtacggacaattacaagaggtcaagaatgaatgcctgatcagtaacaatgcactgctttacggctctaatttcagtataggggtcaacctcttttttcatatgaacaaaatactggctagactgatgaatgactatcctgcttatgatgtgaaggtaaaggagatccaccatacgcaaaagctggattctccgagcgggaccgcaatgacaattgcagaagagattat

SEQ ID NO: 171981 - DNA, 2588 bp, Arabidopsis thaliana landsberg
atggctcaaagaaacaacccgaacaatccaagcctagcttcacctgagaagacgctaatggtggaggcgaggttggagaagactgaagccgtgtcgagtgacttgcagaagatgatgatgcagttgatggctaaccaggagaagataaatcagtggttagatcaactttgtctgacgaatcaaagtgggggaagtcgcgacaatgtgctgacggtggaggagacacctgggtttacgacgccggcggagagagagaggcgtgacgcgctcttacctctcccgaagcttgctataccgtaaaactcggtggaggccacgattcagaccacgaggacggaacctaggggtgagccgcagacccctaaggtggaatcgcctggtaagctcatggatctgccagcttatgactgtcagaccccggaggactggatctttaggatggagaagtgttttagggttaaccagacacctgaagaagagaagcaggaacaagccctagcttgtatggtcggaggtgcagtgcgatgggtaagaaatgttcagttgagggacatactaagagactggctagatttcaaaagcaagctgagaaagaggtatggagcaacgcctagaggtaacatgatttggcagatgcttaagctgagacaagaagggactatagctgagtatagagatcactttgaggaaatgtcagctgaggttcctcatgtgactttgaggaaatatcagcagtgtttctgaatggaatgaaaaagagtttacaggatcaggtgatgagaaagagacctatggggatggatgagattgtggatattgcgaaggtgatagaagagctggaggctgagaaaccctatgtaccgaaaccgtttgcaagaaccacttcggcaccggtgttggctattcagaacagaagttttgggcaaaactcgagggccaatcaagagtacagcccaaccaggagatcatttaaggtaaactggagcagtttcacgaatacagagcctcgtaaaggagtccttaacccatgtaggcattatagagaaagttttttcatggggcatagatgcaagggaaatcataggtttaagtgtctggagttggaggaaggcaatggtaatgaggagatggaggaacaaaatgacgaagaggaaggtaacgaacaaggagaggtagtggaggttcagggaatgcaaaggctgtctctaaggtccatgactggattcgatgggaagtcagtgcgtatgaaagcaagaatatgaaaagtggagttcattgtgttaatagattcaagagccaccactagcttcatcagcccaactctagctaagaagtgtggactgcctgtgattgacactaaaacttttggggtttacgtgggagatggacgagttaaaacgggacagggaagatgtcagaacattgtggtcttagtgcaaggtgtggagattgtggaagagtatttggtgtttgacttgggtataactgatctggttttgggggtacacatggttagagaatctaggggataccaagattaattggaagaagaaggcgctgagtttcaaggttcacaatgagtgggtgacattggtgggagaccttagtttgcagaagacaccaatgaccttgaaatcattggagaagaatatgatggatgtagagatgatttgtttgatggaattgagcaccttgtttgaaggaactgaaccaccaccggaggagtcaaatgatgaagagccgaaaggtgttcttaaacagtactctgatgtcttccagatgcctaaagggttacccccaacaagaaacagagttcactccataaacctgaaggagggatcgccactaatcaatgtgaggccttacaggtattcttacacacagaaaaacgagactgagaagttgatgggagagatgacagaagcgggaatcataaggccgagtgtgagtccgttttctagtccagtgctgctggttaagaagaaagatggatgatggcgtttctgtgtagactatcgagctctaaataaggcaacaatccttgacagatatccaattcctattattgaagagttgttggacgagctgaaaggagcagtagtgttttccaaactggatttaaaatcaggatatcatcagatcagagtaaaagcatctgatgtggagaaaacagctttcaagactcatgatggccattacgagtttctgattatgccatttgggctgacgaatgcaccatcgactttccaaagtatcatgaatgatgttttcaggccctatttgcgtaagttcgtcttggtattttttgacgatattctagtgtacagtcctagcttggaggaacacaaaaaacatttggagatagtgctagaagtcttgaggcagtagagattttaagcaaatgagaagaagtacagtttcggatgtcagaaagtggcttacttggggcatgtgatctctgacgaaggtgtgtcagcagacccacagaaggtggctgcaatggtcaaatggcctgaacctaaaaacgtgatggagttgagaggttttttgggattaactggatactacaacgatttgtagggattttt

SEQ ID NO: 171982 - DNA, 603 bp, Arabidopsis thaliana landsberg; identical to SEQ ID NO: 66616

SEQ ID NO: 171983 - DNA, 1040 bp, Arabidopsis thaliana landsberg
gaccctcactcgctaaactatgaacagcttccatgagaacattgatgatttcacaattcaggcaatggaaggtgtggttggtttcaagtcttacattccaatgtctatagagcttcaaaatttcactttgagatggagaaaatcattgcctgttgaagaagcggagctaactcggttgagtatctctggcatatgggctcacgatatcgcttttgctctggcgagagcagcagaagttataaggatgccaaatgtgacatcaactctccttgaggaaatcacaaagactaggtttaacggtttgagtggtgatttccaactaaatgataagaagttgttatcaaacaagtttgagattatcaatatgataggatcaagtgagagaagagtagggttcttgaactctaacggtagttttagtaatagaagacatttatcttctactcataacaagcttgagaccataatctggccaggtgggtctgctcaaagtccgaaagggactagtctaatagatagcgatagaaaaaagcttagggttcttgttacatctagcaatagattcccaagactgatgaaagtggagactgatccaataacacatgaattaattgttgaagggttctgtatagaagtttttcaggcatccattagtcctttcaactatgaagttgagtatataccttggctcaatggaagtaactacgacaatcttgcatatgcacttcatagccaggtactaagcatgtcttacttaagtgttttatattataacaagtatttttaaaattttcatcagtgtagaatgtgggaactgaatgaactccattgaaatttttgtgttgcatcccttagaaagacaaatatgatgctgctgtgggagatattacaattacttccgatagatcgatgtatgttgattttacgttgccatacactgaaatgggtcttggaattgtagcagcaaaggagagaagtatgtgggtgttcttccaacctttaacaccggatcttggatacaagtcagcattttgtctgag

SEQ ID NO: 171984 - DNA, 1460 bp, Arabidopsis thaliana landsberg
attcataattatctattcgaaaggaatatgattatttcttaataataattagtgatttaaaattaaataatcacaggtgatatgcttgtacattaccggacacctggagcaaatctttacactagagcatgtcaaagagttactccgttacatgtataacactcaggtataaattgcaacagatttatgtacatttattcaaaatagacaaagatatatatatctatatatatagatatgtatacctcgttagctcaactgaaaaaacacctcaaatcaaaacaaaacctagaggtcacatgatcgagtacgcttggagtgggaccatataacatgctcttgtctcgtgttaaggggatgtacagaccttagttagaacttcctaatgattcaacaaaaacaaagaaaaaaagataaaagatgtatacaattgttagaacttgtaacctatagtatgttacaaccataaccattggtatgcagaatgatgatggtgggtgggggttagatatggaaagccacagtgtcatgttttgcacggtcctcaactacatctgcctacgtattttgggagtagaaccagatcttgacggtcaaggaagtgcatgcgcaagggctcgtaaatggatcctagaccatgggggtgccacgtatgcgcccatggtcgctaaagcttggctttcggtatgttttcacacacatacgtataaaattcgaggttttctaaaccaattttttatataagttgtggttcgattcattaagttaatcaattctttatacaggttctcggagtatatgactggtctggttgcaaacctctaccacccgagatttggatgctcccttctttttctcccattaatggaggttccataattcataccttaatgatatgaatatttatttttttgatttgtagcacttgcatgagctctatatctttatgacactgagtaaaaccatgtttcatatacctatgagtgtaggtactctatggatatatatccgggatcttctcatgggcatgtcatatttgtatggtaaaaaatatgtatctacaccaaccgctctcattgtacagctccgagaagatctttatccccagccttacagcaaaatcatttggagcaaagcccgtaatcgatgcgcaaaggtttgtgtagtcatgtgaaatatggattaaaaaaaaatgacatcttatattaatataagaaaacaatttgtgatcacgatgatgcaggaagatctattatatccaaagtcatttggccaagatttgttttggaaaggtgttcatatgctttcggagaatatcataaaccgctggcctctcaacaagtttgttagacaaagagcactacgaaccacaatggaacttgttcactaccatgatgaaacgacccattatatcacaggtgcatgtgttgtgaaggtactatacatacataaagtaaact

SEQ ID NO: 171985 - DNA, 744 bp, Arabidopsis thaliana landsberg
attgacaaactaccgagctgtttaagaatcgtcatccaaagtatagttgaaacaatggaagatattgaaagagaaatgaagccgcgaggaagatcctcgagtgtgcaagacaccgtaaaagaggtacaccaacaattttagggtttagttttaatcaatgtccatataaattaatgtttgtgtttaatattgagaattttgcagattaagatcatggggagagcgtacgctgaaatatcaaaatgggcacgagcaggtcacgttccaacctttgatgactatattgagcttgggcttgactcgtcagggattagatgctttgcaatgtacagcttcatatcgatggaagattgtgaggagaatcaaacgaacgcgtggttcaaatccaaacccaaaatgttacgagctttaagtgttatatttcgtcttacaaacgacatagccggcttcgaggaggagatgaggagaggagaagtggttaatggggtgaactgttacgttaagcaacataatgttaccaaggaattggcggttcgagaaattaagaagatgattagagataattacaagataatgatggaagagttcttgacgataaaaagtgtgccacgtccgattctggtccggtgcttcaacattgtacgattggtcaatctgtattacgaggagggtgataatttcaccaatcccaatggcaagctcaaagatctcatcacatctttgttcttccatcctcttccgcta

SEQ ID NO: 171986 - DNA, 2254 bp, Arabidopsis thaliana landsberg; identical to SEQ ID NO: 26756

SEQ ID NO: 171987 - DNA, 886 bp, Arabidopsis thaliana landsberg
gggctctccaatctggaaaggatccacattctgtcatcgggtcgagttctcttgagttccctgatggcttaccttgcccctcatctaaaagtgagttgcacctttttccctttctcaaatcaaactgatgactgcaaatacttaatctctaaaccttgaacaattccaggaccaaaacagaagctttctgaggtagagcaacaatccaagaaggccgaagctgcacagagacggcgaatgcagtgtgagaaggctgcccaagaagccgaggtaaagttgatacattttttctggttaatatataatgccaatacaagccgaatgacgatctaagagcttcttctttgtcttgttcaccaggctgaagctatcaggaaaatactcggacaagattctggtagaaagaaaagagaggagaagataaaaaaacaacaggaagaacgagctcaggtacctttgattacagatgaaattttattaactcctcctctctgtttgttctgatttcatctttcctcttctcaggagagagctgcaagatcaagcacactcgcatcaaacactatcagattggttattggtccaagtggaacaactatgacattttctgaagacattggtcttccagatatcttcaagccagtcacgtacaggtatgctaacatctgaggatatatttatagaatcatatttatatatgtggaattgtgagatttgaagtgtgtgttttgatggatctgtgtgcttcagttatcctcctccgcgagagaaatgtgtgggaccaaattgcgagaaagcgtacaagtacagggattcaaagtcgaagctgccattatgtagtctcggatgttacaacgccattcaagagaagatggaacaagcactg

SEQ ID NO: 171988 - DNA, 1789 bp, Arabidopsis thaliana landsberg
gatttgaatttacctctctcgaacatcctcaacatcttccaaacaggtcgaagccacatggctgctgtcgttgggaccaagaaccacactaataccaacactccagtccatgaaaagagcatcaatggttaagagactcgtatacaaatgagagagcataaaattcgaaatcatattatgttttgagacgagaaaatttacgtcttctgtaatttttcaggatcgcctaataaagacgccaacgtttttctgagtattcccgcgttgaactccagcgaaactagtcatcaaagtccaatccgatgcattgatagtatttctgatgaagatgaagaagtcattgggattataactctggaagatgttatggaggaacttatacaggtaatctataatatgttatcactacaaatgttagtcatctaacataacgtttgtgattgaattaaccatttgatgaaccttgaaggaagaaatatatgatgagacggaccagtacgtcgaacttcataaaaggtatgatcaccaattatcaatccatacaatagactgcaatttacagtaatttcctactacaggataacaataaacatgccaatgtcgggaaattcgccggaaactgccacttgggcttcggagctggcatctcctatctcgccgtatcgctcaagtcttctgtcgccgagcatcatgatctctacgctgctgcggtcaccaataaattcaccttaccgtcactctctgttactccgaccaacactccacgcttctccaccagcgcaatctccttccatactctctccggacagtaataatgagcgttattattacttgtcgcctagtagggtacgtaccgtgagcctcaagaaattgctttacagtatctttcttgcgctggaagttaattccgcactttgtttattgtttgcgttgttgccttgcaggtgttgaggaaatcgtacgaaaagctatcaagatcaaatggttcctaaaattggattatattatatgtagtgtgcatttgaagtgaagaaataatgatttttctaattttctgaacactaattccatgttcttaaaatacaaaattgaagaaaacgttccaacggtattattttcatgaaatgaagaaaaagatataaagaaggataaatagtatgaaatgtgtggcaatgaacatatcccaaagataaaaacaaaatatgcattatccctaaagacaaaaccatataatacatgtagataagataaataaagaaaaacattagaagaagaaatagaaatgagagctctcttgtgctcacaccgtttactaccattatcatctctctcaagaacaaccgtcaaaaccaaatctcacaatccaaaaaccctatatcctaacaacaaaccaagatgggaatccaagctccacgctggacctaaagggtttcaatcttctagaacctctgaaaaacccggccggccagacccggacccggaagacgatcccccgatacctcaagaagtgttcgagaggatgatggggaggattgtggtgtctgtgggaacaccactgggcttgggagtggcgatcttgaaagtactcgaagttttgaaggatagaaacgtctgggacgtgcctttgtgggttccatacttgaccacactcgtgacctttggttcgtcggctcttgggattgcgtacggaagcttgtccacaaacctggacccggccaagactaactctctttttggactcaaagaggcaaaggagaattgggtagagatgtggaaagaggaccaataa

SEQ ID NO: 171989 - DNA, 1257 bp, Arabidopsis thaliana landsberg
gaaataatcacaaaccaaaggaggaacaagcagtttcacagaaaaccacagtaagctcgaatgcggaggtacgtagtttaatccagttgatttgaagataaaaggaacttgattatggattagttagaagcaattgactatgagaattctagtatctttttgtcaaatcacaggacactttcttcaatgggatttgctaacacttgttaatagaaaatcgaatttagaatttgcatccagatagtcatagcatatgctttaattttgtaatgtatgttccatttcctgtctcaggtgaaaatttcagcaagagatattcaacttaatcataaaacggaattccgacccccttcaagtaagagtgaaaagaatacaagggttcaacttgaaagagcaacagatgagagggtaaaggagatcagagacaaaattatccaagcgaaagcctatctgaatttggccctacctgggaataactcccaaatcgtaaaggagttgagagttcgaacgaaagagctggaacgggctactggtgatactaccaaggataaatatttgccaaagaggtgagcacagctgattgattcaaagggagtcctgttccatcctgtaaaaagttttggcctttacttatgaagctaaatcttaatgaatattgtgttaatttagaagagtcatacataaatgttttgtttcttttcagctctcctaacagattgaaggccatggaagttgcgttatacaaggtcagccgtgcctttcacaactgccctgccattgctaccaaactccaagccatgacttataaaaccgaagaacaagctcgggcgcagaagaaacaagcagcatatttaatgcagcttgcagcaaggactaccccaaaagggcttcattgtctctcaatgcggttgacaacagaatattttaccctggatcacgaaaaaaggcagcttttgcaacaaagttataatgatcctgatctctaccattacgtagtcttctctgacaatgttttggcctcttcggttgttgttaactctacaatctcctcatcaaaggtaaatgtttcacctttattctctttctttcaacatgttgtggttcagttcctttatactcctgaatttgatatctggacaaatgctttaggcttctactgtggttagtaccatatataggatattgtctagttatgaaactaggaaaaggaagttacattattgtgtgctctttgttcagtgaataacttatcttttt

SEQ ID NO: 171990 - DNA, 1034 bp, Arabidopsis thaliana landsberg
cattatggaccagggacttcaatgcaagctccatttttaatcaaccttggaaaccaatctaaagttccaatcatttcattctctgcaacaagccctcttcttgattccctccgtagtccatatttcatcagagccactcacgacgattcgtctcaagtccaagccattagcgccatcatagagtcatttagatggagagaagttgtgcctatatatgtagacaatgagttcggagaaggtattcttcctaacttagttgatgcttttcaagagattaatgttcgtatccgataccgaagtgccatctcattacattcctctgatgatcaaatcaagaaagagctttacaaactaatgaccatgcctactagggtttttatcgtgcacatgctgcctgatctcgggtcaagactcttttcgatagcaaaagagattgatatgctgagcaaaggatatgtatggatagtcacaaatggtatagctgatctcatgagtataatgggggaatcaagcttggtgaatatgcatggtgtcttgggcgtcaagacatattttgcaaaatccaaagagctactacatcttgaagctcgttggcaaaaaagattcggaggagaagagctgaacaactttgcatgttgggcttatgatgctgccacagcacttgcaatgtcagttgaggaaattaggcacgtaaacatgagtttcaacacgaccaaagaagacacttcaagagatgatattgggactgatcttgatgaactcggcgttgctctatctggtcccaagcttcttgatgccttgtcaacagtcagtttcaaaggtgttgccgggagatttcagctaaaaaacggaaagctagaggcgacgactttcaagattatcaatatagaggaaagcggtgaaagaacggttggattttggaaatcaaaagtaggattagtaaagagcttaagagtagataaagtgtctcacagctcccgtcgccttagaccgataatatggcctggtgacactatttttgtgcctaaaggttg

SEQ ID NO: 171991 - DNA, 511 bp, Arabidopsis thaliana landsberg
cgccgagcagaccaagtccattagcgttcctcttttccctaccaccaccatcggatctttccctcagaccaaggagatcggtatccagcgaaacaagttcaccaagggcgagatcactgctgaggagtacgagaagttcattgagaaggagattgccgaagttgtcaagatgcaggaggagctcggccttgacgttctggttcatggtgagcccgagcgtaacgacatggttcagtacttcggtgagcgtcttaccggttacgttttcactacccacgcttgggttcagagttacggatcccgttgcgtgcgtcccccgattatcgtcggtgacatctctcgtccagctcccatgactgtcaaggagtccaagtacgctgtctcgatttcatccaagcccatgaagggtatgcttactggacccatcacctgtctccgctggtccttccctcgtgacgatgtccaccagactgtgaaggctcagcagctggctctggctctgcgcgacgaa

SEQ ID NO: 171992 - DNA, 1665 bp, Arabidopsis thaliana landsberg; identical to SEQ ID NO: 21327

SEQ ID NO: 171993 - DNA, 327 bp, Arabidopsis thaliana landsberg
atggaccggctgaccagcatgtccgtattcgcgaaggtcgtcggcgagggaagctttgcgcaggcggcgcggcagatgcgactgtcaccggcagccgtcaccaagcatgtccagttgctggaagagtggctcggcgcgcgtctgctcaaccggactacgcggcgtatcagcctgaccgaaaccggcgctgcggtttacgagcgaagcctgcgcatattggaggatgtcgaggaggtccggacgagtacggccgaccgccccgtgcgtccgagcggggtgctgcgcgataagaaaccctatctccttcggcgctctccatctcggacc

SEQ ID NO: 171994 - DNA, 509 bp, Arabidopsis thaliana landsberg; identical to SEQ ID NO: 21845

SEQ ID NO: 171995 - DNA, 785 bp, Arabidopsis thaliana landsberg
gaatctgcaggagaatcctataggcttctctctgtttcttcatcaaccacatttcttgccttcataatcatcttcttacttgcgggtatagcaagaagaaagagaagagcgcctcacaggctgcctccgggaagcagaggatggcctttgatcggagataccttcgcttggctcaacgccgtcgctggttctcatccttcaagcttcgtcgagaaacaaataaaaaagttcgtctctttgctatgctctgttttgttattaatactcaagaggcctgataatagtggttttaatgaaattaggtatgggaggatattctcgtgtagcttgtttgggaaatgggcagtggtatcagcagacccggattttaaccggtttataatgcagaacgaaggaaagctatttcagtcaagttatccaaagtctttcagggatttggttgggaaagatggagtgatcacagtgcatggtgatcagcagagtcggcttcactcgattgcatcgagcatgatgcgtcatgaccagctcaagactcattttcttgaggttattgccggcgttatgctccaggcactgagtaatttcaagcacggtgaagtcgtgcttctccgagatatctgcagaaaggtgagtgattgaatatgaagagtaagaagaagagaccttttcggagatttttcttcaattctgatcgttgtttggttctgttttagggtgccattcataaaatggttgaccaaagtctcggtgtgtcgagcgaatcagaagtcaataacatgtcccag

SEQ ID NO: 171996 - DNA, 599 bp, Arabidopsis thaliana landsberg
atggtgcataccaaaatgcaagagcaagatgtgacttttggtgcccttgttgagacaaagttttagaggaagaacctttgagccagaaaatgatcacaaccttagtgaaatcccgcagccccttcttcttggagatggtcaggctaataatggtcatggcatgaatggtggtgctgttggagttgttgaccactctgaaaggaagactcgtagggtgcaaatgttgagtcctaagactgaaggtgagaatgccaaaaagaggaagacttggctgctggattctgaggtactaggctatgtttctttcaatttggctcaaaaagcctgtgtctttttgttttctcaggattggatttcactgttttgtggtcgaaaattatgtggtgattgttcacttactggttcccctttctctacaggcacagggaactgatgaagcagggacaccggtagaacaagtggcgtttctaagagaagtggaggctttttacaaagagagtttcctggaatttaaacctcctaagttttatggacagcctttaaacattctcaagtcccttgttggaaaagtggtgcttttgttcttaaataaaaccata

SEQ ID NO: 171997 - DNA, 2065 bp, Arabidopsis thaliana landsberg; identical to SEQ ID NO: 31251
  unsure (1)..(2065): unsure at all n locations

SEQ ID NO: 171998 - DNA, 562 bp, Arabidopsis thaliana landsberg
acatagataagcttgtccatacattggttgatgatttcgacagggatggagatcgtgagatcgatgaggctgaattcttgattgggatcaaaaaatggctgaatcagtacaaattcagcttcgataccaccgtgccaccaagagaggaccaagctgtaagtgcataacaatcttctcaattcattttttcttacatgtttgatcagattaataaatatcaaaaacatgttgattaattgcaggagggagtaccaattctgaaggtagaaaagccagagcagagtcttgttaagaagctgctctcatggagaaccttgagagcttcccttgaagtcattttagggatgctagttgtcatctatcttgcaagacctttcatgatgaacatccaacttttgtcggaatcagctggagttccttctttctatgttgtctttgtagtcattcctttggcaagaaacctaaagaacaccttgtcagctcacttctgtcgcaagaaagacaaagcgaaaatcacatctgacacattttctgaggttagttaggtttcttgaaactccat

SEQ ID NO: 171999 - DNA, 940 bp, Arabidopsis thaliana landsberg
aacataatagatgccgtggaagagaagtatcttagagaaaccggacaaaacccggacgataacatcgagttccaggtcctcttcaacgacttaagcaataacgatttcaacactctcttccagggacttccttctggcaggagatactatagtgctgccattcctggttccttctttgaccgtgttcttcctaagcatagtatccacataggagtcatgaattatgcttttcaattcacctccaaaatccccaaagggatctcagaccgcaactctcccctctggaacagagacatgcattgcaccggatttaacaacaaggtcaagaaagcgtatcttgatcagttctcgctcgactccaagaatatattggatgctcgagctgaagagcttgtgcccgagggattaatgttgcttttaggatcgtgtctaagagacggtatcaagatgtcggaaacatatagaggaatagtgttggacttaatcggagcctctttaaatgatcttgctcagcaggtatataaataacgttatcttttaatctttaacaaaccatctacaatgaaaaaactaacattatcttctttaaccttttttttataacaaaaagggtgtcattgagaaagacaaggtggagtctttcaacatcacactctacattgcagaagaaggcgagttgaggcaaatcatagaagagaacgggaagttcacaattgaggcattcgaggatatcattcagccaaacggggagtcgcttgaccccaaaatcttggctgtctccttgaagtctgcctttggaggtatcctctccgcacattttggagccgaagcgatgatgaaagcctttgagctcgtcgaggccaaggcacaccaagaattttttcgtctccagaatgccaaacccacaatgcaatacctcatcgtacttcgcaagaactga

SEQ ID NO: 172000 - DNA, 553 bp, Arabidopsis thaliana landsberg
ttattttgcacacttaggcatttaggatcatcttgcatacatattgcatgttttggtgtgttttcaggtgcagaaggagcttacaaggactctactcgaccctctaccctatccaaccaggagggaagcagcagaacaatctactcgaccagttcactcgatccaggcagccatagaggaggcatcaattcactcgacccacttactcgatccaagtagccacagaggaagtagcagatcggtctactcgcccctcttactcgatcctctactcgacccatttactcgaccaagggcgaccaaatctactagactttttgatctatcaaagcgtcttcggatcctcctcattctccactcaaccagacatctgagcatacagataggagaggaagaaacatctactcgaccaattgatcactcggagcatggacacaaaggcgcagactttgcagcaccctctttactcgatctccaagatcgagcactcgcccaaaccgcctcaagtctcttgtcttctagtgaatctagggttttcaacattttactataa

SEQ ID NO: 172001 - DNA, 2343 bp, Arabidopsis thaliana landsberg
acttatgccaagagacaggaacaccacagggatgtaaagccagccaagtttttgccgctgagaaaatgtttgaaggagaatgatgatcttgcttccagaggtaaacatcatcctgctcacaatcaaccatacttccacagtcaggcaaaatgttttttatcagagagatgataggattcctgcttcgggataaggagagccaccaggtattccctcttaaagcgtctttaaccactgattgagaaggcaaaccaacaacttgcggaccaatcggaccagttagatgaataagcggtccaagcccggtccaatagcctgatccaattatcgtaccagaaactagttgtttctccagaaccaatctcacaaaacaagaaggggtctagctatgtctccagaatactatgtctctcagtttacataatatattgtacaactcctctctaataaagtattcacattcacattccatatggtagcagagcaaacgatactttttataaataaataaataaaactaatctttcttctctttttctctagccgccgcctctgctctaatggccaccgaagctgttgacgtcgctgcaactactgtcttgaatgttaacatggctaacattaccaagctctctcaatccaactacctcatgtggagtctccaggttcgtcgcagattaatattcataaatataacttaatttacacctatttggacatgagggaggtatctaactatcgacaatggaaaagtcatagatatagcttttttcgggcggctggatccatacgacataatgcatttcagtgttggttaaagtttcaaaatgtcctctttatggatttttatttgaaaaatatcctattttattttttcttgtaaaaattaatttttaatatataaagttactaaagtaacctcattaaaatttaataataactaaaaagaatttaaactttaaaaataacaatccatgacttaatatttcaaattaatatttgatttaactacaatttaaaagataattcttatttaaatatttttatacaaaattttgttcaaacaaatatataaataaagaaataaattttattaagtgatacattttaaaacatatttagatattattttgttaaattttaatatatatgataaattttttaactgtgtttatcttaaaaatagttgaaaaatttattaacaaccaaaccatatttcgaaactgaacataatatttcgaaaccatatttttgaaactgaacatatttcaaaatgttttttctttaacttttttctttctttcacattttcaatcatgtgcttttgagacgataggttggtgtggcattcacacgtgcgtatcgtggaaatgtatcaacaattttacacgcctaatgaaacgttcctttggttaggttggtaattgtacttgcagcttataatgctaaacaaagatataaatccaactaaaaacgctgcgttttttgtttccacatctctttctctcttaagtctcaagcaagaaaaatgggtgtgatctctccgattgagactctgttctttaagtctcaacatcgtcttcttcaacctcgaaactattcctacccactggttttgtacaacactcgacaagttgcgaatttcccacgtaacagcttctcattatcttctctaggtgtcactttctttctctgttttcttatgaaatgtatattcatttgtttagtctttatttcttgtttttgatgaatatagttctcttgtaggatcattctctgtagattttccagtacgaagtaagccgatttcgcaaagtaagtaaaatctctgctaataactctgtttttttaggggtcaagtaattcagcttttgatatttggttttgtgtgttctataatccaaagatggcaagtcaagttatccttgcaagagatatgtttccgaatctgactcaaacgaggtaaaacacgatcaacaaaattgcgacttttctcgctttcttggcaagtaacagttctgttttgtttcagctgtaccataagaaggtttcttctattatggaaacattaaagcaagcctactcttttattcctcatggaattctgttaagtacaatattagctcttgtctatccaccttctttcacatggttcaagccaaggtgtgtatcaacctacttactaatttgatcaaaatcttaattagacatctctctttattactatttctccttatttaggtactttgtacctggcttagggttcatgatgtttgctattggaaacaattctaatgaaagagactttcttgaagcacttaaaagaccagaggctattattcc

SEQ ID NO: 172002 - DNA, 1031 bp, Arabidopsis thaliana landsberg
tggacgtgttcaaactcaatttccacctgcacctctttcgcatcatcattattcaatgcttgtttgtcaaccattaccatagagttgttttttgttcgtatgcgtaaatatctggtgaagctacattaccattaccaactctgaagttttttcttatatgtttgcagaatcagagcccgtcccctgcacagcaaagaccagtgccatcttacattgcacatcctcaaacttttcatgtcaactacggagagaacgctgaccaaagatggatgccgtcttccattgcacatcctgaaactttacctgttaactacggaggaaatactaaccaaagaccgataccatcttacattgcacatcctcaaactttacctgtcaactacagggggaatactgaccatagatcgacgccatattccattacacatctccaaacattacttaactacggagggaacgccgatcaaagaccaatgccatcttccattacaaatctccaaactttacctgccacgtacggagggtacgcccaccaaagaccaatgtcatcttccattacacatccccgaacttcacctgtcaactacggagggacccctgaccaaagaccaatgccatcttccattacacatccccaaactttacctgtcagctacggagggaccacagaccaaatactgaatcctggtggtgcaatgggacagttctcatcacgagagttcatgaatttgactcctgctaacactgagaattggcgcccacaaagccggatgcgaggcagcgtagcacctggtacgggatatgaccatatgatcattcatcctacccgtccagttcatccacaagctcaaacacctcctgcgcctctttcaacatcttatgatggagcagatgaaattcaagcatttatagggcacccaagctatcccgttagtaataacgaaacacaagcgggtaccagttcgttgccagtggcagagggtcttgggtattcagggtcgttttggtcaatgcctcctgagacatggtga

SEQ ID NO: 172003 - DNA, 1544 bp, Arabidopsis thaliana landsberg
tgccgctctgcgctatgctgcatagtccaagctaatcaggtcgactggctaagtgggcaaccaaactcagtgagtaccatatcaaatatcgaaacaaaacatgtgcaaagtcacaagtcctagccgactttatcgtcgaactacctacaaaaaaagctcgagagaatccgctcgatacgacttggctcctgcacgtggacaattcatcatcaaaacaaggttcgggcgtgggcatccgtctcacttcgcccacatgcgaggttctcgagcaatctttcagactaaatttcaaggcaaccaacaacgtggccgaatacaaagcactcgtagccgggcttaatatagctcgagggctgaagattgcgaaaatacgagcattttgtgattctcagctcgtcgcaaatcagttcaacggtgattacacggctcgggacgaaagaatgaaagcttatctagccaacgtacaaagtctggcaaaacaattcaacgagtttgagctgactaggattccccgaggagaaaatacatcggctgatgtcctagctgccttggcctcaacatccgacccgaacctgaggagggtgatcccagtcgaattaatcgaaaagcctagcatcgagctcgacaaagaggaacatgcttttcccgtgcagagtgccgcgaattgcgaagatgcttcgaagtcgaatgacgtctcagacttggattgtgattcagaatggattgaacccatcagaagctatatatccgaggggaaagtaccttgggataagtgggaagctggaaagctgaaagctcaggctgcgcgttttgttctggtcgaagaaaaactcttcaagtgtcgataacttcgtatggaagcacattttatgtcgctacgggatcccttacgagatcgtcacggacaacggctcgcaaagtttctgtgataagtggggaatccagctaagcaagtcaacaccacggtctcaccaggggaacaaccaagccgaggcccaaacaaaacaatcctcgacggcctgaagaaacgactcaacgctaagaagggctcgtgggccgacgagcttgaaggagtactctggtcacatcgaacaacgtctcgtcgagccacaggtgaaactccattcgcactagtctacgatacagagtgtgtaatccaagccgaaatgacggtaccgaatctgcgtcggagtctgtttctcgagcacgaattggataatacttaaagcatgctcgacgagttagatctgatcaatgaacgaagagattcagccttagtgcgaatacaaaattaccagaatgatacggcttgatactacaactcgaacgttcggcagcaaagatttcaagaatgagatcgggttctccgcaaagtatttcagaacactgccgagcgaaacaatgggaagctcggggcaaacaggaaaggaccatacttagtctcgaaagttgtccgacccgacgtctatgaactcgccgatttaagtggcaaaatcattccacgatcctggaatgccatgcacaacaggaaatactacaactaa

SEQ ID NO: 172004 - DNA, 519 bp, Arabidopsis thaliana landsberg
  unsure (1)..(519): unsure at all n locations
ctcaatcgcatggatcgcgctgtggtgcatggctcgaccttcgccaaaaacgatctggcgatggcggccggcatcgcgacgctggaggtgatggaagccgaaaagttgatcgagaacgccgcagagcgtggcgaccaactgatcactgcgctgtccgcgttgatcccgcgctacgagatgttcaaggaagtgcgcggcaagggtttgatgatcggcgtcgaattcgggccgccgaaatcgttccggctcaaggcggcgtggaatttgctggagagcgccaacaaggggnnnnnnnnnnnnnnnnnnnnnnnnnnnnnnnnnnnnnnnnnnaagatcctgacgcaggtagcgggccacggcagctacaccgtcaagctgctgccgtcgctgactgtcaccgccgacgattgcaagtggatagagaaggcattcgacgcgaccatcgcggcaagccatcaggtgccaggcgcgatctgctcgctcggcaaaacgctggtcgacaacgcgagagcgcaagtc

SEQ ID NO: 172005 - DNA, 1009 bp, Arabidopsis thaliana landsberg
gctcaacatgaaggactgccagtttcaccaacgttattttcttcttcttcaccagttatcactgatctggccctaccagctgaatttccgcggtttcacagaaagtatttcgcaccacaacaagcagaagcacctcagcattctcccccttatagtcgtttggtcgcttctgatcatccccctaccagctcacatttctccaaaccttccatgaaaaggaatgctcagtctcctggagccggcttggttgatattgctccagcacaatctagcaatggtgttcttcctgatgccttaactcagccacctttgtcgccctccatttcaagtaagaaattatccattctcataactaaatcaatgttagcctttacaaggataatttaagttcaactttctctcttttccattttgaatttgaataactttttgattcaagattcattgtgtttatttgttgttcttccagattgttgcaaatcagatatggtgcttaaacgaagaagtattggttgccactgcgtgtatcctataaaactggacatccttctcttgaatgtttcagaaactcctagttggaacatgttcttgaacgaatttgctacccagcttggtctcctacctcaccaaatcgagctgattaacttctatgtgctaagcttatcaaggatgaacatatcgatggatatcacccctcattctggaattagtttctcagctagtcaggcatccgcaataaactcttcccttatcagccacaagattcaatttagccctactttggtgggagattacaaacttctaaaccttacttggtttgaggcccctgcaccttcgcaaggtaaagtacttttctacaattgtatctgggaaagaattcaatcgccccatcaattctgcacatttgatttcacatctgcggtcaaagtttcatcacattcaagatagcatagccgaaagaaagtagactgatatagttttttatgttaaaaaagcatctcccagtttg

SEQ ID NO: 172006 - DNA, 1495 bp, Arabidopsis thaliana landsberg; identical to SEQ ID NO: 9188

SEQ ID NO: 172007 - DNA, 826 bp, Arabidopsis thaliana landsberg
  unsure (1)..(826): unsure at all n locations
ttgaccaagtttccttcagaaaagattcgaaatttctccatcattgctcatattgatcatgggaaatctactttggctgatcgnnnnnnnnnnnnnnnnnnnnnnnnnaagaaaggtcatggtcagcctcagtatctcgacaaattgcaggtactgtctttacctcaaagttgatgtctttcattgtcaatgtttgagaatgattatagttttgaggttatatgtttgaattgagtagagaggaaaatgagggttagtgatatctcaataaagttttgatttttaggtagagagggagagaggaatcactgtgaaagctcagacggcgaccatgttctatgagaacaaagtagaagatcaagaagcgagtggttatcttctgaacttgattgatacaccgggtcatgttgactttagttatgaggtttctagatctttatcagcttgtcaaggagctcttttagttgttgatgcggctcaaggtgttcaagcacaaacagtggctaatttctacttagcttttgaagctaaccttactattgtacctgtgattaacaagattgatcaaccaactgctgatcctgagcgtgttaaagctcagttgaaatcgatgtttgatcttgatacagaagatgtgcttcttgtgtctgctaaaaccggtttgggtcttgagcatgttcttcctgcggttatagaacggatacctcctcctcctgggattagtgaatcgcctctacggatgcttttgtttgattctttttttaatgagtacaaaggtgtcatttgctatgtttctgttggtgatggaatgctgagtaaaggagat

SEQ ID NO: 172008 - DNA, 546 bp, Arabidopsis thaliana landsberg; identical to SEQ ID NO: 73804
  unsure (1)..(546): unsure at all n locations

SEQ ID NO: 172009 - DNA, 465 bp, Arabidopsis thaliana landsberg
tattcatctaacattaatagtcgttacaaaaacagagagaaatttacatgtgttactaactttgttgtggtgtacggcgtatgcattatatggtgaatcattatgcaaattagagttataaacggtttttgtggcagcccatgattcaagaaacccatttctcaaacaaaaaaaaaaaacaacgcttcattgttgttaatgtgtcataaatttaacttttgtctgttttagcttcggggacatactatcactcatcatccgttatatactcatgtgtttcaggctacgactcattctatttggggagaacgcaacggaagacgacatggtaaaattccacacaacccagaaccaacttgttaagtctattgaccgagcagtaacaaattttataacgcatataaattacaaaaataatatataacaaattactagttgaaaaacaaaattagcaaggagaaaaat

SEQ ID NO: 172010 - DNA, 1253 bp, Arabidopsis thaliana landsberg
aaattgactcgatcggtgaagcctaaaacccttcctgttatattgttagatatggagggagttgtttctgtgtttccaaacaagaaattaaaactccaaacgtcggcgtcttgggacttcatgggactaaaggaaggaaaaggtacgaagcggaatcctttagtggagagtgatacaattatcggagtctttgacggtggaatctggccggaatccgaaagcttttctgacaaaggctttggtcctcctccaaagaaatggaagggcatttgtgccggcggcaagaacttcacctgcaataagtaaatctgtttttcctctctttaatttaaaatttctatagatgttagaagtgaagttgatcaaaccttcattgtgtgcgtttacataagttttctatatagttgacatgcttccaatgagctcacaatttaaacattttaagcaaattttattttaaacgtagatgccaaatgcaaatgaaaggaaaacatatatatatcctatgataacatgaaaatatttttagtttcttttttcacaagcttacgtatagtctaaggtaagactatatatgagtcaaaagcttagacttcaagggttgaatgaaaagtctttgtttatttttgggggtagagattgatatatgttagtcttttttacagcaagctgattggggcaagacactactcaccaggagatgctagggactctactggccacggtacacacacggcgtccattgcggctggaaacgccgtcgcgaataccagcttctttgggatcggaaatggaacggtgagaggtgcagttccagcctctagaatcgctgcttatagagtctgcgccggggaatgtagagatgatgcaatactatctgcgttcgatgatgccattgccgatggtgttgacatcattaccatctctataggtgatattaatgtgtacccgttcgagaaagacccgatcgcaattggagcttttcacgctatgtccaaagggatcctcactgtgaacgctgctggtaacactggtccggatacggcctcaattacgagcttagccccgtggatgttacctgttgcagacaacacggcgacccgtgagtgtgtcagcaaagtggttctcggtgccggcaagacgcttgtcgtaagtatcaagtaacgctctcatatgtctgttatcatagtatctttaatttgtcctatacaaatagcaatgactcttctctttttcttttagttttcctaata

SEQ ID NO: 172011 - DNA, 536 bp, Arabidopsis thaliana landsberg
  unsure (1)..(536): unsure at all n locations
cgacgactcgatnnnnnnnnnnnnnnnnnnncacagccccggcttgctgtcatcgatacggcgaccaataaggtgaagagctgggtggaactgcccggactcggctatggcaccgcatcgacacgagatgggcggtggctgctggtggcgattccgaaggagtccaaggtggcggtggtcgatttgaagaccatgaaggtggcgcggacgctggatgtgccgagcgccccgcaggaagtgctgatgcgcccggatggcaaggtggcttacgtctcctgcaactcgaccgggcgtgtggcggcgatcgatctagtgggctggaaggtgcaggacgtgatcgcaaccggaaaaggcgcggatggattggcctgggcaagatagatatcgttctggctaaacggcgagaaaagcnnnnnnnnnnnnnnnnnnnnnnctttttcttttcctcatcttannnnnnnnnnnnnnnnnnnnnnnnnnnnnnnnnnnnnnnnnnnnnnnnnnnnnnnnnnnnnnnnnnncatcctttggcggtc

SEQ ID NO: 172012 - DNA, 458 bp, Arabidopsis thaliana landsberg
tgactaaacagggtcatagccagaggattcatgttaatccgccagcgttagccttcttccacatcccaatattggaagttcgggaactgtggtacacgccctttatcggtcagtttcaggaaggagtggcatgctctattgttcagtctggagtcttacagacatttgtgtcaatgggaaatgtaaaagctgcgttcatgggacacgaccatgttaatgatttctgtggaactctaaaaggggtatggttttgttacggtggaggattcggataccatgcttatggacgaccaaattggcatagaagagcaagagtgatagaagctaagcttgggaaaggaagagacacatgggaaggaatcaaacttatcaagacttggaaacgtcttgacgacgaatacttgagcaaaatagacgaacaagtcttatgggaaacttccgactcatttctgaagtga

SEQ ID NO: 172013 - DNA, 1366 bp, Arabidopsis thaliana landsberg; identical to SEQ ID NO: 17070
  unsure (1)..(1366): unsure at all n locations

SEQ ID NO: 172014 - DNA, 587 bp, Arabidopsis thaliana landsberg
atggagaaaagtcaatcgtctccaaccaaggacgcgtccacaaagcagaagaatgtagacgattggttaccgataacatcctctagaaatgccaagtggtggtactctgcgtttcacaatgtcaccgccatggtcggggctggtgtactcagcttaccttacgccatgtctaatcttggatggtatatatccaatctagctacatatataaatatctcattaaaaaatctctatatacacgttcaatattaatattacactcaattttgatggcaggggacctggagtgacaataatgataatgtcatggctgataacattctacacactatggcagatggtgcaaatgcacgagatggttccagggaagaggttcgacaggtaccacgaattaggccaacacgcgtttggggagaagctcggactatggatcgtggtgccacaacaactaatcgttgaagtaggtgtggatattgtgtacatggttacgggagggaagtcattgaaaaaaattcatgaccttctttgcaccgattgcaaaaatataagaactacatattggatcatgatcttcgcttcgatacact

SEQ ID NO: 172015 - DNA, 735 bp, Arabidopsis thaliana landsberg
gtttgagattaaccatctcaacaatgaacatcttgaatctgtgaagggttactatgactacgggtcgggttacattcaaggacttcaattcaaaaccaattttagggtttccgaactgataggatatgacgagggtactaagttttcactttcagttaagggaaagagaatcattgggtttcatggttatatgaaggaaagaaaaatcatctctcttggaggatatttctcttggattcatcctcgtaaaatggaagcaaaaggcagcaagggaggaaaccagtgggatgatggaaccaataatgatggtgtgacaaagattcatgtacgaggtggtgttgaaggaattcaatacatcaagtttgattatgtcagaaaaagtggacaacacattaatggatcaatccatggtctctcgggtagcgggttcacacaaacggtataaattggaatctcccacatttttccaatatttacggtcttattttctaatcttttttttgttcaccaatttgttttcccagtttgagattgaccatctcaacaatgaacatctggtatgtgtagaaggatactacgacgatgaatctggtgttattcaagcccttcaattcaaaactaacatcaagaattcagagcttcttgggtataaaacagggtaagaaattttcacttgtagacaagagaaaaaaaatcgttggctttcatggatatgctgacaagaatctcaggtct

SEQ ID NO: 172016 - DNA, 1140 bp, Arabidopsis thaliana landsberg; identical to SEQ ID NO: 47113

SEQ ID NO: 172017 - DNA, 835 bp, Arabidopsis thaliana landsberg
  unsure (1)..(835): unsure at all n locations
atgcgacaagaagataataattccgaggaagaattcgttgagattgatcccactggtcgctatggcagggtctgttcttctttacttgatattacttttacctttttctcaattctaaggtttttgtttctcattttttcagtataaagaagttctaggcaaaggagctttcaaagaagtgtatcctttttctaagatctctgttattactacagagaaaattcagattagattcggacaaaacacagtcactaaaaggtttctttgatcagagagttcttcagatacagagcatttgaccaacttgaaggaatcgaagtggcttggaaccaagttaagttggatgataaattnnnnnnnnnnnnnnnnnnnnntcgtctttactctgaagttcacttactcaaaacccttaaacacaaaagcatcatcaaattctacacttcttggatcgatcagcagcacatgaccatcaatctcatcaccgaagtcttcacttccggaaatcttagacagtcagcttcctctctcaacagtcaaatcaaatctttttcgtttgatcaatattattcatgtttgacaaacgctcataggtaccggaagaagcataagtgtgttgatctaagagcattgaagaaatggtcaaggcagatcttagaagggcttgtttatctacatagtcatgatcctcctgtgatccatagagatcttaaatgtgataacattttcattaatgggaaccaaggtgaggtcaaaattggagatctagggctagccgcgagtgtgcaccgcgctcgctaaaaaaatactgtcatcggtgagatctttaatcttgatc

SEQ ID NO: 172018 - DNA, 586 bp, Arabidopsis thaliana landsberg
atgaacaagagtaagattgctgggatcatggctaagcttaacgcggtcgacaatcaacttgtggaggatgtcgcttatgttcgtagcagagattttccaaatcagagatttgatcaccaacaaggctacaaaggttcctatgggaatggtcaaactagctactctcagaattctcagttccagcaaccgcttcagaataacaatagttttagcttcacaaggaactttgatcttgcttcttaccaagtaccccctccacctgcacctaaacgcatgaagaatcaatgcttgaatagattctggaaagtaactaaaggttcttacagcccctatccctagatggaatgagagcagcctcactacttcttggcatgctgcttcgatggaaagtggatatgagttcatgaaggatgatgagagtgacgaatttgacgttgcaaaggtagtatcgaccgacacatcccttggtgtcgatcgacaccagtttcagcccagcaaaaaccctagacgctttcgagtttccagaaactcaagtttgccccagaagacttccctatttgcattattagtctctcgacgtctttag

SEQ ID NO: 172019 - DNA, 547 bp, Arabidopsis thaliana landsberg; identical to SEQ ID NO: 63362
  unsure (1)..(547): unsure at all n locations

SEQ ID NO: 172020 - DNA, 549 bp, Arabidopsis thaliana landsberg
ggtgctcagttttgttggcagcaatgccaaatcgctcggcaatgactacggtttggtcagcagcggctcggtcggcgcgatccagagagcgctgttgcaactagaagccgacggtgccgaccatttctttggtgagccggcgctcgatctcaaggatttcatgcgcatcgatctgagcggtcgcggcatcgtcaacgtgctgcccgccgatgtgctctatcaaaagccgcgtttgtacgcgaccttcctgctgtggctgctgtcgcaattgttcgagcacctgccgaaagccggcgacgccgacaagcccaagctggtgttctttttcgacgaggcgcatctgttgttcaagcacgcacccaaagccttggtcgagaaggtcgaacaggtcgtgcgcctgattcgcagcaagggcgtcggcgtctatttcgtcacgcaaaatccgcttgatctgccggacagcgtgctcggccacctccccaatcgcgtgcagcacgcgctgcgaacataaacgccgcgcgaccagaaggcggtgaaggctgcggcgca

SEQ ID NO: 172021 - DNA, 538 bp, Arabidopsis thaliana landsberg
aggaaattcgcaaggtaggaggcatctgggccattagcttagttggagttttcctttgcgcccacttttttgttaacgtacccttgctcgcagatgttgtcctgctccaatggttagcactggtgctgattagtctgtgcacctaccgagtactcttacgtaccgcactcaattctgttcgtcgcaaaggtttcaacacccgctcggtcgccattgcgggggcgggccctttaggacaacgcctagcttcgaatattgccggtgctccctggatgggtctggacctacttggcttcttcgacgacaagtaccaggatctcatccgtctaggcaatagtaagatcaaactgccgatatctgggaatctggaagacctagtcgaacaagctcgcgcgggtgagatcgaccgcgtttacatcaccctgcctatgcgtagtgaagcacgtataaaatggctagtggatcaactcagcgatactcccgtttcggtttatatagtgccggatgtattcatcttcgaattgctgcacgcgcggag

SEQ ID NO: 172022 - DNA, 734 bp, Arabidopsis thaliana landsberg
atactttcaggtactttgattgtgctccatacgctgtgaaatttggattctaaaatactattattagacatggagcaatcatacagaataccagtttcaattcatcatttccgtagactttatatttgatcttccaggtatagaggatacttaatttgattgtttttgtttcccttcagggtattcgaagaccatggaaaggagttctcatgtttggtcctcctgggacaggtaaaaccctgttggcaaaagctgttgcaactgagtgtggtaccaccttcttcaatgtatcttctgctacattagcttcaaaatggcgtggagagagtgagcgcatggtcagatgcctgtttgatctggctagggcatatgctccaagcacaatttttattgatgagatcgactctctctgcaattctcgggggtaaattttcctgacgatactgagatttcgatactgaaatgaaaagtatttgtaattggtggaggtgtgatgcaggggttctggagagcatgaatcatcaagaagggtgaaatcggaactcctagttcaagtagatggagtgagcaatacagcgacaaatgaagatggtagtcgcaaaatagtaatggtattggcagctaccaacttcccgtgggacatagatgaagctctcaggtttaaatattctttgagttaatgccgtctttagacttgctctaatataacgaaattgctgattctggagctcaaa

SEQ ID NO: 172023 - DNA, 4331 bp, Arabidopsis thaliana landsberg
atgccagagcttggtgtttccattaatacatctacctataactctatgattgctatgtattgtcatcacgatgaggaagataaggcgattgagcttctcaaggaaatggaaagttcaaacctttgtaatcccgatgttcatacgtatcaacccctgctgagatcttgttttaagagaggagatgttgttgaggttgggaaactattgaaagagatggtgactaaacatcatctcagcctcgatgagtcgacttatacttttctgatacagaggttatgcagagctaatatgtgtgagtgggcgtattgtctattcgaagagatgattagccaagatatcacgccgaggcaccgcacttgtttgctgctcttggaagaggtcaagaagaagaatatgcatgaatcagctgagagaatcgaacacattatgaagactgtgaaacttactgcacctgtaaagtgaggtttattagttattatgacgacttgactgttacttcgcagattgggatgagaagtggtctcttcatgcttgcgaaagaagacaagaccagatcatgcatatagatgttcattgtgttgtttattcaaccacattgtagtgtagatttcaagttcgttggtcaatggatatggacaagaaacttggacttcgtattcatgaaaagttgttaagattggaactctggagttgattgatctgacacattcttgatgataagaggttaggcaagttttgtttgttgtctgttttgactcgatctttgcaaaggtctcgagacatctcaagatctagagttatggcaggcttattcacatcaagactaatttatgggagagtttacacaagtgtgggatccaagagcatatttttttttgtaatgagcattgagtttatggacaaatacatgtgcatttggatgcgtccacacttcacagttcacaccgacagaaaggtagatccatattaccccaaacaaaacaaaatatattttttgggatatttttgaaattattaatagaaaataaatttgagtagtcttcttcaacttcataagatggttaagctttaactacgaattattgattagatattattattaagggccctcaaatgttagctgcaacaagtgggcactttttctttggtctacattgttcgaatttatgtattaatttagaggcagagcaatttacatgtcgatttattatgcacgaaataacaaaactactagtatcaataataatacatccacgtctgtttccaaccaaaccagggatgcgtctaatttgatgaagcatcattcaattattgcttacacacttcttaaacattttaaactttactgaataacagattatttttacttttttactgcaaaagggaaccataaccaaaattcttgctagattttaatatacttacacattcttctttcttgctgaaaaatcaacagcctttcagaaatcagactaatacaaaactttttcaggatcataataacatgcttaattgattagaaaaaaaggataaatcccgtcagatatggtccactcacggggatggaatctgcatattgtcgatgctcccaaaaatactatttttttctttttctggtgaaacacacacacaagttccgtcttcgccacaacaacacaatcttcaaaggtttctcctttttgatgacttctgcttcatcactttgtgttcgtcgttaaaaaaacttctttgatttcaaaccactcaaattcatctttataatccacttcctctgttttctcgttagctctgtttcctttgagattcattggtttggttcactaaaaccgaagaagacccggataattttctagaccggaaatgccaccgccgatatttcctctccggtgggaaagtaccggagaccagtggtggtacgcttcaccaatcgattgcgccgccgcaaatggtttatacgacgtcgtcatcgagctgcttcatcaagatacaaaccttctcgtaaaactcacctccctccgccgtatccgccgcctcgaaaccgtctgggacgacggagacggaaataacttccatgtggctctaaaccgctcccgcgtcgcgagaaggctattggaagagtgcgaaatcggaaacggagacaattccctcatcagagctggctacggtggctggctgctgtacacagccgcttcagctggagatttagaattcgttaaaaagcttttagagagagatccgcttctcgtgttcggagaaggagagtacggcgtcactgatatcctctacgcggcggcacgaggacgaagcgacgacgttttccgtcttctcctcgatttcgcgttgttaccggctgatatcgccggcgtcgaagaaatcgacggcgaaaaattaacagagaaacagttaatagtcaaagaagagatggttaaaagaggggtccacagtgcggcgagaggcggacacgtggcaatcctcgatgaactcttactcgctaacaaatacgacgccgttgcaaaactcagagatgcttatggttctactctgttacactctgcttctagcagagctcaaatccaagtaaagaacacagagcacacataatcaaatacttacttacatatacatatattgatttatgaatataatgtaggtggtgaagtatcttatatcgaagtatgattcaatcatggaggttaaagacagccatggaaacacagcgttgcatatagcagcttacaagggtcatttagatgtagtggaagctcttataaacgaatctccaccgttgatttccattgttaatggagatggtgacacgtttcttcacacggtcgtgtctggttttgctgcgtctgggtttaagcggttagatcggcagatggagcttttgaagatgttagtctcaagaagctggtccgttgacttttctgagattgtcaacgttagaaattgtaacggaagaactgtgattcatttagctgtgatggataatcttaacgccgttagacctgacgtcgttgagattctgatgagaatccctggcgttgatcttaacgtcgttgattcttatggaatgacagccgttgatttgcttaaacgacaaacgcctaaaacggtggtttctgatttgttgatcaaacggcttgtatccgccggtggaagatcaaactgcggtgagaaagtttcgcggttgagagaagagcgttatggattctgcggtagtccaggaacgtcgtttgagatatctgattctgagatctttctatttacggcggcgagaacagataaaaccgctgcaaacgctgaattaagtccagacagagagagttttgatggaattagtgagtgttcaactgaaatttcgacgcattcgaaacgcaaacgccgcggtggcggcggtacaggagcgcgtcttaagcttcttttacggtgggcgaagagggaagaatcagaagaaaatcgccgtttatccggagatgttaacaaccgtcgtgttcctctcagagagatgtattctccgtcgtcttgtagcagaggaaaagcatttccgatgagaacagagagtggtgatcttccgagtttatcggtgagacttaaattcacacaagggttaatgaaaggagtggtggttcaggaatctccgaggttcgtgttttctcctccggctgtatccgattactctcgagctccgtcgtcggcttgttcgacgccgtttcagacgttttcttcggaattagggcgaagaacacctgccatgaagaaacagggatcattaatgaacagatacttgtgttttggtggtaaaggactagccattgatggttcttctgagatgatcagtaatggctctggtcatcgtccccagagtttcaaacgagtgatgtcgtctttggtttcttcttgaaatacataattttcttttgtcacacgtaacctaaccctcatgggttacattaacttcatataaacgtaagaaaagtgaactaaaaattgatcattggtttttattgaagtgtggaaatattatttacgttttttgttattgggataactcgtaaatctaaatccagttagtttccttttccctatccaggtttagaccaaaatctatttcgcatgtaatagacaaaaacaatttcgtatgtaatcagtagtagtgaattatgtaaatccatgtattttcaatacttacatactttagattcttgttcaaatatgagaaatatggtttattgatatcctatagaactagtgaactatgtgacttcgaagaaaacaccctctgaacatgacgcactatgttcacgtccaacgcaaaagctttagccaaa

SEQ ID NO: 172024 - DNA, 1634 bp, Arabidopsis thaliana landsberg
  unsure (1)..(1634): unsure at all n locations
ttcttaatcaaatttgatttttgtagcttttgcaatgctaaactcacccgttttaatatgttttacagcttttggacagtcatctataagcagtccttttgggacccaaactcattctttgttcggacagaccaataataacgcgagcaataatccttttgctacgaaaccttttggtacttctactccttttggcgcacagacagggagttctatgtttgggggcacttcaactggtgtgtttggtgcacctcaaacttcttcaccttttggtgcttcaccacaagcgtttgggagctctactcaggcttttggagcatcttctaccccttcatttggcagttcaaattcaccttttggtggtaagtaccttttatttatgttactgcattaactataccagggttggaatatactatgtgtttatatcatgtgagagatacattgataggcttcatggaataggatctactttctctcagtaggacttggagggtagcaatatccaagttttttggtgttcaaaagatttgttactacttccaaaattagtagtcttttgggttttctttgtgacagtactagcagctcctgatttggtctagtttgtttgttttctttaggctacaatttctcattagtcttttgatgtatctcctttgtgcactttttctaacgaagactgatcaatcttttcttacaggcacctctacgtttggtcagaagtcttttggcctctcaacacctcagtcaagtccttttggaagcaccacacaacaatcacagcctgcctttggaaacagcacttttggttcatctacaccttttggtgcctcaaccacgcctgcctttggtgcctctagcacgcctgcctttggtgtctcaaacacttccgggtttggagccacaaacacacccggatttggtgccacaaacacaacagggtttggtggcagtagcacacctgggtttggggcatcaagcacgcctgcctttggctccacaaacacgcctgcttttggtgcctcaaactctccctcctttggcgccacaaacacacctgcattnnnnnnnnnnnnnnnnnnnnnttttggtagcactggcaccacgtttggtaacactggctttggttctggaggtgcttttggagcttcaaacacccctgcttttggtgcatcaggcactccggcttttggtgcatcaggcactcctgccttcggtgcatcaagtactcctgcctttggggcatccagtactcctgcctttggggcatccagtactcctgcctttgggggatctagtactccttcttttggtgcgtcaaatacctcatcctttagttttggctcgtctccagcttttggccagtctacatcagcctttggtagcagcgcctttggctctacaccatctccctttggaggtcaaggttcttcctttagcatttcccattctgtacaatattataactgctaattggtgtgttgctcatttgaataaaggggtgacgaaatatgtttgcatgatttgttttgcaggtgcgcaggcttcaacccctacatttgggggttctggttttagtcaatcaactttcggtggtcaacaagggggcagtcgagctgtgccgtatgcgc

SEQ ID NO: 172025 - DNA, 721 bp, Arabidopsis thaliana landsberg
tgatcatgaaagtagtcaagaaaccggacccgaatcaccaaattcttcaacctttaacggcatgaaagctcttatctcttctcattcgcctaaaagaaggtaggtagatatatgtgattcgaattatataacaatttcaagaaaaattctcatttgactaaagtatattcatatattgatgtacttgttactttacagcaggagatccgtagagaagagagtagtgaacgtaccgatgaaagaaatggaaggatctcggcacaaaggggacacaactccgccctcagattcatgggcttggcgtaagtacggccaaaagcccattaagggatctccataccctagaggttattaccgttgtagtagcacaaaaggttgtccggcgaggaagcaagtcgagagaagcagagatgatccaacgatgattctcatcacttacacttctgagcataaccatccttggcctctcacttcttccacaagaaacgggcctaaacctaaacccgagcccaaacccgaacctgagcctgaggtagagccagaggcggaggaggaggataataagtttatggttcttggaagggggattgaaacgacgccatcatgtgtcgacgagttcgcatggtctacggagatggagacaacatcttggtcgattcttgagagcccgaaattctcgtcggagaaaaagacggctgtctcgggggctgatgacgtggcg

SEQ ID NO: 172026 - DNA, 1545 bp, Arabidopsis thaliana landsberg
  unsure (1)..(1545): unsure at all n locations
aggatttcctcagcaaatatctcagaactctaatggagaaagaattgtttgtttgatttgtggtaaacctggtcatgaggctctgaggtgctggcacatgttcaataacaggtaccaggatgaagatctgccagcagctcttgcagcattgaggataactgatgtcacagatcaatctggcagtgaatgggttggtgactctggctccactgctcacatcaccaatgctcctcacaagctcacacagacatagttgtatgaaggaagtgactcagtgatggttggaaatggcaatttccttcccataactcacacatgatcaggcagtcttccttctacttcatgtaacttaccttttaatgatgttcttgtgtgtcctgatatctctagagcccttgttttcagtttccaagctcaccaatgactatccctgcgtatttcaatttgactgtgatgatgttcgaatctatgataaggcaacaaggaaactgttgacaaagggaaagcacagtaagggactttatgtgttgaaggactcaccagttcaagcactctactcttcaagacagcaaggagcgagtgaagatatatggcatcaacgactggggcatcctcactctcaagtccttcaagtgctatctgcaaacaaatctatcagtgttggaaataaaagtaccaagatggtgtgtgagtcttgccagcttgggaaaaatgttagactccctttttctgcttcaacttttgtagctactagacctctagagagaatacactgtgatctctggggtccttgnnnnnnnnnnnnnnnnnnnnnnnnnagttattatgcagtgttcattgataactactcaagattttgctggttctacccattaaagctcaaatcagactttactcatacctttactgtgttccaagctatggttgaaaatcaatatcaaaccaagattggatctttccagtgtgatggagggggagagttcacaagcagaaagctaactgatcacctacaacaatgcgggatcagacagcttatctcttgtccctacacttcacaacagaatgggttagctgaaagaaaacatagacacattattgaacttggtctctccatgatgtttcagagtacctgtcctcagaagttttcggtagaagccttctacactgcgagtttcttaatcaatctccttcctacaacaactctagatgagaagtacagtccttatgagaagctgcatggtaagcctccagaatactcagcactcagagtctttggttgtgcctgctatcccaccttgagagattatgcgtctaacaagtttgatcctagatcactcaagtgtgtgtttctaggttataatgataaatacaaggggtacaggtgcttcttaccttcaactggaagggtttacatcagtcgccatgtcatctttgatgaaactgtcttcccttttgctcagtctcattcaagaccaaatacaggaagtcttactcctttgatgctagcctggacaaagggaatcaacacagtaagtaaacctcaac

SEQ ID NO: 172027 - DNA, 744 bp, Arabidopsis thaliana landsberg
ttcaaagattggaatttagtatctttgaaacatgccggttgatttagataattcctctacagtttccggcgatgcaagcgtctcatcgaccggaaaccaaaatctaactcctaaatccgtcgggaagaagaaacggaatcttcctggaatgcctggtacttctcaaaaatccaaacttttttttttctgttttttgagtttgaaattttctgtttttagttgttctcactgattgtctaaattcagatccagacgctgaagtgatagctttgtcacctaaaacacttatggcaacgaatcgattcgtttgcgaaatctgtaacaaaggttttcaacgtgaccagaatcttcagcttcatcgtcgaggtcacaatcttccatggaaacttcgacagagatcgactaaagaagtgaggaagaaggtttatgtttgtcctgtttctggctgtgttcatcatgacccttcacgtgctcttggagatcttactggaatcaagaaacacttttgtcggaaacacggcgagaagaaatggaagtgtgagaaatgttctaagaagtatgctgttcaatcagattggaaagctcattcgaagatttgtggcaccaaggagtataaatgcgattgtggaactctgttttctaggtggcgacaaattgttataaacatattcaaaggtttgatctttcttatggattttactaacttgtggattgggttttgttgcaggagagatagctttataa

SEQ ID NO: 172028 - DNA, 1552 bp, Arabidopsis thaliana landsberg
gacccggacatggtgatatagagtgtagactaatcccatcttgtttaactttactggatacaactagctttcaacagggggctggtggccagagcattactgttgctctctctatgtctggacaagtttatgcaatgggaactgctgatccgagtcatgatattgtgagagctccttcttgcattgaagggggtctaggaaagagtttcgtccaagaagtggcttgcgggtttcaccatatcgcggttttgaactcgaaagctgaggtctacacttggggcaaaggatcaaacggacagctcgggcatggagacactgaatatagatgcacgccgactcttgtgaaagctttgaaaggtaaacaggtgagaaaagtggtgtgtggttctaattacacagcaaccatttgtcttcacaaacccattacgggtaccgatagtactaagtgctccggttgtcgccatccttttaactacatgaggaagcttcacaactgttacaactgcgggagtgtcttctgtaattcatgcacaagtaaaaaatccttagcagcagccatggctcccaagacgaacaggccttaccgtgtttgtgatgactgttatatcaaactcgaaggaattagagaatctttagcaacacctgcaaatagtgccaggttttcaaacgcaagtctaccatctagctacgagatggatgaaattggtataacaccgcagcgtcagcttctaagagtggattcatttgatttcttcagacaaactaagcacgcggacctgaaaaccattggtgaaacttcaggaggaagctgcacgtcgtcgattcactcaaacatggatattaaaggtagtttcaacctgaaaggcatacgacgactctctaggcttacttcttttgattcagttcaagaagaaggcaaacaacgtaccaagcattgcgcttcgaaatcagacacatcctctcttataagacactcggtgacttgtggtctaccgttttcacgcagaggttctgttgagttatttcctttatcgataaagtccagccccgttgaatccgttgcaactacttcagacttcaccacagacattaccgatcatgagttactacaagaagtgccaaagaaatccaaccagtgcctaagccatgaaatatcagtactcaaagcacaggttagtcctatccaaccatttagcccctattgaatcaaaatgtagtttaaggtattgtaaaagaagacaagtaaaaaagcttttaatactcaggtggaagagcttactctaaaatcgaagaaactagaaaccgaacttggaatgacttcgaagaagcttgaagttgcggtactaatggcgcgagatgatgcagagaagatcaaatcttcagaagagatagtcagatccttaactctgcaggtacatacatactcattgctattcaaatatgctacttaagctccggtaatgtagatttcagtcttattctcttcatacagttgatgaacacaaccaagaaagaagtagacaagacaaggagacaccgaaactcgttttga

SEQ ID NO: 172029 - DNA, 601 bp, Arabidopsis thaliana landsberg
taaaaaaactttttcgccgagttacaggggaaaaaagaatggtcttatggttgtcctccaaaaaacttaacccaagacaaggttttgttctctctctttttcccttttctttttgtgggtttgtttaatctatcacgcaccttccattctagttaggtagcttagactgaatcacgaaaacgaaaatctaatttattctctaaaaaactaaaggtctggctctaagagaggtctcgattggaattttatctgagcttgaggattcaatctcgggtgttaacagtagcaatggttaggttgacaggatttacaagcttctttgaactttgaagtaatggtttggaaattttcaactattcaacgcaagcttggctttaacattattattgctttcttattgtggttgtaggatttgaatgtggagttggttgaagttgtgagaggttattatcgcggaggacctaaatcgaagtcatacattacattcatggtaaggaagaagccagatggacctcttggtgagtatcaagccaagtgtatggtcactttacacagaaagaggcatcccatcctctgtaggccgactcctacaccaaagcca

SEQ ID NO: 172030 - DNA, 879 bp, Arabidopsis thaliana landsberg; identical to SEQ ID NO: 1036

SEQ ID NO: 172031 - DNA, 1432 bp, Arabidopsis thaliana landsberg
tgttatctaaggttagctggcaaattcttacctctcccaattgcctcctagcaaaaatcgtattgggaaagtattgtagtgcctctagttttccggattgctaagcaactggctcagcctctcatggttggagaggaatcctaataggccgcgatctcctaaaaacacatctgggaaagtccattggctcagggaaggatactttcgtgtggtctgaaccatgaatatctttcgcaaccccataacacctatgggaccccctgctgaacaagcacaattcatgaaggtttcagagctaatatgtcctaatacaaattcgtggaatagagaaaaacaaggctagatcttacctgcttatgaacaagacatcctcgcgctcagaacaagcaagctaggtgctccagatcaacatgtctggctcctgaccaagaccggcgagtatagtgctaaaacagggtaccttgctgccaattccagacacaaccagactaaagttcctccaggattgttagcaggcttcaattggaataaagatatctggaataaacaatgttcccctaagatcaaattctttctatggaaagcgatgaaaaacgccctccctgtgggcgaaaacctaaaagcaagagaaatcaaacctgatgcagtctgccctcattgtgatggagaggaaacctgtttacacactttgttccattgcccttttgcccagcaggtgtaggatcaagcacctttcaaatcctcttcctcaccaacccggatcttaaccttaagaactgagtttgaagcctctaatcttctgacttgtttcccaccggttggaattggacatggcgagctgtttccttggattctatgggcgatctggactaatagaaacaagaaactctttgagcagaaacaacaatcaagctcggagattctatcccaagcaattggcaatgcaaaagaatggatagatgctcaatcgtagcaaccaaaagtgcagagattaccttcgttacaattgggacaggttatccggctcaacaccatccaatgttttacagatgcggcgtggcgagctgattcaaaagatgcaggattcggctggatctttgtagatcacaatgctcagactgaaacttcaaacagatcctcggcgaggaccatcacatctcctcaaatggcggaagctgttgttctcctccttacgatttaaaacgcgctggatcatgtattcacaaacctctcaaaagcttcagactctcaacagttagtcaaagctcttcaagggaagccccaaccaaaggagcttcgaggaattcttcacgatatcctcaatctctctcttaatttttcggaaattagcttcaatttcagtttgcgtgaaaccgatgctttatccaaggcagctttaagttcaattactcctgtaccggtttaccattaa

SEQ ID NO: 172032 - DNA, 611 bp, Arabidopsis thaliana landsberg; identical to SEQ ID NO: 77791
  unsure (1)..(611): unsure at all n locations

SEQ ID NO: 172033 - DNA, 624 bp, Arabidopsis thaliana landsberg
gtttggttaaggaggtcatcaacaaaaatgatgcccatttatgtgttgtttacttgaaactgttagccggttgctcgcttttgatgttatatcaaatcatgtctcaatgcttgacccttgtattgctattgcagatagaagatatccttgaggatgtggaggattctagcacttatctatacatctggggtctgaatccttgaagctgtgtcaaattatgatctttggatataacatgcatattttggattaccaaacactaatactgatattaatgtgttggagtcttcccacctcttctctaatcttgctttagatattgctcctcatgttcattataccattcaaggaaaagaatacaatatgggatattacttggctgatggtatttatccaaaatggttaactatagtgcaaaatatttacgaatttgtgactcaaaagaaaaaatattttgctgtacaacaaaaagcatgtagaaaagatgtagagcgagcattcggagttctccaatcacgttttgctattatcaaaggtccgattcgtttttggagaaaaaaatgtgttgcatgatataatgactacatgtataattttatgtaatatgattatcaaaaataagcg

SEQ ID NO: 172034 - DNA, 540 bp, Arabidopsis thaliana landsberg
atgcaacctcgcaagatccccgccaccatcgtcaccggctttatcggcagcggcaagaccaccttgatgcgccacatcttcgacaacgccaacgaccgccgcatcgcggtgatcgtcaacgaattcgggaagctgggcatcgacggcgagatcctgcagggttgcggcattgcctccgatgacaacggcgagcccactggccagctctacgaactggccaacggctgcctgtgctgcacggtacaggaggatgttcttcccgagtgatggaacagattgctggagcggcgcgaggaagatatgaccacggtgctgatcgagacctcgggcctggcgcgtgcccaagtccgctgtgtgcaggccgttccacttggccgagacatccagcaacgtccttcacgagtagataccgtgagtgaccgtgggtcgtggagccccacacaccacctaagagacagcttcccccgccaacccggtgggccgcggacgccaaaacaaaagcgccgacccggaatttctggacccacgaattcgccgctg

SEQ ID NO: 172035 - DNA, 517 bp, Arabidopsis thaliana landsberg
  unsure (1)..(517): unsure at all n locations
atcgttctcttgactcttattgcatctttggactacttaagacctcgaccgtgtgaaacggggtcaatcctatgcacaccgccgtcaaaactccagctcgggatcttgtacacagccttagctttagtgaccactggagcaggtgggacacggttcaccatggcatccgcgggtgcaaaccaatatgagaaacctaaagaacaaggaagcttcttcaactggtacttcctcacactatacgctggagctattactggtgcaacagcaattgtatatatacaagacaatgctagctggaaacttgggtttggtctctgcgcggcccctaatttgatcagtttcatagtttttgtctctgggaagagatactacaagcatgacaaaccaatgggaagtcccttcacgagtctaatccgcgttgtagtcgctgctacaagaaaaggaaggctgntacttcatgcaacgaagaagactatcatcactatggtctcgaaaaggaggtcaagacttctgcttg

SEQ ID NO: 172036 - DNA, 778 bp, Arabidopsis thaliana landsberg; identical to SEQ ID NO: 32687

SEQ ID NO: 172037 - DNA, 858 bp, Arabidopsis thaliana landsberg
atgaaagagaacgtgatcatatattttaaattcgaaggttgcatgtataatgtgatgatgaagacattaggagagaagataactctctcattgttagaagataggataatgacgaagcttggattagatgcaaataaggttaaattgcatatgaggtacaatccacggttgttcggagtagagaaagagatgaacgtttgtgatgatgaggatgtctttgtttatttaacatccgcaaaaaataaccggagaagtgttttggttctggaggagatctctaaaccgcccgagcaattgtttagagttggtaaaagttctattggtaagaactatacggagttgaattcaggcgaggataaaatgagagtggatgatggtgccctcatcgtcttattagaagaggaacaaggaactcaacaacaacttgaggaaatagtagaggaggatcacaagactcaagaagatgaaacacgctatgatgagtttatggataattcttataagaggggtacaatatgttaagtcgccaccttctatagaacctggtctctttaaaaaagaatgggaagacggaattgggttgaccttacatcaagaatttccaaacaaggcggtattgcacgaggtgggggatagagctgcatttgctaacagttgtggttatgtgaataagaagtcggataaggagcgctatgtaaaaaagtgagccaaagaaagttgttcttggtgtttacgagcgtcaaatatccataatactcatattttctcgatcagaatgtataataacaaaaatagttgcactcgtctaaggaaagatagtagtaggctcagcaaaaggagggtcaacccccaaatagg

SEQ ID NO: 172038 - DNA, 3785 bp, Arabidopsis thaliana landsberg
atgcttactaaagtcatacctgtgcacaagtttgaagcagctttagatcatctaaacttctcaggtgatacttggacatatgattgccgaaggttaagttcaagtagtgcaatttactggagaatgttgaaagattgaatcaaggtggagtgttgtggataattctgattcaactttaagtgaccggtttaggtgttgtggttaagaggaattgaggaccggttagatggagtgttttaaaccggattgaagaggctaaagaaaaccttcttttcgcgagagagggtcttctgtttctatttgggaattagtataaaaggcctttatttcttcttcttcattatccgtttctgatttgtaacaacaaaaaagaaaagcttgagactccattgttgagctctgcttgtactctgtaattctcattctgttctagtggattgccgaactgattcggccccatacgtaggcttgatcatcccgatcttgttgaactgggtaatcaaatctcttgtgttgtttctttcgttcttcaattcgtttctgtttttgagctgattcgaagtttcgattgctgagttttagaaagtttgtgaagatcttgtgttgtgaatcgagcataaaacgtaacaaaaatctaaatcactaaaggagaataaaataatttgactctagctttaaacttcaaacaactctccattttccatttccatgtaatttttttttcttcaaggatattaacaattaatttgactctaacattctccctctatttagtttatgaactatgatatatcaaaacttaacaactctaactccattatttaactcatatcaaccatcttccttctcttttattgatgtatcatgtttttaattgcgtctttatagctttattttacattatttatttacttctttatttattttttaaatatctgaaatttcaagttcaaagatcctacatctcccagaagcgggacccacagcaggttaaattcatctcctgtggagaagagatccctcccaacgtgcctcgaacacatcacctacattggtacattatttatttttttcttattcacaagcactattttcgtagagatggtcgagtatgtggagactcttgatgtagaaaaggatttggagattttagagacatccatatacacttggtagaggatgctctcttcttcttcaatgtccaacatttgttgttgaaaggagttttagggtgacatgctcttcgagatatctgactactgatgtcaaataatctttcctcaactgttgacacgtgcaagggctttttcagaccaccggagtcaaaaaactgctcatggagaaatatgagagggaatataaactgcaccgggaccctccgattcgtcgttcacaacaaaagtaaccttgccggatacgctgtcactctctcccaaatccgctggtttttgcttctggttacgctttcagctaacaacatgggagttaccttttattatactagaaacaacacttttgttctcgggtagttaattatttaatatcaaaagtcaaaactatgtgcaagccaaaaaaacacataacgattagtatttggggtgctgcctgctccaactctaccctatgaaaaataaatctatgtcttatatttataaggtgtggttttgtcactttttgtgacaatctgaggattcaaaccggaagaatattcaagaaacaatagaagagaaaaagacaaaaaaaattttaaggaaaaattaaagagacaaacgagctctcattaaaagtatacttttacagattattaggattctacttattgtgaagtactcatagaaaaaaaaattatgtgtggattagtgtttctaaatttgagggtcaattagtaacagaaaatatttgttgtcagcaaataaaactctgtacttttgtgtgtgttttatgtatagattttccagcttgtaattcatccagcaaatcatacccatcaatatccaacaagtttttgactaactaactctcagacagaaaaaaaaatcaagaccaaaacaaagtaaacaacaaaaatgacacgatcaccactgaaattcatatgcaaaaactcacaagttcttcaaaccttttttttttttttccttcttatttctccagagttgatacaccaagtttccacaatttatgaatacaacgagctatatccgcggttgcatacccttagtattcaacatctcttcttttggattttgggaaaacctaaagtcaccggatgtgattttcgggtattcattgcctctcatggaatttcagatattactcatatttgtattcatcatcataattcacagttttcttaaaagctttggcatttccccgattccctcttatatgttggtaagtatccttgtacatgaaacttgacggtcacgtaacaggaaaaatagatgtaacttgacaagcacgaaaacgttttaagcaacatttgacaatcctacatgctaataaatgtatatttatgttcaggctggtctgattctggggcctcaattgttcaatcttagggaggtatcatcaaggaaattatcgtgggatcctgcactagatggaaacgggccgctatgaggcctttcggtgtgtggaaacattatgcttgcatttttgatgacagtcaaaatcagccgtcgattggcattcaacaacggatggctacccatcgtgatagggactttgagcttcattgttccttttttgggtggcttctgtgtgagaaacctccacactgataatatagacccttactacatgtcgccgaataaagtccttgccgagcgcattgtggtcatctcgagccaatcctcgattctcttgcctaccgtcgttcatttcctgtcagaactcaagatcctcaattcagagcttggtcgccttgtgttgtctgcatcccttatcaatgacatcttcgcgtctactgtcagcattttcgcctatcttgtgggaacgtacaagaacatctctcccatgacagcatatcgtgaccttatagcggtgatcattttgattctagtagccttttgcgttttaaggccggtcgtagaatggatagtagaacgcacaccagaaggcaaacctgtggcagatgtgtatgtacatgctgtggttttgagcgtaattgcttccgccgcatactcttcattttttaatatgaaataccttttgggaccattcttactcggcatcatcataccagaaggtccacctataggatctgccttggaagccaagtatgaggctctcacaatgaacgtgctaataccaatctcaatcacattcagcacgatgagatgcgatgtgatgaagatcgtctaccaatatgatgacatttggtacaacatcttcttaatgacatttacgggctttttgaaaatggcgaccgggatggtaccttgcttgtactgcaagataccattcaaggaggcaatagccgcttcccttcttctatgctctaagagtttctctgaaatctttctctacgaatcaacatacgacgattcggtaacttccctaccaatccataatccatttcgtcatgatcttcacatatttatatggtttgtttgtttttgcagtatatatcgcaagcaacatatacattcttgatcacttgtgctctaataaactctggaattatccccacagccttggccggactatatgacccgaagaaaaagaacgttggttaccaaaaaaagaacatcatgaatctaaaaccaggttcagatctccggatc

SEQ ID NO: 172039 - DNA, 245 bp, Arabidopsis thaliana landsberg
agccctatggcggcttccaaggccaggcgacagcgctaggcgatactgcccgagcaaatgagcacacaccaataagctcctcgccaagcgcatcgcgcaccactccggccagacggtcgagcagatcgaagccgactccgatcgcgaccgctggttcaccgccgagcaggcgaaggactacggcatcatcgaccacgtgatcgttcgccaaggcgagatggccgactgacccactgaccggtaca

SEQ ID NO: 172040 - DNA, 449 bp, Arabidopsis thaliana landsberg
aaaggtctcgtgaacctcaccggaaacgcgttaagcatgatgttatcgttcgacagtttcggagacgacgtcgtttcgtggattcgtccagcgacggaaagagacgggttttgggagaaagctgggccgagtttgggctcgggtacgggtacagaggctagtttgggttttccgtctggtttaacggaagacgtgacggtgtgtaaaaacggagggaaagattgtaaatacaaaacagtgcaagaagccgttgattccgcgccggatacaaacggaactgtaaagtttgtgatacgtattagagaaggtgtgtatgaagaaaccgttagggttccgtttgagaaaaagaatgtcgtcttcatcggtgacggaatgggtaaaacggtaattacagggtcgttgaatgttggacaaccagggatgacaacgtttgaatctgcaacctgtcg

SEQ ID NO: 172041 - DNA, 1337 bp, Arabidopsis thaliana landsberg
aatttgataccggatcctcaactcagaggtgtgaacagagatgagaagaacatttattttgctaaaacttatcctaactcaaggcattggctgacttatcgacactcgctacgtgtatgatgtttcatgtttcttaacacaaatccaatttgttatttcttcttctttaagttttcattcaccattgtctggtttttgtttttatgtagagttatgcatcaattctgtacctcaaacgtccggataatttcagaatcattcttcgtggcgaagatgtcgaacatcacagcgtcttagacgacatgatgaagattgaagagaaaacatacaaacctatgcgttctccagaatggccagatcaagaagaggtattaccttaccttaccttagtctcacttttcataatcttaaaacactctcaaaaatttctcttatgttttcaaaaaatactccagatggttgcttctctaaagcttggctttgtgaaagatgctcatcatcacatcgacatacaaggtttcaatgtttaccataagaaccggcttatcaaggtgactgataataattccagccgagttagtcttgatattgttagtacttatcttaacttcattttcttcagccattttggagggtttggaatgctgctggaagtgatggacgtggcgttattggaatattggaagctaatttcatacaaccagctcataataagcaaggatttgagcgaaccgtcgttcttgctaaactcgaaagccgattggtcacacaccaaaagaactattggtattatcatcgtatattctcgccactactactattagatttgaggttttggactttctcttaagttattattatctttctgtttgataggtcttcaaggtgtcacgaaattggttatgctccaagaaggaaacaaaagaattatgaaagtagcgttacagaaacccctggacctttcaacaacataaacgttgttaagggatcttcttctagtactccagtaccagttcgagtattcaggccaaatgttgaaccatctggaagaaaccaaatccctcaggttgaaataaacttcttttagtaaccataatgtgttataatatatgagtctctaataaaatctcgcttcaatataggttgaaacacgagagaggagttttgacatcaatcctgagatcggggctaagaacagaagctattatgggcttgggataaggtgttttttctctctctgatgtttcttctgattctgaaataatgttatcttcggtactaatttagtttaaattctctcttacagtagtttcaaagaaacaggctcagttaatcta

SEQ ID NO: 172042 - DNA, 558 bp, Arabidopsis thaliana landsberg
  unsure (1)..(558): unsure at all n locations
tcacatatatttatttacttatcccgataatttgatatataataataggggattgtggcatcaagtatctcatactatgtgcaagggatagtgatgaagaaaagaggacctgtgtttgctactgcctttagtcctttgatgatggttattgttgctgtcatgggttcttttgtcttggcagaaaaaatcttccttggagggtaaaaatttccacttttgccccttttctcattctccatgcatggtcatgaatcatatatgatgaataatatcaatcatcacataaagcttatcaactgctttgggacatgtagggtgattggtgcggtactgattgtaattggactgtatgctgtcatatggganaagcaaaaggagaatcaagtgactatatgtgaactagccaagattgactcaaatagtaaagtaactgaagatgtggaagctaatggatctaaaatgaaaatctcggaaggggataactctatgctctctacgattgtaatcagcgtaccactgtcggaaacacatttgaaaaagactatccaagagccatga

SEQ ID NO: 172043 - DNA, 1407 bp, Arabidopsis thaliana landsberg; identical to SEQ ID NO: 25651

SEQ ID NO: 172044 - DNA, 478 bp, Arabidopsis thaliana landsberg; identical to SEQ ID NO: 65059
  unsure (1)..(478): unsure at all n locations

SEQ ID NO: 172045 - DNA, 1317 bp, Arabidopsis thaliana landsberg
cccctgtatctggagtgggctcctcgagatattcttgagccaaaagcacttgccgataacaaagaaaagaagagtgctgtcgaagaaaatgatgcgagaagagtcaacttagatcagcaggttggaatctattcggatataaccgaggtatgtctactttatggttgctgtggacgttttgaaatcatatgttcgtcctttgtgtgcggtatcgaactatcgcaaactgaaatacagttgaaaaaatcttgattagcttgggaaactagatttggttttagtacactattcttgcaagtttcaggttaggaacctggaaagttcatgtttattcattgacttgaaatatctgtgttcagatcacatcttataacgatgtttcctctaaataatgcattatatttcagtcaaatgtccttcatgtaaagaatctgagcttcaagacaactgatgaggggttgaagaagcatttgactggagtggtgaagcagggaaagattctgagtgttaaggtaagttgttgttcattgcttacagatgatgatgatatgcagttaaccatcataagtctgtttttgatattcctttatttttcactataaagcagataataagagactggacgagacgtcgttcaagcggttatggttttgtagaatttgactccgtagagacagcgaccagtgtctacagagatctaccagtagaggtatataatctagttaagtctctttgaaacttgaaggtgattggactcgatgaaggaaggtgacactgatttgtttgtttgtagggaaatgttctggatgggcattaattgatcttgaatttttctgaaaacaagcggagtgaaacggttggggaaggttcagacaaggtcacaaagttggcaaagttacatgtgaaaaatgtagcttttgaagcagccaagaaagaactaagacagcttttcagtccatttggacagattcaagagagttgggcttccattgaagaatgtgagaaaatacgctggttatgcttttgtagaatttgggacaatgcaagaagctttaaacgctaaaaaggcactctccaacacccatttctatggacgccatttggtaagtcttatgttgtgcactcatctctcccaagccagatatcctttatttatccatcctctttgactgtccatttcaggtgctcgagtgggctaacgatgacaatagcatggaagcgatcaggaagcgttctgctgctaagtttgacgaagaaaacgataatgcaaggaaaaggaaaagctcgaaagctgttgaaggcaaaaatgaagtttga

SEQ ID NO: 172046 - DNA, 1811 bp, Arabidopsis thaliana landsberg; identical to SEQ ID NO: 15208

SEQ ID NO: 172047 - DNA, 496 bp, Arabidopsis thaliana landsberg
atggaggagagagaaggaactaacatcaacaacatcccaaccagttttggtctgaaacaacatgaaactcctcttcctcctcctggttacccaccacggtctgaaaaccctaatctttttccggtgggtcaatccagcacttcctccgccgccgccgcggtgaaaccttctgagaatgttgctcctccttttagcttaacaatgccggtggagaattcttcttctgagttgaagaagaagagagggagaccaagaaagtataaccctgacggctcactcgctgtgactctctctcctatgcctatctcatcctccgttccgttgacgtcggagtttggttctcggaaacgaggaagaggtcgaggaagaggcagaggaagaggacgaggacgtggacaaggacaaggaagcagagagccccaataacaacaacaacgacaacaattggctcaagaatcctcagatgttcgaatttaacaacaacactcctacttct

SEQ ID NO: 172048 - DNA, 598 bp, Arabidopsis thaliana landsberg; identical to SEQ ID NO: 70384

SEQ ID NO: 172049 - DNA, 1448 bp, Arabidopsis thaliana landsberg
cttttcccccaagggcccaagattccttatttgctacttgtgtatgacgctgaagaattttgtaatcttgttgctaatggaaaatttctagaaatcatctcaagagttcaggacagatacccatcttatacggtgtgctgcctcacgaataagttaatgtcctacgtaaagaaaaggtgtgtttgataaagtgatttggtgttatattaatgtttccgtcatcaagctgaataaaaccaatcttttagggaaaaggaagagtacaaaagtccgggaaattggagacggcctcctatcgatgaggtaatacattacctagtgatcatgtatgtagaggaaagcctatttattgctgctatgtttgtggttgtaaacatactcttggggcatttgatatgtatgacacaggtgcttgcataatcaactactcactatgttgaagtacattccagacactgtgtagacgaggctgcagtggctgaacatattgctggcctaacaagcagtctggcctcttgccaattcaggtaccaaaaatctactatttttatttctcttacagaagactttatctcgattgatgttggatggaatttttgatttctttcctcaatgaatcccgttagaccaatcaaagcaataatattttgatgaaaacctgtgaagtctaaatcatatacatcttcacgcgtttaacaacttaacgaaataaagatctaacattgggagctcatcacaaaaatgggcagtaaggcttgtcttgaaataagatctgtaaagcctcttatagtctttaaatcatacaaggctgactaccgaatatctgggaggtcaacattacgtagagctgtagttgatagatgaacgtgtggctaataatgtatttctctgcatgattttgaagtgaaactaatcatggctctactatgtgatgcacaggaagaaattaactatgttatcagtaagcgctaatggtgcattagtctccaaggattcagttgacaagcatttgattaaaaagagtccatggtaaagtaaagtagaacattttgaaaataggttgtgttttagtcattttgagtctgttcaataagtaaaattagcacggtatataggttaaaagcgttagtagcaataccaaaggtacagccacgatacgctttatcagtgtgaaagagatatccctccatgaagtctcttcttaaggtttatatggatcgtaacgaatcggtaagtaaaaacatgtcagacatacttggatttgagtttcttcttagtttgttgtttttaaaccaattgtgtagtgttggttaaacgaatgaagatgttcttttgcgtctttttttttcacaggttcatgacaaggagtttctactaaaagccttgaaagtacaaggtttagtggaaggagacataaggttagctgagatttgttcaaagcggatata

SEQ ID NO: 172050 - DNA, 1119 bp, Arabidopsis thaliana landsberg
ttcttcatccccttgtccttcttctacttcctttctttgctttcaattccttagctctcaagttttcacctcaactcttgtctctcctttcccttaaaacatctctctctggccctccctctgcctttcaagactggaaagtccccgttaacggtcaaaacgacgccgtttggtgttcttggtccggtgtagtctgtgataatgtaacggctcaagtcatttccctcgacctctctcaccggaacctctctggtcgtattcctatacagattcgttacttgtcgagcttactctacttaaatctcagtgggaattctttggaaggttcgtttccaacttctatctttgatctcaccaagctcactaccctcgacatcagccgtaactcgttcgactcgagttttcctcccggaatctccaagcttaagttcttaaaagtcttcaatgcgttcagcaacaacttcgaaggtctattacctagtgacgtgtctcgtcttcgtttcttggaagagcttaactttggtggaagttactttgaaggagagattccagcagcttacggtggtttacagagattgaagtttattcatttagctggaaatgtcctcggaggtaaactacctcctagattaggactcttaacagagctccaacacatggaaatcggttataatcacttcaacggaaacataccttcggagtttgccttactctcaaatctcaagtactttgacgtttccaattgcagcctctctggttctctgcctcaagaactggggaatctctcaaacctagagactttacttctattccaaaacggtttcaccggtgaaatcccagagagttatagcaacttgaaatccctcaagcttctcgatttttcgagtaatcagctttctggtagtatcccatcaagcttctcgaccttgaagaacctcacatggctaagcttaatcagcaataacctctcaggtgaactacctgaaggaatcggtgaactccctgagcttactacattgtttctatggaacaataacttcaccggagttttgccacacaagcttggatcaaacagtaaacttgagacaatggacgtctctaacaattcagtcaccggaa

SEQ ID NO: 172051 - DNA, 732 bp, Arabidopsis thaliana landsberg
ctataattttctattgacgtttacttttttttttctttcctttttaggatatgttcttagcgggaacggcaaggagtgggtcgtttcttgaatgggcaatgacagagcttatgagaaatcctaaggtcatgaagaaactccaagaagagattcgttcgagttcacgacaaggtttatttgtaacggagaaagaagctgagaagatggattatttgcaagcagttattaaggaggctttacggttgcgtcctcctgctccactaatggttccacgagtatttagtgaagatgtcacgttaaagggatacaatattcctgcaggaacacaggttaaatctttatcaaatctttagttacatatatactttataatttataacatatttaattatcaaatgcaattataggagcaatcttatacttacttttaaaattataaatagttttataatgtaaataaataatatgcatatatgtgttatggtcattttttagatattagtgacaaacctatcatgggaacacaggttataatcaatgcttgggcaatccaacgagatactacaacatgggggatagatgcagaagagtttaggccagaaaggcattaggctcattttgattttcagggacaagatttcaaatttattccattggtcgccaacgcgtatgtctgggataggattcaaatggaattgatcggggtgacattggccaatatcgtaacggttc

SEQ ID NO: 172052 - DNA, 1262 bp, Arabidopsis thaliana landsberg
ggcttgtattctccttatatttcttcccacatctcaggtcgtggttgctcatccagcttggaacataccagaagctcacaaattttccctctcaaaaagtataagagatcatgtgcaaattacactactaaagagacaaatactactcctttttaaaagaacttgaatttaagtacttctctgtttttgaacaggggatgtttacgccattcaagaagcttgcaaggctacaaatgaaagtgggaggtctcctattttcactggagtcatggcttttgtaatgggtgtagtcaccatgattagagtgactaaaaacgttccaaggaagctaaccgagtcaaccatatactctagcccggtttactgcgacgaaaactcgatgaacaagagctcgatgcatgggaagaaaatggcaacaacaaccatctcaggggaagatttcatggcggtcatgaaacgaatggctgagcttgagcagaaagtcacaaacttgagtgcacagccagcaactatgcctcctgaaaaggaagagatgcttaatgctgccattagccgagccgatttcttggaacaagaacttgctgcaaccaagaaggtaacataaaacaaaaaactcatattactgatttgttctcatctttcaatctctcccattttaaagagttgttgtatcttcacaggctcttgatgattctcttacccgacaagaggaccttgtggcatacgttgagagaaaaaagaagaagaagaagctggttcgttttcaaatcaatggcttcttaactaatttttgttttggtgtttaaaatgctgttctgttttgctttttatctccatgtgcagttcacttggtaagtgaggaacatgaggaagagaagcctctagtggagttagaggtggccaatgcactcatgtcattaacttaaatcttacagtcacattaaaattaaaagaatcttcaaagaattttttttgttttgtctctgtatatatatatcatccttagatgttaccacttatatccgcatcatatgcgagattatgtttgatttgtacaaatgaaaccatagaatttataagaaatatattttgtgatatagttttgtacaaaaccattagtgtgcaagagttttatcatcaacgtatcaaatccaagtacgctttatataatctgaattactagtgttgaagatgacttggggcttgatgttctggagagacagaatcttcgaagatctatggagaaactcaaagttgattga

SEQ ID NO: 172053 - DNA, 1632 bp, Arabidopsis thaliana landsberg
gaatccaatggtgtaagcaactgctcacgctccactatttgccatgatcgagagctgccaaggcgacctgtccctgatttaatcactgaggacagtgatgttgaagaaggggaggcttctactcagattgaagactctgttgttgaattcaaccgttctgctggttcttgtcatctctttcaatacacctcggaagagaaggccgccataatcgagagaatggtaatacgattcaaacctactccattaccctcacgtgctcttccatggacatttaggaaagcgtggatggagagatacaagtctgttgcagcgaaacagctagacgagattgaagcagtgatgccactaatggaagttctcaacctcattcctgatcctcacaaagatgtgagaaatctcgatctcagagcctctgtcagcttaatgtcagcttatttagtacagaccttgtgacctgactttgatccttgcggataggtcttccagaaaacccttcggcatgctgaaagatctacctgtcatgattaatggagtggaagtgcctacagacttcgtggtgttggatatggaagtagagcataaggatcccttaatcctgggaagacccttcttagcttcagtgggagaagtgatagatgtcagggaagggaaaataagcctcaactttggaaagcacatcaagttgcagtttgatgaaaaaacctctaaagactatagagtgatcccaagagaagggtatgagactaagaaagtaaaagagcttaaaaagaggtctgataagcaagaagaaactatagagaggctagctcactctgttgaggaacttaggagtaagctgaatcagatacagaacgaagctcaacctaaaggtgggattaacactttcccgagaaaaaagttcacttcaagatggtctgaagagatagattaccctccagaagagaaagaagcctattttgaagaaaggggaattgagtattctgttgcagacctctccagggagaacgctgagtatgatgatgatatcagagaggattatgcagaccctctctatagttcattttcttcttgataagtgtgaggagtcaagctagagatttaaaacaagctcacttgggaggaagtcccatgattatccttgtaaataatttttactttcttgttatttttgatttgttttagttgtgtttgtggttctctggaaaaaaaaaaagaagtaacgtgagggtagagtaaaaattcaaaacttttactctactgatggcctagagatcgagtacatttgtcgagtatgagcgatttttaaaaaacccgaaaaattttaaatcatcattttactcgaccaacaggagctacagagtcttaaagagagttcatcaaggttacagaagattgcgggatttcctgagattttcctagtgaagatagagtaatgattcagaacaaagagagagatgagggacccactgctgcagccatgtctcccacgctccccacaaggtgataacgaaatctccatgcttcttccctcatcactcgaccactccctatcctcttaacatctcaccaacacttgacatgcaaccaagaaatccccatcactccccacgcttataaaaccaccactcc

SEQ ID NO: 172054 - DNA, 1469 bp, Arabidopsis thaliana landsberg
  unsure (1)..(1469): unsure at all n locations
tctcataataatagagtagcagaccttttgatttaatccatatagacccttggggtcctttttctgttcaaactcatgatgggtatagatatttcttaaccattgtagatgattattctagagctacatgggtatatctcttaagaaataagtatgatgtccttactgtcatcccgcattgtccttggtagaaccaatttgaaaccactattaaaggggttaggtctgacaatgctcccgaattaaatttcactcaattctatcaatctaaaggcattgtgccatatcattcttgtcctgaaacaccccagcaaaactctgtggttgaaagaaaacatcagcatatactaaatgttgctagatcccttttctttcaatcacacattcgtatttcttattggggagactgtattcttactgcagtgtatctcattaatcgacttcctgctcctattctagaggacaaatgtccttttaagaagttaactaagactgttccaacttatgatcatattaaagtttttgnatgtctatgttatgcttccacctctcccaaagacagacataaattttctcctagagctaaagcttgtgctttcattggttatccatctggatttaaaggatacaaactcttggatctagagacacattctataattgtttctagacatgttgtgttccatgaagagctctttccctttcttggatcagatctctctcaggaagagcaaaatttctttcctgatctgaatctttcacctcctatgcaacgtcaatcatctgatcatgttaatccttctgattcatcatcgtctgtagagattttgccttctgcaaatcctactaataatgtccctgaaccttctgttcaaacatcgcataaaaaggtcaaaaagcctgcttatcttcaagattactactgtcattcagtagtgtcttcaactccacatgaaattcgaaaattcctctcttatgataggattaatgatccttatcttacttttctcgcttgtcttgataaaactaaagaaccctctaactatactgaggcagagaaacttcaggtttggcgtgatgctatgggtgctgaatttgattccttagaaggtacacatacttgggaagtttgctctttgcctgcagataaaaggtgtattggttgccgctgcatctctaagatcaaatagacttctgatggtagtgtgaagaaagcagacgctcgcttagttgccctaggctacactcacaaagcaggtattgacatcggtgagacggtttctcctgttcgatagcttaagtctgtcaagcttcctcgtggtgtgcctgcgcgttctaaagtgtctcttacacgtcttgagatatagaacgcttttgttactgtcgctgtagatgaagccatatatacgcaactaccaaaaacctatgcatcaagacaggggagcgcccttcctccaaagggtgtgtgt

SEQ ID NO: 172055 - DNA, 1211 bp, Arabidopsis thaliana landsberg
gtttttctcggagtggaattagtctttttctcatcagtcaaagcgagtgttgggaatgaaagctggataatattggtcttgcccgtaatcatgtttggtataatgtatatttggatctatgaaagtaagttcaggtatgaaacagaagtcgaacaaaagctgtcaatggatttaatgagagaacttgggtgcaacctgggaacgataagagctcctggtatcggtttgctgtacaatgagttagtgaagggagtaccggcaatatttggccattttctgactacacttcctgcaatccattccatggtcattttcgtctgcataaaatatgtcccggttccagttgtaccacagaatgagaggttcctcttcagacgtgtctgcaccaaaagctatcacttattccgttgcattgccaggttggtctgtttttccctttcagtgatcaaattttcatggttcatatatgattgattagacttaacgtagagattcttactcaagtctgtagatctgatatttccttctctctttttgtattatataagaagtacgtcttagagccactgtttagcacacaagaacatattatctccttcattctgttccatttcgttgctgaacaaatcgaatataaacactctttgtgttatatgtggtgtaggtatggttataaagacgcaagaaaggagacccaccaagcatttgagcagctactgatcgagagcctcgagaaattcatccgaagggaagcacaagaacgttccttggagagcgacgggaacgatgattcagactcagaggaagatttcccaggttctagagtcgtaattggccccaacggaagcatgtactcgatgggggttccccttctctctgagtacagagacttaaacaaaccgatcatggaaatgaacacttcatctgatcacacaaaccaccatccctttgacacatcatctgactcctctgtatctgaagctgagcaaagcctggagagagagttatcgttcatacacaaagcgaaagaatcaggggtggtgtatcttctcgggcatggcgatataagagcaagaaaagattcatggttcatcaagaagttagtcataaactacttctacacattcctgaggaaaaactgcaggagagggatcgcaaatttgagtgtgcctcagtcgcatctgatgcaggtcggtatgacatacatggtc

SEQ ID NO: 172056 - DNA, 445 bp, Arabidopsis thaliana landsberg
attgtcaactgtgttccaatccgctatttgattcaagaatttgcattcatcttcggcttatattgccattcttatctaagaaactatgcagcatatgccagcaggtggttcagtggaaagtattttggtccaaccacaacaatgacatacgcgaaagtgaaggccaaactactcaatgaaatataggagacccaattgttcgaagatgacagtcctattcttcttatgcaatgtgatcgtagggaagagaaaaataggttcacgagcagatcttgtggaagacttgtttcttcaggctgtagaagatctagtttggagtaaaatattttcatggggtcgattcgcatttgaagagaatatgaaagacatttggaatcttgtggaccactttgagggcggattaggctcatatttgggttttcctagcttcgtgatgctttttgag

SEQ ID NO: 172057 - DNA, 534 bp, Arabidopsis thaliana landsberg
gtcagtggaaaacattttgaaggacacgtaggaactggaagagaagggagtcgccgtcagaagcttcaattccggccgaaacaccggaaaacttgttcaactggcatagctcactcgtcgcccaaaggattaatggcaaaatttcagttgtaccttgaatggggattttgactccacgaagtgcaattcttctgtcttcttctttttctttttcttcctcttcttcttcaatcaacatctttttaacttgggttcatcaatctttaaactacaggcagaagataaaaaaaacaaaacaaatctaaatccggtcaagaaaccggagagaaagccggccaaagacgccggagaaaagcccgacgaaataagaaagaggatatcttgctctcgggagataagccagccaccaccgctgaaagtagccggtcgatgccggaagctgagccaaccaacgcttctaaggaagccagcgatgccagagtagaagccgaccaaacactgctgataaagccagtcattgccggccagaaaagc

SEQ ID NO: 172058 - DNA, 305 bp, Arabidopsis thaliana landsberg
cggttctatgtggtaagtagaataacggtctaaggagcggtccttatcctgctcggtagctcccactcatcctacccctttccagtcttttttcatggtcgcgctagggtcgggttccccagggtcatctttccctgctgtgttcgccaagcccgtccctaggcttgtggcttcgttgtgtagaacccaggcacggtcggattcccgctgctcccgtcatgcgcgtcccggtttagatgtcggggccgttggctacctgaagcaggtcacagttgctcccaccgctatcccgtccttggtggaac

SEQ ID NO: 172059 - DNA, 1120 bp, Arabidopsis thaliana landsberg; identical to SEQ ID NO: 18350

SEQ ID NO: 172060 - DNA, 1506 bp, Arabidopsis thaliana landsberg
atggaggctgcacttcgagtacacaaagtttggcaatcgattgatcctggaacagaggacgaagagaaaaacgacttatcacgagcacttctcttccaatctattctggagtcattaacgctacaagttggaaagctaaaaactgccaaagaagtatgggacaagatacagtcacgtgttaaggaggcaaagttacaaactcttatggctgagtttgatagattgaagatgaaggacacccgagacgattgatgaatttgctcgaaaactttcagagatacaaactaaatcagcatcattgggagaagacatcaaagaaccaaagattgtcaagaagtttcttaaaagtttgccgagaaagaaatacattcacatcgttgtagctcttgaacaggttctagatctcaagaatacaacgtttgaagacattgtaggcagaataaaaacctatgaagatcgtgtatgtgatgatgatgatgatgatgatgcgtaagaagatcaagggaaactaatgtatgctaacatggattctcagtatgacggaggtagaggcagaggtcgagaaagtagcagaggtcgaggacgtagcagaggaagaggacgtggaacatccggatatcaacaaagagataaatctaaggtaatctgctaccgttgtgataaaacaggtcactatgcctcagattgtccggatcgactactcaaactcatcaaagagtcacaagagaatgtgaatgaagatgatgacgagattggttcactcatggtacacgaggtggtgtatctcaatgagaaaaacgtggatcctaaagtttatgaagcaagctcggacaagatctggcatttagataatgatgttagtaatcatatgacgggagttctaaatggttttgcaaacttgatgaggagatcaccgagaaagtacgttttggtgatgattcttgtgttgacataaaaggaaagggctcaattatctttgttagcaaaaccggagaaaagaaaattctagctaacgtctattacatacctgatcttaagagtaatatagttagcttaggacaagctactgaagcaagctgtgctgttgtgatgaaagatgattacctcaccttacatgaccgtgaaggtgttctgcttataagagcaaaaagatccaagaacagactgtacaaggtgactctagaagtgggagtttctgtcatcaagtgtttacgagctgtgacaacaaatgaaaggtgtgagtggcacgctcgtttaggacacattagctatgagactattaaagccatggtgaagaacgagctggtaataggaatgacgagagcaccaatagaataagaaacttgtgagtcatgtcttcttggaaaacaaacaagacagacatttgctcaagctacttcatatcgagcctcgtctatattggagctaatccatggggatctctgcggacctatctctcattctacagttgcatgagtaagtacatatttgtgctcattgatgatt

SEQ ID NO: 172061 - DNA, 3538 bp, Arabidopsis thaliana landsberg
  unsure (1)..(3538): unsure at all n locations
atggagcagcgtgaagctttgactataggaactgatgtgaaatcattgtttctgtctccaggttgttctgctttgcagaaagctgttgactttggtgagattagtattttgaatcctatcacgcttcattgtaggtcttcaagtaagcctttttatgcgattctgcatcggattgaggaaggtcttgttattgatttggagcctgtgagtccggatgaggtgcctgtgactgctgccggggctttaagatcgtataagcttgcggctgaatcgatttcaagattgcaggcaatgcctagtgtgaatatattgttgatgtgtgatgctttggttaaggaagttactgaattaaccggttatgataaggtgatgatgtagaagttccatgaagacgggaatggggaagtgactgctgaatgctgcagggacgacttggaaccttatttcaggttgcattactcggcaaacttcaagaactgtgctaatctttgcccaagatttacatgtaaatggtactgattgagtgttaaaaggaagaagcttcatacatgcaatatacattgatcgtagagtaggttccgagttccaaaacaaagtgaactatactgagtatttcaacatagaaaaattataaaattgacatcctttgcaaagtaaaagccatatcataacaaaaaaatcggaacatttaaccggaaacagagacaacccacaaaagaagaagaagaatgctaaaattgagaagcactggagttggtcgaaggggaccaaatggaatgggaatatgtcttggagaaattgcacacagtagtcgttgacccacttttaatttcagattttgacactatgggctgggcctttcagttattaaccattaagccaaaaactgaccaaaatgcccctgacgaaactgaacccggtttgtacgtatgaaccgcgtcgttggaatccaaaagaaccaggttcgtacgtacactgttcatcgacgagaaatgcattaaatgatttctgggtttcggcgaagttgacatttgagattggaattcaaaaattttaaaattcgttgggctcagaagtttttaatgctaaaaagttttgacaagactaaaacttatgattacctattataatagagattatattgtaagaaatttagataatttagattagaattctggggaaaaaacgtaaatcgaaattgtgttaaggtgaagaaacgaaaattgaatttgtgttacggtgaagaatctgaagttttcagttgctgttttacaaagtttgaaggattgaaggggagacaatctgtgttctgggtaagaaattcgtgttaatcctaattacacttgagaacgtgatttgaatgatacgtttttaaaaaattctgggttcatacattgttttgttggagattttatttgtatttgtagatataaatgaaagctctatgttttgttttgttaaatttataagtacataaattgttttgttagagattctttttgttttcgttgacataaatgaaagctttcaaaaagatctgatttttttctatttaatgttggtctgacctgaggaatttatgttgcaggtatggagttacctgtattaattatggttggtgagtggatatacaaagaagaatgtttgaaatatgaagctgagaaaaggaagtttcggacgttctgtacgtattacagacacaacgatgtacacggatttggcaagtacaatatgtgatgttttcagtttcaagtttatgaatggaaccctataataagttactggatgcctggaaagatgtctgatatgatagcaagtaatcgccctctagtatatattgagaatcaaatcagcctggatacatttatgttgattcgtaatggcgatccttctgttaacttgtttatgtctttttactctatcggcaagggaggccatacagagacagaggttacaaatgttgatgtatctcataatttttacgaagatataaatgtagatgtggatgacacagatgaaggtgatgaggatgaatatgaggacgaggataatgaagaggacgaagatatgaatgtacatgacgatgacaccgatagtgaatgtcgtggaagtaccctcgaccctactattgatggnagtgaaagtagttgcgaagattacgattacaacaagtggaacgatgtacttgtggaagaatatggaatagggaatgttgaggagaacgtcgtgaataacactcaacaaaccgtggaacccacagggggattcactcatctattggcatcgtgtacgtcgacgggtacacatgtacctcatgtagaacccactggtgttttggttgacagtacaccaacctcagctccatccccgacgtgtcaacatggtttgtaccaatgtaagtacactagagtctgtgcagaggagacaagatgctaaggtgaattagatgagcacacgctgtagatacactatgtagaacgtaactagagatgatggtatagatcgacctagaaggggtgtctacaagtgggttaagtatagaatctgacgaccgtctagcgacaacaggtgaagcctacgaagtgtataaagggttttctacattgtataccttcacgcagcatacgaccacctgggagaccacccaccaaaaggataccatctactggggaaaaccgggtaagattttcccccatcctcacttctatgcaatttttccttccttttaggcgccttaccattttttaactttcagaaaaagaggcagaaaaaactcattcctaatcagtgtagaagatgtcggaaaacggggcataacaagaagacatgcaaaaaccctatttaggcctcgcgatggttagagtttacctctccgtgcttttggaagctgttctacgtacgtttttggaaatcttttgatcagtctatgtagtaatattacatattattttgtctgtacgttaccttatgtacgtacgtttgtggacctcgtattatcgggtgtatttgattatccttcaactttttgtcaatcccgttgttttctgtacgtacttttgttaaacgttttcatttgtacgtacactgggtacatctaattatacagagttgacggttacatttttttgctataccgttacatcgatttgggaccaatcatcgcgtctttctaaaatctatttaagaaacttgtgataacacccttaattcattcaaacaaacgtccaatcccatcacacacataagacagaaagttggttattctggtttttgttgttgtcatcatggatgatggatatcatgccatttccgaactttgtcccatgatcaccggatggagtatacgcgcttttgtggtcagggtgtttcaaaaatgtgtgggaataaatgagttcgacctgggtctcatcttggcagataatcgattaatatttcgccaatgtccttataacgtttttactttcacataccgtacatgtcactaatcatgatgatttgttgtagggaatgcgttcccgcatagaggctaccaataatc

SEQ ID NO: 172062 - DNA, 1625 bp, Arabidopsis thaliana landsberg
agagggtcatccatcaggctgcattacaagtaatggactcaaacactacttaagtatgtatctgttgttccattaacattcaacgtgatatttattaatttggcttagtttaattacaggatctgaagcaacccaagaccgaaaaggatctacctcctggtgttcttacagttcctcttatgaggcatcaggtaataatatattatcatgttttcacttaaaagctttttattgtccttaattttgaatttggtcatatactaaaatctttattgtttgtcagaaaattgcattgaactggatgcgtaagaaagaaaaaagaagcaggcactgtttgggagggatattagcagatgatcaggtaacattggtgtttatcacattttttaattaggtgaaatgttcgatatctaacaaattatgtgtggtgttatatggcactgcagggacttggtaaaacgatctcgacgatctctcttatcctgttacaaaagttgaagtcacaatcaaagcagagaaagcgaaaaggtcaaaactctggtggtacattgattgtttgtccagcaagtgttgtaaaacaatgggcaagagaagttaaagagaaggtttctgatgaacacaaactctctgttttagtccaccatggatctcacagaaccaaagatccaacagaaatagcaatatatgatgtggtcatgacaacttacgccattgttacaaatgaagttccacaaaaccctatgctgaatcgttatgatagtatgagaggcagagaaagccttgacggatcgagtttgattcagcctcacgttggtgcactaggaagagttaggtggttgagagtagtattagatgaagctcatacaattaaaaaccatagaaccctaattgcaaaagcttgttttagccttagagccaaaaggagatggtgtttgactggaacgccgattaagaacaaagtagacgatctttatagctatttcagatttcttagatttcatccatatgccatgggcaatttattttaccaaagaaataaagcttcaattgataaatagcctcttcatggttacaagaagcttcaagctattctaaggggtataatgttgcgccgcaccaaaggtattcgtttgctcttactatatatatatatatatgtccttttgtagtttgtgctaattttcttttatgttttgctatttaggaacattacttgatggacaacctataattaatctaccttaaagaaagttaatttgagcaaaaaggacctttcagtagtagaatggtctttctacaggaagcttgaattgaattcacgttggaagtttgaggtgattcttcaataatataattatcatatatatgtgaataaatggtgactttctaccttgttatatgacattttctactcttattctataggaatatgctgctgatgggactttgcatgaacacatggcttatcttttggtgatgcttttgcgactacgccaagcttgtaaccatccacaacttgttaacggatatcgtcactcccaccctacaagaaaaatgtcagatggagttaaagatagcccctagagagaatctaatcatgttcctcgatctcttgaagtgtcctc

SEQ ID NO: 172063 - DNA, 899 bp, Arabidopsis thaliana landsberg
  unsure (1)..(899): unsure at all n locations
cgggaatgtttcngttgtggatccatcggagaggttgactagtggtggtggcgaaacgagatcgagtggttcatcgtcatcagaaggagaagaagaagaagaanctacacgtgaagacaaaaagattgtagcttggacagaggatgatcaaaagaatttgatggatttaggaaactctgagatggaacgtaacaagaggttagagcatttgattactagaagaagaatgaggagattagtccgacttgccgctgagagtagcttaatggatatggaagttcctccagtctgtgttggacggaactatttcggtttggatcaagaaaactatatagttgatggtcttcaaatgcctgaatctgcaccttctgtgttattaccaactaaaaacccttttgatattccttatgatccacaagaagagaagcctaacctctcaggagatagttttcagcaagagtttgcagccaaccctaatgatatcttcttctgccgccatgaaagcttttgtcgcagagtctttccattggacaatcagcttgacacgaaatgggaaccgtggaaaaagaagtcaataccacaacaaggtacattctcttgtcattctgaaaaatgttgtagcttacaaagtaaatgattctaagttctacaattctgatccttgctcatgtaggtagcaatgatggattggttggggagaaacatcctgtaatgaaaggaaaagatctaacaagaggagaagtaaatgatatggagtcagaacacatgacagagattgttgttagtgattcaaactcattgctttctcctgaagacagggaaatgaattctgatgtctcaaatcaagcatatttttctggaactttctggaaaggaaatggtgatcttcgtgttgaaaa

SEQ ID NO: 172064 - DNA, 439 bp, Arabidopsis thaliana landsberg
aattgcccctcatccttgatgtcaatgatttgaaaaccccagcattggggtagggctggccaatcaaattagggaactggtgtgttgacatacttgatccaaactaccagctaaacgatgatcgacaagtcgatgagttcatggcacatattgtgattcaaatcccgtacataattaacaaattttgtcagcctcgtatgctcaagttcatggattggctcctttcagttggacaagaatgaaagggatttatgtcaacgagaggtctggggactgtggaccagtctcaatgaagctcatcgaaatttatgcaactagtggaaatgcagagaaaattgtccttatcacagatgaaattgtcaatgaattcatgggtcagtaagctatagttttttttcaagaacttgtcgcaccactttaccaatcgaacaccagctaa

SEQ ID NO: 172065 - DNA, 553 bp, Arabidopsis thaliana landsberg; identical to SEQ ID NO: 13825

SEQ ID NO: 172066 - DNA, 571 bp, Arabidopsis thaliana landsberg; identical to SEQ ID NO: 77536
  unsure (1)..(571): unsure at all n locations

SEQ ID NO: 172067 - DNA, 867 bp, Arabidopsis thaliana landsberg
gatattgaaccatagtagattaaaaagattttgtgtgaatataaggacatttttgaggaaccaacagagcttccacctttcaggaaacatcatgaccataaaatccaacttaaagaaggatctaatccggtgaatcaaaggccatacaggtactctattcatcagaaaaatgagatagataaaattgttgaagacatgttggtcagtggaacagttcaaaacagttctagttcttatgcttcaccggtggttttggttaagaagaaggatggttcgtggcggttgtgtgttgattacagggaactcaatgggatgacagtgaaggatcgattcccaattcctttaattgaagacttgatggatgaattagggggttcaatcatttattctaagattgatctcagggcggggtaccatcaagtacgaatgaatgaagctgacattcataagacaacgtttaagactcatagcggccactatgagtatcttgtgatgccttttggtcttacgaacgcgccggctacatttcaagggtggatgaatgcagtttttaagaagtttctgcggaagtttgtactcatcttctttgatgatatacttgtgtacagtaagtcattagaagaacatgtggtgcacttacaattggtttttgaagctatgaggcagaacaagttgtttgccaagtggagtaaatgtgaatttgcagtacagaaggtggagtacctaggccattttataagtggttcaggcatctctacagatccagctaagatcaacgctgtgaaggaatggcctactcccaacaatcttaaacaacttcgtgggtttttgggttaacgggtaatacaggcggtttgtcagaacttt

SEQ ID NO: 172068 - DNA, 1256 bp, Arabidopsis thaliana landsberg
ctcgttgtctttgtttatgggcgacgagtttcatgcggttagatgcccgagccggctgtacgtcttctctgttcatgacctctggcgcttcgaattcccggacggtcaaacatccatttatgcgtggtcgccttctttcttgagaagtggaagcgtctcgcttattcccgaggtttgcgcgtgtgttttctcctttcgagctcacgcgctcttgatgtgttttaatttctcttttggacccgacgcgcctttatatctctatatatattgagctgctcctcaggattcatttatctgaagtttccgaagaaaaatttgagttttgcttctttttcggtagacttccgccgttgtttgttagtattttgattttccgactagaaattttccaaatcctcgtttcgttagttaactccgagccgaggatgacttcttcacgatctagcgcttctctctcggtttccagtagcaacctcaccgactccagcgattccaaccaccgagatgatctccccccgatctatatgcgcagaatggtttggacttcgtccgagggctccgaggctgatgcagcgtcgtctttgaacgctttcgaggcgactccctttatggctcgggaggacgctactgctgatattgcccgcgagctggatttgcctaaagatcccaagacgtccctcgttcgtaggcaccgtgtcccagctaccgacgaggctggcgcgtcgaattggcaagacgtgcccgagccgttttatcttgaggttaagattgaagagcatctgtttttcgggccgaatgagacggagaaccttgttcgagcgttcgagaagacggcttttgagataggcgagaaaaagaagaggaagaagaacaaaaaagtggttaggccgaatcctcccggctcgtctttatgcaccgagcggtcattgtctgatttaaaggctcggttcggttttggcaacgtcactcttgcgtgttcctagcccagatgagcgagccgacaatccccctacgggtttctataccttgtatgaggggttcttttatggctgcttcttgtggctgccagtcccgaggctagtcttggagtatgtgacatcgtatcagattgccctttctcagattacgatgcggtctttaagacatctgctcgggattttgattcggagttatgagtctgaaacagaaattgggcttgctcatctgaggaattttctagagatcccccgggtcccaaaattcgaagtggatcggta

SEQ ID NO: 172069 - DNA, 266 bp, Arabidopsis thaliana landsberg
gaaaacaggagagtccatggaagtcgctatcgtcaccggaggttccagcgggatcggcctcgaaattgcccaagccctccaccgccaagggctccgcgttgccaactgggatctcaatccgccccagaatgaaaccgactctgttttcatcccctgcgatgtctcatcggaaagttcggtgcggcagcccctcgcggaaaccgaaaagcagcttggcacgaaaaataatctgatcaacaactgcggtttgcagttcctttcgccga

SEQ ID NO: 172070 - DNA, 998 bp, Arabidopsis thaliana landsberg
tcctcgcttctctaagtagggaggagtacaacaaggtgcaaggattaaagagcgccaaggaagtttgggacgtgctcaaaaccgcgcacgagggtgatgaactaaccaagatcaccaagcgggaaacgatcgagggggagctcggtcgcttccggcttcgcaaaggggaagagccacaagacatgtacaaccggctcaaaaccttggtgaaccaagtgtgcaacctcgggagcaaaaagtgggatgaccacgagatggttaaggttattcttagatcacttattttccttaaccctactcaagttcaattaattcgtggcaatcctagatatacactaatgactcccgaggaagtaatcgtgaattttgtgagcttcgagtatatgatcaagggctcaaagaagatcaacgagctagatgatcctccacatccgaagcacaaccggtcgcatttaaggcgacggaggagaaggaggagtctacgccaagtagacacccatcgacgcctccaagctcgacaatgaggaaatggcgcttgtcatcaagagctttcgccaaatcctcaagcaaaggagggggaaagattacaagccccgctccaagaaggtttgctacaagtgtggtaagcccggtcactttatagcaaaatgtcctatttctagtgacagtgacaggggagacgacaagaaggggagaagaaaggagaagaagaggtactacaagaagaagggcgcgatgcccatgtttgtcatgagtgggactccgacgaaagctctagcgactccttcgacgacgaggatgctgccaacatcgtcatcaccaagggactcctcttccccaacgtcggcgacaagtgcctcatggcaaaggacggcaaaaagaaaaaggttaaatctaaatcctccactagatatgaatcctctagcgatgataatgctgtgatgaggaagataatttgcatactctttttgccaacttaaatatgcaacaaaaagaga

SEQ ID NO: 172071 - DNA, 1219 bp, Arabidopsis thaliana landsberg
aagaagtctttggttatccatatgaattggactacaacgatgtgaaattcaagtttgaatatcatagcaatgcttgttcttgtgtcaaatttgggcttgaccacgatacgcaaacttgtgacttgtcgtttaagagaataaaagaatgcagagtacggcatttacatgatcctctccatctgaggatggtagtggtaggagcgctcaaactgagaacaaccaacattccagagaaattgacatagtcaatgggagaagcaagaagcgatcaagctaatgcgggtgaagctttgaattattgaactgaaaagtgaaaactagatatctaactattgattcattttcaggatcaactgcaaaatagaccataggaatttaataaatttgattttattatgcagattacggtaagaacatatgaagatccttccaacttactctgaggtaaaacagtagcaaacacaagcttgacggctccaaatttggaactttccttagggcagggtaaagtttccgcccagatgtcttcttctacaagtatgatactattgttatcagtttcttcaagcaaatttcatggcgatggaacatcgttgtataattccctttctccttctgaacatagatgcggtggctgactgctaggaacccttcgcgtgcggcaaaagaaaaaaaccctagtcgcctctcctgtcgccattttctcggctgacgtagcctaaaagttatgagttctttcagggcgatttaattttaaccactagaagtacaataagtcttctatgcaaggcgaagtttctttgttattaatttattattgtgtctgtcatcatactctcttgttaggagatttgattttaacgtatataccactacaaaaatataacttgtacagtaagtcttctatgcaagcctgcaaggaaaggaaggaagtttctgtgttaatttgttaaaacttgattgtgtctctcactatacgctcttgttaggggatttgattttaaccagtaaaataaatatcttgtatagcaagtcttctatgtgagtcttcgacgaaagaaagacgaagtttctgtcttattaagttattattatgtcttaatacatcatactttgttaggacaattcctatcaattaaccactaaaaaaatatatcttgaacaaagtcttctatgcaaatcttcaaggaaaggaaggcgaagtttctgtgtttaatgt

SEQ ID NO: 172072 - DNA, 859 bp, Arabidopsis thaliana landsberg
acagattatccactattcacaaagtctcgatggatcgtaaacaacaagggccaccgcgtgaagctagcttgcgcgaactggccttcgcacctcaagccagtggtagcagaggggctgagcagccagccaatggattcaatatcgaaaaagataaaagacatgggattcaattgtgttaggctcacttggccacttgaattaatgattaatgacactttagcctttaatgttaccgtgaaacaatcatttgagagatatggattggatcatgagcttcaagggatttacactcacaatccatacattgtcaatactcctctcatcaatgtccttcaggtataaatacataattaatcatgtgattctagtattacataatttctacaactcaaacaaaaactattcttttcatgttcaattaaaaatccatggtttttaaataagtcatttgtgactgaaaaatatgactaaaacatgttttatcttatattgcaataatgattatttttccatttcttttcagatctgatcatcgttgtaatgaaaaaaatatatttcacatgcttcttgtttttactatatgatatcttctaacgcaaggcaacatgtttgtgtaggctgtggtgtatagtcttgggaggcatgatgtgatggtgatacttgacaaccacatgaccgtaccggggtggtgttgtagcaacgatgacccggacgcgttctttggcgacccaaaattcaacccggatctatggatgttgggtcttaagaagatggccacaatatttatgaacgtgaaaaacgttgttggtatgagcctgaggaatgaacttaaaggctacaatcatacatcaaaagattg

SEQ ID NO: 172073 - DNA, 525 bp, Arabidopsis thaliana landsberg
gagcagtcagttgatctgatcagttccggaatcaaatttatgtcgtcggcagtccctgagaacccggtattggataagggagagcttgagagcacaatccgagtatggggagaaatttacaacaagagcttcgaaatcacgccggatcagattgcgaacttcgatattgggcaggaggcattcgactacatgaagagccactcaaagtaggtgctttaccgggcagaggcgaggcggacgattcgaaatggaaattgatcagcaggttgtaaatcttgagaacgtatggaaggtatttggctcagagtcccgtgacgttctcgccttgcaagatgtgactttggacgtacggcgaggcgaattcttgaccatcataggaccaagcgggtgcggaaagtcgacagtactcaaagtggtcgcgggcttggaaagtgccgagcacgaagtcccccggtacgacgaagtccccgtcacgactgacaaaacaagagtcggttacatggcgcaagcagatgacctgttgcc

SEQ ID NO: 172074 - DNA, 800 bp, Arabidopsis thaliana landsberg
tgttttggaataatcaaagggagcagctaggaaactttgcaggtgactgatattaagagatgtttagagtacctaaataggaaaaaagagtgcattgacacctaaatgctaattcttcgacttgttttggttacctacaggccaaactcatttgccgctatctagggtcagaaagattttgaaatgtgatcctgaagtcaaggtatgtgaggttaacttgaattatgttggctggtctagagtttctgaaattgccattatgatcaaatttgttagtctgttgagttttactgttagaatgttttagtgttgtttatttttactgttcctttgatatctttctaaggttgatatcaatacttatagacaagatatatgtgacatcaaacatttgaagaaatatgtttgttataacaattttttcctaagatatatgtgaattttcagaagataagctgtgatgttcctgctttgttttcgaaagcctgtgaatacttcattctagaggtaacattacgagcttggatgcatactcaatcatgcactcgtgagaccatccggcgttgtgatatcttccaggccgtaaagaactcaggaacttatgatttcctgattgatcgtgtcccttttggaccgcactgtgtcacccatcaggttagctccttttcgcaatcttactcgtgaaatcaaaaaaattatgttttcatgtgctaaatctttctgttcagggtgtgcaacctcctgctgaaatgattttgccggatatgaatgttccaatcgatatggaccagattgaggag

SEQ ID NO: 172075 - DNA, 598 bp, Arabidopsis thaliana landsberg
atgctgaatctggaagtttaagtaaagcagtggagatttatgattatgttgttgagttatatgattctgtgcctgatgttattgcttgtaactcgttgttgagtttattggtgaaaagtaggagacttggagatgcacggaaggtgtatgacgaaatgtgtgatagaggtgatagtgttgataattacagtacttgtatattggtcaagggtatgtgtaatgaaggaaaggtagaagaaggtagaaagctgattgaaggtcgatggggtaaaggttgtattccgaatattgtgttctacaacacaatcattggtggatactgcaagctgggcgatatcgaaaatgcgtatttagttttcaaggagttgaagttgaagggatttatgcctactttggaaacttttggtacaatgattaacgggttctgcaaggaaggggattttgtggcgagtgatcgacttttgagtgaagtgaaagaaaggggtttaagggttagtgtttggttccttaataatatcattgatgctaagaaaaggcacggatataaggttgatcctgctgagagtataggatggataatagctaatgactgcaagcc

SEQ ID NO: 172076 - DNA, 465 bp, Arabidopsis thaliana landsberg
atggaaggtaaactagcacatgaccaccgcggcatgacgtcaccgcgtcgtatctgcgtcgtcaccggtccggtgatcgtaggcgccggaccgtcgggactagccacggcagcatgtttaaaagagagaggtatcacgtccgtactactagagagatcaaactgtatagcatcactatggcagctcaagacttatgaccgtcttcatcttcaccttcctaaacaattctgtgaacttccgattatacccttccccggagatttccctacctacccgacgaagcaacagttcatcgagtaccttgaggactacgctcggaggtttgacataaagccggagtttaaccaaacggttgagtcggctgcgtttgatgaaaaccttgggatgtggcgcgtgactagcgtgggagaagaggcacgacggagtatgtttgtcggtggttagtggcggcgaccggggagaatg

SEQ ID NO: 172077 - DNA, 269 bp, Arabidopsis thaliana landsberg
aaaagaatgactatgacgagaagaagagggtggtgtatccatttggagtggtaaaaccaggtggtcgagaagaagatataactctaaatgacattaataagaggattttaatgccatcggctaggccggttcgacatccggttggagactttgcatgtcgtccgtgtgtctctgcagatggaccgggtctatcaggcaaagccgtggttgcattcacgaagatacaaacattagggaggggcacaattactattataagaactaaggga

SEQ ID NO: 172078 - DNA, 877 bp, Arabidopsis thaliana landsberg; identical to SEQ ID NO: 5213

SEQ ID NO: 172079 - DNA, 531 bp, Arabidopsis thaliana landsberg
agatcaagaaaagcgtcgattacggcttccttgatttcactacgccggaaaagcgccgtgccgccctgttgcgggagctgcgcttcaaccagcgcatggcggcggatatctatctcggtgtggaagaaattgatggcgaaagcatcctggtcatgcgccggttcgatacggcaggcgttctcggtgagcaaggggctttgcaggagaagtggtccccggacctgacggttatgcacaatctcggccaactggtagcgcgttttcatgccggatcagaggtttgcaatgatatccaacatgttaataacgtaaaatatgttattgactcgaataggaaaaatattgcgatttttcgggatcaactcggtgctgaggccgtcgatgcctatgatgccgccatgcgcatcgcctatgccggggccgaagctgatatcctgaagcggtttgaagctggctctgtccgccattgccacggcgatctgcatctcggcaatatcctgatcgaaaatggcaagcccgtcctgttggctg

SEQ ID NO: 172080 - DNA, 1254 bp, Arabidopsis thaliana landsberg
  unsure (1)..(1254): unsure at all n locations
atggtctccggaggtggtagcaaaaccagcggtggagaggcagcttcctcaggccatcgccgaagtcgtcacaccagcgctgcagaacaagctcagtcgtcagcaaacaaagccctaaggtcacagaatcagcagccacaaaaccacggtggcggaacagagtccacaaacaaagctattcaacagtacactgtcgacgcgagactccacgccgtcttcgaacaatccggagagtcaggtaagtcgtttgattactcacagtctcttaaaacggctccgtacgattcctccgtaccagagcagcagatcacagcttatctctcccggatccaacgcggtggctatacccagccttttggctgcttgatcgccgtcgaagaatccactttcacaatcatcggttacagtgaaaatgcgcgggaaatgctagggctcatgtctcaatctgtaccaagcatcgaggacaaatcagaggttttaacgattggtacggatttgcgatctctcttcaagtcatcgagctaccttctcctcgagcgcgcgttcgtggctcgagagatcacgcttctgaatcctatttggattcactctaacaacactggtaaacctttctacgcgattctccacagggttgatgttggaattttgatcgatttagagccggctcgaaccgaagatccggcactttcaatcgccggagcagtccaannnnnnnnnnnnnnnnnnnnnnnnnnnnntcatttacaatcgttgcctagcggcgacattaagcttctatgtgacactgttgtggaaagcgttagagatcttactggctacgaccgtgttatggtgtacaagtttcatgaagatgaacatggtgaagttgtttctgagattagaaggtctgatttggagccttatttgggtttacattatcctgcaacagatattcctcaggctgctcggttcttgttcaaacagaaccgtgtccgaatgatttgtgactgcaatgcaactccggttaaggttgttcagagtgaggaactcaagagaccactttgtttagttaattctactctaagagctcctcatggctgccatacgcagtatatggcgaatatgggctctgtagcttctcttgcactcgcaattgtagtaaaaggcaaagattcgagcaagctttggggattagttgttggtcatcattgttctcctagatacgttccattcccgttgcggtatgcttgtgagtttctgatgcaagcatttggg

SEQ ID NO: 172081 - DNA, 506 bp, Arabidopsis thaliana landsberg
tcgcacactccgcacagcggcgcggtggaatgcgtcgctttcggggtcggcaccaccgacatggctaacgcattcgtcacgggcgccgtgcggatgaccctgccgcaatgcctgaaagtgcagctggacggcgctctgccggacggtgtctccgccaaggacatcgtgatgcgtccgctggccctgccgcagatccgcgccggcgccggcgtgggcaaagtcttcgcattcaccggtccggccgtggcccggctgtcgatcgatgaacgcgccaccctgaccaacatgaccgccgaactgggcgggctgaccggcatcgtcgcgcccgatgcgcaaaccctgtgtttcctgcaggcgcggcgaggcatcgcattcgaactcgagccctggatgcgcagcgaccccggcgccgcgtacgccgccgaactgcgcgtggattgcgcatcgctatcgccctgggtcgcggcgcccggcgacccgggcaatggcaccgcgctggccgcctg

SEQ ID NO: 172082 - DNA, 580 bp, Arabidopsis thaliana landsberg
  unsure (1)..(580): unsure at all n locations
nnnnnnnnnnnnnnnnnnnnnnnnnnnnnnnnnnnnngctctttgactttcgactcgctcaagcacccacggagaaggagccaaacgccaggctctcctcgagctcgtcgattacgtgcaggctccagctcaggcagcgggcgccaacgcacccagcgcgcttcccggaccacgtccaggaggcgcttcgtcgccgccatctctgccaacatcttccgcccgctgccacccgcgctgcacgaatccgccgccgcgatcgaccccggcgccgcgcccgacgaggaggaggagccatacctcgacccctcctggccacacctccagctcgtctatgagctccttctccgatacgttgtttcgcccgacaccgacaccaaggtcgccaagcggtatgtggaccacgccttcgtcctccgtctcctcgacctctttgactccgaggatccgcgtgagcgcgagtacctcaagaccgtgctccaccgcatctatggcaagttcatggtacaccgaccattcattcgcaaggccatcaacaatgtgttctaccggttcatctttgaaacgcagcgccacaatggca

SEQ ID NO: 172083 - DNA, 442 bp, Arabidopsis thaliana landsberg; identical to SEQ ID NO: 60592

SEQ ID NO: 172084 - DNA, 1270 bp, Arabidopsis thaliana landsberg; identical to SEQ ID NO: 38370

SEQ ID NO: 172085 - DNA, 548 bp, Arabidopsis thaliana landsberg; identical to SEQ ID NO: 2057

SEQ ID NO: 172086 - DNA, 1253 bp, Arabidopsis thaliana landsberg; identical to SEQ ID NO: 10878
  unsure (1)..(1253): unsure at all n locations

SEQ ID NO: 172087 - DNA, 463 bp, Arabidopsis thaliana landsberg
gcctgtacgccggcgcgcaggcgcacctgcacgtgctgtagctgggcgccacactggcccgccaccacgtgcgtgcgaagcttgtcggcgacgcggccggtttccacacccacggtgcattcctgccggacggccgccagcacctcgacacccaactggcgatccgtcaccaggcgcgcaacaccgtgtccgcgtcgacctggcgcggtgtcgccagtgaccgcggccgtggcgtgttccgcggcgcgatcgtggtgaacaccggcgccgacggcaccaatgcctcgctcagcaacaagaacctgctgctctcgacgcaggccgagatcgataccaagccggagctggagatctacaccgacgcggtgaaggcggcgcacggtgccaccgtggaccagctcgacgagcgcgcgctgttctacctgcgctcgcgcggcatcgcccaggcgcaggagcgcacgct

SEQ ID NO: 172088 - DNA, 714 bp, Arabidopsis thaliana landsberg
attttattatactttaattgtcaaataccatacaaatatatgtttgtcagtttccgcgacttcagtcctcatttctctgagccaataaaggtgaacttgtttgttgatggtcttggatcagtaaataaataggtgggagtattgaagttatggtctaaaatcagaagaaaactgataccattattggacaaacaaatgttaattgacttttaaattatcagctgcagttaagctttcttgcatgaactaacatcgccttagtaagtactgaattgtttcttttactcatcatgtcattgcagaatttttgggtggacattaaaggacctcaattagcacttttgccagttcttgcattcgaaggaggaacacgaagaaatattcccaagtttgaggcatgtacattctgatgactcaggaagctctcttgaattctcatttgggatatgacattctctatgaattgattgtttctggaatgttcaaatttttgtgtactaaacaggtaggcactctgctttatctccgggttgtcaagacaaacataggaatgaatccggagctgtcttgtaccgagggtaagttaaaagctttggaggctaaaacagtgctgcttctcttaatcccttttaaactaattgtctcttgtttctatgtattagctagtgggaaagctgcatggggtggacccttgagagatggtttaatgtttgc

SEQ ID NO: 172089 - DNA, 216 bp, Arabidopsis thaliana landsberg
atgtgggagtggctcgtaccggtcatcgtgatcgtcggcattctggtcatcgctggcatctacctgtgggccacctacaacagcctcgtcgcgctcaatgtgcgcgtcgacgaggcgtggagcgacatcacggttcagctcaaacgtcgcgcggacctgctgcccgacttgatcgagacggtgagggctacgcgcgcacgagaaggccgtgtcgag

SEQ ID NO: 172090 - DNA, 1951 bp, Arabidopsis thaliana landsberg
agccaatcgtgtcctcggtggagatcaaagctacttgcacgatgaagagtcgtcggcgcatatcgtgggaagagataaacgagagctggttgaatggcttatgtgtgttttgcaaagagccagaagctcctgatcaccacctgaaacacaagaacttagggcttcttatgatctatggtaatgacgatcatctctctaatggtggaattggtgaatcaattgatcatcgttcaatgaatttggtacatgaggaacgagaggagcactccaagttggataatcacaaagatttagtacagagaactatcatggaggaacgagaggagcactccaattctgagattctgaaaagtgttgaacctagggaagtaaatttcgggttggaaaatcttgattctgtggtgatgaacgagtatcaggagcaagattgggttaaacagaacatgaataagaggtttgaggttgaagatgatgttgataggggtcagaaattgttgagtattacagaaaattgcagtgcacaccaagtgttcggtaaaacgtctcaacatgaagaaaagctggaaataaagaagaaagcgaaaggattcaaatcatggatgttcaaattcaaacttgctaagaaaacaataagggaacgagacataagggttggttccacacttggagcagaaaagtgggttggaggaagagcaagtctatgaaattgcagtttgtttcacatcaggtgaaagagtcatcacatagggataaagactcttttgcgggaaaaaagtcaattaagcaagagatgggtgttgaagtggagagcttgtggcagcaacaggatttaagaacgcattaaagagacacaagcggatcagggagattcttatgttgttgtccagaaactgttgccgcatcttgaatcggtttgtgctacaaaatcgtttttggaaactgattcaatgtccgaacttgaaggggagttaactgactcaaagatgaggacggcttgtgttacacaacatcaggtatcaatttttgtcatggaaactagccatcatcatcaagtgttagaggattttgatatgcaaatggtcattgaggatcaacaacctatcgtgacagaagctttgcgtttaatctctaaagatttccactgggacgtggctgagttgtgtgagcagttaacatgtgacgagtctcataaaccgaagcaaagactatctccaaagtcttggatgtttaagtatagaagggaccataagatactacacaactctactatgtctaggaatgtgagaatggtggttttcagaaaaatggaagcagcagagaggattcaatatttggttacacataggtttcatgagggtccactaaaaatggatattcaagactctgaatttggtatcagagatgttttacgaagagtgatgatgctgttccaacacaatattgtacaagccaagatgatagtgacaaagagaaagaaaacgttttacaagtctaggagattcaagttcaaacatagagttgtaccaagagctttacaatatggttttgaagtcaaaatgaagcaaaacttgaccagcaaggaggcagaacttgttcatattttgcttgggtggggagatgtgatattaaacttgaagaaaaaggggagatcaccagagtttgagctggttatgaactacactccattctcagtggagttggtaaagcttaaagatcgtgatacattgctaataccacagtttctgcttagtgatgagaagttccaaataaagcataactggaaacctaagttcatacactccgtttcagcatttggtgttgggcattatgacgattctacttggaaacagagtgacatagggacgcagctcttatgcgacaggagattggttgtttccaagcttggcagcgaggccctgagtgttagagaaatgtatcagaaactgtaacg

SEQ ID NO: 172091 - DNA, 2481 bp, Arabidopsis thaliana landsberg
  unsure (1)..(2481): unsure at all n locations
accgggagtaannnnnnnnnnnnnnnnnnnnnnnnnnnnnnnnnnnggatactgcaaatcgatctagaagaagctgatgaagatgcatggtactacaaactcttttctgaaaatctgtgcggacaagcgcttatgtggttcacccagttagaaccaggttcaatgagtaattttaacgagctgtcagccgtgtttttgaaggaatattccattcttattgataaaagcatttcggacaccgatctttggaatttgtcacaagggccgagtgaatcacttcggactttcatcaccaagttcaagaatgtactttcaaaactcccaaggatttcacaacagtcagctttgtctgccctacggaaaggtttgaggcacgattcaagattcaaagaggatttaatacttcacaagtcggacataattcatgatgctcttttccgagtaaacaactggatggaagtagaagatgaaaaagaaagctttgcaaaaaggaataggccagcaaaaccggcggttacttttcctgccaagaaattcgagcccagggaaaaccaagggccaaggaagtttggattgcaaccttttaacaataacgtctagaagcagtttccaaggaaaaggaaagtcaaacggctgggtccgagatgaaagtctatactgcgacatacatagggtaaccggacctctaaccaaagattgtagtgtcctcaaaaggcatctcgcggaactatgggccagcgaagatctttccaaattcaacatagacgatttcgtgaagaaatatcacgaagctagggataactccgaagttcaaaactcaaaaaggccaaggttgaccaacgaagaagaaccaaggagttcgaaggggaaaatcaatgtaatccttggaggctccaaactttgccgagattctattagtgcaatcacaaagcataggcgaaatgttctacttaaatcaagtttgagtgaagaagttaaataccaaggcgcttcaatatcatttgacgacgaagaaacgcggaccttaaagacctcacgatgacgctctagtcattatgctggacgtggctttctttgaagtgtcaaaaattctcgtcgatacaggtcgtttggttgatctgatctttctaggtactttggaaagaaagggaattagtagggcagatgtagttggacctccgtctcctttggtacctttcccgagcgaatcagccatgtcttttggaacaatcaagttacctgttttagcttgaaaaatgtcaaagattgtggactttgtcgattttgacaaaccggcagcttacaacatcatcctcggaactccttggatttatcaaatgaaggcggtcccctttacgtatcatcaatgcatcaaatttccaactccaagcgtagtggaaacaattcggtgagaccaagaagcttcgtggacatgttatctaactagccaccgtttgaaggtccaatagcaattaacgaagcccgcaaagaaaggaatagtcccaagatttcctagtgggcagaagggggacgatgtcgacatcgaagtaatgttagaagaagacaaaccagatcggaaagtttgaattggagccactctaactggcgaaataaaagaagctttaatcgagctgttaaagaaaataaaagcatcatttgcatggtcagcaacagacatgcctggcatagacccaagtataatctatcacgagttgaatgtggatccaagcttcaaacctgtaaaacagaaaagaaggaaactcggagtgaacgagcaaaagcggtaaacgacgaagtggataaactcttaaaaataggatctataagggaggtgcagtacccggattgggtggcaaataccgttgtggttaaaagaagaatggaaaggatagggtgtgcatcgatttcacaaatctcaacaaagcttatccaaaagacagtttcccactcccacatatagatcgtcttgtggaatcaactgccggaaacgaattgttaactttcatggatgcttttttgggatataatcagatcatgatgaatccagaagatcaagagaaaacgtcattcattacggataggggcatctattgttataaggtaatgcctttcggcttaaagaacgcaggagcgacctatcaacggctggttaaaaaaatgttcagcgagcaccttgggatgacaatggaagtctatattgatgatatgctagtcaaatcattgaaaaaggaagatcatgttaagcatttagaggaatgtttcacgatccttaaccagtatcaaatgaagttaaacccggcgaagtgtacgtttgaagtcacctccgcggaattccttggttatatcgttacaaaacgaggaattgaggcaaatccaaaccaaattaatgcctttctcaacatgccgtctccaagaaatttcaaggaagtgcagcggttgaccggtcaaattgcggcattaaatcgttttatttcaagatcg

SEQ ID NO: 172092 - DNA, 1008 bp, Arabidopsis thaliana landsberg
  unsure (1)..(1008): unsure at all n locations
nnnnnnnnnnnttactcccggtctaacaactacgaannnnnnnnnnnnnnnnnnnnnnnttcttgattgctctatctccacaagcagattcagctgctctttgtgtgatctgggatcattcatcaacctcatgcctaagtctgttgctgagatactaggcatgactaactacaggccgactagaatcactctctccttcacggatcgttccaaacgaatccctgaaggaattcttgaggatgttcctgttaaggttggtaactccttaatccctgttgactttgtggttctggactacgataaggaacccaaggatcctcttatccttggaagagcattcctagctacagctggtactaggattgatgtgaagagatgtaggatctctctcaaagtgtatgatttggagatggagtttggcatggatggttcagagttcactaagactatcagtagaattgcctctagcacacacacacctcctcaaactgctcagaatccccagatagagccacacacaatgctcccatcagctcagcttgccaattagagttgtagagcaacggtgtcgatcgacaccacaactcctgtcgatcgacaccctcgggattcacaaacataagattctgcacaatttcttcagcccacacctcttgaggccctctgtgataagttctattctatctcttctcatgttttaccttcaattaattttttagattcttcaaagtctgcttcacaagataacaaggctagagttcttcgaaagcttttttctcctgttgttcttgaaggaaacgaagagagtgtcgattgacacctgcagctgcccagactggatcagtttacacaccgccttggaaggcgcgaacacaacagcaagtcctccacccctccgtccacgtcttgaactccgtcaagtcaagctattgactcaaaacaagcgcttagtgggaggcaacccactggtttgatttttcattccctttctttattttctttattttt

SEQ ID NO: 172093 - DNA, 427 bp, Arabidopsis thaliana landsberg
ctcgaacagaaagtgcaccagactgtaatggagatcaatctctctgccatggtgcataacctgaaagtgtatcagcagcacctgcatccatccaccaggctcatggccatggtaaaggccttcagttatggcagcggaagcgatgaagtagcgcgcctgcttcagttccacaaagtggattacctggccgtggcatatgcagatgagggtgttgaattgaggaaagcaggcatcagtctccccatcatggtcatgaatgcggatgaagcaggttttgaagcgctggtgaattacgatctcgagcctgaaatatattcctttggcatcctgcatgcgttggatgcatatctctcgcagcaaagcatcaacaggttcccggtgcatattaaattcaatacgggcatgaacaggctgggctttaagggct

SEQ ID NO: 172094 - DNA, 924 bp, Arabidopsis thaliana landsberg
tttttttaaatatcgtttcataataactaaatgtagtttcagttctttccaaaaatatatttaaaacaattaataacaaatataaatattattattaatataaatactgcataaatacataaatattgtatgaatacataattacgattgtagccgcaacatagtcttcagttagtcacttaaattaacgactattctaccactacactacatctatttatatttgtgaaatttaatcgtaaattagtcattaattagtcactaaatttgacgactacgttacgactatacttacgactacaaatattagtcgtaaagtagtcctaattggcgactatttttacgactatacattttagcgactctcgatttacgactacatgatttagtcgctatttagtcgtaaatgaccacttaacgactatttaacgacttttggtgtagtcgccaaaacccagttttcttgtagtgtgtgccaatgatatcatgtaatatttggagacttggagtgattgatatttgaatccattttgtgtgtggtcatttcaatcatttcgaattatcgatcatccatgcacattcaccaaactctgacaacgtggttggcatacaaatgagaagggcaaaaaagtaatttgtatacatatcatgctttccttgaaaccctagccgcctatcattctgctatcatcttcttcctccgacccattaacctatcactacaagaaaacaggtaaaagactattacgaagagcgacaatcaacatagtcgtattatcaagcgaccatttggcaacggtttgacgactacaatgcgacaacacgaaaattagtagtaacatagtcgttattttacgactaactcaatctgtctgaccatagttgtccattaacgacgtattgacgattctattattgaaggga

SEQ ID NO: 172095 - DNA, 564 bp, Arabidopsis thaliana landsberg; identical to SEQ ID NO: 37424

SEQ ID NO: 172096 - DNA, 956 bp, Arabidopsis thaliana landsberg
atggacctcacccaaatcctactcctctcctttctctttctcactatctccatcaaactcttgctcacaaaatctaaccggaaacctaatcttcctccttctccggcttaccctttaccggttatcggccacctccacctcctcaagcaaccggtccaccgaacattccactccatctctaagtcccttggaaatgctccaatcttccacctccgcctgggaaaccgcctcgtttacgtcatctcctcacactccatagccgaagaatgtttcaccaaaaacgacgtcgttctcgcgaaccgtcccaagttcaccataagtaagcacctcggctacaacgccacctacttactctcggcatcttacggcgatcattggaggaacctccgccgcatcgccgccgttgagatattctccactcatagactcaattcatttctgtatattcgtaaggacgagatccgacggctcatttcacatctctctcgtgattccttacacgtatgatctccttcaattctttttatttattatttgttctgtattcattactttatctttggtttgtcaactaacaaatttattatttattcattactcgtgacgactactttcatatagtacatacttttatatttattgtggtgataaattgtccatgtgactagtttatttttttgaagcattgcgtgtatattacgatactagctatttattcacgaaagtctgatcactatattcataaatattacatagtttattcacaaattacaaatgtacagaaaagcttaattttaaatttatagaaaaacgtcagtgtaggttttaattgtcttaagttggttgaataattatttggttcaaaataaacacattgttctaatatgttatgggggcgaatatggaaatgcacaaatttttacatacttaccaaaactcttatctgggtactaata

SEQ ID NO: 172097 - DNA, 206 bp, Arabidopsis thaliana landsberg
cgaccacgccggccatgcgcggctcgtggttctcggcggtttccgacgcgcggttccgccggttctcgaccagttacaagacacgcttcggcgcccagccttatcgtatcgccacgctcggctatgatgccgtgctgctgaccttgcgcatcgcgcgcgactggcgggtgggaaccccgttcccggtgacccgtctggtcgataac

SEQ ID NO: 172098 - DNA, 1595 bp, Arabidopsis thaliana landsberg
taatttcgccccctttacaattatgaatatacaaaacgtatatattttttgtgattatgatgaaagaataaaaatattcgaaagctcataaacggtaacccatcgatatatagcttataccacacactaatcattggaaatagttaattttgctcacgtgaatagtaaaatgaaatgtaacaaaaaaaaacaagaaatgtaacgaacccgaattatatttggacaagaaaaagtcaagttagtattcaagaattagagaccaaattgtaacaaatgccgtttggagacacgacacaatgtgggaataaagaagaaaaaaaactgcaatgaagggacaaaaattaaatgctcggcagaggacggcaccgtcttgatccattcacaaccgtacgccacacacccctcaccggcgtttaccggtgaccagtgttttctttctttctattatattttaattccatttttattttatattcttttgcccgcgtaaatgagacgaaataataaataattattataaaaaaaaacaaatgggaaacctcctaaatccaagctgttttccagaagaacccaaaactccacaaaagttatattcacacctctctcttatctcaaaaaatcttataaaccattacaaaataaaaaacatataatcacccagaaagcttaagaaaagttttcctttttttccctcacgaaatctcagagaagatgatatatatctataaaagtatcatctcatagattccatccttttctctattacatggagaagaaaaaagaagaggatcatcatcatcatcatcaacaacaacaacaaaaggagatcaagaacacagagacaaagatcgagcaagaacaagaacaagaacaaaaacaagaaatctctcaagcatcatcatcatcaaacatggcgaatctagttacgtcatcagatcatcatcagttggagctagctggaaatctctcaagcatcttcgatacttcatctttaccttttccttattcttatttcgaagatcactcttctaataatcctaattctttcctagacttgctccgacaagatcaccagtttgcttcttcctctaattcctcttctttttcatttgatgcctttcctctccccaataacaacaacaacacctcttttcttacggatttgcccttacctcaagctgagtcatcagaagtcgtgaacacaacaccgacttctccaaactcaacctcagtctcatcttcctccaacgaagctgcaaatgataacaacagtggtaaagaagttactgttaaagatcaagaagaaggagatcaacaacaagagcaaaagggtactaagccacagtaagtttattcattaaccctccattctgatactgattttgtgttggatttttattaattattgtgagtttttctttctttcttttctttttgaaggttgaaggcaaagaagaagagtcaaaagaaaactagagaagctaggtttgcgtttctgacgaagagcgatattgataatcttgacgacggttataggtggagaaaatacggccaaaaagctgtcaaaaacagtccttatcccaggtataaataca

SEQ ID NO: 172099 - DNA, 518 bp, Arabidopsis thaliana landsberg; identical to SEQ ID NO: 79135
  unsure (1)..(518): unsure at all n locations

SEQ ID NO: 172100 - DNA, 1704 bp, Arabidopsis thaliana landsberg
  unsure (1)..(1704): unsure at all n locations
gagtttgatcttgagttccgtgcgcgtacaagcttagagtctcaagttctcgcagatttcctgatcgaactcccattggctacttctgcatctgatgtcccaagtcaaccttggattcttcatgtagacggtgcctcttcaagacacggttctggagccggagttcgccttannnnnnnnnnnnnnnnnnnnnnnnnnnnnnnnttccgactcgctttcaacgcctccaacaatgaaacagagtatgaatctttgctagctggacttcgcctcataattggagtgggtgtacgtaacctgcaggctcactttgactcacaactctttgctagtcagtattcttgagattaggaggcaaaagataatcgcatggaaacttacatggatctccccccccccctgcccgacaaatttgaaaggttcgagttaatcaaagtccctcgtgcagaaaattcagctgctgatgccctagccgctttggcttctacgtccgaagtaactataacaaggataatccccgttgaaacaatagctcaacccagtatttgacttgaggaagtgaattttgttactcgggcaatacgtaggcagctcgaagcacaagcaaacaatcccgaccagcagtagctcgatgacgaaaacgacgttccaaaggttgtcccgcctccaattaccgaagaatcgtctggtccaaatagtcccgaagtccctgataatcagacacctcacgactggggggcagactggagagaactgatccgagactacatcctcaacggggtactccctaccgacaagtgggaggctcgaaagctgaaggccacttgtgctcgtttctgcgtagcatatggcattttatacagaagaatcatctcggctccggatgctatttgtattttcggggaacaaactcagactgtcataaaagaaatccacgatggaacttgtggaaaccactctggaggtcgctctttggcctttaaagtaaaaaagtacggttagttcttgcccacaatggtagcggattgcgaagcgtatgcacgccgctgtgcgtagtgtcagaagcacgcaccgtatatccttcaacccgccgaacttctcacttcggtatcgtcaccttatccattcatgaaatggtctatggacaacactggaccacttcacatttcaactcggggagtcagattcctacttgttctaaccgactatttctcgaagtgggttgaagctgcaacctactcaaacataactcaggtacaagtccgccagttcatctggaaggaaatcatctgtaggcacggcatgccgtatgaaatagtaaccgacaatgggcctcagttaatctccgaacagtacgaagttttttgtgcagggtggcaannnnnnnnnnnnnnnnnnnnnnnnnnnaacccgcaagggaatggtcaggccgaggcgatgaataaaacgatcatctcgaacctcaaaaaaaaactaaatgagtataagggagcttggttcggagagttacaaaacgtgttatgggcaatccgtacaactcctaggagagctaccggtgagacccccttcgctctctttcatggaatggaagcagttatcccagccgagatcaaagtcccgagttcgagaagagtacaaaatccccagaacgaggctgcgaacaacaaaatgatggttgatatgattgatattatcgacgacgac

SEQ ID NO: 172101 - DNA, 181 bp, Arabidopsis thaliana landsberg
ttggccgtaaaacaccgatgccaatcctttcgaaggtcacagactttgctccaacaactgcggcttctttgggagtcccggccccatgatactctgttccaaatgcttcagaaacatttctttgaaggaagaagaacaagtcaaaaccaaatccacaattcaaacccgttctttcttgtat

SEQ ID NO: 172102 - DNA, 1681 bp, Arabidopsis thaliana landsberg; identical to SEQ ID NO: 8603

SEQ ID NO: 172103 - DNA, 1439 bp, Arabidopsis thaliana landsberg
  unsure (1)..(1439): unsure at all n locations
agctaccattgcaagctactcacaccatcgacataacagctctaaaagaagcagtcaaggcagataaagaattgagtaagctgttgcaggatatagaacaaggctgtcagaaaaatggagattttactgtggaagatggtgtgccttacaggaaaggttgtcttgtagtacctgtagtaactcccttcattccaaaactactggaaacgttccacacaagcgctgttggaggccatgaaggagctctgaaaacgtttaaacgattgactaaggaggtgtgttggacatgcataagaagtgatgttgttaagttcatcaaaggctgtcaagtatgttaagagaacaagtattctaacactctctccagctggattattagctcctcttccgatacctcaacagacttgggaagacatcagtttagacttcgtggagggactgccagtctcaagagggttctcgtggtggtagacatgttgagcaaatatggtcactttatcgcattgaaacacccattcacagcaaaaacagtggcaaaggcatttatgagagaggtagtcaaactgcatgggtttccatcaacgatggtttctgatagagataagatattcttgagccacttctggactgagctcttcaagttacaaggtaccgctcttcacaaaagctcagcttaccatccacaaacggatggccaaaccgaggtggtcaacaggtgtttggagtcatatttgcgatgcttcacgggtagacgtccaacgacgtggattcagtggttgccttgggccgaatactggtagaacacatcataccattcagctacaaagaccacaccattcatggcagtctatgaaagagagccacccacaatgatcaggtatggagatgtccctactccaaatgctaatgtggaagagcttcttagagacagagatggaatcttaatggagttgagagaaaacttgatcatagcacagaacaagatgtgtaaagctgctaataaacacaggagagatcttgtgtttgaagttgatgaatgggtatacttgaagttgaggccatatagacagaactcggtgattcacaggaagaacgaaaagctagctcctcgttactttggtccgtattagattatcagtaaggtgggcaacgtggcttataagttgaaactccctgctcacagccaaattcnnnnnnnnnnnnnnnnnnnnnnnnnnnnnnnnnnnnnncctgcatcctacagccctcaggagctacccaaggtcatgaccccatcgctggaatgggcgaagctacttgacatcagaaaggcagaatcaggtgatggtgcagaagttttagtgcagtggagcgggttatctgaactggagtcgaggaaacccttgatcacagttgtgcagcagtttccaaagttcgaccttgaggacaatatcaatctc

SEQ ID NO: 172104 - DNA, 1023 bp, Arabidopsis thaliana landsberg
gtctcaaagtcatttgctgaagggaagaaatctctggaggaatacatcaacgcggttaagaaactagtgggtcttcggtgtcttgtagaggctgtagcaatcggtaaagataaggaagatctgacagtccttacaacaaaacccgtagatgtagaaaaatggtttagagtttcttctgcggtacctgctggtttaggggaatacaattcactcacagttgaaggtataatcgaaaaattgtctggtggttcccgtgtgagcaaagctcgttgcaatgatatcttctgggatgctgtatggccgcgtttgctacataggggttggcgttctgagctgccaaaggaccgaggttacatcaagtctaaagaacacattgtcttcctcgtccctggggtaaagaagttttcaagaaagaaacttgtgaaacgtgatcattactttgattctatcagtgacattctcaaaaaggttgtttcagagcctgagcttcttgaggagacagcagaagaagaaagagaagagaacacttacaaccaatcaaaacaggagaaacactgttacctcaggtctccaagctcttcttctactcatatgaagttcactgttgtggacactagtcgttttgcttcaagaggaaagttgtacgaacttcgggagttgaggattccaagtttagcttctcaatcaaaggcttgtcgaggggataacaactcttctgtggaaagattcaagtttgctgatgaacgtaagtgtaaaaggaagcaaaagatggaagtggtggatgaaccgatgacattcttgattctggatacaagtgtggacaaaggtgggcatacatctgggataagaagacggagacatttgcctaaagaggcatttggtgaatcatcacagaaccaatctggcactagtaaagatgtgaactgcgagtatcttaaggggactgatcctggtgtagaggaagagactttggagaatgtccaacaaggtcggtcaaagaaaatataagcaggagtgcttaga

SEQ ID NO: 172105 - DNA, 555 bp, Arabidopsis thaliana landsberg
gggatctacaccgtggaactttatctgagggttcggctggctgtttcgcaagaaatgacgaagcgccaggcagctaagcatttcaacatatcgcgcgacagcgtggccaagatgatggcctattcgacaccgcccggctatcagcggcgttcgccgatccggcgtccgaagctggatgcattcgtttcgacgatcgagcattggctggaagaagacctgaaggtgccgcgcaagcagcgccatactgccaagcgggtgttcgaccggcttcgtaacgagtgcgggttcaccggcggctacacgatcatcaaggattatatgcgcgagcgggatcagcgtcgccaggaggtattcgtgcccctggctcatccgcccggccatgcgcaggcagacttcggtgaagcaacggtggtgatcggcggcgtcgagcagaaggcgcgcttcttcgtgctcgatctgccacatagcgacggctgctatgtacgaacctatccggcggcggtagctgaggcttgggtagacggccacatccacgcctttgcgttcttcggggcc

SEQ ID NO: 172106 - DNA, 1257 bp, Arabidopsis thaliana landsberg
  unsure (1)..(1257): unsure at all n locations
atgagcttttctgcgacgtcctcaattgccttagggggtggatccgctgaggcttctgctgccaaaaacacctcaaagcgtccaaaatgtgatctctaacctattccctaatttttgatacattttgtcatttgcggttatttttctgatttttttttgtttcttttgcggatttgacaaatctgtactttgggatcgtacctagtgtttctggaatgcctttataattttcacctcgtaatggatcagttcttctatgttatgaacgtattgaaaaaaatgttaagaactcagattctttctttgagatgttgctagtctctcgatcatcatattctatgatttctttatctatgcaaatgactaaaatttatattgtgtatacagatatattatataggaaaaaattccgattattaatattaatctagtacacacaaatgggtgcttgcgttttcttctttgtttggtatgttttagtaatccatttcatgtgaaagtttaacaagggtgtagatgaaacccattgtgtgttgttggattaatgtaactcccaacaaattaaaatgtgtgataccttttgatttctctcttcttaagataagtttcctagaatctaggtcaactaagaaacataatttgttggctaactttgcttcatcagattcaagatttacccaacaggagcttccagcatgcaaaccaattcttactccaaaatgggtaaagcttcaataactcataaaagtgtaacattcttatggataaaatttccaacgtttattatagttaaactcttctttggtttatcttgttttgcaggtgattctgacttttcttgtctcgggtgttgtctttattcctctgggagtgatttgtctatttgcttctcagggtgtatgttttcagtcttttctcagtactttcctcagctacaattatatatattttgtgaatataatttgatcttttattacatacatgatcnnnnnnnnnnnnnnnnnnnnnnnnnngacacagactgcattccattatcctctagggacaacaaagtccgatacatacagggcttggaagataagaggtgtaacagaacaataacggtagatatctatatcatctttagttctttctatattcttcttcagttcttcttaattgaactttctttcacaatcttctttgatgaatttttgttatgataggtgacaaacactatgaagatccggtctacgtatattatcagctagagaacta

SEQ ID NO: 172107 - DNA, 1096 bp, Arabidopsis thaliana landsberg
gaaatataaaagcagaattgctgacataactaaaggttcagagagcgttaaaatccctcttgtcgatgatgttgggagtgaagctgtgccaaagtttacttacatccctcacaacattgtttaccaaagtgcttatctccacgtgtctctggctcgaatctctgatgaagattgctgcgcaaactgcaaagggaactgtctttcagctgactttccttgcacttgtgctcgtgaaaccagtggagaatatgcttataccaaagaagggctgctaaaggaaaagtttctggacacctgtcttaagatgaaaaaggaaccagattcgttccctaaagtttactgcaaagactgccctttggagagagatcacgataagggcacatatggaaaatgtgatggacacttaatccgaaagttcatcaaagaatgctggagaaagtgtggatgtgatatgcagtgtggaaatcgagtagtacagagagggataaggtgccaactgcaggttacatttctaggatactacattcaatcttatatgctgaccatcctattttaaattagtcttctatatagcttcttggcttgatgtctggctccctcataattttgaactatttctatgattttctccccgttttttttttttaattattattttctcctttcatttgtttgacgagcaaaatatattgtttcaggtttactttactcaagaagggaaaggatggggtcttagaacactgcaagacttgcccaaaggaacctttatctgtgaatacattggtgaaatattgaccaacacggatttatacgatcgttagtgttaggtctagtagtgaacgacatacatatcctgtaactgtggatgcagactggggttctgaaaaggatgtacaggatgaacaagctctctgcctggatgccgctatctgtggaaatgtcgcaagggttgctcactcgcaggtattaatcagcgctcgctgtgctatgatttatttcgtgcttcccgtgatagtaaatcccccttccccccttttgttgatgcagatgcgaaaatgataacatggttgatattgggatagacatagagacgcct

SEQ ID NO: 172108 - DNA, 211 bp, Arabidopsis thaliana landsberg
tgcttttgatctcgatgacgattgttgcgaccgcggtgatggtgttggtggcagaagcttttaatagatggtgtttagagtgtgcatgaagtgccatatgttagtgatgctgtgtaaagcgtcaccggcttgccctaattgcaagtttatgcattcacctgaagacacctctctctcacttctttttactcctaagccaagtttgtcagct

SEQ ID NO: 172109 - DNA, 319 bp, Arabidopsis thaliana landsberg
atggcactgaagaaggctgaagaagtgatcgagagccctcctacttcaagtgaagaagaggaatctggctcataatctgagtctgaaggcgaaactgaatcggagctcgagcccgagtccgagcctgctaagacgatcaagccgatgcctgtcgtgaccaaaccaattccagagacgtccgcgaatgtacctgagacttcaacggctaagcgtcctttgaaggaagctgctcctgaagctattaagaagcagaagacatcggaagttgagcatgtgaagaagtcgacaactaatgatcaggttagaacatgcggagagg

SEQ ID NO: 172110 - DNA, 740 bp, Arabidopsis thaliana landsberg; identical to SEQ ID NO: 23016

SEQ ID NO: 172111 - DNA, 798 bp, Arabidopsis thaliana landsberg
aaagccaaaaaaagttcggggattctattgtctgacatgcccgagtatgtcacgcatatgtatgcatgcataggatccaccttgaggatgagtctaagtcttcagttgaacatcaaagaaggctgaattcgaatctgaaaaaagtggtgaagaaggagattgtaaaactgttggaagcagggattatctattcgatttcagatagtagttgggttagtcgagttcatgtagttcccaagaagggaggtgttacagtagtcaagaatgagaaagacgagctgattcctactcggacaatcacaagccatcggatgtgcatcgattacaaaaagatgagtgctgctaccaggaaagaccattttcccttaccatttatcgatcagatgttggagatgttagcaaatcataaatactattgcttccttgatggatactcaggattctttcagaccccgattaaaccagatgaccaggagaaaacaactttcacatgcccttgtggtacatttgcatataggagaatgccatttggtttgtgtaatgctcccgctacatttcaaagatgcatgatgtctatattctcggatctaattgaaaatgtggttgaagttttaatggatgacttctccgtctatggagactcttttgcctcttgtctttctaatttgtgtagggtcttgaaacgttgtgaggagactaaccttgtgttaaattgggagaagtgccacttcatggttagagatgggatagtattgggtcacaagatctttgagaagggtataataggttggatatatc

SEQ ID NO: 172112 - DNA, 484 bp, Arabidopsis thaliana landsberg
tcgatcttgtcaatccctatgttctatgagaagcatggcttgcctttggggaccaacctgtattacactagatccaatgaggcaggtgatgacaactctggctagcgttaatatgtgtactgcaacacttgactttctagaagatgagactgctcctttcccgccgactgtgaacactaaaaccttgcacctgttttacacgaacgttataaaggatatgtcagggattgcgaattatgttgagacgctaccagtgatggtatcagaggattttgctttttaccaacaagcaatcccgggacattttagctttgttgggatgcagaacaaatctcattcaccaatggcgaaccctcactctccgttttttgaagttaatgaagaattactcccttatggtgcttcccttcttgcttctttggccacaagatatcttcttgactcatcttcatcgccaaataaagatgaactttgatgccaactt

SEQ ID NO: 172113 - DNA, 694 bp, Arabidopsis thaliana landsberg
atatttcataggtgagttccttgtgaccatacttgttaaggagttctcttaataatttgtgtcttttattactacacaaaatggttacataattgcaggagagtttacgatagtagaggcaatatgaagtgttcaaatgctagtgaagggcctccatgcacagggtaaaatttctaagtagcataacagtttaagacttctctatataccaaaacacagatattaatgtcattgtttgtctatttttctctgttttttttttcagttttgttgaaggaatggctccagttttctcaagatctgcgtggttttgcacttggaatctaatacaagtaattttacgacatgaacacttataaacaatataactgttctgctttaaatgaaattgcatccaacttcttgtttttgcggtttgcagaatgatctggttcatggttggggaatggatatgaaacttggatactgtgctcaggtaaagtctttttcttctttaagacatcattagcttccattagcattgtgatccgattgcattctctagatgaatcggttttgaatatgtcgttatagggtgaccgaagcaagaaagtaggcattgtcgacagtgaatatatcttccatcaaggcattcaaactctatgtggaaacggtgatcccgataaaaaagtaaaattatttacttccccaccta

SEQ ID NO: 172114 - DNA, 605 bp, Arabidopsis thaliana landsberg
aaccttcacttgttagtgacttactgtaatcatattgttctgcgacgttttcaaatttgagagggcgtaggtaaagcatgagacttttgatcatatttatattctcttgactctttttgttcccgttaagtcttttgccgcatagtgcttgtatattgtgagtataagcatggcattgtgacatttcaatttgagagggcacaagtaaagcatggaccttttgatcacattcgtctcttgccattttttgtacccctgaagttttttgctacacaatgctttgtatattgtgagtgtaagcatgctactctgacgttccaatttaggagagcataagtaaagcatggaacttttgattgcattcactgtcttttgtctttttttgttcccctgaagccttttgctgctctgcttgtagattcgaagactctaaaagaggagaaaagagaagagttatatgaaagcttaaagcttgacaagtcacttggatgggctgttgatgtcattgatcctagggaactctcagccaagatgctcgcaaagttagtatttgtataatgtttttgaagctaactgatggaacggcttaaatgggtcttacatct

SEQ ID NO: 172115 - DNA, 1029 bp, Arabidopsis thaliana landsberg
  unsure (1)..(1029): unsure at all n locations
tctttctcaatcttgagcacaatgaattgctgttggcaggtagttgagccatgttataagtctgctttgtcttacttttgtgtaaaagtgggtaacatttgcatgttgaaggaaaatcttgtcttgttgaagagtgcttttgatgagctcaaagcagaaaaagaagatgttgtaaacagagtcaatgctggtgagcttaagggtggtcaacggctagctatagtggctacgtggctttcacaagtcgaaatcattgaggaaaacaccaaacagttaattgatgttgcgtccgctcgggatgcttcttctcacaatgcttcagctgtacgtcgacgtctgtcaacatctgggtgctggttctcatcctgcaacctaggcgagaaggtattcaagaagttgactgaagttaanagtctctccggtaaagattttaaagaagtgactgagcaacctcctcctcctgtggtagaagtgagactttgccaacaaacagtcggtcttgatacgacgcttgaaaagacttgggaaagtcttagaaaagatgaaaacagaatgttgggaatcttcggtatgggaggcgtaggcaaaactaccctcctcactctaattaacaacaagttcgttgaagtcagtgatgattatgatgttgttatttgggttgaatcgtctaaagatgcagatgtcgggaagattcaagatgccatcggggaaagattacacatctgtgacaataattggtctacatactcaagagggaagaaagctagtgaaataagcagggtactaagagatatgaagccccggttcgtgctgttattggatgacttatgggaggatgtgagtttaacagcaataggcattccagtgctcgggaaaaaatacaaagtcgtgtttactactcgttctaaggatgtctgttcagttatgagggcaaatgaggacatagaagttcaatgtttgtcggagaatgacgcatgggatttgttcgacgtgaaggtccaatgcgacgggttaaatgagatttctcat

SEQ ID NO: 172116 - DNA, 452 bp, Arabidopsis thaliana landsberg
ttctccctctggtgaacttttcttcatcaagtggtacgtatttatttaagattgttcgctacttttactcaatcaaagcagagtagagagatattgagctacttgtttctctgtctaggtacacacagtgtattcacaaagaggacgaagatggggatttggaatttctccacagcaaaactaagcggttcatggtctttaggcaagatgggatgagcaaagactttggttacactgaagatattggagatctctgcatcttccttggcaagagtgaagccttctgtgtcacggcaagtttgtacccagggctcaaacctaactccatctattaccttggccctagatttggttcttacgatctagcttctggtacaaacagttccttcacgttcgatcgctttggtaaaccctcgcttgttgtcccttactggatccattcgacatcttct

SEQ ID NO: 172117 - DNA, 383 bp, Arabidopsis thaliana landsberg
  unsure (1)..(383): unsure at all n locations
atcgatgctcgtccccnnaggtgtaatcgncgtcganctcggcgatatcattcccgccgagcagcntttactcnacggcaatcctctcagaatcngtcaatcgtcactcagcggtgaatcaatgcccntcgcgaaagacccgancngtgaagtcttcgcggnctgaataggcaaagagcncnaaatcnagncgatcggcatcacgagtgattccacgcattctgcggcgaagcagctcgatctcggcgacgagagaaaccaaatctgccatttccagaaanttgtcgacttcaattcgtaacgtcggtatgggttcgattnctgtagaaatcatggttgaacttgtagtaaggtagccgattcaggccgggagatatctgcag

SEQ ID NO: 172118 - DNA, 1474 bp, Arabidopsis thaliana landsberg
cttaatccgagcaatttccttctcttttcgtcttttcgacttttgttttttatgcccttttccatataaagttttgtcgtaaggtaatttccttgtgatgtcacatgtgcatgcgcatacataaaaaaattaataatataacgttgataaagacttctcaagtccatataactatcatttagctcttgtgtaccagaaccaccatcttcttcccaaatatcactctccttctctcataaaaatctctaactcaaaccttccttagatcccaagaaatctcttccaaagccctaagccaaaagcttcaagagaaaaaatggcgatgatgggtcagttatggactaacacaggctctgctcttgcaacactaatgtttgtatacacaatcttcaaacaattcttccctctcttcggaccccagttggaaccattcctttatagactcttcggtcgcttctacccttacatccaaataacattccatgaatacagcggagagcatttcaagagaagcgaagcctacttggggatccagagctatctaagcaaagactcttctgctagagcaaagaaactcaaagccaacacaactaaaggaagcaaatctattgttcttagcatggatgataaggaagagatcactgacgaattttgagggcattagggtttggtggcagtcgaagaaagagggagctactaggcaatctttctcgttttaccctgaagctaatgagaagagatattacatgttaaggttccacagacgtgaccgagaagtaatcatagagaggtatcttgagcatgttatgagagaagggaagacgatagagcaaaagaacagagagaggaagctttattcgaatactccgggtcagagccatggaaacaacagtaagtggagtcatgtaacctttgagcatccagctacgtttgatactctagctatggaagagaataagaaggaacagatcaagagtgatctgatcaagtttagtaagagtaaagattattacaagaagatcggaaaagcgtggaagagagggtatcttttgtttggaccacccgggactgggaagtctacaatgatcgcagcgatggctaatttcttggagtatgatgtttatgatcttgagttgacaacggttaaggataatacacatctgagaaggttattgattgagacttcagcgaaatcaattattgtgattgaagatatcgattgttcgcttaatctaacggggcagagaaagaagaaggaggaggaagaggaagatggagacgataagaacacgattgagaagaagatgatgatgaagaataaaggtgagaataaagagagtaaagttactttatcagggctactaaatttcattgatggtttatggtcagcttgtggtggtgagaggatcattgtattcactccaaacaaagtggacaagttagatccggctttgattaggaaaggaagaatgga

SEQ ID NO: 172119 - DNA, 543 bp, Arabidopsis thaliana landsberg
attgtttgataacttatactatgatcatctttggggttttgggccttttggcttgcattccatgtctttattcccttttcttgtgccgaacaggacacacagttactgctatgggacctagaaatggatgagattgttgttcccctacggcgacctccaggaggatcacccacttacagcacagggagtcagtccgctcactgggacaacattgttccaatgggcactcttcagccagcgccgtgcatgcgcgatgtcccaaagctctcaccagtagtggctcaccgtgttcacaccgagccctctcgggcttgatcttcacccaagaatcattgataacagcttgcagagaaggccatttaaagatctggacacgacctgacacccagcccagcagcagctcagaagcaacaaatccaaccacaagcaaaccctcgctgaccagcaaggttggtggttccagttaattcagtcaccatttaaatcatattgtttcaggtcgtggtttcgaaaggaaaccctgtgaatatctctcctcggtac

SEQ ID NO: 172120 - DNA, 227 bp, Arabidopsis thaliana landsberg
gcacaacaatgggagttgcttctcatacatcccacaatgtttttctttctacccatagcttttcccatccgccttaattcaacaccttaaacatgcacacacattagaaacatcataatcgttatcttcttgataatgcattcatatctcattataagagtgtgaaaaatattcatcagcagtcatttaaaatcgaaatagatccgcgaaaagaaaagaaacaaagt

SEQ ID NO: 172121 - DNA, 504 bp, Arabidopsis thaliana landsberg
accgccatgggatgtaccgattaaatgactgctcaattccgcaacgtcctaaggttttgcttggaacaagagaacagagactctgttttatacaatcagaaacttcagaagctcttacctcagacacaagcatctcttacaggaagcaagatcctttactctgatgtctatgaccctatgatggagatgctccaaaaccctagcaaatacggtatacataatacatagaaaaaccattcttgtttcacaagttatcactataagacgatattgatggttgattataacatcgttgtatgtggaattaaaacagggtttaaagagacgacgagaggatgttgcggaacagggttcttggagacgagcttcatgtgtaatgcttattcttccatgtgtcagaatcgctcggagtttctgttctttgactcgattcatccatctgaagctacctacaattacattggtaatgttctggatactaagattcgtgggtggcttgaggct

SEQ ID NO: 172122 - DNA, 418 bp, Arabidopsis thaliana landsberg; identical to SEQ ID NO: 21315

SEQ ID NO: 172123 - DNA, 410 bp, Arabidopsis thaliana landsberg
atatacctaattagccccaaacatttgggtcattttctgacttatgtgtcgatttataatttaacgcagaggaagaaaagaaggcgacgacatagaaaggagcaggatctttacatgcaactaagcgaggcaatggagtgcatagagcacatatgcacacaaggttgtacattggtcgggccatcaaacgtagtagataacaacaagaagtcaatgactgcggaaaagtcagagccttgtaaggcgttttccacgtgttatggtcttcagcttttgatacgtcactttgccgtatgcaagaggaggaataacgataagggttgtcttcgttgcaagcggatgcttcaactctttagactccattctttgatttgtgatcaacccgattcttgtcgcgtccctctctgcag

SEQ ID NO: 172124 - DNA, 654 bp, Arabidopsis thaliana landsberg
tcgaccaggcgctgtgggacatcaagggcaagaacgtgggccggccggtatcgaaaatgctcgcgggcccggtgcgcgttcgcatccgcgtgaactcgtgggtgggcggtgatcgtccggccgacaccgcccgcgcggcgaaggatgccgtggcgcgcggcttcaccgcggtgaagatgaacgccaccgaggaaatgcagtacgtcgacacgcacgccaaggtcgagcgggtgctggagaacgtgcaggcgatccgcgacgcggtgggcgcggacatcggcatcggcctggatttccacggccgcgtgcacaagccgatggccaaggtgctgatgcgcgaactgctgccctacaagctgatgttcatcgaggagccggtgctgtccgagcacctggaatgcctgcccgaactggccgcaatctcgcccgcgccgatcgcactgggcgagcgcctgtattcgcgctacgacttcaagcgcgtgctgcagaccggtggcgtggacatcatccagcccgatccctcgcacgccggcggcatcaccgagacgcgcaagatcgcggcgatggccgaagcctaaaaagtgacgctggcgttgcactgcccgctcggcccgatcgcgctggcggcgaacctgcagctggatgaggtatgcc

SEQ ID NO: 172125 - DNA, 496 bp, Arabidopsis thaliana landsberg
ggaggtagagcctatttccctttcgtctccttatggttggccttgttcctctttcttcattcctcctccaggtaattgctctgatgggtcttacttgttttttggttctgcttgttaaaaaagattccttttgagattttcctcaatgttaaacccaattcatgagacaaagttgagattttgttgggttacttagggaagagaatatttgaacattattatctacatgaacatttagagcaatactagagctgatttgttttgatgtttgtgtctcgttttcgaaagatatggttgagtcgttgttagggttatttgctgatatctgtggtgatatgtttgtgtatgtctatggaaatgttaagatggttcctcatctacacaagaggaagaagctagcgtggagttgaaaatcccggggaatgagatgttggaagtgaagctagcacattatccagatcctatttactcttttaaacctgaagatggtgaagag

SEQ ID NO: 172126 - DNA, 130 bp, Arabidopsis thaliana landsberg
atgaaaaacgtaaataaccgcttgcgcagagcacgtaaaactcgtgccaaaatagccgagttaaaagttacacgtttgagtgtacatcggaccaataccaatatctacgcgcagatcattgctgaaactg

SEQ ID NO: 172127 - DNA, 589 bp, Arabidopsis thaliana landsberg
  unsure (1)..(589): unsure at all n locations
agcttattctccgtcgtgctttcttcgcactactcactctctacatccaccggaactgcctccnccgggattctatcaatctccacgcgtcctctcccgatcaactcacgcgttgccgtagcggagggcttgatccggcggagattcggagcttgccggtggtgctttgccggagagaaagggcggaggagaaggaggagaaggagtgttgtatatgtctaggtggtttcgaagaaggagagaagatgaaagtgcttcctccgtgtagccattgttaccactgcgaatgtgtggatcggtggcttaaaaccgagtcgagttgtccgctctgccgagtctccatccgtgtcgactcgtcaagctaatgagacagctagagtgatagtgattaagatatgaatttgtttttttttttttgtaattgtgtgggtaaagatttatacatatacttgtgtattgcatggacatggatggaggatgatgtttacacacacacgaatggttatggttttatataaaaggatttaattttcatattctgtctttatcattgattgtgaagtttttatatcacaaatctgtttttgct

SEQ ID NO: 172128 - DNA, 851 bp, Arabidopsis thaliana landsberg
agtcaaattcaccaaattcgaacatgtatagagcgagaaaggcatcataactaaggttccaaagcgttagagagttaagatgcctgtcttggtctatttttgtgcgactttggtggatttaaatctccattgtgttgtcttttatcatccgaaatcaaaattggtttctttaccttttgtatatatttaaagggggttaagtttgttggcgactccggtttgaagactctcatatcaagctgtacggttcttgaggatttaattatgattacgcatctgaatgattatctcaaagtcatacatgttcattctcaatcactgaaaagcatcatactagagtctcagcatatattgaatatgatgatcttgtggttaaaattgatgctccgagtcttgaatatatgagtattcatgattaccaatctaaaagctttctaagcccattccaactctccttcaatatgatactttctgctttgggcctacatgctcaacccgcatggatttgttattggcttcttccaaaatgcctcattctagttggaattggacttgacttatatattagacacctattttctaaactttcgatatgggatgtttgtttgtacccaataatctccccttcaaaccaagaaccacggacattggacctctttttaagcgaaactttggtacccttaactcgtcaccttcttattttcgaagttcttgaatcactttcttatcatgtcacatttaatggcttcttccacaccgaacttttagcccacacccctaaatccattttttcaacaaaggctgtgatactatttattgggttttctaagtcattccaactgcatttctat

SEQ ID NO: 172129 - DNA, 1056 bp, Arabidopsis thaliana landsberg
aaaaaaaaacaagaacaaaacaagaacaaacattaggttatatagacacattgacaaagattattaaatgaagtttatcaaatatctaaatgtaaactttaaatttaaagttacttttagatcgtatttatataatttaagatatttatcataaaatttaaaagtcaacattatggaaccttaatactccaccaaagattaaacacttttggtggaaagtactccataatgctttaccgactgcagataacctcaagaggagaaagttgacttcagatgacatttgtttcagatgtggtgaagctccggaaaacataaaccatttgctctttcaatgccgaatcagcagagaaatctgggagctggcaccgaacctttctataccaggtgcatcttggaacttaaactcttatatggagaatattgagaaattgatgagtctgacaaaaaaccacagaaaggatgtaagtctattccctttcattggttggcgtatctggaaaatgagcaatgaccttatcttcaacaacagaaaatggtctataccagatattatcaacaaagcgctcatcgatttgactcagccccaaccaaattctcaacaagaccaacagaagaccggggcattaatggggaatgtacaagatatcatgaaagaagccaaagcatactgttgctttgtggatgcatcttgggtttccccaactgaatgtgcaggaattgggtgggtcctttacaatgacaaagctcaaatggttctcaaaggtatggcctctatacctccaactaactcttcgattgaagcggaagcggaagcccttaggtcggcaatgatgcaagtacggagattgggttacgaagaggttaaattttgtgtcgatgcttcaatcctgtatcagaatgtagcgccatatctgcaaaaggacaagaaggcatgtcccacaactaactcccctttggccgcttatatccaggacatacaaaaacttgctacaatttcagcttcttttgttgtaagtaaagtgaatcgtacaatcaatgatgtagctgatcatc

SEQ ID NO: 172130 - DNA, 673 bp, Arabidopsis thaliana landsberg
gacagtcgttatgacggactaatcacggcttgtccttttgttctacggataaaaggccaattctttcacgagacaggattcagtgttactctcacaaatgtcaaaagtttcatcaacgacatcaaagcacttgtgaagatctaacccaaatctttattgcgttcttgaaggcagtaactgtcttctcatccgttatgtcacatcctctcctgcttttcttgggaaagaagaaaaagctttagattttgacctaacttactaccgaagcaaagatgatcccttagcaccacgtctctacgaggatttcatcgaagagattgaacaaatggcgatatttaaatacaatgcattgccacattgggggaagaataggaacctagcgtttgatggcgtgattagaaagtacaagaacgcaaacacgtttttgaaagtaaaagagagatttgatcctgtagggttgttttcgacggaatggaccgatcaaattctaggtttaaaaggaaacgtgacgattgtgaaagaaggatgtgcattggaaggactttgtgtttgttcggatgatgctcattgtgctcccaagaaaggttatttgtgtcgaccaggtaaagtttatacaaaggctagagtttgtactcaagtaaatcagtaaatggctatgacgatcataccaaat

SEQ ID NO: 172131 - DNA, 1229 bp, Arabidopsis thaliana landsberg
aacagacaccgagatcaaaaacttttggaactcgacattgaagaagcggcttaagaacaacagcaacaacaatacttcatcaggatcatcacctaacaatagtaatagtaattccttggacccaagagatcagcatgtggatatgggaggcaactcaacttcattgatggatgactatcatcatgatgaaaacatgatgacagtggggaacaccatgcgcatggactcttcctccccattcaatgttggaccaatggttaatagtgtgggcttaaaccaactttatgatcccttgatgatatcagtgccggataacggatatcaccaaatgggaaacacagtgaatgtgttcagcgttaatggtttaggagattatggaaacacaattcttgatccaattagcaagagagtatcagtagaaggtgatgattggttcattcccccctcggagaataccaacgtcattgcttgtagtacaagcaacaacctaaacttacaggcccttgatccttgcttcaatagcaaaaatctttgtcattcagagagcttcaaggtagggaatgtgttggggatagagaatggttcttgggaaatagaaaaccctaaaatcggagattgggatttggatggtctcatcgataacaactcttcttttcccttccttgatttccaagtcgattgacaatttctctcttttcatttcattctatcttcttttactcattccttcttattcattcttatacacatattttttaacatgaagtggatcgatcttttttctaaaagagtctcatttttttgtggcaaaaaagtctttaaaaaataataattcagaattggtatattctcttcttgtccctttgttttcccatcatatgtattttattattcacaataatattgctcatagaaacgggagaaacgggagagatatgatatgcatagcttatatctttaggtggaggaaccaatcaccatgcatggttacattagtacatgaaatgtgaataggaaggtacattgagattttatttgctgaggaagtacttaaataatggcccacacagcagtgaggtgattagttgtttcatttgtatagctttctctttcttttcatatacttttctgtacaaatctgagtttgattgatgtgtaaaacgcggtttcgtaataagaaagcattatcagctttatcattctctctctacctaaaattcgagtgaatt

SEQ ID NO: 172132 - DNA, 561 bp, Arabidopsis thaliana landsberg; identical to SEQ ID NO: 13570
  unsure (1)..(561): unsure at all n locations

SEQ ID NO: 172133 - DNA, 517 bp, Arabidopsis thaliana landsberg
caacgatgatgtgacaaatcacagtcatccaacgatactttccctactgccatgcacatagcggcatacaagatgctggttgatgtgaccattcccggtattaaaaagttgcgcgatacgctcgctcagaagtcgaaagactacatgcatgtggttaagatcggccgcactcattttatggatgccacaccgctcacattgggccaggagattagcggttacgtatcgcaactggatcatggcctgcgtgctatcaataacaccctggctcatcttagtgagctggcattaggtggtactgctgtgggcacaggtatcaatacgccccccggctattccgaaaatgtagctgcacagatcgcaaagctcaccggccttccttttatcacggctgagaataaatttgagagccttgctgcacacgatgcaattgtagaggcgcatggcgaacttaagaccgttgccgttagcatgatgaagatcgctaacgatatccgatatgcttagctcgggtccg

SEQ ID NO: 172134 - DNA, 414 bp, Arabidopsis thaliana landsberg
  unsure (1)..(414): unsure at all n locations
gaaagagccctattctgtgatagtgttcaaagatcatcaatgaattcccagtctcaaatgactgaaagttcatttccagtacccatgactccacctccaagagttgatcctcctccaatgaatcactctgaatttgtagctgcttatccacatcttgcaacagctacaaatgtgaattacaggtttacaggagactcaagcacctccagacaagacttatcatctggttcaaacaatattctgccaagaagaactactcatttcannnnnnnnnnnnnnnnnnnngaaactggtcaatcctcaagacaaaatgaaaacagagaaccaagaagacctacagaaagaatgttgcctccatctcactttgatcatgttcaacgcgctggagggattctgaaacctccaaaaaaacgc

SEQ ID NO: 172135 - DNA, 657 bp, Arabidopsis thaliana landsberg
gctgatggatcttttgtaaatcagaaatctcagcatgttggtgaggcttatgtgaaggtgctggaagagaggatgtctaaaatagacgaggatggtcctcaagtttatgataattcctcgcaacattcaactcattgtacgcttagcattgatgaaaagaatgaattttttcttaagataatttatttctgtttttcttttgcttacaatcttcttgtttttgtttgcttggaatatgattgattatgagcaatggaaagttagagtaattatgattgtctttcgtgattgtatttgtcttcttgtttcagtgtactcattgatataaccttattttcactgattttatctatgttttaggtataggattttgagtctttatgttatttctcgagtctttttagtgtctttccaggtatactatgcaattgtactacaatggagataaggagacatttggagcaagagctaaaggaaagaaagctaaggacgattttggatccaggaatcagcgaggagttcgatcgacacactctagagtgtcgatcgacacactcttggtgtcgatcgacacactcttcggcccagcaaagtcctatacgctttcaagtttacagaagaggaaattaccccagaagactttcctatttgcattat

SEQ ID NO: 172136 - DNA, 363 bp, Arabidopsis thaliana landsberg; identical to SEQ ID NO: 14135

SEQ ID NO: 172137 - DNA, 304 bp, Arabidopsis thaliana landsberg
  unsure (1)..(304): unsure at all n locations
tnnnnnnnnnnnnnnnnnnnnntcgactctccgtagcgaacctgggtctcagcaacacggattgtacaacccctgtgattcatggagtaagtacaaattcgttatgagtggtggagctccacttgtgctaaggctcccacttatcatacacgtaataagtcatttggcaaagccgcactagagtcgcgctcagcatggtcttcccgttcccctaacagagccaagccagttcccccctctgtggtttcactggatagtaaacagggccagtgggcctctcgttaacccttccatgcgcgtcgcc

SEQ ID NO: 172138 - DNA, 599 bp, Arabidopsis thaliana landsberg
  unsure (1)..(599): unsure at all n locations
cgaataatcaggaatatattcagtgaaagtagactactacaatcagaaggtgacggtgtgggggatntgtaacaaactcgatgtgtaagcgatggtgaaaaagaagcgaaaagaagctcggttttggaatgtagaggaagaggagaataataatccagagagcgttgatgattgcattgtcgtaaaagaagacactattattaaaacttcatttgataccgataaatcatcggcgttttatacgtattctacaacgcctccgagattcagtataagacctcctatgtcacttattagaacctcttcattcacatggaaagccgtgaagaaggtcttcactagatccctttccttttgaatcacgtctatatatgactctactaagtttctaataaagctccaagaaatcacgtacgtaactttcattggatctcttaatatatacataaataccaaagtttctatatagttgataaggtttgcatctcgcaacggattgatggtacgtagttcaatggtcaccgcattgttaataaaatctttcttgggacacatatgtaattcagttgtatgacgcttatcaactctgaagttagttt

SEQ ID NO: 172139 - DNA, 317 bp, Arabidopsis thaliana landsberg; identical to SEQ ID NO: 60698

SEQ ID NO: 172140 - DNA, 1463 bp, Arabidopsis thaliana landsberg
atgagcaatataaagctcggggttgaagtgataagcgcacagggtctgttacagagagataagcataactcatgtagccctttcgtggagctcaagttcgacaaccagatattccgcgcaacgaccaaacacaacgacccaaatcctgtctggcacgagtgtttttacttcgttgtctctgacccttccgtcttgtcaactcgtacgcttgaagcccacgtttacagctaccagaacgaattcgatgctaagccctttcttggcaaagttcgagtcaacggaacatcttttgttcctcgctctgaagcagctcctttcaattaccctttagagaaacgcagtgttttctctcgagcccgtggagaactttgcttgagagtttttatcacagacgacccttctgttacaccttctgtcccaaccccggttccagaatctcctcaagcttatagcccaagtccgcgtaaagaacatgtgaagtccttaatcacagccgatgcaagtatggctactgatgagagaagagagctaaagcctaaaacacgtacgtttcataactctgcccctttagtgaaacaacagccaatgatgaactatggcatccacgagatgagagctgcaccgatgcctccaagagtggttcaagtcaacggtccaggtccatccttgcaccagctgccaccagatttctctgtcaaagaaacaagccctttgctcggaggtggacggatcgttggaggacgagtggttcgtggtacagagaggccaacaagcggtacatatgatctcgttgaagagatgaaatttctctacgtgagagttgtgaaagcgcgtgatctccccaacaaagaccttacaggaagcctagacccgtatgtcgtagtaaaaatcggaaacttcaaaggtgttaccacacattttaacaagaatacagatcccgagtggaaccaagtctttgccttcgctaaagataatcttcagtcgaactttcttgaagttatggtcaaggataaagacattctccttgatgattttgttggaatcgttaaattcgatctccgtgaggttcagtctcgcgttcctcctgatagtcctttagctccacaatggtatagattagaagatgggaaaggccaaaaagttaaaggagagcttatgttagctgtttggtttggtactcaagctgatgaagcttttcctgaagcttggcactctgatgctgcaactgttagtggaactgatgctttagctaacatcagatctaaggtttatctctctcctaagctttggtatcttagggttaatgtcattgaagctcaggatttgataccgagcgataaagggagatatcctgaagtctttgtgaaagtgataatgggaagtcaggcattgaggactagagtgtcacaaagcaggagtattaatccgatgtggaatgaggatttgatgtttgttgtagctga

SEQ ID NO: 172141 - DNA, 456 bp, Arabidopsis thaliana landsberg
accaagctgccaggattgtgggaatcaatctaagaaagactgctctcacatgagatgtaggacttgctgcaagagccgtggccttgactgtcccactcacgtgaagagcacgtgggttcctgccgctaaacgccgagaacgccagcagcagctttctaccggtcagcaaccgcagccacagggagggagcgtccctaaacgacagagagagcgtatcccggcgagaccgacttccatggcctacactcgtatacctactaacaacacttcaggtatctcatataatatctctttacccctgaaagaaaatttaagtaatgagctttgaataatttaagttattagtttcaattgcagaaacagaaaccctattttgttgatcagctattttgttcttcttttttcattttctagaaaaaaaggtgaaccatttttcttcccaatcttttttttttt

SEQ ID NO: 172142 - DNA, 856 bp, Arabidopsis thaliana landsberg
aaccaggtataccctcccctttgcatcccacgttggtcttggtgaagaattaattaatagttttttccgttattttttctgtaggtaagacttaatagactaggaatatcaaaatgttggattacaaaactccctcaacttccgaatccaaaaccatacgatgaaattggttgaggtcgaagggagatacactattcagaatcttttctcttcgcttgatgttcacgttggtcaatcttactcggtccttataacagccgatcagcctgcaaaagattattacgttgtcgtctctagtaggtttacatcaaagatactcactactactggagttcttcattacagtaattctgttgcacctgtttctggacctattccagatggaccaattaagttaagctggtcttttaaccaagctcgagctatcaggtattgttttattcttcaatttagtgacaattaccacttttatatatatatttgcatttcatcagtgctagtggttggagaaaactatttcaagatcttaaaagttatggggttcgaagcagttcatttactagtatagatgatatttttgaatttttgcgctctaggcttacatcaaaagcaaaatctttgtagtttcacttgttgttggtttgctcacttcatggtgcaaacatgtttgtttcatggatatgatcttgtaggaccaaccttacagcaagcggaccaaggccaaacccacaaggttcataccgctatggtgtgataaacatcacccgaacgatcagacttgctaacaatcttggacatattgaacgcaagcaacgatacgccgtgaacagtgcatcattttacccagcagacaccc

SEQ ID NO: 172143 - DNA, 443 bp, Arabidopsis thaliana landsberg
gccggccgccggcaccgcgggacagccggcgtgaccgccggtaccccaggcctggtgatcgccggagccacgctggccggtgtccgcgcggccgaggccgcccgcgaggccgggttcggcgggcggctcacgctcgtcggcgccgggccgaatttcccgccttatgaccggcccccgctgtccaagcggctgtccgccgacgacccggacgccctcacccggatccgggtccgcgaggacctggacgcggagctcctgctcgggacgcgcgccaccgggctcgacgtggcacgccgccaggtcaggctcgatgacggcagcagccgggactatgcgggcctggtgatcgcgaccggcgcggcaccgcggacgctgccgggcgcggagggaaacgtgatcgtcctgcgcaccgtccgggaccgggcccggctggccgagtccct

SEQ ID NO: 172144 - DNA, 540 bp, Arabidopsis thaliana landsberg; identical to SEQ ID NO: 3075

SEQ ID NO: 172145 - DNA, 251 bp, Arabidopsis thaliana landsberg
atgttttcttttctcatcctcctagtgtcggaggtttttcaggtggttattgctgccgtggtctctatagtcttcttagtgttagcgggtctaacactggcaggttcagccacggcattaaccataaccacaccgctttttatcatattcagtccgattctcgtaccagccacgatagccactgctgtcataaccacaggactcaccgctggtggcgcactcggaacgatggccgccgcttctctcctcag

SEQ ID NO: 172146 - DNA, 470 bp, Arabidopsis thaliana landsberg
cggtcgagaccgtcacctggtacaccggccacctgggcatgggcgcgatcggtcccgacatgctcaaccagttgcgccacgcccagttcttcggttcgccgcagggcgtgcgcgaccacatggccaagcaccgcacgatcatcgcgccgaagttcgacgaggtggaccgcgtcctcaacgcgcgactgagcggactcggcgtggccacctggaccaagccgaccggcggttacttcgtgagcctggacgtcctggacggcaccgctgcacgcgtggtcgcgctggccaaggaggccggcatcgccctgacgcccgccggatcgtcgttccccggtggcaatgacccgcgcgatcgcaacatccggttggcgccgaccttccccgaactcgccgaggtgaccacagccatcgaggccgtgacgacctgcgtgctgctggccgccgcggagaagctcaccagctgacctctc

SEQ ID NO: 172147 - DNA, 1429 bp, Arabidopsis thaliana landsberg
tcaactgtctctatccccgtcgtgacttgcagacaatggtgtacgccaatgccctaatacctcagatgagcagttacaagccaacattgattttgcttgcagcaacggcgtagattgtacaccgatccaacccggtgggaattgttacaaccctaatactttatttgaccatgcatcgtatgtcatgaacgcttattatcatagccatggccgtgtcgaagatgcgtgtaggttcaaccgtagtggttgttttgttgttgtcgacccaagtaaagactcatgtgtctactatacttaaataaagaaaactctttgcgactgtattaagattgtgctattgattgtttatatctaatatggattttcttttgtgttgttgtatacagtaatacccaaactaaattataatttaataaaaataaattgcctatgaaaatttgtgcgatgattgtcttcgatttcaggtcatgggactacaatacaaacttatggtaaatttctataactacgttcctaggaattgcacaatatatacaagtatacaactcatcaacaaattggtcaattcatggaaaaaatttggtgcagggaacttcttcagaacttctaacttttttctggacatcaacttctactttataatgacaaaaaaaaatatagaaatttacaaattggaaacagaatacttgaattcggatttttagttttgtaaacagaaactcccattcgtttaataaatcttctagttctctatcgttaagtcctttcccaaataagcacaaaagtagcgagagagaatcactattgtttggaaaagtctttttgtatatgatccatgtactttcaaagtctttttgtatagtttccatgtaactgcgataacgtgagcaacaaattaaaagaaactttctcaatacgtagtttccatatcataagtgcttccataatcacatcccttgaaatctttggtcataactctagattattctccattgtatctctatataagaacaatgaaaatcacattacatgatatacataacctaagattcttacaaacacattaagatttcttgtttctcattcaatgtcatcgcagcttttaacgctctttcttcttctatctgctgttgcgatccctgtcgtgactagcagacaatggtgcatggccatgccgaatgccacaggagaacaattacaagcaaatattgattatgcttgtagccagaatgttgattgtacaccgatccaaccaggtggaacttgctatgaacctaacacgttattagaccatgcgtcgtttgccatgaacgcatattatcaaagccatggtcgtatcgaagatgcttgtaggttcggccgtactggttgttttgttttcatcgacccaagtaatggttcatgtatctactacacttaaaaataagta

SEQ ID NO: 172148 - DNA, 507 bp, Arabidopsis thaliana landsberg
cgatcgacgaataggggttaagttctgagagtcgttaatgtacacgacaaggtaccttctgttccagggatattcacaaacgagaagtttcagtttcagaagtatgtagaagaaaaaacatcattcccgtggagctacgcgcacgtaggcgtggagcttgccttggaccacaagaaaagcccatttctgaaaccgactaaggatttgggttgtgcacataacctagaagctttgcttcatttggtggatggttatcatggaaaagacgaagaagcagagaagagattttgtttggtgacaaagagagacatagctttagtgaataagagttgtgatttcttgagaggtgagtaccatgtgccgccttgttggagacaagatgagaacaaaggtatggtcaagaacggcgatggacagtgggttcttcccgaccgaccactgcttgaacctcacggaccggaggatatcgctcatcatcttcaacaagttcttgggaaggttaacgat

SEQ ID NO: 172149 - DNA, 717 bp, Arabidopsis thaliana landsberg; identical to SEQ ID NO: 31240

SEQ ID NO: 172150 - DNA, 386 bp, Arabidopsis thaliana landsberg
atgaagttggccgtggtctcagtcgtcgtcatactcggagttctcgtggcttggccggtatcggctggccgaaaagacttacctggagcgggaggatacggaggcgatgacgatgatgatacaaagtcattgttccctttggacaacctattatcgttgaattattatgataggatttgtcctgattttgagaaaatcgttgttacgaaagtgagggaatggactaagagtgactcttcccttggtcccgcctcctccgccttatcttccacgattgtggcgtcgcggtattgcaattatatcttcttccttccacacctatttaacattaatcgttcaattaaaaatgacaaatgttttgattcatatatgatttacattgttct

SEQ ID NO: 172151 - DNA, 2061 bp, Arabidopsis thaliana landsberg
attaagggaagcgcacaactcgattagggaaattcaaaaaccggatggctcagttacacaaaagaaagaagaaatgaaagaggaagcagaactattctttagagaatttcttcaattggttccacatgactatgaggaaatatccattagtgatcttcaggaatttttttcttatcgatgctcagaggatgaaaaaacagagatgactagatcagtaacagaggaggagattaagcgggtactctttgcaatgccaaaagataaatcgccagggccagatggttatactgcagagttttataaatcgacatgggatatcattgggaaggagtttattcttgcggtccaatctttctttgtgaaaggttttttaccaaagggaattaattccaccattcttgctctcataccaaagaagacaacggctaaggagatgaaagattataggccaatatcgtgttgcaatgtcatatttaaagtcatattaaaaataatagctaatcccctgaagcgagtgctaccaaattttgttgtaggaaaccaatcggcttttgttcaagataggctgctcatagagaatgtgctgctcgcgacggagttagtaaaagattatcacaaagaatcggtatcgactggctgcgcaattaaaatagatatctctaaagctttcgactcggttcaatggtctgttctccgtaaggtactcgaagccatgaaatttccattgttttttattcattggattatgctttgtgtcaccacaacctctttttcggttcaagtcaatggggaactggtgggatatttcaacagtgtgcggggtttgagacagagatgttctcaatctccctctccgtatctgtttgtcgttagtatggatgttctctccaaactattggataaggcagtaggtttgaggaagtttggttaccatccaagatgtaagagcattggtttaactccccttagttttgcagataatcataaggttctttcggatggtaaaatgtagggatgttaaatagggttttccggcccaacccggccctatttatttaaagtccagccctaagtgagccctaaccctttttaatccctaaaaaagtttaaaatagggttgagcccctttttggccttttgtagcccttaagtttttttttttatttaaagagaagggtttttccaacaaaaacaattataagataataatactattgtttattatcaaatggaaacactataacaccacaacatataaaacattgtttcttgtcattttgctgaaatgtaaaacattgttaccgatatttgtcgaaaaaaaaactgagcaaaaaaaacttctcatcatatgttagaatctccaactcctgaactacttgtcatctttgtagcatcattatcttcttcagcaaaaagttcttcgatttctcctgcattttaatgatacaagttaaaataagacaatgatttatgtaagttttataacttcaaattacaattttaccttcaagatctgcatatccacgaagccaattgcgggtgcaaattaatgcttgcgcattttggggaagaagacgattcctaaaaggatttaacacccgtcctccaacgctgaaagcagactctgatgctactgttgtgattgggatactaaacaaatcagatgccattgaagctaaatcagtatatctatgttgattctctttccaaaagcttaaaatttccatgtcagagaaagtcttcatctctaatcttggttcatcatccaaatagatttccaaagttgacttggtactttttgaagcagatatgagactactttcaagctcaaaaagatattgtaaatacacaaatagacacacaattagttaaacaaaaaccagaactagtgaaagatattcaaatatattattatacttacatcattcacatctgcttcaagtggcaattcattgagaagctcgtgtggagtaagtgtggttgaagagttcgaagaacaagcagattaagtatggtattcttcataaagcgagatcaaattattcctcacaatatcaacct

SEQ ID NO: 172152 - DNA, 1225 bp, Arabidopsis thaliana landsberg
aatttataatctctacaacatatttggagccattattatcaatatatgcgttgatatatcatatttaagcataggtatggacagatccagatgctgatgtcatcgctctatcgccaacaacactcatggcaacaaacagattcgtgtgcgagatctgcaacaaagggtttcaaagggaccagaatttacaactacatcgccgtggccacaaccttccatggaagctaaagcaacggtccaaacaagaagtgataaagaagaaagtatacatatgtcctatcaagacttgtgtacaccatgatgcctccagggcccttggagacctcactgggatcaagaaacactacagccgcaaacacggtgaaaagaagtggaagtgtgaaaagtgttctaagaaatacgctgttcagtctgattggaaggcacatgcgaaaacttgtggtactcgtgagtataaatgtgactgtggcacgttgttctccaggtaatatttactaacgagattaacagttggtattggttaatgtataagttgagtttttttctacatgaagtattagaactcggtattctattcatatatagcaatatcggatgaaagcaatgcaaaacaattcatgtgacagtgttagaacctaaaagaattgtgtaaaaaactcaaacagatataggtgtatatatcaagtgtcggcatgcatgaatgtgtgtgcaatgtcttgtgatttgttatatctgttgcgaaagttggaatagagcagagcattaattgaagacattctgacttttgggagcaatttctatttatttttgtttaagattttgaaataatagctgcatactttatgagtatatgatattcgatgagattttgatggcatgagcatctattcattttgtgtggttgtatgtgtacatgtctatttggcttcattcttttcttctattcacaccatatggcaagaaactagatatcatgcatatattttgtcaacaaacacatacacacacatgcatatatattatatatatatataagttctatgtttttgtatatagtaacaattaaggtttttgtgctttttttttctttttttttctagttttatgtttatttctgtcttcatgtcgcgagtttgcataggagaaataaatgcttactccggccaagaatgtttttgttttgcaaatgatttcaaattcaatgctctattgaataatgatcgat

SEQ ID NO: 172153 - DNA, 347 bp, Arabidopsis thaliana landsberg
acatatcactgttcttcaatcgcccgtcagctcagacatttggaagtcttcactcagagggcagaatgtctcctccaaataattttgggctatcctcacttggtaaaaacggcttctacctccaagaatctctcactccttatcaagctcatcttccaagcctcgctttatctaatctggagagagcgcaattgtaggattccctctaacattttcaggatcctcctcagatcatcaaggaaattcaagtccttcttcgtgcaaagctggaccctctctctcgtgttagtcactcaaatgcttctcgcgcttctattatgatcacttggtttgagttgtttctggtt

SEQ ID NO: 172154 - DNA, 1036 bp, Arabidopsis thaliana landsberg
accggccttatatgaagaaagggagaaccacaaatacaagaaaagattgataacaaggactttcaggtttataatgtacttaaaatgaagcgtacacggagcaattaagaaaaggatttaaagagagacatttgagaagcccacatgagtaaattaatgagcatgtgaaatttggcagagaagtaatatgcaattagtaaatttacatttatattttggttaaattagcaacgtaacttagcatttcattagttttcctttttctggttttaagaaacgttcttagaagaatattagctatccaaaattttgtatgtatgaaatgcacttgggcctaaacgaataaggtggcttggagtcaactcatacggtttgctcagggagttcttcgctaacttttcattgtgtggcttgctctaaacactagattgtctacatgtaatcgtataagagtgcggaaaaaaaaaggctgtgtttttgtagagagcgtaacaaaactaaagatcacttattttgtacatgtcgaccttactcttacaccacttggcttgcccttatcggagaatttcttggctcgacacttatctggactggttggatacggttgcacatcttaccttggcaaattatcctcttctagatatcattctcatccgtatgtgtttctaaaccatcatatatttcgtacgtaaggaaaggaatacttgaaggcagctgcagagagaaaaaaaaaaaagaaaaaaaaaaaaggcaccacagggctggcttgacttgggccagctagtccaaacatacacgaaggcttcgtcgctagttcgggatgataaactgcaagtaattaattgtaacattttttttttaattgtaacatattgtaattaacaaatataccaaattacaattacattatggcacatctgactagatgaaatgaataatattctcttttctcttcttgttgagtatataagatttatagtgcgccaactcaacaaatggtgtttttagagaaatacaacaagttaataaaaggttt

SEQ ID NO: 172155 - DNA, 590 bp, Arabidopsis thaliana landsberg
aaagttgaacttctttgaagcttatcatattaacactggtgggtacttttttgggaaacagttattggaatgaaacaatcattcacagcaacctattctgaagctgactgagcatacagcagcggttaaggcaattacatggtctcctcatcagagcagcctccttgcttcgggaggtggaaccgcagacagatgcattagattctggaacacgacaaacggaaatcagttaaacagcatcgacactgggagccaggtctgcaatctggcgtggagcaagaatgttaacgagatagtgagtactcatggatactctcaaaaccaaatcatgctctggaagtacccatccatgtcaaaggtacatagttttgttcacacttgaaagctcattttcttgatctttctctcatcttcaatatgtataactgacgcatcaactgatgtaggttgcaacacttacgggccacagtatgagagtactttacttggctacgtcacctgatggccagactatagtgaccggagcaggagatgagaccctgcggttttggaacgtctttccttcagtaaaaatgcaggtttgtattctt

SEQ ID NO: 172156 - DNA, 689 bp, Arabidopsis thaliana landsberg
caaatgaaggaaaagcttgtcaagatcagcaacgcccttcttaaccaacaagacgatatccaagaccacaacacaagaatcatcagtgtcgaatttgccattgattcggttgaaggtcatctagattggaagattgaagaactagagaagaagctcactaactcaaacgagttttcggagtggagaagtaaccaatcttaccaagaagaagaacattttcccaaggcccaagcccgatactaggtggaaacaaaaaaggaaattggattcctagtgaaaaagggaaagatctatgttgctattccgaaaaaggaaatcttgaccctataaaaactctagggatttcgatccctaatgtttctcaacaagatcaaatcaaagaaggatatcacttagaagaagaagcagcggcacgcctagaagaaaattcaatggccgagacttattcttgaagtgagagctacgaaactcaagaagactattctcacttcgagaatttggagaattggattgaagactgttcaagaggggatgatgaactcagcgaccgttctaaagaagaggaggattatgaagagttcaaagacacctactcttgcatgacaactagactcctcgatgaagatactccctgaaaccctagtttcaaggcaactatgaaactgtgctacctaaggccatctccaatg

SEQ ID NO: 172157 - DNA, 541 bp, Arabidopsis thaliana landsberg
aatgaatcgtcaagcatgagtattgtgatgtatccgtggttagcctttggccacatgactccttttcttcacctctccaacaagctcgcagagaaaggtcacaagattgttttcttgcttcccaagaaagcactaaaccagctcgaacctcttaatctctacccaaatctcatcactttccaaaccatctctatccctcaggtcaaagggcttcctcccggtgcggagaccaactccgacgtccccttcttcttgacacatttgcttgcagttgcaatggaccaaacccggccagaggtcgagaccattttccgtacaatcaaaccggacttggttttctatgactctgcccattggataccagagattgctaaaccggtcggggctaaaaccgtttgcttcaacatcgttagcgctgcgtcaatcgcactgtctcttgtccctgctgcggagacagaattcattgatggcccggaaatgtcaggggaggaaatagctaaaaagcctctaggttaaccgtcttcgaaagtcgtcttgcgtg

SEQ ID NO: 172158 - DNA, 2851 bp, Arabidopsis thaliana landsberg
agatatttcaaatctcttacttctactatcacgagatattttttttattcagatcttcgaccaaaatgatttactatgaataatatatctacaaaagtcgaaatatatcgtcaaaattttatatatatatacgtagacgcacacatacatatacctacatagatatccaaaaactaaattagttgaatacaattcaattgtcagttttaaaaatggccaaaatatcatcacctttgactctcttattcatcatgttatcttccatcatgatcaaccatatccatgtggcgagttccaaaacatggtgtatagcaactctaatcgcaacgaatgcgcagctgcaagcaaatattaattttgcatgtagtcgaggagttgattgtaggccaatccgacctggtggatcttgttttatcccaaataatcttgcaaatcatgcatcgtttgtgatgaactcttattatcagacccatggtcgtaccaatcaggcatgtagtttcaaaaataccggcacatttgctgctaccgatcctagttttggtaaatgtgtgtatgcgtcttagaaattttattttgtttcgataatttctatgcgtaataaaagaatgaattggtgattgcaattatccattggtgaatacaatacgtaataaaagaaatggtgatttcaatcatccattggtgaataaatgcgtagttaatttgattgaatacgtcagacataaaaagcgagacatatccaaaaacgaatatatatatttacaaagatgactcaagttgaacaaatctctttaaccatgaggctccaccaaatagataccatcataagttcataacttaaccacctatgctaatccactatcaaattcctattttttttttttgtctccattaatatagtttttctagaaaagttgttatttacggatctcgttagacggtgcattgttaactcaaacgaccttcctagtccttgaaattcaaaaacaataagctccaaaggtttgatgatctgtcatatggaaccacctcccgaggtttgcgctaagagaatttataatgagaatccataggtattaaccataactttaaagatataaatatatccctttctgctgttaaatctgacctaagatattcctttgatgtcccttgtagttatgctaacatgtttacattaatcccgtaaatagtttcaatttgtggagttaggattgctctctctataatccttgcatatgtaatttttgaaaaattggtttccatatttatggtttgaaatataacctgaaaataatgtctaatttattgcattataaatataggatcaacgaccataatctgaccatcgtctttgttgacctatttagcttcacctttgggtatttttccatcttctacagttaggagccatgcagctaaattttctgggattttttaaatccattagagaagactttgcaacaggcttacaagtatggctgtctacttgatgctaagaccacacgcatcagcgtgagagtcttgtggaataatgatgtgtgtgcttttttacctcataagttttactttataaaatacatgaaaagtatcgagtgcaccactaatcttatgtgtatttaaggattgattacacaaaaagagagagaatgtgttccaaatcaattagaaaagatataagctatgacaaaaataagagattagtttatatttcgtcatagaaacaagcaagcaagtaaatatgaaaagaattcaacaaagtgaagtgttgggcatcacgagtttgcaagagattcattaaaaccttcattccatgactctaagattatcgatcacttactaaacaaattctttaacttaatcttaggtggaacaaaaatgacctaaagactcacggttcgaatagtctatagtctaagttctaaactaagcagttactcaattcttctaacaattcagttactaatcagttactcaaattttttgaatagtctatagtctaagttctaaaccccgagtatttttgaaaagaagtatctaatatgattaaattatgtttttctactaatacattatagacatatcatttctgattataaaaatatatttctatttttaccgacatataatttcaaatcaaaaagaaaaattactgtttacaaaatatttctaattataaagcatatatttattttccaaaatattttaaactttttgattttctaccatctagttaaaaagtttttatagacatcaattctaattataaagatatatttctagatatttcaaatctcttacttctactatcacgagatattttttttattcagatcttcgaccaaaatgaataactatgaataatatatctacaaaagtagaaatatatcgtcaaaattttatttatatacatagacgcacacatacatatacctacatagatatccaaaaactaaattagttgaatacaattcaattgtcagttttaaaaatggccaaaatatcatcacctttgactctcttattcatcatgttatcttccatcatgatcaaccatatccatgtggcgagttccaaaacatggtgtatagcaactctaatcgcaacgaatgcgcagttgcaagcaaatattaattttgcatgtagtcaaggagttgattgtaggccaatccgacctggtggatcttgttttatccctaataatcttgcaaatcatgcatcgtttgtgatgaactcttattatcagacccatggtcgtaccaatcaggcatgtagtttcaaaaataccggaacatttgctgctaccaatcctagttttggtaaatgtgtgtatgcgtcttaaaaattttat

SEQ ID NO: 172159 - DNA, 648 bp, Arabidopsis thaliana landsberg
catcagttccatcagctcatagaaaattggtcattaagccttatactaactcttgtggctctagtagcggattttgtctctgtacacttttcaaggtttgatttctgaatacttcttaaacaactaaaggcttttctacttcagactcttaattctctttactttctgaaaattctttgtagcttggctcatccatatcttcttgctgataatcgccattatcctttctacctatggagaaaaattatcaatgcgcattggttaatgaagtacatgttagtcccggtatacgtctattcctggttctcaatcctaactttattaggtatgttaaaaccattttctgtagtatacttatttacttttcccatatattttgcattgtgaacctgacttattctttcatgatccgatagcgaaaactcgaaggcagacctggatattggtctatttcttagctacatgcggtgttcttgttcctactccattgatcgagttcagatattacaccattccgttttacctcttcatgcttcactcctgtgtcagaagcagcagcttcgccacttggcttcacatcggaacgatttttgtctctatcaatgtgtttacaatggcaatgttcttgtttagaccgtttaagtggac

SEQ ID NO: 172160 - DNA, 121 bp, Arabidopsis thaliana landsberg
gtgtgctcattagttaaggtggcaatgccagacgaatgagccagagagaggagcacaagcttcctaaaataagtctgctccagtatgtgtcacaatgcctaccgtcgatatatcccgtaag

SEQ ID NO: 172161 - DNA, 445 bp, Arabidopsis thaliana landsberg; identical to SEQ ID NO: 68323
  unsure (1)..(445): unsure at all n locations

SEQ ID NO: 172162 - DNA, 485 bp, Arabidopsis thaliana landsberg
  unsure (1)..(485): unsure at all n locations
tcaaagatatgtgcaataggcaggattgcgagatccctcctgatctcatgatagaaattcttatnnnnnnnnnnnnnnnnnnnnnnnnnnnnnnnnnnnnnnnnnnnnnnnnnnnnnnnnnncttatctctggtcgatatttttgcaaccgttgatttacttgtgtaacacggcaacatcaacaacaacaacaaccacgtctatacatgtgtttagtggccaaagacaagcaatgtgttctactatcatcaatgtcaccggacaacacttgttttgtactcgtcgaccaagatttgagcatcccaggctacttcttcgcctctgttcctggcttgctgtgtttccagttcggaacaaaggcgtgtatctataaccctagcaccaaacaactcttgaccttaccctccgtaaaatcaaacatcacaactcaacaaggtcaactgaagactacccaatactatattggacgcgatcctgttaatgat

SEQ ID NO: 172163 - DNA, 523 bp, Arabidopsis thaliana landsberg
gttttttacaggctgccggcatttgtcggtagttttttttgcttttctacttcttttttcttctgtttttaataattgtgatgggagacattttcatcaatcggtatttctgttcgatctactttctgatttctaatagtgacagtgtttattgtcatgtttagaacagtgacaaacagttaccattttcaagtaaactcgttgccatattcgaatcagaaaattcatcccatcaatgtctcttttcccatgtcatgtcgattcatttgaatcgtgatgtattcccttacctaaagtttggttttggtggttgctctcaccaatgtaatctccggttctcaaccgatgaaatttcttcaaatctatggtttggagaagtcatttgggtatttgatccaggaatcaatagacaaatttttttgagtgaaggaactggcatcgacgataatttcctccttccaaagacatggtccaatgatggtgatgtactcgttgtccaacgatccgtttattcatattcatg

SEQ ID NO: 172164 - DNA, 422 bp, Arabidopsis thaliana landsberg
tccgtttggcatatgtgactacaatgattctagggctctatcagcctttagagaagaacaactctcagtgagatttgatacatcagagttttgatacagaaaagatggatatatgggtgaccaataaaattgatgacaccacagattggtcatggagcaagttcttcacagtgagattaatcaataggttagactatcctattagcatgatgaagaagtctcccctaagtttcttcatcgatgagaaaaagaatatcattttgtgttatgataaacacagagaaaatacctacaagtcattggtattaattgttgggaaggataaagtctacagagaattctactttccagaatcatacgtattaggtaggacatatctatgcaactatgttccaagtttagttcaaatcaagcaaagtgga

SEQ ID NO: 172165 - DNA, 792 bp, Arabidopsis thaliana landsberg; identical to SEQ ID NO: 17650

SEQ ID NO: 172166 - DNA, 340 bp, Arabidopsis thaliana landsberg
taatttccaaaaatcgaccaaagaacaatgacagaatccgtgatccaactgaagatcgtccacctcaaaaagttccttatacacgtgaaaaagttcaaatggtaaaatagagaacaatgaattatgtttcacaagatcttccttttcaaattatttaatttaatctttgcatatttagacttgcagcaactgtcaacaagtcggacacaacaaacgttcatgcaagcgtaaagcagtgccaaaaccacccaagaaacctcaaggacgaccaaggaaaaaacagaaaacaatggatgaagagaaccctatcactcagccaatacaatcttctcttcaaagt

SEQ ID NO: 172167 - DNA, 237 bp, Arabidopsis thaliana landsberg
atgccccatcccatctacaccgttgacgcttttaccgatcatgtgtttggcggcaatcctgcggctgtttgtcccttgcaggaatggttgccggatgataccatgcagcggctggctaatgagaataacctgtcggaaaccgctttttttgtgcagcgggccgatggcagttatgatatccgctggtttacaccggagctggaaattgacctggcaaggcatcctacactggcaaca

SEQ ID NO: 172168 - DNA, 332 bp, Arabidopsis thaliana landsberg
  unsure (1)..(332): unsure at all n locations
atgaatggatcggacaatatcacttctccttccggaccacggtatatgactcagccttcatttgccttcttttccttgcccccgttgagcccttctcagtcgtcatcccgttgcaattcaataccattgatgaacctttctccctcagctcctgtagagagtagagactcttccattaaggttaagaaaaaccttacattgcgtcctttgggtgtgaaaagaagagtagccacaggcgttgcgcgtttcgataggcataagngaggtgtttccttgaatagttgtttacatgacttaccaaagctgcctccttctccgggtaacgattcctc

SEQ ID NO: 172169 - DNA, 726 bp, Arabidopsis thaliana landsberg
ctttatagaccattcccgagcattgtttggaagataagtaagaacattttgattactagtgtctagtggtacaaaatagaaattgtcgttagaccatttcagatcaataataacttttgttcacttgtggttacaaaaatataaacttttgttcacttgtggttacaaaaatataaacatttgttcacttgcgctcctacgaataataactttaactcagtcgtcagaaactactacaatgtggtagagcagtttagttgacataggctagttgacttcttttttaagccactgttctattttttaatgatcaaagattaggttcaaggttttccgagtaattaagaaatttacgattattttattttttctcaccgttagttgcactcaatttggaattaagtaaaactcctgcacaagttgcactacgctgaggtctccaaatgggtcaaagtgatcttccaaagagaactcatatacacaggaggatcaaaggaatttcggttttttcagttggtccatattcagaaggaaaaaaaaaacttcgggccgtcgcacccatgcccacaggtaggtcgaaattgtttgttttgctcatgggctcgggttatctaaaatggaagatgtgtgtttaaatgctaaatggtaggttggtgagaggcatgtcatttgttcatgagacgagtccttgtgagaatcttgaagaactctgagacgggtgagata

SEQ ID NO: 172170 - DNA, 421 bp, Arabidopsis thaliana landsberg
gacccttccgcatctgccgaccgagaagccgcgctacctgatgggcgtcggcacgccggacgatattctcaaatccgtcgcccgcggcatcgacatgttcgactgcgtgatgccgacccgctccggccgccacggccttgccttcacgcggcgcggccgcatcaacctgcgcaacgcccgccatgccgaggacatgcgcccgctggacgaggaatcgaactgcccggccgcccgcgattattcgcgcgcctacctgcaccacctcatccgcgccaacgagtcgctcggcggcatgctactgacctggaacaaccttgcctactaccaggacctgatggccggcatccgcaaggcgatcgaggaggggcgcttcgccgatttcatggcggaaacgcaggaaaactgggcgaggggcgatctc

SEQ ID NO: 172171 - DNA, 425 bp, Arabidopsis thaliana landsberg
  unsure (1)..(425): unsure at all n locations
cttgggttgttttagcccatttttcttatataatgaacttgatgatactttttaatgataaaggcacttacgaaagtgattgatttatgcggttcagaaaaccgcactacgacaaggtgaatatgtgagcatgcaacaannnnnnnnnnnnnnnnnnnnnnnnnnnnngtttgatccaaccgaactgagcaatccattttcagatgataacaaagggtcagttcacatttggtgtgcactcgaagacaaacaaatttcgcatgaggttttactctacttatgtgataagcttccatggataaagcttcatgaagtccctgatgctggacatcttattatccatgagaagcagcattttgaagacattattaaagccgcttgtagttgaaggttaaaaaaaaaacttaattcaaagtttgtgtgtg

SEQ ID NO: 172172 - DNA, 218 bp, Arabidopsis thaliana landsberg
atgtcgtgtacgcatgatcacaactgcgaagatcatgagtgttcttccgattggtctctctacaaacacattgatctctccaaggtctctctctctcttttctataatcacttacctatttcgtttgttttgctcaaataatgtctaaatcttccatccccacgtcaaatatgttactagtttagtgaatcccaaccatttagattctaatttataaa

SEQ ID NO: 172173 - DNA, 880 bp, Arabidopsis thaliana landsberg
aatgtatatctgtttttgaaaaaaaattaatgattttggttatgaattaattttgcagtacgaattcacactcaaaaactgcttccaccacaaaacagaagacattgcaattaggatcaccatggggtttgttaacttcctcaactatacataacatacaacaaaataatattatcttttgtatgttttgaaccttaacgataaatttcttcttgttgtatacggcagggtattaatacaagttctatgcagctacatcactctacctctctatgctcttgttactcaggtacaacttttaacaaattttaaattgctaagtgtcaatgcgtcatgtttgaaacaattaagggtttgctacaaaattgtgattgtcccatatatagtttagattattttggatgtataggatttctctaacactaaaatgtgattgcagatgggaacatcaatgaggccgacaatattcaacgacagggtagccaatgcattgaagaaatggcaccacacagccaagaaacagacgaaacatggacactcaggatctaacacacctcactcgagccgtcctactacgccaacacatggcatgtcaccggtgcatctcctccacaactacaataaccgcagcctcgaccaacaaaccagcttcactgcttctccttctcctcctagattctctgattatagcggccaaggccatggccatcagcatttcttcgaccctgaatctcagaatcactcttaccaacgtgagatcacagattctgaattcagcaatagtcatcatccccaagttgacatggcaagtcctgttagagaagagaaggagattgttgagcatgtcaaggttgatttgtctgagtttacgttcaagaag

SEQ ID NO: 172174 - DNA, 309 bp, Arabidopsis thaliana landsberg
atgtatcttttgagaatgcccgagctttatgttgagtcttttgagatcaaggatgtgaagactctaaaaggtgagcatctgtctagatccattggtaggttgtctggtaaaggagggaagacaaagtttgctattgagaactcgacctagacgaggattgcgattgcagactctaggattcatattttgggagctttctttaatattaaagtcgcaaggagttcacttgcaagtcttattatgggatctcctgctgggaaagtttactctaagctcagatctgtctctgctagattgaacgaatagttt

SEQ ID NO: 172175 - DNA, 681 bp, Arabidopsis thaliana landsberg; identical to SEQ ID NO: 19606

SEQ ID NO: 172176 - DNA, 555 bp, Arabidopsis thaliana landsberg
gcacgcttatttacccagggcgtgagccgcatgctgccacaatcggatgaaaaacggttggtgattgatattggtggccgctctaccgagtttatcctaggccagcacttcaaggccaacgtgacagaatccttgcgcttgggctcggtcggttggtcacaaaaatattttgccgatggccaattcagcgagcgcaatttcgagcgtgccgaaatcgccgccgagtctatcatcgacatgattgccagccgctacattggccaatcagaagtcgcttatggtgcctctggtacggtgggcgcggttgccgatgtgttggctggtgcagggtttgccgcggaccgtatcgagcgctcacaactggaatggcttaaacaaaccctgatcaaggccaaaacccctgaccgcctgaatatggaaggcctgaaggacgacaggcgcgcggtgattggtggcgggcttgccatcctcacagccgtattagacaccctgcaaatataagacattgatggtggccaacggcgccctgcgccgcggcgtattgtatacatgctc

SEQ ID NO: 172177 - DNA, 1382 bp, Arabidopsis thaliana landsberg
ctttccacacataaaacacacacttacataagtatattgtggataataacataaaagacaaaatggggaatatgagaagcttagtgaagatgttaatggtggttctgtttcttggatggattttcgtttggattatgatttcaactaatcgtttccaaaacatatggacccccaaactcgccaagtatctcaaaactacttattttggtcctcaaggtattaacttctctatttattctcgcattaaaattttgattccttcatctttgagtattcctttatcatgtacgtgtaggcatgaatcttgtgctactcacggttccaatgatgttcattgcggttctgagctgtgtttatttgcatacccaaaagcaaccctcccaaactcaaaggttccacttgttataattcaacttttattgacgatatatatttgtaaaatttgttacaaaattatcacaattttgtttgtataagtgcagagaatggaaggtaaaagggagaatggggagggtgatgatggttatgaacccattggggatagtgacagccacagagttgactttttctctgttgttcctggctcttttagtttgggctctctccaattatctctaccttagctatcacgtccaccttcataaccatgacaacgccaaaatgtaagcttcttaatttgtttcacttctaactttatatgctcgaatggtttgttggaatatcccacataacatctatctatataagatatgtgtctctccactcgttgatcatgattgctcacaaggttatactatgtgaaacataacatatggaacacaccaaaacctctagtgcattttttggcactaccattttttataccttgatgaattgcttcactcccaagttaccatttggagtatctaggtaccaaatccgtagggtatgggagttgatttaatattgcgtgacatgtgtagatggcaggcaaagtttagggcttttggactgaggataggttacgtaggccactactgctgggcctttttgttcttcccggtgacaagagcctctacgatcctgccacttgtcgggttaacgtcggagtcaagcataaaatatcacatttggcttggacatgtctcaaatttttgcttcctcgttcacacagtcgttttccttatctactgggccatggtcaataagttgatggaggtccgtgttacatgcatctaccttaatcttatccttaaaacaaaacaaaacaaaactttcattctttcttttattccaactgatatttgtttttacgatttcttaaatatgtaaaaacgtttgcatggaatgcaacatatgtgcctaatctggccggaacaatagcgatggtgattgggatagcg

SEQ ID NO: 172178 - DNA, 1616 bp, Arabidopsis thaliana landsberg; identical to SEQ ID NO: 17019

SEQ ID NO: 172179 - DNA, 711 bp, Arabidopsis thaliana landsberg
aattgtcaatataatctcttctcattgatcttctggctcttccctgtgagcttaattgttgttgtctctgcacagttatgctcggacaagtttggaacttttacaccaggtggtacatttgacaagaaccgccgaatcattctctcatctcttccatctgaagtcacagctcaagatggcttctacaacgcttcgattggaacagatcctgacaaactctacgcaatggggatgtgcatcccaggtgctaaacaaaagctttgtagggattgtatcaaggacgtcacaagacagttaatacagacatgtcccaaccagacagcagcaattcactggtcaggtggagggaaaactttatgtatggcacgttactataaccgaccgtcttctagaccaatagatttggaatcagttgctattggttataacgatggaaatctcagcacaaatttaacagattttgatagattatgggagcgattgatagctcctatggtgactaaagcttcatcatcatcaataaaatatttatcatttgataacggtagattctatgcagctgatgaagcaaacttgacaagttttcagatgatctatgccttaatgcaatgcacaccagacgtctctccttccaactgtaacacttgtttaaaacaaagtgttgacgactatgttggttgctgccatgggaagcaaggtggctatgtgtat

SEQ ID NO: 172180 - DNA, 920 bp, Arabidopsis thaliana landsberg
atggatcataactcgccgaaatctcgtcggagccggaaaccggagcccaaacctgacatatactccactttcgtagtccactccgactctgattctgatcaaggtcgagatcgagacaaacgtaaagccaaacctgaggaagacgaaaatgtcgatttatacgctacaatggtctacaaaggcgatagtgacggagaaggagaggaagatgatgatgacgattctatgcttcctcctcttctcaagcgtcttcccaaggatttcggaggcggcgcgtcgctcgattacgacgacgacgacggtgatgaatctggagatttcggtacgatgattgtgaaaacagatcggagtagtcatagtaagaagaacagtccgtactcgtccaaaccgcgaatgggagttagtcctaggaggagagcgagaggcggagatgaggaatcttctgatgaagaagacgaagaagaagatgatgatgacgacgacggagactacggtacgtttgttgtgaaatctaaggataaaaagggaaagaagaaagacaaggagattgatatgacaactatgggaagagctgttgcgagtatgcagaaatcaaattttggtggtaagactcggaaattggatccttcctcttcttcttcgaaacttcacggtgaagataatcggaaaatgcagcagcaaaacagtaagatgtcgactacgtctcttccggatagcattactagagaagatccaaccaccaaatacgaattcctcaatgaacttggtaaattagcctatttagcttcatagacttaatttggtgtttgtctctatcggatttgctccattatgttgctataatcatgatcagccatcaatatcccttagtacttggttcaatttcttgcttactatatcaaatttggtctctggattgg

SEQ ID NO: 172181 - DNA, 197 bp, Arabidopsis thaliana landsberg
cacggctcttatttgggcaatataggtttcatggggactaggataccgctctctaatattcgaagatgataacaaaatcatcaaccacgttatcaatgcgaacatcaataatattcgactcaaacactatatagagacaatacaacattggaaaagtggcttcatgaactcaagattcactttcacccatcgtagag

SEQ ID NO: 172182 - DNA, 498 bp, Arabidopsis thaliana landsberg
ccaccacgtggcggcggcagcttcaggggaaggggaggaagagataacggcggacgtggacgtggacgctttggtggtggtaattatgacgaaggacctcccagcgaagtcgttggttcgttttcaaccctctttgacgattctctcattcttaccaatcaagcagataaaaattattgaaaaaagttgtcagctttgacattaatgagcgtttgttgctgaaatttgacacaaagaaaatttttgtattctgattgatgatttgttttcctgttattaggattttgttggattcttgtgacagttttgaagttaattgaaaaggaacaaacttgtgaattgtctctgttatgatagagtttctttcttggtggtgttatacagaagttgcaacttttctccatgcttgtgagggagatgctgtgttcaagctctccaatgtgaaaatcccacatttcaatgccccaatctacctacaaaacaagacccagattggga

SEQ ID NO: 172183 - DNA, 644 bp, Arabidopsis thaliana landsberg
ggataggacaaagtctcctcaaacgcccactttacatccgccggcaaaatctcatcgtgttatttctccgtcgaagtctcctttaactcctactttacatcctccggtgatccaaaaatctccagaggcaccatcttcgacgaagcaaacatcgccttcaaagtctccggagaaatcctctgtttcctctccggcggcctttgtgactccatcgatatcccctgttctttctccggcgacttccccatcttggaccactgcatctccatcgaaatcacctgtttttactccgacgaattcccctgtttcctctcgaaccattgcttctccattgaaatcccctgtttcgtctccggcgacttcccctgttacatctcgtaccattgcgtctcctctgaaatcccctgtttcatctccggtgacttcccctgtttcctctccgactacatccacgactcctgtctctacgcctgcaacttcccctgtatcccctcccactacaagtccagggaagtctccaatctctgctccaatgataagtcccaccacctcaatagaatcgcctgcccccaccccatcaaaccaaccaccagactcaaacgatgctccatatataacagcaacatcgccagtagcggccctgc

SEQ ID NO: 172184 - DNA, 671 bp, Arabidopsis thaliana landsberg; identical to SEQ ID NO: 14533

SEQ ID NO: 172185 - DNA, 900 bp, Arabidopsis thaliana landsberg
taaggggttcttcctattccctaaagtttgttccatggataaatgagggtaaaaggcttgttgcgtatcttctaatttttgtaaaagaatgtagagtaagtgatcaaaaacctgttgttggcctattccacggcggattgagagaattgtgcggggacagggtcttgtcattttatttgagttttggcctaacatatagcgactagatcataacccgtatatagcccggacattaatattttatataaattaaattgtatactttgttatgtttgctatgtttgttaaaattatttattatatttgtaaaactttagtaaaatatattcaaattaaattaaatttattaaaacttaataaatttaaaagttttttttgtttggagatgcactatttacatacaaaatatccgtttctattttttgagtactttgggcctgaaactttttatccaaactgacccaaatccaactggacccgacccaaaccgaatatttagaattattctattaggtaataaatcatatacccattaatcccaaacccgaacgggttctacccgaactcgaatgggttactcatatgcccagccctattctctgatttaattatctaaaaaatcccaataaaacatatgttttgctgactactttttattcaaaattttacatcctcttctgccaaaataattttataagacatcccaaaacccttggaataatgatttcatgaatgaagaatcctaatttgaatatagcaagaggttttgaaaggttttaagtttttgataggtgtgtatgtgagaaggtacatccatcgtgatggtaatctgcttatttataattttaacttgcattatacagcaggtaggcttatattttagttaaattaaaaacatat

SEQ ID NO: 172186 - DNA, 780 bp, Arabidopsis thaliana landsberg
actggagttgattgagcacctgctctagatgatgatagtctcacgggcgcagctggagttgaccttaaccatgcatatatagccggacatttaccaccagagcttggccttatgacggacctagctttatttcacatcaattcgaatcggttttgtgggatcatccccaaaagtttatcgaaactcgctttgatgtacgaattcgatgttagcaacaatcgattcgttggtcagttccctgaagtttcactctcatggccttctttgaagtttcttgatctaagatacaacgaatgtgaaggaagcttgccatcagaaatctttgataaagatcttgatgcaattttcttgaacaacaatcggtttgaatcggttatccccggtacaattgggaaatcgaaagcatcggttgtgacattcgcaaacaataaattcagtggttgtatcccgaaatcgattggtaatatgaagaacctcaatgagattgtcttcactggaaacaatttaaccggttgtttcccaaacgagattggtttgcttaacaatgtgacggtgtttgatgcaagcaagaacggttttgtcggtagtttaccgtcaaccttgtccggtttagctagcgttgagcagttagatttatcgcataataagctcaccggatttgttgttgacaaattttgcaagttgcctaatttggacagcttcaagtctctcttacaattttttcaatggagaagataagaaaagtgttccagggagaaacaatgggaaacaatttgatga

SEQ ID NO: 172187 - DNA, 1916 bp, Arabidopsis thaliana landsberg; identical to SEQ ID NO: 33914

SEQ ID NO: 172188 - DNA, 684 bp, Arabidopsis thaliana landsberg
  unsure (1)..(684): unsure at all n locations
agataggggtaaaaaagtgttgccttcaccagtagcgcaatacgctcttgataaaggcttaccttctgatctcattttctcccctgagaaggcaggagatgtaagaattcttgtctgattaatatcaagctattgcttttggaaagatgtgatcttttgttctttcttgtgacgatgacattgctatatcttgtgattnnnnnnnnnnnnnnnnnnnnnnnnnnnctttaagagagttgcaacctgagctttgtattacagcagcttatgggaatattttgcctactaagttccttaagattccggtacatggttagttaaagaattggttgatggacttatggaaacgaatgtagtttctttatagtagatagctgcaaatgagtcttgtgttttgaagccaatgtttaatgttttagggacagtgaacatacacccaagtttgctgccgctgtaccgtggtgcagctccagttcaaagagcattacaggtgcaattgttttttcaatatgaactcattacactcttcatgttattgcttagcttcttacttactacattgctaagactgttgcttcaagtgtgcacaataacacttggtgtttgcactaggatggtgtcccggaaacaagagaatcattagcatttactgtgcgtaagttagatgcagggccagtgattgcc

SEQ ID NO: 172189 - DNA, 998 bp, Arabidopsis thaliana landsberg
atgtgaaattgtctttgagtacaattacaattatcatgtgatcaagtgttggatcatattagtggaagattatgtggttatgaaaatcacactcacaaaaaggagaatatcgagtcattgaagttcctgatgcaagagctcgtagaggtacgtgatgattttttgacaatagttaagattgaggaagataacggtctataaacgtttgctcaagtccagtaatggctattgagggtcgaaggtatggagtctcaagtgaatgatttgttaagtgccagcacaaacgaaatcgaacatttttgtgtgtagtatttgttctaaaacttataaattaagcattttttacagtaaaacaatattcaggaagttgaaagaagtcaaaaatcttaaagctaaagaataatattttgtagtggttacaagcaaaattgtaattcctaagttggagaagaagtacatttcacctacagtagttggtttggaaatggtctttcaacgggaatggaaccttctcttgaaagatgatgtaataactctaggattttacggtatggatggagtaggcaagatcacaaccctacctcagatcaatactttgattcaagaaattgatttgatattgtgatttgggttgtggtgtctaaagatttgtcagattgagagtattcaagaacagatcggcgaaatactagggtttggtaaggaatattgacaatagacagaaaaggaaaaggctattgacaaatataatatccttagtagaaagagatttgtattgttattggacgatttatgaagtgaggtggatctaaataagatcagtgttccacttataacacaagaaaatggatgaaaagtattgttgaccactcggcaagaggaagtttgttaaaaaatgaaggtaaatgatgatatggaacttagttgtttggcaccagaagatgcatggaaattgtttcaaagaaacgttgggagaagtcgcactcagaagtcatcca

SEQ ID NO: 172190 - DNA, 455 bp, Arabidopsis thaliana landsberg
  unsure (1)..(455): unsure at all n locations
ttgaagatggtgggtgaacttattgcaaagaaaataatgggtgaaacggaatccgaggccgtaaaagaactcgggttatgctggagtgctttccgaaccagttggtttcagttttcttacaacattcctggaacaactgnnnnnnnnnnnnnnnnnnnnnnnnnnnnnnnnntgctactaaaatctcatgttatatgattgcaacataaatcactgagcatttatatagtgcatgtgatttttggtaggctcggaggaaggctgcgaagctgctaaaggccttgattctgaagaagatagtatcaaaagaaggacttggcgatttcttagatataatatttgatgaaatggaaaaggatggggccgctttagatatagacaaagccgtaaacttaatattcgtcttcttcatactctcccaagagacaactcctggtgttcaaggaaccgttcca

SEQ ID NO: 172191 - DNA, 476 bp, Arabidopsis thaliana landsberg; identical to SEQ ID NO: 75198
  unsure (1)..(476): unsure at all n locations

SEQ ID NO: 172192 - DNA, 821 bp, Arabidopsis thaliana landsberg; identical to SEQ ID NO: 9694

SEQ ID NO: 172193 - DNA, 535 bp, Arabidopsis thaliana landsberg; identical to SEQ ID NO: 12258

SEQ ID NO: 172194 - DNA, 286 bp, Arabidopsis thaliana landsberg
tgagacaatgcctctcctaaagagttggcgttgaaagcacaataataaagacaatttttacactggcatgatggcactgtacgcatcaggtgagaagagggtcggcacaaagaaggtgtacgcaatggttcagtgtatgagagatctagttaagcctaagatgtgtaaggagtgtttggaaagcattataaaggagtttcccgagtgttgcgacggtaaacaaggagggaggattttgggtacgagctgtgattttaggtatgaactttacccttttctaaggact

SEQ ID NO: 172195 - DNA, 342 bp, Arabidopsis thaliana landsberg
ccgtgcgcgcgcccttctccggaaccatcacccaggtggctttcaaggccggggaaatcgttcctccccaatcgcccgtgctaacgctcacgagcctcgatcgcctctacctcgaggtgaatctcgagcagcaatcggtcttgcgcgtgtctcccggcaaggcggccatggtttctttcgagagcctccgtggccagcgcttccaaggcaaggtgaagaatatctatccccgcgattcgcaattcatcgtgcgcctcgagatggaccagtggccccagggcgttcaaaccggcaaaacggccgacgtggccattgaggcgaacgccaaggaagatgctctcc

SEQ ID NO: 172196 - DNA, 421 bp, Arabidopsis thaliana landsberg
atggcggtattgtctaaaccggtagcagtaccaaaatccggattctctctaatcccggttatagatatgtctgacccagaatccaaacatgccctcgtgaaagcatgcgaagacttcggcttcttcaaggtgatcaaccatggcgtttccgcagagctattctctgttttagaacacgagaccgtcgatttcttctcgttgcccaagtcagagaaaacccaagtcgcaggttatcccttcggatacaggaacagtaagattggtcggaatggtgacgtgggttggagttgagtacttgttgatgaacgctaatcttgattccgggtctggtccactatttgcaagtcttttcaaaagcccgggaactttcagggttttaaatgtccctagctttgttacacacctttcattctcagactct

SEQ ID NO: 172197 - DNA, 1439 bp, Arabidopsis thaliana landsberg
acccgtctcccgaggcgattattgcggctgccgaacctactgtagtgcaagatccttcgctggctccgagcgagtgctgttgccatagttggattgccggctcgagatcgttctaaggcctcgtggaagcacaccagtcactgcatgatcccccggcagggagcaactagagggacgacgacggacgccgagactctgcccacacgtcgtcgagcctatactcgacggacagggctgcctcggctaaccttttcggcgcctgcactggggctttgttgtctcccccgaggttttgttggagtccgagctatatgccgatagggcgtcgaactttttgagagtacgttagaaactttgatctccgagcaagagtttttacaaggttcttatctttgttttgtttcttcaagccatcggctcgttgaataggatggtgctatcctacgattcctcttcgcagtccaatctgagcgcagtggacaagctgctcgaagctgaaaagaagttggccgctgcggaacttgctcgagttaacgcaaagcgactatgatgttgcaagaaaaggggaaagccgagcaggatgctttcacccataaagagaatcccatcctactagccgaggccaaccttgagatttcgtcgacaggcgagaggtacaagcgtatgttgaccgaggagagaggtctcttggataataaaattgctcgggttcgtcgatcggtagcgcgagagactgcagctttgtttgttgagaggatgaaagctgtcgaggcgaagttagctatggtcgatcaagctagcgaccactggatgtatttggcgcaggctaaggcaaacaccgagctgattgccgcgcttgagggtgggaagcgtctggaggacgagaagaagctggtggacagctagttgaaagattttgcggatgccgaggtgaagtttaccagtctccttaaagaagttaaggaagagttggtaatccctcaggttccatcctcctcggatcctttgagtcctggaggaaaccgatcggtggaatgcgaggcggatgaagtctgtatcatcaaccaagctggttcgaacctccgcggtgatgcctcgcggaataagggacttgaccaatgataagaaccggattcccttttttcttcttttggtatttgtaaaaactcgtgcctggatggctttatccttcgtactttttttgtttctattttttctagtcgccgtaaaacttatgcctgaatggctttatccactttccaaagttccaaaggcttttattttgttctggtgtttcgataacttaacaatgtcattcctcgatgactttcttaccctgattcgtttcgtgggttcgtggccagaaagaaaagactgaaattttacagtgaaactttcggggagcgacccgagatggagattcactttttagaacagtg

SEQ ID NO: 172198 - DNA, 490 bp, Arabidopsis thaliana landsberg
atgcagagataaatatcttgaacaagaaaagatggaaaatatattatgctttactagagagaagtcgtgatgggaagttagagaaaaaaactacacgcgaagtttctgaattatttttggtatctattcaaacggtgcaacatatttggaaacaagcaaaagaaacttctaatggtggagaagtcaatgtatcccaaaaaaatcggacgttgtggtcgcaagagaatctcacttgatttggatcaaattaaagatcccacaagagaacgacactatgatcgctatcaatgtgtttaggtattggtctttcgtccttacataagcgtcttaaggaaggtacacttcgacgccatactaatgctattacaccaagtctaaatgatgagaatatgaaaggaaggctaaagttttgcgtgtccatgttggaaaatgattctctgactcatgaaccaaaatttcttgatatgtacaatattgatgaaaaatggtt

SEQ ID NO: 172199 - DNA, 588 bp, Arabidopsis thaliana landsberg
aaacggttcatagaaaagaggtcgaggacaagcaagtctgatgagccaaatctcaagagtctgcagacattgcttgagtcggcacagaaagaagctgcagcatggaaaagcaaggctagtgcagataaaagagaggtggtgaagctgcttgataaaatctccttgttgaaatcgagtttagcaggtagagatcatgagttcagggatttaaatgcagcattgtctgacgcagaagagaagattttcccggagaaggcacaggtcaaagccgagatagcaaagctgttggaagaaaaaatacaccgggatgaccaattcaaagagctggaagccaatgtgcgttatcttgaagatgagataagaaaggtgaacaatgagaaaatagaagaggaggaaaagctgaagagcgaaatcgaggtgctgacactggaaaaggtagagaaagagagatgcatagagacgttaagcagaaaggtgagtgagctagagtcggagataagtcgacttggaagtgaaataaaagcgagagacgataggactatgaaaatggagaaggaggtggagaagcagaggagggaactagaagaa

SEQ ID NO: 172200 - DNA, 568 bp, Arabidopsis thaliana landsberg
tggttaaaactagagtgttttgttgtcttccttaactaacctctctgacacagaatgacgatatcaacgggcagaactacacgggtcattggatggtaccactcccatcctcatattaccgttcttccttcccatgtcggtatgtatcatcatcattgtaactttttatgattttttttatgatcttgttcctcatatttatgtcctgcagatgttcggacacaagctatgtatcagcttttagattctggttttattggcctcatattttcctgttttagtgaagatgctaacaaggttggtatttgctttctatgagtggattagcaagttgaaacttttcaggattacttctcctgtttgctgaactggctttgttgatgtttccaggttggtagaatccaagttatcgctttccagtcttctgatggaaagccgaatagtattcctaaatcaatgagcctggttcttgctaataaagattctgtcatcgatatagaatcttcatctagttcttcggactcgatataccagcgatcctcttctgctaagcccgagctagacgcca

SEQ ID NO: 172201 - DNA, 388 bp, Arabidopsis thaliana landsberg
  unsure (1)..(388): unsure at all n locations
tttctgtaagtgttgacaccgttacggttggtgggattagcatcacgtcgcagaccttcatagagggcgttaagactccttacaaagagtttttcaagaaaatgccgtttgatggtatattggaactcggtgtcacgctnaagcccttcatctaggagcacatattgttattccctctatggttttccaaggcaagattgcaaaaaatgtgttctctatctggcttagacggttttctaactctggagaagaaggtctcaccggtggagaggtagtatttggaggaatcatcccaacgcatttctccggtgaccatacatacgttgacgtggaagggccacaaaacatcatcgcaatgtacaacatttgggtcgcaggagaaaacacc

SEQ ID NO: 172202 - DNA, 370 bp, Arabidopsis thaliana landsberg
tggttcatattatgagtttgattgattttccttgggtgctctctcagaacagaagagcagacctgaagtcactgccataatagctgcatcctctggttcaatggaaacagaagaagtagcaaaaaaggctatggatggcataaaagcaggaaacttcaccgtctcatgcaactttgagggattcttactgtctctcgcgacaaccggcatgtcccctcaaagatcattttggcttgcttttcttgaagttataaccgcagggcctataagattaatcgctctcttctttcaatgggattggtataaagccattgaaaaatggagcaaaaccaaaaccaaatggtaagttcctaatgccatcaagttgtca

SEQ ID NO: 172203 - DNA, 529 bp, Arabidopsis thaliana landsberg
gtcaatcataggatcgttgtgtcggatgttgttttcaagaatcgttggagcaacgtgagttcatcagatttgatgtttttgaattccgagatggttaattcgatttctagcgagagattttcttcattggatcgtgtgaagagaggagatgaagaggatcagataggtatcttgcgaatcaaggaagagatggaagcgaagagaatgttggagaacaagttaacttcgatgacaactatgttttcctcggaaaacggagactctggttcgaaatcaagaagcgttatgatcgaaccaggacgaagatcggtgtctgacatcactgcggttcctagactcagtatatcgattcatggagattgcagcggttcagccgcagagactgcgtctgcgttacaaaacggtgggaatgagacggaggagagaagacggcgtttgtggctgccgatcgctagaaaaactgctcaatggtttgctaactagagaaaaaagaagtcaaattaacacaacacaccaacactttaatgta

SEQ ID NO: 172204 - DNA, 349 bp, Arabidopsis thaliana landsberg
gtaggtaacatactaaaatccatctgcttctatttcactgagatgcaaattaagcctgtatggtctcgctttgtatcaccatgatcttagttggctataactagaaatgcgttattcttctaattttgcagagccaacggttaatctaagttcatcgttggaagcgcttgctgactactatagtcttacaagggagggtgatgctcacagggccttgtcagatgtgttactcttatctaaggtgttccagaaactcaccattgatctcaagctctcactctctgatctcgtccttcgctgtcacactgcatctgatatcagtgctgccatggccaagaacaagaaggcc

SEQ ID NO: 172205 - DNA, 1461 bp, Arabidopsis thaliana landsberg
ggcggattggaaaatgggctgcagagctcaatgaattgggcattgattttgtgcatagatcttcgatccagtcccaggcgttagcagacttcattgctgattggacgccaggggctcaggatgaagaaacaaataaggatgccgaagtatggacagtgttttgcgatgggtcttggggaaccttcggggcaggagcagctgctgtgttggtctcgccatccaaagttaaaacttgttatgcggcaagactcgatttcagttgtacaaacaatattactgagtacgaagccctgcttttgggtcttcggaagctaaaagcaatgggaatcagaagggccattcttaaaactgattcccaggttgtttcgggtcatatcgacaagagttgcaaggctaaagatccgaagcttgaaaaatatctggatatggttcgaagagttgaagcttccttcgaaggattttctgtcaaaaatatccctcgaggacaaaatgagcatgctgatttgctagctaatgtcagcagcacatggggctgccctgtacgttcggatgtattcttcgaaacaataaacaggccttcggtggaacttcttgaaagagcagtcctcaatatatctcctgtttatagcgaagattggagaactgagatcatctcttaccttcagggtaaattccttttagatgacgaaacttataacaggaggatagaggcaagagctcgtccatatgtcatgatagaaggggagttgtacaagcatggagtttgtgtccgctactcaagtgtttatctagaaccgaaggcatagagttgatgaaagagatacatgcatgcctgtgtggatctcacattggatctaggccgttacttggaaaagttttccgtcaagggttttattggccgaaggcagcttcggatgcagcggaattagttcaaaagtgcgaaggttgtcagaaatgtgcaagagatcaaaaacaaccttcgtctttgacacagctaatacaacccatctggccattgcaaaggtggggcctcgatttgctgggcccattaccaccggctcaaggcaatctgaaatatgttgtagttgctgtggaatatttttccaagtggatcgagcgaagccattagctacaataacttcatttactattcaaaagtttttctggcaaaacattgtttgtcgcttcggagtgcgaaggctatcactgtggataatggaacacagtttgattctgaagccttcagagaattttgtaatcaaatcggcacgaagatacattttgcatcagtccgacacccagagtcaaatggacttgttgaaagagccaatgggatcataatgacaggaataatgaagtcaatcttcaatcagcccaggggaaagtggccagacgagttaatcaaagtggtgtggagccataacacaaccacgtcaagatcaacaggctttacacccttta

SEQ ID NO: 172206 - DNA, 243 bp, Arabidopsis thaliana landsberg
caaataaaacgatagaagtctgagatcttatgcttggacttctttttggagggaaagtagatgtctcaaatcgaaagaatcaaacaggctatcatggcggattcgcagaatgccagctatacagagcgtggcattgagcttctctttgcagcgccaaaaactgctcgcatcaatatcatcggtcaggctccgggacttaaaactcaagaagcagctttagagcacactggcgggcgttactag

SEQ ID NO: 172207 - DNA, 676 bp, Arabidopsis thaliana landsberg
gcactaaaaatggacctcaattttccaggcacttcttacctaatccctcctgcttctatagcggtcatatcattattaaccataggtatatggcttcctttctatgaaaccgttttggtccgacacatcgaaatcattccaaaacaaaacggaggtatctcgttactacaaaaagtcggcattgggaatattttctccatctcgacgatgctcatatccggtattgtggagcgaaggagaagagatttatcgcttaatggagtaagcatgtcggttttctggctaaccccgcaacaagtactaatgggattttatcaagtcttcacgattgttggtctcaccgagttcttcaacaaacaagttccaatcaacatgagaagcattgggaactcgttgctttacttaggtttgtctctagccagttatctaagcagtgccatggtgagcattgttcatagtgtgactgctcgtggaggacagagttggctaacggatgatattgacaaaagcaagttggattgtttctattactttattgccgctttaagcactcttaatttcatcttcttcttctggtgtgctcgaaggtatcgttacagaaactatagtaatgaacaataattagtttgacatgttggaaatgaggagtggagaatctgcacagttttaaaacaat

SEQ ID NO: 172208 - DNA, 263 bp, Arabidopsis thaliana landsberg
  unsure (1)..(263): unsure at all n locations
tatcttttatggagcactttctaaaggagattgaggtaaaattaatcattgctttcatagacaagaaagttgagataggccagtagttagatgccgagtttaaaaaggcaattaagggtttcaggatcgcagtggttgtgttatacaaaaagtatgcatattgaatttggtgcgttaccgatttaatgtaccagggggcanctaaagaaaagtgtggccaaaaaaatgagataggttttgttggggatggatctttcacatgt

SEQ ID NO: 172209 - DNA, 1392 bp, Arabidopsis thaliana landsberg; identical to SEQ ID NO: 19547

SEQ ID NO: 172210 - DNA, 1925 bp, Arabidopsis thaliana landsberg; identical to SEQ ID NO: 24336

SEQ ID NO: 172211 - DNA, 457 bp, Arabidopsis thaliana landsberg
gtaaaaatggagttagacacgatccagtcggatacttggttgtcaatgggaagtcttattgatcgtagttgaaaaaggggaacatatgaattgggagtgcaccgagatgctacagttgcagaggttgtagcaagaggtcactggtcaatccgtcgtggtcagaaccaacatataagtttgattgtggaccagatcatagctaaagatccgtccgtacactcggctagtcaagatcatattctatggtggtatgcaccagacacatatgaagatgaattctcagctatgattacacggaaacaaattcttctttgtcgtccagagcaaccttgggcctgtacaatttggttttcataagttgtgtcgcggttcgcatttatagcttggcttgctgtaaaagattgcatgtcaacatgtgtaagagcaagagtgtgggggaggggatcatccgtgtctt

SEQ ID NO: 172212 - DNA, 542 bp, Arabidopsis thaliana landsberg
gaaaatccagctccaacagtgatgaagctgaaagatcaactatggatgtttgaaaaaagatttaataagttttcaatgagtattgatccagagaagatggaaactacactagctatcaaagaggacaaaagatttcgcaacagaatggtttgtaccagaagatcagaaaggagttcacttagaggaaagaagcttggagagcaagttgttgagtgaggaggaaattattccgacttattctccagaggtacctaaaccgcccactaaaccctcttctgaagaagaacacttgattcttgattctattgctgaagaactcctggagctttggattgggtataaagctcaggaggatacaattggaaagttaattcataagatggaagagttaaatagcaccattctggaacttcaagaaatggttaaaggctaccccagttttgaacttgaggattggtcaaaggagcctggttcaaaagaagaagaatactctgctgatcaaaaagaagcttattttaagaaaaatcaaatgagtactcatc

SEQ ID NO: 172213 - DNA, 618 bp, Arabidopsis thaliana landsberg
atggctgttgcttgctgtgtattcatgattgagcaatcaatttttttgtgcagacgatcaacaatgtcagatccaaaactgaagccagtggaggatgcactagttactgttgccaagagctcacaaattcaattagccaaggatgatacttcaggtggaaccatagttggaaggttactgcagtgccagtattcaaagacccataagttctgggagactcaacctgttgagcagtttaaagatatccaggacacgagtttgcctgaaggcccaattgagcccgcaactttggtgtctgaggtcaagcaagagccgtacaaccttcttggtcaattcgaatggaccatatgcgatatgaactctgacgatatgtgtttagagatgtacaactttctcaaggaaaacagtcctgatgaccaacagatcaagtatgagtactccaaagagtatctaaggtgggcactgtgtccacctggttattaccagagctggcatattggagtccgcgtcaagacctccaagaaactcattgctttcatctgtggcaggccaacaagaatcagggtgcgtgatgaggttgttaaaatggcgaaggtcaattccttgtgtgttggcaag

SEQ ID NO: 172214 - DNA, 912 bp, Arabidopsis thaliana landsberg
ctaaaattgttgggtacttatccatcaacactccatgtttaagaccggtgtgaatttatatgctttgatggattcattgatgcaactatttttgttttggttggtttgaggacgcttttaaggtaataagcgataaaattatagattgatacaactccggtagaatgaaactgaactaaactagagaagaatatgaaattgtttctgaatcgattatgacctattttatttggttaattatattttgttttaaaggaatcgaaacaaagttgaatatgatattggtagctactgaatcattatgtgttgtttctatgtttgagtagtttctcaattgggtttggagttttctttgtttaaacagttaacactctactaacgggttaactttactttagtgatttcagttcaagaagaacgcttaatttggtctctgtttaattatttttccgcttaatttaagaaaaacaaattttgtctaagctatactcgtttctcacaaattcggtgtataacttttcatattgattcaatcctaaagtgttacatcgatgtaccattcgactgtgatattgtgctcatttaattttaatcacaacttaagaaacacattcaataatgtatgcaaagtaggtatggaatcgaaatcaacatttaagaaaatggagacataggtttggaccgtttggtatgagttagtgaatgttcaacaaacaatcaggttttaatatgatatcagtgcgtccacgtgtagaaagcatttcaattaacagtcagtctcctataacccttttggtgagcttgacactttctaaatctgtcttgagaatctgtgatggagttggatcatatcttcagctatgtggtcttctggctaagttatccattgttcgtgaaacagcgaaagcacct

SEQ ID NO: 172215 - DNA, 349 bp, Arabidopsis thaliana landsberg
  unsure (1)..(349): unsure at all n locations
gaaacaacaacatcacaccaagtcatcggcgcttactctttcagcttcngacgcatattggcgtctagctctgccacgtggagcgagtagagaccatccatggtgtaacccgctgatgagctcggcgggagcgaagttaccgacgacgatggtgttcatggcggagtttgatatactaaaagaacgaaacttggagatgtgtaaagtgatgagaagccatgggaagagagttgaaggtatagttcatggaggtgttggtcacgcttttcatattctcgacaactcgtcggtgtcacgtgatcgaatccacgacatgatgtgtcgtcttcacaacttcatacatctatca

SEQ ID NO: 172216 - DNA, 522 bp, Arabidopsis thaliana landsberg
cccatgatcccgcagcaaattgcgctcgtccaagcgagcttcgccaaggtggtgccgatcgccggcaccgccgccgacctgttctacgaccggctgttcgaaatagccccggacctgcgccgaatgttccccagcgacatggcgcttcagaagaagaagctcatggtcatgctcggcaccgtggtgaacgggctgtcgcgcctcgacgcgctgctgccggtcgatcacgcgctgggcgagcggcatgccagctacggcatcgagcccgaggatttcgcgccggtcggagcggcgctgctctggaccctggaacagggactgggggacgatgtcacgcccgaagtcgcggacgcctgggcggatgtctacgaaattccggcgcgcgccatgatcgccgcgatgatccacaagcggtggaaagcagcggcgtcaccgtcttgatgccgcacgggcaaccaaagggtccaggaggtctgctctactacaggcggatcgtggtgcgctctcgtgatgggggatgag

SEQ ID NO: 172217 - DNA, 455 bp, Arabidopsis thaliana landsberg
gcttctctgcttcaaacaccatcttcattgatgatgaaccatataaagctcttcgtaatcctgtaaaacactcgagatctctattatagtgttgtctatcgacaagtttgtagttcttaatcctaactctaatcaatattctttatttgcattcaggacaatactggtctcttcccaatgagctttgatgcttctaacaaacaggataatttacttggtatgcaaaatttaaacttttgatgttcacctcttaactttagacatgcgttatggtttatatgtgattggtctttattttgttagatccataaggtgagttctgttcttacttggatggtttggcaaaatcatctgatgttcaggcttacataaaggagcatccttttggacagcccatgatcgattcttctcatcctgattggtcttactaccgcagagtgtctaagattgtctct

SEQ ID NO: 172218 - DNA, 531 bp, Arabidopsis thaliana landsberg
tgttactttagatagctttattagacctccttccaatgtttggcacacaatgaatgatagtgaattgctttggcgtgcttctatagagccgcaaagaaatggttatccgtttagacgtgtccctaaattggctttcatgtttcttgccaaaggtcctttaccatttgctccactttgggagaagttctgtaaaggacatgagggtctttattctatctatgttcattcgttgcctagttacaaatcggatttttcgaggtcgtctgtgttttacagaagatatatccctagtcaggtactgtcattgatgtttcagaggaaaatcttgttttgtgtttgtttcttgtgttctcacagtattagtttcttctgtgttataggctgtggcatggggagagatgagtatgggtgaagcagagaggaggcttttggctaatgcgtcgcttgatatctctaatgaatggtttgttctgctatctgaatcatgcattcctctgcgaggtttcagctttatctataggtatggctctg

SEQ ID NO: 172219 - DNA, 1134 bp, Arabidopsis thaliana landsberg
gggcaaactcgaccggctcctggtttctttaaattcgaccggttaggtgttcgtgttcctaccattatggtttcgccttggattcaaaaaggaaccggttagttctctttttctctattataattttacaaatttgttcttactgtgcattgctttttagtagaatcctcaagcttttttccaaattaacaagaacactccgcttttgaacttgatatataaatagttttgaaactactgaccaaaaaacttatatgtagtatttatgcctatttaacgtactatttttttcacttatgaattattaatattgaaactattcatttctttaacccaaaaaaagaaattcatttgtatttcatgtatttccactttctactactatttccgacagatttttgacatttgctaacaaaatttaaggctgcaaaaaccaaatcacatggatggcatttgacaactataagattgtattcattaataatggtggagaaaataattgaatccattgattatgccattgaaagatggagtatattataatttgtcggcgtcgttgcgtgactcatgtttttcaaccatcctttgaccccatttgattttaatatatttttactatatatagtttaataacatcttattttattatatgttttgaatgaagtcgtaagtgaagcaaaaggaccaacagagagctcagagtacgagcattcatcaataccagcgacaatcaagaaactcttcaatctctcttccaatttcttaacacatagagatgcatgggctgctactttcgaagacgttgtatctcacttaaccactcctcgaaccgattgtcccatgactctacctgaagttgcacctatgagagccactgagcctaaagaagacgctgctctttctgagtttcaaggtgaagtggttcagcttgcaacggttctcaatggtgatcacttcctcagtagctttccggaagaaattgaaaagaagatgactgtgaaacaagctcatgagtatgtcaaaggagctacttctcggttcattagagctagtaaagaggcaatgaagcttggtgccgataaatctgctattgtcgatatgcgatcttcgctcactacacggccacacaactga

SEQ ID NO: 172220 - DNA, 455 bp, Arabidopsis thaliana landsberg
tcagcctgggtgataacaacaacaacaaccacaactttttcaacctcgcatactttcaagacaccaagaattctgatcagacaggtgttccttctctgttcaccaatggtgctgataacaacggcccatctgctttgcttagagggctaacttcttcatcttcgtcaagtgtggtcgttaatgactttggagattgtgatcatggaaaccttcaaggactcatgaactctctagctgcgacaacagatcaacaaggccggtcccctagccttttcgaccttcatttcgcaaacaatcttagcatgggtggctcggataggttgactttggactttcttggtgttaatggaggaattgtgagcaccgtcaatggccgtggtggtcgtagtggtggacctcctctggatgctgagatgaagttttcacacccaaatcatccatatggcaaagcttga

SEQ ID NO: 172221 - DNA, 455 bp, Arabidopsis thaliana landsberg; identical to SEQ ID NO: 74147

SEQ ID NO: 172222 - DNA, 1791 bp, Arabidopsis thaliana landsberg
agcatcctcttatacaatgtgctaaaacctgtttattgttgtcttggcaggccttttctcagaataagtctatctataagccagtagagaatgccttcatctccatctacataaggaaaaatccagttgacacggcgaaacagctgttgaaccttgccatagattcgaatataggagatcaggcagcactagagtttattgttaatgctttagtgtcaaaaggtgaaatatctagcagcacggtaggttccttctgtgactccagcgtatgagtatgctatgaattatggtcacttgatacgtgtagtctgcttatgcacagtcaagaacaactaaaaataatgagcgtttgttattgattattgattaaatttctcgagcgaaaaggattttcacctgctagaggctaataagtgcttctatcatttttctgtttgtagacatcagctctatgggacttcttttgctttaacatcaatgggacaactgctgagcaaagtcgtggggctctatctatcctttgcatggctgcaaagtcgtcccctaggattcttggatcacacatacaggatattattgatattgggtttggccgttgggcaaaagtggaacctctacttgccagaactgcatgtactgttattcagcggttctccgaggaagataggaaaaagttattgctcagcagtggcagccgattgtttggtattcttgaaagcttgatcactgggaactggcttccagaaaatatatattatgcagctgctgataaagccataagtgccatatacatgatccacccaactccagaaacattggcttctactattattaaaaagtccctgagcactgtgttgggcgtagttgaacaagaggaagcacagactgataccgaaaataataaagttgatattttgactccagttcaagtggctaaactcagtagatttttgttcgctgtcagtcacattgccatgaaccagttggtgtatatagaatcctgtatccagaagatccggagacagaagactaaaaaggacaaaccggctgctgaaagtcagaacacagaagaaaaccttgaggccacccaagaggtacagaccaatttcgtagagcgcagctggtggcacaaattttacaaccctaaagggttatttttgctgaataatgcaaagttttctttgttttgtagaacaatggcataaatgctgagctaggatttgctgcctctgatgatgcactgcttgatacactcgctgaaagagcagagagggaaattgtttctgggggttctgttgagaagaatctgattggggagtgtgcaacttttctctttaagctttgcagaaatttttctctgctgcaaaaggtagttagttttctattcattcattctgtttcatggcgtgtgatgaagttaaaagccttcttttgctctcacatttattttgtgatatacatgataaaatgaaacttgtcttttcattcgtacagcatcctgaactacaagcttccgcaatgcttgcattatgcaggtttatgattattgatgcaagtttctggtgagattaaatcattatcatatagtctatttatcctttacaaaactgaatttatagttaaattgatgcattaaactcaatgtatgccagcgaatccaatcttcagcttctcttcacagttgttgaaaatgcaccgtctgaagttgtacgatcgaattgcaccctttcccttggagacttggctgttcgttttccaaatcttttagaaccttggacagaaaatatgtat

SEQ ID NO: 172223 - DNA, 3001 bp, Arabidopsis thaliana landsberg
atgggctcgggaccggtcaaagattgccacgtaagaaggagaggcccaaaaagaggaaacgcccacgggcttccttgagcaagaatataagtgaggtggttaactcgtgaggtgaatgtgacatcgaagtcaaagccacccggattggagagtcaagtaggccgaaaggtgaagcctaggaagtccggagtcaattcaaattcaaacgtttgaatagttaattcgaaaattgaaacggatacatttaagatagaataattgtgtgtaaatgagaaataaatgtattctttgagtataaattatgggtcaaggaccatgtaaagacacacgcatttttgtgcaaactaactatacacattttcttacgaaactcatagttttctcgatagtcatcaatctattttctagtatatttgtcctcaagaataatccttctcactaaataaataaatacttgagtgtgtgaatccgacatccatattttggcgccgtctgtggggacggaggattcttgagtcgtcagattttttctatatattacatttccgaagtgagccgtaatgtctggagaagatgctaccaaggcttcattagccgaaaccctcaagaccatgcaacaaactatggccgatatggcgcagaagttttcgaatgtgaaaaaaaccgttgaaacactgcaaacaacccatgtatcactcagccaaaatgttagtaccattcagtctcgtgtccgttctttaaatgtagaaaatcctagagttcgaagaactatcttcggatccccacattcccttccgcgaaatgcaacatgtgatcaaacgaccccggatggtacaaacgcgtagaatcaaccagaagatggagaaaggcatcccgaggacgatgaccagttcggtgatcaacacgagcaggaaaacttcgaccagctcgaaaccatgaaagaagtaagccgagagttgaaagaaatgaggtcgaaattccaccaagctacaagctcggagccggatatcaaccgggttatcgaggaggctaggcgaacaccgttcaccctgcgaattgcgagtttgagaatcagaggttctcgaaaactcaacttagaaccatataatggtttggaagatccgaaaggctatctcgcagcttttctaatagccgctggtcgagttgatctaaacgaagccgatgaggacggggtatattgcaaacttttctctgaaaatctgtgtgggcaagccctgatgtggttcactcagttggaaccaggatcggtcaataatttcaaagaactatcggcagtatgtttaaaacaatactcaattctaatggataagagcatttcggacaccaatctctggaatctgtctcaagggccgaatgagacacttctggctttcatcaccaaatttaaaaacgtgctatcaaagctcccaaggatctcacaacagtcggctctgtcggctttgcggaagggattatggcatgattcaaggtttaaggaagatctaatacttcacaaacctgatactattcaagacacactatttcgagcgaataattggatggaagtcaaggatgaaaaagaaagttttgcaaaaaggaatgagcaagtaaaaccagcggtcacttttccgcccaagaaattcgagcccagggaaaaccaagggccaaggaagtttggattgcaaccattcaataacaacgtcggaaagcagtttcaggggaaaggaaggtcaaataccctggtccgagatgaaagctcgtattacgatatacacagagtcactatacatctgagtaaagattgtagtgtccttaagaggcatctcgcggaattatgggccagtggagacctttcaaaattcaacatggagaacttcatcaagaaatatcatgaatcaagggataatctagaggctcaaaactctaaaagaccaagaccggctggcgaagaggaaccaagagcttcaaagggtaaaatcaatgtaatccttggaggctccaaattatgccgtgattctattagtgcaatcaaaaagcatagacgaaatgttttacttaagtcgagcttgagcgaagaaattgactaccaaggcgcttcaatatcatttgatgagaaagacctcatgatgacgctctagacattacgctggacgttgctaacttcgaagtgtaaagaattcttgtcgatactggcagttcggttgatttaatctttctaggaactttggaaagaatgagaattagtcgggcagacatagtggggcctccatctcctttggtggcattcacaagcgagtcggctatgtctcttggaacaatcaagctaccggttctagccggaaagatgtcaaaaatcgtggactttgtcgtttttgataaaccggcagcctacaacatcatcctcgggattgcctggatttatcaaatgaaggcagtcccctctacttatcatcaatgcatcaaatttccaattccaagcggagtagaaacaattcggggagatcaagaagcttcgcggacatgttatctagctagccatcgtttgaagatccaatagcaattaacgaagcctgcgaagaaagaaacaatcccaagattttctagtgggtagaaagtggatgatctcgtgatcgaagtaatgttagaggaggagaaacaagatcggaatcttcgaattggagctactctaaccagggaaataaaagaggccataatagagctttttaagaaaaacaaagcgtcgctctcgtggtcagcaacggatatgcttggcatagatcctagcataatctgccacgagctaaacgtgaatccaagcttcaaaccagtaaaacaaaaaagaagaaaactcagagtggaacgagcaaaggcggtaaatgacaaagtggacaagcttttaaagataggatctataagggaggcccaatccccgaattgggtggcaaacacggtaatggtaaaaaaaaagaatagaaaggacagggtatgcatcaacttcgcg

SEQ ID NO: 172224 - DNA, 542 bp, Arabidopsis thaliana landsberg
acggaaagggccaactcgatcttgatcgatagagatgggcgccgcttcacggatgaactcattcccaatatcggcgaagtgatagatcgccgtgatcccgggtcgggcgagtttctgcatttgccggcccatgtcgtggccgatgcgcgctacctgcccaggatgccgctggttcggtggctggccaggctggcgccgggctggctggtccaagccgcgaccctagaagagctggcgctgaagatcggcgtgccgcccggcgctttggcggatacggtcgcgcgctataacgccctttgcgccacgggcgtcgatagcgatttcggccgcgggcgcacgagagcgcagcaggcggccgataaacggaagcggggcgggttcgagcccatcgtgcagtctccctttatcgccatccgtttcaaccgctcgatcatgagcacaaagggcggcgcgcgcaccgacgcgcgggggcgagcgctgcggcccgatggaagcgtgatcgagggcctggactgtgccgggggatccaggccaaaacccaa

SEQ ID NO: 172225 - DNA, 186 bp, Arabidopsis thaliana landsberg
atggcgaaatctccggtggaagtgaatttgattcctatcgaagctactccggagaacttcgcagagtatggtcaagtcattgaagcctctcgtgatggtgctggtttcggtccccacgacgctcaactagatctctctagaggaaccccacggtactcttttccccgattctcttaaatttcgtta

SEQ ID NO: 172226 - DNA, 1156 bp, Arabidopsis thaliana landsberg
atcttagttaagatattgggcagtaagattttggactcgtttttaaaactatagttttaccaaaatgcatgagtcgtggaagcgaatctagacccacagttttgttttcaattgcatattccttcttataagcattggtttcttatatatttattccaaatttaaagtgctgttctaaaagttttggatactatattctgtaaaccaaaaactaaaaaaataaataaataaaagaatttgtacacatactctaagcctcaaataaaacaactgtagtttaccaaattttgcatccactaatgtaactagactttgatttataatatttttgaacaaagaccaagagagatcttgaacgtggaacaaaagctcaaaatctttcacaaaaaggtgtcttattccacaagtgaactaatggaacagattcttgcaatatcttcattttatttatataatcgacctttaaacatcttggaatatatctacgttattagacactaatctgattgattaaattaactaaagaataaggatcttgtcatatccctctgcttaactctttaatcttgtctatactttttgttcaggaatcttcacggcgggtctcgccctcttcaccgacctaaacgtcctcctaaacctagtctccatcggaacgctcttcgtcttctatatggtcgcaaacgctgttatatttcgccgttacgtaacggtcggatacacggagccatggccaacactctccttcctctgcctattctccataacctcaattttgtttaccttggtctggcaacttgcaccgtcgggcccacctaaatggttcatacttggagctagcacggtcacggctatagccatcgtccagatattccattgtgttgtacctcaagctaggatccctgagttttggggtgtaccgttgatgccgtggactccatgcgtttcgatatttttgaacattttcttgcttggatcattggatgctccttcgtatatcagattcgggttcttctcgggattagtggtgctcgtgtatgtgttttatagtgttcatgcaagctatgatgctgaaggagacgggtctcttgatttcaaagacgtggaaagccttgaaagaattaacagagtgttgagttaattaataaacagaact

SEQ ID NO: 172227 - DNA, 1041 bp, Arabidopsis thaliana landsberg
  unsure (1)..(1041): unsure at all n locations
ctgaagaatgcgttatccatggacctgtccacaataggctaattggaagaataccttatggagtttttaacttacctagcttgagtgctgncttgaatctacgaacaacctattttctggtccaatccctcaagatgtaagtcgtctcgaaagccttgtgagtctagatctctctgataacaagttttttggcaacattccctcatccatcaaagattgccagagcttagagaagctaaacatggctaggaatcatctctttggaccaattcccgatgaactagcagaagtgaaaggtctagagtttctagatctctcgtcaaaccgattttctggttttattcctttgaaatttcaagatttacaagctttgaagttcttgaatctttcattcaacaatcttgaaggacggatcccaaatggtgggattttcaagaatagttcgaaagtttacatggagggaaatccaaagctatgcatccatgcatcttgtcgaaaaactcggatgcagggaaagcttttgaaagtgagcattagtacatgtgtggtaggcgtaattgtgatatgcgtgataacattcttgattctgaaaagaaaaggaagaaagtctataacatcagcatcatcaagttcactcgtcaaggaaccattcatgaatgtctcatatgatgagctcaggagggttactgagaatttcaaccctggaaatcttctcggcattggaagctttgggtcagtattcaaagggataataggaggagttgatgtcgcggtaaaagtcatcgatctcaaggcacaaggatactataaaggctttatcgcagagtgtgaggctttgagaaatgtcaggcacagaaatcttgtgaagctaataacttcttgctcaagcatagacttcaaaaacactgagtttctagctttggtgtatgagtttttgagtaacgggagcttagaagaatggatcaaaggtaagaagctaaactctgatgggagtgttgggttaagtcttgaagaaagagtgaatgtagccatgaacattgc

SEQ ID NO: 172228 - DNA, 1451 bp, Arabidopsis thaliana landsberg
ggatcttttaaggtaatatctttcttcgatcgtgttaaattttgagacaaatcggtgatttggaacaggaaaatcaggaagatgcggatgctattaagaccaggtaatctgtgtatgcgcatttcagtttctgaaaattttcagtgtttaatttgctcgattttgagctgaattctggtcgtttcttcatagtattgtagcctggaggttgataactcccatatgaactattctatggtgggattcgctagaacaaaatgttttttttttttttgtttatccgctcattagtttgatcctgatttgcgttatttttgtcttatcactgcaggaattatattccatacagatacaaaatcatctcgtgttgtcacagtttgtaagaacttatcatctttatctgataatggcgaaaatcatgagaaaccatatacatttgagggtaataggcaaactgttaatgatatttgcaatgttttggagactggtccatggggaccttcagctgagaatactctatctgctctaagttttaaaccacaaccagaatttgtcattggggttttacggaggctgaaagatgttaatcgggctattgagtatttccgttggtatgagagaagaaccgagctgcctcattgtcctgaatcatacaactccttgcttttggtgatggctcgttgtagaaattttgatgctttggaccagattcttggagaaatgagtgttgcaggatttggcccttctgttaacacttgtattgagatggttttgggctgcgttaaggctaataagcttagggaaggttatgatgttgtgcagatgatgaggaagttcaagttccgacctgctttttcagcttacacaactcttatcggtgctttctcggcagttaatcattctgatatgatgttgacactctttcagcaaatgcaggagttaggatatgaaccgaccgttcatctgtttacaacattgattcggggatttgccaaagagggtcgagttgattctgctctatctttacttgatgagatgaagagcagctctcttgatgccgacattgttctttataatgtatgtattgatagctttggtaaagtgggcaaggttgatatggcatggaaattttttcatgagattgaagcgaatggtttaaagcctgatgaagtcacttataccagcatgataggagttctgtgcaaggcaaacagattggatgaagctgtagagatgtttgagcatctagagaagaatagacgggttccttgcacttatgcttacaacacgatgattatgggttatggttcggctggaaaatttgatgaagcatacagtctcctagagagacagagggctaaagggtctataccgagtgtgattgcatataattgcattcttacataaattaaggaaattgggaaaagtggacgaagctttaaagtttcgag

SEQ ID NO: 172229 - DNA, 642 bp, Arabidopsis thaliana landsberg; identical to SEQ ID NO: 65541

SEQ ID NO: 172230 - DNA, 929 bp, Arabidopsis thaliana landsberg
ccaatcttatgaacgaagcagcgattctcgccggaagaagaggaaaagacaagattacccttacagagatcgacgactctatcgatcggatagtcgccggaatggaagggacaaagatgatcgacggtaaaagtaaagcgattgtagcgtaccatgaagtaggacatgcaatttgtgcgtaagtccggttcaatttcaattacttatatttcatgtctccggtttggtcaatttaagtcgaattgaaccgtttcttcttcggtttaggactttgacggagggtcatgatccggttcagaaagttacgttggttcctagaggtcaagcacgtggtctcacgtggttcttaccgggagaagatccgacattggtgtctaaacagcaattgttcgctagaatcgtcggaggactcggaggcagagccgccgaagatgtaatttttggagaaccggagataaccaccggcgctgccggtgatctccagcaagtcactgagatagcaagacaggtacagtaattgaaacaaaattttcataaaccggaaaaaaacggtggattttctaattattcttatggttcagatggtgacgatgtttggtatgtcggaaatcggtccatgggcactaaccgacccagcggttaagcaaaacgatgtggttctacggatgctagcgaggaactcaatgtccgagaaacttgcggaggatattgattcttgcgtgaagaaaataatcggtgacgcttacgaggttgcgaaaaagcacgtgaggaataatagagaagctatagacaagcttgttgatgttttgttggagaaagaaaccttaacgggagacgagtttcgagcaattctgtctgagtatactgatcaaccgttaaataccgatggcgatgttagaattcgaatcaatgacttgattagtgtctaa

SEQ ID NO: 172231 - DNA, 1039 bp, Arabidopsis thaliana landsberg
cttggttggagactatttctactctttctgagactcttcgttttacttactctgagactcttgaaaagtggcctattggtgatcttgcgtttgggatcaattttctcatcaagaggcaggtataacatcgttttaacggtcttaagttctggatttttttctaattatcttgtggtcaaaattgaactttttgtaattgtgtacctaaaaccgtagggacttctacatgttgatcgtgtctttggtggtaaagatagtgtagaacttagaggatcagaagtagccactgaactcaaatatcttttgcacttgttgacattgtgttggcatttttccaagaagtcgtttccgtttttcttagaagagaccggctttacaaaggaaaatgtccttattcatgaacccaaagctggggtaaactttaacaactctcaactcttaggcactttttcaacatagaaattgagaagtttagttttgaattttgcaccatgtagatattgaagccagcttttacggttcttgtcgatcacaatacaaaatattttctgttattgattcgtggaacgcatagcatcaaagataccttgactgctgcaactggagcaatcgtaccgttccatcatactgttgtaaatgaaagaggggtcagcaatttggtcttaggttatgctcattgtggtatggttgctgctgcccggtgtatagctaaacttgccaccccttgtcttctcaagggtcttgagcaatatccagattacaaaatcaaggtacttttgttgcccgttctctaatctttatttcaacttttcctaaaacccattgtgtgagaaaccaaagattgtctctagccctatacattgtaattctcctgcattttgttggcagatcgtagggcactctttgggtggtggaacggctgcacttttaacatatattatgcgggagcagaaaatgctctctacagctacatgtgttacatttgcgccaggtttttcatacaatctagttttcaattatatatgtttatatcttctta

SEQ ID NO: 172232 - DNA, 211 bp, Arabidopsis thaliana landsberg
  unsure (1)..(211): unsure at all n locations
ctccacaccctcaggacgatcatgaaccggcaacggcaatgtctgccctctgcgcagcaccggaggatgccgtggacgatcggcttccgaggttaatggaagggctnnnnnnnnnnnnnnnnngtccagcatttgatcctcacttaaccctcgttggacctttcccttacagacttacgcccagcgtggctatacggatgttcaagcccac

SEQ ID NO: 172233 - DNA, 1902 bp, Arabidopsis thaliana landsberg
  unsure (1)..(1902): unsure at all n locations
ctactctcgaggtctttctcatctacttctcaactcttctccagagaaaactatntgaggaatctcaggttgggaagactagttccaaaagctactagaaccacctccacttaaacgagctggaagtgctccttatcgtattgttcttggagaagtaaaagaaaaggtaaagatcataagcttttcaatcaaagataatataaagattcagatttagcatgtcaaaaccaacagattttcaaatttaatgatttatgatcatagcttgtgaagacaagaagacttcttgaacttcttattgagggtcttccttgtgagtatgaccctaaaaactcctatgaaacatcagatcaacttcttgaaccattgctcctctgttacgaatctctggttagcaatcttgattccatgtgaaacttgtgttaccacaataatccataatcataaaatttaacatcattcgtttttgcagcaatcatcgggtgctagggtactagctgatggacgacttgctgatctgattcgtagagtttctacctttggaatggttttggtgaaactcgacttacgccaggtgattttagtttgttttcttaaatcttcatgctttggtcctctaattcaataatatgtgtgattcaattactaggaagctgcaagacattctgaagctttggatgcaattacaacatacttggatatgggtacttatagtgaatgggatgaagagaagaaattagaatttttgacaagagaactaaaagggaaacgacctcttgttcctcaatgtattaaggtcataatgaaatatctattgcgtaaattacaagaaagagcaatgttatgttatgaaagttgttaaattttatttatttatctgtattttatttatgtaggttggtcctgacgtcaaagaagtattggacacattccgagtcgctgctgaacttggaagtgaatcacttggcgcttacgttatttctatggcttcaaatgtatgatttctcttatgcatgacgactttaaacattttcattaaaacaaaacaatgacatagatttgtttgttacttgcaggcaagtgatgtcctcgctgtggaacttcttcaaaaagatgctcgacttgctttaactagcgaacatggaaaaccatgtcctggtggaacgtgagttcaaatctccaccaagatattacattgtttatagcaatcactttataagtacatacatgagtaacatttttagtagtcttaagatctcttactactatctatttatttgaataggctacgagtggtacctctttttgaaacggtgaatgatttaagagccgctggtccttcgataaggaaattgctctcaatcgattggtatagggaacacatccaaaagaaccacaacggtcaccaagaggtacgttacacgtgaatttaaacatgttaattttgaagggaggttctaagaacttgtaacaatgttacttgtaggtgatggttggatactctgattctggaaaagatgctggacgttttactgcagcatgggaactctacaaagctcaagaaaatgttgttgctgcttgtaatgaatttggaatcaaaataacattatttcatggacgaggaggaagcattggtcgtggtggtggtccaacctatctcgctattcagtcccaaccaccaggctctgtaatggtcagtttccaaactattatttattgatcatttaaaaacatatttaatgattgtattatttgttttgttactaatgtcaatacggggttaaaaatatatatatatatatatatatatatacatttttggtgccatggcactagaccaatgagctattacgctaaaatgtttgaaatggtttgaccagggctctttgcatatcaactgag

SEQ ID NO: 172234 - DNA, 918 bp, Arabidopsis thaliana landsberg
  unsure (1)..(918): unsure at all n locations
ctgtaagctgattttgatgagtgcaactttagatgctgagcttttctcgtcatactttggtggggcaggtgtcatttatattccagtaagtaagaaacatatttgtttatcctctttagaacatttcaagatatttaatcttttgctgagttcaatattccttggatctatatgctctgattaaccccagtgaaactactaatattgtcttcttcactatagggatttacatatccagttcgtagtcatttcctagaggatattnnnnnnnnnnnnnnnnnnnnnnnnnntccatacaatcaaattgatgattatggtcaagaaagaacgtggaagatgaacaaacagatcccaaaaaaacggaagagccaaattacctttgtcgttgaggtatctagaaaaagaatatcagcagcttaactctacatgttaggtcctcatttctttttcccttatgcaaacaggacgcactgagagcagctgacttcaaggagtttagccctgagactcgagagtctttatcttgttggtatcctgattgcattggttttaacctcatagaatttctcctttgcaatatatgtgagaatgagggtcctggtggtattttaatttttttgactgggtgggatgatatcagctctctgaaagaaaaactgcagattcatccgatctttggcaacccagatttggttatgttgcttgcctgccatggttctatggaaacttttgagcaggtgatttataatgtttttctcctgatgacaacacatgctagtgtagtttgcattgtagaatgaccgtcgaatataaccgagttcatctgttgaagagctgataccaatttcttatctttttccctctccgttctttgcaaccagaacctgtattcgaaagataccatatttatcattaacc

SEQ ID NO: 172235 - DNA, 853 bp, Arabidopsis thaliana landsberg; identical to SEQ ID NO: 54431

SEQ ID NO: 172236 - DNA, 521 bp, Arabidopsis thaliana landsberg
aaccgacatccgcttgaccgagcgtggtgggcggcaagatggcggactactacctgcgcgcgcgcagcctgcgcccccgggtccgctttgaactggatgggatcgaatcgattgccaagctggtttccgaggggctgggcgtggcgctgctgccagactgggccagcacgggcgcgccgcccgcgcacatcaaacgctggccgttgcccgagccttgtccggtccgaacggtgggcgcaatctggttgcggtcaggcgtgcgatcggaactgatgcggacgtttgtggaattggccgagtcgcaactcggccggggcgctacagcggcgcagcgcccccgctaggcgatggcgtcttcgccattgcgcgccacgatcacgccgctggacacaaccagccgccggggcgtgctctgcaccacggcctgggcgatacaggcagcatcgaccagcaccagatcggcgcgcgcgctcggcgccaggccgtaatccgcaaacccgcaggcgcgcgcggcagcccgg

SEQ ID NO: 172237 - DNA, 713 bp, Arabidopsis thaliana landsberg
gagacttcagaccttgaggtttgatgtcttgatttgattgatggtacaatgattgaagttcttttaaggccttaagttagatgtttgaagttcagtactgtgaatgagagaatgattaattgttgtggtttctctacaggaattatatgaatgcatccatctgtgatgctctccacctaaccgaaatcgatataagcgtgccatgtgacgcatttgcaccgagagtggatacttctctgtaccgtccgtggtactcatcatttccagttgtggaaaatggaattcggtatagtttcaacacttatgtccgaagaaaagatgccattgttggctccggtgaaaagaaaagtgttgctgagtcagatttgaaggagtactcgtttttgcctaagatggtttttgagaggcatgaggagtctggttacttgaatcatgtacgaaacattatatctagtggagacatgaatgacagtagtactctttctaaatttggctgacctgtgagagctaccatgacaaaccaatcgtatattttctatcaagcgaggcaggcctgtcctttgttcttgattaggatcattcacagaagctggtcaattctgcgcaagactttcccgcttatcacgaccaaggcatgtcttcttttattcacatgtctaatcaaagtagttcacctttatttgatcacagaaaaaaattatgtctggtttttg

SEQ ID NO: 172238 - DNA, 480 bp, Arabidopsis thaliana landsberg
aatcaacgcaagacttcaagaaatcgtcatggtgtcaccgggacggagtgaatctatctccggcgagaacaatacaacccttcccgacggaagcagcggcaagagaactcctccatcgtctccttccggagacaaatctccttcatctaaacgctcaaaggtttctgatcggagactttacttcctcttcaccatctggagcttctcgtttgaaatatttagggcgattttggggatttccgttttcgtttcagttgggagatggcagcggcgcttctaccgatagcagtgaagctccaacctccgaagacgccaagattgccgaaggtccgtcgtcactcttcattattgttcgatctttctgcaattttttttatctcagttttgaaattggattctcaatttcatctttgataaatgatttctaggcaaaacaccgactttgccagatagttctttttcgggatggacatatcgaca

SEQ ID NO: 172239 - DNA, 360 bp, Arabidopsis thaliana landsberg
ttaaccgtactcacctagttgaccctactctaaacaaagcctacgcaaaagaactttaattggcttgtcccaagaaagttgacccaagaaagtcatcattaacattgacccggtaagccccaggaagtttcacaacatctactttaaaaatctgcaacacgtacacggcaaacgactcttcacctctgaccaggttctcttcaccgacaaccgcagcagaccattcgttgatgcttgggctaacgactcacttgccttcaaccgcgcctttgtcatctccatgaaaaattaaaactcggccgcgttggcatcaaaaccagccagcatggaaacatccgtcgcgactgtcgcgtatttaac

SEQ ID NO: 172240 - DNA, 1827 bp, Arabidopsis thaliana landsberg
  unsure (1)..(1827): unsure at all n locations
atgagtagcaacgacgatcagagctccggcgaccgagcccccaccctcgacgacattaagcagctgcttcagcagctatccgagaagactgaccgacagcagcttgccgtgacgtctctctccgacaagttcgtgaccttccaagagcaatgcaacggccaactcgcagcactagcggctaatcattccgaaatcagatcggctcacaacgcatacnnnnnnnnnnnnnnnnnnnnnnnnnnnnnnnnnnnnnnnnnnnnnnnnnnnnnnnnncgactcaacttccagggcaccgtcagtccgagcgtccaaaattcccaggaagcgtctggccagcagactccgccaccaccggttgaagtcggggcgacgtcgactcagaatcctgtcacctcatcttcaccagcaggacttgccgcaatttcagatggaggaatagctcgaactccgtttccgcttgattcctccatcagaatcccaatctccgatcctcgacaagagccaaacgcagtcaattcggagctccaaagccttcaagaccaaatctgggccatgaatgcaagagtccatcaagccactacttcggctcccgaagtggataaggtcatcgaagcaacaaggagaacacctttcaccccaagaatctctaagttgcgcatccgcgaattccgagatttcaagcttcccgtttacagtggaaaaggagatccgaaggagcacttgacttccttccaagtcatcgccggacgggtccccctagaaccgcacgaagaagatgccgggctttgcaaattgttttctgaaaatttgtccggacctgctctcacctggttcacacaactggaagaaggctcgattgataattttaagcaactatcaaccgccttcattaagcagtacggatacttcatcaagagtgacatcactgaagcccatctttggaatctttctcaattcgctgacgaaccacttcggacgtatattactgcgttcaaagaaatcatggttcaaattcctagcttgtccgactcagcagctcagtccgcgctcaagaatggcctttggcacgagtcacgtttccgcgagtccttgacggtaaatcgacctgagacaatccaagatgcacttcatcgagcaacgaactggataaatgcagaagaagaacgagcttttctagctaaaaaaatcagtgctccaaatgctgcaccaaaggtatctcagcccgcaactaccaagaaacctgccgaactccgaaagcccgcagcaggaactttttccgttgagaaagagtcaccgaagtcttctcctaaagcttcgccgtccaaaccccctttctctcctaagggcaaaaacggtgcattaccgagcaacaaatgggtccgagatccgaatgcatattgtgatattcataagatgaacggtcacgcaaccaaggattgcaaagctttaggcaggcttttggcagcgaagtatgcttcgggagaaatttccgaagtggacattacaacaatcgatttggctcagaccgcgaacgaagtttcagagtcaggagacgcttcacctccgagcaaaaagcacaaaagtgatccagctcccgtagttcctaaaggtccgaagaaaatgggcaaggtgattatgggaggttcaaaactttttcgtgattatattagcgcgatcaagccacacgagagaagatctgacactccagttgcaaagaaaccaaagacgggtcgaactgattgcccagaaatatccttttccgaggaagagaccagcgatctggacaaaccgcacgacgatgctctagtaataactcttgacattgcg

SEQ ID NO: 172241 - DNA, 542 bp, Arabidopsis thaliana landsberg
cgaagaaaacatcaagtttcccaccaaacaaaaattacattatttcttggaggattcagagctaattaacgattacgatatggaatggggtactgcgatatttgagctaattttctatgttgttgcagtaactaatcccgcaagagggtgactattctccgggggatgatttgcttgtgtccttgcttatttttcctaatgatgatccgatcgaaaaaaagtatgagattgaagaagaggatttgagtgaagaagaggatcaaattgaagaagcggttcgagcctcgttggaggagaccactaatatcaatttgagacccgcaaacaagctcgtggtcaattctttagccaggaaaatatacaagaagaccactagttctactgaaaggtgcacaatttgtttggaagagtttaacgatggaacaaaagttgtgactttaccttgcggacatgaatccgacgatcagtgtgtcctaacgtggtttgagactaataatgactgtccgctgtgtcgtttcaagttgccatgtgaagatcaatga

SEQ ID NO: 172242 - DNA, 1682 bp, Arabidopsis thaliana landsberg
  unsure (1)..(1682): unsure at all n locations
gcctcttcggggttgttagccgcgaacgggctcatccctgtcttgatcttttccatgaattggccttcaatgctggatatgttgttcattggacccatgtgaactaacggtgtctctccttctctgtacacccacactttgaatttcttctccatctctatatggcttctgctcaatttcataagaaaaagtgttgttactactcgatcataattcataaacacagtgaagtacatttgttcctacagtttttgtttatttaaagttcgtctatgaatttgtgatagataaccgttggtgcaggaattagcacctccgacaataccgatttaaaccaagaaataacatgaataaaatcgagaattcggttgaaccgggaaatcccggttagcctgttaatgggcctgagtcatgagctcgcccgaagattcagatcgacaattgagatcgccgtaggcggtttctgaagtcgtgtgaagagaagacttctattttaaagaagaggatcttgtgaagaatagaagaaatgaagatttaaaccttagataattagaagtttatcatattctgatatcaaggaaacattgtataaatagaggggtttgtcctatattcaatggatctagaacctaatacaaaaacactacttttgtcatagcaaaaacgctagcttctttttcaagcaactttgttcttcttttccgattactttagagctaagagagaagtgaatttatctaaccccttagtataaattcattgtttgatctacagaatcaacatccgtttaaaaggtaaagaagcattcggattggttaagaaggcggctaatgctctcagacagggcgactttcaaaccacatttgatcagaaagaaatgatgaatcttgcactacatgcttacctagaaagaagcattcggattggttaagatgtgcaactctggacacatgtacatttcctaggtgatacgtacaacttgcttacaagcaacattgcagaatcaatgaataatgtggtgtcacatgccaggagttttcctattactcaactattacaggaaataagatccatgatgannnnnnnnnnnnnnnnnnnnnnagccgatgcattaaaaatgactacatctttgacacgtggtgtagagaaaattctgcagatatattttacttcagtcattataacaatgacgagtaaacatgtatataagtttaactatgttattcatttaacaaaaccgcattaagtatgctcagttaatggactatcaagatataaatgttgttaaagctcaagttacaattggaacatctctctatgttttaaatttggtagacaaaaagtgtacatgtcgccggtttgacgtggagaaattgccatgtgcacacgcaattgcagcagctgaaaaatagcaaggtgtatagtgtcatctgtgttatcacaagaactacctgtacaatgcatatgtgaatgctatcatgccaagagagtttgctatatctgttcccgaacatgtggcgacaactgtttgcttacccccatacctcgacaacaaccgggaaggccatagaatttgagaattatacggcattggaggttgctatgcataaaagaagcaaacaaagccatacacttgtggtaattgcaataaagtaggacacaattgtaatacttgtacttca

SEQ ID NO: 172243 - DNA, 346 bp, Arabidopsis thaliana landsberg
atgggggcggcttcatcgagcatcgtccgatccgaaccttttgccggaaagttatgcggcctcgaagatgtgcctgagaactgtataacagcaatgttcatatacatggagccaccggagatctgcctgcttgctagggtaaataaatcatttcatagggcgtcgagatccgatgccgtgtgggaagacaagcttcctagtaactacaagtttctggtccgaagaattcttgaagatcaacaacaagtaggagtaaaagacaaacttatttaccacaagaaagagatctatgcaaggctttgccgaccaaacctcttcgacgccggcacaaaggttctatactttc

SEQ ID NO: 172244 - DNA, 877 bp, Arabidopsis thaliana landsberg
  unsure (1)..(877): unsure at all n locations
atgagggtcacgttctttgcttctttgctcttatttaccaataccatctttataagttttagctttgcaattgcagggataaacaaagagagtcctttgtcaataggacaaactctcagctcctctaatggagtttatgaattgggtttcttcagttttaataactcggaaaatcattatcttggaatctggttcaagggaatcattccccgggtggttgtgtgggtggcttacagagatacgcccgttactagnnnnnnnnnnnnnnnnnnnnnnnnnnnnaatgggagcgcgtgatcttgcttgatgggaaacaagatgttatttggtcaacaggaaaagctttcacatccaacaaatgtcatgcggagctcttagataccggaaattttgttgtaattgatgatgtttcagggaataaattatggcaaagcttcgagcatcttggtaatactatgctgcctcagtcatcattgatgtatgatacttctaatggcaagaagcgtgtgttgactacatggaaaagtaacagcgatccttcgcctggggagttctcactggagattacaccacaaatccccacacaaggccttataagaagaggctcagtaccttactggagatgtggtccttgggcaaaaacaagattctctgggatatctggaattgatgcatcatatgtaagtccattcagcgttgtccaggatacagcagccggcacaggatctttctcttattccacattaagaactgataatctctcatatgttacgctaacaccagaagggaaaatgaagatcctctgggatgatggaaataattggaagcttcactgaatctaacagagaacccatgtgatctatatgtagatcgggcg

SEQ ID NO: 172245 - DNA, 3422 bp, Arabidopsis thaliana landsberg
  unsure (1)..(3422): unsure at all n locations
tcatggaaattcttccacgagnatggtttggagctcgttggggttgctgtcccctccatctttttgggggggcggggagtttgttctccggaatcctagcctcttccgtgtgatcttcttcttggttcggttgatgctttaacaagtattgcccctcattcaccggttcgccttgagcctgtttgaaatcgtccttgcatttattcttcccattcttaggatagtagaccgcctctacttctccagacttgtacttttcgaggaggatgttcagaagatgtttgcactcttccgtggaatgtcctccgaactgatggaaacgaaagtatgaattcttcgagttctttggtttcccgggctgttgaggttgatcgtccgagactattgcggcaaaaaccgttcctcgtttattcgcttttgggtcatagtgttgaggcggctccttgtagacctcccgcgctttttccttggctttgggtggttgggacttccctgccagcttggcgtcttcctcttcaaggaaggcgtatcgtgatgctgtatgtagagcgtcatcaagatctagcggttctctaatcgccaaatatttcctcagttgggacccttggaacagtcccttcctgaaagcggtcatcgcagcttcatccgtgatggtgactttggagagtatttccttgaatcaacctagataggcgttcaatggttcgccgttttcttgagtcatactccaaaggtcggagctagaagctcctggtggaatgaacactcggtattgctttaagaaagcagttgaaaattggatgaagttgtcaatcgagttcgcctcaaatctggagaaccaagttaaagcgtttccaacgagagcttcggtgaagagctggcaacaaccaacatctctcttctcgtccgagaagtgagctttggcgactgtgatcatgaaggaggtcatgtattgcttgggatcgctttcgcccccgtaaattggaattcagagcttcacttgaggaatccgtgtgtgtgtaacccaattagtgaaaggagtcttttgggtttcttcgatcattcgctcgatttccggggccgaactgacacccttatggacttgggatccgatctctctgagctttaggtagatatcgtttatctgtccagcatgatctaaagttggggacctggagatatgaccagatgccattgggtgagacataggcggtctgccgtcttggttggcgggatgaagcgaccctgggaacctggagttgaccctattggattgtgcatctgtgaggtcgaagataagaccgcgcggttgaatcattcttggcggtgttacttcagagttcggacgttgggagatcccttttgctaactcgtcgagccgacggtttgtctctgtgacagagttggacaggtccttggtcacggttgtgagaatggctttgaggtcttccaaggagaaaggtggtggaatgatggcaggggcgataggattcgcctcccgagttgactgatcgtcaaccgttttcacggctaactctagagagctggaattagatgggagcaaaattaatgaacctaaggttcaattaaagcatgtgatgcctattggctcaaaagataactatcccaaaagataaagaaaatacgagaagtaaatgaaaaatttcttcaagaagaaccaagtcctcgtgacgatagagaaaactatgagatttccattaacaatccccatgatggaatcatatgagatagaaatgatattgatgatgaaaatgaaatattctcattttctttatctaaagagatcgatcatgagaatgatgatctagatccaaagacattatgtgaatgccaaaaaaggccagattaggagaaatagaaaaatgccaatcaaattgagttgcactcccttcacaaaagaaatgtctttggacttattttcacagcttctgagatgtttttttgttgggcacaagtgggtattcatgcggaaaagaaatgagaaagatgagatcaaacgatataaagcccgacttggtgcacaaggtttctctcaaaggccaggagttgaatatgaagaaacatatccttcggtcatggatgcaactacattcatgtacttaatgactctttcggtatccaataatctaaatatgtaccttatggatgtagtgacaacttatttatatggatttcttgataatgatatatatatggaaatcctggaagaattaaaagttcttgaggcattacacaaataaaagtctaaagatatatatgtggtaaacttacagtgatcactttacggattaaaacaatctggacgcatgtggtacactcatttaagtgatatctacttaagaaagggtatgttaataatgaaatctgcccttgcgtctttattaagaaatccatttgtgatcattgctgtttatgttgatgacctaaatataattggaagcccaaaagagattgatgatgcacaaaaacatatgaaagaagagtttgaaatgaaagatcttgaaaagacaaaattttgtctcggactccaaattgagcatttcctagaaggtatttttgtgcatcaattcaaaaagatttttaagcgatttaatatggataaagcaaattatttaaatactccaattgtcaatagatctttaaatgttgaaaaggatctatttagaccttgtgaggatgacgaagatttacttggtcccgaaataccttacatgagtgttattggtggacttatgtatcttgcaaattatacaagaccaaatattgcttttactactaatttccttgcaaagtacaattgatctcttactcgaagacattggaatgggacaaaacacatcttccgttattttcaaggtactatggatgtatgattatattatcttagaaacttcgagtttggtctagttggttttgcagatgcagggtatctatcggaccctcataagtttagatcacaaaccggatatgtttttaccattggaggaactgcaatctcgtggctttctcaaaagcaaactatagtcgccacttcattaaactacgcagagataattgctcttcatgaagcgtgtagagaatgtgtttggcttagatccatgactaaccatattcaagaagcaagtgaattaatcatcaaaaaggagctaacaagattatatgaagataatgttgcttgtgttgctcaaataaaagaaggctatatcaagagcgacagaacaaagcatatacctccaagatttttctcttacactcaagaactcgagaataataaggaagtcgacgttcaatacattcgtttaagtgacaatgcaacagatctattcacaaaggcgtttcccacttctacatttagaaagtatgttcagagcattggaatgcgtcatctacgagacctgtga

SEQ ID NO: 172246 - DNA, 782 bp, Arabidopsis thaliana landsberg
agtatcaagaaggaagcttgctggactatctctaacattacagttgggatcacaagtcaaattcaagtgagttatatacattattaacaaataacaatgttcaaaaaccaatatcttttcttataatttaaaaccagaagtcgtatatacatttggattaaacatcgataaatttgttgtgcaggaagtgtttcaggcaggcattattcggcctctgattaacctgcttgagatcggtgaattcgaaattaagaaagaagctgtttgggcaatctctaatgcaacttctggtggcaatcatgaccaaatcaagtacaacaaatctcattgtttctgtctctttttagtttttttttcagtgattcttgttatagaacctcttatatccttgcaggtttctcgtgagccaaggctgcatcagacccctgtgtgatctcctaccgtgtcccgatccaagggttgtcacagtgactttggaaggtctagaaaacattctcaaagtaggtgaagccgagaagaatctaggcaacacaggaaacgataatctgtacgcgcagatgattgaagacgcagatggtttggacaagattgagaatcttcagagtcacgataataatgagatttatgagaaagcagtcaaaatcctggagtcgtattgggctgcagatgacgaggaggaagatattagcggtgtggatgctcctgagaatgttcagtcttccggtttccaattcggaaaccaaagtggtaatgctcctacgggtggattcaacttaagttga

SEQ ID NO: 172247 - DNA, 555 bp, Arabidopsis thaliana landsberg; identical to SEQ ID NO: 78392

SEQ ID NO: 172248 - DNA, 1172 bp, Arabidopsis thaliana landsberg
  unsure (1)..(1172): unsure at all n locations
tttgaaaatgggtgcttcgcatttgcagatgttgcttcattgattttnnnnnnnnnnnnnnnnnngatagtttccttcaatctgagaacgtggttatggacgctgacttcatggatggattgttactagatggttgttggttagagactacagatggatctgagtttcttaacatagctccttcaacttcttctgttagcccttttgatccaacttccttcatgtggtctccaactcaagatacatcagctctttgcacatcaggagttgtatctcagatgtatggtcaggattgtgtagaaagatctagtcttgatgagttcaatggaacaaacgatggtggattggaccaggaggtggtggttcttcggttactgacaggttggttcaagcagttgaccacattaaagatttcccagcagcgagaggctcacttattcagttatgggttccggttaatagaggcggtaagcgagttttgaccacaaaggaacacccttttagccatgatccgttgtgtcaaagacttgcaacactatagagagatctctgtgaattatcacttctctgctgagcaagatgattccaaggctttagctggtttgcctgggagggttttcttggggaagcttcctgaatggactcctgatgttaggtttttcaagagcgaggagtatccgagagtacaccatgctcaggactgcgatgtccgtggaacgctggcgattccggtgtttgaacaaggtagtaagatttgcttgggtgttattgatgttgtaatgaccactgagatggttaaactaagacctgagcttgaaagcatttgcagagcacttcaggtttgtgttcttctctaaagctctcagcttttgctatagaaatggttttctgagagtgatgaatgtgtttcctttttgcaggcagttgatcttaggagcaccgagcttccgattccaccttctctaaaggtaatcaaagaaactacatgagttccttatgttcagcttttgggtataaacaagatcgtttcttctttattcagggatgtgacttatcctacaaagctgccttacctgaaatccgaaacctcttgagatgtgcttgtgagactcataaactacctttagctcagacatgggttttcttgtcaacagcaaaacaaaagcgggtgc

SEQ ID NO: 172249 - DNA, 1605 bp, Arabidopsis thaliana landsberg
aaacttgtattttgggttgacaaggcccaacaaaagcccataaatgaatttcggatggatatatagaagagaaaggacatttcgcctgcatgggtaaaaaactcaacaaatcctgaaaacaacaaattccgaatcacacagcgaggaggaagagaatatggatatgagtgtgattatgaggtatggggatgataaaaccgagaagttatgccttgaagtggaggattactgggctcgagtggatgaatccgatgtatgtaattctttcattttcttaattgttaatttagaggattcttacctttggggttgttcaagatgacgactgttgttgcatgttgcttacatttgtcacaaagattaactgtaaccctgaccctagatctgcttaatctatgattgttctgtttttttgaacgaaaatttctcttcttgcaaagtgatttattattaattttttcgtaattagggtttcgatgtcgagggaatccaagtaccaccagggggcactccattgatacactacgactgtcatctgcccaatagtaggcatcctgatcctgtattggtcaagctttatgctagtgcggggcttcatcgctacaatatgtggcaggtaaaaaaaactccatcgtggtaacagaatgcttgtgtacatacatgacatttaattgctctctttttctcaggggacgaacttcaagctcgttgatgtaatgaaattcaacaagttaatgatgcatttgtcccctttctacataactttacttgcccaagatccagttagccgttcgcagcaaacctttcaggttcaagttgatgaacactgtcttagcactatggatttgacggttctaattgctagacctaaaggtaagtaaacattgttgttgttgttgttgttcttcttcttctatatatatacaagtagactataaaagtaggtagtctcatcacttgctgataaatcatgcatgttgcatatatagctgtgtccaccaatgagtccgtcttagctccgcagagtttttcagtggaagaatcgcctgagtggccgtcagatttcaatgatggaaaacgattctaccgggtaagacacagcatcatcagttttgttttgttcatgatcgattataagcaggactactgatatgtttttttattatttttattattgcttttgcatttaggtgaaggaatctgagttgcgtaacaatgattggatttctctatatttgcaacttgtactcgtatcacatgataggatgagaatctcagatgtaagtcttgactttttctttaattgtatcttttttgcatatcaatgacacaccatgagttggtgacaatcaataacttttggttttgtttctcaactgttgttggtgcagagcgatctgtccaagctgaagattgtggaagcggtgatagaaaccaaggacgatatgctgccgccgaatgagagactactcaatgccaaaactgcaattgtgtacataacttttaagggcttcaccaagtgtcggattggtgatgagcatactgaacgcaacactatagttagaagaatattcgatgaggatacaggacacctttctatcaagg

SEQ ID NO: 172250 - DNA, 468 bp, Arabidopsis thaliana landsberg
caaaaaccggtgttaaatttttttgaatatgttttggaacgggcttgtattgtcctttaatgtttaatgatcgattgtatttgtagatccaaacagtggacactggtggttgacttgcgaaaacaacgtgttgggttattggccggtacactattcagctacctaaaacacagcgccacagctgtgcagtggggtggagaagtacatagccctaacgtagtattgaagaagccacacacgacaaccgcaatggggagtggacaatgggcatcttacatctgggccgaagcttgtttccacaccaaccttaggatcaaggactattccatgcagctcaaatacccccagtatctatccgagtatgctgatgagtacaactgttattctacactgctccaccggaaaacatatatgtcagagccccacttttacttcggaggacctggccggaactctcgttgtccttaa

SEQ ID NO: 172251 - DNA, 541 bp, Arabidopsis thaliana landsberg
tagaactaatcatgggtcatcttgaaacatctttccagattgtcctcttccgttccgtctgcagctcatggcggtctgttgtacctccactagatcattcccgctgcttaggtatcaaaactcatgatatatcgttcaatggcggcttttcgttcaacggtcgaccaacggatgaatattgcacactaaaaaagattccaatatatctcgtgaaattctggactccgtttggtgatgattatctattggaagagatgcgtgaaagaaaggatggggaaccgaagttattgttgtcgcccttgtcatctaatggtatcaagtatggaatgggaataaataaagtgttgttcaactctcttacctcaccaattatcccatttggacaatactaccaggttggtgttcaaaagctcatattagtttttgaaacttttatcttttctttttgataatttttgccacttatatagtcatttaaccaccaattcaaattttttttatctatttagatttctgctgcaaataacctaccactaaaact

SEQ ID NO: 172252 - DNA, 503 bp, Arabidopsis thaliana landsberg
aagcaaagcatctgctactacagaagctttgtagattcgagcaacttgcgggtttagatcccatggaactcgagaaacgaatgtcggatcaagagaccgaggaggaggaggaggaggaagaagaagagatgaaaagtctttatcattgtgagattataactcagagagttcttaaaacatactttgaagagatggtagaagttccggaaggcgtagaagcattgatctcagaccttgcagcagaggaattgccaagcgacatcgacggtgaagctgaagccgcgattgtagccaaaagggtatgcgagagattgagatcttggagagatgtggagtcaaacacaatcgatatgatggtcgaacatgatttcagaacagagagattgggattatggagctcaaagaacgacgcagatgtctcagagacggttttggatatcgagtttgagatttttgaggatttggttgaagaattatcagaagacattggcggaaaccggtga

SEQ ID NO: 172253 - DNA, 332 bp, Arabidopsis thaliana landsberg
  unsure (1)..(332): unsure at all n locations
ctttctctttctagcggcgaagccatgggttatccggtgggctacactgagctcctcctcccaagaatcttccttcacttactctctctcttaggcttaatacgaacactcatagacacgggttttcggatattgggtctacccgactttctcgaatccgacccggtttcatcgtcatcgtcatggctggaaccaccgtatatgtccacggcggcgcatcatcaccaagaaagctcattttctttccaatggcngcgaggctagcntgagaaatcttgcccgcatcagattcttcgaactaactcgaccccgattcggatcccgatcccgat

SEQ ID NO: 172254 - DNA, 615 bp, Arabidopsis thaliana landsberg
ttgaattttgcaaacgtcttttgaccaaacgtagagtttttagaagtcgttgcagaaacttcctacggatgcagttatttcttgaacctgcataaagccacaagccatcctgtccttgtttacatgccggctggtcagctcgctagagacatcgagaaaaagtccgatgaagcagctgcaaattttgccttttcgcaactacagaaaattcttccagatgcctcttcaccggtactgctccaaactaccttttctttcacctgagttgctatattgttttgccaatgtacaagctctaatggggttttctgttggcagataaattatttggtatcaaggtggggatcagacatcaattcaatgggatcatatagctatgacattgtgaacaaacctcacgacctctatgagagactgagagtgccattggataatctattctttgcgggggaagccactagctcgagctacccgggatcagttcacggtgcttattcaaccggagtgctggcagctgaagactgcaggatgcgtgtgcttgagcgctatggagagctcgaacatgagatggaagaggaagctcctgcttctgtccctcttctgatctcccgtatg

SEQ ID NO: 172255 - DNA, 919 bp, Arabidopsis thaliana landsberg
atgaagttcatggaattagggtttcgacctgacacattctacactgtggaatcagtaaggtagaagacagaaccaatcgtctctctcaaaatttcgaatcctctgttttcaatcaatctcagatcttttgactctgttttgttttaaaattcccaggtctgtgtcttctgatttattgaatgatcttgtaatccaagtcaaatccacaaaataccttcttcacaaggtttttttttcttgttttgtgttgtttcttataacatttcatgttttgattctgatttttttgtgtttcttggcaatgcaatatacagtttccgatgttatccaaatgcttaacgttaaagaacttagtctctttacaagaaacagaaacctcttaagaacagcaagtcattcaacttgttgattttcccggtgaaacagaagcttttgagctttgtgctaagttctgttacggcatcacaatcactctctgtgctcacaatgtagtcgcggtacgttgcgcacagagtatctagggatgacggaagaagtggagctcggagagagggagaatcttgttcagagacttgaacttttcttgactacttgtgtgttcaagagttggagagattcttatgttactcttcagactacaaaggttttgcctttatggtctgaagatcttgggatcacaaaccgatgcatcgaggcgattgctaacggtgtaactgtatcccccggagaggatttttcgacacaattggagacgggtttgttgagaaccgatcaaggataagaagagatgaaatcttgtgtaatggtggaggaggaagtaaggcagagagtttgaggtggtggggtgaagatttagctgaattgggtttagatctttaccggagaacaatggtggcgataaaatcacacaccggaagat

SEQ ID NO: 172256 - DNA, 452 bp, Arabidopsis thaliana landsberg
atggcgtatcaccaaccgtacgatcctttctacgtctatcaacttcattctcatcctcatcatcttccgccgcagctgccactgctcgccgacgaacctggggcgattaacactctctttgtctctggcttgcctaatgacgttaaggctcgtgagatccacaatctcttccgtcgtcgtcatggattcgaatcttgtcagctcaagtacactggacgcggtgaccaggtttgtaaaaatctccaatttctgttttttttattcccatttttagaaaagctgtatactttgtgattctatcgatgtttaagctttctgaagttactatcttcaggttgtggcatttgcaacattcacgagtcatagattcgccttggctgcaatgaatgagctaaatgtaagatcacttcgatcgaattgtgtgacctactgtacattgtgtacttgatgtg

SEQ ID NO: 172257 - DNA, 661 bp, Arabidopsis thaliana landsberg
aatgttatcttcttcattgtctgtttggacacttgttgctctaagccaacatcaagattggcatatcaaagcaagagacgagatttctcaggccttcggtaacaacgaacccgatttcgaagggctaagccacctgaaagtcgtaagtatacattttcaaaagtgactaaaccacattataactaaaaaaagggttgttttttttaacaacttctttggctattatcattaggtaacaatgatcctccatgaagttctacgactctattcaccagcttacttcacatgtcggataactaaacaagaagtgaagctagagagattctctttacctgaaggagttgtagtaacaataccaatgctcttggtgcaccatgattctgatctttggggagacgatgtgaaagagtttaagcccgagagattcgccaatggcgtggcgggtgcaaccaaaggaagactctccttgttgccatttagctcgggccctcggacttgtatcggtcagaacttttcaatgttgcaagctaaactcttcttggcaatggtacttcaaaggttcagtgttgaactctctccatcgtatactcatgctcctttcccagctgcaactacatttccacaacatggagctcatttgatcatccgaaaactgtaggag

SEQ ID NO: 172258 - DNA, 716 bp, Arabidopsis thaliana landsberg
actttgaaatgcagtagaatggctgagaatacttcattgtagtttaaggtgggcttcttgtggatgtgggttggggaagcggtttgttttcccgcaaatttgcgcagtctggcaaatactctggcgtgattgctttagactactctgaaaacatgcttcgtcagtgcaaagaattcattaaaaatgataatactttcgacaactcaactaatatagctgttgtgagagcagacgtttctcgcctccctttcccttcgggttctgttgacgcggttcatgctggtgcagccttgcactgttggccttctcctacaaatgctgtaagttcttgaatatgtcagagcttcatgagtgtatgcaaatggtcacttgttaaatttgtctttgtgttgttgttttcaagattgctgagatctgtcgtgttctaagaagcggaggtgtgtttgtcgggacaacgtttctcagatacagtccttcgactccttggattattcgtcctttccaatcggtaaagaaaatttataatgatcaaaagtggctatttctatgcatagattttgatctttatacattttgcatttttgcagagaattctgcagagctacaattacttgatgcaggatgagatcaaggatgtgtgcacatcatgtggtctcacagattatgaagattatattcaggattcttttatcatgtttactgctcgcaagccctag

SEQ ID NO: 172259 - DNA, 791 bp, Arabidopsis thaliana landsberg
catgatcagcttgcaatgttacaaagggtgagttccattatacgagtaataaatattactatactaaagcaatttcattaattatcttgttaatttgtgcatgcgttgatctccagtgctaccctctgattggactcccgatcctgtgaagaattttgctgctgatgatgatgatgaggaaaccaaagcaaaggatgcaacaatggttctgccttttgtgaagaagtcaccggtttggaagatatatgaatcaatggaggtcttcaaaagagtaccacaaagtcctcatttcagcccattgtttgaagcaaaagaagatttccgtgaaggttttgctttgggtatgatggtgactttttctggggtattagaaaaagtagaagatctgaaaaccgacgttcccatacgccaactaaatagccttaaagactcatttaccgagctagagaagcatggattcacggtcacagcgcctttatctcggatcgccaagctgttagctctcaaagatagacaactaaaaatattggaggaactaaaagttttcgacaaagagatgaaagatgaatctagcaaaaagcataaagctgagcaagagtttggtgagatggaacgcaagattcttgaagtgaaaaacaaggttctggagctgcagaagcaagaagcggctctggaaaaacagaaggatgcaacctatgaaaagatatgtaaaatggagtcacgtgcaagagatcttggtgtagagcttgaagatgtggagtgagttggagacaattctgtcagctccctgg

SEQ ID NO: 172260 - DNA, 1198 bp, Arabidopsis thaliana landsberg
atggcaaacttagactgcagcaatttagaaaaggggaacttgaatatggcttctcctcataaaatgagacctcaagaaaatgaaaaccttgataatgacagaaacgctagctttccaagcttcgagtttcaccaagctcgtggtgagcgttcgaatcagaatcatggctcaagaggatatccttcaagacaaatgccatctaaatggaatgatgctgagaagtggataatgagcagacagaacatggtgatgaggaagaacggtcaagggaaccgaatacctgtgagagttgtgcctgataatgcaggttacgagcataacaaatctaggatggatctgtgccaatcctcacaagttgatgggtttgagaagttccctaatgttgttccctcggcgccacatcctattctaactcaagagtatggaggagactcgttgattgaccaatccacacaaagcaatgatcttgcggattcatcacatgatcatacaacaggtaaagaattagactagtttttttgtgaaattgttttaattattagagctttcggagcttgacaagataagtgtttatatatgtgaaggtggtcctgcgattcgttcggtatgtatgagagatatgggaaccgaaatgacacctataccgagtcaagaaccttcaagatctgtgacaccagttggtgcaacaactcctcttcgtagcccgacttcatctctcccttctactcctagaggtggccaaccagaggaatcttctatgtcgaaaaacacaagaagagaactatctgaggaggaagagaaagcgaagacgcgaagagagattgtagctcttggagttcagctagggaagatgaacatcgccgcttgggcaagtaaagaagaagaggagaacaagaaaaacaatggagatgcagaggaggcacagaagattgagtttgaaaaacgagcgactgcatgggaagaagcagagaaatccaaacataatgcgaggtctgtctgctcttatgacctaaaccaaatatgttgcatgtccagtggagaaacatagtgtaaaagacttaaaatgtgttgttcttttctttctgaaactcaaaattgtttaggtataagcgtgaggaaatcagaatccaagcttgggaaagtcaggagaaagccaaactcgaagcagaaatgcgacgtatagagagtatgaaaggcg

SEQ ID NO: 172261 - DNA, 1619 bp, Arabidopsis thaliana landsberg; identical to SEQ ID NO: 59806

SEQ ID NO: 172262 - DNA, 667 bp, Arabidopsis thaliana landsberg
ttgggttactgctaatgaagggtgtgttcttgtggccgctggggcgcatgctgggcggcctgaagcggcggaatgcactgcgcttgacggtgctgctggccagtggcggcgagttcgccttcgtggtgctcaagcaggcgcaggaacagcagctgattggcgcgcggcaggccggagcgctggtgctggcgattaccttgtcgatggcattgaccccgttgctggtggcgctgctggccaagctgctgggcaacgacaaggcgaagaagccggaacgcgcctacgacaccatcgacacgggtgccccgcgggtgatcatcgccggcttcggccgcatgggtcaggtggtggggcgcatcctgcgtgccgaaggcattccgttcgtggcactggaccattccatcgaacagatggacatggtgcgccgcttcggcaactggaacgacatcttctacggcgaccccgcgcggcccgaactgttgcgcgcggcgcaggcggacaaggccgaggtgttcgtgctggccagcgacgaccccgagtccagcctgcgcgtggcgcgcgtggtacgccggcaatatccgcatctgaagattgtggcgcgcgcacgcaaccgccagcacgtgtggcggctgatgcacatgggcattgatgacccagtgcaggagac

SEQ ID NO: 172263 - DNA, 423 bp, Arabidopsis thaliana landsberg
ttatactcattcgagtacttctttgacaacaaaagctgtagatcttctattcatcagtacaagcctgggaagactcgatacgctcatttccgtcaaggcaacactcttttagcagattctggttggcattgcagtttctgtttcaggcacatcagtgagtttatattcaagatgaaagcgtacagtcacaatgaccgggtcagattctctcattatctaaacccaaaaagaatacaagatgtgatctgtaaaggaactgatctgttcgatatgcttcctgaagagtatacgttcagggaaatcatcgggaaactaggtccaatcccgcggtcttattccgcagttcatctaccagctcatctgatagaaaaagctgagagttacaaatacttgttacctgggaactgcataagggaaagtggc

SEQ ID NO: 172264 - DNA, 2084 bp, Arabidopsis thaliana landsberg
catgctccacgcgttgatatctgcaaattctttgaagagtttggatttaagtgtccagagagaaaaggcgttgctgactttctccaagaggtatggctgtaaatttgatcattttccctatctatttgtaatcatcacatgcttctgctacagattatgtcgaaaaaggaccaagaacaatattggtgccacagagacaagccctacagttatatatctgttgattccttctctcttatgggggaaggaaagataatttaccatgctccacgcgctgatatctgcagattctttgaagagtttggatttaagtgtccagagagaaaaggcgttgctgactttctccaagaggtatggctgtaaatttgatcattttccctatctatttgtaatcatcacatgcttctgctacagattatgtcgaaaaaggaccaagaacaatattggtgccacagagacaagccctacagttatatatctgttgattccttcattaataagtttaaagaatcaaatcttgggttgctgctaaaggaagaactgtcaaagccgtttaataagtcccagactcgcaaggatggtttatgttataaaaaatactcacttagtaactgggatatgcttaaagcttgctcaaggagagaatttcttctgatgaaacgtaactctttcgtttacgtattcaaatctggacttgtaagttgtatttactttgccaaaaagctttacttatttttaccgatacatattaaacccatttacctttttctgcagttaattttcattggattcattgcaatgactgtttatctacggactgggtctacaagagattctcttcatgctaattatcttatgggttctttgttcttctctctctttaaacttcttgctgatggactaccagaactcacattgacagtctcgagaattgcggtgttctgcaaacaaaaagagttatacttttatcctgcttgggcatatgctattccttctgctattttaaagataccgatttcatttcttgaatcattcctctggacaatgttgacatattatgtcattggttacagtcctgaggcgggaaggtactaatttcgaacatgcaaaaagaaaccaaatttaatattttgctttctgctaaacaaaaatattgtttctttccttcaggttctttcgccaggtcttgatcttatttgctctacacctttcgtgtatatcgatgttccgtgctataggtgctgtctttcgagattttgatgttgccactaccattggaagcatctctatagtgcttctctcagtattcggaggatttattgttcgaaaacgtaagtttttaacctgtaacttgaactgtagtaactcggaggattcactgtaatggtgccctgttacttttcagcctcaatgccttcttggcttgagtggggattctggctttctccattgtcatatgctgagattggtctaactgcaaatgaatttttcgctccacggtgggggaaggtaatgaattcttcagaaacctttctcattagataattttttagtctattattgatccttatcatctttgcattaccattagataacatctgaaaacagaactttgggggaagaagttctagatgctcgcgggttgaactttggaaatcaatcttactggaatgcatttggcgctttgattggcttcacactcttcttcaatactgtttttgcactggccttgacctttctgaagagtaagttcacaagagataagaatgtgacttaatcatgttagattataatcaatgagaattgatgttttttctgcaacttcagcttcacagaggtctcgtgtgattgtttctcatgaaaagaacactcaaagctcagagaatgattctaaaattgcttcccgtttcaaaaatgcattgcctttcgaacctctaactttcacatttcaagacgtacaatatattattgagactccccaggtaaagactaaagagtatgcaagatcagtgcaagttttcttgaatccttttaaacaagatagagaattataatgtgtggctatgatttatgtgttaaaggga

SEQ ID NO: 172265 - DNA, 921 bp, Arabidopsis thaliana landsberg
actcatctatgacaagctgctccagtaaagatcttgagaacactcatgtgactgattgtagaatcaggaggaccttagaaggaatcatcagagagttggatgattattttcttaaagcatcgggttgcgagaaggagatagctgtgatagtagacatcaacagtagggatactgttgatcctttcaggtaccaggaaacaagaagtaagtgactgactgagatttttaatcttttttgatgttggaccaactacagattttgatttgtgttcataagcataaacaatttgttgtacatattataatacttatgtggctcgcagggaagagaagcagctcggcaaaggtattcagtgcattgtcatggagttggtcttcaaagtctcttcagttgggcaaagatgctacaacaagcgggactgttgaaccctgtaggcctggagctcactgcagcacacttgagaagctatacacagctgagaagaaactttaccagctagtcagagtaagagctagctgatctaactctttcggtgttagattatcaagttcaacaatgaaatactaagttttattctctgaccagaacaaagagattgccaaagtggagcatgagaggaagtctgcattactgcaaaagcaagatggggaaacctatgatttgagcaaaatggagaaagcacgcttgtctttggagagtttggaaaccgagatacagcgtctagaagattccataactacaacacgctcatgtttgcttaacttgatcaatgatgagctgtatccgcagctagttgctttaacttcagggtaaactccacaaccactcttatgctgaccatctcattgaaaagcattttttttatgcgatttgcatatgtcgcttctcaagattgatttggtcttaatatgtgcaggcta

SEQ ID NO: 172266 - DNA, 457 bp, Arabidopsis thaliana landsberg
catggtggtgtgctatagcctgttctatacggcgaccgtattctgcctgagctacggcaccgctaccttgcacatcccgcgtacgcagtttctcgccatgctgtgcggtgccgtatgctggatggcgctggcgacgccgttatcggccaaagccagcgatcgctggggccggcgtccggtgctgctggtcgcggccgccgcggcgatacttgctggtttcatgctggcgccgatgctggccagtgggtcgacgatgctgatcgcgctatttctttgcttctcgctgtttgtcatgggcgccggtttcgcgcccatgggcgcgctcctgccagaattatttccggtggccgtgcgttacagcggcgccggcatggcctaccagctgggcggcatcctcggcgcatcgctggaaccgtatatttcgcaattgctggtgacgcgcggcgggttgtcctgg

SEQ ID NO: 172267 - DNA, 527 bp, Arabidopsis thaliana landsberg
tgacttctttctcatatggctttaaattagcccatctctataattttactattggtgagggtttataagcccattaagtttcggcccactcttgacgttaatctgacgtcagcttgatctttccggcggatttctcaaatcgacaaattcgttttcatcggttgtttcagacgtaatttccaaaaatgaaggctgagtctagcaacgagtctttcataatcgggcagcgagtccactctctcaacgattcgcgtcgtgtgggcaccgtgaaatacgtcggagatgtggagggatactccggaacttggatcggcgttgattgggatcaagacggtgatggaaaacataacggttccgtcaatggcgttttctactttaacggtcgttctcagagctcagcttcatttgttcgttcccagaatcttagtcgcggtatcacattgcttcaagctttggagcttagatacagaacaatttcaactaaggacgaagaaggtcttgaaagagaatgttatattttagtttca

SEQ ID NO: 172268 - DNA, 769 bp, Arabidopsis thaliana landsberg
  unsure (1)..(769): unsure at all n locations
ttctaatgtntgcagactgatgttttgttttccaggttttcttggatgtgatagagagtgtaaatatccttgtgaacagtaatgggcaaattgtcaggtctgatgtcgttggagctttgaagatgcgaacatacttgaggtgcgttctctagtgtccctagttaaccaacgcatttaaaatcaaaagtccctcctctttgactctctgcttctttatccatgttattacagtggaatgccagagtgtaagctaggcttgaatgacagaatattgttggaggcacagggacgagcaataaaaggaaaagccattgatttggaggacatcaaatttcatcagtacgttaatctcttgcaactttaaacattctttgacagtcactctatcgaggccaatttttttactaactcgaaaaattattgaatacttgagtttttacacgtctctttcttcaaaatgtaggtgtgttcgattagcccgttttgagaacgacaggacaatatcattcataccacctgatggatcttttgatcttatgacgtatagactcagtactcaggttttagaatgtgtaatattgcagaaatggttttgtccccttcttaaacgaattatatcatgatatatcttattttcgcataatacttgttcaggtaaagccttttatatgggtggaagcgcatatacacagcccttccagaagtcgtgttgagatgcaagtaaaaaatagaagccaattcaaggacacaaggtaagtaccagatgttg

SEQ ID NO: 172269 - DNA, 1768 bp, Arabidopsis thaliana landsberg
  unsure (1)..(1768): unsure at all n locations
agaatgtggtgtttgtcctgctttaaaccttccactaaacatgatccctctgaggtaattcaatttatttggctctttcttggtttcgtgaagattgcttaacttttgacgtctgaaacttgcaggaacgttttgaagaagaaacaaatatcgttacaggtatttctctgtatgaagatgtcatcttacgtcagagaagatcagaagctgatcagatagaatgggctattcaagatagcttcaacccgcaagaaacttctcgttgtcgtcagcgagaggaggatgatcagatagcgcgtggtttgcaatatgtggaagaaactgagcttgataaatcagttgtggacgaagaagatcagcagctttctaagattgttgaggagagtttgaaggagaaaggcaaaagtaagcaatctgaagatgatcagatagcgcttggtttgcaatacgtggaagaaactgagcttaataaatcagttgtggacgaagaagatcagcagctttctaagattgttgaggagagtttgaaggagaaaggcaaaagtaagcaatttgaagatgatcaagtggaaaatgatgaacagcaagctctgatggttcaggagagtctatacatggtggagctttctgctcaacttgaagaagataaaaacatttcaacaatacctccgctgaatgaagatgcgcagcttcagaaggttatttgggaaagcgcgaagggtaaaggccaaatagagcatttcaaagatccagtggaagaagatggaaatcttccaagggtagatctcaacgttaaccatcctcataggtaagtgtttgtctattactttggcggtttccttgcatgctttattacaagatagaaatgtcctgacctggttaagattatttcacttgtagcatatgtgatggttgcaaatctgcgattgaatatggaagatctgttcatgccttgggtgttaattggcatcctgaatgtttctgttgtcgttattgcgacaaaccaatcgctatgcacgaggtttagaaccgtatatgaaagcttccttttttatagtgattggtactttaatatactaattgagttgctcattatgttttctgatgcaacatctaactcctgagggctgcttagttttcaaacacaaaagggaggtgtcatataacctgctacgagcgtagtcacccaaactgccatgtctgcaaaaagaaggtaacttcccattggggtctatgagttgaaagttaaataattggtatcttataacagtttacgacttatgtataatctgttgtacttttcctggcgatgatggatcttaatgtaattgtattcagtttcctggtagaaagtataaagaacatcccttctggaaggaaaagtactgcccttttcatgaagttgatggaactcccaagtgttgcagttgtgaaagattagaggtgggtttactttcacttcaatatgaatattggcaaatgagcatgagataaagaatcaaccgccatttcaaaagaagaagtaaagctttctcatgattttttttttgtttgcagccctggggaacgaagtatgtaatgcttgctgacaatcggtggctatgcgtaaaatgtatggaatgcgcggttatggatacttatgagtgccaaccattgcactttgaaatccgtgaattcttcggaagcttaaacatgaaggttgagaaagaattccctcttcttttggtggagaaagaannnnnnnnnnnnnnnnnnnnnnnngaaaaga

SEQ ID NO: 172270 - DNA, 649 bp, Arabidopsis thaliana landsberg
ttattgggtatcatttcatgaaactgacatggagatttatatatcgacagttcaaattttgggtcgaccttactagaccaaagggtaacgttttcatgattgacgcaagagatctttccattgcatggtcagaggactccaaccattggacctggctcactctcgcaaaccaaaattcaaagtaaaacttctcttaaaagtatttcttatctaaattgagagaaatatctcaaatttgtataactcttttagtgacaagcaaaataattatcacgaaaatatataccttataacgataattttctagatttattgtctaatactaagcacaatactttccagtgaatcagtgatggaaattgcatttttgaaaagtgctagctggctagacgtagctggaaagtttgacactcgatatttgaccccgaggacaaggtacgaggtggtgttcgtagtgaagttagaatacacattcgaatgggagacactagtgaagctaaagctagacttgccgaatacttgggagaaaccgcaagaacagagtgtggacatgtttgactacataagtgaccaatggctcgatattccggttggagagttcaccacatcgaagaaaaacgtcggggaaatctcttatgcaatgtacgga

SEQ ID NO: 172271 - DNA, 386 bp, Arabidopsis thaliana landsberg
atgcataagagttgggtatggctgccaaggaatagcattgagtacgagaaaggagcaacaacatttgtttacgcatcatcgagacgtttgggagatccttctgaaatgttttgtccatgtacggattgccggaatctgtgtcatcaaccaaatgatactgttttggagcatctggttattaagggaatggatcataaatacaagagaaatggatgctggagtaagcatggggagatacgagctgataagttagaagttcagcctagtagtgaatttggagcttatgagctgataagaacaacttattttgatggagaagaccattctgattctcagaataagaatgaagatgatagtaaggagccatcaactaaagaagaatctga

SEQ ID NO: 172272 - DNA, 552 bp, Arabidopsis thaliana landsberg
ttattttgcacacttaggcatttaggatcatcttgcatacatattgcatgttttggtgtgttttcaggtgcagaaggagcttaaaagcattctactcaatccattcactcgatccaggcagccatagaggaggcagcaattcactcgaccctcttactcgatcaaggcaacctcagaagaagcagcagatcaatctactcgccccttctactcgatcctctattcgacccatttactcgatcaagggcagcctactctacaagacttgttgatcgttcaaagcgtctcctgatcctcctcattccccactcaaccagacatttgagcatacggataggagaggaagaagcaactactcgaccaattgatcactccgagcatggatgcaaacgcgaagactttgcagcatcctctgtactcaatctgcaagatcgaacattcgtgcataccgtcttaagtatcttgtcttctagtgtatctaatgatattaacattatagtatatataggtcactttgggatttgtccaaaggaccaagcttttatctcttag

SEQ ID NO: 172273 - DNA, 419 bp, Arabidopsis thaliana landsberg
atggctttggagaaagaggaagaagcgtcacaaaacgcaccgttttgtgtccttgatgggctctattgcgaggaagaaaccgggtttgtggaggaagatcttgatgacgacggagatttagattttctcgagaaatctgatgagagtgttgtaaagtttcagtttttacctcttttggatatgttcttatgggatgacgatgagattctgagtttgatttcaaaggaaaacgaaacgaatccatgttttggggaacaaatcttagatggctttttggtttcttgtaggaaagaggctttagattgggttcttagggttaaatctcattatgggcctacttccttgacggctatacttgctgtgaaaaacttcaataggtttatgacaagtataaagcttcagactgatgagccatggat

SEQ ID NO: 172274 - DNA, 699 bp, Arabidopsis thaliana landsberg
atgaattttcgtcgttttcttcttttataattttaatatttgctttggtttgactgtaattgacgattactgtatcatttgagcttaattatacgcttaacatcgctaaagtggtaattatgtatagaagctttacattgtgatgactgttgttggttgttataggagcaactctaagcaaagggtttaatagagcgcttgggacattatcagctggaggtcttgctcttggaatggctgagctttccactttattcggtgactgggaagagatcttctgcactcttagtatcttctgcattggtatgttaacaacatcttcatctacatgaatcatttttggttttctctctgcttacgtatgtttttactgtggtggtctcttgtttcagggtttcttgcaactttcatgaaactatacccgtcgatgaaagcttatgaatacgggttccgggttttcttgcttacgtattgctacattctgatttctgggttcagaactgggcagtttatagaagtggctatctctcggtttctgcttatagctcttggtgctggtgttagtttaggtgttaatatgtttatctatcctatatgggctggagaggatctctcatacccttgtcgtgaagaattttatgaataatgaaaattcccttgaaggttagtataacaaaggttttggcttttctgcgtctc

SEQ ID NO: 172275 - DNA, 617 bp, Arabidopsis thaliana landsberg
gaattgtataaggtctcatcgatcggatttgctccacggagcacaggaggtaataaagtctctttactcaaaacacacacaccaaaacagtactggctagatgaattaagactcatgttggggttatatgtgttttgtcacagtacgcacttggagcatgcattgttcagtctgctgatatgaaggcattgtgccactcgaaaggcagaaccttcttcaaagacggatgccccagcaagttcgggtacctggccattgtcttcctggcctttacatctttgtgtacgcgcccggtatgggcacagttccatggattgtcaactcagagatctatcttttcggtacaagggctcgcgggaggaatcgctgcagtctcaaactggatgtcaaatctcgtagtgagtgagacgttcctgacattgacgaacgcagtcgggtcatcgggaacattccttctatttgcagggtcatccgcagtcgggctgttcttcatctggctgcttgtgcctgagaccaaagggcttcagtttgaggaagtggaaaagttgctagaaggagggtttaggcctagtttattgcggccaacgaccaaggaaaatcaagtggaaacgccttag

SEQ ID NO: 172276 - DNA, 2052 bp, Arabidopsis thaliana landsberg
tgggtttcaactgtgttaggtttacttggccacttgatctagctacaaatgagacgttggctaataatgttactgtgagacaatcttttcaaagtcttggtcttaatgatgatatttctggtttcgaaacaaagaacccatccatgattgatcttcccctcattgaagcttacaaggtatgatagtattcaatttattggatctctttcattggcataaaataaaagaattacaaaaactttttttttcggttgaaaatttaatgaatctaatataaatttatgcttattattatggttttaagttataaattatattttcttttaaacctcgtattcatgtaaattttagatattaaaacatattagtttgttaaataatgttgtttaataacaatcactaattttttactgttgttgtcaatctttttttttttttttaagttaatttgtcaagagtttacattggtggtatactagctaattgatttaccaacaatctcatagtgttgtcctatcagtaaaggtaaatctattggttcggacttcggatatccgtccgaaaaatttagaatagctttattttgttcataatatacaaaaataatttataaagatggatttgtcaaaaagaaattacatagatgtggatccaaatactttaaaacaatagttcaaaccggaatttcatatatcatgtcgttttttaccctaagtcactcatctcctttgaaaacaaaacttacttttttgtttttctttcgtttttgcagaaggtggtagctaagttgggaaacaaaaatgtgatggtgatattagacaaccacgtgaccaagccagggtggtgttgtggctacaacgacggcaacggtttctttggtgacactttctttgaccctgctacgtggatcgccggtctgaccaagatagccatgactttcaaaggtgctactaatgtcgttggcatgagcctcagaaacgaacttagaggaccaaaacaaaacgtcgatgattggttcaagtacgtctatttgtataacctattcggatcctttttctttctgagtttatcttctatataattggtttaatgaaattgaattgcattaaatatttaacggttacatagaaagaaagaaaaatataaactagtggccatctcttgcacgtattgctttgaactttaagtgcctttttttcatgtttaccccattcgctgcatgtgtgtacgtgtaagagatcgctattctgtaatgttaaaatcagtattttgttttttaccttcagtggcatacgttacattaaaagttcctttttaacgaaaaaagtttagaacactaagaagaaactaaatggacatttttaaagtatttttatcaaaaaaaaattagataatagttgaagtatgtcacttataattgacttataaggattaaagactttacttacgtacggtttcacagaaaataaaatgtatcaatcaaataagaaatgatcatatttttccttgtttttttttgtttttcctagagccaatattattaagtggcacataatttttttatgctagaagactagaaccatagtaaacgatcaaaatacttatatctagtcaatattatagcaacagtctataccagcccccaatgattacttacgtcgtctaaccaaaaacaaaaaaaagaaaagaaattatgtgtgttatattttagattatactgtatatatttaattccttcgtattcaaaaattagcaatgattcaatgggcacatattaatatgttactaatgtggtttgtttcaaatatgttgttttgtaattttttaaacatatatttttttgtcaatatatatatgtgtgctagatttgattaaacttgagtaagatttatattttatttgtctcatgtaggtacatgcaacaaggggccgaagcagttcacgaagcaaaccctaatgtacttgtaatcctttctggcctcagctacgacaccgacctctcatttgtccgatcacgacacgtaacctaactttcctagaaactcgtgtttg

SEQ ID NO: 172277 - DNA, 1127 bp, Arabidopsis thaliana landsberg
atgaggaaagaacgaaaaacctttgcgaaaccacaaaaactacaagaaaacgtaatttgttggctcgggcccaaaaaaaaatgtaaatactcggccgagttgtattatttactcggcccagctgtattatttacagaaaaaacctaagttctcccttttcacttctcgacttcttcctcttctctccgtcgtcgtcttctctcgtctccgacgataccactttcaccggaaaaatcaatctcttctattcttctttcttctccgttttcgttcgtctttgtctctttcatatccgcaaatttattttccaatggctagagtaaaagactcatctggagaatatgaatcaactagggttgaagcgaccggcgaaattcctccatcagtcgacgagaccgccgccgagattctccaaagagatgaagaaggcacagagcttcttacaacagaagaggaagccggagaaattcagcctacaaccggcgattgtgacgccgccgatttgggtaattcaaacgccgtcgcatgggaatcaattgacgatctttcagacccaaatgccgattcttgtgtagaagaagaagaggcaacgaatgcagttgttcaacatgatgatggagcaaataaggtatgatagaagaccgttatttttttgattaggctcgttttagaatattatgcattggtaaatgattggatttgtgaatgttgcttcagataaaacaagtagtacaagtaggtcgtaaatttgtgaatgatcattcaggaacaagtagtacaactaggtcgttaatgtggaattgaaagtattttggattgaatatgcaggatgatggtgatgatgataacctgccgcagaatatgcaggatgatgatgatgatgataaccaaccattgccgccagaagttatgtaatttgatccaactaactacacgaaggtgtgtaagataggaacgaggtgtcagttggtacaaacagtggaatttatagagactttggatgcagaactgaagtggtttaggaatcatgaccaatttaagcacatattccacatgcctaaggagcccaatcaaggcatgtggatgcttatggttcgcacggctaagacagaattggcgagagagtg

SEQ ID NO: 172278 - DNA, 2777 bp, Arabidopsis thaliana landsberg
  unsure (1)..(2777): unsure at all n locations
gacttataagggactcacaagtaagtgttaggcttttgctttgttctagtaaatgttttttttcttttcttttcaagacgaggtagccactcaaaccttgatcattgaggcttttcatatcattatttctcacttttcccgatatgctattaaacgttaggtaacttctaggatttctatttaaggattctcgttctgtatatctccaagtagttaatcagattatttggaattatcaggggagaaaaatgtcaaaatctcttgggaatgtgattgatccgcttgacacaattaaagattttggcactgatgctctgagatttacgattgcactaggaactgctggtcaggtttgatctctactgtgttgaggcagctgaaccatgcttttttgggtaggtttatattaaaatgtcatatttatgtctatattccttgttttccccattacctttttgttaggatctgaacttatctactgagaggttaactgcaaataaagcattcaccaacaaactctggaatgctggaaagtttgtgcttcatagtctgcctagtctaagtgatacatctgcttgggagaatttgctggacctcaaggtttgcttgtttttccatctccactagaaagtattagggaattgtggtatatttgtcctttcagtgacagactaagtatggtataaagtcgaaagtcattgataatatgtttagactatctttgtgtttgggatcatgaaccataaaagtctcacaaaaaaacgaggtagctttaaatataggagattggtcagacctctttccaggagtatctccacctgcataccttttgccattacttaaaacagctgcagagtcgcatcacaagtgataagctaccttaggctgctctcttactatcgatttgttgtgacactttacaataaggattttttctaacattgtgcttccttttttttttgacagttggacaaagaggaaaccctgcttagtttacccttgcctgagtgttgggcggtataatatttttaccctgnnnnnnnnnnnnnnnnnnnnnnnnnnnncaccttatattccttttgtattatttcaggtgtcaaaactccatattctcattgattctgtcacagcaagctatgagaagttgttctttggggatgtaggaagagaaacatatgatttcttttggagtgactttgctgattggtatcaccacgtcaactcttaataaccaatacacatgtttcttggacttaattgactgactagtatactctaaaggtatattgaagccagcaaatctcgactgtatggatctggaggcaattcagtttctctagcttctcaggcggttttgttatatgtctttgagaatatacttaagctgttgcatccgtttatgccgtttgtaaccgaggatctatggcaggtaacatgctctcagttttgctatctgtgtatttcatttttacttaaattggcccttaaccatttacttaggccaactgcactgggcatgattttccttataccttagagtttttgtagtggccgtttttttaccaaagcatgcttaagctgttatctttgagtttttttttggtagtttagcctcttttgaggatgaaataaaaaggaccgaaaacttagttatatatggttgatacattggtactgctaccaaaaaatgatttcagcttcataaaactgtaattatgaatgcatttataattgcaggcacttccctacaggaaagaagcgctcattgtgtctccatggccacaaaattcacttccaaggaatgttgaatcaataaaaagatttgagaatttacaagctctggtcagtatgaatttttaccttaatatattctgtaaacctcaaacagaaccatacttaaaggaattaatatttatactattaaaagttcagagcatgttgacaccttgcctgttaaatcacagactagagcaattcgaaatgcacgagcagagtattcagtggaaccagtaaagcgtatatctgcctcagttgttggaagtgcagaggtcattgaatatatttcggtcagtaacttgtggcttcctaacagttaaattatcttacgaataaggttcatcagtttgccttgtgtttccttattaaaaactgtgttcttgtggcggtgcagaaagagaaggaggtattagctcttctatccaggcttgacttaaacaacgtccatttttccaatgcccctcctggtataattatctttaatcctttttttctcttttcttttcattgtttgcatcttatctcaatatttacattttcgatgattcccttgaatcatcatggtcacaacaaaacttcacatggttggtccttcaggtgatgcaaatctatcagtccaccttgtagccagtgaaggactcgaggcatatctacctcttgcagccatggttgatatatcatctgaagtccaacgcatttctaaacgtctctccaagatgcaaactgaatatgacgccctcataactcgtctcagttcaccaaaggtataccataaccatcaaaagagtctcttaaacccttgctagaaattgttttcgataagcttattaaacatggtgcattagttttagactctgcttgttttacaacatttttaacgctgaaatatgtagtttgtggagaaagctccagaagaagtggtgagaggtgtaaaggagcaagtagaagaattagaagagaagataaagttgaccaaagctaggcttgattttctcaagtct

SEQ ID NO: 172279 - DNA, 598 bp, Arabidopsis thaliana landsberg
  unsure (1)..(598): unsure at all n locations
atttggaacaacgattccccggcgcattcgcgcaggtgccgactgggaaggaacagggtgcgaacctggtctacggcggctggcgcgcgatcatggcgcccaaaggcatcacgccgacgcagattgcgtactgggaaggcgtactgcgcaaggtgacttccacnccggaatggaaagccgatctcgacaagaattactggtccgatgattttgtcggccacgagcagttcagcaaggatatcgccaaggactacaacgacatcaaggccgtgctggtcgatatcggtctcgccaagcagtaaccacccacatcatcaaggcatccaggagtttttcatgacagcacccgtcgtcatcaccgaacgccccgccgagggcgtcggcctgatccgaatcaatcgtccggaagcgcgcaacgcgctgaacctggaagtgcggaaactgatcggccagtacctgaccgaaatgaccgatgacgacacggtgcgctgcatcgtgctgaccggcaacgacaaggctttaccgcccccgcccccatcaaggaaatggccaacgccaaaccaagacatgtgctgcgcggcacccacaaatgtggcgg

SEQ ID NO: 172280 - DNA, 1199 bp, Arabidopsis thaliana landsberg; identical to SEQ ID NO: 1361

SEQ ID NO: 172281 - DNA, 1343 bp, Arabidopsis thaliana landsberg
attctagaggaaacatggatctggagattctgttttggatggataagtggctaacaaatattcctctagctgagttgttggttcaggagcttccggcaggttggaaaggaatgcgagctagggatctttggagaaatgagatcggttgggatatggaggcgatagctccatatatatcttcttataacagattacaactacaatcggttgttttagatgatataacgggagctagagacagaatatcgtggggggagagtcaagatgggagattcaaagtgagcaccgcctattcttttcttactagagatgaggcgccgagacaagatatgaagcgattctttgaccgagtatggagcgtgactgcgcctgagagagtgagactcttcctctggttagtagcacaacaagccattatgacgaatcaagaaaggcatcgtcgacatttgagtaccacgagcatctgtcaagtttgtaagggagcggaagagtctattatccatgttctcagagattgccctgcaatggaaggaatatggctacggcttgtcccggtgagcaaacggcgccttttctttgagaagtctattcttgagtggttgtatgtaaatctgggagaacacggtgaggtgggaggcagtgtttggtccacagtttttgcattggcaatttggtggggttggaaatggcgttgtggaaatgtttttggagaggttggccgttgtcgggatagactacggttcattaaggatttggcaaatgaggtttcagctgctcacttaaagctctccgggaatacgaaggagattgtgcgggtagagcgacaagtctcatggaggaaaccaaatgagggctgggtcaagctaaatatggatggggcgtcgcatgggaatcccgaagaggcgactgcaggtggtgcgttgcgggatgaggaaggtaattggaatggaggctttgtgcttaatattgggatttgtacagctcctttggcagaactgtggggggtctactatggactttacatagcttgggagaggcgggtcgcgaggttggagctagaggtggactcggagattgtggtgggttttttaacttcagggatcagtgactctcaccccctgtcgttcctagtacgtttgtgctatggctttttatcaagggactggttagtccgtgtgtcacatgtgtatagggaggctaaccgtctagcggatgggttagcgaactatgctttttctttacctttaggtttccattctttaaattttccaccggatattgttaatccgattttgttggaagatgccgatgggtacacgatacccatgattgtccgattgtaa

SEQ ID NO: 172282 - DNA, 526 bp, Arabidopsis thaliana landsberg; identical to SEQ ID NO: 2321

SEQ ID NO: 172283 - DNA, 1318 bp, Arabidopsis thaliana landsberg; identical to SEQ ID NO: 21594

SEQ ID NO: 172284 - DNA, 368 bp, Arabidopsis thaliana landsberg
tcaactgatagagattcaagaggcgttccttatgagtaggaagcctgaaagagtctcttgtcaatggcaagcggaaggaagcaggtgacttaacttcctttgtcggtctgcaaaaacagttattggaagatcaacgcaagatagaagagcaggtctcttacaatcagaagcgtgatattgaggttgctttgcgtgaagctgagatttcccgagttgcggatgagcataagaagaagatcgagcacttgtccttggtggagaagttcttgcgcgaaactgatccctggttcctgaatttcctcgagacgcaatcggcagagacaaccacaaatcctccctcatgctctccatcatcatctgcttcatag

SEQ ID NO: 172285 - DNA, 351 bp, Arabidopsis thaliana landsberg
  unsure (1)..(351): unsure at all n locations
tcacgcgcgatgatgtggtggtcgcgctttccaattctggcgagagcgcgaagctgctggccannnnnnnnnnnnnnnnnnnnnnnnnnnnnnnnnnnnnnnnnnnnnnnnnnnnnnnnnnnnngtcgctggcgcgcgaggccgatgtccatctcgatgcccatgtcgaccaggaagcttgcccgctgggcctgtcgcccacggccagcaccacgacggcgctggcgctgggcgatgcgctggcggtgacagtgctcgacatgcgcgggttctccgccgaggatttcgcgcgttaacacccaagtgggcaactggggcggcggctcttgctgcatgtcagcggtgtcatgc

SEQ ID NO: 172286 - DNA, 722 bp, Arabidopsis thaliana landsberg
gtaatgagtgttccggatgctgatttctacatcttcgacaagggaatagacttcttgtttcgcccggagaaaaccaggtatgggctacttatgatgattacggaatgcctcggcggtatgcattggtccataaggttatctctcaagaaccgtttgagttgtgtttttcttggcttgatggcaagaaaaagggatatacgggttcaatgaagaagtggattgattcagggtattacaagacgagtgggtgctttacaatcgggaaacgtaacagcagtgattctctcaactcattctcacatagagttcaatggacaataggtgacaaaggaaggactagtgcacatatatcccaaaaaaaagggcaatatttgggctctttatgcaaattggtcaccatcatggaatattttcgactttactttaagaaatgactcaagtatgatatggtagaagtacatcaagatttcgacgtaaagggaggtggacagttgtgcctcttgttaaactcccgggatttaaatctttatcccgtcaccatccaaatcagaggacatacccaaggaaagaactatttagattctcgcataaagttgcttattagttgctgaattataggtaaagaagatgagaatgcttctgaagtttgcttggaccttgatgtagcagctgtgatacaagagcttctcaaggttctcattgggcaggagatgagagaataa

SEQ ID NO: 172287 - DNA, 1286 bp, Arabidopsis thaliana landsberg; identical to SEQ ID NO: 17966

SEQ ID NO: 172288 - DNA, 621 bp, Arabidopsis thaliana landsberg; identical to SEQ ID NO: 68824

SEQ ID NO: 172289 - DNA, 529 bp, Arabidopsis thaliana landsberg; identical to SEQ ID NO: 40225

SEQ ID NO: 172290 - DNA, 450 bp, Arabidopsis thaliana landsberg
gtgtaattttctatattgacgacgtgttggatctatacaaacaaaacccatctcgaattacaactaaacaaggaggatccaccatagatgttagatatcagtcacggaagaagaaaattagtcggcaaacgtggatcaaacctgctggctaaggaaagcaaaccatgatcttcatcaaagaaaatcttttatatatatatatataattgttgctttattcaatcacttaggcaaaaaataacaaaaattcacatataaatggtcggaatagagcagccaggcaaacaaacaagatggcgctactggatacgtttcgctttacgcaagaatcgataactcaactctcatctccaatccaaaggatgtgtacgcagaggtcaagttcttcgtctacaacagaatctacgacaaatactatacctaccaaggtatgtaatgtaacctattgcc

SEQ ID NO: 172291 - DNA, 574 bp, Arabidopsis thaliana landsberg; identical to SEQ ID NO: 77709
  unsure (1)..(574): unsure at all n locations

SEQ ID NO: 172292 - DNA, 1121 bp, Arabidopsis thaliana landsberg; identical to SEQ ID NO: 34139

SEQ ID NO: 172293 - DNA, 2504 bp, Arabidopsis thaliana landsberg
  unsure (1)..(2504): unsure at all n locations
tgaagtaataaaaggcaagggtaaaatggtccgcacagacgcagacatcgatgagatcgaaaacaaaagtaacgagatgagaccaaacgtgcaagccatgggttggtccaacacttatcatttttaggcctaaaagtttgtgattattccctgcctttttatcctcccattttttcttttatttaccaacatattttctttttacatacatcagtgagattttttcgacttttttttcaacttcgtgttcaaagatcagcgagttttttagtttgactattgatgcatcatacatttgtttaaccagtggtacatacatacgattgatacacttttacaatccacgtatttacggcaaatgtgaattaatatttaatacactttattattaaattcaggcgtctttcttttgtgaaaaaaaaaacacttaattatatgcattcattctataatcactcatttcattattaatttcgtaagtaattatttagtattatactactaccccgcagtaccatattatcagctttgaatacccataaataactagtttgataactacaatggattggattgaaacattagtagactaggaaaaatctcttttatataatactagtattcaaaaacaaaaacaaaaactgttatcaaatatacatccactttagtatgttttccagtacgaaccgaaattggagtatggacactgcataagcagcagaaatgtgtacttgaaaggttcacaccttaagatttcatgccgaccaatcgtgtcggcccaccaacactttaaagctctttaacccaattccgcgttctttcagaagaacaattttagcattcaactttttgaccttccatttttttttcttcattcttttacatttgattttctccccataaagtttaattttatcattgtttatgtcttttgtcttttttatgtaattcctcgagtaacactgtccgaaaataacaactcttaatcgtgcgcagtcacataatttaggaataacaaagtcatcctttataatttcattactagaattttgaaaagaaaattaagagactactaagttttactcctagtttgactgaccatatttgtcgattaatttataaaacatgttgtttgtttgtttttaacgggtaactggtgataaaacagaaatctctaaaactctaccgagttatatcacattacttgtttaattggttcagatattatcatcatcatatagaacaatccaccagttatgcctgattcttaaaatcagttataccaaaataattctcatatagagagaaaaaaaaatttggttggaactaaagcaaatgacaaatcagtacaacaacgattacatgtatatataacttaaaaagttaaaacaagataattgaatggttatccaaagaactctctcacctaataataatcttaagatgccacaaatccaaaaaaaaaaaatcacaattttgcaaatttaaatactttgctttgtctattcttggtaggttttgtttttctctcttccgttcacacaatttcttggcgatcacgaaagacaaaaaagaaaaagaagaaaacaagagatttcacatcaatcaaattgattccattgcgcgtgtaaccgcaatgcgcaattgggaggacccgtttacgcttgcgtgtaacacggccttgaagaagactctaccttcttgcattttcctcatcatctttatcagcgtgttatgtccggtggcaatgtctcaggtggttgtgccggattcagatgcagattgtctcttgagattcaaagatacattagcaaatggttcagaatttcgtagttgggatccattatcatcaccatgtcaaggaaatacagcaaattggtttggtgttctttgtagcaattacgtttggggattacaacttgagggaatgggtttgaccgggaaactaaacctcgacccattggttccaatgaagaatctgcgaaccataagcttcatgaacaataacttcaatggcccaatgcctcaagttaagaggtttacttcgctgaaatctttgtatttgtctaataaccggttttcgggggagatacccgcagatgcatttctaggtatgccacttttgaagaaaattttgctggctaataacgcattccgaggaacaattccttcttctctagcctctttgccaatgcttttagagttgaggctaaatggtaatcaatttcaagggcaaataccatcttttcaacagaaggatcttaaattagctagctttgaaaacaatgatctcgatggaccgatacctaaaagtcttcgaaacatggatccaggctcttttgcaggtaacaataaaaatgttctacatattaatattgtcatataatgcttttagaatcaaatgtcaacatgacatcctttntaggtgtgcaactagagaattcattattttcatataaattttgcataaacctttcaagagtttgatgcattttttatgacat

SEQ ID NO: 172294 - DNA, 1394 bp, Arabidopsis thaliana landsberg
tgaaggttggtttagccttccttcttcttccatgcttatattgtttcatacctgattaatattttatttatctttttatgaacagactgaatatggtgatatattcgactgtatcgatattcacaaacaacgagcatttgatcatcatctactcaaaaaccactctattcaggttttttatacagaattttctctttatctcctttcttttcaataaaagatgaatatttccttagagaatgatgtaatttgtgaacacattgacgtatatatacagctaaagcctacaagtgtacctgaatggatcaatagaaacatttcagggagatcatttggtcttctacaagaaggtataagctgtccagatggaacagtaattgtaaaaaggactacaatgcaagatcttatgcatgcacaacgtttgaaatccatgggattcgacggcccgagaccttttctcacagagacaaacaacactaatttcaatagaaaattctacgtaagtaacccttataaattgagagtataccaaccaccatttttagtttctactttcattttctgagttttttggtctttgtggatattaggttgcaaaagctaactatggaccagatctttttgctggagtaagaggaaacattaacatatggtcaccaaaaatcttgcaagatcaagttagtgttgcatacatagcagttggtggaggtgctaaagaaaattttgccagcatttcagttggatggaaagtaagtcacttctcgttccttagcaaaaagtgaccatgttcgctaatacgcctcatcaactataagatgcatgagtttaaagttaacaaaagttgaaaatatgtatatacaacaggtgaatccatctctataccatggtgatcatgttcgtttatacgcctcttggactgtaagttttgagttataccagtaagcgcttgcactaatattttctttatcttctgagggtcttataagttctatatgtatatgtttgcttataattgtgctaatagttacatggaagcaataccggctgcaacgacatgtcatgtcctggatctgtgcaagttagcaagactatagcacttggtgccattattcaaccaatttccatctataagggtccacagtatgtattgcgtttgaccttgtatcaggtaaagtctactcatctttttgatcacttcttttaaaagtcatttggattcatctttcaaaaattgggtacagaatcaaatcaaggtagattggtggtttgcatgtaatgatgaggacgttggatactggccagcatcattgaacaagtcctggagagaatctaacgccgcaagttatgcatcttggggtggccaagtgtatagcaaagtaacagagaagagtccc

SEQ ID NO: 172295 - DNA, 947 bp, Arabidopsis thaliana landsberg
aaaaaattatgatgggatttggcaagattcttgagcaaagggttgttcatgcagatacaaagaagaacatggaatatgagcccatcttcagaccagaagagatcaagaaaatggattatctacaagctgctttgtctgagactcttagattgtatccctctgttccagtcgatcacaaagaggtatctgctctgtttcatttacttgtctcccaagaagtcattaagaatatgatttttggttctttttttttcagctatccggaattttttttagtcctttttgtgaaaattttggctcgcttctagttttagccttttaggtacaattcgaattttgagacgaactattatccataagtaaataattagttttaatcaatatagtaaaacctagttctgatatatagttaaaagtgaatttgttaggaatatttgatatattggtgtggttgactgcttgggttacataagattctcttttattcgatttcggttattgacatatagttttcatgaggtttacaagagtaaaataatttgtaggtacttgaagacgatgtatttccagatgggacgaaattaaaaaaagaagaaaaggttatatatgcaatatacgcgatgggacgtatggaaacaatttgggggaaagactgtcgtgagttcaagccagaaaggtggttattagacggcaggtacatgagtgagtcggcctataagttcacggccttcaatggtggtcctcggctatgtctaggcaaggattttgcgtattaccaaatgagatatgtagcggccgccattatttaccggtataaggttagggttgatgataagggtggtcataaggttgagccaaagatggctctaactatgtacatgaagcatggcttgaaggtgaatatggtcaagaggagtgtctctgagatagaccactactactgctga

SEQ ID NO: 172296 - DNA, 511 bp, Arabidopsis thaliana landsberg
tggtgggaaacttttggtcttttttgttttttcctttccaccacgacgttcttccttgggtttggggtatagtggttggatatccttttatcaaactttgcagaatcttatatttgcgcgggtcctctagactgatagttgttttcgatgaaacttgatccaccatgccaagattcctcaaagtcaaatttgtaaaaatgcgtgaacttgagcttaatctcacacatgcgtccagatctatgaatctagttgcttcgtgatcctagttgaccaacaaccttaccagatttcagcatggttcgaaccggagacgaagatggcagcgaaagggttaaccctgatccatctagccttctccatcctggatcccgtcactctctttaaatggtactgcagccaattgcccttgtttgctcttgtgccacagcctccgataatgtctctatcaactctaattatctgatcgccgatgccgagctaccacacagaaagcctcatcgacctagctaga

SEQ ID NO: 172297 - DNA, 1297 bp, Arabidopsis thaliana landsberg
agcttgtagcttctccttttacatgttaaaatcgatcggaatgaaaacgttggtgtactgtgtttagacgaaaaaggaatagaattttatttaacaggctacacactgctctaaccagttactgctttttctactctgatcatgcgattgttgcaatttagttgagttcttccttaagcttcctcttgattatctatgactgttttcattcagtattcaacatgatcaaaccaatatttctatagtttaaatctgggttcaacctgacttttccgtaagaactgagatctattattgattcttgagcaaatagtctaattaatgctgaatcaattcttagagtccacgacaaaactacctgcaactggtgggaccaacctattgaaaattttgttgtggcctacaaatggagaattatgaggctgacagctatacatattactgtattgaacattggttgtttcttttttctgttacctgtttgtactggttctgactgttgagtatgttaaatcaaatcctcatgtttgtttcacatttctttttttgctctgaaatgtaacagatttatcgtagtttggctactgtgtttgttgtatatgttctgacggcatcttttcttcttgtttcaggaaaatgtgaaaactaagcatcctcagttgctgtatgaatcaaagttgtacaaagtattacaaggaggaagtatggatctagttctgtacttgtttacatttgtagtttgtgatgtcttttttcttatccaagaggggttgctttcctttccttgatttctagctggcgttccaaacgttaaatggtatggtgttgaaggggactataatgtcctcgtgatagacttgttggggcctagccttgaagatctattcaatttctgtagtaggaaactctcactaaagactgtactaatgcttgcagatcaaatggtaggatcccgtctatagcctgaaaattgtgttctcatgttgaataaacgtttaggatatctttgttcctctttcagatcaatcgcattgagtttgtacatcagaagtcatttctacatcgggacatcaagcctgacaactttctgatgggtcttggaaggcgtgcaaatcaggtagctgttgaaaagggctgttagtaaaatttgtttattctccagaattatttgttcaacgatttgttgactgaatacaggtatacgtcctcgactttggtctggcaaagaagtacagagactcaaatcatcagcatattccatataggttggttatagccctatgattttcgttgggtc

SEQ ID NO: 172298 - DNA, 801 bp, Arabidopsis thaliana landsberg
tcttggaatgatgtagcaagtggaaaagacggtggatgtgtgtctagaagatgaaacggtgaactatcttaaccggagagatgtgcaaaaagctctccacgctcggcttgtcggaactcgcaaatggactgtttgcagcgagtaatatcattttctttcgtaaacatttaaccgaaattgcctatttgggtctagttactaaatttgtttcgttttattgtgatgacagtgtgctggattacgaagtacttgatgtggaagtaccaacgataaatatcgtaggaagtcttgttaaagctggtgttccagttcttgtgtacaggtaaagcaatgttcataacagagttgtgaacttctgttaaactaggcttgacgtgtctgtttaaaacataacagtggagatcaagactctgtgattccgttaaccggaagtagaacattagtgaagcgactggctgaagagttgggactaagaacaaccgtgccttatcgagtttggttcgcaggacaacaggtgagcatcatgactctaaaatttaagggtgctcaattcttggtgattgatgtttttcgaatctactgttgatatgtttcggttcggatacagatttttgaatatttaagagacgtggtaataaaggtttggtgttacaggttggtgggtggactcaagtttatgggaacacattggcgtttgccactgtgagaggagcagcccacgaggtaccattctcgcagcccgcgagagcgcttgtgttgtttaaagcattcttgggtggtcgtcctctccctgaagaattc

SEQ ID NO: 172299 - DNA, 467 bp, Arabidopsis thaliana landsberg
ttagtttagagagtcacgcactggttattggcagcggcatcattcaaaatgtactcacaagcttcatagtcgctgaaaaatactcatcaaaaagcacgcaagattgtagtgcacgctccttcatgacaggcttgatcaatggtcacacccacttggctataaattactgtcgtggctgggcagatgatttagcgcttatggcttggttgaagcaccatttttggcctgcggaaaagcaatgggtaaatcaagaattcgtgcatgatgcatagctgtatgccatggctgaattgacacgcagtggctcagcctgctttaatgatatgtatttctttttgccagcacccgcacaagcggcaaaatctgcgggcctacgcgctcacattggtatgactataaaacaagtaccagcagcatgggcaaagtccaccgatgaatattttgcgcgtggcttagacttattaaat

SEQ ID NO: 172300 - DNA, 1768 bp, Arabidopsis thaliana landsberg
  unsure (1)..(1768): unsure at all n locations
gttttcattcttatgtacaaactgaaacgtagtgaaatgaaaatcgaccctctatctcgacgagtattcatcggtcttgnagaaangcatctcggaaaattcctagtgagctctctaaaagaagaattggaatcgaaccaaatattagtgtatgtagaggatgagacgaagagcaggatcaaagagtcaggggttgcagtagtgttcttctcaaagaagtaccctaattctgaannnnnnnnnnnnnnnnnnnnnnnnnnnnnnnaacttatggacgcagggaaaatcgatcccttgcctgttttttacagcttaaaggatgaaccagttaagaatctcaagggatatttccttaataggcttctcaagatagagaatgaagtgcgtaagaacatcaagacgagggatgataagtctatacttgatactgaagctaaaatctggggatggagagatgctctctcgtccattgcctcaagaccgggtctgagctatgagcttaggtatataactatatgtgtgtgtgtgtgtttcttctatgtcaacattagtttctcactaatgggctatatttttgcagcactgatgacgtgttcgttagtgatattgtgaccaaggtcaatgaactatttgcctcaagggagagaaagaagacagaagcagcaacaacagttgtcaaaactctcgatgctgatgacttattctattcccgaacttcgttcttacaagctatagaccgtgacattacagattttgaaagcttcactgatatcccaaatggtcttgtacttctgaggcttaaaggacacactaatctagtgttcctcaaactgagttctcatgaaaatctggtcagatttcaacgttctgactcatttaaattcctcacagaggtttaatttctccccaaccctaaatttcttctctcaaatctgaagcaacttttgtggcttctcatgaaaatctttaggtattattattacccttgcagggttttgctttgaatccttctggtgtcatcagatttagcgaaccttccctggcattggaattagagtccaatcaatctcaacaatagttttgagatggattcagttggagacaggacgctcaaaaagcatttcttctttgcttacttgggtatcaagttaaacctctgttttgttttcctcacataattaagacaatggacggatacataaaaaaatgtacgtgtattcaaggaatttttggtttttctttttatcccttgaacctctgtctctggttattcaacaaaagttacttagaaaacaccagattaaagtcatggtgttaaagacaccaagagcagagctgaactaaggaagaagaagagacaaatcaaagattagataaatcttaaaacaccaaggacttcattaactgaatattaagcaacaggtcaaatcttgatttgtctcttcttcttccttagctgcaggttttatacttgttgtctttggattttaacaaaagaggaggggaagccgaaagcattggtaacattcaaagacaacagatggttcaattgtctttgaactattaatcataacaacattttagtgtccgagaagaagtgcctaaagagaatctagtctcaactggtcttagactgtcttatgatgacgatgaacgcaactcttcagtgacttctgctagtggtagcattgtagctgcttcttcaatgtttcagccactcgataatagtattcggattgacctcaatagacaaaaatatgcaacttga

SEQ ID NO: 172301 - DNA, 350 bp, Arabidopsis thaliana landsberg
ctttcagtatttttgctgatgaaacatacattcgatgtgatttacggaaccgaagaatatccattctctgtatttacggtaaaaatgctattccttttgattatccaatcattcaaatccttaatgtatgtttgttttacatgtatattaatactgtatgatctgatggtaaaagaattgggtggatgaaaatgaatgcaggtactaacattaaaggccattgggatactattgccaatgttcattataattcgaacaatctcaactattcagaaaactcttcgtcgtcgtcatcaatatcctgtaagttcgtttccccaatccctttttatttaaaggttcattaaaac

SEQ ID NO: 172302 - DNA, 353 bp, Arabidopsis thaliana landsberg
cttgtcaaagatcaccgaaccaacgtggaactgcgcgatatcgagcgcgtactcgacggagatatacagcaatttctagacgcttcatcggacttagattaaaatagtcaaacggccatgatctattttgataacgtttcgaagttatacaacagcgggaattcgacagcacttcatgatgtaaccttccagatcgctcccaacgagttcgtttccatcgtgggacattccggtgcaggcaagaccacccttctcaagatgctgattgcacaggacagaccgacaaagggaaaggtgttcttaaagtccctggacgttcattccatcgcccgaagcgcacttcctaagtgtcg

SEQ ID NO: 172303 - DNA, 1092 bp, Arabidopsis thaliana landsberg
atggactaccccaaagagttcgttgcggttggtaaggcaattatgctggaaaaaggaaattacggtcactggaaagtaaagatgagagctctaatacgtggtctgggaaaggaagcctggattgccactagtgttggatggaaagctccggttgtcaaaggggaaaacggagaggatgtgctgaaaactgaagatcagtggactgatgcagaagagacaaaggccacggcaaactcaagagctctgtctttgattttcaactctgtaaatcagaatcagttcaagcgaattcaaaactgtgagtcagctaaagaagcgtgggataaactcgctaaagcttatgaaggtactagcagtgtcaaacggtccagaatcgatatgttagcttctcagtttgaaaatctcactatggacgaatctgaaaacattgaggagtttagtggaaaaataagtgctatagcaagtgaagcacataatcttgggaaaaaatacaaagacaagaaattggtcaagaaactgctgagatgtcttccatctagattcgaaagcaagagaactgctatggggacgtcgctggacactgacacgatagatttcgaagaagtagtaggaatgcttcaagcatatgagttggaaatcacttcaggaaagggaggctactctaaaggagttgcactagctgtatcatcagagaaaaacgagattcaggaattaaaagattcaatgagtatgatggctaaaaacttcagcagagcaataaaacgagttgagaaaagaggatttgcaagaaatcagggttcagacagagacagagacagagacagagatcgtaactcaaagagaagtgaaattcaatgtcacgaatgtcaagggtacggacatatcaaagctgagtgtccctctttaaagagaaaagatctcaagtgctcagagtgtagaggtatcggacataccaagtttgattgcatcgggtccaagtctaaacctgatagatcctatattgctgaaagtgacagtgactctgatgatgaagattcggaagaagatgtcaaaggatttgtgtcttttgtaggaatcattgaagatgataat

SEQ ID NO: 172304 - DNA, 3210 bp, Arabidopsis thaliana landsberg
atgaggcacgattcaatcttggtcgtccatttcctcattccggcgaaacctacgatctgtcaccagaccgcaagaacattaatacggcacactccgttccaatgtctcctgagggtccatgacgcaaatcaaggcttccttaggactataacacgttccatgccagaattaaccgagtaagccggctatcgtcacttatccgcattctccgatcaatcccgtgaccattcacgacccatacacatatctcactgtccaaatggattccactcgaccttctaaggtttcctagaccgaaagtaaggtttcctgaagctatcctagttcttagggctagcctaatggttttggggtttaccgatagtcgcatcgtagctaaacttggtccgtctcatggtgtgtcattcctttacccatggacttgatccaattcaatgctccttacccatgacttgccacactaaaaggccgaactgatcttgcctttttttggcttgatctcgcattctactcgacagactgtacgtccggccatatagtcaaggtcaggggcattacaccatctcttgggaaagagaagatcgagacaaccatctctaacaacatggttgcgatgaaaaggcatacaacaacatccatagagtaaataattatactacaaaagactgtaccgatttcaagaggcatcttgctgagctacggacaattggtgacctcgcaaaacctcgacatcggagagttcgtgaaaacttaccacgaaaaaaaggcggaagtcgaaaattcatcactagctaagaaaatacctaaaacatcaaatcccggagttgcttttggttctaagaagaagattgaagtaatcatgaatgggtctaagttttgtagagattcgaccactacaatcaaaaagtttaagggaatgttctattaaaggcgagcacaagcgacaaactcgaactcgctagagcaatcacaatgttcaaggaagaagaaattcgtcaccttgcagaacctgatgacgttgattttgtcctcaccttagacgtggctgacgtcggggtttcaaggattgtgattgatgttggaagtttgatagatctactattcttgagtacgcttagagagaatggaaagtagccaggctgacatagttggagccccatgaatttatcggatcaaggttatcccatcaatctatcgtcaatacgttaaatatttaatcccgaatggtgtgaaaattttacgaggagatcaagaatcttcaaaatcttgttatttaacgactcatcggatggttatccaattaacaaatctcgtgaagaaagaagtgattctaggaatatcaagcgggcaagtagtggatgacgtcataatcaaagtgaccatcgatgagaaagatcatgaacgaacaatttggaagacagtagcatctagttacaaccaaataacgatgaatgatataggtaaaattaatcctaagactactctctcaaataaagaggtcggttgcagcacttaggggttgaattcacaaagttctcggatcacgcaatagactaatggcaaatcgaattatgctaagtaaatcactaaatgaaatgaagggaaacaaaagtaagcaatagcattcgattggatggttgtacatcaagataataaaagcgtcagccttagggaattttcaggaaatagatgatagtagatctagaaataactgaattgttatcgaaccgttctcaaactcaaactatgattttagagtaagcggtggcattccgcgaaactctctatacttagagctaagataaccggagaagccgagaaatcctagactaaagcatgcattattatcaagtttgattagttcacctagtatctaaactagagcccttctatgagcctacatgttctttcttaaatgcctaggctcatctatgatagttcaaataacaagtacctatggtaggcatagacctattatctaatatcaagttctaattagctactctagaactagcattaagaataatcaagatgaagaatcctacagataaccaagcaagggggcaatctactaaatcatctataaccctaatgagaaaccgtaaacctaacaagaagattactcaaacatgatcatagaagaacaaaacatgattgaataagaaatcaatgcataaaacaagaggagagtagagttaagaaaaatattctctaaagggagtctccacagggttttgctcccaagaacagaatagataaagggaatagcctcccaaagcttagggtcttaacaatgacctaaaaactatatatatgtcttaaaaacgtgttgggccttcattaaacataggagaaatttctgggccatatttggaaatcttcaaaacatcaataagttgcgtctcaaaattaccgtcaggtattggtgtcgctcaacaccaggggtggtgtcgttcgacacctacgtgctttttcgtctccggattgcttttgcagcttaagttgtctgttttgctccagaatgctctattatatccaaatgaatcccaaacatgtaaaaacttgaaaaggactagaaaagactctagaaaaaacaattagactctaaaatctatacctaaaacgtagttaaaaacagtaaaaatagggatatatcaatatgttcacttgttccatcagacgattactaataaatactactctactataggatactggtgtagatgatgatcaacttggtagttgcagagttttagattggacattggatgaagttatagccgagggtgttatctgttcaaccaacaaagatgagttgatcgataacatacctttgggtgtgaatgcttgtttgtggagaccaagtaccgaaaagtttgtgatgtctgatgcatttaaaacaaagatagcatggccttgccatagaagagacatagactttgttgatgaacctgtacagggagtaggcagaagatcatcctactatggtaagtcccctttagataatatctatgtcactatgatgcatatattaatatttgtgttgttgtctggtgctagagtgcaagtaacacaaccagcacagttaatggaatacatgaatttggcagaaagtcatccactcaggtaaatattgagcactagctttttttttgtagttttgaaaattttgatgtgtatggcatcgatgttgctgtcatgagagtaatt

SEQ ID NO: 172305 - DNA, 668 bp, Arabidopsis thaliana landsberg; identical to SEQ ID NO: 42055

SEQ ID NO: 172306 - DNA, 1703 bp, Arabidopsis thaliana landsberg
ctacatggaatatgatcgttccactctcttacaggtaaattattcgagcatgtgtatcctaaatgttatattgcagtctgattatttgcacaatcaactggaatgtgctttaaatatatttctagcaggataagtaatctttcttttctagatgtctggcagggctggtcggcctccatttgatgacacgggaatggttattattatgacgagaagagagacggttatttactgaaacttttctatgtggctaaatatctcactttaattttacttttctcgtatgttctctgattgtaatttataaacgattacaggtccatctatatgagaatctcttgaatggatgcgaagttgttgagtcacagtaagtattgcccaataaacttctttttttggaacccattgctttctttaacattcttttaaaagctatgttggcttcaagaaatattcttctatttattttgttccagattgctgccatgcttaatagagcacctaaccgcagaaatagtgcaacttactatctctgacattacacgggcaattgagtggatgaagtgctcatacctgtatgtcagaatgaaaaaggtacgttcatatgtctctcaatgatttgtcggagaacttctttattatcataaatagtatagctaacttggaagtttgtatggacagaatccggagaattatgctattaaaaaaggaattcctaaagatcgggtagagaagcatttgcaaggtgcctactaacttagttagtttactcatttttccttcttggagttctcatgtgtcctatgtcctaccagagctttgccttcagaagatcaatgagctttcacaatatcagatgatctggactgacacagacggttttgttttgaaaccagaaggtattgagatttatgatttcatatcttcagtttcaaattataatgcactctcgttcttttgtgtagagcccggaaggctgatgacaaagtattatctaaagtttgaagcaatgaagtacattattaatacgccaacgagctatagcttggatgaggctcttcatattgtatgtcatgctgaagagatatcttgtatgtcaaatctgctttggtacataactcgttgttacttgacggatatactaatttatgtttatcttgaaaaatgaagggatacagctcagacgcaatgagaagaagaccttaaatgatgtaaatgcagataaagaagggcggctcagattccacatcaacgataataaaggaaagcggaaaaaacgtatccaaaccagagaagagaaactctttgtgcttgcaaatgattggttgactggggatccttcagtccatgatttatccatgactcaggtccatcagtattatattcatgactcctatcacttgatcacggttacttcttagctctgcatatgaacatttgaacttttgtctcaggatgctaactctatttgctcgaacggatccagaatagccagatgcatgaaagagtactttatatacaaaaagaattataaaggaactcttagctcaactcttcttgcaaaatcactctatcaaaagctctgggacgacagtccatatttgctgaaacaattgcctggcattggaatggttacagctaaggtttaatctctgtttaagctcgttctctgcaccttaccttttccagatgattcagtggtt

SEQ ID NO: 172307 - DNA, 996 bp, Arabidopsis thaliana landsberg
atgtacaatcaagatgataattcaatatttgaattttatttatacttttatatcatattgtttttcgtatttcaatctggagtattgttctgttttacttaaaaatgggctttttttaggggacattttaacctaagtaatttcgaagatggtgtattgtcatcttcatttatggttggacttcttattgcatcaccaatctttgcttcattggcaaaaaggtgatcagaaagaactttcatttttgttatttttctctcttctgattgatgtctaaaaaacttattaaagtggtttcgtttgtgtttagtgcagcttcaatccatttagacttattggagtaggtttaactgtttggactattgcagttcttggctgtggcagttcctttgccttttggtttatcgtcttatgtcgtatgtaagttgtttagtaaaccttatgattgattttgttttgttttcgccatatgcgaacttttgtcattggatgcaaatactcttattattactcctaggttcgttggtgtaggtgaagcttctttcattagtcttgcagctccatttatagatgacaatgctcctcaaaaacaagtatctgtttgaattttgttttgaacttcttatgaagccaaaatgcaccattatatttataaagcttgtttggttttaacagaaaaactgcatggcttggactgttttacatgtgtataccaagtggtgttgctcttggttatgtctatggcggatacgtaagttatatttaatattagaacacttttataaatacgaaaaacgcaatcggtgattccttcttgatgcgtttaggtaggaaaacattttagttggcggtatgcgttttggggtgtagctgttttaatggctccatttgctgttcttggttttttaatgtcacctttacagttaaaaggttaagaacaaatcttgtattatgttatatattaagcatgccctgttcaaatatccgcctcccccg

SEQ ID NO: 172308 - DNA, 1201 bp, Arabidopsis thaliana landsberg; identical to SEQ ID NO: 24049

SEQ ID NO: 172309 - DNA, 562 bp, Arabidopsis thaliana landsberg
  unsure (1)..(562): unsure at all n locations
atggcaggaggagcttttgtatcagaaggaggaggtggtggaagaagttatgaaggaggagtcaccgcattcgttatcatgacatgtatcgtcgccgccatgggaggtctgctctttggttatgaccttggaatctcaggaggtgttacatcaatggaagagtttcttaccaagttcttccctcaagtagagagccagatgaaaaaggcgaagcacgacacggcttactgtaaatttgataaccaaatgctccaattgttcacttcttctctctacctcgcagctcttgtagcttcctttatggcttcagttatcannnnnnnnnnnnnnnnnnnngtctctatgtttattggtggacttgctttcctcatcggtgcactttttaacgcatttgccgttaatgtttcaatgctcatcatcggtagactgttgcttggtgttggtgttggatttgctaatcaggtacgtgccccatccgttgctttcttgtgtatcaatcatctaattctatggtttaggttaatatctcaatctttttatgtgtagtctacgccggtgtccc

SEQ ID NO: 172310 - DNA, 558 bp, Arabidopsis thaliana landsberg
  unsure (1)..(558): unsure at all n locations
ctcgagttcaagaagcaggggatcaccctcgaactgttctcggccaagctgagcgaggtgagccgggtcgccgaccatgtcacggtcatccgncgancgcgcagacgatccgagacgctgagccacgacacgctgagccaggaccgcatcatcacctcgatggtcgggcggtcgctcgaggaccgtttcccgccgcggcagccaaagatcggcgacaccattctcgaggtcaagaactggtcggtctaccacccggtgcatgccgagcggcaggtgatcaagggcatcgacgtttcggtccggcgcggcgaagtggtcggcattgccgggctgatgggggcgggccgcaccgaattcgcgatgagcttgttcggccgcagctatggccgccacatcaccggcgaggtgtggctcaacggcaagaagatcgacacgtccaccgtggggcgggcggtgcagcacggcatcgcctacgtcacagaggaccgtaagacctacgggctcaacctcatcgaccacatcaagcacaatgtgacgttcgccaacctcaagggcgct

SEQ ID NO: 172311 - DNA, 631 bp, Arabidopsis thaliana landsberg
atgatgatgtctagtaactctacatctccaagtctatggaacttaagagctcaagctttggataggttaagtcctgttgatttgaagcggtttgctatgcagatcttgtcacaaagagattcagagagtgttagtgaaacaaagattggtatcgaagaagaaaatgaagagagtgagatattagcagaagaaaaagaagaagaagataatgatttctctgttttagaaacagaggaaacagagcaagagattaaaacagaacatcatagggaaagttctggaacagagcatgagactgaagcagagcatgagattgaggcaaaggatcatagcgaaggttttgaaacagagcatcaccatattgaaggtttcgaaactgagcatgagattgatgcaaatgatcatatcgaaggttttgaaacagagcatcatcatattgaaggtttagaaacagagcatgagattgatgcaaatgatcatatcgaaggttttgaaacagagcatcatcatattgaaggtttagaaacagagcatgagattgatgcaaatgatcatatcgaagattttgaaacagagcatcatcatattgaaggaatcgaaacagagcatgagaatgaaacagaggatcata

SEQ ID NO: 172312 - DNA, 429 bp, Arabidopsis thaliana landsberg
atgggcatgggaggtatgatgtagatatctacgcctcccatgagccggagcgatgtggccagaaaataaggagcacacgcgactatattttctgactccgtcgaaaaacactattcataatgtgttttccgacgataatacatacctatattctatcgaaaaacatctggctcaaggccagatgtttttcgtgttataatatgccttatatcaagctaaaacgtatgttatgtcatttccaatgatcctccttattgtcgctgtcattctcgtcctctgggcgatattcgcgtacaacagattcgtaaagctcgtacaacgtacgaaagaagcatgggccgatatcgatgtacagctcaagcgtcgctatgatctcattccgaatctcgtcgagaccgtgaaagggtatgcggcgcacgaacgcggcac

SEQ ID NO: 172313 - DNA, 527 bp, Arabidopsis thaliana landsberg
tggccggttcagatcagacaagaaagggtcagccagcaaaggttcatcaggttgccgtgaggtggatcttttcgtgaagcaagtagacgggaagaaggtgactgatcctgcgaaacaggacgcgctgcggtcaccctgaggtccgagacgctccatccgctcagggtcatggtcgtcggccgtggacccgacacggagctcctcgtcgccaacccggtcgaggcctccgggaagggacggccgcgcgtgttctacgacgccactcttgctctgaaggcgcttgggatctgcatcttctctgtaagaactgcttcttttgtttgttccatttcaggcttagtatttcactccattgggtcttcttcttttgctccgtttcaggctgagatcgggaggcaagcggcgtccgagcgccactgggaggtgtacaggttcctcctggatgacagcaaggagttcccttggcaagcagcctcgctaacaggaactgtgtcgtcgatagggcgaggaagacgctgatgggatgc

SEQ ID NO: 172314 - DNA, 1553 bp, Arabidopsis thaliana landsberg; identical to SEQ ID NO: 10369

SEQ ID NO: 172315 - DNA, 1647 bp, Arabidopsis thaliana landsberg
gcggtcaagcttctcgaagctgaaaagaagttggccgctgcggaacttgctctagttaacgcatagcgactatgatgtttccagaaaaggggaaagccacacaggatgctttcacccattaagagaatcccatcctactatccgaggccaaccttgagatttcgtcgacaggcgagaggtacaagcgtatgttgaccgaggagagaggtctcttggataataaaattgctcgggttcgtcgatcggtagcgcgagagactgcagctttgtttgttgagaggatgaaagctgtcgaggcgaagttagctatggtcgatcaagctagcgaccactggatgtatttggcgcatgctaaggcaaacaccgagctgattgatgcgcttgagggtgggaagcatttggaggacgagaaggagctggtagaaggattatgtagtcgccgaggcgacatataccagtctccttaaagaagttatggaagagttggccattccttatgttccttctaccttggatccccagagtcgtgcaggcaacagatcggtggaatgccaggtggatgagatcggtattgccaaccaagccggttcgaacttccgtggcgatgcctcgcgaaatgaaggacttgacaagtgacccgaaccagctttccttttatttttgtgtacgtaaagattggcgcttggatggctttatcctttttggtttttgtaaacacttatgtctggattgctttatccacaaatttcaccttttgaaaatttggcctctcataagatcccgatgcgttttattcgtttgatgttaccgtaacctaattgagtcgctctttcgcggaattgctttctaattacgaaccgttttattggttagggccagtgtgaatggaatagacttaactttttgcattggtgaaatcttctcggttgcgacctgatccgattcactctttcaccagcgtttagaaagaagctggggtaccggtattatgatataactgggttttctgaagatagaacgagattctgcgcgaagtttttccggcaggttataactcgaatttagatagtgcgttgtaaccaagtaggtttaaaagatactctgagccgtcgctcatcgtagtatttgaaacaggtacaaactgtgaaaagtagaacttttattcatgccaaagtgaaaactcacaagataaatgaaagtgggagtatggatatacggacccactcccccttttttaatttgggggtggggggtagctgaactcgttcgaagacgagctgcctaagtacccttcttagggatcaaaccacctcgtagttcaagtttatgcttctcacacttagttatagtatttcctgaggtgcatggcattccaggatcttggaatgactttgctgcttaaatcggcgagttcgtaaatgtctggtcagacgactttcgagattaagtatggtccttcccagtgtgccctgagttttccagcgttcggttcgggggtgttccgaaaaacttttcggagaacccgatctccttcgtggaatctacgctgtcgaacgtttgagttataatgaagagccgtttcattttgataattttgtatgcgaaccaaggctgaatcccttcgttcatcgatcagatcgagttcgt

SEQ ID NO: 172316 - DNA, 2483 bp, Arabidopsis thaliana landsberg
gaagaaattgatattccaattttcaggtaagtatatatatattggcttttttgaaactttaattgttaacattactaattcccaaaatgattttgaaatgcagccgcagatacatgattgaagatgatgaggacgatcctaatatggaggtcgttgaggagaactaaagctatgatgaattgtatgtttggttttcttttttgaagttaaactctgttctttttgtttctttctatctctcttaatatttggattctattctattttgtaatggtttaagaatgttttattttttaatcttaatctatgttcaaatcaaaagtttgccaccactacaggaaatgtgggtattgatagcataataagatagcgttgtttatctatgtgctataattgacttaatcgtgttttaaagatagcgttttgtatattgtaaacgctataaattattaaagcgggataatgaaattgacgcggggaaattttgtggttctaatctttagtatcccgctattgaaaatggtaagagggaaaaagtgaaattttggctaaagcaaaataaaaaaaaatcctaaaaaataactttctcatttttttgcctaaggaaaggtaatttttggatctaaaaaaacaaccctagctcactcgatttctcattttcttgaggtattgagctcaaaatctgcaactctcactcgatttctctcaatctcactcgctttcttagtcactccatctaattcgcactttatctcactcgatttatctccctgcaatcttcaataggtatgttctaattcaatcatagttctttgttctttggaatggaaaacaattttgatttggggttcttattcttggcttgtgtgaacattgatgcggaagtttgtgattttgggtatcaattttgatttgttagtttcgaggaacatgcatgtcgaagtttggcacatttcttgtttgggttatgtttttaggtttcgattatgatttttgggtttcgattgaaactgttcttcatttatcagtttcagaaatggcaaagacaagaggtggaggtaaagttggttctcgtcgtagtagacataatcaaggcttggaggtagaagatataacaccacaagttgctcctgcaacaacattaaaggtgaataagaaaagaaaagcaatgaaactagctacaagaagaagcaagaaaatggctgctcgagatgatgaggtagaagatgttacacctgtagatgatgaggtagaagatgttacacctgtagatgatgaggtagaagatgtgacaccgcaagatgatgaggtagaagatgttacaccggatgttgtggaagaagagaagggtaatgacaaggatgtaacagtaccggaggctgatcagactgagaaagcaatgtctgaagatgagaagagagattctgagatagaagtaagaagcttgtttgactggacaagaacagcagaagaatgtagaagctgccaatatggaagaagatggtgttgccaatggtcaagataatgcaattcctagcaacactgatgaatgaagtaaagtagcgcaggaaagagtgaaagaaagaaagaaagaaaagaggacccacaaagatgcgtaaagtggctgaaaatcctaatgaaaaggtttcagttactttcactgactttggtgatcatgttggacctggttcaataacattatcatcttttcatggtgtcctggtgagggaacatgttccggttacacttgctgattggaggaaaattgatgcagtggctaaacaaacaatgtgggaagaaattcaagtatatatttatatgcaacaatttttggctggacatatatgaaacaagtgtgacttttgcttgttgtatgtgatgtatgggaggtttaacttgcaagaagaatggcagagagttgttatttttaagcaaatgggaaatatctggagggcttggaagtcaaggctagtttcagaagtaagtgctgcgaagactgttgcttagataatagatttaaaacccagcaacatcccatccactcaagtgtggaacacttgggttaggagcaaaactaacgcagctttcacggttagttatttacaactaactactttcttgtttatatgtcatggctgatagatttaatgcgttgatatttatcatgtaggaaataagtaacaagtacaggaagatgagacaaaatcagattcctcacaccaccagctgcaaaggaatgcctcgtttagctgatgatatggtaataatagttgtcaaatatctatatatattgtattcttgttagaatcaaatggtactaagatatgtatgtactttatatagaaaaaaagagtacagacccaagtaaggtgactagcagtaaggtgtggattgcgggacactatcagataaagatagagacagtgcacatcgttatgtgctatttacatggcatctttggatccttatgtcgagtaagaggt

SEQ ID NO: 172317 - DNA, 1692 bp, Arabidopsis thaliana landsberg
tcactgttgctgatagtgatgcagagctgctccaggcgtgttctttccgggcaagatgtcgcttacctgtgatcacatggtgtcagccaggtaggaaggcagatattttggacttttggttgcttccattttaattgtggttgtattgcttccaaaatgatatactgattttgatcttaacctcaattgcaggaagtggagctgtgattgcacgctcatcacaacctttagtgggtcttatgatgaatatgaggaggtatataaaactttcaatttcacgaggagacatttttgataacattttgttttagttttggatttcaaattttctagacgcactagattctgactattgatttgttttattttatccaacagtaatcttgatgaaaaactagttgctgcattctgctctcagttacctggtgctaagggagaacgaaggtgagcttaatatggttaactcttacatgtcttgtattttatgtttcgttataaagatttaaaatttatgaatcacgaatgcatctcacaaagggaaattagcacttttgtggggcttgctggacgcgagatcatcttctaaatgcatcaaaatgtctgtttggttactattaaaatacctgctgttagataaccaatatggttgacagttttttttccttttcatttacaagtatgtgttgaactcaactcatgtggtttatagttacaaagatgcacttatctcatcttgtttttgtttttactttgtaggaagctttatattgctgatgcaagacctaggaaaaatgcattagccaatggagcaatgggaggtggctcagaatcatcttccaattattttcaatctgaagttagtgaatggtcttggtggtttgattattaaagtcttgatcttctggaattccatgattttagtgactatgtttctttcttcagattgttttctttggcatagacaacatacatgcaatgagggagagcttttcccgcgttagagattatttagatatgcacggtacaacatcatccgatgggagatcatcgttcttggtaagtactgaatatcaagtaacttttttgacggatttctttgaggggatacaatatgatatataatatttttatgttgcgtatcattaagatatatgtatgtgtgaattctgcagagacacggtggttggacctggggaggaggtaatcttagtagtatgtctgcttcagtatctttacttggagatagtggctggttgatacacatccagagcgtcttagctggtgcagcatggattgctgcacgtgttgctatggagtcggcatcagttcttgtgcactgcaggttagctaccttgactcacatcaccggccaactgcttaaccaatttctgtcctcgtgataagatgaatatacgtctgtttgtagaaaaccttctattatcatcagggtgaaaaagattatttgttatatcatgactcttcgtatgtcattgcgcagtgatggatgggacagaacaactcagcttgtttctcttgcgtgcttattgcttgatccatactacagaacttttgctgggtttcaggtattccctgtgctatttggtgtttctgggttcttacttttgaagtatcatagcataatttaatggtttacaattgtaaaacttttctggagtaccatatcgaaattct

SEQ ID NO: 172318 - DNA, 1121 bp, Arabidopsis thaliana landsberg
gaacgagagatataaggtggccgtgggaatagctgaagcgttggactatctgcataacgatgctccacaacctgttattcacagagatgttaagtcatctaacatattattgtctgatgattttgaaccacaagtaagtttcttttagtttccaatgtttacatcgaagaggaaaaattcacgagatactaaaaagagaaatcttgttcacagctttctgactttgggcttgcaaagtgggcgtcggaatccacaactcagataatctgctccgatgtcgcaggcacctttgggtgaggaaaaaaaaaaaatatatgttgatgctgcgtgaaagttgtttaggagataacaatcttgaaaatgttctacgtttcttgttgcagctacttagctccagagtactttatgtatggtaagatgaacaataagatagatgtctatgcttacggcgttgtactcctcgaacttctttctggaagaaaaccggttaatagcgaatctccaaaggctcaagacagtcttgttatgtgggtatgtggatactaccggcaaaatgttcttacattgaaatgtctaagctttctttgttattgctaaacagacatgcatgtacacttgcaggcgaagccaattctggatgataaagaatattcacagctattggactcgagtttgcaagatgacaacaatagtgaccagatggagaagatggcgttagcagccactctttgtataagacataaccctcaaactaggccaacgatgggaatggtgagtcaattcttaatcctccatttcattgccagtttcatcattttagagatggctactatatcaaacaagttattaacacgatatgtcttttggaaatgcaggtcttagagcttcttaaaggtgacgtagagatgctaaaatgggcaaagctacaagttagtaacccgttagaggattcaatgctactcaaggacgagaaattgcggaggtctaatctgcagtcacatctaaacctagcattccttgacatggaagatgactctctttccatgggaagtatggagcaaggcatctccgtggaggagtatcttaaaggcaggacaagccgttcatcaagcttcaactga

SEQ ID NO: 172319 - DNA, 1003 bp, Arabidopsis thaliana landsberg
ggtggtcttatacatctaccgctagttaaaaaaatgaatctgctggtaaagcctttgatgatttgtttaaccttcaaaaaaaaaaaaggttaaaggttccttggagaaaaaacaaaccaattctctacgataagttaaggaaacttttgaagacaaaaaatggaaaaaatttgattagaaaaggaagagaaaaaaggacttcctattttaaacagtagcaccaaccaggggttcgattttccaataagcttgatatgtttttccggccgtgtgttcatacggtgggccggtactcgagagctcgggatcctggattactctcttctcttttcttttaccgaagttgcaataatgtactgaccaattcactgccaacggtaacacgggccggcgagtttcccagatacggatatatatgcaggaggagcagcacatcagcagcggagaggggtgtgtttcttccatttgcgttaacttgccgaagaaatatccactcaatacatgaagatgagaagaagctagaacggtggaagaaaatagaagaaagtcatcctcttgatgaattggtgctggattcggttgtaaaggtattctctaactctaccgagtatagcaaatccaaaccttggaagactcttgaccaaaaatcatccaggggcactggtatgtgactatacttatctcaaagctcacttcaaagttgttatttttatggcttgaaattgatgttctaggatttgcaatcgccggaaggaaaattcttacgaacgctcatgtggtgatggctatgaatgatcacacattcgtggacgtcaaaagacatggctctcaaatcaaatacaaagcaaaagttcaaaagatttcacatgaatgtgatttggccatcttggagatcgatagtgacgagttttggaagggtatgaatcccttggagcttggagacataccacctctccaagaagttgtgtccgttgttggtaataaatcatatggacactatcct

SEQ ID NO: 172320 - DNA, 994 bp, Arabidopsis thaliana landsberg
ccccctgaggttttagctctagcggaaatggacctcaagttgctaatgtaaaggataatgagtccgccatatgtgaggctagtgagtaaacaaatggttgggattcttttgaccatttgggttaaacgaagcttgcggaaacatattcaaaacgtacgagtctctactgttggtgttggcgttatgggatatattggtaacaaggtatatatataaagattagatgtttccatcaaatttatgttacaatatgtttcaggattgtgaagtgattttgtggtctctgcagggagctgtgtctgtgagcatgtcgataaaccagacgttcttttgtttcataaacacgcatttaacggcaggagaaagagaggttgatcagataaagaggaatgctgatgtacacgagatacataaaagaacagtctttcactctgtctcagctcttggacttcccaagcttatctatgatcacgagtcagtctttttttctctcttccaaataaatctttaactcaaaaaacccgttacggtttcgatttgtctaactttacttgtgtgttttcaccacttctcagaagaataatctggctaggtgatctcaactatcggcttagttcatcgtatgagaaaaccagagacctcatttccaagagagaatggtctaaattacttgaatatgaccaggtaattatttggattacctttgttactgttaggatttggatctcaaatataactttagaagacgtctaatgcaaataaaaatacacacacacactgtctcaaatccgaccatagctctgaagtttattcaacttatgttgtgacacattttgttacttatgattattatataatgcagctggtaaaggaatacagaaaaggtagagcatttgatggatggtcagaaggaactctacattttccaccaacttataagtaccaagcgaattccgatgagcacaccgcaaacgatggaaaggcgccgaaaaga

SEQ ID NO: 172321 - DNA, 1131 bp, Arabidopsis thaliana landsberg
aactagcctatggagcttctgggtcggagactcgagtgtatacccggaaaaaaaggctaaagcaggaaccttttgagcctctggagaaatattccggcaaaggagtcaatacccacaaagtaagtttcctcaattgagagtttagcattttgtagaactgggttctggagatttatctctcaagtgtgataatttctctaaagtgtgttcttacttggctcagattttgtcttatttgtccaaatgtcttgagttttaagttaatctgactcagccctatgggttgttagtgatcctagtgtttttaaatttgttcgccctgtgcttcagcaaatgagagaaaaccttgattagtgttgccatttgttccatgaccatatatgaccttgtgttagtattttactatttagagtcttatgtgttgcttaatgtaatgtcttccatcttttcatgtctaatgatgcatcagctgtgtggtttacccgatatagaagattttgcttacaaaaagactattggatctccttcatctagtaagtctccttttataaactcacaactttcacattcccaaccattcattaaacttaatatcaatcaccaggttgaaaaaatagccaaagaacctgactactttctaaactagttgcatgatatgttcttgtcacttgaatgtctcaacagatttaatctgaatagaagttggtaggaaaagttctatcatcaagaagattctttaaacggtcaagagatattaattatctagcttttgcaggcaggtcaacggaaactagcatcactgtgacttcagtcaaaacagcaggtatgttatcatgcaccgagtcccttaatgatagggttggtttggtttttactttacagatttcttcacacacagtaacttgttatgtttataatccaggatatccgcctgaaaactgggtcgaagtgctcgagggtattcgtcaaatgagatcttctgaagatgcaccagttgattctatgggatgtgataaagccggaagctttctacctcccacggtataattattttcctcatttagtgtttaaattttgtgtggaagtatgccatgagatacactgagtttctgctcttttggcttgagcttt

SEQ ID NO: 172322 - DNA, 764 bp, Arabidopsis thaliana landsberg; identical to SEQ ID NO: 64831

SEQ ID NO: 172323 - DNA, 1220 bp, Arabidopsis thaliana landsberg
  unsure (1)..(1220): unsure at all n locations
atggatcaagaagctcttctcgtcggaagaactcttctgaagcgcggtattccgaccattcctttcattctaggtataatcaattcttgtattcttatatatgatataaactccgtattcataaaaatagatagatttacgtacttttttttaattcttggtaattaaatggttttggatagcaagtcaggctttggagaaacttgcatattttggtttggtaccgaacatgatactcttcttgacggtggaatacggcatgggaacagcggaagcggccaacatccttttcctctggtctgccgccaccaatttcttcgctcttgttggtgcttttatcgctgattcttacaccggtcggtttcctctgatcgggtttggatcctccatcagccttacggtacatatttgatgtcataagctcacaaatcagaacaaaaaatgaaattggagaaatataagaaattatatatgaaactggagaaccttagcttgcgtcttaatacaattgttgcaaaagtcctagtccatattatcattgataaaaaaacaaataactatatattctaatgatgcatgtaattatactatacattaataataatcatttgtagaattttcaaaaaaaaattaatcatcctatattttccgtggctattattttatttatgtaacttttgctttataattagttgtatttaatttaatattgcttgtgagtaacagggaatggttttgttatggctgacaacaataattcgaccagaatgcgataaattaacaaaagtgtgtcaacccaccacactgctcaaaagtgttctcctatattccttttttgccctcaccgccattggtgccggcggcgttagatcctcctgcttagccttcgctgccgaccagctccaacctaatcagacgtcacgtgtcaccacatcatccgtagaaacgctcttcaactggtactacttctccgtcatggtcgcatgctttctttctcagtctttgctcgtcttcgttcagacaacgtatggctggcagatcggttttggagtttctgtcgctgccatggctctatcggtcgctttgttcttcgcggcgtctccgtactatgtaacgtttaagtgtgagtccggccnnnnnnnnnnnnnnnnnnnnntgctcgttgttgctctcagaccagatcatcgttgatttatcaccggaagtgcatattatatcgt

SEQ ID NO: 172324 - DNA, 1147 bp, Arabidopsis thaliana landsberg
tccttgtgccgcaacgacgaacgggatgctcttttagagctaaaagaagagttatcgatctattccagcaacagcgctcctgtaccaacagtttcatggaacaagagcgtcgactgctgttcttggaaaggtgtgagatgtgatgctatcctccggagaggtgatatcactaaaactcggttacccctctagaaccaacacctctttgaaatctagcagtggtctttttaagctccaacatcttcgtcacctagatcttttatctttaggtctccaaggggagattccttcttcatttggaaatctttctcatctcacatatcttgatctttctaatagtctactagtaggtaaagttccggattcaatcggtaacctaaaccaactagaatacattgatctttccaataataatctcgtaggtattattccttctacaataggaaatctttctcatctcacaggtcttactctttatagtaaccaattagtaggtgaagttcccgcttcgatcggtaacctaaaccaactaggatacatggatctttcgtttaatgatctaagaggtaatattcctatttcgcttgccaacttaagcaagctttctcaattaaacctcaatagaaatcaattcactggtagggcgatactattagccaatttaaccaatttgcctgaaatagacctctcctccaatctcttcagatcctctattaccggtgaccttagtggactccacaatttaaagcgatattcggtgcaataacaaatcatttgtgggaccttttccctcatccttgctcatgattccttcgttagtccatattgatttaagccaaaaccaattcgagggacctcttgacttcaagaataccacttcatcatctaggcttaaagagttagatgttggcaacaacaattttgatgggacaatctcagaacctatatcgaaattaatcaatctcggatctttaaatcttagccatcacaattttggagggccagtccctagatctatatggaaattacggcatctctattctttagatcttagccacaacaatttaggaggacaagtccctagttcccttatcaaaattagtcaacctcggttcccttgatctttcatacaatatgttgaaggtca

SEQ ID NO: 172325 - DNA, 2038 bp, Arabidopsis thaliana landsberg
  unsure (1)..(2038): unsure at all n locations
ggacaacccgttgtatggcttcggcggcaagggcacctttcccgtcggcaaaatagagttgcccctctccttcggtgtagcacccaatgcccgaagtgagcaagtgactttcgatatcgtggctatggtatatccatacaacaccatcatgggtcggggctccatcaataagttcgaagccgccattcacggactgtacctatgtatgaagataccaggtccgctaggcgtcattacggtctacggcaaccaacagacggcgcgcaacatagagcgggacttcgtgcccggtcagagaaacgtgcactgcctcacgggccagcgcgaggtccccgtgcccgccagcccaaccgataaacagcacgacaaggcacagctgcagagccaagacgggaccaagactgtccccctcgatcaggccacgcccaagcagacagtcactatcagcgaagacctcacttcgcatgaagaggagaaactcctctactgcctgtccaagaacaaagatgtcttcgcctggtcagccctcgacctggtcggggtcagccgatccataattgagcacagcttgggaatcgaccttcggtgagaccgaaaaaacagcggcttcgcaaaatgtccgacgagaagacagaggccgccaagcacgaggtgcaccgcctcctggaagccaaattcatcgagccggtggttaccccacgtggctctccaacgttgtgatggtgcagaaaaagagcaggaagtggcgaatgtgcatcgacttcaccagtctcaacaaggcctgcccaaaggacaacttcccgttgccgcagatcgacaagatcatcgatagtgcggccggatgcgaagtcatgtcactcctcgactgcttctctggctatcaccaaatatatatgaaagaggaagacaagaccagtaccagtttcattacatccttcggcacgtactgcttcatcaagatgccggacggactcaagaacgctgggtcaaccttctctcgcctcaccaagacggtgctcgagagccaagtaggccggaacatcttcacgtatgtggacaacatcgtcgtcgccagcaaaaataaggcggatcacctggctgacctcgcagagacattcacaaacatgagggacgcacgacttcgcctcaaccccgagaagtgcgtcttcagggtctgccaggggaagatactgggttacctggggtcgcaccgcgggatcgaggccaacccaaccaagatttaggcaatcatcaacatgacaccctcgcagacaacaagggacgtccagtgtctgacaggcagattagccgctctgaacagattcatctcaaagtccaccgagcggagtctacttttccttaagacactgtgcggcgcgaaagactttgcatggggacccgaacaggcggcagccttcgcctcactcaagcatcacctgtcagacttggccattctcaccagtccagacccctcgctgcctctgctgctttacatcgccgccttgccacatgcagtcagcgcagctcaagtccaagagcaagacagggagggcacgacccgacagtgtccagtctactacgtctccaaggtcctcacggcctccaagtgcaacatgaccgagatggaaaaaatctcctacgcagtcgtcatggcatcgtgcaagttgcgccactatttcgaggcgtttaaggtgcgggtcacctcggacaggggattgggcgaactattcagaaacccggaggcgtccatctgaattgccaaatcgacagccgaaatctccgggtaccatatcaccttcgagcccannnnnnnnnnnnnnnnnnnnnncctggcagacttcatcgtcgactggacagggctgacacagtagcaagaagagccctcagagaaggtgtggaccatccactatgacagcgcatggtgccatgcgggacaggcacgactgcaattatcacgtcacccataggcgtcaagaacaaatacgcagcacgcctctagtcgctctggagtccgacagatgcaccgaacaacatagaa

SEQ ID NO: 172326 - DNA, 335 bp, Arabidopsis thaliana landsberg
ggaaagtgttcaaatcttatcaagcattaggtgggcatagagcaagtcttaagaagaccagagtaagtaacaacaaaacagagcaacgaagcgaaacagagtatgataatgttgttgttgttgctaagagaatccatgaatgtccgatttgtctaagagttttcgcatcgggacaagcacttggaggtcacaaaagatctcacggggtagggaatttatctgtgaatcaacaacgtcgagttcatagaaacgagtctgtgaaacagaggatgatagatcttaatcttcctgcaccaaccgaagaagacgaagtctctgtggtgtttcaatgaatg

SEQ ID NO: 172327 - DNA, 180 bp, Arabidopsis thaliana landsberg
atgccctatagttactctcaaccatccacgtccgaagctagttggaatagtggagaggcgaatgccgatgcaaattggggggttccagaaaaatgtttttgtggtaagcctgtaaaacttgaagtgtgcaaaactggttacaggcaaggcgacaaagtctacaaatgcccaatgcttaaa

SEQ ID NO: 172328 - DNA, 498 bp, Arabidopsis thaliana landsberg
tgtgcttcctttataaccaaaatcatatggaggtgatgatcagtcattacgatctttggtcttaatgttttttgtgcagaggtcacaaaggatggtttgttctctgttggagagatggagtgcatggtatggattttgcgtcacctcaattcattaatccatgcagaacaataaccaagattagtactttcacatgaaaagattcaatgcagatctaatgtgtttggttttgttacagggatgttgtgttaatgcacccatgatcactgtggctgactattccaatggatcagaaggatatacatataactatttcgtatgtcaaatctcgttgaacaatttttctttttctcctgcattatcctattgtttatgtgggttacgtcggaagagtgaaatcatacttacactgtcttatgctacaatacacaggaagatgttacacctgagaaagtcgtagaaattgttgaaaagctgagaaaaggagaaaagccaccg

SEQ ID NO: 172329 - DNA, 1758 bp, Arabidopsis thaliana landsberg
gttgatgataaaaactaaaaaggtgaaaatgtttcaagtgaaggaaatagattgggccatcattattgttgggccacgaaaagaggtatatggtgtcaatgagttaattatggtttccaaagagtaaagaaacaaaaataaaagatagttgacgtcggtgaaaactttagaagaagacggataaaatatggttataacttttagcctttaggtgtgcatatagagataaaatggagcgataggatttaagaagatattgtacgtctgcatgtcaattatctaacaagggtgtccaagtaatgccgtgagaaatgggtttgtaattaataggtcatgaggtaaagagaaagcaaagccactagctcttcaatgatatcttcttggctagctaaccaaaacaagggattagagaattaggttaggaagagatagctttgggtgaaagggaaaaatatgtgtaagtgttaatgatagagtgaattattttcgttacatataggcagaagactaaattttggctaagtttagcggaacaagttattatagttttccgcgtaattcctccgattgttcctttgattgtttctccgattgttcctccggttgttcctccggttgttcccgtttatacatcatcgattgataatccagatagtattcattctccatatcatctttccaacagtgataatcttggaatttctataatttctgaggttcttgatggtacaaattatgatgattggcagatagcgatgaaaacttctttagatgcaaagaacaagattgcttttattgatggatctatatctcgacctagttaaacaaacgctatgttcaggatttggtcacgatgcaacagtttagtgaaactcttggattctaaactcggtttcaaaacagatctataaaagcattcttcgttttagtgatgcatctgagatttggaaagatttggccacacgttttcacattacaaaccttgcaagatcatatcaattgtcacagcagatatggtcactacaacaaggttcaatggatcttgctacgtattatactactctgaagacattgtggaatgagtcggatggcgctaattgtgttacagtatgtaaaaactgtgattgctgcaaagctatggaaacaaaatcagaacatgctcgtgttattaaatttctggctggcttaaacgaatcctatgccgtcattagaagtcagataatcatgaagaagcatattccagaacttgctgggatttacaatttgttggatcaggatttgagtcaaagaaatatcactcctgttcagaatgctgtagcttttaatgtttcagcaatggaaccagctcaagcttctgttaatgctacttataatcattcaaaactgcagcagaaagtgatttgttctcattgtggatacactggtcacactgtggataagtgttataaaattcatggttatcccataggatttaaacacaagaacaagaatgctcaacaggataaacagattgttcctccaaaacctgttgttgctcagttagcttttactaatgctacttcgagtgatttgttaacaggaatggcaaaaactctaacaaaagatcagattcaaggggttcttgcttatttttcagcaaaactcaatgatggttctgtgacatggcttctccatctggtgctacgattactgcattacctggtatagctttttcttcctccacattacgttttatgtagccttaaagctcaggaagtg

SEQ ID NO: 172330 - DNA, 550 bp, Arabidopsis thaliana landsberg
atggcagatggaaacactccacatgtagcaatcataccaagtcccggtataggtcacctcatcccactcgtcgagttagcaaagcgactccttgacaatcacggtttcaccgtcactttcatcatccccggcgattctcctccgtctaaggctcaaagatccgttctcaactctctcccttcctccatagcctccgtcttcctccctcccgccgatctttccgacgttccttcgacagctcgaatcgaaactcggatatcgctcaccgtgactcgttccaacccggcgctccgggagctttttggctcgttatcggcggagaaacgtctcccggcggttctcgtcgtcgatctatttggtacggatgcgttcgacgtggctgctgagttccacgtgtcgccatacattttctatgcatcaaatgccaacgtcctcacgtttctgcttcacttgccgaagctagacgaaacggtgtcgtgtgagtttagggaattaaccgaaccggttattattcccggttgtgtcccataaccggtaaggatttcgtcga

SEQ ID NO: 172331 - DNA, 453 bp, Arabidopsis thaliana landsberg
  unsure (1)..(453): unsure at all n locations
atggagaatatgtttagactcatggcaagtgaagaatatttctcagagcggcgatgtgtttgggtcaacggtccggttatcgtaggagctggtccatccggtttagctacagcagcttgtctacatgatcaaggagtcccattcgttgtggtcgagagatcagattgcatagcgtcactgtggcaaaaacgaacctacgataggctcaagcttcacttgcccaagaaattctgccaattaccgaaaatgcccttcccggatcactaccctgaatacccaacgaaacgacagttcatcgattaccttgagtcatacgcaaaccggttcgatattaacncggagtttaataaagcgttgagttgctcggtttgatgaaactagcggctatgagggttagaacacctcagacgagaggagaggaaatattgccggtggtgtgttgcgacggagaaa

SEQ ID NO: 172332 - DNA, 889 bp, Arabidopsis thaliana landsberg
tcgggatatcgaacattgcgtcgcgaccggcgggagggatgatatcggatgcgctggggaagagattcggtatgagagggaggctgtgggggctatggatcgtgcaatcggtggctgggttgttgtgcgtgttactcggacgagtcaactcgctctggggatcaatcctcgtcatgtgggtcttctctgttttcgttcaagctgcttctggccttgtatttggcgtggtccctttcgtctccacgcggttagtttaaagtctaccaatccggtttttgctaataatttcggtttggttttaatttggttttgtttataatgacagatcgttaggagtggtggcgggaattacgggaagcggcggtacggttggtgcggtggtgacgcagtttctgttgttttccggtgatgatgttcgaaaacagagaagcatttcacttatgggtttgatgacttttgtgtttgctctttctgttacatcaatttactttccacaatggggtggaatgtgttgtgggccttcgtcatcttccgaagaagaagatatttctcggggactccttgtagaagacgaagatgaagaaggtaaagtggttagtggtagtctacgtcccgtttgttgatgccgcatttgaactgctggcccatttggccaaagcaaaagcaatagcaaaacattagtatactactaataaggacgaatttgctgttatcaagttaaagagtctatcaatttttttaaatatatatatgttcttgtttgtgttgaaattctccttccataaacaacactagagctgacaacattgcaaaacaagacataattagtttgtatcctttttgtatctcttgtaacaatataggcaaagtgactctgacaaataacaat

SEQ ID NO: 172333 - DNA, 918 bp, Arabidopsis thaliana landsberg
tgatcaaaggctcaaagaaaatcatcgagcaagatggcccctccacgcccgaagcacaaccagtcgcattcaaggcgacggaggagaagaaggaagagtctacatcaagtagactccccattgacgcctccaagctcgacaatgaggagatggcactcatcatcaagagcttccgccaaatcctcaagcaaaggagaggaaaggactacaaatcccgctctaagaaagtgtgctacaagtgtggtaagcccggtcactttattgcaaaatgtccattatcaagtgacagtgacaggggtgacgacaagaagggcaagaggagagaaaagaagagatactacaagaagaagggtggcgatgcccatgtgtaccgcgagtgggacttcgacgagagctccaccgactcctcctccgacgaggacgccgccaacgtcgccgtcaacaagggacttctcttccccaacgtcgggcacaagtgcttcatgacaaaggatggcaaaaagaagaaggtacaaactagaaccgcaccaagtatactacatctagtgatgagggtagttctagtgatgatgaagatgatttgtttacgctttttggcaaccttaacatgcaacaaaaagaaaaattgaatgaattaataggtgctattcatgagaaggatgaactcttggatagccaagaggaattccttattaaggaaaataaaaagcatgttaaagtaaaaaatgcttatgctcaggaagtagagaaaaataaaaacttgtctaaagaacttagcatgtgtcatgattcaattaccaatcttagaaatgagaatgctagtttaatttctaagattgataaattgaatgaatcaatttctagccttagaactgaaaatgctagtttaacttccaaggctaaagatttaaatgtttg

SEQ ID NO: 172334 - DNA, 2463 bp, Arabidopsis thaliana landsberg
ctgcgtgtgcgtaaaatggttctaaaggctgagttaagtgagctgttccattcttggtcagaccaattagaagacccagcactcgatcacttgattgaagacatacacgagtttaagcttgttaaaggttattgggatgtgaagacgagtaagaagaagaagaaactcgtaaaagataaagatgcggatgtgtctgaatctcccgcaaagaagcagaaagtctctcaaagtgagggtgttcattctcgtgagaaagatgcccaaaagaagaagaagaataagaagaaggaagtagccgtcgaatctgatgaggacgaggatgagcaggatgttcggggagaacaacagtcgctcgtggatgtggtgtccaacttgatctctcccttaagctcaaggtttgacaccattgataatagcatcaaaggaatgtcctcccgtctggatgtgattggagttcaagtagaatcgaggattgatgcaaagtttgaaaaaggtttgcatctattgagaacgaggtcaaacagattaaagagcatctgaagggcatagcttagtcagaattaaacactactagttatattagagctatgtttttacccaaaacacagctaggctaccctaagccccaaacccaacagacaccagaaggtccaaacaaacctacaaataaccaatctgctactagtcctcctccagtaagctaatcgctgagttattacttttatttagttacgactgacttatcttcatattatacgaccgagttataacctttatttagttatggctgagttatcttcatattatacgactgagttataacttttagttagttatggctgagtgatcttcatattatacggctaagttataacttttagttagttatgtttgagttatatttataaataggtatgagttttcgatatctaacgcctgagttttcgttacgtttatgcagtcaaaacaagctgtagcggtagagaatgatgcagatattgctgaggttggggtaagtaggaatcttaatggagaaattgctaaggcctccatcgattctgatattgatttcattgagacgtctcctggttcccgccgtttacgctctacgacggtggcgtaggagaatttccaaagcaaaaacatcaccaaagaagaaaggcaatgttaaggagaaaatattaaatgagctaatcgtgaaagagccagccaaaagaggaagaaatgctggtacaaagccacctacaaaggtgcctccaaaggtgcttctaaaggtgacaataaaaaagccaaaatcacttgaggaaaaagccaaggaaaaagctgactgtggtacttcttctggccccaaaaataagcctgaggaagccaaggaaaaagttgacggtgatacttcttctgtccccaagaataagcctaaggaagccaaggaaaaagctgatggtgagaggcgagctgatgactgatctataccttctgaagtccgtatgccacgatacgaccaattttcattccggcagagggacaagaaacaggtcccgcaaaatcatatcagaggggactgcggcgtttacgcgttaaagattcttgaatgtttattgcttagtgtttgttttgatggcattactgatgcaaatatacaagctctacgggttaagatggcagcaaagaccttcgatgaagcacatgaaaggatgcctgcacggtatctaaagacgtgattggctttttcgaacatatgtttatggcttttgggatttttagcatgtgattgtactaaatattgacgctttaggattgataaccagaattatgtctgtatgaatctattatgttaataaaaagttaaatcgaattaatggctgacttatcatcgctcaattcattttacggctgagttatgctaacgtaagggctgacttgtcatcgctcaaatcatgttatggctgagttatgataccgtgatggctgagttattgtagtttaattcgatgtttagctaagttattctaacgtggtgggtgacttatcatcacacaaatcgtgtgatggcggagttattctaacgtggtggttgacttgtcaaacccaaacttccatcccatcaaagaaaccaaacgtcactgtaggactatacatacaccggtttacgacaattgaatagtcaagaacccaaacgtcgttagaggaccaaacgtcgttagaggaccaaacgtttgattcatagggatacaaaataaaagaaataaaataaagaaccataactcaacaaaagatgtttacatctgatatttcatacggacaactgaaaaaaagttttccggttgtaacaggatcacgagaagtggcaacgacaaccttagcattgcaatcacactcgatcggaacgcccttatcgcgcctcctgttttcgtcgtacctcgttcgcatccttatttccatacgatcgagctcctacattaa

SEQ ID NO: 172335 - DNA, 520 bp, Arabidopsis thaliana landsberg
ctccctattagcgaaaatggctatgtacctattcggctgaaagacggctcaactaaaaacatccggttgattcgtattcacatggaagaagacgcagggaaaaacatccactccagcggaacgcaagaaagttttgttgatgttaaccgtgccggaacgccacttttagagattgttacctatcccgatattgcaagcgcttatgaagctcgcgcttatcttaaagcacttcgtggcattgtcatgtatctcaatatatgttcagggaacatggaagaaggcgccttcagagcagacaccaacatttctgtgcgcaaaaaaggcgtacagactcttggaactaagtgcgagcttaagaacattaactcattcaagtttattagcgacgctatagaatacgaaacagcacgacaaatagaacttttagaaaatggtgagcgtgtacctcaagaaacacgcctttgggacaccaaagagcaaaaatcggttgtcatgcgctcaaaagaagaggctgcaggtt

SEQ ID NO: 172336 - DNA, 1689 bp, Arabidopsis thaliana landsberg
aggcgtttcatccggtgattcttgttccggggattgtaaccggcgggctcgagctttgggaaggtcggccttgcgctgaaggactctttcgtaaacgtctttggggtgctagcttctccgagattcttagaaggtaacacattagaccgttatgttcggttcgagatatttttatagacccggtcagatattggtttggttcgtctggttaggggtatgtataattggttaagcttggtttcttcttgaattggctttacgtagtgttatactgttgttgttatggatggtctttggattttcattttggttaatgggtggagatggttctttgggttttgttattgttttgcaactagtttatgaaaatattattttctaagtaatgatggatggttttaggaaattaataattaatcgtgatttttgggatatgtttttaaatgtcattcgaatttggaaatggaaaccgtaagttttgatttctatataggaagtagaaaatcgtcctacaaaactataaaatatatttatgttcaaaacatgaatgacgatttcattgcattttaaaacttactaaatttagaatatcagttttaacatattattttagtatttctaaattttcatatatttttggttatggttttaacatggattctggaaaatatatatatatatattgattgttacggtttttgatttacatgattttctggttagcatttcgattttctcaattctgaattagtttgaagtgtatacttggtcgtttaattgttgtaatttgatttataggccattgtgctggttggagcacttatctctagacagtgagaccggtctcgatccaccgggaatccgtgtccgagcagtcccaggactagtggctgcagactatttcgcaccatgctactttgcttgggcagttctcatagagaatttggcaaaaattggatatgaaggcaagaaccttcacatggcctcttatgattggagactctctttccataacaccgaggtatgctcagattagtcgttattaatacctatatgatcacattgacaacactggtggtctagagaatgatgataatgatatactataagacctccatgattagctactttagtgtatgtaattacatattgttgtagagctttggactaatctatagtttttggattgaaaccgagcaggtacgtgaccaatcgttaagtagactgaagagcaaaatcgagctaatgtatgccaccaatgggtttaagaaagttgtggtggttccgcattcaatgggggctatctatttccttcacttccttaaatgggtagaaacacctcttcctgatggaggcggtgggggtggtccaggttggtgtgccaaacacatcaaatccgtcgtcaacattggacccgcctttttaggtgtccctaaagccgtcagtaatttactttctgctgaaggcaaagacatcgcttacgccaggttaggtccatgaacatttttaaatttactttcacttgttatgttagtattcatgagaactataacatttttagtgaatatttgaattggcttaatggattttgattggtcatttttatggttcagatctttggctccaggtctcttggactcggaacttctcaagctgcaaacactcgaacaccttatgcggatgtcacat

SEQ ID NO: 172337 - DNA, 1096 bp, Arabidopsis thaliana landsberg; identical to SEQ ID NO: 61851

SEQ ID NO: 172338 - DNA, 2634 bp, Arabidopsis thaliana landsberg
cagtgtcaagctttgattaagacaaaacataaacctctcccaagttcctaaaacaatcccactctaccgaactttttcaaagtttcgatttttcttaagcataaagccataaattggcaagagatctcaaagattctatctttattctccaaacccagtacaacggatccataaatttgatgccatatcaatcaaaccataacacaaatttgcgtaaaggaatccatacatttgtcaatacaactaaaccaaagacatctaaagtcaaatcgaataaaaaccggaaagtaggacttaccttgctcaaagtgttagaaacaacgcggtcgcagacacaatttgagatccaaacttgtgtcggttggtgcttcagttgtctctttctcaaaattttgctaaaactaaacgtaaatatttttttttctattgtgggaaattaacgataaatacgctgattttgtttttccaaataaagatacattgtattttttaggttgttcaaaactttacatccttgatccttaatcttatcctttatcaatcatttatcttataaatcataaattattttatcaattgtatttgtgtcatgtgtcaaagtcacaatttaaaaaaaaaaaaaaaaagaaaaaatcaagtttctgtaaaatttggcgaaaccaaactatcgttattttaaaaagataaatcaaattctttacgatctacgcaatctaccgttacgaatcatatttataagaatatgtctttctttttaaaaaaaacttcgaaaattgttatctaatttttatttgaccgtttaatatttttagttttaaatttgaaaaaatacctcgtttaactttagatgctatttaaaacttttgataaaattgaattttcgagttaatgactgttatctttactaacaaaagttctaactacggttaaaacttaacccctggtatttacgtttaaatatacaatcttcttccaaatctttacgattatattgtcttggtcaggtggttattcggtctatgatttcaatacgttgacatgatcgcaaagcagtggactttgtattcgccgttctttagatcggatttgttgcttccggctagcacccagattatttaaccccctcctccatgtatgcgccgataattttagttcttttctaattgtggatatttgtagaatatatgcattatgtccaaattcaggagtaccatgaacaaaaataaattatattaaaagaaaagaaaattcacttaaataataataaagttttgtatacaaactttggaaagtttaatcatctcgaaacaatatttggataatatacaatgtgccaaggggtgttaatgcgggctcttaaatagtgggctttgcataatctaaatacggtatggggcggattaggactattaaatttttaggcccaaagaaaccggacataacaagttattgtgggtataatcaggaaggttttcagcaaaaacctcagtttaacaacttccagggaagttaccaagcacctccaagcgctaattctgcatcttcttcaggagacaatgagatgaagatgatgatgcagcaatttcttgagggccagaaaaagaatgctgctgatatcaacatgaaggttgatggcatgaaaaacgatcttcatgggaaatttgagacattagcttcacatgttaagacacttgagaatcaagtagctcagacagtttctgcttctacatgacaaacaagggttcttccggctaaaccaatcacgaacccgaaagactacagtggtaaagagtatgttcaattcatctccctgaggagtggcagagaacttaatccaattctgaagaaggagaaggctaaggagaaatctaatgctgtatctgatgacttagaagaggataatactgggaaggagtctgatgttgagccattggttgaaggagtagaagctgagaaaactttccctgagaaggagaaggttgaaaagactgtgctaccaccatatgtgcctaagttgccttttccgagtcgccagaggaagatacagagagaaaagaagtatgctctgtttgatgagattatgaggcagcgccatgtacaacttccatttcttgagttagttgagaatgtttctatctgccggaaacatttgaagagcattttgactaacaaaaggacccttgaagaaggagctgtgttgatcagtcatgaatgtagcgctattctccagaatgtctatctttagtgacatgattaaggattttatggttgatttttctgtgcatggctcgtctttcgctacttgtttgtctaacttgtccagggtacttcggcgctgcgaggacaaacacttggtcttgaactgggagaaatgtcatttcatggtgagggatggtattgtgctcgggtacaagatttcagaaaagggtattgaggttgacagtgctaagattgatgtgatgatgagtatgcagtcgccaaattcagtgaaaggaatcaggagcttcttgggacacgcgggtttctacaagaggttcattaaagatttttccaagatcgctagaccaatcactcagttgctgtgcaaggaacagaagtttgagtttgatgacagctgttacaggcattcaatat

SEQ ID NO: 172339 - DNA, 937 bp, Arabidopsis thaliana landsberg
aaaaagttagtatcatcttctccatatttttgctactacagaggatgacacaagcgtaccagtggagatcaaagttccaattctgatagctttccaccgtcatatatacgatggtgactggcatttttcatgtaagtaataagaagagacttttcacatcttaacctttcagatgaaattcttttcttttaacttaattactcttcattcaattttaggtggtacaaaagagtataaacttctaatggaccaatttcaccatgtttctgcagcttttctgaaacttgaaaaagggttaatttgctatatacaaattctgttctgttttttataaatgttcttgctcatttattgattgatctactgaatttggtgatactaattttatgttttgttttactaacttatatatacaaaaaaggtatcaagaggctattgaagatataactaaaagaatgggtgcaggaatggccaagttcatttgcaaggaggtatgtgatacagagcagttttcgtagttggatatgtttttgagttatggtgacaaaatgtcttgagctggactgaggtctctgtttcagttagaattctgtcatgcttaatcttttcataagtcataaatattggaatgcctcatgtgatgcttctatgatatgacaagtagtaattgtattgaaagtaccaaaacttatttataagttttgtaaagaaatgaaatcatttgtttaccgatccagttgatccagttttcactattatacacaggtagaaactgttgatgactacgatgaatactgccactatgttgctgggcttgttggtttaggtttgtcgaaactcttcctcgctgcaggatcagaggttttgacaccagattgggaggcgatttccaattcaatgggtttatttctacaggtacaacaatgtattttgaggt

SEQ ID NO: 172340 - DNA, 1152 bp, Arabidopsis thaliana landsberg
atgtgttgcattgttgggagtcgtaaatacatgaccatattacacgttgatgagtaaggttttgcgttggttcgaagaggaagagttagctgtcaaaaaagaacaagttgaccgtctaggtgatgaataagtttagaagatgagtttccaaagccatgcaatttaggtcagttcttccatttttagttttaaatttcttacacattttagtcttaattttgttcttctatatttgatatctaatatttgttgacaacatcattgtttgggttataatgtgtatgaatttctttgcaatttagatgtttttgttaatttatttaattttctttatatgatggattaacacaaagcaatatccatgacttgcatcacaagctttgaactttcgctctccctgatcaaagcttgtgatgcaagtcacatgatattgcatggtgttaattatacaggccaaatacttaaatacatagtcttcaaaccaaccacaaaatagtatcagatcatgccaaacccaaaattgtgtagccgtgataagtaactcggtataacggtaactaggttgaacacgcccggtatgaatcgtttcagtacttttgtgtgccaagttttttattccgattcgtttatgtggaagaggttaaaaaatcagcgtctaccaataacagactgttttattctttcaaacccggtacaagcttcagggttcttgcattggagatcatggaacaacaatgtgatccggttatgtctcaaaactgaaacttggtctttcttacgtatccccaactttggtattttcatagagttggtcagatacgaagggaagctaggtcttattcgtcactggataacaaagatcaagaagattatcacggattatgggttttaaagagcaggtgaggaaagccgtggataaaagtgaaagatattaaaagcattggattaggtcagattgtgtggactcaaagcaacgacgtcgtaatgatttctagttgggatcgtgtttgcctttacaaccgtaacacagagacgttgaacttagttcatacaaacaaggattttgcctcttacgtttgtttcctgttttgttctgattacgagaaggttgatcttgacgaaagaagaaatggaccgacaaatgcaaactag

SEQ ID NO: 172341 - DNA, 2909 bp, Arabidopsis thaliana landsberg
  unsure (1)..(2909): unsure at all n locations
atgcattacaacgtacaacgtagtggaggtaggtgaaaaaagaatctaaagagagttctagagaagagagataaaggagcttcctaagcaagctttcttcttcctctttgttgttcttgaatctttgttcttcttgagtgcaaatctgtaaaaccaaaagacatcatcacaagttagtggtgtgtttgtaatccctttgatatagtgaagctttggagcaagagatctcccccgagacgtagcggttgaggccgtgaactcggttaccaattatctgtgtctctttatttcatttaacaagcaatctctatcacttttttctccacagatttactattagacgttttaaaaaaaaaaacttgcttttctacatgtcttcagaattagtctttgttttgttctaagattttacccgatgataatataaaattaaatatgaatgttcttgttttaccaaaaatcagatcacatttctaaaaattgttacgaattgtctaacaaatattttatttaccagagattccaatccctgattttgattccactctataggttattcagatttacaatgagttcactttcatgtgccccgtttccaagcctttctccaggttagtacagctgatattgttcataatttatagtttagtgccattcgttatatgtagctgcctccgtacccgtctctttgggtttagttgcttttgttgagtacactttgcccaagatttactgtaattatcaatcatatattagctgacatcnccatatgtaattgacctcatttttagttatacacatnatgtttgggtttacaaagttgtggttattagggtttagtaccatttgttgcgtctcggtttgtctaagctttttcccttcgtctattggtatcatatcttatcagttttgccatctattacaaagttgtgtgcacaagagttattgtcattgtcaatcatatataagctgccatcccatgtgtaattgacctcatttttgttataaacatctgtttgggtttacaaagttgtggtgattagggtttagtaccatttgttgcgtctttgtttgtctacgcttcgtttcttggtatcgtatcttttcaattctaccatctattgtgtactcacagctgttgtacacacctactagggtttacaaggttgtggaaattagggtttagtgccattttcataaggcaaaccctttgacttgtttgcatttttgtagtttaaattgtattctaatatatcctgtttgcgttttttcttctctagttgtaagagtcctacctgatagaattttccgatctgactgctatccaggttatgtagtccgcattaactcatactcaaaaccaaagtaccttcttaaagttttaaaggtcctagatggtatgcgtgagttggagaccttgttggatcgccacttggggctcttttctctctctttgtccgccaatgttctttgtctagtcagttagtccatcagatgctctgtaggcagctgaataccactaattctgaggcactgtggtttgtttttgctggtcagcctgtgaagttttcacttacagaattttatggagtgactagattagactgttctcctttacttgcagagcgtgaacttgctgctgcaacaactcatgttgaaggttctgccccttatttgtattctctaattggtagaacactaggttcgtgactgttaaggagcttctaaggcgtttgaagtctgaacctgctatggcgagttggcgcaagtttaggcttgctcttgttgtcagtgtagatggtatcttgctttctcgtacacatccagttaaggcatcccctgaagttgttgagatggtcaaagatgttgagttctttctgagatacccatggggtcgccatgctttccatcggatgctccgcatggtaaaagtaggatcatatattgaagatacctcatctcttgttggcaagctgaaacaatcctctcttgctgtccatggtttctccctctctattcagttgtttgcttttaagaccatccctgtgctgcttacacttctccgtaatggtgacgagaaggaaaccttccttgatcaaaccattccatgtctcccaaagtgcaagacatatcatacttcaaacatcatgtctctagaaaaacaaatttatgtgagctctccctccttcatatctttgtgttgtactttctttcttcttcttataccttcttctattatctatattttctagctacaagttttcctagctacaagttttacatattgcgatccaaaggttcagcatttagagagtcttcttgcatcatcttttcagttcacaaaaactgattggcttggtggtgatgcttcacttccgtctatacactcttctcggaaatgtaaatctcgatctatgaactctggcagttcaagttctagtcctcaaaatcggaagacaaattctaagcgctgtacacatggtacttcagccaacaatcttcgagatgctgagacgactcttgataaacgactaaaaagcttcaaggcatctatactagacgaggttcgccacctcatcaatcacaaccatcaaaataccgtcggtgttgacgcatctgtcaaacccctttctccaagttctccacctacttctattattccttccctgcgcacacgttcaggatatgctggagtgtttgcggattctttctctacgcgttctgccgccaacacgagatgctcaacccattacggtaaacaataagctctgtctgatcctgctggagattccctgccatacggtcagctcgcatgtaagaggacaatacgaaactgtggaaccctttaaggcttgttgatctaaatttccactttttttaacaatcatggtaccccccttaagggaatc

SEQ ID NO: 172342 - DNA, 2200 bp, Arabidopsis thaliana landsberg
  unsure (1)..(2200): unsure at all n locations
tcattaaggaatgctagtcatcgtcaagcatctgcaaggacattagnaagattgataattaacaattttgaagaaggaaagcttcccctcatacctaaatagctgatgaaaatatttagaaaagatcatggagttgggatcaattattcgaaggcttggagagtttaagaacatgcagcagaacttgcgaggggtttacctgatgatagttttgaggttttaccgaagtggttccacatggtacaagtgacgaatccaagttctataaattgttttaaaaagagtctgctaataagtgtaagtatacatttctagcttttggtgcatcaattagaggttataagttgatgagaaaagtcatatctattgatggtgcccatctgacatcaaagtttaaagggactttgcttgctgcctcagctcaagatggaaattttaatttgtattttattgcttttgcaatagttgattctgaaaatgatgcgtcatgggactggtttttgaagtgtttgctgaatataatccctgatgagaaggatttagtatttgtgtctgaccgagctgcttctattgcaagcggagtttcagagaattatctacttgctcatcatggaaacaaaagttgtttagcactttaagaaactttataaactgaagttgtttaaaaactaaagttgtttcgtccaaacttattagaaactgaagttgtttagtactttaagaaactttagaaactgaagttgtttagaaattgaagttgtttagaaactgaagttgtttggtctaaacttattagaaactttagaaactgaagttgtttagcactgtaagaaactttagaaactgaagtattaaactttagaaactgaagttgtttaaaacctgaagttgtttggtccaaactaatagaaactaaagttgtttagcactttaagaaagtttagaaattgtaagttgtttagaaactgaagttgtttagcactttaagaaactgaatttgtttagaaactgaagttgtttagaaactgaagttgtttatttgctctttgatttctctataggttatagcacctcaaaatgggaggatttttggtgttggaggaatcagtacacgcgagcgaggtgaaagctcagcagctggtgctttgggtagagtcactcttaaacgccaagtcataaccttgcaagagcagctggcatctgttgtggagtgtctgaaacagtacatgccaaatggtgcgcctaactttgcctcgacgcatcgatacacattgaaccgacgcttcagtgaccattccagaccgtgctaacaacatggagaatgaaaatgctgatggggaccaagatgatgacattgacccactttatcctttgaatgaggatgctaatgatgaggcttttgaaggtgaggatgaagcaggtggtggtgctgccttttaagtgatatactcgttaaatttcctactctttgtatcgtttgagaccgagtattgtttaatgtctaaccttaatttattgctttctgaactatgcttttcatcttattaatccagagtgtgtaagaagatataattaactattttaatgtatgatattaattatgcttttctgaattcttgttttaacatttgattttcttttatgcaaaacgatttaatacactaattaaaatgtattaaaacagaattagtcaagtatagtaaattgtaactaataacaccaaaatagttaaaacaatttgttgctaaattgctactagagccctgtggcagtttgtaagtaaataagtgacaagaatatcgttagacttgttactaattttttgtgtctacatcgttacatttgttacaagaagatttgtnnnnnnnnnnnnnnnnnnnnnnnnnnnnnnnnnnnnnnnnnnatttacttcaatgatcttgtgacagttagtaagaggtacttacagggtatattgtaacaactttgtatcaagtttgttattaacgtgtattgtctcttccttgtatcattttatgacaggcttttttgttgcatttcatatcagatttgttatacaattttgtaactaagtgtaacatatgcttactatatacttgttgctatttagtagcacttggttacgaaatttctgaagataaatgtaactattttgcttcagttatttgtggtaagtggtaataaagagtgtcaatatttg

SEQ ID NO: 172343 - DNA, 343 bp, Arabidopsis thaliana landsberg
cattcgtacaccatgaagggcgaaacttctccggagcccacaatcacaagccgatacacccctaggtcgagggtgaggccatggccaaggacgtggatgaaggatcaacccacgggaaatgagcaggagtactacgagttgcacaagagctacggccatcacacttctagatgtcgtagcctcggtgcaaaattggcagccaagttcctaactggtgaaattggcgggggcttaacccattgaagacatggaaccagagaatgtgaacgttaagcaggtaaacaccgtggcaaaccctgaacaggcagtgtagtgaccctcgctaaagggtaagcggccaaac

SEQ ID NO: 172344 - DNA, 487 bp, Arabidopsis thaliana landsberg
acattggaagtagaaagaccgagagggtctatgcagctgaaccagtttgcacgtttttcttgaaccgcggagatggcttgggctctctcgccactttgttcatggtactccaaggggaagtctgtatgaagccttggtacgatcctagttcattattcacaaaatgttctacatatatacacgtaacgttaactaaaactgattctaatttatttttactagggaacatctcaaagacatgatattagaaggaaaagatgcattcacctctgctcatggcatgaggtttttcgaactcattggttcgaacgaacaattcgctgaaatgtttaaccgggcaatgtcggaagcttccacattgattatgaagaaggttttagaagtttacaaaggattcgaagatgtaaatactttggtggatgtgggaggaggaattggaacaatcataggtcaagtgacttccaagtatcctcatattaaaggcatc

SEQ ID NO: 172345 - DNA, 1362 bp, Arabidopsis thaliana landsberg
atcatcccattctcactaaatttctttactgctaattacttggttccatcatcatcccttttggcatatgtgagactggtcacgagcacatgcatagaaaaattcaccatggacgtacccactcacaacgtaggggattgacatattatatatcattgatgtaacagagactttgatgcatttgatttgagaatgcgtcttccagccgtggttggtactctttacaaagctgttaagcgaaatggaggagttacatatgtgcactgcactgctggaatgggaagggctcctgctgttgcggtatgttacagaaacctgttactaagctcttctctttttcccccttttctttccagtattgaaaaaatgtaagactgttgcaaacagtagttgtcttaattttgtgcttatttggttgactcatgaaggtatgaccaagttttcacattttgctgactgatactgagaagggatattaatttcattttcagttgacatacatgttctgggtgcaaggctataagcttatggaagctcataaattacttatggtaagatactaatttacttgtggtttatgttctctatatgtgtttctttatacttatattaagtaaccaacatgttaatcatgttttactagtgttactgcctgttatattatgtgaggatgtttggggatttccttcttctcctatgaaccgacaattatgataactagaatcatagaccattgggtcaggggtttgtagtaaatatacactgaagatatagcactttaaaagacaaaaatcttgggttagttcatccaaaatagtctagcattagacatttttagtttgatatctctagatggctggtgaaacataaaggcacgcgtaaatttggtttatataacatttctgaaattttcttgcagagcaaaaggtcgtgctttccgaagctggatgctatcagaaatgcaacaattgatattgtgagtcagcgttcaactttcacaatgcttcctatgtttgaaaaccctcagttccattgattagcatgagtgcgcaacagttacctggttccttgactcctgattattgtttccgggtgtatatggataaaagcttacaggactcaagaggaagactgttactctgacactgaaagataaggggttctccagagtagaaatttctggccttgacattggatggggacaggtaaatatattttatcttaaaccaatttatttattatgacaccttgctcttaaatctatggtgtgccatataagctttaaagccaggatgcacttttgtcaatgctattaaaagaatggcctctttgataagaagtggaagagatgagtgtggattt

SEQ ID NO: 172346 - DNA, 1264 bp, Arabidopsis thaliana landsberg
tggtagaaaacgtgtagctaccaattctggtaatgttgtccttggtcgatgtctccatcttcaccaggttctgtttgtaccagacctcgatgcagatctgatttctgtttcacagatgattgatcagaatgattgttttgctcaattttacccaaagtcttgtgtgattcaagactgttcgctgaggacgattgggacaggacagaggattgatgggctgtactactttagagctgttgagtccgctgctgttgtttctgctgttcggagacagacgtttgatgtgtggcataaacgtttggggcacccatcttctagagttgttaagttgcttccgcatgttgattttagtgaagacagtgaaagtttatgcaaggcgtgtgaagtgtgtctccgcgccaaacaagcaagagaaagttttcctttgagtagtaataaaacaagatcagtttttgagaagatccattgcgatgtgtggggaccgtatcgatccgttgcttcaagtggagcacgttattttctaacaatagttgatgacttctcacgtggagtctggttatatttgatgaaagaaaagagtgaagttgcccaacatcttcgtgatttcatagctatggtggaaaagcagtttcaggttcctgttaaaacagtacggagcgataatgggacagagttcatgtgtcttaagtcatactttcaacgtagtggaatattacatgagacatcatgtgttgggatatcacaacaaaatggtcgtgccgaacgtaagcatcgtcacattctcaacgtggccagagctctgctttttcaggcggatctaccgactaagttttggggtgaaagtatacttacagctgcttatttgattaatagaactccgtctatggttcttcaggggaaaactccatatgaagtgttgaatggtaaaccaccaatgatcgatcatctgaaggtatttggatgtttgtgctttgttcataatcaggatcacaggggagataagtttgctagtcgtagccgtcgttgtatgtttgtagggtatcctcatggacagaaagcatataaggtgtttgatttggagaagcgagtgtttttagtttctcgagatgttgttttctctgaagaagagtttctataccggaaaatagtatcttcatccacgatgggcaattcagtgattccatctattgttacacctgctgtagtttatgaagggatacagttgaatgttgtggatatgtgtatgacatatgattggttgtag

SEQ ID NO: 172347 - DNA, 2177 bp, Arabidopsis thaliana landsberg; identical to SEQ ID NO: 19636

SEQ ID NO: 172348 - DNA, 2937 bp, Arabidopsis thaliana landsberg
  unsure (1)..(2937): unsure at all n locations
gactccgctagaagcgtgagtactataaatggccatgcaaagataatattaggctttggcaaagtcaattttacaatgccaaggggaactcattttaaagtaaatgatgcattatattcccctaagtctcatagaaacttgataagtttcaaagatatccaaagtaatggatatcatatagagactatgaataaagatggcattgaatatctttgcataaaatccgagaggcaatatatattagaagaattgccaatgctatcccctagattatattgcacaaaaataaatataatcgcatcagatgttacagtaaactcgagtgacaatcactcgtgtgagtttactagtacatttaagatatggcatgaaagacttggacatccttgttcagtcatgatgcgaaaaattgtgcaaaattctaatggccatccattgaaaaacctgaaaatatttaaatctggtgagttttcatgtaaaacatgttctcaaggaaaactcataataggactatcgccaactaaagttgggaatgaaagacctgtattcttgtcgagaattcatggtgatatatgtgggccaatccccccaccatacgggccgtttcgatattttatggtataactttacgcatctaatagatgatcacatgtatatcttttgactacacaaaatacggctttnnnnnnnnnnnnnnnnnnnnnnnnnnnnnnnnnnnnnnnnnnnnnnnnnnntatgccataaagaaagtcaggcctgataatgctggagaatttactttgcgaacctttaatgactattgtgtatcgatgagaatcgatgtagagcatccagtctctcatgttcatnnnnnnnnnnnnnnnnnnnnnnnattaattaaaaggttgcaactcattgcaagaccaataatattgacaacaaaactcccaatttatatacgggatcatgctatattgcatgctgcaactttggttcagattagaccaagcgcatataatgtatattcccctttacaaatgacttatggtcaagtaccaaatttatctcatctccacatttttgatgtgaggtatatgtgcctatagcaccaccacaaaaaacaaaaatgggacctgttgattctgtaaatcaaacaatgaatttatactaaggggttagataaatttacttctctcttggctctatagtaattaaaagaagatgaacaaggttgcttgagtaaaaggtagggttttgctctgagaaaagtagtgcttagtattaggtcaaaagataattcgaatagaggacaaaacccctttatttatacaatgctctgatcatatcaaaatatgataaacttctaattatctaggacctaaaacttcattacttctattcttcacaagatcctcttctctcaaaatggaaggcttccctttgcaaggtttaggaattcggctgggcgacttcaattgtcgaattaggtcttctggcgatctcgtaacttaggcccattaacaggctaaccggggtaccccggttaaatcgagttctcgattttattcacatttttctccggtttaaaccggtattgtcggaggtgccaattcctgcaccaacaattagtccccccccccagttctgagaatccgagttgcctaatttgaaatttccaaacttagaaaacgaatatttggttcaaaccttggaatatgtgaataaatcattagatctcccaatcgattcgtatctccgaacgcgtttgacacgtgtcacaacctcgcgtctgtacgcgcgcgtgaagctcaggaaccaagcgtcccgtaggtttaatgatgaccttataggtttgccgcacattccttactatttatattcgaccaaaccctcgagaattcattttccgccgcttgcaagaagaatcaaaggtagctttcgctctctcctctacgaattattttgtattctcgattctttatcgatttttctgacaatgggtaaggctgttcttgtttctccgtcctcttcttcctccgagagtgaagcgtcgttagttcgccgaaactctcggttaaccaggaatccaagtgacgaagctcaatctagtcgatcgaatcggatcgaaattccgacgttgcttgatgagccagatcgggaaggttccggtggacatcccgctgctcctgaagattcggtggattttttagctcagttcgacccactcatcgacctggaggatgcttacaacacgcagccgcagtatacagaggctgaagttaatgcgagattacttcatgaggattatgtcgaatttgacctcgacccaattgttcattggaacaccgagatcgccgcgaaaaagaccctttcaacaaccgagtctgtcgcggaagtattcgccctatgtggctatggagatcgcccgctcacttgcatgattcccggagaggaggagcgcccatggaatccccctcgagggtatgtttgtatgtatgaagcctacttcagacagtgtcacctctggtttccgattccgtctctgatcatctcctttctgaatcgccgtcgtatggcgttctcccagcttacgccggcggcgatctgcaattttgttgctgctttaactttcggcgctgaagaaggttacctggtgaacgtccattgtttcgaagaaatgacgacgctgaaagccatcaggtcgcctgcattttgggtaatgaataaccgccctaaatataattttcttcccggtcctaaagtcagcaatttcaagaactgggaagaatattacttctacgttagggttgacttcgagtcttatgagcgttcgttctcgggaaggaagaggatgtggacagaggctcctggtaaatttcttttaaatagataaggtaaaaagttgttttgattttgattaaattctcacaaccttttctcctattgcagattggtaca

SEQ ID NO: 172349 - DNA, 519 bp, Arabidopsis thaliana landsberg
aaatagtttctattttcaaacttcaccccaaaataagtaatatgctgagagaacctacctggtctgttttaggaaacagttggtttcattctctccattggttcaatcggatcgattctagcagcaacgttataccaactagtcctaaaggatcatccgttccgcggactttgtttgtggactcaacttctctttgctctatcgggaatgcttgacctcattcttgtgttacgtctcaacttaaaatttggtttaccggattatctcttcatagtagtggacgagatagtttctcagatgatcggacgcttgaaatggatgccgctgcttgtcctcacttcaaagctttgtcctcacggaattgaagggacgttctttgcattgctaatgtcaattgacaatgcaggcctcatgacctcatcttggcttggagggataatgttgcatgtcctcaaggtgactcggactgagtttggtaacctgtggcttgcggttttggtcaggaatggcataaacttt

SEQ ID NO: 172350 - DNA, 652 bp, Arabidopsis thaliana landsberg
gactatcatgagcaattacagtgacagttcgtcaatggatcctgactatcacatagatgaggctgagtcttcatcttctagacgagaaagagaacaaagagaatatgataatttcaggagaaaagctgagatagctcgtgggaagagagcattgacagagaagtatgagttgatagatgaggagctggaggtcgagtatatgcctgattattctgtcagacccacaagacttctgcacaaacttgatgtattgcctgccgaggagtatatcatgctcttcaggctgaaggagttctacagtacaagatatccttgctcgactactctggcacaacttggattactggaggatgttcagcacctgtaccagagttgtcacctggacactctgattgcttacccatatgtagcctatgaagaagaaacgattcagttcctctccacactgcaagtggagctttaccaaggtatgacctttgatgatttggaaagtgaaggattgggattcttgtgattctctgtgtatggtcaggattataagctatcaatcaagcgcttggaaggattgttttgtttccccaatcaaacgggtactaagcccaagtttgacagagaagagttgaaagacttatgaatcaccattggcagctct

SEQ ID NO: 172351 - DNA, 559 bp, Arabidopsis thaliana landsberg; identical to SEQ ID NO: 11913

SEQ ID NO: 172352 - DNA, 365 bp, Arabidopsis thaliana landsberg
ggaagaattcctggccgaacccacccaaggatggtaccaccaggacaaccttcttcgccccgactcgccctaagtcctacgcgttccactacttaggttggaaaccatggctttgctatagggactacgattgcaactacgacgtggacgagcagttggtgtacgctagtgatgcggctcacgttaggtggtggaaagtgcacgactccatggacgatgcattgcaaaagttttgcaggctgacgaaaaagaggagaacggagatcaactgggagaggaggaaagcaaggcttagaggttccactgattatcattggaagatcaatgtcactgatccaagacgacgtcgttcttatttgattggt

SEQ ID NO: 172353 - DNA, 1984 bp, Arabidopsis thaliana landsberg; identical to SEQ ID NO: 3659

SEQ ID NO: 172354 - DNA, 380 bp, Arabidopsis thaliana landsberg
ttttaggggagttcggctgtctgtgttggaacaatgcccgacaacaaataagatcaagatttgggtgactaagaacaagattagtggagataggaaggagcttgtgtcgtggagactgttaatgacagtgtcgataccaaacttcccgagattacaagatctttactctaattctcagccgagttacttcatggataacaatgatgacaagaggctcatcgtgtgtacttgtgatgaaagtggtaagccttgcatatacattgtgaagggggataggttcaagaagattcaaatgggttttgaggttgagccttggccttttcaccttgtttatgttcctagtttggttcacattcctttagcctaagagcaacaagaat

SEQ ID NO: 172355 - DNA, 540 bp, Arabidopsis thaliana landsberg
cgttcaattacgtggttaatggcatttacttcggcatgtgcttcgccatatttgcgatgatagccttcgcctattatcctatcctggtgcacaaccacggcgcccaccatcgggttggggctaacactgcctgtgcctaattgagccagctccaggcagcgctgcatatatttttcatgttgcaccatgctgcaaaagtagcttttatgttactttgttgcatgaaaactataaaggatgtttttaccgcttaccggcaggaattatcagcaatatatgatgtgaatgaaataagcgccactacccttttggttatcagcgatatatgcggcataagcaacgcgaaagtcaaagcttttccggagcttgaactaacagaagaacaatcagtaaaaatggccgctgttcttacagaactcaaaacaggccgcccggtgcgatatattttaggtcacacggaaatttatggtttgccgtttaacgtaaatccatcggtccttatcccccgtccggagaccgaagaattggtagaatgggtgt

SEQ ID NO: 172356 - DNA, 1334 bp, Arabidopsis thaliana landsberg
taatgctacagctgaaagtcgttggcccagtttctgtccttggagggcttcttcaaattgtcttactcatgtttttgtgtggtgtaactgccttggtatggccaaagatttcagtatgtgtgcatatacggcaatcttgaaattatttttagaattgatatctgatgacatgtgcagttgtgtggagcaaggttgtcagagggtatttttgttggtgcctttttatctatgtcatcaactgcagtggtatttttcttttcttttgtcttctcaagtttaatacaaaagctactctctttccggtttcatctcagagtttctgtttctaatccacatgtcaatttgaccaggtggtaaagtttttggtagaacggaacagtacaagttctcttcatggtcaagttactatagggatacttatctttcaggtttcactcacatcactctatatttacaaattgaatatttcgttttacgaagtttttgtttcctttagcttaatcttgaattttcaggactgtgttgttggtttactattcgccttgcttccagttttgggtggtaacagtggtttactacaaggaattatatcaatgggaaagctgtaagtggttccctagtaagaagtttgtccaggaacctcttatatatcctcattaccgtctctgacataaaacattttcttcttctaatttaggctactgatattgtccatatatctcactgtggcatctctattaacgtggtcatttgtacctcgttttctgaagctaatgattcaattatcatctcaagtacgttttagacgtcatatcttcatatacactacttgtctatctttatttctttcttaaagtgggatccaaattattgccaatgtctctcattatataatgcagacaaatgaactttaccagttagctgctgtggcattctgcttactatctgcatgggtaagtctaattctgtcatttctttgcatactggtgcttgcttagctttctgatcccttttggtgtattataacatctgagtaaattgttacctgagcttgcatcttactaatagactacagaagaaaaaaatgatgattacaatagacactgaagtatttaagtataatagcatattgatgtaatttccaatttttaacttagagtgttggttccttgcaaaactttttcagtgcagtgacaagctgggtcttagtcttgagttgggatcatttgtggctggcgttatgttgtctacgactgaatttgctcaacatacactagagcaggtattgattctaaactcaggtcgcttttgctttgcgagtacgtggtacaaaa

SEQ ID NO: 172357 - DNA, 1451 bp, Arabidopsis thaliana landsberg
aggtcatctaagaagttttttccttggcctttttgcaggttgttaatccatttaccaaatatcctttatcaagaaatattcagagacttttcatttatctctgtaattttgtcataagcttattcataatataaactgaaaattgtgtggccttaatagaaagaaagcacatatgctttgacattatctccagttgcaatgagtcttgaggagttaataccatcaaactatgggaagtcacgtttctacgcaatcgccattagaagtgcattagccatctctactctgctcgttggtcttgcgattcccttcttcggtaaggacaaacgaaaaatatacatgtaaagaaaataagtgtcacttcttttgacactcagaattcttgcaggccttgtcatgtcactgattggatcattcttgacaatgctcattgtaagttacacgtttgtttcatccttttctggttatgtaaagcaaattctcatattgcagtttcatagtgaatttgcttagcctgacaaagtttctggacacagacgctgatactaccgccagcttgtttcttgagcatcttaaggaaaaaagtaacccctactcaggtatggcctgctcacttactgataaccaaaccgaatatcgaaattcctcaaactgaaatcgatataacaatctgtggtttgtttgcaggtgacaatctgtatcttaattatgacagtaggagcagtatgttcagtcattggcacatattcagcccttgcaaagatcattgagaagttgaacacctaaaactgatcaatcttgagattcttattttgtttctcttgagattttgtttctgtcttaaatcaatggaacatctcaacctatatggaacattccaaacacataattgtattaaacatcttctgcatttaaatgttaccaaacagtgaactacaagaaacaattataatactggaacataaggtgaagttctgttccataatggttaagtagcaaaagcaaagaagatcactccttattcagtagaaatctttcctccagctaaatcttcaggagttaggttaagagaatccatggatcctttcttgaattcttccccttgagaagcaaggaagtcctccacgcttcctggttctccaaaccaaccacgacggtctgcaatcaaatgtagattatcacacccttcacatcgtaccaccacaacgccgttttcatatgattctcggctcgccatcttcatagatcttgtatcacagaccttgcaagtgaagaccatcatgaagtcatgcctcgggtttatttttaactgggacttgtacttcaccatcattttctcagagggcgtcgcatgggagggaactttggccgattcagtagcagagtttgacgagttgcagacattggttacagaagcttcatttgcctcactgattacagataactgcctc

SEQ ID NO: 172358 - DNA, 437 bp, Arabidopsis thaliana landsberg
  unsure (1)..(437): unsure at all n locations
gtatcactaacgtcatcgtgggcgagtggaaaaccatgcgaatcttggccaatggcacctgccggccgttttgcaatcaacaacaagttctggttctggacgaaaggttcggtcatgtttggtcctggaaaccctcgaacatgctcaggcgcgcggcgcgacggtacttcccgaactgaccggccccgtcatgtcggcaaacaccggaaacatggtggccccggccaatacggggcccgcacaaaccatgcagtccgcacttcttgatgccgggctcaacgccacggatatcggctacatcaatgcgcacggtacgaccactccggccaacgacccctccgaaacacgcgccatccccaaggtttataggcaatctcgcccaacggcatgccatttcttcaaacaaagccgtgcatgggcatgctctagancggcag

SEQ ID NO: 172359 - DNA, 502 bp, Arabidopsis thaliana landsberg
gaagaaaaaatggcaagacatgtccctcttagtgaggtgttcatccagacacacactaagtcggatgggacttatgttgatcagaaggcaaagaagattgctctgccgtatgagcagaatgtgagagagaagttgtctgaactagaggcgcctgcttctgctgtgtctgatggctcttcacgtcctcgggatctcacactagatgagtatgcagccatatttctcgaggtaagatgttctttgtctttttcagagtcttagagacatttaggatctgtcactaattatcttcctctaggcagtgccaaccgccaactccccggagaaaaggatgcaagaggcaatccttatggacttggttgtcttaaagaaactctaggcagtgccaaccgccaactccccggagactcaacctttaaagccttagaagaacggctgcaggaagctcagcggcaaattgaagaacaggctgcatataacgagaagcgagatgctgagattg

SEQ ID NO: 172360 - DNA, 595 bp, Arabidopsis thaliana landsberg; identical to SEQ ID NO: 667
  unsure (1)..(595): unsure at all n locations

SEQ ID NO: 172361 - DNA, 1323 bp, Arabidopsis thaliana landsberg
  unsure (1)..(1323): unsure at all n locations
cattcaccgcgacatcaagtctgcaaatattctcttggacttcaactttgatgctatggtgataaactagtagcttgcattcatctacggttttttgttaagactacattgatgacattttgcatttgtttattcaggtggctgattttggattagctaagttaacatctgataacaacactcatgtatctactcgtgtgatgggaactttcgggtaaaaatcatctttaatctactaaacatgtacatttatgcagtttgcttaatgcatgtgatccttgtgcaacaagttctgaaacttttggttttgggattttaggtatttggctccggaatatgctgcaagtggaaagctcacagaaaagtctgacgttttctcatttggcgttgtactnnnnnnnnnnnnnnnnnnnnggcgccctgttgatgcgaacaatgtctatgtagatgacagcttagttgactgggtactttactatgactgcagataatctaaacttctgatttttctacaatctaaacttctgactaaagaaaaagctatgtgtgattgatggtggacaggcacgacccttgcttaaccgagcatctgaggaaggtgattttgatggtttggctgattcaaagatgggtaatgagtatgccagagaggagatggctcgcatggttgcttgtgctgcagcttgtgttaccattcagctcgccgcagacttggtatgagccaggtaacttaatttgagcccaatcccaatcattttttttctctagagaagagcattcactttgttttttctggttatttgggttgtttcggttgcgctagcttcagtttcagattggtttggttctgtttctttgttctaaagaattggcaacacattttcttagctgcagtttcttttgttttcattttgccaagtatagtcattttaacatatgttaataatgctaatggagtgagtgatttgctgtacaaaatgagcagatagtacgggcgttagaaggaaatgtatcgctgtctgatcttaacgaagggatgagacccggtcacagcaacgtctacagttcatatggaggaagcactgactatgacacgagccaatacaacgatgacatgaagaagtttaggaaaatggctcttggaactcaagaatacggcacaaccggcgagtacagtaatccaaccagtgactacggactgtacccgtctggttcaagcagtgaaggtcaagccacacgagaaatggagatgggaaagaataagaaaaccggtcaagttatagtggaccctctcttaaaccataagagtggagaaattgcagg

SEQ ID NO: 172362 - DNA, 726 bp, Arabidopsis thaliana landsberg
ccatctacgagtggtttgtctgttggcaacctcttctcgaccacttcagttccatcgttcgccattatggattctttggcaaagtagcagtgttctgtcagttcagcacatgacacgttctgtggaacatcgacttagttctggctagaccgcatgcgcaacagtggtctcagtcggtcacttcattcacattcgaccatcatgtctgcggaagccgagcttcggataatagcaacggttggagacgtccagcaaggggttggttgaaatgcaattttgatggctccttcattaatgtggatacgtcggggaaaacgggatgcgttgtaagagatcataatgggagctatcaaattgcaggtctggccatcggcaagtgtgttgataacgctctcgaaggtgaactacaagctctaatcatagctatgcaacattgctggggtaaaggttatagacaagtctgctttgaaggagacaacaaggatatgtttgctctgataaaaggaacaaagaaacatttcggagtctacaactggatacgggatattcaatggtgggcaaagaagtttgagtcgattcaattccaagtggacaaaaaggcataacaacatactggcatacatacttgccaaaaactctctccaagatcaagtgcttttcatcaatcatttttgggttcctaatgtaataaactatgcactacactgtgattacactgcttcttta

SEQ ID NO: 172363 - DNA, 1267 bp, Arabidopsis thaliana landsberg; identical to SEQ ID NO: 31252

SEQ ID NO: 172364 - DNA, 806 bp, Arabidopsis thaliana landsberg
ttgcagaacagcccattaaatgcgtcatagttcgaggaaatgagaaaacaagtggatatagagaagaagaaacccggtatagaacacatgaaatcttctgttgtgctgtccaaatctcaacacgggtccctctgtctctctcgtctttagagaagtttttttactcttccgatggcatctttggttatcctcgctttgatcgcctaatcaggtttgagtctacattttctggaacttgaggaatttgcatactcgttactttaattgtgtgttttaactataacaaagtttcttagtagttaaatgttttgatgtgtcaattctcactggtttagtctaacgattgtgatcaagatgacttttaccggaaatgtagcagattctaatgagaaacttggaaactttttggcttatggtttctctaaaaacatgtttgttcatacaattgaaattgtgggtatgttactaatttaagcagtgtgatcggatggaagaagtcacaagagtggatgggaagatgggttggctttggaggaaaggagttagtgtgggaaagaaggttcttgcagcatgttttctagtgttttctgcaccgttcctcgttcccgcactcgttgttgcctccacaatcgcgttgatttcgtcccttccttattgttttttcttggtgagctataaagatcagtctatagtcaaaactataaacatacaaattcaaacagaaacatatccaaccaaaaagacatttatatgtagtctctggtcttgttcaatgtgtcgcagaatcaatgatatagaaacccaaa

SEQ ID NO: 172365 - DNA, 879 bp, Arabidopsis thaliana landsberg
  unsure (1)..(879): unsure at all n locations
gcaaaaggtgagactcattcctctgttgctgtggtttacgttaggcttgctgacttgtacacaaagattgggaaaacacgcgattccaaatcgtactgcgaaaacgctcttaagatttacctanaaccgactccgggaactcctatggaagaggttgctacaggttttatagagatttctgcgatatatcagtcaatgaacgaacttgatcaatctcttaagttgttgagacgggcgttgaagatatatgcaaacgctccaggtcaacagaacacgattgcaggtattgaagctcaaatgggtgtgattacttacatgatggggaattactccgagtcctacgacatattcaagagcgcgatatcaaagttccgcaatagcggagagaaaaaaaccgctcttttcgggattgctttgaatcagatgggactagcttgcgttcagcgttacgcgatcaacgaagctgcagatttgtttgaagaagcgaaaactattcttgagaaagagtatggaccgtaccatcccgatacattagcggtttacagtaacctcgccggaacatacgacgcaatgggaaggtaaatttggaacttaaaacacattttcttgctaggttatgtcttttgggatttcctgcggtacaagcaatgtgtttacttgccttacaggttagatgatgctatagagatattggagtatgttgttggtacaagagaagagaagctcgggacggcgaatcccgaggttgaggacgagaagcagaggcttgctgcgttgttgaaagaagctggaagaggaaggagtaaaagaaacagagcacttcttacccttttggacaacaaccctgaaattgcaaatggacagagaccggtttattga

SEQ ID NO: 172366 - DNA, 536 bp, Arabidopsis thaliana landsberg; identical to SEQ ID NO: 56660
  unsure (1)..(536): unsure at all n locations

SEQ ID NO: 172367 - DNA, 533 bp, Arabidopsis thaliana landsberg; identical to SEQ ID NO: 74894
  unsure (1)..(533): unsure at all n locations

SEQ ID NO: 172368 - DNA, 527 bp, Arabidopsis thaliana landsberg
tcattcgatgtcaacaagtatagcatcattatatatgtgtatatattactgtagatgataaagaggatgttgaagaagaagatccatccagatgtcgatgcaactaaggctttaaagaaggacgttctatacaagccaactcggaactgtgaagctctcgagtcacattgtcttcttaaaattcaaggtttgtatttcttaattattttggtttaggggttcgatatgatttatttctttcatttgctcgtatatatatgctttgtggacagattgcgtggcctagaagtctaagaacgacgacatcgtacaagagcaatctctggatctattgttctactccctataatatatgtgatttttttgttcttatttcagaatgtgttggtattgttatgactgttgagatgtattgctttcttcttacaaacattactaagttgttactatttgttcctgttatgcatattgtattttattactatgtcatatgttttcttatttatacgtatatcaatgcatcgttc

SEQ ID NO: 172369 - DNA, 1644 bp, Arabidopsis thaliana landsberg
cttcctttaatcagttgatcgtcgatgagtgcaactacaaatgtgagtcattgaaaacaaagcatgataattggataaaaatattaactgctgaacagaagaaggtatacgatgaaataatgaatgatgtccttaatgatagaggaggtgttttttcttatatggttttggaggaacagggaaaacctttttgtggaaggttctatccgcagcgataagatgtaaaggagatatttatttaaatgttgcgtcaagcggcattgcatctctgttattagaaggtggtcgaactgcacattctaggtttggtattcctctaactcctcatgagacctcaacatgcaacatggagcgtggtagtgatcttgctgaattagttacagcagctaagttgattatttgggatgaagctcgtatgatgagtaagtactgttttgagtcattagataaaagtttaaaagatattctatcgactccagaagacatgccgtttggtggaaaagtaattcttttcggaggtgattttaggcaaattcttcctgtcatccctgcagccggtagggaactgattgtcaaatcgtcactcaattcgtcttatctttggcagcattgcaaagttttgaagttgaccaagaacatgaggcttctccaagatatagacataaatgaggcacgtgagattgaggagttttctaaatggatccttgcagttggcaaggggaaactaaatgagcctaacgacggagtaactcagatacaaatactagatgatattcttatacctgaagggaacaaccctatagaatcaatcattaaggcagtctatggtacaacctttgttcaagagagagatccaaagtttttccaagatagagctattttgtgtcccaccaatgatgatgttaactcaattaacgatcatatgctttccaagctaacaggttagtgaattaactttggatattactcaaaaacatacatataactttatcagctcttaccaataagtgtatatgacaatgaactactattcttttcaagtgaagaaaggatttatcaaagttctgattctattgatccttctgacacacgtgcagataagaaccctgtatatatatgcctgattttctcaataaaatcaagctttctgaattacctaaccgtctacttcggttaaaagttggttgcctagttatgttgttgcgtaatcttgatccgtatggaggtttgatgaatggtacaagacttcagattgtcagacttggagataaactagtgcaaggacgtctattaacaggtactagagttggtaaactggttcttattccgaggatgcccctaactccttcggatcgtagattgccctttacaatgcaacggagacagatttctttatccattgcatttgctatgatgatcaataaaagccaaggccagtcattagccaatgttggcatatatttgtcgaaacctgttttctcacatggacagttgtatgtcgctatgtctagagtgaaatcaaaggcagggctgaaggttcttattacagacgctaaggaatacagaagaaagaaacaacaaatgttgttttcaaagaaatatttcaaaacctttagtagattatttctacaggatttattttag

SEQ ID NO: 172370 - DNA, 645 bp, Arabidopsis thaliana landsberg
atggatcctaaggggaagggaatcgtgatcaacgacaaggaaaaggagtcctttgtcaacgagccaaaagatgacaaatccaacaactctggctcgggccacagacgtaaagatgggaagaagaagaagacaagacgtatcaaggagatcgtctactacgacagcgacgagtctacttcttcccacaaggacgacgactacgacaaacaaaagacggttaactcaaacttttcttttgattattcgcgcattgcgcacagctcaaatgctcatttgctccccattccacttggcaagcctcctcactttgatggagaggactacggattttggagtcacaaaatgcgtacacacctattttctctccatccaagcatttgggagattgtggaaagtggaatgaaatttgatagctcaaatagtccttcgtttattaatgaacatatccataaaaatgcacaagctactactgtgttgctagcctctttgtgcagggacgagtatcacaaggtgagcggcttggacaatgccaagcaaatttgggacaccctcaagatctctcatgaggggaatgatgtcaccttactcaccaagatggagttggtggagggcgagctcggacgattcgcgatgataaggggcgag

SEQ ID NO: 172371 - DNA, 693 bp, Arabidopsis thaliana landsberg; identical to SEQ ID NO: 52038

SEQ ID NO: 172372 - DNA, 688 bp, Arabidopsis thaliana landsberg
atgaagctttgcaaaatctttattcatagtcaatcattatttctttatgtaagttgaatgatagtagatgaaatctttttatgtcactgtttttcaattttgcaaagtttattttccagttttatagactatcattttctatatatggttatagtatcttgttagaggatcactaatcaaatcattgaaatttttttttttgataactatcaaatcattgaatttataaaatgaatttgattagggtccgggtttatctcttcaagcatgtatcaacatgggtttttcagttcgttgataaagttgccaggagcttacacggctggtatcgtcgtcgctttctatgtaaatcactaattttttgaatttgattatcaaataatttataaacatatactggaaataaatggttgagttaacgtgtgcaatttgtaaattatgcagacatcaaatggcgatgtgtttgtgaaggaccatgacgaactagacatagagtttttagggaacctaaaagggaagccttggcgatttcaaacgaatatgtatggaaacggtagcacaaaccgcggccgcgaagaacgctaccgtctttggtttgatccttccaaggagtttcaccgttatagcatcctttggacccctaccaaaataatggtagtttcctctgcctctcttttttttttttttt

SEQ ID NO: 172373 - DNA, 453 bp, Arabidopsis thaliana landsberg
ggatgacactcttgttttaaataaagtttggttcatacagtcggaaagttgtcgctagtcgtacgcttcatacccgcagggcggcgttatgatgaatatatatatacatggttcaaagtgtttagacttgatgaagaagcagggaagagaaagtgggttcaagttaattacttgaacgaccgagtgatctttcttggagctcggacgaaactctgctgctcggtacataagctcccaggtgcaaaggagaattgcattgtgttccttgcttcaaatgatggttctatctttgacaatgattcagtccttttgtttgacctaaaaaccagaagaactaatactgcgtttaatgaatgcaaaggctacatgggggtgttcggcgcgaatcttaaatctttggtgtcttgtggacttgtgaccattccaaacccaacgacaagatttctgttatga

SEQ ID NO: 172374 - DNA, 314 bp, Arabidopsis thaliana landsberg
atgtcgtcaaccttgagcaacgaagagtcaggactcggtgattcaaatcgttcgacggaagtagatagcggcgacggaggaaacttcacggcttacgagtctcgattccagtcgcagcggtttgactcttccttctctaattttgactcccaaccggagaaagagtcagacttaccaggcggcgattcatctcctcgacccgaaactcaatctccgccgtcgataaatagtttcgatgatacaaacggttcgatcttgccgccaccatcggccatggagaaagaggaaggtttcgctcttagagagtggcgaag

SEQ ID NO: 172375 - DNA, 675 bp, Arabidopsis thaliana landsberg; identical to SEQ ID NO: 23930

SEQ ID NO: 172376 - DNA, 540 bp, Arabidopsis thaliana landsberg; identical to SEQ ID NO: 45428

SEQ ID NO: 172377 - DNA, 421 bp, Arabidopsis thaliana landsberg
catgctggtagtgctcaccaccgacgccgcggcgacccccgccgatctggacgccgcgttgcgcgccgccgcgcgggtcagcttcgaccggctggactccgacggtgccatgtccaccaacgacaccgtgctgctgctggcctccggcgctcgcggcaccgccccggatctcgcggcgctgaccgacgccgtcaccgccgcctgcacggacctcgccacccaactgctggccgacgccgagggcgccaccaaggagatcgccatcgaggtcgtgggtgccgcttccgaggaccaggcggtggccgtcggccgggcggtggcccgcaacaacctggtcaagaccgcgtcattcggacgcgaccccaactgggggcgcataatcgccgacagtcggcaccgtcgacccggccgacgcgcgctt

SEQ ID NO: 172378 - DNA, 1200 bp, Arabidopsis thaliana landsberg
  unsure (1)..(1200): unsure at all n locations
cgtattagtggccgcagtggataatgggccatgactgaaaacgtgtaaacctaatcgatatattagatgactaagacatgannnnnnnnnnnnnnnnnngggcggatctagatgaagtgcatctgcggtaaaaattatacgaggtgtgaatgttcgaaacgttaatagtcaccagagtaacatgaatctaagcggtttgagttcaaaagaaatatcggataaatactggaatagtgtagaaacaagagctgtatgggggactacactaacaacaatgttgctgcggaacctttcaggtgaaactgataactacagtcttgagtaaatggatcattagcagataaattagatatctgcgaatagtatttatatttcaggtaacgtagacgatatggcaaccatggggagaacaacgagattgacatacgtaaaggcaaggagcaacacaacacgtatgcatgggttatcataagagacaacattgatattacagctgggactaccagcaaaagtaacacaaccaggggcaagtacaagcttgaaaggaaaagagaaagttattgatgacgaggagagggaaagagattgtttatttgagatgtggcgaacaaatcaacaaaaagaaacgtggcgagatatgtgtgtaacacaaatgaccttgtgaggaactcaaactaatacaacaaaaagtgtgcggcaaagagaaaacagcgagggccctagatttcggaagtggccattaggcaaaaagagatccaaatgaaaatttgcgcctgactcttgcaagtgcataaacacatgttgttggggcaaaagtggtgctctatcttctagcgattcaaccttcggaacgctaacctcgctttccacaagcatttctttttgtagcgaagacctaatggatgatactgactcatcgaccaacaatagcttatcggtcataggtgagttatctaatcattcatatattatccgataattatcttatgcgctattaacaattattcaatctttttaacttttaactgtaggtgacgaaacactagtacacttttactctgatcctgatagcccactcattatggatcctcaacccatcacaatgattgataaagtcaaaggtctaattatagaggacgaattatccactaaagagataggaacagattcaactaacacaagagtatcagaggtatcgag

SEQ ID NO: 172379 - DNA, 655 bp, Arabidopsis thaliana landsberg
agaatttattcaccggatgtacaagccattgtgtatttaacactatcatactaggctttatatatgatgataacataacccttagaaggtatttgacattgaaggctacaacaatgaacaaacgtcgtactgttccatccataatttgttttaaaactagtagacattataactcaaggtatatcttgctaaacaagtaacttccggtgaaaccctaaatatgttcattttttcgcaggttgtagtaggagtaacactagcgttgaagtttggggaaggtaaggagctaccaaaatcgctcggtctgattcttgtggtccttatctgtctatttgtattggcgtatggtcgatcttggggtccaatgggatggttagttccgagcgagcttttccctctagagactcgatcagccggtcagagcgttgtggtgtgcgtgaaccttttcttcacggctctaatcgcgcagtgtttcctggtgtcgctgtgccatctcaagtacggaatattccttttattcgccggacttatattggggatgggaagcttcgtttactttctgttgccggagacgaaacaggttccgattgaagaggtttatcttctttggagacagcattggttatggaagaaatatgtcgaagatgttgatgaa

SEQ ID NO: 172380 - DNA, 445 bp, Arabidopsis thaliana landsberg
  unsure (1)..(445): unsure at all n locations
gagaaaagcatgaaaaagattgtcgtgaaaaatcccgtcgtcgagctgaacggcgacgaaatgacccgcattatctgggacttcatcaaaaagaagctgatccttccctatctcgaaatagatttgaaatatttcagatctcggcgtcgagcatcgcgaccagaccgaggacaaagtcaccgtcgacgcggccgaagcgatcaaaaaatacggtgtcggcgtgaaatgcgcgacgatcacgcccgacgaagagcgcgtgaaggaattcaagctcaagcaaatgtggaaatcgccgaannnnnnnnnnnnnnnnnnnnnnnnnnnnnnnnnnnnnnnnnnnnnnnnnnnnnnnnnnnnnnnnnnnnnnnnnnnnaccacctgaacggagccgatctgcatcggccgccacgctttcggcgaccagngcaacgccacggaagtcgtg

SEQ ID NO: 172381 - DNA, 1289 bp, Arabidopsis thaliana landsberg
gaatttgttgtacctccaatgcggttccacagattcactcttatagttctcttctttgggcttgggggatgcatacttcttcttagctccattgattcttcctttcatccttttatactatatgcttgcatacatcatctaccgaagccaggtatatatgacacacatattttactctcctagctttcttcgtgcactagaactaaggactcaattgtgttttgggatgcagtttatgaatgtgtatgctccaaagtttgatacgggtggaatgttttggccaatgatacactatacgatgatattctctcttgtacttatgcaagcaattgcaatcggtctatttgcgctaaagaagatggaactagctacatacttgcttgtccctcttcccgtttttactcttctctttaacgagttctgtcgtaaacgcttcatgcctatattcactgattatcctgctgaggtacaaatcccacacacactcacacacataaagaagtaaatctgaaatttgcattacaagatgtttggtgttaactctctgtgttttgttttaggtgttgacaaagagagataaggaagatagaaacgatccaacaatgcccgagttttacaataacttggtcagtgcgtacaaagatcctgctctgctcccacttagattctcaggatcaggaaacagaaacgatagcctcactagtcctcttctctcttttagtgaggtttgatcctcttctatacaactttacctgtctcttcttctgtacatgcttgtgcatatatatacacttcacttatacctcaaaagtcattagagatctacattggaaactctaatatcataatttatttgtaaatctttatttactacagaatcagtcattataagatagagtagtttattacatcagtgagttattaaatattgactactaaacgttatactgttagctaaccatgtctcttatagacattaactgtttgttacaagaacactaaaactaaattataacaagagtgggaaaaaatgtatttgtttaacataatgtgaacgggatttttatctctgggagaagattaaaaaaaaaaaaaaaattgcaaagagaatgtgtttttatgaaaataggtatccaaagatttatctgtgatgatgtaacgccatctttattcttttaacgagctttagtccaaatcagttataggtaaatggatatgactggtcatttggctctttttcagatactcataggtcaaagcggttggaccttgatctttgtgatccatag

SEQ ID NO: 172382 - DNA, 393 bp, Arabidopsis thaliana landsberg
ggagccgaggaggagagagagaaatgtaaggaagcgattgcgagagcttcgagggagtggggattttttcaagtgataaaccatggaatatcaatggatgtgttggagaagatgagacaagagcaaattagggtctttagagagccttttgacaagaaaagtaagtcggagaaattttccgccgggagttaccggtggggaacgccgtcagccacttctatccggcagctttcttggtcagaagcttttcatgttcccatgacagatatttctgacaacaaggactttactactctcaggtacacaaatattgttatcaattacatttttttagaattaatttacttattaaacttaattatttgaaaaaatatgtggagaattatcccaata

SEQ ID NO: 172383 - DNA, 1403 bp, Arabidopsis thaliana landsberg; identical to SEQ ID NO: 28147

SEQ ID NO: 172384 - DNA, 414 bp, Arabidopsis thaliana landsberg
atggattcaacagcaaccgttgcaagtgatcgtcttagtcaactaaactctttcgaggagactatgacaggcgtgaaaggccttgttgattccggaatcaaagaggttccaactatgttccgtgagcctccagctattttagcaagccgaaaaccaccactagctttgcagttcacgatcccaaccatcgatctgaacggaggagtgtactacaagaatcaagattcaattacacggagaagcatggttgagaagataggagatgcagcggagaaatggggtttcttccaggtggttaaccacgggatcccgctcgacgtgctggagaaggtgaaagaagggattcgcgcgtttcacgagcaggatgctgaattgaagaaacggttctactctcgtgatcacactcgaaaatgg

SEQ ID NO: 172385 - DNA, 1455 bp, Arabidopsis thaliana landsberg
agtcactcgcaagatctagttgaaattgaagaactgataaaatctaattatattgaagtaatcgatctccaaggttgtacaaaaatacagagttttccagctacaagacatctacaacatctcagagttattaatctttctggttgcgttgagatcaaaagcacacagctcgaagaatttcagggctttccaaggaacctgaaagaattatatctttctggtactgggataagagaagtgacatcatcaatcagccacctctcctcacttgaagttttggatttgtctaactgcaaaagacttcaaaacttgcccatgggaaagggtaatttggcttctcttattaaactcatgttatcagggtgttcaaagctccagaatattcaagatctcccaacaaacctgaaagagctatatcttgctgggacctctataagagaagttccatcatcaatctgtcatctcactcaacttgttgttttcgatgccgagaactgcaagaagcttcaagacttgcctatgggaatgggtaatttgatctctctgactatgttaattttatctggctgctcagagctcaggagtatccccgatcttccacggaaccttagacatttaaatctagccgagacccccataaagaaactgccatcatcatttgaggatctcactaaactggtttcactagatttgaatcactgcgaaaggtttcaacatctccaaatggaatctttcgaatcagtagttagggtggatctatctggctgcttagagctgaagtatatcctaggtttctcacttcaagacattacacaacttcatgaagatgggaccgacaaagtgatgttacatggaactcctccatgcaacgtcaccttaattttagagaagtggagaacaagacatgtcactccaatggaaaagagtgggtctaaattttatcttaagcttatgccatttgtaaccacgccatatcgttcaaagttgcattcttccctagtgttccgtatgtatgccatggtatctttgtttctcagtaaagcatacctccttgacatacatatacctcaagagatatgcaatctcctttcactcaagacattggatctcagtggaaacatttttggtaaacttcctgaaagcgtcaagcagttccgcaatttggagagccttatattatgtcattgcaaaaacctcgaatcacttccagagcttcctcaaagtctagagtttttgaatgcacatggttgtgtgtgtctaaaaaatattcataggagcttccaacagtttcctagacattgcacatgcagcaattgctttgagatttctccagacatcgttagggagattttagaagcaagagttgcgcaaatggtcacccctcatacttttcaggtaccccccctctctctctctgcacacatattagaagaatacatcaagaaaagtatcaca

SEQ ID NO: 172386 - DNA, 1074 bp, Arabidopsis thaliana landsberg
aattctacccatgaaactgatgtgtcaatacttatcagccgattttgcatttttttgtggacctccaatacgttttttccctccaccgtatatcattttgcctttgttttcaagctttgacttagtgttttggacatttatctcgtgtcattgtttaaaaataaataaatgaattatcacaattaatatgtaaacaacaaagacaatggaaagaaacaaaaagaagagaacatagcaggaaaaggatgtaggagacctgacagctaatgacaaccaacttgttttcttcattttatttttctttttaaatctatagaacatgttaccttcaaaactttataatgtttttatattggttttcacgttctttacaaagttacctctgtaattggggttttattaagaaaaacactcaatttatatcttttaaattcctaatttatcaggaatatgacgtcacactattcctataccgaacaccatacctagtggacatctccaaagaaagtgtcgggcgtgtgcttaaccttggagccattgaagatggagctgatgcttggaaaaatatggacctcctcgtcttcaattcttggcactggtggactcacacaggagtacagtctcaagggtccgaaccatattattattacacttagagctatcaccatatattttgggattaagacatgcttagttgacaaaactcatcttctatatttcaattgttgttttttcaggtgggattttataagagatgggtcttcactgatgagagacatggaccgccttgatgctttcaacaaaggactcaccacttggggtcaatgggttgatcaaaatgttaatgtttcgcaaacccgagtcttcttccaaggcatttctcccactcactacatgtaagttcatcacactaatatatgcatatataatgttgaaaactgctgctttaataggtacaatttcatgtctttttttttgggtgatcaataggggaagggaatggaacgagccgaggaaaacttgcaacgggcagatgcaaccgttgaccggatcaacatacccaggtggttcact

SEQ ID NO: 172387 - DNA, 999 bp, Arabidopsis thaliana landsberg
  unsure (1)..(999): unsure at all n locations
cgagtataatctcaatggttatgtgacaggatggataggagactatcaatacgaacaattgattaccattactgcaggttatattttctttaacttacaatgtaatcaagatttatattaggctgtatcaagaagtgcaagttaacttaacattagctacactctgcacacaaaaaccaggctgcgacattgacgttggcaatatcgtgtatgaaccgccccgagatgggccaacagtgtgggaaatagggatacctgaccggtctgcagctgagttctttgttccagacccaaatcccaaatacatcaacaaactatatattggtcatcctgataggtatgtccatgatcaaagatatcacaacattaaggtttcagattgttaaaacagtagagagctaaagtatggttgtacgtaagcaggtttaggcaatacgggctatgggaaagatacacagaactatatcctnnnnnnnnnnnnnnnnnnnnnnnnnnnnnnnnnnnttacaaaaaagattggttctttgcacacgttaccaggtaacaaatatttcacattttctaagaagagtaaaacaaagaagcctcacatttactttaaatgatgataggaaaatgggagatgatacatatcagaaaacaacatggcaaatcaagttcaagctagagaatgtacagaaaagttgcacatacaaaatccggatcgcgctagcaactgcaaatgtagcagaattacaggtgaggatgaatgatgatgacacagaaaagactactcctatattcacaacgggtgtaatcgggcacgataacgcgattgcaagacatgggatacatggaatctataggctttataatgtggatgtaccaagtgagaagcttgtggaaggagacaacactttgttcttgacacaaaccatgaccaccactggagcctttaatggtctcatgtatgactatatccgcctcgaaggacctcctttagattcatactctcactag

SEQ ID NO: 172388 - DNA, 1133 bp, Arabidopsis thaliana landsberg
atggttggactgcatttagagggtcggattcagaggaatgtgattgaggaagcgataagaagattattttcggaaactgaaggaaaagcaatccgagagaggatggaaattcttaaggagaatgtaggaagatccgttaaaccaaaaggttcggcgtatcgatcgttacaacatttgattgattatataacatctttctagtgtttgtttctttttgttctcatttttaagttgatcaattgtttgcgtgtattcacgaaattgtgcctttgtgtttggcatcgttggaataaaagttgttgtttattttcgggaataaaacttgatcttaactaacttgaaaatatgcacatatattgatggactatggatcacaaaaaattatgcttttagggttttttatcagacggttttggctttagtataatcctagtcattgacaccttaaacaatgacacactcaaatggatatgtgtatttgaatacttatcaaagtcttcctcttttggtgcaatttagtttcctattttcttgcaacacacaaacttaccgtaattaattagttaatggcttaatgcttataatatataaacctcactaacataggatttacttatagataccaaaaattattttgcaccatttcttttgagctcacccactccactcacacaatcatgcgatcttttccgccgtcaccatctcccgcatctatcgaaaacaatacgcatcatcatctacatgaagacttcactcttatggtcatcgtcttcgttttgtatggcattgttgccataaggtatgcaacctttaacgatggttctcgtggaactaatcttagattccagagaccgcaaccacctctaccgttaccacaacctcagccgccaatgtgtccgcgggagattgcggcgatgattaaagacatagttgtggacgtggaattatgttgtccgatatgtcttgaggatttgaagaaggttgataatgatgatgataaagtcgtggtttgtttatccaagtgcaatcatagtttccacatgaattgcatattctcttggcttagagaaagtcaggattgtcccatctgtcgtagcactgtttacagaggtggagttacattgatcaaataa

SEQ ID NO: 172389 - DNA, 525 bp, Arabidopsis thaliana landsberg
atgttgaacgactatcacgaggcacaattcactgaaagacgtacaatggatgagcaagaggtgactgcgaaggcgttctatgacatgtttgacgaggcatataaactccttcatggccagacaaaggtttttcaactagatgctatttgacgtataatggagttaaagtcgtagtacagcctaagtcgaaatgcctttaatggtttgttgacagttattggcagcctgctcccagacgatcacgatctgccaaagagcatgtacgaggcacagaaactccttcatgcactcaagatgatgtatgagtagatgcatgcttgtccgaagggctgcgtcctattccaggaaagaatacatggaggcaaagtactatccgaagtgtaaattgtctaggttcatgaaggtagattctagtgatggacagaagaggcagctcaacatccccataacaatcctacaccaccttccattcataccgaggatccaacagctatacatgaccgaggaatccacaaaacagatgac

SEQ ID NO: 172390 - DNA, 550 bp, Arabidopsis thaliana landsberg
ttattttacacacttaggcatgtaggatcatcttgcatacatattgcatgttttagtgttttcaggtgtagaaggagcttacaaggattctactcgacactctactttatccaaccaacaaggaagcagtagagaattctactcgaccagttcagtcgatcaggcagccacaaaggaggcagcaattcactcgaccaacttactggatcaaggcagccttagaagcagcaacatatcgatctactcgcccctcctactcgatcctatactcgacccatttactcgaccaagggcgaccaaatctacaagacttgttgatctatcaaagcgtcttcggatcctcctcattccccactcaaccagacatctgagcatacatataagagaggaagaagcatctactcgaccaattgatcactcggagcatagacacaaaggtgcagactttgcagcaccctctttactcgatccccaagatcgagcactcgcccaaaccgcctcaagtctcttgtcttctagtgaatataggtttttcaacattttactataa

SEQ ID NO: 172391 - DNA, 757 bp, Arabidopsis thaliana landsberg
gacgctgataattgagatttaatccctagtttaccgaaacgccctcttccctgttaacggtttatccgagagtgttcgacttaacatctactcaacacctgagtatttgggtactctagtcaaactcctgcacggttctgaagcctgggatctgctaatttcttctcaatttagaaaattattcttacttcatgtagcaagatgctctcactccgcgaaattgatccatggcatgttttcccgtcagccgattacccgaagaatcaatgagctgtgggtggattatgggggttttcctcttcgtttttctctgcgcgaattccatatttctacgagtcttttgtgtcatcctattccaacttaagatgagattgaagatcaccaagaccctgcatacctatctgtttggaatcgcctttttggcgagaagaaaattgtatttgtctccgatgttcttcagatgctcgaagatgatttggaagcgcagccaaacaagaagctatcgacttggaaaaatttatgtctagctctaattgtaattgtcgatggtgtggttgtatatagcaacagaaatgccggtagagtaactcctcgctttgttgaaatgttacatgaacctgattttttatgtcttacccatggggccgtgaggctttctcttcaacattggagcggtttggccctgatcttggggatcccaaccccattgcggaactgaagaaacaattctgtcaaagaactagcgtctggtgagatt

SEQ ID NO: 172392 - DNA, 1108 bp, Arabidopsis thaliana landsberg
aagtgttaaatcaaaagacggtttgaaatcacgaaaggatttagaagacatagggattagaaaacacttatatgcagagacacgtggaaagagaacttacctgcctcctgccgcttattggctatcaaagttagagaagaagttgttctgcaataggttagcaaaatttaggggtcctgacgaatattgtgctaatatctcaaactgtgtatcagttgagcctcttggaattggtgggttaaaatcacatgatcatcacgtccttatgcagaatctactttcagttgctttgagaggcttgttgcttagaggacctcgagttgctgtcactcgtttatgcttttacttcaatagattatgtcagcgtgtgattgatccagagaaaatactagccttagagtctgaagttgtggatacaatgtgtcaactagaacggttctttcctccttccatgtttgacataatgtttcacctgcccatacatctagggagggaagcacgaatgggtgggccagtacattttcgctcgatgtacccatttgagaggtacttctacttctaactctctaattatgtgatatgttgttagttagctttattgaaatcttcagactctaaggctagtattttctcttatgatgtaggtacatgaaaacattgaaatcttatgttaagaactatgcaagaccagaagcgtgtattgcagagggctatttggctagagaatgtgttgcattttgcacagagttcctacgcaactcgttaccatgtgaagaatcagttaatcgcaatgaagatattgagacaaatgagaatgtgcttggaggtcgtccattatataagggtacaaatgttacactaatagagaaagaaagagagatagcacatcgatatgttctaatgaacatggctgtgactgaaccttatattgagtaagagcactgaatctcttgtatatatctttattcatcgagtatgatctttacattaagttttgtcttttttcagtatgcatttggaagaattacaagaatttgatggtagttgtgcaagaaacgaaactctattgttcaagttacacaaccgaaagatttgcagagtggattaa

SEQ ID NO: 172393 - DNA, 688 bp, Arabidopsis thaliana landsberg; identical to SEQ ID NO: 42581

SEQ ID NO: 172394 - DNA, 3300 bp, Arabidopsis thaliana landsberg
  unsure (1)..(3300): unsure at all n locations
atgtctcgtcgttactctcctagcgatcgcagatccaccctggatccccctttccggcctcctcgccctccgagagttaaagtcccggcttttgacaactctgagttgttgcgcagacatgccctcacggccatcggcagacttaccaatccggcggaacaagacgtctgggcagtactgcctttcctagccgaccactggaagttttccacccgacctactggagcagatcttgggaatgggttattccaattccaattcgcgactgagcaagaccttgctagagccctaaagtatcaaccctaccatttttcgcaatggatgataattttccaacgttgggagccgacgattgataaggatttcccttcccagatccctttctggatcaatgttcaaggtgtgtcgattcatctttggtctgaaggaatcctggttagtattgcgaagagtgtgggagttctagagaagactgaagtttcgtctaccttctttcgaatgagggtgctagtaaatgggctgaagcccctcgtgttgaagacgattgtggagtttgaagatgggagtgaagtggaagcctccctagtttacgagaagctgagaaattattgcaaatcctgctacaagctggatcattcccatctgtcctgccccctccttggtagaaaagagagtagaagactagaagaacctatcaatccaatctcgtgggaggagattagaggcaaaagctccaactcgtcctctgcctcaagaatcttcaggatatctgaggatagttcctctcagagaagagatgtgcctgcctccaaccaccgcacccgtaataggcaaagacaccaaacggactgctctagacgattccgggaatctggtggggatgtaagaagaagagatggtcatgaacctcagagggaaaggattcgaccagtgctctcccccagacattctatttcttcttctgagaatgatatgcgttcttctctgtccagaaggcagagatcttcggatcctgccccagttaatcgacgatcacattccttccaagaggactcccacccaggcccttctgtctatcgaccccttattgataagggtaaaggtgttcaaagaaaatactctcctgttctagaggataacgcaagtcgaagccaggaagtgcaaggctctggcctagcttcaagtcacagagacaaagacaggcccccgccaggaaaggatgcactgaatgctgctatggatgagctccgaggggtcatgacccagtatgttagctgcccggatcctacagagagtgcggccagacgcgaaagagtttgacaggcagaggctctaggagagcttgaagcaactgctgagcaaatggttagagcagctcaaccagctccttcttctacctcagtccaaatccctgaggaggtgacttcatccagcgtggagagagttccggtatctcaacgtctaggtccagtcaatcagcctaaacccaagaggaaagtcaggtccaagcagtctcctaaaaggaaggtaggaagacctccaggcaagcgtgctagtccaaagcccctggcaggagtgaagtcaaagaagctgaaacttctcaaccagcanaccatcccgttccccagaagaagactaatcttggatcaggatcatgtttcagaggatcccatgagttcacatcgggatgaagcacaaatgggtggtccttcgatacagaatcatgtggattttcactccccaagaagccggctcacgtaaccatgagctggaactgtcaagggattgggaaccccaagacagttcgcagagtgagagagatactcaagaaactctctcctgatgttatatttctaatggagacgatgaatcaagatgaagtggttttgaagaagctagatttcttgaagagatataatcacttcctagtttccccttctggacaagggaagggaggtttggccctgttctggaagcacgacgtggagatggcaattgtttcctcctgcgataacttcattgatgccagagtttcattcaaaagaatctcctttctggcaacctatgtttatggggaaccagaacagtcaaagaaaggagctacctgggaaaagctgaagtgtcttgctgataaccgagaggagccatggtttctcacaggggacttcaacgagatactggataattctgagaaatcagaagggccaccaagagctgagggatctttcgtcgagttcaggtcattcatgtctgaatgtggactcttcgaccttaagcacttaggtaactccctctcttggcgtggagtcaggcatactcatctggttagagcccggttggacagagccatgtcaaatagtgcctgcctagagctcttctcaagaggaaggtgtgattatagaaagtttgaaggctctaatcacagacctatcattactttcctaaggcaagataagcaacgcaagaaggggctttttcgatatgatagaagactgaaggagaatgaggagatcaaagacctcatagctgcagcttggaatgaagatttatctgattcggtggagaagaaacttagtcgatgcaggagggctatcatctcctggacaaaggagactcagagaaacagccagaagatcatagaggcgctcaaagtaaagctggaacaggccatggtaatccctgttaatgatgtctgcctcctagtccagattaactcagagctcagtgcagcttacctagctgaggaggccttctggaagcaaagaagcagacaaaactggctcagtttgggagaccagaattcagggtacttccacgcggttacaaaagggagaagttgtctcaatgatctatcagttcgggaaacagacctaggagagaaggtttttgaagatagccagtttgcagaagtgatctctacctgctatcaagctctcttcacctcccagctctccaatccagaagagatttcaaggattgttcaagaatcggttcaccccaaggtgatagaggaggagaatgacttccttatatccattccttcagctatggaaattaaggaagcactgtttaacgtccatcctgataaagccccagggtatgatggtttctctgccagtttcttccaaactaattggactatagtgggtgagtccattgtgcaggagattcagggatactttctatttggacaagttccagcttccatcaaaaggactttcatccggttaatcccaaagattcaaggacagaagaaagtaatggactataggccgattgctttctatattgtgatctagg

SEQ ID NO: 172395 - DNA, 460 bp, Arabidopsis thaliana landsberg
  unsure (1)..(460): unsure at all n locations
gtttttatgatgatcctgcggccaatccttttcacagttatggcgccgacagcgttgctaatgccgggcatacagccctggcccgcaccatggcgcagcaaagcatggtgctgttgaaaaacgataaccagttattgccgcttgataaaaagaaatatccnnnnnnnnnnnnnnnnnnnnnnnnnnnnnnnnnnnnnnntgccctgctgggcaactatcatggcgtaagcaaacaggcagtaaacttcctggaaggcattaccaatgcagtggatgccggaacgcgggttgaatatgaccagggcagcgattataccgataccacgcatttcggcggcatttgggcagccggcaatgccgatattaccgttgccgtaattgggttaccgcccctgtatgaaggcgaagaaggcgatgaattccaagccgccaaaggaggcgacaaacccgacatgagttt

SEQ ID NO: 172396 - DNA, 1420 bp, Arabidopsis thaliana landsberg
agaaattttggtgaagcaatggactctagggattggatgttttcattttaagacgaaatctattcgataaagaagaacgagactcggagtcttgtagatcttccatttggaataaagccgattggtttaaaatgggtattcaaactcaaacgaaattctgatgtaagtatcaataaatacaaagctcgacttgttgctaagggttacgtgcaacgttatgggactgatttctatgaagtctttgttccagtagcttgtattgagaaaataattcttgtcgaccttgaggcttcaaatgattgggagatacaacttgatgttaaaacagctttcttacatggagagttaaaggaaactgtttatgtcacgcgaccagaagattttgtagaaaagggagaagaaggaaaagtttacaagctccataaagctttgtattgcttaagaaaagcaccaaggccgtgaaataacaagctgaaccagatccttcaagagctacagtttgaaaaatgttcaaaggaaccgtcggtttatcgaaaaactataagtggtgagtttcttcttgtagcagtttacgtggatgacttatttgttacaggaacaaatacaaccattattgatgagttcaaaggagagatgacttcaaatttcaacatgagcagccttgggaaattaacttattatctcggaattgaagtgtttcaacgaaaagaagaaataaggttgaatcaaagtcgttataagatgaagatattagaagagactgcaatggtgagttgcagtctgattcatacatcgagggagtccgtagtacaactagcaaaatccgagaatgagaaagaaattgatgctacgggattcaggaaaaaggttggttgtctgcgctatcttctacatagtaggccggacctatcttactctgtgggagtaatgagtcgttatatgcaaagtccaagagaatcacatggagcggctatgaggcactgcttaaggtatctttaaggaaccactaaccttggtttggtatttaaacactcggtgtctaagataccaaagttagtaggctatagcgacaatagtcataacgttgatctggagtccggacgatggaagaagcacatctggtcatatctttttttgctattaaagtccaatctcttggttctcacaaaagcaagatattgtggcaatgtcatcatgtgaggctgaattcatggcaggcattgaaacggcaagataagcaatttggctccaagatttgctcagtgaagtcaccgggttgccaagcaaaagagttgttatacggattgacaataaatcagcgatatctctcacgaagaaccctgtatttcatggcgagggcaaacacatccataggcggtatcacttcataagagagcgtgtcgagaatgaacaaatagaa

SEQ ID NO: 172397 - DNA, 1149 bp, Arabidopsis thaliana landsberg; identical to SEQ ID NO: 25872

SEQ ID NO: 172398 - DNA, 1691 bp, Arabidopsis thaliana landsberg
ctaacctaaaaaactgaggcggctgtaagttttaggattgtggctttacaactatacactaagaaagggaatcttgttcaaattagaagtgatcatggacgggaattccaaaatgaagaatttgaaaagttctgcaggattcaaggaatcagacatcagttctctacacctagaacgccacaacataatggtgttgttgagataaagaacagaactttacaagagatggctagagcaatgattcatggaaacaatgtgtcaccaagattctgggctgaagctgtaaacaccgcatgctacattgtgaatagggtgtatgttagaccggggacaagcaccacaccttatgagatatggaagggaagatctccaaatttgtgctactttcatacttttggatgtgtgtgttatgttctgaacgataaggatcatcttggaaagtttgatgcaagaagtgatgaagggatatttctggggtatgccacaaacagtatagcgtacaaagtttacaataagaggttgaagagagttgaagaatcagtcaatgttgtgtttgatgacaaacaccctactagactattccctgtggaacaagatgatgataagcatgtagaagaaacaagacagtcaacgcctaaagttgaatcaggacctcaaaaggatctgaacagacagtgatgactacagaacctcatacatcatcttctcgccttactgttctaaaaagtcattcagagactaatgttattggaaagttggatggagacagaactaccagggggataaagatgaactacagagatatgattctgtttacttgttttgtgtcaagcattgagcctaccaacattgaaactgcgttagaggatgaattctggtaccatgtttgccatgaagaactaaatcagttctttcgtcatgaagtttgggatttagttccaagacctgttcacgtcaatgtggttggtactaaatggatctttaagaataaaactgatgaagaaggcaatgtgacacgtaacagaacaagacttgttgctcaaggatactctcaggttgaaggaattgattttgatgagacattcgcccctgtagcacgtctggaatctatccgtcttcttcttggaatctcgtgcttgttgaaaagtaaactgtttcatatggatgtcaagagtgcgtttctgaatggagttattcaggaagaagtgtttgtgtctcaacctaaaggatttgaagattctgcttttccggatcatgtttacaagctcaaaaaggctctttatggattgaagcaagcaccaagggcttggtatgagcgtctcactctgttcctaatagaaaagggtttcaaacgtggaagtgtggacaaaactttgttcatctttgtagatgaaaaagacatcctcattgtgcaaatttatgtggatgatattgtgtttggaagcacaaaacaaaagcttgtcacggactttgtggaatccatgaccaaaaagtttgagatgagtatggttggagagatgaactactttcttggtctacagatcaaacagacttgatgaaggagttcatatctctcagtctacttatgtcaaggggttgattcagagatttggaatgcagacagctaagacctcgaaaactcccatgagtgttactgccaaactgtctacagatgaagctggtctgagtgt

SEQ ID NO: 172399 - DNA, 589 bp, Arabidopsis thaliana landsberg
gctctaacgagtaaaggctttggagatccgacagtttttgacaatgcatactacaaaatccttcttgaaaaaccatggacgtcaacttgtaagtctcataagtcataacaaggttcttaagttcttttactcatagagtttcagttttctaccattcctccctatgttctgaagattgattgtaagactgagattgtatatttacttagttttcttacaatgctgtagctaagatgacgagcatggtcgggcttccttcggatcatgctttagtgcaggatgatgagtgcttaaggtttctcatctactcaaagttcttaccttatcatttcatcacctatttttctctcaagtaccattcaaagtagatgaacacttagagagtataggatcattggcaagactgtaaactgttgatcactgttcttgccatttgagtaatctggataactattcaactgatatagattcgtggtttgatgatgcacaggtgggtgaaacggtatgcagaagaccaagacaagttcttcgaagacttcacaaatgcttatatcaaactagtaaattctggagccaaatgaatatgtta

SEQ ID NO: 172400 - DNA, 999 bp, Arabidopsis thaliana landsberg; identical to SEQ ID NO: 16936

SEQ ID NO: 172401 - DNA, 1158 bp, Arabidopsis thaliana landsberg
aagggagtaactactcgctcaagattagctaatttttgtgagcattactcgtttgtctcttctattgagcctttcagggtagaagaggccttgcaagatccggactaggtgttggccatgcaggaagagctcaacaacttcaagaggaatgaagtttggagcctggtgccacgtccaaagcaaaacgttgtggaaccaagtgggtgttccgcaacaagcaagacgagcacggagtggtgacaagaaacaaggctcgacttgtggcaaaaggttatgcccaagtcgcaggtttggatttcgaggagacttttgctcctgtggctaggctcgagtctattagaatattattagcctatgtcactcaccactctttcaggttgtttcaaatggatgtgaagagcactttcctcaacgggccaatcaaggaagaggtgtacgtggaacaccccctagctttgaggatgacaggtactcgaccatgtttataaactctctaaggcgctttatgggctcaagcaagccccaagagcatggtatgaatgccttagagatttccttatagataatggcttcaaagtcggaaaggccgatcctacactctttaccaaaactcttgaaaataatttgtttgtatgccaaatttatgttgatgatatcatatttgggtctactaacgaatctacatgtgaagagtttagtaggatcatgacacaaaaattcgagatgtcaatgatgggggagttgaagtatttcttaggatttcaaagtgaagcaactccaagagggcaccttcacaagccaaacgaagtatactaaagatattctaagcaagtttgggatgaaggatgccaaacccatcaagacacccatgggaaccaatgggcatctcgacctcgacacggaaggtaaatccgtcgatcaaaaggtataccggtccatgatagggtctttactctatttatgtgcatctcgatcggatattatgcttttcgtatgcatgtgtgcaaggttccaagccgatcctaaggaagttcacgttagggccgtgaaaaggatcatgagatatttagtttatacacctaagtttggactttggtaccccaagggatccacttttaatttaataggttattcagatgctgattgggcatggtgtaa

SEQ ID NO: 172402 - DNA, 1535 bp, Arabidopsis thaliana landsberg
  unsure (1)..(1535): unsure at all n locations
cagagtggtgggaagatagaccgagatctcgctctacgtctagctgtggtcgtggacgtgaaggctcaaacagagggactggaaagagtcgtggcagcacttcgtacgtcaacgccgtcggagttaatgaaccaacaggttatgcagccgctaactacgtcatcaccgacaatgacagagacggagtgaccggtttctccgattcacagtggaaggtgattaagaatctgctcaatgctaacactagcaaagtctatgaatccgaaaatctgacaggtacgtactcttttccctcttggataatggatacaggggctacacatcacttgacgggttagttagaaatcttaacggatgttaaagatattcaaccagttggaattgtgttagctgatgggagacaacgagtgttagttaaagaacgatcagtgaggcttgggccgaattggacactaaaatcagtttattatgttgatgggtttcaatcgaatttgatttctctttgtcaattgatggatgaaaatcgttgcgtagtgcagttagctgatcatttccttgttgttcaggaccgcactacaaggacggtgattggagttagtaagctaaagggagggaccttccttttttggagtttnnnnnnnnnnnnnnnnnnnnnngttagagatgagaagtcattcgagttgtggcatcaacggatgggacatccttcagctaaagtagttggtcttcttcctgtaatctcaaatgttatttcttctgaaattttgaataaagcatgcgatatatgtctccgcgctaagcaaacccggttgtcttttccaataaatgacaataaaacgaaaaggatttttgatcttattcactgtgatttatggggtccatatcgaactccaacacactctggtgctcgttatttcttaactatcgttgatgattactctcgaggagtgtggttatatttgcttaacgaaaaatctgaggcaccaaatgttttgaagaacttcatagccatgactgaacgacaatttgaaacccaagttaaagtcataagaagtgataacggctctgaatttgttagtttgaatgagttcttcaagaaacaagagattgttcatgagacatcatgcgtcggcactcctcagcagaatggacgggttgaaagaaagcacagacatattctaaacgtcgctagagctctacagtttcaagctaacttgcccattgagttttggggggaatgtgttctcacagcggcatatttaatcaatcgaacaccgagtatggtcttgaaaggaatgactccttatgaacggatatacaatgctaaaccggtgtatgatcacattcgaattcttgggaacacgtgatatgcttacgaccaatcacatgtaggcgataagttcgcatcgcgaagccgtcgatgtgtattcatgggatatccgtacgggaaaaaggggtggcaattatatgatctagagaagtgtcaattctttgtctcaagagatgtggtgttctttgacgtgttttccactcta

SEQ ID NO: 172403 - DNA, 1493 bp, Arabidopsis thaliana landsberg
tttgagtcctttctttctggccaaaaccttctaggctttgtcaatgggtcactcaagcctcctcctgcaacaactccattcaacaacatcgatggtcttactactgaggtaccaaatccagagtatcatacctggaacagatctgaccaagtagtccgagcctggctgttgggatctctgaatgaagacatcatgcgggaagttgtcaactgtgccacctcctatcaagtctggaatgctttggctcaacactgcaataaggtatctttatcacgactctttgagctacagagaaagcttcaaaccatagataaacatgataaatccatggaaacttaccttaaggagataaagagggtttgtgaacagctagcttccataggcagtcctgttagtgaacagatgaagatatttgctgcacttcatgggttaggtagagagtatgagcctatcaaaacatctgtagaaggttcaatggatactcagccaccacctacctttgagagtgtgatttcaaggctgacaggatttgctgataggctgaacagctatggtcctgatactgaaacttcacctcacatggctttcaatgcttcaagatcagactcctctggttactacaacaacaacaacaaccgaggaaaaggcaactaaagatttgggagtggaaaaagcaaagattcattctccacacgtggtagaggttttcatcaataaatttcacaaaactcaaatggagaaagagtcatttgtcagatctgtggcaaacctggtcatcatgctttgaagtgttggcatcggttcaacaacagctaccaagatgaggatctgccagcagctcttgcaacactcaggataactgatgtcacagatcaatccggtggtgaatgggtaggtgactctggctctactgctcacatcaccaatgcacctcacaagctcagtcagactcagctgtatgaaggaagtgactcagtaatggtgggaaatggaaactttcttcccataacacacacatgattaggcagtcttccttctacttcatgtaacttacctttaaatgatgttcttgtgtgtcctgatatctctaaacccttgttttcagtttccaagctcaccaatgactatccctgcgtatttcaatttgactgtgatgatgttcgaatctatgataaggcaacaaggaaactgttgacaaagggaaagcacagtaagggactttatgtgttgaaggactcaccagttcaagcactctactcttcaagacagcaaggagcgagtgaagatatatggcatcaacgactggggcatcctcactctcaagtccttcaagtgctatctgcaaacaaatctatcagtgttggaaataaaagtaccaagatggtgtgtgagtcttgccagcttgggaaaaatgttagactccctttttctgcttcaacttttgtagctactagacctctagagagaatacactgtgatctctggggtccttg

SEQ ID NO: 172404 - DNA, 441 bp, Arabidopsis thaliana landsberg; identical to SEQ ID NO: 21059

SEQ ID NO: 172405 - DNA, 903 bp, Arabidopsis thaliana landsberg
gcaaatccattcttcgagttggaaggagagatgcttcattgtgctacctcaagagattgttattacttcagcctcaagctggctggcttagcctgatcttgaaaccatcgcctttgtgtctcatgaaggtatgtatattgtagtttgtttgatctcatgggttttatgtgtgcgcttctcattcttgtcgttctgtttgagcagatatacttagtgtgtatgcttatgcttcatggaccgcagaagagacgatgttagtttctggttttgcgaaggagagtgaaacctcaactaccaagaagaggagatgcagagaagaatgtttttctagttgttctgtttcaaagacattgtcgaaggagtccccctcattgtacttttacatgccgataactcaagcggctagagagcttaacattggtttaactcttttgaagaagagatgccgcgaattgggtattaaacgttggcctcatcgtaagctcatgagcctacaaaaactcatcagcaatgtcaaggtataaacaactataaacataagacgactaagttataacaagttaaattcctctattgtgtatcattaggaagtattttttgcagatttttagttcgccaaattttcttgaaaatttgatttttgttgttttggaaatgaaaacgctatataaagccttaatgctatggtctaccgatttagtgaatttgatgtgactatttttataattgtaacaggagctagagaagatggaaggggaagaaaatgaagataagctaagaaacgctttggaaaagctggagaaggagaagaaaacgattaagaagaaaccacctttgaagtttgaggataagacaaagagaaagagaaaagcttgtttcaaggctaaccataagagcaacacc

SEQ ID NO: 172406 - DNA, 1010 bp, Arabidopsis thaliana landsberg
caactgtgctctatattttgattcaatgggtggtggtgaaaaggccatgcgatatgttctcactgaagacacaaaacaggtcatcaaacctgagttgacagggccattgggtgctcgtatatttgataaagccatcatgtataaatcaattacagtgtacgtatgctattggactacaatcttatgtctgtctcttttatgattcttcacaaaatctgttttctaatggatttatatctttgctctatcttgtttcgtttgtacagaccagagccagtattttttgaatttacagagtttaaaggcaatgctcgtcgagactactggttgggaatttgcctggagatccttcgtgtacaatggttcatacgaagatacaactttaaagggattcaacgatcagaaatacttgcaagagcaatccttggcatattccggtaccgtgcaataagggaagcttttcaagtcttctcttcccaatacaaaacattgcttatatttaacctggcagaaagtctccccggtggagatatggtcttagaagctctgtccagccgtgtctctcgcataaccactgatgttgcttctgatgtcggttctgttcagtatatgaaatggccctcaaatttatctccagtctcactcaaattgcttgagcattttggcttgaatctagaaactggtacaaatatgggtgaagaaatgacaatcgtaggagatttttgtgttggggagacgagtccattggagatagctctgaaacagtcaatcctagacacagacagagctgaagctgctcaggcgacagttgaacaagtgaaagtagaaggaattgacactaacgttgcagttatgaaggtatcatgagatactttcttcttcatcttttctccttttctttgctctatagttactagtaactgatagtctcataacagaaagctattgttacctttcatcaaactaggcttgcatataaatcgcttagcctattggcaagatccttataa

SEQ ID NO: 172407 - DNA, 1558 bp, Arabidopsis thaliana landsberg; identical to SEQ ID NO: 17838
  unsure (1)..(1558): unsure at all n locations

SEQ ID NO: 172408 - DNA, 631 bp, Arabidopsis thaliana landsberg; identical to SEQ ID NO: 46857

SEQ ID NO: 172409 - DNA, 1369 bp, Arabidopsis thaliana landsberg; identical to SEQ ID NO: 17501

SEQ ID NO: 172410 - DNA, 852 bp, Arabidopsis thaliana landsberg
ggatctaagatgcaggtcactcttagaaagtattatattggcaagtttcacaggtcaatgaaggtcggtgattggaggatcattgataacttcactttgagtccttccactggcaagtacaagatatcgagtttgagcaatcgcatgggctttaaccacaacactgatgtgagtcaatgtgatcctgtattgaatagtgtttttcttgatcttgcagattttgaagggattaagaacgagagttatgatgagaatgttctaattggttagtattttcaaaattccctatcatgttttaactcaaacaaacaagtgatatgtattttaatattaacagagtaatctttacaatggcagacatattaggtcaagtggtcagtgtgggtaaagtggatgagattgttgctcagaacaaaccaaacaaaaaactagagtttcaaataagagatgccaggcaagtcttcaatattgttatacataattttgattcatagcagttatgtgttcaaacaagtaatattgatatcgtgaaactctatattgaagcaatgagcgtttgtcttgtactttgtggggtgtgtttgctgagaaagtattcagtgctttaaaaagtgtaaagcatgacgagaagacagtggttcttatacgctatgctaaaatcaataatttcaaaggtatccactcttcccttaactatgtctaaagttatcatattgaatgtatattggcatgtctaacaaatattgtctaattctgttaactaggtgagattagtattacaagtgtttttgatgtttcggatgtcaacatcaatccggttcatgttcttgaggtggagctgttcgtgaaatc

SEQ ID NO: 172411 - DNA, 523 bp, Arabidopsis thaliana landsberg; identical to SEQ ID NO: 10142

SEQ ID NO: 172412 - DNA, 293 bp, Arabidopsis thaliana landsberg
  unsure (1)..(293): unsure at all n locations
acctaaaatcacaatcactggcaaaaacaacttagatgcttctgtgcaacaaagactcttgttctgtttttcttcaggttttttgctcatttcagctcaaacgaaatcttaattccccaaatgcagaaccaaaaggtttagttcttgatcttcttttgtgtaactttttgcaggattttcaacttggtgaaacggtgagaagcttgccnnnnnnnnnnnnnnnnnnnnnnnnnnnnnnnnnnnnnnnnnnnnnnnnnnnnnncggatcttgtccaatgtgtagacgcgatctg

SEQ ID NO: 172413 - DNA, 1203 bp, Arabidopsis thaliana landsberg
aggttgaagtgaaatcaatagttggtgttaatcctcatgaatatgaccacttggtttcaaaaaagaatcctaaagattaggatttgttacatatttttgatcttctgatcaaagggtataaaatgagcaagaaagattggagtgagtgatggattgaagtggaacaagtacatgaaagtagaatagatcaggtaatgaaacctgcaattgaaacacttgtgtatcacataagaaaaaggaaatcaatatcctttggtgagaaaatagggctggtctatgaaaactatgaagttcttaggtacaaagtttgaaggatggccgacaatatcggggtcgaaagagtttctacttgttctaatagagaagtggaagaagaaaattttgcgagagatatattccttgcaaattttgcgacgaattagtgacgttctcctatctgctctcaaagtcctcgcaattcattagcaaatttgcgagggaccttttcgatcgcaaatgtgtctcgcaaatcgcttgttttcttgtagtaaaaaggtttttaaaagaattttaaatcgttgaaaaagttactgtaatgttaacacgtaaactgttagtaattgggcctagacctcttatttttgaaaaaacaaaccgttttagtataatttcacaccaaaaattaactaaaaaccgaacaaaaaaaaaaaaggaaaccgtgaaagtaacagaaagtaaaaaaaaaaactttttagagaaattgtcgtctctctcaccttgtcttcttccttagaacaatttgaaaaaaaaaaaaatctccagcaaaggaatcaattgaaggtaacaaatatatgatactaaattttgatatttgggttagttcgattttatttctttttgtcgaatctcttctctattataggaatatctagggttttcggttcgcaaattcttcgcaagtacctagcaattttgcgagggatatatttgaaaaattaaatgaaaccaatagttggtgttaattctcatgaatatgaccacttggtttcacaaaagaatcttaaagacaaggaactgttacatgtttttgatcttgtgatcaaagggtatataatgagcaagaaggattggagacatggatggattcaagtggaacaagtacatgaaggtagaattgattatgtaatgaaacctgcaattgaaacacttatgtatcgcagcaga

SEQ ID NO: 172414 - DNA, 842 bp, Arabidopsis thaliana landsberg; identical to SEQ ID NO: 15043

SEQ ID NO: 172415 - DNA, 621 bp, Arabidopsis thaliana landsberg
agggggagtcatcaacgggtcttttaaagtttcatgtctcaaaaataaaactctattctctatcatgatttcctctaaaactctggctttggtctgttttagggaaaatgcaaacgaaataaaagccaaattcatcattggaggtgctaatcacccacatgatcctgaggctgacgaggttattcgaaaatctgatactttgtttttgctctatcttcttcccaacctcgcgtaacagagactctgtaatatctgtctccgcagatcttgaacaagaaaggtgttatgctcctcccagatatatacgcaaactcagaaggagtcactgtaagttacttcgagtgggttcaggtaagactcgaaaatcaaggctgtatgacctgatcgaatctaaagccactcgatcaaaacactgatttgtgttatatctgtgtgaagaacatacaagcattcatgtgggatgaggaaaaggtgaatagggagctaaagacctacatgactcgcgggttcaaagacttgaaagaaatgtgtcagacgcactcatgtgatctccgtatgggagctttcaccctcggtattaatcgtgtcgctcaagctaccactatcagaggctggggttct

SEQ ID NO: 172416 - DNA, 302 bp, Arabidopsis thaliana landsberg
aagagcaaccagatatcgaatcaaaactccatctgaagaacccacatatgagaataacatacttgaatagcctactaagcttgactgagattctgagccagtcccctgagaacatttccaatgatgatttggccaacgcatattctacgctatcttatgtgacaaaagccgggtttaagttagattggttggagaagaaactgaaagatgttggtgagactcgtattcaagaaattcgggaagagttgaaagacatgaagcataagtgtgtagacatggaggctcttctggagttcttacta

SEQ ID NO: 172417 - DNA, 797 bp, Arabidopsis thaliana landsberg
  unsure (1)..(797): unsure at all n locations
aacttatgcgttcattatgcatgataactaacatattaggtccaaatataaaaaataatgtgagcatctaatcagtttatgaacttctaatacgttgttaagctaataaacaagaaaacaaaaggtcacggtcacgtatacgtgcaccacgtgtaagtgtacatttttggctctttaaagtttagatagggcttagaaaaactagagttgtttattttatttatatagaagacacgagaaatgctgtagaagtggtcttgtcttatgggttattaacttattaaaaatatcactcactttttttgtccaacacaaaagtttatatatgtgatttccttatcaatcattgattcgagaaatttcaacaaatctctataatacagtacatgttgagtctactttataagatgttaaattatttctaatgaatataataatgtagaagacggtttttgttttggaacaaaagttacttttcttcatatgaattaaatgttcaaattattttatgattgtttcctgtaatttgatgggtgtgtgttttcaccgtaattgtttggtttagaaatcttaaaatatgtcagtattatcactacaagaaaacagacaaacaacgactacagaaagcgnnnnnnnnnnnnnnnnnnnnnnnnnnnnnnnnngtcacgaccgttttacgacgcatatacgacaacatgagcattagtagtcaattagtcgttattttacgactaaatatgttagtcggcaaatactcgtatagtaacgacaatttaacgattatattatagaagaaa

SEQ ID NO: 172418 - DNA, 221 bp, Arabidopsis thaliana landsberg
cctacaaaaccgtgatgtaacacgacaatgttgttttctagctttctgaggttgaactaaacactcccttagtgcctttacgggttacggactcaccgtttccgttatgggaagatggtgacatggctaatggagacgtggacaaaaatatcattttcgtaatcgaacgctcctttgttgaaacatgattttggacaaagtagattttcccgcaaaataat

SEQ ID NO: 172419 - DNA, 412 bp, Arabidopsis thaliana landsberg
gtggaatattgtgggagagctattctggtgagtcctaatgatgggaatgttctagccatgtacgctgagttggtgtggaagatccataaggattcatctcgtgctgagaattacttcaatcaagctgttgcagctgctcctgaggactggtaagaaaaagattctaactttaaaaatcaagctctcttctttgggactttgatagtagttgtgtgactcttgtgcttgaattctgactaacgtacttgttgttttctgcagttatgtacaagcttcgtatgcacggtttctatgggatgctgaagaggaagaagaagaggaaaaggaagagagacatgaagaagaacttgagcatcaaacttctcgaatgaatttcttcaccggaccttctccaatcacggccatgtcttaa

SEQ ID NO: 172420 - DNA, 650 bp, Arabidopsis thaliana landsberg
tcagccatgactatctctttatcacccacgcccacctcgaccacatcgtgagcgcattggccctgttttcatatttgcaggctctatttctgcttttgctttgtttgcttatacacctctaacacctaaggtttacatgcgccgttgctaagtccagctcttacaaaactactataaaactattaatggcgcactgatgattaccacaataccacatcaatttctgctgtgctgatcgtgcagggtggtcttccaatgtacatagctacccgaggcctctacaacttgaagcctcctactgtgtttgtaccaccctgcatcagggatgatgtcgaggatctgcttcaagtccatcgtagaacgagtcaaattgagctaaaagttgaattagttgcactagatttgggtatggatattgcttcattactgatttggatgttttctgcttgtttgtttccttataatgcaacgacttctttcaggagagacatatgaaatacgtaatgatcttgttgccaggccatttcaaacgtaccacactatacccagccaggtactgcttcttagagctagcagacatttattttttgttattggtcatgatttaatgcctattgatattatcctagttgatcctctagagtcgacgt

SEQ ID NO: 172421 - DNA, 884 bp, Arabidopsis thaliana landsberg; identical to SEQ ID NO: 34308

SEQ ID NO: 172422 - DNA, 476 bp, Arabidopsis thaliana landsberg
tgaaaatcaaacagagccgatatcgccgaaattcttcaacgctttcgaattcatatcctcgatgtcttccggatttgacttatcgagcttgttcgagagcaagaggaaagtgcaatcggtgtttacgtcacggtcgtcggcgacggaggtaatggagaagatagaaacggttacgaaggagatgaacatgaaagtgaagagaacgaaggattttaaagtgaagatggaagggaaaacggaagggagaaaaggacggttgtcgatgacggcggaagtgtttgaagtagcgccggagatatcggtggtggagttttgcaaatcggcgggagatactttggagtacgataggttatacgaagaagaagtacggccggcgttaaacgacatcgtctggtcatggcacggtgataataataacacttcttccgaggattgttgaatcagtagtttttggttctgatttaaccggttatcgg

SEQ ID NO: 172423 - DNA, 230 bp, Arabidopsis thaliana landsberg
atttcttagctcccgttcatagttttgcttcagtttatccactagtattctttttatggtggttcttccttctaatgtccggcatatctatatttcttttctaccagatgaagcatcaggcatcggtccgtagttcgtatataaaatatatggttgtggctcgaagtactcttgtgcatctacgtcactcggctcgcgcgcatctccgccccgttatgttatgtaacaat

SEQ ID NO: 172424 - DNA, 267 bp, Arabidopsis thaliana landsberg
  unsure (1)..(267): unsure at all n locations
tgaatgattatctttttctctttgcttctcctttccttgacccattagagcagtctggatcgtacgagacagaagttcatcattattaatagagtctggcaggtccatgcccaagttcttattacttcttgggttgtaattgctatcttattaggttccgcagttctagcgattcgcaatccacaaacaattccaactgacggccaaaatttctttgaatttgtcctccaattcattcgaaacgtgagtaaaacccagattgnagaa

SEQ ID NO: 172425 - DNA, 935 bp, Arabidopsis thaliana landsberg
  unsure (1)..(935): unsure at all n locations
cgactatcgaaaggtcggagatggatacatagaagagttggtaaagagaaacatggtatttctgagagagacgctagaactaggagatttgaaacatgtcacttgcatgatattgtgagagaagtttgtcttcttaaagctgaagaagagaacttgatagaaactgaaaactctaaatctcctagtaaacctcgcagacttgtcgtaaaagggggtgataaaacagatatggaggggaagctgaagaatccaaaacttagatctctcttgtttatcgaggagcttggtggttataggggattcgaagtatggtttacgaggctacagttgatgagggttttagatctccatggagttgagtttggaggggagttaccctctagcatcggactgctaatccacttgagatatttgagtttatatcgggcaaaagcatctcatctactttcgtctatgcagaatttgaagcttctgctctatttaaacttagagtttgctgacggggtaacagttcatgtgccaaatgttttgaaagagatgatagagttgaggtacctttctctacctttgtttatgcatgataaaactaagttagaattgggtgatctagtgaacctggagcacttgtggtatttctcaacgcaacacagtagtgtcacagacctcctccgtatgactaagctcaggtcgctcgctgtatccttgagtgaaaggtgtactctaggaaatctatcgtcatctctccgtgaattgcgaaacctggagatgcttgagttctttgtttcgcgtaaaaccaatatggttgattatgtgggagagtttgttctggattttattaatctaaaggagataggtttgngagtgcgtatgtcnnngnttcctggtcggcgtcggttccctccgcgccttgctctcaaacttctctttngctgccg

SEQ ID NO: 172426 - DNA, 1728 bp, Arabidopsis thaliana landsberg; identical to SEQ ID NO: 27616

SEQ ID NO: 172427 - DNA, 1141 bp, Arabidopsis thaliana landsberg
catcatcaatgtccgatcaacgactacgtctgctcattatgtagcttccagatcaagagaccctgttttcgagaagctcatggacaaatacaagaaccttctcaaggtcattgccatacaagaccttaccctcgccaatccaacagctgatcctccctctctatccattgagtttctctccaggctctcccagaagctccaccttaatcgtggcgctgcttctttcctgcgaaagtatcctcacatctttcatgtcttgtatgatcctgtgaaagctgagcccttttgcaggttaactgatgtagccatggagatttctcgccaagaggctttggctatcactgctactttgtctcttgttgttgaccggttggttaggctcttgtctatgtccatatcaaagtccattccgcttcgtgcggtttttaaggtttggagagaacttgggctcccagatgattttgaggactctgtgatttcaaagaaccctcatctttttaagcttagtgatggtcatgaacccaacacccatatcttagagctggttcaggaagaagagaaaagactggaatttgaggccgcggttgagaaatggagggtggttgagtgttctaaggaggattgcagtgtcgatagaaccgaggttcagtttagtttcatacatagttacccaccaggaatgagactgagcaagacctttaaagctaaagttaaggaatggcagaggctgccttacgtagggccatacgaggacatggttggtaagaagaagagtagatccggtgtgatgggaatagagaaaagagcggttgcgattgctcacgagttcctgaatttgactgtagagaagatggtggaggtagaaaagatcagccatttcagaaaatgttttgggattgatttgaacataagagatttgttcttggatcacccgggcatgttttatgtgtcaactaaagggaaaagacacactgtctttctcagagaggcttatgaaagaggacgtttgattgatccaaatcctgtttacgatgcgaggaggaagcttcttgaccttgttctcttgggacgccatgctgctttatcagaatctgggaacactagtatgtctgaacaagaatgacattacgatttttcaggc

SEQ ID NO: 172428 - DNA, 181 bp, Arabidopsis thaliana landsberg
atgacaaaattaaatacccttacctacgatgatctcgatagtgtttcaaagctacaaaaaagtccgagatatgctgatataatgcagcaagtggaagaggctcttgaaggatctgtattagagaacaagaagctaatcgtggacctgcagcacctcttagttgatattgagaatgaaatag

SEQ ID NO: 172429 - DNA, 292 bp, Arabidopsis thaliana landsberg
ttattttgcacacttagccatttaggatcatcttgcatacacattgcatgttttggtgtgttttcaggtgcagaaggagcttaaaaggactttactcgaccctctactctatccaaccaggagggaagcagtagagcattctactcgatccattcactcgatccaggcagccatagaggaggcagcaattcactcgaccctcttgctcgatcaaggcagccttagatgaagcagaagattgatctactcgcccctccaactcgatcctctactcgacccatttactcgacca

SEQ ID NO: 172430 - DNA, 694 bp, Arabidopsis thaliana landsberg
atgcctgatggaaatctagatgatttcttgtttaatgaagaagggtctaaccttagttggtcccaaaggtttcacattatcaaaggagtggcttcagctcttctttatttgcatgaacagatcgttcttcaccgcgatgtaaaagccgcgaatgtactcttggatgaggatttaaacgggcggctagattacggtctagcaagatttggtacaaacaggaacccaatgctaggaagcgtaggttatgtggctccagagctaataataacaggaatgccgacaaccaaagccgatgtttattcattcggagcattactacttgagtttgcttgtggaagaatgttcattgagtatccagggaagcctgaagagtttaacttaatcagctgggtgtgtcaatgctggaaaagagggaacttggttggcgcccgagacgctagattggaaggagactacgtcggcaaggagatagagatggtactaaagcttggtctactatgtgcacagtacaatccagaggataggcctagtatgtcccaagtggtaaactatcttgaaggaaatgatgttttgcctgagatgcctccagacactcctgggatcagtatcccaacaccgtaccatgaagttcttgcgtagcagcacttcgtctagtgcccggcaaataacagaacaaatcgcttctctcaataac

SEQ ID NO: 172431 - DNA, 1608 bp, Arabidopsis thaliana landsberg
gagcttaggatgtttgtggacacatgtttagctcattatgaccatttgattaacctcaaggctatggtcgctaagaccgatgtcttccacctcatttctggagcatggaaaactccagctgaacgttgcttcttgtggatgggtggtttccgtccatcggagatcattaaggtacatctcgttttttcttatagccatatacatatatttaggtttttcgagagatatttacttattctattcgagccacatcccacacaataattagtcatgatgatattgtaaactaatcaaatatggattaataaatctaaattttggaattttacttgaagactaatcattttaaattttatcttagaacctaaaatattccaggaggcaatcattcatacaatcaacactgtggattacttgcagaacatatactaataatgactgaaattgtgacattgttattatttatatcgtacatatatgtccacagaatatagtacttccaactttattttattatttagattttttttttttaatttagtctttgattctcgtaaaagaggtacgatatagtaataatagataagacagacaagagatagactatatagtgatattgttggacgaggtatatatatacataacattgcatggggtgactctagatgtataaaaccaacatatatacgtgaatgtctttataaataaaggtacacgtaaaattattttgaaaacaaattaagaatgcatgcaattgtgtgtgatggtgaagtatctctagaaataggtaggttttggcataatgcaaaagaaagtgcctgtctgttttttcgatttatgggatccataggagagagagatagacataaaccaccatggaattcaacagagacgaccataataaacaaaccaaaaataaataattgtttaacatttttagcacgctcgtcaattggatgattatcattttttttcttttctaaaatggttacgtaaagccattttaattaaacctactttttattctaaacaatatgagtacctacgatagccgattaataatacaaattaatatatggatggtgtgcatatctgacaagacctttggcaatgtctcaatcttatatcctttttagtgaaaacaaaaaggaaagaagagattttgggtgtagctagtaactcgtgcagagtacatacactacacactttaatgcattcaacgttctttatgcatccattaagaccattgttaattaatcctcgatatatcaacttgtgtgtattaattagaaacgcatgcatgcaggtgattgtgaaccagatagaaccattgacggagcaacagatagttgggatatgtgggctgcaacagtccacacaagaggccgaggaggctctctcgcaaggcctcgaggcgttgaatcaatcactttccgatagcattgtctctgactccctcccgcctgcctccgcaccacttcctcctcatctatccaatttcatgtcacacatgtccttagctctcaacaagctctactgctctcgagggcttcgttctccaggtacccttataactctttctttttaagtttatgtgcaattatatat

SEQ ID NO: 172432 - DNA, 695 bp, Arabidopsis thaliana landsberg; identical to SEQ ID NO: 47885

SEQ ID NO: 172433 - DNA, 349 bp, Arabidopsis thaliana landsberg
gctttcaatatgcttcttgatgctctgtgtaagtgtggtttggttaaggagggtgaagctttgcttagaaggatgaggcatagagttaaacctgatgcgaatacgtttaatgtcttgttctttgggtggtgtagggtgagagaccctaaaaaggcaatgaagctgcttgaagagatgattgaagctggtcataagccggaaaatttcacttattgtgctgctattgatactttctgtcaagctggaatggtggatgaggcagctgatttgtttgactttatgataaccaaaggctctgctgtttctgctccaaccgcaaagacttttgctttaatgattgtggcgttgg

SEQ ID NO: 172434 - DNA, 1426 bp, Arabidopsis thaliana landsberg
agatcaattgttgtcgggctttaattattcggtggactaaagcccagaactctaatagcaaaaggcttatcaaagaagtccaagatgcgttagaggtgggcctctcagagtcttctcctaataagagctttattgatgagtgtacggccaagctggaaaagctgtattctgcagagaaacttttttggaggccgtgttttctattaaccccgataaagctccgggtcccgatgggttttcagcgggtttctaccaatctttttgggatatcattggtttggatgtttcgctggatagtaagcgtttctttgagtcaagttttcttcctcgtcagcttaatgaaacacacatctgtctgatacctaagatcacaagtccacgacgagtcgctgattatagaccaatcgctttgtgtacggtgcattacaagataattgctaaggtgcttaccaaacgccttcaacctctccttgcaaagcttatctcacctaatcagtcggcctttgtacctaaccgggcaatctcggacaatgtcttgatcacccacgagattttgcactatctccgaacttcggatgcgcgtgtgagagtctcaatggccgtgaagaccgacatgagtaaagcttacgataggatagagtggaccttccttgaagctgttcttcgccggttaggtttccatgacaaatggacatcgtggatcatggcatgtgtcagttcggtctcatactcctttcttgttaaaggttcgcctaagggtcaggttttgccttctcagggattacgtcaaggggaccctctctctccttacctctttatcttatgtaccgaggagctttaaggtttgtgtcaaagagctcaagatagtgggcagcttcccgggattaaagtggccaagggtagcccccctattaaccacttactctttgcggatgatacaatgttcttttgccgctctaatcaaaaaagctgtaatagacttatggaaatcatctctcggtacggagaagcatcgggccaagttatcaacttcaacaagttcgccattactttctctaacaaagcttctttagcgagcaagatggctgctaaactcactttaggaattgcacaagaaggtggagtgggaaagtatttgggtcttcccgaacattttggccaaaggaagaaagacattttcacgtcaatcgttgataggattcgtcaaaggtctcatagttggactactcgttttttatcggctgcgggtaaacaagttttactcaaagtggtgttagcagctatgcccttatatgcaatgtcctggtttaagatacctctcttgctctgcaaacgaattcagtctattctaacccggttttggtgagatgacaagcccgataagaggaagaatagttgggtctcgtgggaaaagttaactcttcca

SEQ ID NO: 172435 - DNA, 761 bp, Arabidopsis thaliana landsberg
ggtggaacagagaaaggtttagatcctcagctatggcatgcatgtgctggtggtatggctcgtatgcctcctatgaactctaaagtcttttactttcctcaaggtcacgccgaaaacgcttacgattgtgtcgatttcggtaatctccctattcctcccatggttttgtgtcgtgttttagccattaagtatatggctgatgctgaatctgacgaggttttcgctaaactgagattgatcctttgaaagatgatgagtatgttgatcacgagtatggtgatggtgaagatagtaacggtttcgagagtaatagtgagaaaacgccttcgtttgctaagactttgactcagtctgatgctaataacggtgggggtttctctgttcctcgttattgcgctgagacgattttcccgaggttggattataacgccgagccgccggttcagaccattcttgctaaggatgttcatggtgatgtttggaagtttagacatatttatagagggacgcctcggcgtcaccttcttacaaccggatggagtaattttgtaaaccagaagaagcttgtggcgggagattcgattgtcttcatgagagcggagaatggagatctttgtgtaggtattaggagggctaagagaggagggataggtaatggacccgaatattcagcgggttggaatccgatcggtggaagttgcggctactcttctctgttaagggaagatgaaagcaatagtttaggagaagtaaatgtaccc

SEQ ID NO: 172436 - DNA, 203 bp, Arabidopsis thaliana landsberg
tcactcttccacctgggttaagtaccgttcttaatccgtcgcaatactgcgtcgttttgagtattagggttttcagaatatttcgctataggtagcatgtattttacattttcgtttacataagttttattctgcagacactgtgctcttgaccttttgtaatccggatttctcttaatctattcagtattcagtatttgctt

SEQ ID NO: 172437 - DNA, 535 bp, Arabidopsis thaliana landsberg
  unsure (1)..(535): unsure at all n locations
gagagctacaaagcagcttggtcacaatgaattaagcagctctnnnnnnnnnnnnnnnnnnnnnnnnnnnnnnnnnnnnnnnnnnnnnnnnnnnnnnnnnnnnnnnnnnnnnnnnnnnnnnnnnnnnnnnnnnnnnnnnnnnnnnnnnnnnnnnnnnnnnnnnnnnnnnnnnnnnnnnnnnnnnnnnnnnnnnnnnntccccgaaacttcctggttacttcctctagattttccattgaatgatcagttagatagcttcaacagggaacactcgcgatgttacggaacaatgttgaagaatcatgccattaactcaacttcaataatactgtcacatctttatcttgatatttgccatgattacaggaatcatgacaaaaagttcttctgtgaagaagatcaagctttccttgataaagtcacttggcttgtcgtgaaatccaacctttactttgttccatctctatgattgagcaagcgttagcagtgtatctctgttagaaatcccaaagcacaaagacgtgtactatggcct

SEQ ID NO: 172438 - DNA, 493 bp, Arabidopsis thaliana landsberg
ttccccaaaaggtacgaattgcataaaacggtgaagaattgggtggagcaatggcaaaatctcccatacatttcgccttatgaaaatgcttttcacttggggtcgtacagtgatcaggctgagaagtggcgtgtcgcagtacttcatgagcttttgttccttttagtatctaagaagactgagacagacaatgtgatttgcttaggggagtatttagggttcgggatgaggttcaagaaggctttggtgcaccacccgggtatattttacatgtcgcacaagattcggacccagactgttgttctaagggaagcttaccacaaagttttcttgctggagaagcatccattgatggggatcagacatcagtacatttatcttatgagcaaatcagggagagggaagaaacgagactatgttcatggagttgagagaagcaaccgaaaaaagagagtaatcaaagcttgtgaagatggtgaaatttatgcatcct

SEQ ID NO: 172439 - DNA, 550 bp, Arabidopsis thaliana landsberg
acatgtacacacctagtctaaactactcctattaagaagacaaaaaggacgtccacaccaaacggcgcccccgcctacgcccgtgcgtcctcgcctacgcccgctcttccgccagattcaccgtatccccaatccaactgcctcgaacacacatcgccacgatcccgccgccgcatactccgcctcaaacatgcaccatcatccccattcgtgcgcccactcccagatcccatccccgccggccccaaccatctcccctgcatgccgctatcttccaaccactcccgcaccatccgtgctagcccgcatggacgctcaccgcgccgctagcaccccgcatgtcgcgcaccccacaccgatatctacgcagcctcctccccatctatccacatcccatccgagcccctacaaccttcgtccgcatcccgatcccgcccccgccacgtcgcctgctccaaccgcgttctgcctccatcatgctgccacacggccccctcctaccacgctcctcacaacagtggatctagcgtcctaatcgccagcaaggaga

SEQ ID NO: 172440 - DNA, 664 bp, Arabidopsis thaliana landsberg
atggaactgaggagaaaattgtgcattgtggttgcagttttcgtaattgtgatcgaatttgcatcagccaatttcgtgtttaaggtacaacacaagttcgcagggaaaaggaagaagctcgagcatttcaagtctcatgacacgcgccgccactctcggatgctcgcttccattgatctccctcttggcggagacagccgcgtagactctgtcgggttttgttctttttccctctctttttaataatttaacgtatgataaatgtagcttccgactcaaaaccaattggcaataagcgaaaatgattatgcagcgatcatttagtaccgacataatttatgtaacatttgggacaaatacctaagtttaggtactaatgaagttacattttttttattttgttatagtttatacttcactaaaatcaagctagggtcgccaccaaaggaatatcatgtacaagttgatacaggaagtgatatactttggatcaattgcaagccgtgtccaaaatgtcccacgaaaactaatttgaatgtaatgcttccttcttcttaataacttactatctagtagtaacacagatggatcatctttgtttttttgtttacaccaattcagtcccgttcatcgctggggctctcccaatgggtagtccaagtcc

SEQ ID NO: 172441 - DNA, 559 bp, Arabidopsis thaliana landsberg
tgatccgggaaaagaccgtggtgctttgatgggagaaatcgccagagaagctgataacatgctgtggatggtagatatattgattaagaagaaactgtgcagtgagtttgtgaaactatgggcggatcaaaaggagctagcgaatcttcattccaagatcccaacgatgtacagacacgaaataagcaagatcaccgcgcagatatgtgttggtattggtaaaggaaggatcttggtgaatcgggagactaggtttgcggttctgaatacatggttagaggctttgtatgatgatttcgggtggatgagacggttatcctcgagatctctggataggaaactggtggaggatggactcagccagaccatattgactttgtcgttgagacaacaacaagtgattctgatgaaatggtttgatcggtttctgagcaaaggtgatgattgtccaaatgtgcaacgagcatttgaggtgtggtggagaagagctttcataagacaggtcttgacagagcccgatgagcctcggctgcagattgcactctattcacagactcct

SEQ ID NO: 172442 - DNA, 626 bp, Arabidopsis thaliana landsberg; identical to SEQ ID NO: 73079
  unsure (1)..(626): unsure at all n locations

SEQ ID NO: 172443 - DNA, 523 bp, Arabidopsis thaliana landsberg
aacctgaaatgggttttgatgaatctcttgtttgtttctgctcttgttcgtaattttgttctttcatcatcacaacaagtaatctgttcaagccaagacagagcaacacttctgggtttcaagtcaagcatcatcgaggacacaacaggagttcttgattcatgggttggtaaagattgttgcaatggagattgggaaggtgttcaatgcaatccagccaccggaaaagtcaccggcttggtgttacaatccgccgtgaacgagcctactctctacatgaaaggcacattatcaccttctttgggtaatctccgatctcttgagcttttgctgattactggaaacaaattcatcactggttcaatccccaacagcttctttaatctgaccaatcttcgtcagctcatactcgatgataattctctccaaggcaatgttctttcttctttaagccatctttccttgttggagaatctctctttagctgggaatcgcttctcaagtcttgtcccggcgagttttg

SEQ ID NO: 172444 - DNA, 342 bp, Arabidopsis thaliana landsberg
atgttggcgtgtgacgagatttatatccgacgggaatggatgtataagcacaaagatgttaatggatcaatgacaatagagtttgcagatgggctagaagaattcatgataaacgaaaatcaattgccactcacgcaagaaattgcaatatgtcttgtccatgtcgaaagtgcaaaaatggtcgctattttctttcaaaacagtatgaaagcagttatataatagaggattcatggcaaattattatatttggttttggcatggcgaggaacatatggtgaatgcatcgtctagtaactctagttttcaacatgaagaggaacctaatatcaattttgagcc

SEQ ID NO: 172445 - DNA, 305 bp, Arabidopsis thaliana landsberg; identical to SEQ ID NO: 80789
  unsure (1)..(305): unsure at all n locations

SEQ ID NO: 172446 - DNA, 441 bp, Arabidopsis thaliana landsberg
ttctttttgtctgttgttagatcccacattatgaggaaaatgatccgattagccctgatcctggcgcttttctattcctatgccgatgcgcagcaatcatctggcccccgttctaaagtaaatcccgccaaaaaacaggtggcctgcaggtggcagttcaaaacctcagctcctgttacgggtactccggttatcaaagatcagctgctgcttatcggcgccgccgacagcagtttgtatgcgcttaataaaaccagcggtaaagtggtatggaaatttaaaacccaggggaaaatcacgagtacagctgcctgtgataacaatactgtatactttattagcgaagatgctcatatctacgcagttggactcacaactggtcaacttcggtggcaatttaaaacatacggggagcatgcgacagatccctgggattacttc

SEQ ID NO: 172447 - DNA, 691 bp, Arabidopsis thaliana landsberg
catgatgaagaagttacagacaaaggaaaagccgataagcgattctccacttctaaaccttgttcgcaagagtcaaatgcaaatcaagacactggtcttggagtttataaagaagagaaggagaaaagagaagcgagtctaagacgcatgtatcgatgtagatcactcccagtgagccagaatagtagagttattggagattcgcttgttcaacatttggtttcagaggttgcgtttcccgtaagaaacaagatgggtttagagaaagctaacacgtctgcagctctgcctgttccttgcgtaggaagcaacaaaacgcaagagactattgaagcgatgactgaaggcagtaaagaagctagatttgagatgccagctcctagctttgatcatggcctaagaatcgaagaaagacgcgatgaatcggtagagaatactccggtactctgtgaggacaagactgagatatacgaggcaacaatcgatgtggaagagaaaactgtgatgctgaagagaagtgagtctgtgaaatcaagaggcagcgaggcatctctagggtctttgaaaaaacacaatgatagcttcaaagaaaccaagggctcgcaagatagcttggtggacaagaaagcgtcgtctgattctatgaaaggcatagtcagaaaacggagtaaatcttcgctcttgggaacag

SEQ ID NO: 172448 - DNA, 1802 bp, Arabidopsis thaliana landsberg
cactctgtctttccatctctaaaatttactttttagtttaagattaattaaagtttttacaaaagctaaacgtataataacgggctttctcatacgaggattatatatattctataatacgtataaaccaaacacatgaacacgtcaacacttaaacctaaacttcagctagattgaaagtgacaatatagatatacagatagagaagttaaacgaactttttatattcaaaactctaaatatgttattctcaccaaactccatctctcttcttccacaagacacatttaaatagacatttcaatcaaagatcaaagctcatcacaaaaacaaagaacaacaccacaaagcaaagaaagaaagaaagataaaaagcttgcaaggaaacaatgacattgaagaagagtttctctgcttctctactttcaccatttctgatcatatgtcttattgcattgctttctgttccggtattcgttggagctcgccggttattggaggaacctaaaccagagataccgacatttccggagctacctaaaccagagatgccaaagttacccgaatttccgaagctagagttgcctaagttacctgagattccaaaaccagagatgcctaagttaccggagattcagaagcctgaattgccgacgtttccagagttaccgaagatgccggaatttcccaagttcgattttccaaagttgccggaattgccaaaaccagaagaaaccaaagtgccggcgtttacaatgccaaagtttcctggatctccttaagcccattacaccagaagaaggcccatctactttggagcccattctaatttactgaaattgtcgtatcaccccttgtattgtttgtctattttacagagatgtgctttttgtatcccatctcatccttgatccttgtaccttatttgtctcgtcattgttattacactcatacttgtactttgattccattgttgcctttgttgccttgttggcaggggcggacccacagcaagagagggttgggcctaacgtgaagtgccctactctaatgttcaactcaattcaattaaaacaaatataatattttagcccaaaataattaaacaaaaaaacccataaaaattcttatagttgatgttactttttcttggactcacaaatagtttatcagtggctctacaaaggaaagaccaagacattttgaatgctatgttactagtgaaatctaccaagcaacaattatgcaagctcagagatgatggatgggattctttggttaatgaagttttttctttttgtaagaagcatgacattgagttggttattatggatggagaatttgttaatccaaaaaagccaagaaaaagaagcaacatgaccaacttccatcattatcaagtggagtgtttttacactgtattagatatgcaaattcaagagtttaatgatcgtttcgatgaggtaaacactgaattacttagttgtgttgcttctttaagccgtattgattcgtttcatgagtttgatcagttaaaagttctgagattgtctgagttttatccacaagattttactcatgtcgatcagagatcactcgagcatcaacttggtctttacattgacaatattcgagaagatgaaaggtttgctaatttgaagagtctaggagatcttgcacgcgttatgatcgagacaaggaaatatcttacgcatccaaaggtttatcgacttttgaagctacttttgactttacttatagccactgctagtgttgaaagatgcttctctgcaatgaagatt

SEQ ID NO: 172449 - DNA, 1214 bp, Arabidopsis thaliana landsberg
atcatcttttctggcattggaaagcctcagctcaccggcgtcggaacttgtctcttctattgccttttttcgcattatctattccgctttaaccttgcttctgctcttttctcaatcttttcaaaactttcatcaattttctcgaacctcttttcaatccacaagtttcaacgagtgctcaattgatagtggcagaaaacataggagttttgtggtgagcctcttccagattcaggctctacccattcctgtggcgaagccttaactcccagatccacctcaaagcttgagatccgaattaattcgaaggctgaatttgtctaccatcaatccatttccgccataacaacttcgtgtaacatgtctactccgcctctttcaatctcgacgacaagtgtctctactccaatcctatggtcatctcagcgtaaccgccgcatcatcaccattggtggtagcgtggagtcctagaccagccaaaacagggtcaaaagctacaacatagattaaaattgacagaattatctcgtaaccggatatgggcaaatacgatatataaccatagtcacaccgtcgatcaagagccagcaagtttaggcattcacaaagcatagccagagatgaatattgcgaccagattgtagggtgacaatagaatggtttgatagctatcatggctgaagtcagatggaaagtttattacaaaccctaactgagccttctattccaagtcagtaccaattgcccaagagtggagaagaatggcattatgaccccgtctccatggagcggtggttaccatagattcttcaactctctatcttcttatccggtaattatcgagctcattcaagtaatcatcaaatatttgaataatttgcaaacttgtgaaagcttggaaacgagcgacattatgacactgtccttaggaggtcattaccgcgtcttctccaaccttctatatccgacagtctttcatgtggaacatctttctaaaaattcgtatgcgttatccgcgctagccgtcaatgaccacacgtttgtcaaggattttgtgaagctcgtttttatggttgaatccgcaaagacctctaacagatttttcagactttgtaaaaaaaattgaaagtgaacatgtctttagaaaaatcacatttttatttcttttatatcattttagtttcagtttgtatagttttcctcatttaaagttt

SEQ ID NO: 172450 - DNA, 564 bp, Arabidopsis thaliana landsberg
agacccacccctttaaggtgctttccacgccttcttctgcaaaagaccaggttctgctttatctcttctctgattcctcactgcaaattgttgtgtcgatctatggaaccaattgttcatggacgccgattggatcctaatcaaactttgttgcaatgtgggttcaaactttgtctgataacctggccattagaatcacctaggggttttacttttgtttttagcaaccatgttcgaggccaaatgaatttgtcgaggaataacgacattatggtcccggctccaaggagcggtgattaccgtaacttcctcgacctcttatctccatatcccttgtttactgaactcattcatgtgccatctatcatctttagtgatacctttaacactctcaaaactttgaagcccatgtccttttatcatctctctgggttaaaccgaagacaaactttgtatggatttcttaatctccatggccgagaactccatgtgggagagaacccacctgttttgttacgctttattacccgacatttacgaatccttgtttttgcttcctctaat

SEQ ID NO: 172451 - DNA, 791 bp, Arabidopsis thaliana landsberg
atgaaggtgcatagtctgttcttgatggctattttcttctacctaacatatacgcagctggtcaaggcgcaacctcgcgatgattgccaaactagatgtggtaacgtcacaattgattacccttatggtatttctacaggttgttactaccccggagatgatagcttcaatatcacctgtgaggaagataaaccaaatgtcttaagcaacattgaagtgctaaactttaatcatagcggccagctacgcggtctgattcctcgatccactgtttgctacgaccagcaaacaaataatgaattcgagtccctctggtttcggttggataatttatctttctcccccaacaacaagtttactttagtaggctgtaacgcttgggcacttctaagcacttttggaatacaaaactactcaactggatgtatgtcattatgcgatactcccccgccgccaaatagtaaatgtaatggtgttggttgctgcagaacagaggtctctatcccgttggatagccatagaattgaaactcaaccatctcgcttcgaaaacatgacctccgtggagcactttaatccttgcagctacgcttttttcgttgaagatggtatgtttaacttcagttctttagaagatcttaaggatctgcgaaatgtcacgaggttccctgtgttactagattggtctattggaaaccagacatgtgagcaagttgtaggtagaaacatatgaataaaaacagcacatgttttgattctactcgtggaaagggttataactggcaagtgtta

SEQ ID NO: 172452 - DNA, 1150 bp, Arabidopsis thaliana landsberg; identical to SEQ ID NO: 26207

SEQ ID NO: 172453 - DNA, 906 bp, Arabidopsis thaliana landsberg; identical to SEQ ID NO: 20945

SEQ ID NO: 172454 - DNA, 1003 bp, Arabidopsis thaliana landsberg
  unsure (1)..(1003): unsure at all n locations
tggtataaaggacttataaaagagtcggttcaggggcatccatctcaatttggaaggatctgtggattccggctcaattctcgagaccagcaatacgtaatcgtttaattattgacccatctttaaaagttcaacatttaatagatagccagctaataccttgaaggagctctttgatccggaagatgtctagctaataagtgcattgcacttgggtgcatcaacaaaagaggatactctaggttggcatttcaccaaatccggaaaatatacagttaaatctggttatcatacaccaaggttagaaaactgggaggatttggtactgaaataaatgttctaaaagcacatgcnnnnnnnnnnnnnnnnnnnnnnnnnnnnnnncattttttgttgcaaacattgtcaggttgtgtccttgtcacagagaatttacggagaagaattgtgatataggatgtgtcagatgtggcgctattacggaaacaataaaccgtacccttttccaatgtcatccggcgagacaaatatgggctctctcaaagattcctacggttccaagaatcccttcccacatattctatttttacgaatttggatcacttattctcaagaataccttcagaatttgattcatcttcatatccatggatacgaatgattctagagtagccggtggcgttccgcaaaactctctatacttaaagctagataaccagagaagccgagaaatcatatgctaaagcatgcatctatagcccttctatgaacctacatgttctttcttaaatgtctaggctcatctatgatagttctaatattaagtacctatggcgggcatacctattatctaatatcaagttctaagtgatcaatctaaaactagcaataagaataattaagatgaagaacgctaagaataatcctaaggggttttcgatctactaatccatctaaatctctattgagactccctaaacccaacaaggtgattactgagaca

SEQ ID NO: 172455 - DNA, 597 bp, Arabidopsis thaliana landsberg
  unsure (1)..(597): unsure at all n locations
cttgatatgtcatattgatgaaaatggtttataagatgaagaaaatccagaaatattattttttctggatgaagaagcgcaacatcatacatgtcaaagtaagaattatattggcaaggtgatgttnttagccgtgatggctcagccgagattttatgatgaaggaaatgagatattttctagagaaattggaatgtttctatttgttactgtggaacctgttaagagacgaaacaaacatagagatgctaaaactttagagatgaaagcattaacttccgtgaaaagagaagatataaaatcatgtttgattggaaaagtcattccaaaaatccatgaaagatggccaatagaagatcgggaaaagcctattttcatccaacaagacaatgcaaggacccatattcatttgtatgtctggaatctatagtttaaaagtatcccccactatagctcttaaaacaagacaactttaagttattgaggaaaacaaaaaaccaaatttcatttaaaagaattctgtaagaaaaagtccacagtcttagtttggatgattttgaattgatatcattaactgtaaatttttggtgtgtgaca

SEQ ID NO: 172456 - DNA, 553 bp, Arabidopsis thaliana landsberg; identical to SEQ ID NO: 21123

SEQ ID NO: 172457 - DNA, 1231 bp, Arabidopsis thaliana landsberg; identical to SEQ ID NO: 30671

SEQ ID NO: 172458 - DNA, 1025 bp, Arabidopsis thaliana landsberg
tcatgggaagaagaaaactacaaagtttatatggcaggagtagtcaatcaactacaagagcatttccctgaagcatcttctcttgtgtttaatttccgtgaagtgggtactcgaagtgtgatggctgatgtcttatctgaacatggcttgactataatggattatcctcggcactacgaaggctgctcattgttacctgtggaagtgatgcatcattttctccggtcaagtgaaagttggctctcgcttgggccaaataacttgttactaatgcattgtgaaagtggggcttggcctgttttagcttttatgctagctgccctccttatatacaggaagcagtatagtggtgagtctaagactttggacatgatctacaagcaggctccgcgtgagcttctgcgtttgttctcgcccttgaacccaattccttctcagcttcgttatctacagtacgtgtcaagaaggaatttggtctctgaatggcctccattggatagggctctcaccatggattgtgttattttgagatttattcctgatgttagtggacaaggaggctttcgccctatgtttcgaatatatggtcaggatcccttttttgttgatgataaaaagcctaagcttttgtacactactcccaagaaagggaaacacctgagggtctacaagcaggtatttctcagaatattcatagcgttcttataattatgacctctgactcagcctgtgttacattgcatctgaaggtcttagaaaaagaaatatatttgatcactgattagccctgttggttttttgtttcttgtgcttcttagctttctttttccttgtttgcaatatgatttaatggcttttcgatgttgtttactcaactctttgtgttttgcaggcagaatgtgaactagtcaagattgacattaattgtcatgtgcaaggtgatatcgtgatcgagtgccttagtttgaacgatgacatggaaagagaggtcatgatgtttcgagtggtttttaacactgctttta

SEQ ID NO: 172459 - DNA, 975 bp, Arabidopsis thaliana landsberg
tgttatttcactaggagcttgcaatttggtgaaggttcctcattttcctataccataaggatttgcgtcatgttgatctctctaacaataataagtttccatcgtggctgctggagaacaatacaaaactcgaggctttgcttctacagaataactcttttacaagcttgcagctaccgcaatctgatcataatctgctttacctggatgtttcagttaatggattggatcaactctttcctcagaacattgggtgaatacttccttgcttacattatatgaatctaacgactaatggttttcaaggaaatctaccatcttctctgggtaacatggaaatgattgaatttctggatatatctcacagaagtttccatgggaagctaccaagaagttttttgaagggttgtgattccttgatagtcttgaaactatcacataagaaactaagtggggaggtttttccagaagcatcaaactttttttcaatactagagctgtctatggataacaatctgtttacaggaaagattggaagaggtttgcagagcttgagatctttgattatgcttgacatttcgaacaacaatctctcaggtgttattccaagttggtttgaccaacttcaagacttacattcgctacagatttctaataacttgttggaaggtgaagtacctatatcgttattcaacatgtccagtcttcaactactggccctctctgcaaacagtttatcaggggacttacctcaagccatttctggatatggggcattaaaagtgttactcctgcgagacattaatttatcaggggttattccagatacactgctagggaagaatatcattgtgcttgatctgagaaataacagattgtctgggaatattccggagttcatcaacacccaatacatcagaattcttcttctccgagggaataatttaacaggcagtattcctcgccggttgtgtg

SEQ ID NO: 172460 - DNA, 319 bp, Arabidopsis thaliana landsberg
aaaggatcaacgatgaactgggtttatgtggtggaccatttcaggcaaaagatcagcctgcaggaagcggccggagtagccaagatgagcccgaatgctttttgtaaatatttcaaaaagatcacgcggaaactttcatgaaacggtcatcgggtaccgcctgaattatgccgcccagcaactggtacaaacagacgaacccgtatcctccatctgctttgacagcggctttggagacgtatcgcatttcaataaaaccttcaaggccaaaatgcagctcagcccgttgcattaccggaagaaattcgtgcacgggata

SEQ ID NO: 172461 - DNA, 293 bp, Arabidopsis thaliana landsberg
ttattttgcatacttagggatctaggatcatcttgcatacgcattgcatgttttggtgtgttttcaggtgcaaaaggagctaaaaaggacattactcgatccattcactcgatccaagcagctatagaagaggcattatttcactcgacctctttacttgatccaggcagctacagaggaggctgtagtttactcgaccctcttactcgatcaaggcagcctcaaatgaagcagcagattgatctactcgcccctcctactcgatcctctactcgacccatttactcgaccaa

SEQ ID NO: 172462 - DNA, 1264 bp, Arabidopsis thaliana landsberg
gttgatggaagggaaatttgtgaagtactcactagtcatacagtaagttgtcatttatccttcagtttttttactcatatacaaatttaatgcgtttgattactaaccacctttacttatatatttgtgtattttattagggaagtgaaagtgttataggcataaatttggaagtttatcggagcatggacgaactaaatataagtgagagagtttttgaaggaatgcctaatcttcaatttttgagattcaatgataattattatggaagattgcacttgtcacaaggtctaaactatctacctccaaaacttagaattctacattgggattattatccgttgacaagcttgccttctaagtttaatccgaagtttcttgtcaagataaaaatatatttcagcaagctcgagagactgtgggaaggaattcaagtaagcatttaccattcttttatgaaatttattttatttgaatttctatttttgtataaaattgttagtttcgaaaataaagatgaaaaagcatggttttagcctttaaatggcatttaaattgttctcttgtgttgtctttttttcttttggtcattacagccgcttatcaatctcaaggtgatggatttaagttattcaagtcatttgaaagagcttcctaatctctcaacagccattaatctcttgggaatgtctctttctcattgctcaagtttgatagagcttccttcctctattgggaatgctactaatctcgagagcttagatctacaaggttgctcaagcctattgaagcttccctcatctattggaaatctcattaatctccagtttttttgttgccacggatgttcaagtttggtggagcttccctcatctattggaaatctcatttatctcaagaaattggatctcagtaaatgctcaagcttaggggagcttccttcatctattgggaatctcattaatctcaaggaattggatctaagtggatgctcaagcttaggggagcttccttcatctattggaaatctcattaatctcaagaaattggatctcagtaaatgctcaagcttaggggagcttccttcatctattgggaatctcattaatctcaaggaattggatcttagtgaatgctcaagcctagtagagcttccttcatctattgggaatctcattaatctcaagaaattagatctcaacaaatgcaggaagctggtatcagtcccgcagcttccacattccttatcaattttacatgcaga

SEQ ID NO: 172463 - DNA, 1627 bp, Arabidopsis thaliana landsberg
  unsure (1)..(1627): unsure at all n locations
atgtctgaagaccaagcaagggtgtaccctccaagattttaccaagagggggattctaatctggagggtaaaggcattaatcataatataaagctgggagagttccctacaattagagaatcaataggagaagaaatatgggcagaactgaaagagacagagcttggattaattgctaagcttgttgatagtcattttctatggtctggtaagaccgtacattatctactatgcagacagctgagaatactgaagaaggagctttggtgtatcgtggctggtaaacccatccggtttggattgaacgaatttcatcatatcactggtttaaatatagatgaactgcctacagaaaannnnnnnnnnnnnnnnnnnnnnnnagcgttcttcagtgaattgcgtgtgccaaccggtgaaggtcctaatctagatgaacttaggcagggcttagtaacgtgcagagcttggcctactgaaaagcgtatatggtttgggttattgactcttctatccattggactttttggcttgcatactaactctaggataccatttgagagtgccaaaagagttttcgacgacgaagccatgaagacttatccatggggtcgggcagcatatgaagcccttgtcgtttctataaagttgctgaggcctattggcaagacgtacaccgtcagtggtctggttttcgtgttgcaggcttgggcgtatgagtcaatcatcaccatcgccgagcgttttgggaacgctgttaacgcggatgagattccgttgcttagatggggtggcagccgtacccgttcaactatagaataggtcattgctgaagatatcaaagcgaatggtggtgaggtacggtttcggctctgttatgttctgttttttatcaaatatgtatgttacggctgagttaatgttttatttttctctgtgaaggctgagttatgttcttttttttttggcaaatatgttatgttacgactgaattatgttctataatggctgagttatattaagtgacgactgagttatattaagtgatggttgagttaaacatactgatgggttttattatctctcctgttgtagctgcgtgttcgtacaatggttgaaaaggctgagttaagcgagatggttcatttttggccagaccaattagaagacccagcacttgataacttgatccaagacttacacgaggttaagcttgttaaaggttattgggatgtgaagacgagtgagaagaagaagaaactcttaaaagataaagaagcggaggtgtctgaatctcccgctaagaaacagaaggtctctcacagtgagcatgttgattctcttgagaaagatgcagaaaagaagaagaagaagaagaagaagaagaagaagaagaaggaagtagctgtcgaatctgatgaggacgaggatgttcgttctcgtgagcaggatggtcagggagaccagcagtcgctcgtggatgtggtgtccaacttgatctctcccttaaactctcgatttgacaccgttgatactagcataaaagaaatgtcctcccgtctggatgtgattggatgtcaaatcgaatcgagtgttgaagcaaagtttgaaggaagggttggatcgattg

SEQ ID NO: 172464 - DNA, 3815 bp, Arabidopsis thaliana landsberg
tactggcaaaagcaaaaccagcaagtttaagtcaatcagtatgagacaatggtttgcttttcggattcaggaaagggagcatgaaagccatactcttcttctgtgtaggagattgtttcagcagtttttggttgatggatattcagcaactgaagctaataggttgtcttatattaaattcaatcaatcaaaactacgttgtgagaaattcagtaacatcaaagaagcggttgctgctggaaacaagaaaatgaatgaacagggaagacctttgcttattccttcctcattcaccgatggccctcgatatatggtacaacaatattacgatgtaatggccatatgtaagcactatggtttcccagatcttttcatcacttttacgtgtaatcctaaatagccagagatcactaggtattatgaagagcgtggtttgaatcctgatgatcgaccaaatattatatgttgtatcttcaagattaagctagattctctaatgtttgatttaactgaaaaacatcttctaggcaaaactgttgctggtaagttaattattatagtatttattttagtagtatatatatatatatatatatatgtttaaaatatctttgaatgtaaagatgttaatgtttttgattcagctatctacaacgttgagtttcaaaaaagaggtcttccacatgctcatatacttttattcatggcatctaggagtaagctaccgtcttctgatgatattaacaggatcatttgtgctgaaatacccaacaaagagaaaaatctggagctttatgaggtcatcaaagagtcaatgatccacggaccttgtggtgcagcgtttacgaattccccatatatggtagatggaaagtgttcaaaattgtatcctaagccttatgcaaaattgactaaagtaggcaaagatggttttccgatttataggaggacgcagacgtcagactttgttgaaaagtgtggttttaagtgtgacaataggtatgttgtgccttccaatgcgaagctatcgttgcgatatcgagctcatatcaatatggaatggtgtaatcaaacaggttctatcaaatacttactcacgtacattaataaaagacctgatcgtgttgttgtggttgttgagcgtataaacaagagtcaaacttcaaatacagagaacattcctaaataagataagccaaagaagaatgaaattaaggattactttgattccaggtttgtttatatttatataagcaagaaacaatttgttatataatttataacaaggatgttttctattaaaatttctttgtttttgtaatcctttgcagatttgtatctgtttcaaaagcaatatagaggatttttaaatttccaattcaatttagaaatacactggtgcataagctttctttccacaaagaaggaaatcacccgtgttgtttcgatgaggataaagataaataagatgttttggaaaaaaaaaagcaaatgaagattatcagtttactgcttggttgtatttgaatagccacgatgatttagcaaagaccctcacatattcagagattccagcacattatacttgagatggtaagaataagcaatgaaatccgcgattaagaggattttctttaggtagaataaattatgtatcacgaagaatggaagctgaataagtggacctcttcagatagaggcggaggagcttgatgttgtggttgagtcgttgagttctggaagagttgcagaggcggtggatagttgcggacgttgggtgcagacgttgaaggtccatgttgttgagctgactccgtcgcaggaacttgaaccgccggcgccggagtgaagttgtattggggaggaagatttgcaggtcttgatccgccggcgccggctctctaagtgacgttcggcgtcgtcttacgcttccgggagccacctcgaccggcgataggcatgatagtgagccaaatgaagagattgaagagaagaagaagaagaagacgaagcagatcggagaggttgaaggtgagagatcgaagaagatcgatcgatcttataagaagaagaagaagatcgatctacaaggagaaaggatcgatcttagaaagagttctggggattagggttttcgagatgaagaagaagaagaagaggaggttggatcgaataggtttaaggtgagagatcgaagaagatcgatcgatcttagcagaagaagaagaagatcgatctagaaggagaaaggatcgatcttagaaagagaattggggattagggttttcgagacgaagaagaagaacaagaagaagaaatggctaagtgtttggctcgaagagaaatgactcgatttagggttttcaacacaatagaagtcgcataatagtcgcataattgtcgcatattcattaggtttgggcctcgaaattttgaagcccaactaatcaaaaaagtaccgttgaatagtcgtaattttgtcgccaattatactgggtttgggtttcaaaatttcaaagccaaacaaatcaaaacttgtcggaacatagtcgcatctttgtcataaaatattactgggtttgggcttcaacatttagaagcccaaaataccaaacatctgtcggccaatactcgcaatattatcgccgataataatgggtttgggccccgaaattaagaagcccacaaaacaaacttgtctcggtatttagtcgcaatatagacgcctatactaatgggtttgggcctcaaaattttaaagcccatcatatcaaacatgtgtaggtatttagtcgcatatatggacgcctataataatgggtttgggcctcgaaatttaaaagccccaacatatcaaacatgtgtcgcgtaatagtcgtcgttttgtcaccgtttttaatgggtttggactccaacatttagaagcccaataaatcttatattggtcgcccattagtcgcataatagtcacctgttaaattgataaaattataaatgtgaaagaaatatacatatatcataaaaagttcaatgatattatgaaacaaaattcattctaatatttattcaaataattatacatatattcacacatttatacatcttcatcttctacttcatcttcgtccgaagacgataaattacatcggacttcgtcttcttgttcagcatccccgacatcgtaatcaaggattattgggtttaagttggatactggattttcaagtacaagatcttcaattgtagtgagcaaaacatcatcatcattttatgtttgcaaaagagttggatcattgttttcatattctccagaaatgttcccctcggattaacttttaaaacattgagccaaatgttctttggtttcttcgtatatggatacggaatataacaaacttgatctgcgtgggatgctgtatactcaaattatacattaataaatatacaaaattatttaataatttataaagaaccttatgtattcttaattacgtacctagaataaatggctcgtatttattgtatttcttaaatgatagaacgtctacaacaccaccatggcttcgccgagtgcctctaccaatcacagggtcataccacttacacttaaaaagtgtgattttcaaattgacgatgccatcatactcgagttctataatatcagttaaggtaccgtagaaatccgcttcatcagatgaatccgcgtaattttctcctttaacacatacccaatagttacatgtttttagtccagcgccatgattttttggatgaaacaaatatcctcgtgtgaaatgcattgggcaagtttaaac

SEQ ID NO: 172465 - DNA, 269 bp, Arabidopsis thaliana landsberg
tctctctttttaatcgtcatattaaataccataagatgtcgaattttttaacataatatctacgttgacgatgttgtgactatccaccgggagacgatgaggggggagacgatgaggaagacccctcaccgtctcccacatacaaaatcgccgccgcctatcacattgtttcaaagaaactcctcctcgccgacttgctctcaatggaagtgaactcccatctcccaaccctagtcccaggagcctccatcatcgttaccaacaattca

SEQ ID NO: 172466 - DNA, 585 bp, Arabidopsis thaliana landsberg
gaccaggagtggaaacggcctgtttttggcgcgacaggccatccaatccggcgcggccgattgcgtgctggcactgggcttcgagcagatgaagccgggcgctttgggctccgtgtataccgaccggccgagcgcgttcgaggacttcgacgccgccgccgacaagttgatcgatgcgcccggcattcctctggcgttgcgttactttggtggtgccggcctcagccacatgaagaagtacggcacgccgctgagtgcattcgcgaagatccgtgccaaggccagccgccatgcgaagaacaatccgctggcattgttccgcaaggaagtcaccgccgacgatgtcatgaacgatcaggtgatctggcctggcgtgatgacgcggctgatggcatgtccgcccacttgcggggctgccgccgcgatcctggtgtccgagaagttcgcgaagcaacacggcctgcgtgccgatgtccgcattcgcgcgcagtcgatgacgaccgacacgccctcgaccttcggtgccggcgacatgatgcaggttgtcgggtccgacatggccaaggcggcgggggaaaaaagggg

SEQ ID NO: 172467 - DNA, 426 bp, Arabidopsis thaliana landsberg
atgggagagaatctgcatttgtctccacgacaccgatcttctctaaagaagccattgttgattgttttgttagtctgtatcacaagtgtgcttttggtgatcacttacatgtatccacaacacaacaacagtaagagctctgcttgtgcgggtttgtctagtagaggctgtcaagctgcgctctctggatggcttcctgttcatgtcaggaaattcactgatgaagaagtagcagctcgagttgtgatcaaagatatactgagactacctcctgctctaaccgctaaatcgaaaatcgcttttatgtttttgactcctggtactttgccatttgagaagctttgggataagtttttccaggttggaacaagttccgagacatttcttgatttatttgaatgctgtgtatggtatttgacggttttg

SEQ ID NO: 172468 - DNA, 129 bp, Arabidopsis thaliana landsberg
atggctacaaatgttgaatacacttgctttgttcgtggtcttgatcaggacaccgataaaaaagaacttacggatatattttcaaagtttggcaacgtgatcgattctaaagtccgttatctatacatg

SEQ ID NO: 172469 - DNA, 541 bp, Arabidopsis thaliana landsberg
  unsure (1)..(541): unsure at all n locations
gaaaactacattcgagttgttctctactccattttgtctctcatcttcttgataatctctttcaagttcttgaaaccaaagaaacacaattttccaccgtctcccccgggatggttgccagtaataggccatctccgccttctgaagccacccatccaccgcaccctccgctccttctccgagaccctcgaccacaacgatggtggcggcgtgatgtccctccgacttggatcccgtctagtctacgtggtgtcgtcacataaggttgcggcagaggagtgctttggcaagaannnnnnnnnnnnnnnnnnnnnnnnnnnnnnnnnnnnnnnnnnnnnnnngttggttataacaatacaaacaatgatcgctgcaccttacgggtgatcacttggcgtaacctccgtcgcctctgcactatcgagatcttttcaacacaccgccttaactgctttctttatgtccgtaccgacgaagtacgtcgccttataagccgcctctctcgtctcgcaggtatatatgtattaatgtatatgctaca

SEQ ID NO: 172470 - DNA, 844 bp, Arabidopsis thaliana landsberg
  unsure (1)..(844): unsure at all n locations
aaggatgaagctttctggaatgaaaccaaatttcataacttttttgaatgtgctcaatgcttgtagtcacgcgggtctagttgatgaagggagatactactttgatcagatgaaagaatcgaggattgagccgacggataagcattacgcttccttggtggatatgttaggacgagctggtagattacaagaagcactcgaagttatcactaatatgccgattgatcccacggaatctgtatggggagctttattaacgagttgtacagtccacaagaacacagagcttgcagcatttgcagctgacaaggtcttcgaattaggaccagtgagttccggtatgcacatttcgttatccaatgcttatgcagccgatggtagattcgaagacgcagctaaagctagaaaattgcttcgagaccgaggggaaaagaaggaaacagggctaagttgggttgaagaaaggaacaaggttcatacatttgcagctggagaaagacgtcatgagaaaagcaaggagatatatgagaagctggctgagttaggggaagagatggagaaagcgggttacattgcagacacaagctatgttctgagagaagtggatggtgacgagaagaatcaaaccataaggtatcatagtgagagattagctattgcttttggactgatcacgtttccagctgatagaccgatccgagtaatgaagaatctgcgtgtttgcggtgattnnnnnnnnnnnnnnnnnnnnnnnnnnntatgtacgagacgagtgatcattgtgagagataataatcggtttcatcggtttgaagatggcaagtgttcttgtaatgactattgg

SEQ ID NO: 172471 - DNA, 126 bp, Arabidopsis thaliana landsberg
gatccggagataaagagaaagagacgagtggcgaaatacaaactctattcagccgaagggaagatgaagataactttgagaaagagttacaaatggattaagatccaatgctcgaagatcattcat

SEQ ID NO: 172472 - DNA, 465 bp, Arabidopsis thaliana landsberg
ttgtatgatgcaataatgcagagaactccatagaattgcagtcttgccttctgtgcacccacaacgagttgtaaagatgtgcacaataacatgttagagtcattcaacaatgcaattgatcctacagaatatttgccgatggttgagatgctagagactatgaggagaagaacaatgcagtgtattgagatgcggatgaagaaagcggagacttacaaaggaagattcacaaagagagctgcagagttcatagctttggagcaggaaaaattgaagttcaccaagtatgtttcaggattagagaatggtagatgtgaggttcttgattgtggcaaatatgtcagcttgcacatgggaatgaagacttgtgcttgtcggaaatgggagatgactgggctaccttgtcgtcatgcattacgaatcattaataacaagagactaaaccatgaagattacacatctgaa

SEQ ID NO: 172473 - DNA, 242 bp, Arabidopsis thaliana landsberg
ttattttgcatacttaggcatctaggatcatcttgcatacgcatcgcttgttttggtgtgttttcaggtgtagaaggagctaaaaaggactctactcgatccattcactcgatcaaggcagctacagaagaggcatcaattcagtcgacccctttactcgatcaaggcagccttagatgaagcagcagattgatctactcgcccctcctactcgatcctctactcaacccatttactcgacc

SEQ ID NO: 172474 - DNA, 798 bp, Arabidopsis thaliana landsberg
catgggtttgaaaagttctgatatgtcttacacttttttctcagacttataggtctattctgtctgccttttgggcaaccgatgaaaatgtacgcagagctctaggcgtgaaaaaggtacctacgtgaattgaattgacttggttctatacaaaaatcaccaattcaaaatgtgatgcaggaagtaggaaaatggaaccgatgcaacagccaaaacataccatatacatttgagattttcaatgcagttccttatcacgtaaacaatagtcttaaaggcttccgctctctcatctacaggcaagattaatatttgttgatgtctaagtacaagaactagtttttttgtatctttataatttgacaaaactcatgtacttgaaacagtggtgatcatgattctatggtaccattttcttcaactcaagcatggatcagagctctcaactattccattgttaataactggagaccttggatgatgagtagcaatcaagtcgcagggtaacaaaagatacattgtttctaactccattctcctcaatttcattatctttaaagacgctcttttttatcggtgtttgtagctatacaaggacttacgcaaacaagatgacatttgcaaccatcaaggcaaacatttctttcttgtcttgtccaaagcttctgcaggaaaaacagaaagtgatagagtttttttttttacttgaatgttttgcagggaggaggacacacagcggagtatactccagatcaatgctctcttatgttcagaagatggattgatggagaacctctc

SEQ ID NO: 172475 - DNA, 561 bp, Arabidopsis thaliana landsberg; identical to SEQ ID NO: 1350

SEQ ID NO: 172476 - DNA, 609 bp, Arabidopsis thaliana landsberg
gcacatcgcgcagaccctgcgcgaggacctggcgatcctggacaagctggccggtgcggccgagcggatgaccgagatgggtcgtcgctacggcttcgtcgactgggtcagcgagctgcgccacagcctcgccaacgagatcgacttcgagctggaagcggacaacctgcgacgcttcgcggccaatctggaatgttatccgcggctgtacgtgccgcagccggtggagggcttcaccaccacccgcgtgctgaccatggatcgcgtgcgcggggtcaaggtgacccacatacccgcggtgcggcggatcgagcagccgatgggtgccgaagcggccgagctgatgcgcgcctacctcgatcaggtgttcgtgcacggtctggtgcatgccgacccgcacccaggcaacgtgctgttgatggacgaccggcgattggcgctgttcgatctgggcatggtcgcgcggctgaccccgcgcacccgccgcaacctgctcaagctgctgctgggcacgatcggcggcaacgccgaccaggtcggcaagtactgaaaggcgatgggcacccagctggaggatttccagcatggcacctatcggcgacagctcga

SEQ ID NO: 172477 - DNA, 317 bp, Arabidopsis thaliana landsberg
gatctttcggttttggatttgaattccctgaaaaggagatcacactcaaggagcttggttttattaatttcacagcacagtttatggcgcggtacgggatgaattttgtgcagggtttgaggaagagagtggttgggaaccctcagtttaagtttttggagtcaactaataatagcaggttcagtttttacaatgggcttgttattgcgtattcaagggttttaatgccttccaaaatgctgagcaagagtgatgattgtacggcgaccgttgttgatggttttctcagttgtcttcaattggaaaagcgataggag

SEQ ID NO: 172478 - DNA, 376 bp, Arabidopsis thaliana landsberg
ggaagacttgctgggtacatatggttacctggatccattatactttgcaactagaattgagacttaatttacggatgtgtacagctttgcagactttatgatggtaggcatcaccggattatcggattactgaaccgggtctgacgggtatcccgtaggcattcttggatatatgaaaggcttagctgagaatgggaagctcaatgaaatagtatatcctatgataatgaaagagatgacaagtgctcaaagattgcaggtggaagcatgcgttgtacttgcgttgagatgctgtgttgtaagagacgaagacagaccgaagatgatccaagtagctaaggaactcaagcggattgaaacatcactgaaaggtgtt

SEQ ID NO: 172479 - DNA, 1905 bp, Arabidopsis thaliana landsberg
ataagtgtcaaattacgaaaatcctttcagagacttgaatttggggatcgatgacaaactcatggctctttctcgagatttttgttctcaggctgcgtttgttaaccgcttcactatggttgtgacaacaatgaaccctcgcaacaagaatattcgtgctcttattggtcagatgccaagagtctaggtttccctgattcgtgtgttggcagaatcctggacagaggcaggatccaacttaaatttcagactaaacaagcgatgaacttggttctccgtcgtggaccatagtcgttcaatgacgggatgctctcaattcatcgttggtacccgaatatcagtgaagccgagatgaagatcatcccgttttgggtacaactaatgggtatctctcttctcttccttaccaatgcaatggcaagatgcgttgaaaataggttaggctatgttgttgttgtagactttgatgagaatgtgaatcacgctggatttctaagagtgcggcttaattggaatctagatgatccgctttgcttccagaggaatttccaatttgctgctgatgaaaacaatgtcatcaagtatcattttgaacgtctgagaaactattgttccaaatgtggttccttgaaacatgatgtctaaggaatgcaccctccttacctttgatgatgcagacccaatagacttgagtgacgaggatgataacgatgatcaaggagacaacaaagataaggacatgagtgacacatacacccttcagacggttgatccagcaaccctcattccaggactcaaagctttgctaccgtttgcaaaccaaggtcataccatgagagacttggagccttcatatgtcccaagtgtctttgaagacacaaatcttatagttgagagggcgcgttacctacatgccaaactcgcgagagttaggacccggacaccggattacaatgatctactcttggagtcctctgacaatgcacaaaatcagtttgttttcatggagagaaagagagttcagtttgaagacatgtaccaaaaggttgaagcagtagatgagatggcggttttgagcctactttacaaaaaggagaggaaaacagagtcgacaggctcctgttcgatacgtaatggaatagacggaggcatgggggcccggtacccctaagggatcgaataggaggatagcctcatggaattgtcagggcattggtgtgccgctgacgcagttacggctttcccgtttaactcgtatctataagtatgttattcttcttctagttgaaactcttaatcagtttgatgtattatgtaaattagcgtgtaatttaggatttcctaatataataactcagcccccattggaaggagtggtggcttagctcttatgtggaagaacaatgtttctttgtccttgctttctcataatgaaagactcattgactcctatgtaacttataataataagagcttctacttgtcttgtgtgtatggtcaccctgttccatccgaacgtcttcacctttgggaaaccattaaacaaatttcagataatagaagtgaagcatggatgttaattggggatttcaatgagattctatccaatgatgaaaagattggtggccctttaagagaagaatggactttccggaatttcaaagctatggttttatattgtgatctcgaagatatgcgttcacgaggggatagattcacttgggttggggaaagacacacacatacaataaaatgttgtcttgacagagtcttcataaattcagtttggtctgcaaattttccaaacgctgaaacagagtttttggatttttctggttcagaccataaaccggctttggtccacactaatgattctttcatccaacgtcgacaccagattcggtt

SEQ ID NO: 172480 - DNA, 306 bp, Arabidopsis thaliana landsberg
agttaaagctataacttgcttctaagcaagggagttccagaatcacatatcatctttctcaatcttatagcagtaactaaagaccagccaaacaaacctcttgtccatgtttctctctgtaatcatcattattattactaacccaagaaaaaaccgcaggcacctcaaggcatccacgcgctttgcaagaaattcccgatgctaaagattgtgacatcggaaatcgattcatctctcaatgaggactcgcgtgtgattccaggcttgggagaatttgcagaccgttactttgggacaaacaacatt

SEQ ID NO: 172481 - DNA, 340 bp, Arabidopsis thaliana landsberg; identical to SEQ ID NO: 57257
  unsure (1)..(340): unsure at all n locations

SEQ ID NO: 172482 - DNA, 505 bp, Arabidopsis thaliana landsberg
atggtcaacaatcagatccccgataacacagttgacgcaaagggaaacccgatccctccaaaccagacaaacgttcctgaagccaccgctcttgcggtcctagcagaattaagaagtatgatggctcaacttcagaagaaggtaaacgatcaagaacaggcgaatcaatctttggcgcaacaactcgaagcagctaccttccaaggacaggtcaggactactcgtttcggcgcgaggcatcttcacgatcgacgaacggcagcagatctcaacccaacacgactcgtgttccacacgcctggcaacacgacgaggcccatccgccgaaccgcgccggaaattggaagagaccgagcagagtcgacaatcttgggaaatcgggacacgacgtaccgaacagaaggaaacgatccgcagctccctcttccccgagcagaaattgcttaggccgatcagatcagggtcttggacgatgaagattcagaagagaacgttcgatgggctg

SEQ ID NO: 172483 - DNA, 635 bp, Arabidopsis thaliana landsberg
  unsure (1)..(635): unsure at all n locations
ccatcatgatcaagtcaatgagtgcaattgtagtctaagcatagctgatgaggaatgaagatctgtgaaccttcacgtgaattccattatcgagaagtacctccaagttggagtgtttcaaaaactaccttgaattcaagcaaaagcctttgagcttacagaacttgatcgctaggctgcagaatgagtcttccgagagagacaaatcttgtttcgtagctcatgatgcaaatgtggctgagtacaagataaagggtaaagccaaagttgtttataacaacaagggtgaaaaacctaacaagggtggtccaaagataatgtcatctaaaccctccactagctttaagaagcaaggtgatattaaaaaaaattctgggaagtgcacctactgtggcaagcaaggtcataaggcgagnnnnnnnnnnnnnnnnnnnnnnngaaaaggtcagctaaccaagcgaatttgactgaagatgacctctatgcggtggtcactgaagcaaatgtggtgacgactgatgaaaacccaatggagtggtggtacgacagtggagcaaccacccacatctgcatcaatatagacatgttcaacacctatcagaagtgcaagctgacgacaaactgatgatgggcaa

SEQ ID NO: 172484 - DNA, 1742 bp, Arabidopsis thaliana landsberg
  unsure (1)..(1742): unsure at all n locations
aggtttgccgcccattcgactctatttatattagattaaaccctcggcccctcaccctccgccgcttgcaagaagaatctaaggtagctctcgctctctcctctgcgaattattttgtactctcggttcttttatcgatttgtccgataatgggtaaggttgttcttgtctctccgtcctcttcttcttccgagagcgaaacaatgttagtttgccacaactctcggttcgccgggaatcctagagacgaggctcaatctagtcgatcaaatcagatcaaaattccaacgttgcgtgatgagccagatcgggaagattccgatggaaacccagctgctcatgaagaaccagtggactacctagatcaattcgaccccctcatcgatctggaagatacttataatacacatccgggatatagagaagctgaagttgaggtgaggttgatccctgtagataccgtcgagtttgacctcgatccgatcgttgattggaacaccgagattgctgcgaccaggaccctttcgacatcctagtctgttgcagaattatttgccctttgcggttatggagatcgcccgctcacttacatgattcctggagaagacgagcgtccttggaatcctcctcgaggatatgtctgtttgtacgaggcctacttcagacaatgccatctctggtttcctatcccattcctgatccttgcttttctaactcgtcgtcgcatggcgatctgcaattttgttgctgctttaactttcggcgctgaagaaggttacctggtgaacgtccattgtttcgaagaaatgacgacgctgaaagccatcaggtcgcctgcattttgggtaatgaataaccgccctaaatataattttcttcccggtcctaaagtcagcaatttcaagaactgggaagaatattacttctacgttagggttgacttcgagtcttatgagcgttcgttctcgggaaggaagaggatgtggacagaggctcctggtaaatttcttttaaatagataaggtaaaaagttgttttgattttgattaaattctcacaaccttttctcctattgcagattggtacaaacctagctcggagtttcccgttgaatttgaaggagtcctagaagcaatcttctgaggtcgacatcgtacgtggtcgcgagttaatagaataatggggaaggtcaggaagtccttcgtcagctatgctacaaggcttctgaatatgccacctcccccagctcctgttgaagaagaaactcgtcctttggatgaagaggcggctccgtcgattcctcccgctagttctggcccttcaagtattgatcaggtctctcgtgaggccccgatcaacccagattctcaagatgagtcacgtcttgatggggtcggagatgttcaaattcaagagatcgctgattgcgatcagaatcagtctttatctactcaggtcgtcgaacctgagattcaagtttccgctagcgatttgccggctgctgctcaagtcgccacaacagaaggcgagaagactgatgcannnnnnnnnnnnnnnnnnncaaacagggacggaactgctactgagctcgggacctccaggaggtctcgcgaagagaaaggaaagggagtagctacccaatccaagaagaggctggtctctgaagccggcttaaacgatgaagccatcgctccaaaggattctgcttatctagaggtgaagctcttaacgcgatagtatca

SEQ ID NO: 172485 - DNA, 456 bp, Arabidopsis thaliana landsberg
aaaaggagtaggaaaaaagagatagatctagtaatcgtggatcctcgagatattagatttgaaaccatcaatttctatagatacattggctctctcactattcctccatgcaccgaaggcgttatttgcaccgtccagaaaagggtataacattttttttgtttctgttatagatcaataatcttcgttacaccttacataaacattttttggatttttgtttttgtattttggtgtatgtaggtgaacacaatatcaaaggaacaaattacagctctgagggaagccgttgtcgatgtaagtatttgtaactgcaaatgtaatttcattagctatgatattgatttagtattattactaattaattaactaattgaataggggtttgagataaattcaagaccggttcaagacccacatggaagatcggtttggttccacgattaatgtttgatt

SEQ ID NO: 172486 - DNA, 512 bp, Arabidopsis thaliana landsberg
cgattgggattcactaaaacagtatacgacaccggaatggttccggcatgcaaagtttggtatcttcattcattggggcgtatatgctgtacctgcctacggaggcaactcctatggtgaatggtatccctataatatgtacagaaaagggaccttggtttataagcatcacatagccacttatggcacacaggataaattcggctataaggactttattccgatgttcaaggcggaaaaatttgacccggataattggacacgcctgttcaaagaagcaggggctaaatatgtaattccggttgcggaacatcatgatggatttgccatgtataaaacgtccttgtccaggtggaatgcctttgacatgggacctcatcgtgatgtaataggagagctggcaaaatccatccgaaaagaaggaatgctcttcggcctgtcgtcacacagggcagagcaaaggttttataattataatggcagattgatcaattcagatgtgaatggttctg

SEQ ID NO: 172487 - DNA, 1045 bp, Arabidopsis thaliana landsberg
ggcttgtccaactcttgttctgtgtgctatgactgggaagctcgatggatacaagactctgaaatggatagccgagaccaaccttggtctagtgactcagtgtttcttgtccatatctgccattaaaggagataccgtttctgatcagtacttggcaaatctcgccctcaagataaacgcaaaggttggtggaacgaacgtggagttggtggataatattttctctttcttcaaaaaagaagataaggtcatgttcattggtgctgatgtcaatcatcccgctgctcacgacaatatgagtccatccattgttgctgttgtaggcactcttaactggcctgaagctaaccgctacgcagctagagtcaaagctcagagtcaccgtaaagaagagatacaagggtttggtgaaacttgctgggagcttatcgaagctcattctcaggcccccgagaaacgacctaacaagattgtgatattccgtgatggtgtcagcgatggtcagttcgatatggttctcaatgtggagttacagaatgttaaggacgtttttgtcaaggttggctataatccgcagataactgtaattgtggcacagaaacgtcatcaaacccgtttcttccccgccacaactagcaaagatggaagggctaagggcaatgtgccttcaggtacggtcgttgataccacgatcattcacccgtttgagtatgatttctacctctgtagtcaacatggagcgataggtacaagcaaaccaactcattattatgttctttcggacgaaatcgggttcaactcgaatcagattcagaaactcatctttgacttgtgcttcacgtttactcgctgcaccaaaccggtcgctctggttcctccggtttcttatgctgacaaggctgcttctagaggaagggtgtactacgaggcaagcttaatgaagaagaattctaagcagtcgcgtggagcgtcttcgtcttctgcctcggttgcctcttcatcctcttctgtcacaatggaggacaaagagatcttcaaggttcac

SEQ ID NO: 172488 - DNA, 187 bp, Arabidopsis thaliana landsberg
ttggaacggattcttggagaagatgtcgaggcaaagagtgtatgatgagttttggctagaattggcgatcatcaacacaccaacctggtatgatagccctgagaagtacagacgtgttatcaaggcttatgttgattcaaattctgatgaagcttatgtggaatcaaattctgatgagggatcttac

SEQ ID NO: 172489 - DNA, 570 bp, Arabidopsis thaliana landsberg
ttggctgttccatcccacgtcacggtaatctttagaaatgggttgtggaggtaaatggaacatctctacttattggtgccatcaattctcagttttacttggagaaggtaaagcaattcacttttggttttctttttagggtgtgttgctgctgaatgttgttcttacaggtagtgtctcttatcgtgtgacgaccttatatgtataaaactgtcaaaatcctaaaattcttctcacaaatatgtcggttaacttgctttctaattcagtaaggtgtaaacagcctaattcacatgcaaagaaaggatgggaacaattcactgatactgttattcaaagtatctcacagcatcagtgaattgttcccattagcaaatattaataactcatataactcatatttttggtatatcattctagtaattaaacctaacatatgggtcttcctagtaaattttcttttttttcctatattaaaaccttgatactatataaaagttgaagctatttgcttttaaaggcgtccacgtaggatttaaaacaacgaatctggagttggtacatcaataa

SEQ ID NO: 172490 - DNA, 293 bp, Arabidopsis thaliana landsberg
ttgttttgcatacttaggcatctaagatcatcttgcattcgcattgcatgttttggtgtgttttcaggtgcaaaaggagcttaaaaagactctactcgatccattcactcaatccaggcagctactgaagaggcatcattctactcgacctctttactcgatccaggatgccacagaggaggctgcagtttactcgaccctcctactcgatcaaggcaacctcagacgaagcagtagattcaactactcgcccctcctactcgatccactactcgatccatttactcgaccaa

SEQ ID NO: 172491 - DNA, 535 bp, Arabidopsis thaliana landsberg
agatgctatgataggtgtgcacataccaggatatgtccaaatgatccaacattctctaatgtacataacaagcttagaccttatgaccctgtctttgatgatgcataggagtcttagatggcacacattccagctcacgtatgtcatgagtcgaggcttgtacacataaatagataagggtggcctagctacaatgtattaggtatactggacatggatatgcagttcacttttgtaggtgctgggttgtctggttcttgccatgacatggcagtgctcgtgagttgtatgggagaagcgaactatccacacccaccagcaggtgtggtggcatgcatgttatgttggcgccattgtataccattgcattcatgcattacgatctagtaaatctttttctgagtttatttgtttgtgtagagggaggtattatctagtggatgttgattactcaattcgcgaaggttacttgccaccatatcggaatcagagacatcacttagaagattttaatcaaacatcgagctcggtaccc

SEQ ID NO: 172492 - DNA, 2527 bp, Arabidopsis thaliana landsberg
atggctttaatagggttaattgaagcattcatagctttcgtttgctttctcattttctattacttcctcatcaagaaaccctatagttacatactcattaagatatcccaaagcggcctatggaactggccggttcttggtatgtctcccggtgcacttatgagactcccccgcatatatgacttcagcgtcgaccttctcgagaattccaacttgacttttcacttcaaagggccatggttcgctggaatagatattttggccacggctgattcagttaatattaatcatatttattaccgtggtcctgagttgcgagaaatctttggaccttttggagacggcatcatcaactcggactcagagctatggaggaatttaaagaaggcaacacaagttatattcaaccatcaaaagtaccagaaattttcaacaagtaccacaagaagcaagctcaaactcgggcttgtgcctcttttcaatgaccacgaaaatttaaagtaatatactaatgtagtaatattgaatttatatctaacggaaaaaaagaatcgaacaatttctgataagttttaaaataaaaatgataagtcgcaatgcataacttcagacgtttgcggaatattaccaaaaaaagaaaggaagtttgtttggaaaaactaaagagctccttaagctgagagacttgtaccaccaacagagtttttatccatcttaatcttcttagatggaggttcggattcttcttctccttcttcttccgaaatgtttgatgactccgcaacttcagcctcttacttactcttcttaaaaatctctattaatctcatcatctctttgttcacctggtttatttggacattttgggattagccaaagttaatcacaacaaaactggaaagaactagaatgtaggaagaagagttggtttctgtttttaacctgcgggttttggagaaactcggagagatccgtcgtgcagcaagggcaggtcatgatgttcttctttgcacgtagtttacgtccgccattgcttctctctctcagttgagttatcccagcaaacttcgcttctaagcatgctttgcagaagttgtgtgcacaaggtgtcgtcactggaagactcagcactttccgacagatttggcaactgaattctgtgtcaaataaaacaaaaaaaaaaacagttataaattgtgctatatacagtaataacacaagtgataatggacgtttacctttcagaagtctggccttcatagcattatttcctttttttgctctcttattcttcttcctctcctcagaattcaaagccattctgctaacaggtggagacttcatccatttccaacgaccctcagcttcctgatgagggaaaagttacaaaataatgaaccaaccgaagaatattagatataagctctggtcatataaaagagagactttactaacatcgaaaccccatgatggactctcctttctcacaaacaggtcagtagcattctccagctctggaacatcaggcaaaggtcttggacgatcgccatgctcatcactgcagtatataattaataaatgcatgagccatcaaatagcaaatacatataagacactttccgggaaaaaacaaagaccaaacctgttccatggagctggctcattatcacatcttacaaacaggtaacgacagaccttaaatgaatcctatggaaatgagaagaacatgtcaatgcataaaaagaacagggaaaaaacctacgagcttgtttccctatatgtgtacctggagtctagcttttcgccagcatttctcgatcctgtatacaccatcatatctcactccttcctcgggggcatatacagaatgcctatccttgtaagacctagattaagggaactgatattaagagttgtatctatggaacttagcataactctattctttattcaatgcaaagaaaagcaatacatttcacctttgtggtacaactttcgatataggaaacttaacgaaaaaatgagaatgtgagagagcaatggagttttgttctgctaacctgacaactcgaactggataccccatttcgcaactaactcttaaagcttcattcaagtcttcaaactcctgatcctcgttagcgaaatgtctccctctactgcgtgacacatcgacatatattcaagacgaaaacaaacaaaactatgtcaacaaactggacaatagctacttctaacacatgagagaagtaaaatcaacatgagtcaaatggaccaaaatttaggagtaatgaaaggcagaccttcctgtgtatagaaaccattctccatgatcctcatcatccttataacctccagagagtgctacagattgagctccataagtagattgtccagcaatgccagcaacatgtgggaaatgagcaccccactgcctacactcgagtctgtcctcccaggattctccaaccaaaagaccttggttcctgacagggtcattttcagctggaataggaccaaaatgatc

SEQ ID NO: 172493 - DNA, 1281 bp, Arabidopsis thaliana landsberg
ggcggtatgtcaagtgcaacgaagacattatgcgggcaagcatacggtgcggacaatatcacacaatggggatatatctacaacgttcatggatcgtggacatggccgtgaccactttgtttctaccgtttattgtacttgcgggtcccattctccgtctattaggccaaaacgtggagatcacaaagaccgttgatgagatatatccttggatgattccgtatgtatatagcttaattttcactatgactatacaaatgtacctccaagcacagatgaggaacgctattgtaggcgttctttcgacattgtccttggctcttgacctcgtggtcacatggtggtgcgtgagtgttatgggtatgggcattggtggtgctctcctcggacttaatgtgggctcttgggcaatggtattagccgagtttgtgtacatttttggtggatggtgtccttttacttggaccggatttagtattgctgcttttgttgacctaattcctatgctcaagctttccatttcttcaggcttcatgatctggtaattaattacctattctttttttgtttttttttcttcttaacaacttcaatattataattccaaggcttgaagtgagatttctattgaaggagtaatattattattttttagcataaagttatgttatgttaaatgttctacttttgttctctaataatcctcttctttacaattttcgttcagcttagagtattggtacatgagcatccttgtcttaatggcggggtatacaaaagatgcgagaatcgcaatctctgctttctcaatatggtaaaagtcaaaaccttcatagctaactgaatttcagttcaaaaggctatattaaaaataaagaaattcaatcatcttgaaaatttgcagccaatacatatatacatgggaactcaacatatgccttggcttcttgggtgcagcatggttagtaacatatatacgtactctcattcacagtattttgattttgatgtatacatatattatttgtttaatactaaagtgaatgtatctctatctatgaatccgaaaatgtagtgtaccagtggcgaatgaattgggaaaaggcgatgcggatgcggtgagattctcgataaaagtggtgcttgtggtattagcggtgatcggtgagatatgtttcgttctttgcctagcgtttggcggacagattttgattttgtctatgatagccaagcagtttctgatgcaacagctgaactttccatcggtcctagcatatctat

SEQ ID NO: 172494 - DNA, 1003 bp, Arabidopsis thaliana landsberg
caagatgctcaaaagaatcgaagaatctcaacgagacatcgctatggagaatcttatctaccacgctaatgctcgtgccctagatccagtaggaggggtttacaggacaatctgtgatcttaagtgcaagatcgagtttgttcagactgagcttaacttaactcgtcagcaaatcgatatgtgtcgctctctagctcaggagcagcataggcaaaggcaaaatcttccatatcgctgcaattccttcgaaagtctattacaacaagacggagatgaatacgttaatgtggatggtttagatcatcagaacatgcaacaacaacaagagatgcagcagcagcaacagaatccgtcaaactacgatatgtttttggagatgcctgaacaaaccagcaaagtaaagcttgaggaggaaaaaatctctgaccagagaaaaaacaatctcatgaggcagatactcatgtcgtcggcaatcatataaaagtagttcctttcaggtttttagtctcatgtgttgtatgaagtttgaacacggaaaaccctagttcagcttcgtcattatcacgctttttcttctcatctttgctatagtgaatggtcatttaatttaccatatttcttgtattttcctttagaattttagaactagttatcttgtttacaaatgttttttcttttattactagaacaagaacatgtgtttatgaatctgttttagcttgagaaattgtcagagtgaatctgaaagcaaaatcaggccatgaattgattgtaagagtattgaaacagaaaacgtgattaacttttcacacaagctaataagcaacagagccgattggccaattgaagggtacccaagttaataaaacattttaaccttatccttaattgaatcgaatatcaaataacagagaaggagacagagagagatattctccaacacaattccacaacagaattatctgctacgaatttgtctaccataaaagctcaatctgcaaac

SEQ ID NO: 172495 - DNA, 275 bp, Arabidopsis thaliana landsberg
atggctttagtcggaggtgttggcgatgtccctgctaatcagaacagtggtgaggttgagagcctcgctcgtttcgctgtcgatgaacacaacaagaaagaggttccaaatctctcatcatcttcgattttttcacatctctcgtctcgatatgtgtgttttatgctattatagtcttgatccagaacacgattagactaattttgtccggagtttctctattgatctcaatttcagttaccagcagatcttagagagtgtatattattcggtga

SEQ ID NO: 172496 - DNA, 281 bp, Arabidopsis thaliana landsberg
aggagaaacgtcatgaacagcacggaattcagcggcaaggtcgctctcgtcaccggggccagcagtggcatcggcgccgccaccgccgtcctcctcgcgcagcgaggcgcggcagtcgcggtgttcggccgacgcaaggacaagctcgacgacgttgtcgccaccatcagggaagccggcggcaccgggctggccgtacccgacgacgtcggcgtgccgtccgacgtcgagcgggccgtcgcggccacagccgcggaattcggcgccctccctgagagcca

SEQ ID NO: 172497 - DNA, 383 bp, Arabidopsis thaliana landsberg; identical to SEQ ID NO: 40702

SEQ ID NO: 172498 - DNA, 560 bp, Arabidopsis thaliana landsberg
acggacatttccaatatgggcttttgggcccatagtgatatgggtctccttccgatatctttgactgcgcgtgcctccaaaggttgctgtagagaacagaaagaggccttcgatcctggctttgtccagacaaaagctgcctcatctacctggaacttcggtcgaggtagtggtgaaggggggatatgtaatctcagacaactccacaggtgacaaaactagacgtaatcctaatggggacagggtcggagctagagatagctgcaaaggctggagagaagctaagagaagaaagaaaagcagtgagagtagtgtcattggtgagttgggagctgtttgatgaacaaagagaagaatacaaagaaagtgtgttaccttgagaggtttcagcaagagtgagcattgaagcagggtcgacctttgggtgggagaagatggttggctccaaaagaaaagccatcggcgtagacagttttggagcaagtgcaccagccaatgtgctctacaggaaatttggactcaccgtggatacggttattgcagccgctaaagacttttgt

SEQ ID NO: 172499 - DNA, 875 bp, Arabidopsis thaliana landsberg
cattcagattaatatctgaaggagtgatacttcatttcgttcatagccatcatctccaacttgaggttagcagactatgtgataaaagtaagttttgtcaagcatgtgtccttcctatttgtgaaggtaatcattacatttgtgtcgaatgtggcttcaccatccatgaaatatgcgcaaaatatcggcgaagaatacaacatgcgttacatcctcatccacttacattgaatgtcgtgagtaaatatgggacgggcaactttgagtgcgatgcttgttttcgttattgtggtggctttgtctatatgtgtccgagaaaggactgcaacttcgatctagacgtacgatgtgcttccgtttgtgaaccgtttaacttccaaggtcataaacatccattgttcctagctttagccccaggagaaaagcccatttgtcatgtgtgcagatcagagtgtcttacaccattaaattgcatcgaatgcgattttattatgtgtataaaatgtgcgacgttaccatatcaagcaaagtataagcatgacagacactctctcacaattctgtggggagaagaagtatgtgaaaaagattggtgcgaggtgtgtgagcgtaatttaggagatacaaacacaaaagtgttctattggtgcaacgagtgctgcactactcttcatatcgaatgcttatttggggaaatcctatatctgaaacttggtagatgttttttggatggggatgagaaagagttctacattcttgggaaagttgccacttctcgaccattttgcgattcttgcaaaatgcgttgtcaaggcaaaatatttgcgaaagacaacagcataacgtgttctttgagatgtgccgtcgaatttttt

SEQ ID NO: 172500 - DNA, 258 bp, Arabidopsis thaliana landsberg
  unsure (1)..(258): unsure at all n locations
atgtgcaaccccagcatggtggtgttctttgaaccgtccatggggctggctccgcagatcgtngaggaggtgttcaacatcgtcaaggatctgaacgacaaggaaggcacgacctttctgctggccgagcagaacaccaacatggcgctcaagtacgccgactacggctacatcatggaaagcgggcgcatcgtcatggacggcccggcgcaggaactggccagcaacgaggacgtcaaggagttctacctgggcgtg

SEQ ID NO: 172501 - DNA, 647 bp, Arabidopsis thaliana landsberg; identical to SEQ ID NO: 25573

SEQ ID NO: 172502 - DNA, 857 bp, Arabidopsis thaliana landsberg; identical to SEQ ID NO: 13504

SEQ ID NO: 172503 - DNA, 822 bp, Arabidopsis thaliana landsberg
  unsure (1)..(822): unsure at all n locations
ccttttttatttttcctattcatagtgctagctacaatggctaanccatgtctctatgcttattaacgcctntggtggtttcagactgtcgacatatgaaagaagttcttatggttgaatctcatttttggttttgacagcttatttagtatggacggtgactttgcaccaatagaagagctctctcagcttcggaagaaggatggcttccttctagttattgatgatgtaagttgatcgaaaatgttcaagtaaaattttagtatgttggtgtcaactactacttttgctgaagaaaaataatattgatcggtcaggctcatggaacatttgtctgtggagaaaacggtggtggcgtggctgaggaatttaactgtgaagctgacgtagatttatgtgtgggcactttgagtaaggcagcagggtgtcatggcggtttcatagcttgcaggtactcattcctatgtgatctgaaattcgtgaacccagaatttgttttagtggtggttaagatccctatagtatacggtccatgaaagcttatgataaagtgaatcaataatcagtctgtatcgtctcaatatctctataaatgaaacagagatttcaatgtactagtagactggtaacagcttaagtttgttgacggaaacagcaaaaaatggaagcaactgatacagtcgagaggtcgttcattcatattttcaacagcaatccctgtcccaatggctgcagctgcttatgcagcagttgtagtggcgaggaaggagatatggagaagaaaggcaatatgggagagggtaaaagagttcaaggaattat

SEQ ID NO: 172504 - DNA, 374 bp, Arabidopsis thaliana landsberg
cggggactaaagataggaaaaatccaagctttttgcgattcccagctcgtcgcgaatcagttaacatggatccctcgaggagaaaatacatcggctgacgccctagctgctctagcctcgacatctgacccgagcctgagaagagtcatcccagtagaatttattgagaagccaagtatcgagctcggcgaagaaggacacgtcctcccgatacaaatcggcgcggatcaaaacaacccagattatctaggaggctgcctctcacaatggatatagccaaacaaaagctatatatctgacgggaaatggcctttgacagatggaaggctcggatactcagagctcaggctgcacgttttgctctagtaaatgaa

SEQ ID NO: 172505 - DNA, 425 bp, Arabidopsis thaliana landsberg
gctaggtttctcctactctcaaagttttgggccgaaataatccgaagtagacatttcatcacgtctttccaggttaggttttcgttgcagccgcgtctcctagtagtgtttattattttaaataaacaatgtaactgcgaagattggtagttcttctcactgtcttcatcatcaatatcttatctatcacgtgttacatgtcccgttccagattccgtgcactattctcattatgttaatggcttgataagccttgatattggtctatagcaattcataactaaccctagcaccggtaaatccacagttttagggagagtccaaaccaatagtaaggttgcgcaatgttttttggggtatgatccggttaatgatgtatacaaactattggtattgtgcataaagcaaaaaatgcaacgtcatga

SEQ ID NO: 172506 - DNA, 1022 bp, Arabidopsis thaliana landsberg
aaagtaccaggtaaaacagctctggtctccggcttgaggggatctaggcccagaacctcgtaaaaattcaacaaaagtttttatttttttaatcttataagagatcaataacgttttcaatttttccaagcatactttttgcatctgcgtttgtagattgataataatggatacttatcttatgttagggagctctcatggcgcagcactttaccgcagccgcgccttactcgagtataaacaacgacatatgcacgctggccctcgacaagaaagcgacgttaatcgtgattccgttccacaagcagtacgcgattgacgggactgtcggacaagtcaacgggcccatccggaccataaaccttaacgtgttggacgcggcaccttgttcggtggcaatattcatagaccgaggagagaccgagggacgtcggtccgtgttgatgaccaatacgtggcagaacgttgcgatgctcttcatcggtggcaaggatgatgcggaagcgctcgcgttatgcatgaggatggctgaaaaaccagaccttaacgttacgatgatacatttccgtcacaagagcgctcttcaagacgaagattacagcgacatgtctgagtacaatctcatcagcgatttcaagagctatgcagcgaacaaagggaaaattcactacgtagaggagatagtaagagatggcgtggaaactacgcaagtgattagctcacttggagatgcctacgacatggtgttagtgggtcgagaccatgacctagagtcttcggtcttgtacggactcacggactggagtgagtgccctgagttaggtgtgatcggagatatgttgacgtcgccggattttcatttctccgtacttgtcgttcatcagcagcaaggagacgacttactggccatggacgatagttataaattgcctaacgtcgagcatcagaagattggtgatactggaatgcaacaacgtttctctgctgaagaaggtttcactaccattgatctcggtaaacgc

SEQ ID NO: 172507 - DNA, 478 bp, Arabidopsis thaliana landsberg
tttctccctcaaaaaaagtatcctttaacacaaataaatggaacacgaagtaaacgcaggaacagcaagcagttcaagatggaacccaacgaaagatcagatcacgctactggaaaatctttacaaggaaggaatacgaactccgagcgccgatcagattcagcagatcaccggtaggcttcgtgcgtacggccatatcgaaggtaaaaacgtcttttactggttccagaaccataaggctaggcaacgccaaaagcagaaacaggagcgcatggcttacttcaatcgcctcctccacaaaacctcccgtttcttctacccccctccttgctcaaacggcacgtagttcttatccttttctcttacttatacgtatctaatcttcgacgttctattttataatcttaaaaaaattgtagtccatacgttataggttctttttgttgacgacgttttctttccgtattaagaaataaaa

SEQ ID NO: 172508 - DNA, 748 bp, Arabidopsis thaliana landsberg
atggcaagtaaccctgattttctttggtgcaaagaagagaggaagcagaaagcttcttcaaagttcttaagcgttccgacatgtcttcagaggacacggtaaactatgttctaaactctttatgttgttgaattagcttagtctagaaaggttaaactttcggtttcttaaaggtttgaatcttgtcgttaactgtctttatgggtctagaaaaagcttttgtttttcttttctgaggaacttttttcatggtcctgtgcttctcttagttctcagttctctgtctgaatgtgaagatgtgtactttatttcttgtggatgagatctgttctgttcattttcaccgtcttgttgtgtttgtcatttgtgtgttatagctcactgatttcatggttagatttgaaactttgtactcagattcttgatgggatgtgtaaaagctcactgatttttcactgttttatattaatatcagacatgtatcttacttatatcttttcatctttctttaatataaccacagcgagcgattccgtacgactttgtgataaacttctctgacaatgagctctccggagacatgaagttcagagtgcaatggggaaactcttggaaagtaaaaatctccaagaacccgagattctacttcatggagaagtctggatgggagaagttagttacacccaatctcttgggagaccacgagtttctaacctacacacacaaaggacaaatgagcttcactgtg

SEQ ID NO: 172509 - DNA, 274 bp, Arabidopsis thaliana landsberg
ttttgggtccaatattcatctcttacagttggttataacttgtcatataacccaccaggagaaccagagaagttccaatggcatggacaaatggggtatgttcatatcgatgacgttgcacgaacccaacatagtcgttttcgaacacgaagcagctcaaggcagatacatttgtagctctaacgttatcagtctagaggaactcgtttcattcctatctgctcgttacccatcactccctatccccaagaggtttgacactgaccctttaaac

SEQ ID NO: 172510 - DNA, 774 bp, Arabidopsis thaliana landsberg
tgcttcctcctccaactactcttctggaatctcgaaagtatgccgagacggcatctcattttttgcgggtatgtgctttgttacttataacttgcttcggcgttgtcattgtaaatctaacttttccttttccaagttgtcgcttcgatgaaccggatggtacattcgtatgattcggccatgcggagcaacatggaggcggctggcaagttagccgaggcggagtctcggattcaggccatcgagcgggagaaaaacgaggccctctccccagctgccgcagcgaagctggaaagagaggaggtcgagaggatggcctttgtgaacaaagaaaatgccatcaaaatggccgagcagaatctcaaggcgaatgctgagatcgtccgtctcaagcggatgttatccgaagagagagggcttcgtgatagcgaggtggctcgggccattcagacgatgaggcgggaggtttccgaaaccttaattgccaagataaggaccatcgagcacaaagtgtcgctccttgatgaggtcaatgaccgattcatgtacttgtctcaggcgcgagccaacgcgcagctgatcgaggtcctcgaaggtggcggagttctggagagagagaaggagcaggttgatgagtggttaaaagattttgccgatgctgaggtaaattttaatcgcttaatggccgagctgaaagatgacctcaaagctccagctcccgagcccgctcctctgagtccgggtggtcataggtcggttgagtcattatccgac

SEQ ID NO: 172511 - DNA, 304 bp, Arabidopsis thaliana landsberg
tcatccaccacgcccggctgcctgtgggtggtcgccacgccgatcgggcatcgcgacgatttttcggtgcgtgccatcgagacgctgcgcagtgtttcggtgatcgcggcggaagatacccgccacagccggccgttgctgcagcaccacaacatcgccacgccgctgattgcgctgcacgagcacaatgaacgcgatgtcgtggatgccgtagtgcgtcgcttgctgaatggcgactcggtggcgttgatctccgatgcgggtacgccggtgatctccgacccgggttttcggctggtgcgtg

SEQ ID NO: 172512 - DNA, 325 bp, Arabidopsis thaliana landsberg
ttgagctatgggtatgccgtatgtgtatgtctaaagctcagactattttttttccaatggaagaaaaagtcgtcaaatacgacgagaagaggaagaaatagacgatttggtttcggcaaagattcctttggatctcatgatcgagattccaattagattgcctgctaaatcactgatgaagttcaagtgtgtctctaagctctgagtttctcttatccattctcgatatttaaccaacctttatcttacggtcgcatctccaccacaacaacctcatcgtgtacacatacgtttcgtaaacgagtacctgtgtagttctgtaatg

SEQ ID NO: 172513 - DNA, 827 bp, Arabidopsis thaliana landsberg
taaatgagaggtttgcagaaggaaaaaggattggtaaagaggatgttaagccttgcttacttctcatcgacgaacgggatcttctaggaactagaaaccagtctgttttatacaacattcttgattggcctaccaagcctaactccaaattagttgtgttgggaatagcaaacactatggatcttccagagaagctgcttcctcggatttctagccgaatgggtatacagagactatgtttcggtccttataaccacactcagctacaagaaatcatttctacaaggttgaatggaatagatgctttcgagaagacagctattgaatttgcttcgagaaaagtagctgcgatttcaggagatgcaagacgtgcgcttgagatatgcaggcgtgctgcagaagtagcggatcaccgtctaaatactaacaaatccgcaaagaatcagctggtgattatggcagatgttgaagcagctatccaagagatgtttcaggcacctcatattcaagtgatgaagagcgtgtcaaaactgagtaaaatcttcttgacggctatggttcatgagctttacaaaacaggaatggcagagacaacatttgaccgagtggcaacgacagtagcatctatttgctttactaatggagaagcttttccaggttgggatatacttctcaaaatcagttgcgatcttggtgaatgtagaatcattctctgtgagcctggagagaagcatagattccagaagctgcagctaaattttccaagtgatgatgttgcttttgcattgaaagacaataaggatcttccatggctggccaattacttg

SEQ ID NO: 172514 - DNA, 191 bp, Arabidopsis thaliana landsberg
  unsure (1)..(191): unsure at all n locations
actcgagagtaacaagctccatgaactgcgttggatcatcagagacatggacatcaacccaagtatcttccacctcgtgactagattctgttatggatacaaaatcgaattatcagctgacaatatcngctctggtgtatgcattgcttattacctagagatgagcgatgatcatagctctaacaaacttg

SEQ ID NO: 172515 - DNA, 581 bp, Arabidopsis thaliana landsberg
ccccattattgaacacttggtgatgaactctattgaggttttttttgtggtgtactccattgtggagcatttgggggtctaccccattgtggagcatttggtggtgtacccagtggccacctgaagtttgaccccatgaattaccactaaagtatggactgtcataaggaaaattaccagacattggactgccataagaaggattgagaagctccccgatctaggtagctttgttcttgattgcttaataatacctactagcagatttagtcactccttgtgttatctgggatcaagcatcaacctcatgcccaagtctgttgctgagaggctagacatgacccgatctgtttacacactactttggaaggcgagattgcaatccgctaagcagcacaagtcccttgttcctccatccacgtcctaaattccgccaagtcaagctattgactcaaaagaagcgcttagtgggaggcaactcagtggtttgatttttcttttcttttcttttcctttcttttattttagatttatttttctcgtttttttcggatttgaatgctactggagactgtgtcgtt

SEQ ID NO: 172516 - DNA, 477 bp, Arabidopsis thaliana landsberg
tttggtaaaatgataatttcattgagtcttatgatgatgataatgtggaagagcgtggatggttacagtagtggttgggtcaatgctcgagccacattctatggaggagctgatgcttctggcaccatgggtaatttgcttactcctctctgacactttatagttatatcattcttattttctgaccaatataacttcaaacttcaaatttcttaggaattttaaagtttttattagtgagtggtgacaattaatatgctactaattaatatgctacataagtttgtatctacacaagtcttatttttgtgttgttgttgtttctgtatggatcaggcggcgcgtgtggttacggaaacttatacagtcaaggatacggcactaacacggcggctctaagcacggctctattcaacggcggccaaagctgtggtgcttgttttcagataaaatgcgtagacgacccaaaatggtgta

SEQ ID NO: 172517 - DNA, 467 bp, Arabidopsis thaliana landsberg
agagagatgaataaacttgtttagattttagtgttaaaatttaggatatcagatctatcgttttaattaagggttagtttcggtgtaaatatttcggtttatatcatttgtattctctattgctgtttattttgcagccctactagaaattatattactcttttctgtacaattttttttttttacttttctcttaaatatcattttttctgtagacaagatttcagaacaatgatgtattcaactcatttttagaggttttgaaaacgcataaaaaggaaaacaagagcgttgctgagctctaccaggaggtgtatatatatatatatatatgtttcactaccttttctttttccatctttcttgtattggatttaatgtaatgtattattttgtaggtggctatcctttttcaaggccatcgagacttgcttgaggaatttcatctctttcttccacattatgga

SEQ ID NO: 172518 - DNA, 1144 bp, Arabidopsis thaliana landsberg
  unsure (1)..(1144): unsure at all n locations
attggtttatcaaagggttatcaatcaaatcattggacccaacatcgtaatagtcttgctcaaatgatccatcatggaaagctaagcgatgatttggtcgaacagttcgagttggatgcaaatttgttaccataccaccatgaatatcatacaaagaaccaaaaaggttcccaacagcaccaatagaagatgaagatgaagcaccaaaagatccaacaagatgaacgttttcttgaacattagagaaaggttgattgttacctcgttgggtctcaacagaaaccatccgagcaaccgaaggttgatttacccttgcccgtttggcacgactacttccaccaactggtatgtttcttaaagccccaccatgagtccagtatctacgacagttcttgcagaagtatcgtggctgaaactcacagtagttgttgtaataaaaaaaaactttttgatgtcaagatgtgattctgataacactaagttttgttattataacacctacaataagactcaacctcgctacttctgctagaattgtcatagatattagactcgtagtggagttttaagaaaagtaccaattgatggaagttgtcgtaaaaccataacgtgcatgggtagatcaacctttggtttctcggatgatttatgttgaaatctaacaatcaacatttcttacatgtaaaagacaacatcaagtttgtgggattgtttggtactttaatttaagggtagtaaatctatatcgtagatactttgtggtatcttagaaaacaaatgtgtgctattttctagaataaccataaatatctttgttcaaaaaaaaaaaacacacacataaatatcttaatgtttggtaaatatagtaaacaaactaaaataaatgaaagtaatttaaagtatattttaagtaacttattttattattttacctagttaacccattttctatattttttgagatcttgaatacctgtgaagccgatttgttggttaaaatctagatattggaaatttcagaaagtacaatataagtttttgtaatttaaaatattaccaattntgaagcttttacatgagttgaccanaaccatgtacatgaattaantcttgaaaaaaatcgattcgatcagaagtttccatt

SEQ ID NO: 172519 - DNA, 293 bp, Arabidopsis thaliana landsberg
ttattttgcatacttaggcatttaggatcatcttgcatacacattgcatgttttggtgtgttttcaggtgcagaaggagctcaaaaggattcaactcgaccttctactctatccaaccaggagggaagcagcaaagcattgtactcgacccactcactcgatccaggcagccacatcggaggcagcaattcactcgaccctcttacacgatccttgcagcctcataagaagcagtagatcgatctactcgccccttctactcgtttctctactcgacccatttactcgatcaa

SEQ ID NO: 172520 - DNA, 418 bp, Arabidopsis thaliana landsberg
gcaatcgatttattcagtcccatcaagatcggcagcatcgacctcagcaaccgcatcgtcatggcaccgatgacccgcaaccgcgcaggcgagggcaatgtcccgcaggacatgaacgtcacctactacgcgcagcgcgccagcgccggcctcatcatcaccgaggcgacgccgatctccgagatggggcatggctatcctgccacgcccggcatccataccgacgcccaggtcgccggctggaagaaagtggtcgacgccgtgcatgctaagggcggcaagatcgtcctgcaactgtggcatgtcggccgtatctcgcctccctccctgttgccgaacgacaccttgccggatagcgcctaaggccatcaagccggccggccaggctttcacctaccagggcctgcaggatttaaca

SEQ ID NO: 172521 - DNA, 1041 bp, Arabidopsis thaliana landsberg
ctctctctctccgaccccaacttcactaccctctcttcctcgagacgcagaactcgtgacgataatccgtctctagcgcgtcaagtttctcaaatcccgaacattatcttcgtcaattcgacgattcagccattttagctcacgtatgtactcaatttccccccaaatttgattatacgaaatggtgatttcaattagctttgggtgtagaaaattgctttggagcatatgaagaaatttgagaagaagattggaattgagaagagatttatacatgttcgtataaacactagtggatctcctctagaacgaagccctggtgtgtgtgtgtgtgtgtgtgactctcttgttttcgagtttgttctgcttctattagctgattttgattttgattttgacacagagactttcccgagtattggccgggttagagtaaagcaccgtgggattctgatgatgttgaaaggcacagtgattcgatccggggctgttaaaatgtatgaaggagaaaagatgtatcgatgtcgaaaatgcaagcacatgtatggttgaaactgtatattatgcattttgtcatctcttgttcttgtaatatggctgattgagttggtttcttctataggtttcctattttccctgagttggaatcaatcaattctattgtgaaaccacctttttgtccttctcaggtttgtgtcatttcattctttgactagctaagcttgtttgaagtagataaaatccgttttctgttttgcgataacactcagactagggtctctgcaattgtgtccctaacatttgaatttggaaaactcttaacatttgatcttacagcattttgatatctttttaactctgggtgacagcggtcaaaagcttgtgaaggcacaaactttgatcctgtagatgatacagtaacacgccatgattatcaagaaatcaaaatccaagaaaatactcaggttttaggtgttggtgttatcccaaggtctattctagtcgtcctgaaagatgaccttgttgacaatgttaaagctg

SEQ ID NO: 172522 - DNA, 478 bp, Arabidopsis thaliana landsberg
  unsure (1)..(478): unsure at all n locations
ttcctgctgctctggaaagtgtannnnnnnnnnnnnnnnnnncagggtcaaggcgaagattatcggggaggccgccaacggcccactcacgccagaggcagatgcgatcctcaatgccaaaggtgtagtgatcattcctgatatgtacctgaatgcgggcggggtaaccgtttcctattttgagtgnnnnnnnnnnnnnnnnnnnnnnnnnnnnngacggatggaaaaacgcttcacagaaaatatgaataagcagattttagcgcaactagaagatctgaccggtaagaaagtcagcagtgcggaaagagcatttatagaacatggagccgatgaggtggatctggtttacagtggtctggaagagacgatggtttctgctaccagagagattctggaggtctggaacagtaatgacgccatcccggatatgcgcactgcagcctatatcgtggccattaataaagtaggtacatct

SEQ ID NO: 172523 - DNA, 436 bp, Arabidopsis thaliana landsberg
cccgacagcactgacgacggcgaagccttccgtcgccagataaaggaattcggtctcgaagaccgtgtcgaatggcatggacatgtctcgactgaaaagatgatcgagttgtacgcgggcgccaaagccgtcattttcccgccattcgatgaggacctgggttatgtgacccttgaggcgatgattgcgggaaagcctgtcataacgacaacggattcaggcggccctttggagtttatccgtcatgaaaaggaaggccttgtcgcaaaacccaacgcgcgttccctcgctcaggccctagatcgattccagtcggatccgtcacttgcgccgcgcctgggagcagccgcccacaagcggtatttggagctttccctctcttggggaaagattattgagaaactgacgcagcctggcctcccatgacccccgtcat

SEQ ID NO: 172524 - DNA, 376 bp, Arabidopsis thaliana landsberg
tagtttatcacagctaagcctcgttgaattcacaccttcaactccaatgggactactactacgaatatgatagttgcaaagacaagagattcgtggagtattgtgaatgtgtggagatctatgcattattaatcaactttgcgcaaaggaagcttatatcgagcccgtttataagatggaagaggatttggcaaattgggttgaggttagttccttggaagacaaggctctcattgtagcaaaatcttttatttcatttaatgtcatttataatttattaacaaaaattggccgaactaaattaagaaaactttatataaatattaatatatataatgtcattggtataaaagagacttttattaagaaggaaaat

SEQ ID NO: 172525 - DNA, 1619 bp, Arabidopsis thaliana landsberg
agtaagtgtatctatcccttaactgattatgtctcacttgatcggttctctcctcctcaacagatgtttttggccgctattagcgctggttcagagcccgtttcatttaaacaagcaatgagtgatccaagatggactcatgcggttaaaggagaagttgggaagagaatgaaacttgggatataacaacattgccagaaggaaaacatgcgataggctgcaaatgggtttttcgcattaagtataactctgatggatctatcgaaaggttcaaagctcgtcttgtagctcttgggaatagacaagaggaagggacagattacactgaaacgtttgcaccagttgtgaagatgacaacgattcgtactctgttgaaagttgcttccgctcgtaattgggaattatttcaaatggacgttcataacgcctttttacatggagatctagaggaagaaatttatatgacggttccaccgggtgttgaaaatgtggattcttcaaaagtttgcaaacttaaaaagtcgctttacggacttaaacaagctccgagatgctggttttcaaaactctccaatgcactcatagagtttggatttacgaataattacacggattactcgttattcacatatttcaaggggggctcgtgtttgtatgttttggtttacgtggatgatttcattgtgggtggtaatgattccaagctaactgcagagtttaaggcatatatgagcgaatgctttcacatgaaagatttaggtcctctaaaattctttcttgggatcgaagtctccagaggaaagcaagggatttatatctcgcaacgcaaatatactttggatatcatctctgaatgcggacttcttggagctaaacccgttgacattcctattgaacagaatcatactctagccaaagaagacggtgaattctatcctgaaccaaccaaataccgcaggttagttggccggttggtttatctttttatcacccgaccagacctttgctatccggttcatcttctagcgcaatttctcggacaaccacgtaaacgtcattgggatgcagcagttcgcctagtacgatatcttaaagggacttgcggacaaggcttattactaagcaacgatgatgatcttcatctagatgcctattgtgattcagatttttcaaacatgtccaaaaacgcgtcgttcgctgtccggctatgttgtcttactcggcaaatcccctatatgttggaaaacaaagaaacagaacgggtatcactctctttagctgaacctgaatattgaagcttggcttattcttatcaagaactcatatggctcaaggagctgcttctcatttttcaagttcctcatccagaatcaataagtcttcattgtgacagtcaagcagcacttttcattgcagctaatcatgtcttccatgaacgcaccaaacacatagaatccgattgccataaggtccgcgatgcagttctcgataaactcattactacggagcacatttctacaacagagcaagttgctgatctttttaccaagtcgttgccaagaccgacgtttgaacggttattgtccacgttaggtgttactaattacataccaccaacg

SEQ ID NO: 172526 - DNA, 317 bp, Arabidopsis thaliana landsberg
taagcaagacaagaccagtgacacactgtcgaaatggctatttataaaagtgtgtattaatctaatgaaaatctgtgattcaggggatcccaaagaaatttgtggatatgcatatgccaactgagacaacgatgttcaagattcatcatccgagaggaaagaagtcatgggatgttacatatgtggtcactgatgtacaatcaagattctctggtggatggagtcgtttggccaaggagttaggtttagtggtcggagatgtttgtacgttcaagctcatcaaaccgacagagatgcgtgtgaaagtctccaaagaa

SEQ ID NO: 172527 - DNA, 620 bp, Arabidopsis thaliana landsberg
  unsure (1)..(620): unsure at all n locations
agcttgtttggcgtattcggtgttggattttccagataagtttacatggaggacaagtgatttcatggaggaataaactagncgaagagcttcttttcactagcaataaggtaactgatctcactacaaaaccctgatacattgtgaagaatctgaaacataaaaagtaaaaatctgatttttatattgttatgaatttgttaggctatattcaaacccccaaaatcaatgcgtggagggattcagatttgttatccgcaggtaaaatttactagtagcgctcactgaactgagatcttttgttgatcactttttcattgaagttttgtgtgtgtgtttgtgaagtttggggattgtggatcactggatcaacatgggtttgcaaggaacaaaatttgggtaatcgatgagaacccacctccacttaactcaaacgaatccttaggaaaatcctttgttgatcttcttttgaaaccatcagaagatgacttaaagcaatggcctcataggtaatctcctcatcacttgtttcttcattttttcaaattgacagagattctaaaattctatgcttattcccttgcagtttcgagttccgtcttagggtttcgcttgctgta

SEQ ID NO: 172528 - DNA, 116 bp, Arabidopsis thaliana landsberg
agagtgattgttgcaaaccacccgaacgctggagaaagtcactatcgtgcttctaagatcaatgaagccaaagagatgatgcttggaaaattcaacacaacactagttctgctttt

SEQ ID NO: 172529 - DNA, 289 bp, Arabidopsis thaliana landsberg
ttaatttgcatatttaggcatctaggatcatcttgcattcgcattgcatgttttggtatgttttcaggtgcagaaagagctaaaaaggactctactcgatccattcactcgatccaggcagctacaaaagaggcatcattctactcgacctctttactctatcgaggatgctacaaaggatgttgtagtttactcgaccctcctactcgatcaaggcaaccttagatcaagcagcagattgatcaactcgcaactcctatcgatccacactcgatccattactgccagg

SEQ ID NO: 172530 - DNA, 781 bp, Arabidopsis thaliana landsberg
tcttcccgcggcgaatcctttaaaacaacaggcgctggttcatcggactcgacatcgctgaggacagcatcctcatcggctccgttagccatctcaccgtgcgatcagtgaagataatttagtcttctctccgatctagattttcgtagtcgtaatagtggcgtgcaaggaattgacgcaattgcttcgccaaggaggaggcaaaattagaaaatttgagaatataactttctaccaacagccttctctgctcggaggatggagaattcagagaggggctatatcggagtaggtgaaacaagagacgatcttctacgacggaggaacttcaaattctacggcgaagaagacagaagaaagcaatctcgtcgggttagtttactatgtctctcttaattaatttatttcaattaaaatatttgggctttggtaggctaactgtttatttgttaggcccaactgtggcaaaagttaagcccgttttatttgttaggcccaactgtggcaactgtggcaattaaatcaaaagttttagaagttttatttatgtatgttaagcaattgtgtttaaagttggaaggtttttaaagtaatgttttggtgggtttggttttgaatttaggagcgagatcattcaacaggcaaagcttgcattacattggaacaagtccaaacccgtaccagcaagcgatatctatcattggaaagactttatatgctttcgatgaagataatttgattccatgttatggatttggagatggtaatgactgcagacaca

SEQ ID NO: 172531 - DNA, 612 bp, Arabidopsis thaliana landsberg
gtcactcccattaagctcgggtctgtcaaagatacgttgataatgagtaagtttggatctgtacaaccagacatttattggtgcagggtttgtgaaggagattcagaatctgttgttaaacgtccgtggcatttgttatggcaatcaagcaggttgatgaaaatcgtctctgctattgcatccaggttaaactgggcctacaatgctgtacacattgatagaggagaggaagcaagttccaaggaggtttgccctgatcttgaagcggattcttcccccagcgctctcttgtcgtccttgcaggtcatagttgaagaagtaaggcatctctacatcgcaacgaatgaaggagaattatccttcttcagccctttgaaagataagtacgccactcatttccttcgcgacaacaaagatctttgggatgagagcagtgagtggtattcagagactactaagcttaatggaggcaacccggtcgaatttgatggttacatgagagcatctgttgacacagaagtattcttgagagggaagaagcagattgaaacattcaacgatcttacaaacgattgtaaagatggagttgggacctgcaatgctgcaacttcc

SEQ ID NO: 172532 - DNA, 1758 bp, Arabidopsis thaliana landsberg; identical to SEQ ID NO: 36326

SEQ ID NO: 172533 - DNA, 1339 bp, Arabidopsis thaliana landsberg
atggggaatgtgcagttgccaaagcgtttgtttcggctaggttctcaacctgagggccgaaagaggataaacaactcctttactcttaggtggattgagatcatcaagactgctttagatcaaacccatttgaagcagttgaagggttcgcagtttggaagtcagttgcaaatggggacgcatcagttttctgtaatgttcttacattacattctatctaggcagttggtgacagataagaagtacgaaatgcggtgggtgtttgcagggaagccaattcgatttgccattgatgattttgcacttgtaaccgggcttaactgcagcaaatctggattcaacaaaaaggatgcaaggacaagagggaagatgaaagcggtttagaatccgacgaggttctacaaggcactatttgagaaagagagaaagtctacttcacaatggattgttgggaagctatctatggggaagaaatacaaagacccgttgactcgattttgcctatcgttgctgctactagttgatgggattctttgcccgacatatgcgcgaactatcatcgatcctgaccatgtagagatggtaaaagatgtagaatcctttcttaaatatccttggggtagaacttcgtttctcgcgactattcgaagtgccaagcaaagaacagcaaaggagcttgcacaagataccacagctatacaagggttccctcatgccttagttcttgtgacagtggcatgttgtccagctattatatacacggcagactcgatgtttaacattctagaccaaaccattccagtcgagaagctggttcagtatgtattggggctgagtttgaacatcaatgttcatgatgcacgaactatcgaccaaagtggcatggtaattctattgttgtatagcttgttctttgtatttggtgttaaaagcttgtgtacttgacttacctattctattgactcttaatttttaggaccgggtaacctcactgctgaatgaagagctctggcgaaagagatcgacttatctttctcagatgaggaggaggatgaaaaagtttcgcatctgctatcattgataatggaggaacacccattcgagcataacagttggagtggtggtgttgatgctactgatgttgaacatccatctgaagatgagttcatggctgatgaatgtgtaaatcaggctaagggggatggtgacgatgagatggatgttgatggtgctagtgttgctgcggaagagagggaagagtgtgcagccggaaaaggtgtagacggattggatggtgaggtgaataaggatggaccggtgatagataaagatggtgtca

SEQ ID NO: 172534 - DNA, 1022 bp, Arabidopsis thaliana landsberg
gaaaataatatttggaatttgaggttttaacatcgaaacccccacgcccacgatctggcattgcggcaaaaagagattagatattctggaatttaattttaggatatttttgatgttctggacgcaaaatttacaatagttggtattcaaatttaaatctgattccgtaagaaaatattataattaagtacattgattcaagaattagaaaaataaaaataactgttaatgaaagattgatataagaattcggaaaattagttctattattttattaaaatatcaattaactgttatattcatttatatactatgttttaggtgtttttccgtttatgtggatcaaaacaagcaacatatttcgaaacttggttggacaccatgatacttaaaaaacaaactgaaaacgtgataacatgcggcgtcattaattagctgtttaaagtatgatcttttaatgtagtatactatgcatagtaatcgaaactctctcggacacgattattgagacaactcaaaagctaaagtttcccaaatgtttgaagaagatcggcattatgatcccgtctccaaggagcggtagttaccaaaacttctcaaacattttgtctaagcctcttctgattaccaagctctctcaagtgcacattctcagtttcaggggtaattaccaagcatctacaagcttgaagaagatcggcattataaccatacctccaaggagtgatggttaccgaagcttcttcaatatttcttatctcgcagcctcctccgtagagcattgtaccaaaagctcgtatgcgttattagcgcgagctgtttatgaccaccagttggtcgaggatttcgcggagttcatctccatggtcgaatccgctatagtttcaaaagacttttcaaacattgcaagcttctctaggttgagcatctctttggaaaactcatagagcctttatcgttatctttattgccattgtattatttcagttttagtttgtatgaactttcttcttatgaggctt

SEQ ID NO: 172535 - DNA, 1000 bp, Arabidopsis thaliana landsberg
tggctattcgcttgatgacattacaggtatatctctggatgtatgcatgcataggatccaccttgaggatgagtctaagtcttcagttgaacatcagagaagactgaatccgaatcttaaagaagtggttaagaaagagattatgaagctgttggaagcaggaattatctatccgatttcagatagtagttgggttagtccagttcatgtagttcctaagaaaggaggagttacagtagtcaagaacgagaaagacgagttgattcctcctcggacaatcacatgccatcagatgtgcatcgattacagaaaggctgaatgctgccaccaggaaggaccatttcccttaccatttatcgatgagatgttgggaaggttagcaaatcaaaagtactattgctttcttgatggatactcaggattctttcagatcctgattcatccagacaacccagagaaaacgactttcacctgcccttatggtacatttgcttatcggagaatgccctttggtctttgtaatactcctttaacatttaagagaggtatgatgtctatcttcacagacatgattgaggatatcatggaggtcttcaacgatgatttttcagtttatggatcatcgtttgaggatgtttagagaatctcagcaaagtgttagcaagatgtgaggagaaacatctggttttgaattgggagaaatgtcactttatggtgcaggatgggatagttcttagtcaccagatttctgagcatggtatagaagtatatagagctaagatcgaagttatgacaagtcttttagcacccgataatgtttaagcagtgaggagtttccttggacatactggtttctataggagattcatcaaagactttagcaaaatcgcaacaccactgactgctctactctgtaaagaagtcacattcgagtttacactagagtgtcatgatgcctttcagcagataaaacaagccttgataagcgcaccaattgttc

SEQ ID NO: 172536 - DNA, 1154 bp, Arabidopsis thaliana landsberg
  unsure (1)..(1154): unsure at all n locations
gatagagctgaactcgacacttgcttaattgctaagactaacatgagttggctctggcaccgcgactagcccatgttggaatgaagaatcttcataagcttttaaagggagagcacattttaggattaacaaatgttcatttttagaaagacaggatttgtagcgcatgccaagccgggaagaaagttggtgttcatcatccacacaagaacatcatgacgactgacaggccactggagctcctacacatagatttattcggcctgattgcttacataagcatcggcgggagtaagtactgtctagttattgtggatgattattctcgcttcacttgggtgttctttttgcaggaaaaatctcatacccaagagaccttaaagggattcttgagacaggctcaaaatgagttcggcttaaggatcaagaaaataagaagcgacaacgggacggagttcaagaactctcaaattgaaggcttccttgaggaggagggcatcaagcatgagttctcttctccctacacgccacagcaaaatggtgtagtggagaggaagaatagannnnnnnnnnnnnnnnnnnnnnccatgcttgatgagtacaagacttcggatcggttttgggccgagcggtcaacaccgcctgtacgccatcaaccggttgtatctacactgaatcctcaagaagacataatatgaactcctcaccggtaaaaagcccaatgtttcatattttagagtctttggtagcaaatgttttattcttgttaaaagaggtagaaaatctaaatttggtcctaaggttgtagaaggctttttacttggttatgactcaaacacaagggcatatagagtcttcaaaaaatccactggattagttgaggtttcttgtgacattgtgtttgatgagactaatggctctcaagtagagcaagttgatcttgatgagctagatgatgaagaggctcagtgcgtcgcgctgaggaacctgtccattggggatgtgtgtcctaaggaatctgaagagcctccacaagcacaagatcaaccattatcttccaatcaagcatctccaccaactcaagatgaggatcaggctcaaaacaatgaagaagaagatcaagaagatgagccacctcaagaggagaacaatga

SEQ ID NO: 172537 - DNA, 790 bp, Arabidopsis thaliana landsberg
atataagtgatatgagtgagctgatgtatgttaagaaaccaggtggatgccgatactcaagaggtttagatcccaatttccaacactactcgaggaatcatgtgcgtaatagtggaggcacatctgctttagctatggagagtgataggctaaaagcaggttcatcatatccacaacttgattcaactgtacttactgcgttgaaaacagataaagattattctcgtcgaaatgaggttttccaaccatctgagagccaaggaagtatatttgtgaaagatacagaacataggcaggaggaaaaaagtgagtcaagtcagttcgatgctttaactgcatctttgtgttctttttctggcagtgagctgttagaggcattagggccagcgttcagtaaaacaagcactgattatggggagctagcaaagtttgaatctgctgcagctataagacgaacaaatgatatgagccatagtcacctgacatttgaatccagctccgagaatcttctagatgccgttgttgctagtatgagtaatggtgatggtaatgtcaggcgtgaaatatcttcaagcaggtcaacacagtcattgcttacaactgctgaaatggcacaggcagaaccttttggtcataataagcaaaatattgttagcacagttgatagtgtgattagccagccgcctctagcagatgggcttatccaacagaatccacccaatatctgcggagcattttcttccattgaaatttcataaacatgtctcagttcatccagcgaccagtttcc

SEQ ID NO: 172538 - DNA, 853 bp, Arabidopsis thaliana landsberg
  unsure (1)..(853): unsure at all n locations
atgtctttgttatttaacatccgcaaaaaataaccggagaagtgttttggttctggaggagatctctaaaccgcccgagcaattgcccaaaatnnnnnnnnnnnnnnnnnnnnnnnnnnntaaaagttctgttggtaagaactatacggagttgaattcagaggaggatgaaatgagagtggatgatggtgcactcatcgtcttatgagaagaggaacaaggaactcaacaacaacttgaggcaatagtggaggaggatcacgtgactcaagaagatgaaacacactatgatgagtctatagataattctgataggggggaacagtatgttgagtcgccacctgctgtagaacctggtatgtttaaaaaagaatgagaagacggaattgggttgaccttacgtcaagaatttccaaacaaggtggcattgcacgaggtggtggatggagctgcatttgctaacagtttaggttatgtgattaagaagtcggataaggagcgctatgtcctaaagtgttccaaagaaagttgttcttggcgtttacgagcgtccaatatcagtaatattgatatattctcgattagaaggtacaataagatgcataattgcactcgactaagtaaaggtagtagtaggctcaggaaaaagaaaggcaacccacaattagtcgcagctctccttcatgatcattttccgggacagttggaaactctggttccaaggattatcatggagctagttcagacaaaattaggtgtgaaagtatcatacttgacagcgctaaggaagaaatatcatgcgatttatgatttaaaaggtagcccggaagaaagctacaaggatatcaattgt

SEQ ID NO: 172539 - DNA, 336 bp, Arabidopsis thaliana landsberg
aagagaaggcaaatggatcagatgtcggtgacgttcaaaaatcgtgacatcgatgtcgcggcggacctgcgcctgcccgacgacttcgacgagtccaagacgtatcccgcgatcatcgtgggacaccccatcagcagctgcaaggagcagacctctggctcaatctacggcgagcagctcaccaagcggggctacataaccttggcgttcgacgcgtccttccaggggcacagcggtggcgaacctcgcttcttggaggaccctcaaacgcccgtcgaggatttccgctgcgccataaactaaaatggtcacccaggacttcgtgatgccgcccgc

SEQ ID NO: 172540 - DNA, 359 bp, Arabidopsis thaliana landsberg
ttcgttctgatcttaaattcattaggtttggacctctagttggtgactggaccggagataggagacttgtggaatgttgtggagacttttacattgtggaaagacttgttggagagagtacttggaagagaaaagctgacgacaccgggtatgagtatgcgaaaacggtcggtttcaaggtttataagtttgatgatgaacaaggaaaaatgatggaggttaagtccttgggagataaggcatttgtgatagctaccgatacttgtttctcggttttggctcatgagttttacggatgtcttgaaaacgctatttacttcaccgacgataccatgattaaggtgttcaagctagataat

SEQ ID NO: 172541 - DNA, 595 bp, Arabidopsis thaliana landsberg; identical to SEQ ID NO: 9655

SEQ ID NO: 172542 - DNA, 542 bp, Arabidopsis thaliana landsberg
  unsure (1)..(542): unsure at all n locations
tgcgatcaacggccatcggtcgtcctcgggcagtcctaatgacaatcgcatcaccacgcgctgcacngataccgagttctttgattccatttattcgaccgtgcacgaagccggtcacgcgatgtacggccagaatcttcccgtggcctggcggtatcagcnnnnnnnnnnnnnnnnnnnnnnnnnnnnnnnnnnnnnnnnnnnnnnnnnnnnnnnnnttcaggcctgcatgagcggcccgttccttgattatttgtccggtgaattgcaaaaaaccttcgcccgcccgaacgacccggccttatccgcacaaaatctgaaagacacgctctggcggtcgcaaccgagctttatccgcgtacaggcggatgagctgacctatcctttgcatgttatccttcgccnnnnnnnnnnnnnnnnnnnnnnnnnnnnnnnnnnnnnnnnnnnnnnnnnnnnnnnnncgtggaatgccggcatgaagcagcgccttggcatcacaaagaaccgatccgtcgaagggctgcatgcaggacatccactgg

SEQ ID NO: 172543 - DNA, 404 bp, Arabidopsis thaliana landsberg
acgagagtaagattgccgggatcaaaggttttccgaatcagagatttgatcaccaacaaggctacaaagattcctatgggaatggtccaactagctacactcagaattctcagttccagcaaccgcttcagaatagcaatagtttcagcttcacaaggaactatgatcttgcttcttaccaagccccccctccacccacacctaaaagcaagatagaatcattgctggaacagatttaggaaggtcaacagaggatcttagagagacctatccatagatggaatgagagcagcctcactacttcttggcattctgcttcaatggaaagtgagtatgagttagtgaagattgaggagagtgacaatttgcaggtgcagaggcagtgtctacgacacaacccttgg

SEQ ID NO: 172544 - DNA, 462 bp, Arabidopsis thaliana landsberg
taaaagattgaagaagaatgacattatgatctcgtctcgaaggagcggtggttaccgaagtctcttcaatctctccttatccttttatccgattactgaaatcaattcattgcgattcaacaacattaagattgttagtcatgattttgaaagctcgaggaaaaacggcattatgaaccgtctccatggagcgagggttaccgaagctttctcagctttctatcccaaccccatccgattctcgacccgtcactactcatctcctttccgatacatcacctcgtctcttgacaatgaccaattttttatccatcgattcactcgtgaaaaattgtgtgactaaccgtgatctcgcatatgcaataaagcttcttagcttgtgttttaaagctctcatagcttatatgtcgtcttactttatccatcatgttttggttttggagaatgcctattttaattctg

SEQ ID NO: 172545 - DNA, 403 bp, Arabidopsis thaliana landsberg; identical to SEQ ID NO: 57498

SEQ ID NO: 172546 - DNA, 664 bp, Arabidopsis thaliana landsberg
gatctttccaatcgagttcttcccaagcttcgtcgtcgtcgtcgtctaggtcgggtgtttaaatttacggtttctgagttagacgagagactctcaatctcggagaatctgaggttttacgggatatcccgttttaatcaaattcagggtaaatttcaattctttttccttctgagatctgattttttttcttttttttttgggtattgaaattctattatccttgaaaagcttcatacttcttaaaactttgcattgtctgagtttcatttttgatacaatctctctatttgattctttctgcaactttggttatgttcatttatatttttagagtatcaaaaatgaatcttttagttgtcttttggtcatcttggattatatttctctgtttgtgatgaattctgaagcttgttgttgtgttagattcatattgtctcactgtttacatttttatccttttcttaagagtgatgatataggtttttttttcttctgaattatagatagatggattttcagagttgctaaggtgggacagagtattagtggtgattgcaacgacaatgggcttattgaagaaaaaagattcaacttcagctcgctcctctacttctccctgcgccgatttgcgaaacgcttaccacaattgcttcaacaagtg

SEQ ID NO: 172547 - DNA, 810 bp, Arabidopsis thaliana landsberg
  unsure (1)..(810): unsure at all n locations
tttagatccagacttaaagtaaagatgctcgaagtagcttatcagaaagtagatcccactacttctgcgttgaagattaaagaacttgagaagaatttggaaatgatttttaagctttatcagacgagttctccaggtgtttcagggacaacaaatccacatgacttacttagtgaatctccacttgaggatgatttcgataatgtaagtatcttcatatacaaagttaaaattccatattagaaatccatattgttaactgatgtaaatctttgtaatacaggatctctttgagttggaaagaagcattgaagctggtgtgaacaacacaaagagtcacttggatatctatttggctnnnnnnnnnnnnnnnnnnnnnnnnnnnnnnnatttagatgttttgaggtattggaaagacaaccaacatcgccttggggatttagctttaatggcacttgatattctcagtattccaattaccacagtatcttcggaannnnnnnnnnnnnnnnnnnnnnnnnnnnnnnnnnnnnntaggaaccgtttacttccacaaaacgttcgggctttgctatgtacacgtaactggttacgtggtttcgcagaatatgaaggtaataatttaagatttacagaaactactttataattaagtgattgttatcactaatttttatgttgaattgtaggtacagttgaagataatgacgacactacgctttgaaaatgctcttgaagatttatggatcactcatcatttgctcttatttttttgttttgttcaatgttattgaaatctatgttttaatg

SEQ ID NO: 172548 - DNA, 724 bp, Arabidopsis thaliana landsberg
ttccaagcacgttaccggaaaatctaagattgcgggagaagggttaaagatacttgtagagattctcaacgaaggagctaaaacagagacgagactatactctgcttctgctctgttttatctctcttccgttgaagattacagcagattgatcggagaaaatccagatgcgattccgagattgatgaatatcgttaaaggagatgattacggcgattccgccaaacgtagcgcgttgcttgcggttatgggtttgttaatgcaatccgataaccattggcgtgttctcgccgccggagctgttccgattcttcttgatctgttgagatcgggggagattagcggcggactcacggcggattgtttagcgacgttggcgaagctggcggagtatcctgatgggacgattggggtgattcgtcgtggcggtttgaaactcgcggtgaagattttgtcttcgtcggaggattctccggtggcggtgaagcagcattgtgttggtctgattttgaacttgtgtcttaacggaggacgtgacgtcgttggggttctggtgaagaattcgttggtcatggggtcgctttacacggtgttaagtaacggcgaatatggaggaagcaagaaggctagtgcgctgatcagaatgatccatgagttccaggagaggaaaaccggttcggttgaaccgaatcttcaaagaggacggttcgttcacgcctggtga

SEQ ID NO: 172549 - DNA, 1260 bp, Arabidopsis thaliana landsberg
agaagacacaactagagtttcaaaccagagtgaagaagcacaatcccatcagtcaggagtaacaaaaacagaactagaggtccatctaagatgtgtaaactggctaaacatctagatgataaattcgatgttgaatttacagaattgggtgaacactttgggaatggttcagtcaaactgtcgtcctttcttggtgcactagtcagggagcatgtacctatgatacttgatgattggaggcaccttgatgaacttacaagacacccactttgggaggaaattcaggtatgtataccaatttatttagtttaccaaaacgttgctttgtaactcttagttaacaatctaaacttatgtaggggaggtttactttgcaagaagaatggcaaaaacaagctatttttaggcagatgggttgtttgtggaggtcccataaatctaagcttctttcaaaggttaaagctgcaaagacaaagcttagagtacttgagctaagaccaagcaacatcccatctgtcgcagtttggagcaattgggtgaagagtaggactagcagcacttttaaggttgtattcattgtgacatttgattttctaaagtaaatttgcaagaaaatattaataatgttgcattgggtttgatttgtaggtacaaagtgacaaatttaggcaattaaggagggcacaaattccacatactaccagtcggaaaggaatgattcgcctggctcaagagatggtaagtttatatagtttttgattacgctgtaatccttgaaaacaatagtgagttctgctggtatttaaattaatatttggtcgtagaaaaaaaagagttcagacccaaggaaggtgacaagaagcaaggtgtgggtagcaggactcacacattctgatgggagacctgtgaagccagagtttgaagagaccattgcaagaagttgtcctttattctattatcattttcttgatcaatttgtttatcaagatttgtgttttgtttcaggaaaaaataaagtcaattgacagtgaaatggactccacatctaatactaatattagagaagatgctgttagtcaagtattaggaaaggacaaacccgggagagtcagagggatgggcagaggggttactttttctaagctagccttcatgcaagttagagattcacatgtgcagcagcttgaagctaaacaagctgaattgatcagcaaacttgaagacttcgagaatgacgttcatgacttagctggcaaaaat

SEQ ID NO: 172550 - DNA, 561 bp, Arabidopsis thaliana landsberg; identical to SEQ ID NO: 73433

SEQ ID NO: 172551 - DNA, 444 bp, Arabidopsis thaliana landsberg
gaattcctgaacaatacttcttgtccaatctttcaggatttatgtgacgttggaaaccattcatatgtgacggatgaaagtaacggagaaaaagctcaatctccacttcaaggttctacagtagtcccttcactccgtgatacaaggtctatagctaatgaagttgactttagagaatcttttgaaactttgtcgcatccttcacctgataattcagtaacgtcacctgataagtgctgcaatatttgtggttccacatctgttgaacaagatgcttattcttctcgagacaaaggaacccatatctctgagagccctacacgggagtatatgcaaccacagaccaactaaggtatcaacgagcattcgccagcaactattcagtcgcctcctgtaacgcatccaaactcgtgaggagggtatgacggcagaactaccactacc

SEQ ID NO: 172552 - DNA, 529 bp, Arabidopsis thaliana landsberg
cgtggtcaatattctcgtcgctgacaaactgatgcagaatccgcggctctacgccacgttcatgctctgaatgttgtcggagctgttcgaggagcttccggaagtcggcgatccgccgaagccgaagctggtgttcttcttcgacgaggcgcatctgttgttcaacgacgcgcccaaagccttgatggaaaagatcgagcaggtggtgcggctgatccgctccaagggcgtcggcgtctatttcgtgacgcaaaaccccgttgacgtgccggacaaggtgctggcgcaactcggcaaccgtatccagcatgcgttgcgtgccttcaccccgcgcgatcagaaagccgttgcggcagcggcgcagacgtttcgtcccaaccccaagctgaacaccgcgcaggtcatcaccgaactcgggaccggcgaggcgttggtgtcgttccttgaaaagacgggccccccctcgatcgtcgagcgggtgttaaaccgtaacccgtcggcgcggatcgggccggtgacgccgcaggag

SEQ ID NO: 172553 - DNA, 872 bp, Arabidopsis thaliana landsberg
caatcatatacaaggctatccatctattcggattttccgcagaggcagtgatcttaggtgagaaaatgagctaaattagttccttaagtttacgattagcttcagttatgattcttcttgtcatgtacttaagcattttgtaaaactccattccctttttcgtgatcaattgttatctaatcttatccagggaggaccatgggaaccacgaacatgaatcttactatggagatcgggacacagatagcttagtcaaggtagactggtcttagttagattcgaccattaggattatatgattcaataatcacatccttatacctgctttttgtgtattcatataagaaactgtgtttccttgaaaaactttcatatacaataacatgactattccagatggtggaagaactgctcaaacctattaaaaaggaggatcataagttggctttggatggtaaatctgataatgcggcttcaacttttaaaaaggcaccagttagtggaggttgtcgaattgaaggatatgttcgcgcaaagaaggtaaaaatgtcgaacgtccaattttatgtgatgtccgatgattttttttcttgcttatctttcctcttttcttatggtgccattttgtcttttatattgtttgatctcaggttcccggcgaacttgtaatctcagctcattcaggagctcattcatttgatgcttctcaaatgaacatgtctcatattgttacccatctaacatttggtacaatggtttcagaaaggttgtggactgatatgaaacgattactgccttatcttggccaaagctatgataggctgaatggaaaatcgttcatcaatgaacgacaattggatgctaatgttaca

SEQ ID NO: 172554 - DNA, 514 bp, Arabidopsis thaliana landsberg
tcactattgatgttaacgtctttccgaggtccacgcaagctcttcatcgaatacagtggagatcaatctcaagcgtgagagcgacgacaagtgtgatgatgctcctctgttccaaatcactcaacttatcttaaaagacgtcgttaactttgatccacacaagacctctcctctcctcgaaacaatctttccagacagtatctcaggcactcgtctctgcgttgagatggctttagcatccgaacgagttccagcgccgtttgacatgtaccttcacgtcacagtgagattcgtcgaagaatccacttctagttctcctctagaaaacaagacatgcgctatttgtttggaggatatgtcacaggatgtacatgactatcaggagatgccgaattgtccccatgtctttcataatgactgtatctacaaatggttgggtcatagtaatttgtgccctctctgccgcactgttcttgaagatgaagatgacgacgattatccctactactcctaa

SEQ ID NO: 172555 - DNA, 902 bp, Arabidopsis thaliana landsberg
cgaacaatctactttgtctattgaattcaaatttgctgaggattgttgatacttactaatcttctctcactttgtctgtaggttgtgatctggtgggctggtctaatgagaggtgctgtatctatggctcttgcctacaataaggtaaattgaaagtttaatggatagtaaacagcgacatggtgattagtaaaaatctagcagataatttaacttctttatttctctgtgctctctaatgcagtttacaagatcagggcacacagaattgcgcgggaatgcaatcatgattaccagtacaataaccgtctgtctttttagcaccatggtaagatatctccctctcaggtttggactactaaatgtattttctctacagagatgttgtcaatgaggataaaccaatgctgagccgtgagacggatttgcattttctatatccggaaaactgttccctcctatttgatttgttattccaatgttttctggatcgctaacactgaaccctgataccggacatttaacatatgtttttttttttccacggctttcaggtgtttggtatgctaaccaaaccactgattagatacctaatgccacaccaaaaagcgaccaccagtaccacgagtatgttatcggacgatagcactccgaaatcaatccacattccgctcctcgatggtgaacagctagattcatttgagttacctgggagccaccaggacgtgccacgaccaaacagccttcgaggtttcctcatgcgccccacacggactgtccactattactggagacagtttgatgatgccttcatgcgtcctgtgtttggtggtcgcggattcgttccctttgtccctggttctccgactgagagaagcagccatgatcttagtaaaccttga

SEQ ID NO: 172556 - DNA, 171 bp, Arabidopsis thaliana landsberg
atgacgcagaagctcgtacgccttgtgatcgtctctctggctattactgtcactttacttcaagcaaaaaccgataaccaagaaggtaaaaacatttacggattgaattattaaacgaacagttttgatagattaatcaaattaaccgatcgagatattaatcagacaagt

SEQ ID NO: 172557 - DNA, 1455 bp, Arabidopsis thaliana landsberg; identical to SEQ ID NO: 52996
  unsure (1)..(1455): unsure at all n locations

SEQ ID NO: 172558 - DNA, 465 bp, Arabidopsis thaliana landsberg
gcccatgtgcaaaggaacgccaacctctggcggatcagcgacgacttctgggaccagtggccgctgctgctggagcagttcggccggctgaagcgctggaacccctaccgcatccccggctgctggcccgacgccgacatgctgcctataggcgtcctggacctgggcaagcgaaccacgcgcttcacgcccgacgagcagcgcacgatgatgactttgtggtcgatcgcccgctcgccgctgatcatgggcggcgacctaagaaagctggacccggcgacgacggccctgctgaccaacgacgaggtgctggccgtgaaccagcgcagcatgggcaaccggccggtggtctacgacgaccggcaggccgtgtggacggcggaaaccccgggcgccaaaaacaggtaaagcgctgttcaacaagggcgacgccgaggcgacggtcggcgccgatctacggcgcag

SEQ ID NO: 172559 - DNA, 376 bp, Arabidopsis thaliana landsberg
ccgcctccaactgttcgagtaagtcctctacaagggaattctcaaggaacaaggcagactgatataaccatgtttctactgattttatctatgttttacgtaaatgattttgattctttatatcatttctcgagtcttttaatgtcttttcaggtactctatgtagtgggacaacaatgaagataaggagacattttggagcaagagctaaggaaaaggaagctaaggatgattttggattcaagaatcagcgagtagtgtcgatcgacacagtcttggtgtcgatcgacaccagtttcggcccaacaaagtcctagatgctttcgagtttacagaagaggaaatttgccccagaaaacttccctatttgcattat

SEQ ID NO: 172560 - DNA, 521 bp, Arabidopsis thaliana landsberg
cctgcaggtcgactctagaggatcccctgcaactactttttggattttcgttgtgccactctaccatatacagtaaggcttcccaggtacgatgatcatccactcactctttgttatggtgaaaaggcaagcggaaaatattggtgtgatatttgcgaaagagaaacaaattcaaagacttggttctacacttgtaaagattgcggggtcactttgcatgtcttttgtgtacttggggatattcgatatgctaaaccaggaggaagcatcaacaacaatgttgaattggtgcctaacaatagatcttcaagaccactttgccacaactgtcattgtcattgcccaggtcccttcattcttaaggattttgtcgaagaatgtttttgttcttactattgtttcagccgttgcaaatcctggatgtccatcgtgaagaaggaaaaaggcatatgccctccatgggcattataaataaatacgatatccggatccgggattcagttatacaggaccacacgtga

SEQ ID NO: 172561 - DNA, 875 bp, Arabidopsis thaliana landsberg; identical to SEQ ID NO: 45484

SEQ ID NO: 172562 - DNA, 677 bp, Arabidopsis thaliana landsberg
taatacagcagtgtgaataataatttcttttaagacccttcaacatgaaaacacacaattcttaccatattttcttattattttgatttccacccacatctagaaatactattaatgtgctaattacaaattttttgggattagatctggtgtaggtaaaatgaatgctgatttggctatgattattaattctgatgaggttcagattgtggttagaccgattgagaaagatgcgaagagtgctgtgttgaagaagaatcctcttaagaatgtgatgttgaagcttaacccttatgcgaagactgcgaggaggatgtctttgctggctgcagctgagagagttaagtcgaaaaaggagaagcttgagaggaagaggaacccatcgcaaaggtagtaacttttctcctcttctattagagatttataattccctgctgcttattggtttatgtattcgattcgaagatgttgagtctgaacattctctctgtttccttagtgaacttagaatctctggtgtatattatctggcttgtttgatcaaccttcttgttgttgtcttctaggaggtgacaatgaagatcaaagcagcatgaaaagcgtggtaccagactatgatatcagacagtgactttactgagtttgacaacttcaccaagtggctcggtgtggaacag

SEQ ID NO: 172563 - DNA, 480 bp, Arabidopsis thaliana landsberg; identical to SEQ ID NO: 73254
  unsure (1)..(480): unsure at all n locations

SEQ ID NO: 172564 - DNA, 523 bp, Arabidopsis thaliana landsberg
atgtatgttacgaggcgtttgtcggaataccaaagaaacagatcggagttgccggaaagtccaaactccggcgtacttataattcaagatgaagagtcaaggccaacttgttgcttcggatcttgctaccgggctacactcaaaggcttacctttcccacagaacgcgaacctgattgtatcttacggcagcagccgcatatttcttaaccagacgattacttatatagatcctgtcgttttcattcctgttcttgatcaacccttatcttcaaaccgttactatgtcattaaacgaggcgggaaacactcagggtatgttatgacttagaattatgcaaaatttcaactttctttgttttgtgacgtgatttacaaggatttgttgtgttgtagaaaagcttcggctaatgcgaaagaggaagacagagtcccctgctgtttttgtttcagctatgttcctgaagctaagccacaagaagcagatcctaatgacatatatcagcaattccagatccatcaaa

SEQ ID NO: 172565 - DNA, 683 bp, Arabidopsis thaliana landsberg; identical to SEQ ID NO: 15464

SEQ ID NO: 172566 - DNA, 731 bp, Arabidopsis thaliana landsberg; identical to SEQ ID NO: 12185

SEQ ID NO: 172567 - DNA, 532 bp, Arabidopsis thaliana landsberg
  unsure (1)..(532): unsure at all n locations
gacccgcgaacttgccctgcaggtgaagcgcgagctggaatggctttatgaaatgaccggtgcgctgatcgtcagctgcgtcggcggcatggatatccgcagcgagcgccgggcgctggagcgcggcgcccatatcgtcgtcggcacgcctggccgtctctgcgatcatatccgccgcaaggcgctcgacatgtcggcgctgaaggccgtggtgctcgatgaagccgacgagatgctcgatctcggcttccgcgaagatgtcgaattcattctcgaagcagcacctgatgaccgccgcacgctgatgttctcggcgacggtaccggcagcgatcgccaagcttgccaagagctaccagcgcgacgccgtgcgcatctcgacgcagtcggaagaaaagcagcatgtcgatatcgaatatcgcgcgctggccgtggcgcgttcggaccgcgaaaacgcccccatcaccctgttgcgctattncgatgcgaaaaacgccaaagtgttctgctcgacgcgtgcggccgtcaatcac

SEQ ID NO: 172568 - DNA, 692 bp, Arabidopsis thaliana landsberg; identical to SEQ ID NO: 42203

SEQ ID NO: 172569 - DNA, 473 bp, Arabidopsis thaliana landsberg
  unsure (1)..(473): unsure at all n locations
ggcaaaacctgcccatgaacgggacacgcacgtgaataccacgccgacgaatctgccgcgcgcaagccactctggttacgacgtcgtcatcattggcgccggcgtgttcggcatgtggaccgcgcacaagctgcatgccatgggcaagcgcgtcgcggtgatcgacgcggccgagnnnnnnnnnnnnnnnnnnnnnnnnnnnnnnnnnagccgcgtggcacgatgtggctatggcgaccgggaaatctatgccgaatgggcatggcagtcgctgggtgagtggcgcgcactggccgaacgcgccaaggcgcccttgtttcaggccacgggcgtgttgtgggtacacaagcggcatgacgaggacgtggcagccaccgcgcgggtgttggcacgatacgagatctcgtttcagacgctgaatgccgatgagctgcggcgccgctatccgttcatgcgagtcgacgatgacgagt

SEQ ID NO: 172570 - DNA, 1814 bp, Arabidopsis thaliana landsberg; identical to SEQ ID NO: 25511

SEQ ID NO: 172571 - DNA, 604 bp, Arabidopsis thaliana landsberg
  unsure (1)..(604): unsure at all n locations
catgacgctcaaggtcgcccagggcggcaccctgcgcggctcggcgaacgccgccgactacgcctacggcgacccgttctacgactacgagaccaacctgcggtactacgcgctgatcaacgcccggaacaacgactacgcgcacccgctgcggaacatcaggatcgtcgggccgggcagcatcgacggcaacggctggaagcaggccggcaccgacagcgagggcttcccggtctcnnnnnnnnnnnnnnnnnnnnnnnnnnnnnnnnnnnnnnnnnnnnnnnnnnnnnnnnnnnnnnnnnnnnnnnnnnnnggcaacctcaacccgtacggcgccaggtccaacctgatcatgctgcgcggggtgcgcggcgtgtactacggggacttcaccgcgctgaacccggcccagcacaccatcgtcaacctgcacgaccaggacgtcacggtcaacgacgtcaagatcaccacctacgacgtgaacaacgcggacggcatcgagttcaaccagagcgacggcctgaccgtgatgaacgacgtcttaaacacaagggacgacgcgatgaacttcgcggccggcctcggcgcggccggggatggcacc

SEQ ID NO: 172572 - DNA, 3194 bp, Arabidopsis thaliana landsberg
  unsure (1)..(3194): unsure at all n locations
ttatctaaacttctggattttttttttgtcagacttacgaacttatcttcttaacattttctcttgccttattcactctttaacttaatgatccaactttttacttaatcttattcaggggacctcctaatgggactacagggaaagtaattttagtgtttgatgagaatccttcagctaaagtgggtgttagatttgataagccaatacctgatggagttgatcttggtgaactatgtgaaagcggacatgggttcttctgcaaaggtacttcatgttcagtagtgcattatttactggtccgcagcagctcttgtctcacacaatgtttcttctgttttcttatagctactgatcttcggttcaaaagctcgagttttaaggatctagttagattacttgttaacacattgtttgaggtacttttcagttgcaaagtaatgaattttttttttccttgtgcttatattttttttctgtttccaggttgtccattctgagagcagaacttgtccgtttattctatttttgaaagatgctgagaaatctgttgctggaaacttcgatttgtactctgcgttccaaatcagacttgaatatctcccagaaaacgtaattgtgatctgttcacagacacactcagatcatctcaaggtgaaggtagttactgtactatgttttgctccagttgcatgctatttctatgctttgagctcattttgcaaaagttatttattctctcttggaatagaaaattttcctagggcaaagaagtgtgtctccttttttctttatgtatatcacatgcattaaaataattgccacaatttccttgtcagcattttctgtatttcatatgttgaagtagacttttaatattgagtagctgttttctagccggctttcagttctgaaacgtacttgatcccttttcttttaatattgactaatgttactttcgctctatattcctaggatattggaagacaaaagaagcaagggaaggaagtcccacatgcaacagaacttctagcggagctctttgagaataaaattactattcagatgccacaggtctgttactctgttctactagacataagcattctcgtctgttgtctgtcaaagaaaccttatacttgatggagctaattattcccaggatgagaaacgtcttacattgtggaagcatcaaatggatcgtgatgctgagacttcgaaagtgaagtctaacgtcaatcacttgcgcatggtatgtctttcatctgaatatattgtatgatttttggctgtattcattgaagcctataactctataactctatcttatctctatttttcaaaacttcattgcttgactccaagtctcatgaaaataaattattgatagccgaccttctagaatatgttacgttttctctggtgtacaagattatctgttttaaaacaggggatttacagaagttttaagaacgattccgtaattgcatctcaattcaggtgttgcgacgacgtggtctaggatgtgaaggacttgagacgacgtggtctaggatgttcctgaaggatctcacacttcaaagagacagtatgttttccctttgttcggtctaatgacaatggaatgcttttctaaagagttgactttgcctttctgctttaggtgtagaaaagatcattggatgggcttttggtaaccatataagcaaaaatcctgatactgatccagctaaggttactttgtctcgagagaggtaattggcagcttgtccctgtgcattactgctcttaaatatctgtctcggtgtattgagtgcgaactttggatccttgcagcatagaatttggaataggactcttacagaatgatctaaaaggttctacgagctcaaagaagtctctcaaggttagcaaatttcctttggaattgaattgttgtttacttattttcattatggcaatggctcctattatgtaagaactgttaattttctctgtggctttcaggacattgtggtagaaaatgtgtttgagaagaggcttctaagtgatgtaattctgcccagtgacattgatgttacatttgatgacattggggcacttgagaaagtcaaagatatcttaaaggaactggttatgcttcctttacaacggcctgaacttttctgcaagggggaattaacaaaggtggttctcttctctgcattatgtttcagaaaactcccataattttttgaggtcctgcctcggatttatcacagatgtannnnnnnnnnnnnnnnnnnnnnnnnnnnnnnnnnctaatttggctttcctcaataattcttctctcctaaaatttggtagttaacgttatgcattggtggcttctcacccagtccgctcttgttcgtcttatgcagccttgtaaaggaattcttttatttggacctcctggaactggaaagaccatgcttgcaaaagcagtggcaaaggaagctgatgcgaacttcatcaacatctcaatgtcaagcatcacatctaaggtaactgaatactctatgaaaagttctaccgatttacacacgggatctttttttcaaacttgtgttcttcttaatactgcagtggtttggtgagggtgagaagtatgtcaaagctgtcttttctttggccagtaaaatgtcccctagcgttatctttgtggacgaggtaatttttctggttaattccttgcgaatttgcttgtaatcagagcactgacagtcttacaatgttattactgttttgtaggtggacagcatgctaggccgaagagaacacccacgtgaacatgaagcctcgcggaagattaaaaatgagttcatgatgcattgggacggtcttacgactcaggaaagggaacgtgttctggtccttgcagccacaaatcggccttttgaccttgatgaggctgttattagacggttgccccgtaggtaaattataaatcgcttccttgttggactaagctttttttgttaaattgacatgacagttataggttgtgaaaattttgtggtattgacttctgcaggttgatggtgggactaccagatacttcaaatagagcatttatattaaaggttatacttgcaaaagaagacttgtcccctgatttggatattggtgagattgctagtatgactaatggatattctggaagtgatcttaag

SEQ ID NO: 172573 - DNA, 605 bp, Arabidopsis thaliana landsberg
  unsure (1)..(605): unsure at all n locations
atgggagtggccggctttgcggtagctctgatggtaacttcactgataatcgccacttgcgctgatggaaaagagttctttcatcaccgggaaattaaagtacaaagatttttgaagcagcnnnnnnnnnnnnnnnnnnnntccattaaggtatcttacacaaatttcatatgcatgcaacatgcatatactccatgctttgaatattcgctcacaaatttcttttgagactaataattgttttgctttaatctttcttacagagtgaagacggagatataattgattgtgttccaataactagccaaccagcttttgatcatcctttgcttaaaaatcacaccattcaggtttgctatcatttacaatctctgggttgtttacacatacatgatcgcgttgttttctcacgtaggtaaaaccaagttttatcccggaaggggaaggtgactctacgtacaccaagaaggagacaaaagctactcaagtgtggcagatatatggagagtgttcacaaaacactatcccgatgagaagaacagaaaaagaagatatcttacgagcaaaatccctttgaaagttcgggaaaaagaatcatcaataca

SEQ ID NO: 172574 - DNA, 1299 bp, Arabidopsis thaliana landsberg
atggatccaattgctgagacaggtacattttgttacatcgaccccgagtaccagcaaacgggaatgcttggggtgaagtctgacttgtactcatttggtgtggtgcttctgcaaatcatcacagcgatgccagcaatgggtttaagccatagagtagagaaagcaattgagaagaagaaactccgagaagttttggatccaaaaatatcagactggcctgaagaagagacaatggtgctagctcaattggctttgcagtgctgcgagctgcggaaaaaggacagacctgatcttgcttcccttctgttgcctgcactgagcaagctaagagagtttgcaacagaggatcatgaagtacataactctgatagaacatttcatgtgtcacgtgctcacaatttggttcctctttccccaatatcttcctgtcaggttggtttcttagatactgcaataacacatttctaatcttcacctggaaaaggaataaaattaataaagttcattgattcctgagtcctctctttcaatcatgtagacagaggatgatgcttgggaaaatcctattgacagaaagattggaacttcgacgtaaatcaaagtgaagcgacattggctatctctgagatccgcgataaacttgttcagtttaagcatccgatgccatcccatacccaccacaagaaggtgatttacatgatcacaaacaagccaatgcaaaggaagttgttgtcagtctctcatgaattgtactccaccccaaagttgaatgttgaacttccattgtatcggagttcctatcttgtttatcaaacactttatttttggtctcatgaaaagaaacacatttattatagaagatttgtatccttcttgcaaaatcaactcatctagtcacttttgctatagagaatgccatctgtagcacataaaaaacttttctacgaaactagaaaccgaaatttgagagtatagtcttctttgaataaaaaatggtttgacagcattagctgcgaagaagatgcaaacagtcgcacacaaaaaaaaagttcttcttaaaaccagaattaagggaatacctgtcggagctgcaccagcaatgttagctgacagggcactttgtcaatttgggactatacgcgcttaggctgaacacttagactcgagacttaagagacaaaagcagaagttcacaacagatccacattacatcatggaattttttgtttaagtcgttacctggagaaattccagagatgacgatgagagacaaaaagcttcaagagaaactccagagag

SEQ ID NO: 172575 - DNA, 351 bp, Arabidopsis thaliana landsberg
  unsure (1)..(351): unsure at all n locations
atgtccctgaattctgcagctgtttataaccctgtcgtgcacaatagcgattggaaccaacctaagccagttcatctgcatcggaagattcacagctgtatcgttccaagtgctgggacacatgnnnnnnnnnnnnnnnnnnnnnnnnggcttcttcttctttggtagagaaggtcttaacttgcacgtggttgttggaatgataattgcagtactgggtatgatctggtacggtaatgcctcttcgaagccaggaggcaaagagcgacgaaactattctcttccaactacccgtcaacagaaactcggagctgcttcggattctgacgacaacgaagacaaagcctagta

SEQ ID NO: 172576 - DNA, 1210 bp, Arabidopsis thaliana landsberg; identical to SEQ ID NO: 20179
  unsure (1)..(1210): unsure at all n locations

SEQ ID NO: 172577 - DNA, 1204 bp, Arabidopsis thaliana landsberg
tggtggagatgccaagatggtcgcctcggagaatgagacagctgttactgtctctgagaatggaggtgacagagctgcagatgaagacgaaattgatcccttagatgcttttatgaatactatggtattacctgaggttgaaaagcttagcaatattgtgatcgatggtattttggattttaaaatgaatgggaaggaaactggtgaccaagccaaaaaaggttttaataaggccgcccttggtaggataattcaaggtgaagattctgattcagattactcagaaccaaagagtgatgatgatccaagtttagacgaagacgacgaggagtttatgaagagagttaagaagacaaaagcagagaaattgtctcttgttgaccactccaaaatagagtatgaacctttccggaagaatttttatatcgaagtcaaggatatctcaaggatgacacaggatgcagtgaacgcttatagaaaggaattggagctgaaagttcatgggaaagatgttccaagacccattcaattttggcaccagactggattaactagcaaaattttggatactctgaagaagcttaactatgaaaagccaatgcctatccaagcacaagcacttccaatcatcatgagcggtagagactgcattggggttgccaaaaccgggtcaggtaaaacccttggctttgttttgcctatgttgaggcatatcaaagatcagcctcccgttgaagctggtgatgggccgattgggcttgtaatggcacctactagagaacttgttcagcagatttacagcgatatcagaaagttttctaaggcattgggtataatatgtgtgcctgtgtatggaggatctggagttgcccagcaaatcagtgagcttaagcgaggtaccgagattgttgtttgtactcctggaagaatgatcgatattctttgcacaagcagtggaaaaattaccaatctacgaagggtcacatatttggtaatggatgaagctgatcgtatgtttgatatgggttttgagcctcaaataactcgcattgttcaaaatattcgacctgatcgtcaaactgtgctcttttctgccacttttccacgccaagttgaaactttggcacgtaaagtcttgaacaagcctgtggagaaacagaacggtggaaggagtgttgtgaataaagatataactcagggagtt

SEQ ID NO: 172578 - DNA, 539 bp, Arabidopsis thaliana landsberg; identical to SEQ ID NO: 23814
  unsure (1)..(539): unsure at all n locations

SEQ ID NO: 172579 - DNA, 454 bp, Arabidopsis thaliana landsberg
atgccaacttctgttagtctaagagaggatgatcctttgttgaaggatttgagtgagaagaagcacagtttcaggagaaatgtggtgtctttggccactgagttgaaagaagcgaggactcgtcttgcggaacaggagcggtcgtgttcaaaagaagctatgtccaggcaggttagcaaagttctgaatttatcagctattacttttttttgtgatttagtcttttggtttggatgttgagacttttgttgagctgttttcaatatgagcaggaggcagaaacaagagttaagagaatggaagatgaaatgcatgaacttgccaaggaactaaacgagaaagttgagcagattcgtgcttcggatgttgctactgagaaggttagggattggtttctttcacatttcttggttgtccaggttctctagttttgcttgattctgcttgaacacat

SEQ ID NO: 172580 - DNA, 295 bp, Arabidopsis thaliana landsberg
aagattttaattgtttacattgtccaccccaataaatgccctgtgaagttatctttgttgtgacctgtttagaaatttctatactttcagagcagcaaagaatgcagataaagatttatacgctgtaatgtcccagcggagagataataggaaagagaagttcgattcaatgttctcttcacttgtctctaggtatggtagcaatgctgactttgagccaaacgaacaagagttagaagctgctcagagaaaagttgaaagccggagatcatcgaagaagtctagaaaaaaataa

SEQ ID NO: 172581 - DNA, 490 bp, Arabidopsis thaliana landsberg; identical to SEQ ID NO: 64311

SEQ ID NO: 172582 - DNA, 544 bp, Arabidopsis thaliana landsberg; identical to SEQ ID NO: 40826

SEQ ID NO: 172583 - DNA, 560 bp, Arabidopsis thaliana landsberg; identical to SEQ ID NO: 32383
  unsure (1)..(560): unsure at all n locations

SEQ ID NO: 172584 - DNA, 546 bp, Arabidopsis thaliana landsberg; identical to SEQ ID NO: 3981
  unsure (1)..(546): unsure at all n locations

SEQ ID NO: 172585 - DNA, 512 bp, Arabidopsis thaliana landsberg
attcatcgatgtacaggcaaggttccagggggatgatggccttgtatatgtttcttttctcgagatattgacaatgtaccaacaaggaaacaaatccgtaaatgacttgtaccaggaggtagggttcttggtgggacattttgtgtgttgcacttcttagctctttggtttgattagctttgttatctttgcttgcaggttgttgcacttcttcagggtcatgaagatttagtcatgaagttttcaaacgttttcaagagaaccactggtccatcagggtcaaaatctgctagaagcagatgagtacattatagaagactgtctctgctttattttaggatgcttggaatataatgtttggggtacaagagacaaaaagagtacttctttctaacgagaagtgagtgtatagttatcatttgtagacatttgagattagtttgattcttactcatatgcttctatatttgagatcaatgagatgcataatggtttgggtaaatataagagac

SEQ ID NO: 172586 - DNA, 386 bp, Arabidopsis thaliana landsberg
atggcagccaacgaactcaagatagcggtcatccccggggacgggatcggcaaggaagtcgtccccgaagggctgcgcgtgctggaggtcgcggccaagcgcttcggcatcggcctgcggttcgaccacttcgacttcgcctcgtgcgactactatgccaggcatggccggatgatgccggaggactggaagtccaggatcgaaggtcacgacgcgatcttcttcggcgcggtcggctggccggcgacgatccccgaccacgtctcgctttggggatcgctgctgcagttccgccgcgagttcgaccagtatgtcaacctgcgcccggtccggctgatgccgggcgtgccctcgccgctcgccggccgcgagccgggcggcatcgc

SEQ ID NO: 172587 - DNA, 1396 bp, Arabidopsis thaliana landsberg
gtcctctgccttctacaatagggaaactgagcaagcttttcgagcttcggttatcgagaaacgctttaaccggagagattcctgttgagattggacagctgcaagatcttcaaagtgctttagatctcagctacaacaactttaccggatgtataccgtctacgatttcgacgttacctaagcttgaatctcttgatctgtctcacaatcagcttgtaggagaagttcctgcccaaatcggtgacatgaaaagcttgggatatcttaacctctcttacaacaaccttgagggaaagttaaagaaacagttctctagatggcaagctgatgcgtttgtaggcaatgcaggtctttgtggaagccctcttagtcactgcaacagagctggatcaaagaatcaacgaagtcttagtccgaaaacggtggttataatctctgcgatttcatcattagcagcgattgctttgatggtacttgttatcatcctcttcttcaagcaaaaccatgatcttttcaagaaagtgcgaggcggaaacagcgcattttcatcgaactcttcttcttcacaagctcctctgtttagtaatggaggtgcaaagtcagatataaagtgggatgacataatgaaagctacacattaccttaacgacgagttcatgattggatcaggagggtcaggaaaagtttacaaagcggagttgaagaacggcgagacgattgctgtgaagaagattctttggaaagatgatttgatgtcaaacaagagctttaacagagaagttaagactcttggaacaatcagacatagacatttggttaagctaatgggttattgcagcagtaaagcagatggtttgaatctgttgatctacgagtatatggcgaatggaagcgtttgggattggcttcatgccaacgagaatacgaagaagaaggaggttcttggttgggaaagaagattgaaaataacacttgggttggctcaaggagtggagtatcttcattatgactgtgttcctccgattgttcaccgcgatattaagtctagtaatgtgcttcttgattccaacatggaagcacatttaggagatttcggactcgccaagatcctaaccgggaattatgacaccaacacagaatcaaacactatgtttgctggctcttacggatacatcgcgccaggtacatgtctttctcgggtttcttaacttcgattcgattattgaacctaacgtttttgaaaccgttcttttttcgcagagtatgcgtactcgttgaaggcgactgagaagagcgatgtgtacagtatggggatagtattgatggagatcgtgactggtaaaatgccaactgaaacattgtttgatgaagagacggatatgggtgagatgggtag

SEQ ID NO: 172588 - DNA, 1861 bp, Arabidopsis thaliana landsberg
agagatagatcgatgggggttgtttcaagaaccgtgttccctgtatgtgaaagcttgtgttgcttttgtccggctttgcgagccagatcgagacatcccgtcaaaagatataaacatcttctcgctgatatcttccctcgatcccaggttttgcttcgatctctttgaatcaatccaccatttcgcattcctcagtaatataatgccattagccaaaacttgtcttgttctcgtgacctatagatagaacatgagtttcattgaattaggatgagattagtgtaattgttgctcatatccaagtcggagccataacgatggaacttcatttgcagagcaccttattactttaggcctatgtaataacactttcttgaaaatcgagttttggagaagcatcagctttttacactaccgaaacggttttttaaatccactatgcatgttctgattattgactctgtgaaagtctctcctaaattttgattcatggtctgcaggatgagcaacctaatgatcgaaaaatcggtaaattatgcgagtatgctgcgaaaaaccctcttcgtatccctaaggtgaattccgcatcaagttattctttgatattgggatatcgttgatctctacaacaactttctcatttccatttactgttttcagatcacaacctctcttgaacaaaggtgttacaaggaattgagaatggaacaatttcactctgttaagattgtaatgtctatctacaagaagctcttggtttcctgtaatgaacaaatgtatgttttttgtttttattatttcaacattatactgcttaaaaatggttttgtctttcctaatgagttatgtcttttacaggtcgttgtttgctagtagctaccttggtctcattcatattcttctagatcaaactaggtatgatgagatgcgcattttaggttgtgaagctctctatgattttgttaccagtcaggtgaataactcttgtcaactttacttatctcgatttgtcttataattgacaaagtctgataattaatgtatatttctgatttttttttcaggcagagggcacttacatgtttaacttagatgggttgatcccaaaaatctgtcctttagctcatgaattgggagaagaagatagcacaacaaatttgtgtgctgctggcctccaggccctctcatccttggtattcatattctctgtgtttttttttttcttatgattgagaacttgtaaaaaaaagtactgatatgatcacgtccattttccacaggtttggtttatgggagagttttctcatatatcagttgaatttgacaatgtaagcttgtatatgaactctataatgactgtatttatttcttggattgttgaatactttatcctctgttttgttgtttctcttcttttcaggtagtctctgttgtcttagaaaattatggaggccatagtcaatcgtccacttctgcagtcaatcaagacaacaaggttgcttccattgataaagagttatctcctgcggaagctgaaacaaggattgcttcttggacaagaatcgtggatgacagaggcaaggcaattgtatctgtgtaaatccttctactccagctttactttggcatgcttcttgttgtttttagaatatattttctgattagagagggtaataacagggaggatgctaaaaaccccaagttttggtcgagggtttgtctgcataatctggcaaagttagctaaagaagcaacaactgtgcgacgtgttctcgagtcactcttccgttattttaattttaatgaagtgtggtcctccgagaacggtcttgctgtatatgtgctgcaggacgttcagttg

SEQ ID NO: 172589 - DNA, 1052 bp, Arabidopsis thaliana landsberg
  unsure (1)..(1052): unsure at all n locations
atggcggcgacttgttctctgctcgcgtcctttctcctctgttttgctcttctctccgccgtttctttcgcggcggaccctttcgtctcctacgacttcagagtttcttacctcactgcttctcccctcggcgttcctcaacaggttcggtgttttactcacttacctttcctgaaaatctcgggttcagtgttttagtaaaggttctcgctttcgattgagagattcaatggcctcttagaatgccttttggtttctgaaactcgtattcttacctctggatctatatatacagtgtgtttgagttagctatcgcaagtttctctctttcggtctctaaagttgatttaaacccattaccatagaatctcaagctcgtcatttacatgggtttaggtattcaactaatggttactgttatatgaaaatgttgtttggcataaaaaaagattggtcttttaatgtgttagccttttttgatttgatgttatcttcgtatattcaggttatagcnnnnnnnnnnnnnnnnncaggacctctgcttaatgctactaccaactacaatgttgttgttaacgttttcaatcatttggatgagcctctcctcttgacttggtgagaccaagagctctgtctctttaaattacctccttattatatgagtttctaaagactaatatgcttcttggtttcttctatttgtctgttgaaataggcctggtatccaaatgcggcgtaactcgtggcaagacggtgttcttggcacaaactgccctattcctcccagatggaactttacttaccaatttcaagtcaaggatcaaattggaagctttttctactccccttcactcaactttcagagagcatctggtggttttggtcccatcgtgattaataaccgggacattattcctatccctttcccacagcctgatggtgaactcatcttcattattggtgattggtacactcaggaccataaagtatgtaatcaacacttctgtatatttcccttctatgcattttgtttttcagcacccatgttttat

SEQ ID NO: 172590 - DNA, 1928 bp, Arabidopsis thaliana landsberg; identical to SEQ ID NO: 64438

SEQ ID NO: 172591 - DNA, 869 bp, Arabidopsis thaliana landsberg
gcacagcatgcagtatctgctgtgaagtctgacactaaagataaagaaaggaaagaagaagatacaggaatcgaacttggattggtgattggcattatcatcggtgtgatcctcgtttcagcggttttagctggcttggttttggttaggatgagaaaatcaagatcaaaagaagagcctttggaagcaaacaacgtcgatcaggtcactgtttgcagcaacaccaccaggtccaccacatcaaagacagtaccagatctaagtaggctattactttgaaatcttgaatcaagttttcacacccattaacctaactagcttgattttttcaaatgcaggacgtgtaccgcaaaccatgagatccgcggtgattggactatcaccataccgagttttctctttggaggaactggaagaagcaaccaacaattttgatgcagagaatctctgtggagaacaggtaaaggaaaatgtaaataagacatgatttaaaattgatccgagtgtctaaccaatcgatatatctaatttcaaaacagctgtacaaaggttgtcttagagaaggcatagcagtgacagtgaggtgtattaagctgaaacagaagaattcaacacagaatttagctcaacaaatggaagttttatcaaagctaaggcatatgcatttggtcagtgttcttggacactgcattggtacttatcaagatcatcatccttatgccggaagctctattttcattgtccaagaatatatctctagcggcgtctttgagggattacctcaccggtaatacttgaaaaagattatcgatttcaagaacttatatttttgtgtgggatctaatgtattgggaaatgtttttggcaga

SEQ ID NO: 172592 - DNA, 612 bp, Arabidopsis thaliana landsberg
attctattgatggctctgattattccatagcaagacggaaccacatcgtaaaggtacaatttttttagatcagtcattatttagttggtctcatatataaccaaaaaccatgtattgtaagaacagtattacgaggattctggaaagccgacgcctagagttgaagtgatgaagttactcaagggaaatggatacttgtattcaaaagaatttgcaggagaatgtgagcctgtaatcattattgccaaaggacaaagttagttactccattttctattaacttgcaaagttcaatgtagtaatagtactaatatgtgaaattcttgatctgatgcagatgtacaaggaacatgcaagtacgggacacgggtcgattacattctggcatctccagagtcaccttacgaatttgttcctggctcgtactcagttgtttcttccaaaggtacttctgatcatcatatagtcaaagtcgatttagttataaccaaagagcgatctcgaggtagcttcaaacattcacgcaagaaagcaaagcagaagatctttcagataaaagctaatttgatgtcgaaagatacatggaaactaggaaatctgatgtcttcataa

SEQ ID NO: 172593 - DNA, 609 bp, Arabidopsis thaliana landsberg; identical to SEQ ID NO: 19107

SEQ ID NO: 172594 - DNA, 601 bp, Arabidopsis thaliana landsberg
ttaaatcagctaagttccgatctttcactaatagtgttcttagaaagtcaaagtttgcatttttatgttcttaatggatttaaagtgtgtagttttgtttaagtttgtataaggaagctgatttgttttgttgtggcaatttgtagaatggagaaactgtagcgatcaagaaaataagacttggtaaagagaaagaaggtgtgaatgtaacagctcttagagaaatcaaattacttaaagagcttaagcatccacatataattgagttgattgatgcgtttcctcacaaggagaatttgcacatcgtgtttgagttcatggagactgatctcgaagcagttatccgagatcgtaatctctatctttcgcctggtgatgtcaaatcttacctccaaatgatattgaaaggtcttgaatattgccatggcaaatgggttctgcacaggtactatcattggaacttagaagcagaacttgttctatctctaataaggtctgttttgatttaaacatatggatgatcattcgtatttgtttcagagatatgaaaccaaacaacttgatgataggacccaatggacagctgaaacgtgcaggtttt

SEQ ID NO: 172595 - DNA, 642 bp, Arabidopsis thaliana landsberg; identical to SEQ ID NO: 68058
  unsure (1)..(642): unsure at all n locations

SEQ ID NO: 172596 - DNA, 719 bp, Arabidopsis thaliana landsberg
ttaaagtttgatccaaatgaggccatacttttgtttgcagtgtttggaacgttacaagaggttatattttattttcggtaccaatgttaagtaacgtgacaaagaattaaaacttcaacagggcatgttggtgttgactttcacgtctctgatccctaatctacgaccaccaccttgcactgccgaccaaatcgctggacaatgtattccctatagctattcacagttatacgttttactctcaggacttttcttgttatcagttggaacaggaggaatcaggtcatgcagtgttcctttcagtctcgatcagttcgatgattcgactgaagaaggaagagaaggaagtagaagcttctttagctggtactataccactcatacaatcgtccagttagtttcaatgacactagtgttgtacgtgcagaacaacatcagttggggcattggattcgcaatcccgaccgttctcaatttgtttgcgcttcttctgctttttgtgggtactcggtattatgtctttgtcaaacccgaaggaagtgtcttctctggagttttcaaggttcttgtggctgcttataagaaacgcaatgcacggtttacttctggaattgactaccatcaacccttactagagacagatttacaatcaaataaactcgtactcactgatcaattcaggtaaaaattagttaggcccttactccgtttcgccattt

SEQ ID NO: 172597 - DNA, 1168 bp, Arabidopsis thaliana landsberg
  unsure (1)..(1168): unsure at all n locations
atgtggttgattcataaaggagccaacttggctctgtttctagcgttgactgtgttggtcaacggagttttcgggagattcatcgttgataagagtagcgtgacgattctaaaccctatggcaatgcggtctaagcacgatgcagccattgctaacttcggtgttnnnnnnnnnnnnnnnnnnntgatcggttccgtcgtttacgccggtcaaggagcttatggatgtgactcttttgacaaaactttcaaacccaaattccctcgtcctaccattttgatcatcgatcgtggaggtaactgtttcattcaaattgttccaaattgcaagtttttggttagaaatagaaagttttgtcatttacatgaaagttttgttgtatattatctcaaaagctttctcttttatgtcttagttttacatctttcatccaaattcttctgcaagttagataatcaaccaaatttatggttaagagatagaaagttttgtcatttacataggagacttgtcttaacctttaaagctctctcttttaagtcttactttacatctttcaatctccttttgatctaaatattactgcaaatttggtaatgttccaactttctggtataccatgcttgtctcaatcttaatttagtttgtagaagaacttaaaagttttctctttttaagttaattgagattgagacctttcaatttgatatatgttccatattatgtagaaagttctgttatttacatatgttgcataaatggtaaatatctggttttgattcattgttttgtttggcattagagtgttactttgcattaaaggtatggaacggtcaacaatccggtgtagcagcagttttagtagctgataacgtcgatgagccattgataacaatggattcacctgaggaatccaaagaagctgatgactttatagagaaactcaacattccatcggctttaatagacttttctttcgccaatactctcaagcaagctcttaagaaaggtgaggaagtagtcctgaagatagactggagtgagtcattacctcatccggatgagagagttgagtatgagctatggactaacacgaacgatgagtgtggtgcacggtgtgatgagcagatgaatttcgtaaaaaacttcaaaggacatgcgcagattc

SEQ ID NO: 172598 - DNA, 1855 bp, Arabidopsis thaliana landsberg
tccgtcgcaaaatttgcaggggaaaagtccctcgcataattgcgtcgaagttgcgagaaatttgcgtggaattcagaattcctcgcaaatgcatcgcaaatagcgagggatttgcgtgcacaaagaacgcctcgcaaattgcgacaaacttgcaacgtcactttattttgtagtaaacattgcaacggaattgcgagtcattggcaagttaggtaagcacgttttaaataattttaccggtctagttgctaggtgaacttccctcgcaaattcctagcaaaaaatatcagttcctagcatatccctcgcaacctgcctagcaaatcccttgcaatatttttttggacctctataaataaccaacataacatttacgaaattataactcaaatcataacatctacttacaaacaaaattaatcttttccaaaaaaaaaacttctaaagaaaataataatgtcttggggtggagagcatgagatttacacattacgaagttggatgtacaatcatagagatcaagcgaccggtaaggcgacgagagagtattatgacagactacgcggtttcatgtatcaagcgacaaacgaaccatttgctcgtgagaacggtacaatattatgtccatgtcgtaagtgtatcaatgagtaatatttggaatttaatgtagtgaataagcatctttataatagaggatttatgccaaagtactatgtttggttacgtcatggagagggttgtagtgatagagcaggaactagtaatacaaattatggtgtcgagcaacctagtaattttaataatgatgcgaattatggtcagcaagtacctgatcaatttggttatggacataaccaggaaaataaatttcatgatatggttatggatgcatttcatgaaactgttgctgcatttcctgaaaatattagtgaagatcccaacgtagatgcacaatactttaatgatatgttagatgctgcaaatcaaccaatctacgagggatgtagagaagggctttctagattatctttggcatctaggatgatgactattaaagctgataataacttgcatggattcataggcagaattaattaaggaatatttgccaccggataatatatcggctgagagttattattaaatacagaagttggtttcgagtcttgggtgtattcaatctagtattttaagtgatttgtgtaaacttcacaaattctatacatttgctgaaaatattagtgaagaatccaatgtagatgcgcaacgcttttatgatatgttagatgctgcaaatcaaccaatctaggagagatgtagagaagggctttctatgttatctttcgcatctaggatgatgaaaattaaagttgataataccttaagtgaaaattgcatggattgatggacataattaattaagttatatttgtctccagataatatatcggctgagttactataatataaaagttggtttctagtcttgggttagcatcagacatgatagatgtatgcattgcagttccgcgggaagccaagatatcagcctactgggggaagaaactactaccagttttgggttgggagtctaatgaactttagtgtaggttttgaaaaaagaaaaagcggattttagtgttagaagattttgattaaaggacttttgtgataaaagagtaaaaaaatatttttcaaagaagttaatttttttttgcttgaaatgaacaaataataattctttctgtaattaccttgattggattataaagttagccgaatttcaaaacataaaaacataaataacagtgttcttacgctattcttacattataatttttgaattattttgaat

SEQ ID NO: 172599 - DNA, 531 bp, Arabidopsis thaliana landsberg
  unsure (1)..(531): unsure at all n locations
cctgcttcccctgcgngccgaagatggcgcggcgagttctgggctggccggccgacaggcccgccaccttccatggcggcctgaccttcggcggcgggccgatcggcaactacatgacccatgcggtggtcgcgatggtccaggccctgcgcaagggcggcggcaagggcctgctgttcggcaacggcgggcactgcacccacaaccacaccatcgtcatcagccgcgaggcgccgcccgagaacctgctgggcctagactacgactacaacgccgaggccgacgccgcgcgcggctccattccgcccatgtcggacacctatgaggggaccgtggaggtcgaaacctacacggtcatctatgaccgctcgggcaatccgaccttcggggtcgtgatgtcacgagcgcctgacggcgtcagggtcgtggccaaggtcgcggcggacgacgcccgtgcgatcgccttccttaccaatggcgaggccgagccggtcgggtcttctggcgcgaccaggcgatcgggcgatacgc

SEQ ID NO: 172600 - DNA, 512 bp, Arabidopsis thaliana landsberg; identical to SEQ ID NO: 77908
  unsure (1)..(512): unsure at all n locations

SEQ ID NO: 172601 - DNA, 364 bp, Arabidopsis thaliana landsberg
cgaaaattggagtagatacctcaggatgtgtcgaactagcaaagcatgtcagattgaacaaccctaagctagtgaagtcaggttagatgataatcgggatgcttgattactcctcagatccgaagaaattcaaggtaatgtataactcagggttatagacgtactatcgaaatggcaatatggcatgtaaatgagcactaacgcgtattatgtatgtccaattcataggcactagccaactgtcaagcagatgtgtgccaagagcttggaataccggcagagcagctcgtactatctgtggacatgtcatctgacttatgcccagcagtaagggacatactgtgatctatcagtcttgaagagg

SEQ ID NO: 172602 - DNA, 1619 bp, Arabidopsis thaliana landsberg
aaataatttgtttagagatgtataattcttaatattattcattcgctatcttcaagatatgcaaaacatgcctagagaagattcactgtcagaacatatggagtcagcatctggagaagcttcagccagatacaattcagctcttgacatgacgctgaaggtgaagtagttaccaacaaatatatgattaagtattttaattgtcgtcttctgattcagctcattctagatctctttactttcttattctcgttgataagttcacagaaacatgtggtattgcaggccctcctgaacattaagattctcaaagagtatttgatgcacaatatgcaaccgtttcaagaccacttggaagaaccagttccttctgcgctacaaactttatttactgcttttgtgtcagaggacataaaaatcgagggagtctacagttgcctcttaagcgacttacttgtttccgttgaagaaatgttttccatggtttgtgtggagaaggtaaccttctaggcatggtgtttttctttttctttctgtcaataatctgctattttaatgacactctatctttactctattcagttgagtgatgctgatgctgctgaggtagttgtagccatctttgagttttggcattgctggaaatatcgagaaagagagagtttggtaactcgccttttcaccttggaggaaaatgaaagaatgagttgtataaaatgcagaagtcggccaaattatccagagcaacgttctcatggcattgttgtggctgcagattcaattagagacctgaaggtatgtttcatttattttcctccttatctttcctacagaaactagtgcttccccttataaagttgttatgtgtttatatatatgcagtgtgctctcggaaatatgaagtttgtggatatccttaaggtgacccgcatggaatataaaatgttatgtgacactagatcaggaggatgtggaaggacaaatattgttcatcatattataagtagatgcccgccaatcttcacaatcggtaaggtttgagaaacatgattgtgatcttatatatactcatttcatttataaagcagagttggtgttttgtggttttgcaacattagtgttagaatgggagaagagtgaaactgaaaaagaaatatctgaaacaacaaaggctttggagtgggagatagatatcagcaggctgtacgaaggcttagaaccaaacactaactaccggcttgtgtcaatggtagaaaaagtctcacaaatgattgtcctattgctcttctgtatttctcttttacaatgtgtcgggatatatgggaatgtgatgtaggttggttgcagtgaagtagaagaagaacacatttgcatagcttatgaaaagaaccgatgggtcaatctcaagcgtgagtctttagtaggagaggtaagataaaacagttgattttttgccttccttgagttgaattgtgactttagataggcctgacattgttgatctatgtgttgtgatgccataggatattggtaactggaagagtgtggtcaggttctgtggagaaaagaaggttcgaccagagattcttttttacgaagctgcgagatggatggcttaa

SEQ ID NO: 172603 - DNA, 2272 bp, Arabidopsis thaliana landsberg
gtgtttctcataatgtggacactcatgcgctttctgttggtggtaattccaaagaggaagatttggatgtccctggagtacctaccattgctgtcgccgaaagaagaataatttcaaagccgaagaaaagtgtttcttttgctgttgacactactgagctatctgattccaataaggaagatatgcaaggattcattgatgaataggtatggcatgtaagtacattcctaaatattttctaattcatatgtctgtataactgtactgtctacttcggtacagtatggagctaataatgaaagtgattttactacaaatgatggagtggattcttcggccgctgaagaagagatagttgacactagatttttattagttctttatgctggatccacacaatcccattcggtatgtcgtctactaatactcttaccaatctgttttaatggtgtacgtacatattcgcttaagaagttagttaaactatgtttcaggatagaggaaatgttgttgttggtaagactgtccttttaggttcaatgtctgggactgtctatgttacacaggaagggaggcctgtgcaagaagctactgttgacaccgagatggaagaagttccatctaatgtgtctgcaagagtttcagaggtagatcttgtggtaatcgttatatacagatttccatgactatatgcatatatattacattaatttctccacttatctaccgcttaactctattgtagcctatgtttcatgataatggaccaaaggatgttgttgaacctggcttagttggtacccatacaggggccgatgaaatagctgatgctgacacagagatggtagacaatccatcaggtttaccttcaacatctgcacaggtatgtgttagtcacttgttctttttctatatgtgtacgcccataagactttgaaacttatttttgtttcaggaagaagcaagagatgcttgtgctacgactgaagctaatggcagcgagtcagaagaaacttttgagcctgctgatggagatacagctcacatacctgccacaagtgtacgtacatttttgtcactatggtctgtgtacatagattgtttcatacataactaaaaagctgcttttcgatgataaattctacaggttgaggcgacagaagaatccaaattagtgacagggatggaagttgaaatacctgagaagacccacagtgatcccccatcaccatttcaagtagttaacaatgtaagctaactctagctgaaaataaagtgtactattaactgttcaaatgtataaaatttatattatgctggtcatacgggagttggataccaaagccgttggtgatttggctgcagctactgatgtggaggtaacaatttgtgtgtttcaattcctaatctcggaataacatacataggattatatgtgtacattatataggcttgtgtacgttaacttgcacagggagtgatggaagagtcgggtattgtcgaggggtttgtaggaaatgaggatcctaacccagggtcagatgaagccgactacaccggtctttctctacataatgtgtgttcctcttttctacttttgcctaatttatatattctttgtgcgatccttttttgttgtgggtgggtaaaaaccatgctggtggtgtcgcagcaaaagaagaaaaaaaatcgtccccaaaggtcccaaaaaaagtgaagaagcaacttgtctatgaacaggatgatgcccatcctcatggttttaaggcaaaaacagtcttggtgcccgatgtaccagctcaacagatagaggttgttatcagggctagaaatgtctcatacaaccccctggacatggttgacccttcaaaagtagaggaattcagcaatatcattagaggaccctcagtgtaagtacattatagtaaaatggattatttaatatctgaatcatcattttccaagtcttaaagttgttatcaaaaaattttctggatttacaggattcacactcttttcgggtttcgcaaagtgcccaacgagttttttgcgaaccttctaacacctggtgaatgggtcgaaagttcggtacgttgcatttatatacgtacattccttgttataaattgtacatagatgattaaatttttcgtggaagtgtacgtacactgatatattttttgaacatttcagcaaatagaaatgatggcaatgttgatgtggcacaagaacggggaacagatgatagcaaacagatgtattgtatggacat

SEQ ID NO: 172604 - DNA, 837 bp, Arabidopsis thaliana landsberg; identical to SEQ ID NO: 39483
  unsure (1)..(837): unsure at all n locations

SEQ ID NO: 172605 - DNA, 466 bp, Arabidopsis thaliana landsberg
agagagatatcgacaacaacaatggaagattcaagcaaaaaaagccaaaagaagaagaagaacaaaagcaagaacaacatcccaactgtttggttctcactcaagaaatctctccactgtaaatccgaaccatctgatgtccacgacccaatatccaccactaaaccgcaacaacacctctccacaatctccaccaagaaaatctccggcatatcatccggcggagccgccgtatgcggtggtggtttatcaggatgttcaagatcaatagcaaatctcaaagacgtaatccatggaagcaaaagacatttcgagaaaccaccaataagtagtcctcgttctattggaagcaatgagtttctaaatcctataactcatgaagttattcttagtaactcaacttgtgagcttaagatcactggtgtcggagacatggcttcacctgtcggaccagcggattccggcg

SEQ ID NO: 172606 - DNA, 529 bp, Arabidopsis thaliana landsberg
accgcgatgtgatgggtgcgaagaaaatccttctctccattatctcgggtgttgaagctgaattgcagatggacgaacttaccgagattacggaatatattcagatgcaggccggtgatgaagctgagatgatcttcggtcacggtgttgatccggatctcggagacagaatccgtgtaacagtaatcgctaccggatttcaggcagatgcaaagcttccgattacgcgggcgaaagctgaagaaaagaaggttcacgaactggagaagtcacagggatggctattctcagccgacaactctgtaaatgaaaagaaagaactacaaatgcgtcagcgcgaagaggctaaacctcagcagaagcctgaaccgaaaagagatttatttgatgataagtcaaccggaagcaaacctaatgagcgtgaactcatttttaccgggccgttcaataatatatccaataataatgcttccgacgatgacggtgaagagagcttgttgcgagacgacgactttgataccacgcaaca

SEQ ID NO: 172607 - DNA, 1577 bp, Arabidopsis thaliana landsberg
cgaaaggctcgagttgttatagggtgcgttttgcgtttactattgtatgcgagatttttgtttgtgttttgagccgagtattgataagggtgtctttacattgcagatgtggtaagaagcaaagtggggactacttggatggggttgcccctgatggtttgatgggtttaggacctgcagaaatctcggttccaagttttctctctaaagcgggactcatgagaaactcgttctcgttgtgctttgatgaggaagattcagggagaatttacttcggtgacatgggaccgtcaatacaacaatcaaccccattcctccagcttgacaacaacaaatagtaatgaacgatctctatacttatggtttttattttttaaccattttatgacagctttatcaattagtaacttatgttgatttttgtttacagttcaggctacattgtgggtgtggaggcttgttgtattggcaactcgtgtctgaagcagacgagcttcacaacttttattgacagtggacaatcatttacttatctaccggaagaaatatacagaaaagttgcacttgagattgacagacatataaacgctacgagtaagaacttcgaaggtgtttcatgggagtattgctatgaatctaggtacactaattctataaaacagatatatagataaagaagctccttacttggtttattatacagataattttctcttaatgttttttggattctcctttttgttttgatggagacagtgctgagccaaaggtgccagcgatcaaactcaagttttcacacaataacacattcgtgattcacaaacctttgtttgtattccaacaaagtcaggttagaccatataaacacattttatgattcctgctagaaagaattaaaacaagatttagattttgatgtattacatcgtcataaaccacttttcaggggcttgttcaattttgcttgcctatcagtcgtagtggacaagaaggaataggaagcataggacgtatgtattagtcttatacatattctctcttacatcctcagaccaatatcctccattaagtacactttatatttttcttttgcagagaactacatgagagggtatcgaatggttttcgatagagagaacatgaagctaggctggtcaccctctaaatgtaagattttgattttaacagaacattagtactaagatctcttgtaggatccaaagctaaatcgaatgataccggggttgttttatgcaggtcaagaagataagatagagccgcctcaagcttcaccgggaagcacttcatcgccaaatccattaccaacagacgagcaacaaagcagaggaggccatgcagtttcaccagcaattgcaggtaaaactccatccaaaacaccatcatcatcatcatcatacagcttctcttccataatgagattattcaactcacttcttctactacattggcttgcctctttaatgtagagataaagattgtcttatcaaaaaacaaaaactattttgccttgcatatatataagaaagttgatcttaaagtcttgcatttatatctcg

SEQ ID NO: 172608 - DNA, 1346 bp, Arabidopsis thaliana landsberg
agaaaagatttgccaagtccgcacaaatctcaatatagatgttagctgcattttggttcccgagtatttcacacataaaagtcatgaacatcccgttgtcatctccacatcctatagcgacacagatgagatcctctgtaatgcttgtcaggggacatgttggcaacctcatataaagtgtactaaatgcgattttgctatgtgttatacatgtgctaccattccaaacgaagtacactacaaattcgatgagcatcctcttaccttatgccacggagaaagtactggtgcgaagtgtgtgagaaaaaactagatacaacaaaatggttctacacatgcaacaaatgctgcactactgtccaccgtgaatgcttattcgggtcaactgtttatatgcagcctggttccagattcaactacgtatacggaacggtggaagttttccgcaacagtcataacagtcgactggtttgtcgtaaatgttttcattcgtgcacagattccgtctacttcagaggctacaagtcccaacagacgtttatttcatacaaaggctacgagcagcatgagatggctatttgttctttgacctgtttaaaactagagatgctcttctggtaggtcttaatgcaacttctgtttagctatgtaatgttatgctttacctaaagactacaagtatgttagatgttgttacatctattcatattatttgaagacttttgcataaaagttacttttgtttctttctgttgtaaccattaaaaaatttgttggatttgagatcgtcaaatgtttaacttgatgagactaattcatcgatctttctcgtcgtctccaacaaactatgttcttcaaaccattcttccaatctctcaattatgctccaacggtcgtcttcaagaagctttactggagatggtgatgttaggtcccgagatggggttccatggttacgatgctttgttgaatgcgtgtttggacaaaagggctcttagagatggtcaaagagttcatgcccacatgatcaaaacccgttatttacccgccacttacctccgaactcgtctgcttatcttctatggtaaatgtgattgtttagaggatgcacggaaagtgctcgacgaaatgcctgacaagaatgtcgtttcctggactgctatgatctcgcgttattctcaaactgggcattgttctgaggctctcactgtttttgcagagatgatgagatcagatgggaaaccaaatgagttcactttcgctactgttcttacttgttgtatacgtgcttctgggttaggtcttggtaagcaaatccatggactcatagttaagtggaattacga

SEQ ID NO: 172609 - DNA, 1477 bp, Arabidopsis thaliana landsberg; identical to SEQ ID NO: 18155

SEQ ID NO: 172610 - DNA, 583 bp, Arabidopsis thaliana landsberg; identical to SEQ ID NO: 63010
  unsure (1)..(583): unsure at all n locations

SEQ ID NO: 172611 - DNA, 697 bp, Arabidopsis thaliana landsberg
cagttgtgaagaagcagagactctgtttcagtgaactgcggtctttctccacggcggcgacgccgtatctgcttttaaaggataccaactacagggcggcgtctggtggatcagtggtcgacattaacctgtatgatccgaggaagaaggaaatattgaaaattcgcgaccaatatctgtcggaggagctccaatgtacgatgaagatgggatcttcgaggggatggattgttgcgaagacgatatacgagcccacattgtatctcactaatatcttcaacccgtgtgcctctgtttcgtcacataagggtttcaatctgcctccattggaggatgatgctaaagctcgtatctccagtatctctctatcagcctctccaaaccagcaagactgtgtattggcagtcaagtcctctagtagtccattcctcagcctgtggcggcctggtgactcggcttggacacgcatcaaggtcccgtttcctgcctccaatgtgatgatgtattctggaagagaccgcaagttctatctcctccccagggagagtaaggaagagtgtgagggtcccattgatctcatcaacactagctccgacgacttccctcaggtgactctgtaccagagattccctaactctgacatccccgtgagtaggcaagaacagcttctctcaagtatcaagactcgatacctggt

SEQ ID NO: 172612 - DNA, 1182 bp, Arabidopsis thaliana landsberg
atggcggaaagagtcgaagcatcatctgtaccagaaggagaaaatacaatagaagaaagagaagtaggagctatgtgggaattagagcagaaacttgatcaacccatggatgaagaagctaataagctcaacaacatgtatagagaaaaggttattactttctcattgaaattcatatgtagattttgagaaatggagaaaagttgaggtttttaaagtttgctctgttttttttttcatcagggattatcaatgttgatgcttctaaggctctcttttcattgtctagggattttttatggagatttagggacgtctccattgtatgtgttctacaatacattccctgatggaattgatgatagtgaagatgtaatcggagctctttctttgatcatttactctcttttgcttattcctctcatcaagtatgtgttcattgtctgcaaagctaatgataatggtcaaggtaaggtttagaccgcggtgttttgaaccaaccggttttggtgtatgctcattcggattgatcaatgttgttttgcaggtgggactttagctatatactcgttgctttgtagacatgctaaagtgaaactaatcccgaatcagcaccgcagtgatgaggatctcacgacttatagtcgaactgtatccgctgaagggtcttttgctgctaaaaccaagaagtggttggagggtaaagagtggaggaagagagctcttcttgtcgttgttcttctcggtacttgtatgatgatcggtgatggtatcttaactccagctatctccggtaaagcttctttactttctttctcgttgaggtttacaaaaaagatgataatagtttgcaaaaacaacttcttacagttctttcagcaactggtgggatcaaagtcaacaatccaaaaatgagcggcggtaacattcaccgcgccttatgtcagttcatgtttcgaatcggttcttgttttgctaacttgctacttttcccgtttgcagatatcgtcgtgcttgtggcaattgtcattttgataggattgtttagtatgcagcaatacggtacagacaaagtcgaatggctctttgcgcctatcgtgcttatttggttcctcttcattggagcgggtgggatgtacggcatctgaaagtaaccccccccgttttaaaagcgttttcgcc

SEQ ID NO: 172613 - DNA, 5350 bp, Arabidopsis thaliana landsberg
  unsure (1)..(5350): unsure at all n locations
aaaaaagagctggaggctgagcttgccaatgttacagcgggtgccaagcctactcgaaagataaggttactaccacatacgataataattgttgaattttcctaattattcattggcacatacatctaatatattttgacatttattggtaaggtaaaaccagatccagtttcaccgtaattcagcctatgctttgtgaatactcaatgtgcctctgtcaaatttctgaataattgaattgatatgcatgagtatttctttttggtttcaagacctttttctagcctgtgtgaattttaaagttgaaaaagtaaagctgcaatgagattatttctgtatttggctttcaagatctgagcaagacaaggaaccacaggcagaagctaattctgatgttgagggtgatgggcccagtgaagaagctgttgctgacagtaagtaccttgtacctcaatgaattgctcttcatcaagtaataatgttttgtttgcttacatggtcttttcttttatctacccgtactatcagcgcctcaagaaatagatgagtatgatcttatggatcctgtggacattttgacacctttggagaagtctgggttctgggacggagtggtgagttttgatgcttaatgcacattttactatgttttatttcttgtggttgtctttcactgaaagaacttttttatactataccacttacttctcatgttgattgcatgtggcacattacactaactaacgatgtatcccttatagaaagctacaaagtggtccgaacgtaaagaagctgttgcagagctaacaaagcttgcttcgactaaaaagatagctcctggtgatttttcagaaatttgtcggactttaaagaaggtagttaactttccatgataagaagtttaggcagcattgattatatgtatatgttataatccttgttatgttttattccgtaagtagaatattatctaattggtgatcatgcagcctgcaaacatctgtgcttattgattaatctgaagttcgaagttcatgcgtttcaaaatgttttctggtcgcaatcatagtttgtggatgctgctattgttcaggattcaatactgcataactaattttgctttcgttttgataatatttgtaaatatttccaattgcagcttatcacggatgtgaacttggccgttgcagttgaagctattcaagccattggaaatcttgcatgtggtttaagaacacatttctctgctagttcacggtttatgctgcctgttttacttgtgagtcatgtagcatctttgatcgaaaagtataattggaggaagacgcttccagtcttatgagtgttaatactatttcttagatattaatgggcttaagtagctgacttggttttagtccaggaattgatacaaaattgctgtctgtttgttccttgaacaggaaaaattgaaagagaaaaagcaatcagtcacagacccacttacacaaacgctacaaacaatgtacaaagccgggtgtttgaatcttgttgacgttatagaaggcaagagtcagtttatcttggattttattttatgaagctctactgatttgcttatgattatcttttttagatggcgaccaattttgcttaagcatctgtctttcatcagtttccaatcaactttactctcttttgcagatgtgaagacagcagtgaaaaacaaagttccacttgtgcgttcttcaactttgacctggttgacattctgccttgaaacaagtaacaaagctcttattctaaaggcnnnnnnnnnnnnnnnnnnnnnnnnnnnnnnngttagttttcttgcgccaaatggctcctaattatactttgactgaactttaaagcatggcactgttagattagctatatgcaacaagttagtgctaaaaagacagacaacgtatgtcatgttgcagtattatgattagttggtgtagcgaaagcctggagttttgattgcagttaccccttctaagtttgaaattaatcaatggtttgaacttataacttaattggatgcctgaaatttgtaatgatgtagtgtctcaacgatggaactcctgatgtgagggatgcagcattttcggctttggctgcaatagctaaggtattaattttatattgtgctttgtaacagcaacctttttgcgttgttgtctgtggtacattaatgttgtacacatgttagaatatgtggataaatgagtatcgtttacttcatgttttactattcccgtttgtttattatcttttggttattttagtctgtaggtatgagacctttggaaaggtcgttggaaaaacttgatgatgttagaaaaaagaaactttcagaaatgattgcaggctctggtggtggtgaccaagctggtacaagctcaggtttgtggactttttgtactcgttagctaaacatcaagttttgtttgcgggggttttcccattctaattggatgctcttttcatattaaagtgacagttcagtcttcagttgggagcacagccacaggggtacgcttctatctatatcttcagggtcaaataatatttagttctataaaacgttttctcttccccttttgatgggataagggtagggcatctgggatgtggagatgtagctggtattagatgccttgtcttttcccatcgtgttgtctaagagtttgaatgggttttatgtcttgtatctatttgcctagtcgctcttataacattagtgtctccacaatcgttataccacttcaaaatttatgcagaactcatacgcttcctttgtaaggaaatcagctgcaagcatgttgagcggcaaaagacccgctccttcggctgtgagttttttcatactttttcttttgtggctgttgaatcctgcaatcatttggggtttcatgacacttgcacgccttttccttttctcttttgttctcaattccactatgacttggacgtcacattgtatgttaacattttatagcaggcgagcaagaaggttgggactggcaaaccgggtggaggcaaaaaagatggatctgtaaggaatgaaggttcaaaatctgttgaaccacctgaagatgtcgaggtacatagaaatataattataaatggttatgtgatttactatgtccttcttcagactttgatggtattaatatcttattcttctttgcaatttagcctgccgagatgggtcttgaagagattgaaaacagattaggttctcttgtgaaaccagaaactgtatctcagttaaagagctctgtttggaaagaaagacttgaaggtttgttaaaggccttgaggactcttttattctcaaatactgttatcttcatcattagttcttacttccttctttgttcatttctttttgcgttttgcttgggtggttaatctcattttaagtggttcatcatcaaattttaccacacataggataaatttgttgcgcaaggttcctgaattgatattaaagctcgatttcatgttgcctcttattgcttcagatcaaagctgcattagcacatgtcacagaatctctttgctagctctttaaaaaaaaaagtatttatcagtttggtgattttttgcattatattgccgtgcagcaactttggctttgaaagaagagatagaaggtctacaagaactagacaagtcggtggaaatcttggtccggttgctgtgtgctgttcctggttggaatgagaaaaatgtgcaggtatgctctaattctatctaaaatcttcttatttgtagttttaagaattgatttcccccaaaatatttaaagaagtacatgagcatattacttgaaaatgcaggttcagcaacaggtcattgaaatcatcacttatatatcttcgactgcagcgaagtttcctaagaaatgtgtcgtactttgtattaccggttagtatcatatgaagaaatacctagtttcagttgatgaatgctattttctgacctcagttgttctcttttgagaattatttcttttctaatttgcctgatttttatattgattcattaggcactagtgaacgagttgcagatataaaaacaagagcctctgctatgaagtgccttactgctttctgtgaagcagttggtcctggatttgttttcgagagggtatgtgctggttcggtcaactttctttgactttcattttattctgatcataatgacatatggcttttgtttgtagcttttcaaaatcatgaaagagcacaagaatcccaaggttcttagtgaaggcttgttatggatggttgcggcagttgatgactttggtgtctcacttttgaaacttaaggttttgaagatttttctacttggaaattcccatatcctgatttccctgtttatgtaactgcagggtctaggttattaatattatgacccaggagacttttgtgttcatttggcaggatttgatagatttttgtaaggatgttgggctgcaatctagtacagctgccaccagaaatgctacaattaaactcttgggtgctttacacaagtttgttggtccaggtggctacgaattcctttaagctggttcagctttgtctaaattctgtttggtagaataacttatcttaacactgaatcaaacttatgtttttctgttttcagacattaaagggtttcttaatgatgtcaaacctgcactactaagtgcacttgacaccgaatatgagaaaaaccctttcgaggtacagttgtgtggattgccttgatttgtctagttcttgtttttcttgctgtacttatattatgttcatcaggggactgcggctccaaagagagttgttaagacgtcagtttcaacatcaacatcttctggagggttggatagcttacctagagaagatatcagtaccaagattacacctaatctccttaagggctttgagagtcctgattggaaggtgctcttgaaattggaagtcttcttttgttgtctacacctatcaatttctttgcggaaatttatttgaaactgtagagttaaaattgagtcttttaaacttttgtagatgcgtttggattcaattgaagctgtaaataaaattctggaagagctaaaataaacgtatccaaccaaccagaattggtatgaagtcaggatttttttttatttataattctctgttattttagctttttcattccaaaattattcatgaatccttattgttatctgttatattcttgtcacgtttggtaggagaattatttggtgatccacgagcacgacgtttagtcttgtgatgcaaacataaactcgccttggaggtgttgtagcagccat

SEQ ID NO: 172614 - DNA, 1021 bp, Arabidopsis thaliana landsberg
tgccactcaccatcgcaaggaagctgggattcgtccaatataagccatgcgacctatccttgatccttgctgataggaccttaagaaaaccctatggcatgctcgaagatctgcctatcaagattaatggagtagaagtgcctacagactttattgtgctcgagattgatgaaaaacttaaagatcctctgatcttgggaagacccttcttggccacagttggagcagtcatcgatgttaagcagggaaagatagatcttaatttgggaaaggatcttaaaatgaagtttgacatcagagatgatatgaagaaaccaacaatagacggccataccttcttagttgatgaaaagggtcagctagctaaggaactattagaagagcctgcttctaaagatcaggttgaaactgctttgactaggattggtgaagctagacatctccctagtgagactttgagctatgataaatcattagactcacacaaggcagtagtaggaacagagctctttggatcgaaaacagaggttagggcatcaaacaaggaaatctcaactcatactcgaccactatgctcgagcgtcaactcgagtaacctttcaacgtgtccagagaagtcatgttccaccaacagctccagtcacgcattttgcaatcaaatgataggttagtactcaaggagaagtctatatggcaggacaaagctataagagagttaacacacacggtgagagagctgaagaatcaaatcaaagagcttcatggaaaagcctacaaagcgcctctcgacatcaaggatgtcccaaatgatgaagtaattgctttggttagcaaagaagaatgtgaattcacattcgaacggtttagagaagacgactatcgagatgatcaaaaggaaacttacaagaaaagggacattgagtattcaactacagacctgtcaagagagcatgttgagtacattgctgtatccattgaggaagaagaggagatttcaattcctctatatcaccctccttaa

SEQ ID NO: 172615 - DNA, 573 bp, Arabidopsis thaliana landsberg
tgtgcagaaaacggagaaacgcttcaagttatcaattattaagttttgcagaaatttgagcctcactttgacggatttcaaagaattgctacggttcttatgtatctgtatgtaaaccctttataatctttctcatcagccatgtaaaaattttacaatatttgcataagttaatcttgttttcttttctcatcgtatgactaattagctcggacgttgataaaggcggcgaaacagttttccctgaagccaaaggaattaaaagtaaaaaaggagtctctgttagaccgaagaagggagacgctttactcttttggagcatgagacccgacgggtctcgagaccattcgagtaagcatggtaagaggcattgcctttctctaaacttgttttaaatcgtaataaacccttaattataacttgtttgagatcatgagatgtaaaacaaatttctcaaaaatttgtctgtttgatttaggtgggagtccagtaatcaaaggaaccaagtgggcatcaaccaaatggttccgctctcataagttcatcaactctacacaacattccaagaggtaa

SEQ ID NO: 172616 - DNA, 145 bp, Arabidopsis thaliana landsberg
  unsure (1)..(145): unsure at all n locations
ttagatgctatcanaatctggtgacacgtgtcttaacaataatggcggcactttctctacttcaggtttcaaatacgtatgggacacaagctttgccttcaaaggtcatcgacggccaaatcggttgctcttaaactcgaattga

SEQ ID NO: 172617 - DNA, 1177 bp, Arabidopsis thaliana landsberg
ggttttgtatttttttttaaaagattaggaggatttacaaaaatcacttaccctgggtaacttgtttttttttttttgaactttcttagacattttccccagaacttgacatatccaaaaaaggctgtaaagcacgtaaaagttccggggaatgttaataagattcttgaaagttctgatcttgttaaatatggatcatttcttgaggagcagtcttttccagaaattttgatgaaggccatgtccttggggaaacctatagttgcaccagacctcttcaacattagaaaatatgtatgctccttcttcccttgcatgtggcttgacggaaatgtgttgttgcatgttctctgtccatttgactttcactgactgtatttgcaatattaaataggttgacgacagggttactgggtatctcttccccaagcagaatcttaaagttctatcgcaagttgtgcttgaagtgataacagaagggaagatatctccattggctcagaagattgccatgatggggaaaacaactgttaaaaatatgatggctcgggaaaccatagaaggttatgcagctctactagagaatatgctcaagttttcttcggaagttgcttctcctaaggatgtacaaaaagttcctccagaactgagagaagagtggagttggcatccgtttgaagcttttatggatacatcgcctaataatagaatagcaagaagttatgagttcttagcgaaggttgaggggcattggaattataccccaggagaagctatgaaatttggagctgttaatgatgattcgttcgtgtatgaaatttgggaagaagagagatatcttcaaatgatgaatagtaaaaaaagacgagaagacgaggaggtaaggtttagatgcgaatttttgaaatgacgttctcatctccatttcctacatgccaatttgatttgttttatgttattacgcagctgaaaagcagagtcttgcagtatcgtgggacatgggaagatgtatataaaagcgccaaaagggcagaccgaagtaagaatgatctacatgagagggatgaaggggagctgctaagaaccggtcaacctttatgcatatatgaaccctattttggtgaaggaacctgggtcgtttctacatcaagatcccctctatcgtggggttggcctg

SEQ ID NO: 172618 - DNA, 597 bp, Arabidopsis thaliana landsberg
tagctgagtaacagccatcaccattgtcttggcaacatccttccctgatttcttcaactctctggcaccttctgctgaaaccatctctctcattctcatgcaggtatctctttctttacactttatccattatttagaaccaattagacatgtcattggcaaaatgggctatgtctgacccgttttgagcccttattctcattgttaaagcccatccctgattaagcccgaggacttcagaccatggtttgtttttgaatcttttttgttcaggtatttttcacaattctaggagccacagggagtgtatggaatgtaatcaacactgccccaagtatcttcttatttgctgctattcaagtaatggttcatctagcagtgactttggttctaggaaagctattctgtatcgacatgaagctattacttcttgcatcaaatgctaacatcggaggcccaaccactgcgtgtgccatggcaaccgcaaaaggatggacttctcttgtcgtccccgggattctctctggtgtttttggggtctccatagcaacttttctaggcattggatgtggagtttttgtcctcaaacgattatag

SEQ ID NO: 172619 - DNA, 1621 bp, Arabidopsis thaliana landsberg; identical to SEQ ID NO: 23191
  unsure (1)..(1621): unsure at all n locations

SEQ ID NO: 172620 - DNA, 951 bp, Arabidopsis thaliana landsberg; identical to SEQ ID NO: 16956

SEQ ID NO: 172621 - DNA, 754 bp, Arabidopsis thaliana landsberg
  unsure (1)..(754): unsure at all n locations
tcaaaataaatgtagttttagggttctgttttaaaaagtctttatattgcttgcttgagaaaactataaatgatagaattaaatatnttcactcttttgttttcttaatgtatatcaaaaatctatatgttggttttctcacaagatgcatgtgtgaattacaggtctgtataggtaccgtttaggggatgttttacgagtgactggtttccacaacaatgcgccacaattttacttcgtggggagacagaatgtagttctgagcatcgacttgagcaagacctacgaagaagaccttctcaaggcagtgaaaaacgcgagtctcctgctcgagccacatgacctgatgctcatggatttcactagccgtgtagatctatcctcgttgccaggacactacgtgctctattgggaacttggtaacaaattcaggaacgccaagctcgatcccaaatctaatgtcttggaggaatgttgcttaaccgttgaggagtctctcgactctatctacagaaaaggacgaaaaaatgataagatcattggaccacttgagattaaggtagttaaacctggcgcttttgatgagctcatgaatttcttcttgtctcgaggctcttctgtgagtcagtacaagactccaaggtcagtgacgcatgaagaagccttgaatatattggagtcgaacgttgtttccgagtttcttagccggaaaactccgtcgtgggagctacatgagctacattccagccgttaa

SEQ ID NO: 172622 - DNA, 951 bp, Arabidopsis thaliana landsberg
cattggattctacttcagtagcttggtaacgttcataaaactttagctgaataattgtttcagttgtagatgagctctaatttcttttgacgtgtgtacagatttccgtgatcgggatttatatttatctctatggtcaactctacctcgtactcagtgggttgcagaagacgcttattcttgaggccaaggtgaaaaacataaaatcattggaaacagcccttgcctctcaatcatttatccagctaggtctcttgaccggtctaccaatggtgatggagattgggttggagaaaggatttcttatagcctttcaagatttcatactcatgcagctacagcttgctgcattcttcttcactttctctctaggaactaaaacgcattactttggcagaacaattctccatggaggtgccaaatacagacccacagggcgtaaagtagtggtgttccatgccaacttcagtgaaaattacagattatattctcgaagccatttcatcaaaggttttgagctcatgattcttctggtcgtctacgagttgttcaagcatacatctcaaagcaacatggctgactcattcatcactttctcagtgtggttcatgtcttttacttggttatgcgccccgtttctcttcaacccttcaggctttacctgggaaataatagtcggtgactggagagactggaacaggtggatcaaagagcaaggtgcaatagggattcagcaagacaagagctggcaatcttggtggatcgacgagcaagcccatctacgtggctctggtgttggagctcgctgtttggagataattttgtccctcaggttctttgtgtatcagtatggtttggtatatcaccttgacattacccaaagcaacacaaatataatagtctacgcgctttcttgggtcgtgattctcgccggatttttgcagtaaaggt

SEQ ID NO: 172623 - DNA, 1014 bp, Arabidopsis thaliana landsberg
atatgtgcggaaagccgggacattttgcaccagattggtcaacggtcgtacaaactaaagtgccaaatctggcatttgttacttgttacacttgtggggagttaggacatgtgtcaaatgtatgcccgaataagcaagggggactaaagagtaaccgagtgggagcttgtttcatttgtggagacccagggcattatgctaacgcatgcaggcaaatatagtagtataaccaaatggtaaccacccaccgccagttcagaaagctaagggaccaccggtaaagaagcaagccactccagcaaatgtttatgccttagatgtagaacctaccaaaccttcagggccgccaaaaggtcatataacaggttagtatgggttcttacttttcttgtttatgtgtatatgagtgattgattgttgtgtgcatagtttactagttaaatattgcatatatcattttaatatgcattagggacattacttgtcagtggtaaccccacgcatgtattgttcgattcgggagggacaaatagttttgttagttctgacgtggccgataagttaggtgacgggtatgagaaaagagaagtgaatgttttggaacataccgcgggaaaccagccacccttgcagacccgaattgtgttagtaggaattcctgtagttatccaggatacaattctacatgcaaaccttttggtaatgccaatggaaatgttcaaagttatcattgggatagattggttgtcaggatatcatgcccatttagattgcgggcggagtagagtaatgttcaaactaaggaatcgacgacaactcacttattgtggaatcaatctaagtaaaattgcttcgttcatgtcagcactgaaggttgagagtttactaagggaaggagaagtctaccttgtcactttaaccgccattggtggagaagttgaaaatgacccaaggattgaagagatctcggtggtgaacgaatttgaagatgtgttcaagcccttggaaggataa

SEQ ID NO: 172624 - DNA, 421 bp, Arabidopsis thaliana landsberg
  unsure (1)..(421): unsure at all n locations
accatgaccgaagcctacatctacgaccatgtccgcacccccaggggacgcggcaagaaggatggttcgctccacgaagtgccgccggtgcggcttgccgcgcatacgctggaatggctgcgcgacaggaacggcatcnnnnnnnnnnnnnnnnnnnnnnnnnnnnnnnnnnnnntcgatccggtgatggaagcgggttcggtgattccgcgcgccgccgcattcgaggccggttactccaaccgcgcgccgggcatgcagatatcgcgtttctgcgcctcggggctcgatgccgtcaacctcgctgccgccaaggtggcacagggggccgacgnnnnnnnnnnnnnnnnnngcgtcgagagcatgagccgggtcggcatgggcatgtcaggcggcgcctggccggtcgatccttacgtcg

SEQ ID NO: 172625 - DNA, 581 bp, Arabidopsis thaliana landsberg; identical to SEQ ID NO: 46856

SEQ ID NO: 172626 - DNA, 464 bp, Arabidopsis thaliana landsberg; identical to SEQ ID NO: 51583

SEQ ID NO: 172627 - DNA, 511 bp, Arabidopsis thaliana landsberg
  unsure (1)..(511): unsure at all n locations
tcccgcgccatttattgatgacaccgttcgatcaggttacattaccagacggaagtgtaatccatggacttattaacctgccggccgtatttattgtgatagtgttatccctggtcctcattcgtggtacgcgggaatcttcctgggtcaataacattattgtccttttgaaagtatccatcgtcatcgttttcattgtgataggatttaagtacatccgcccggaaaacctgactccctacatccctgctaatacaggcacctttggctcctttgggtggtcaggtattattagagctgcggcgattgtttttttcgcctacatcggttttgatgccgtctccaccgctgcacaggaaacccgcaatccnnnnnnnnnnnnnnnnnntggtatcctgggggccctggccatctgcactgtgctgtactatgctatctcgcctatgtgatgaccggagaagccaactaaaccacttttggccagggaaccaatgatctggccgctgtagct

SEQ ID NO: 172628 - DNA, 1278 bp, Arabidopsis thaliana landsberg
gcccttcccctccttttttttctggactccaaccaaattcaaaactcttcaaggggcatgggactttctttctacacatcaaaatcaaatcgcctcaagcttctaataatcatcctaatcctatatctgggcgtttcaacaacctgacacttgatgagttgcttgatagtcccggtcgtgcatctctgacgagagtagaccttaatcgtcctttggaaactctttggtaggttgatgtccttcattcgaacaataattaggtttctattatggtttaagggttaattgtgtagatgttttgtttggtttagcataacaatctggtaaaatgttttggtttctattatggtttagggttagttgggtagatgttttgtttggtttagcataataatctggtaaaatattttggtttctattctggttttagggttagttgtgtagatgttttgtttggtttagcataacaatctggtaaaatgttttggttttagatgattatactaattagtccgattgaattatttttttaggtttaacgaagacccttctgttgctggcactgtccgcagcatatttaagagagatttcaaagaaccacatgttaattggacaatgacaccgcaactagtgatcactcgttggtttgaaacttttgctgtaagtgcaattggtgtcttgttatcttgtgctaatttagaaatttgagtgctttgtatttggctgttgtgtaaagatgatgtgactatgttttcttgtgttaattttttgacttgattgcactttttgatatatcttctgtctgttttgtagcaagtatacaactgggaccgtgcaataaactagagagttaggatatagtttgaagcaaagctgaaggataggatgtgcgatcaaatctctcactgtaagggaaactggaagcttgataacattgtattttactcattctagacatgtatttatcatcatttagcttagtgatcactcattatttcatatcattttgcatcacatttagcttattttgcacacctaggcatttaggatcatcttgcatacatattgcatgttttggtgtgttttcaggtgcagaaggagtttacaaggattatactcgaccctctactctatcaagccaggagggaagcagcagagcaaccactcgacctttttactcgatccaggcagccacagaggaggcagcagacactactcaaccctcctactcgatcccctactcgacccaatcactcgaccaaaggcgacctactctaa

SEQ ID NO: 172629 - DNA, 951 bp, Arabidopsis thaliana landsberg
ttgaaccattgattttagattctagtgtcttattgtgagagttgctttgttagtggactcttcactgttggctcactttttttttttgcatatgatcttgcagagaaaatcacttccagagttttggcgagatcgtcctgtagtaagttgcttttctctggtcacatatttaactaccgcaccgtattaagttattaacagttcctccttgcccgttagctcatgcccattcgattcctacatgttttactctgtagaatctggcaggcatttacagtttgatgaccaggacacgatgtgttgtactaatgtaatcttattgtgtagccagctgaaggttggaaggaacacaactgtatacctgatgagcactatgttcagacattgctatctgtaagatcaatgtttgatccaaccatgtgaattgttgtttagaaataaatagtattactaatcaaatctggtaatgcttcttcaaatttcagcaaaagggtgtagatagcgaactcacacgaagatcactgacacactcagcttgggacctttcatcctcgaaaagtaatgaacgtcgtggatggcatcctatgacttacaagttttctgatgctactcctgatcttatacagtccattaaggtaagcatccgtaagaccaacattttatttggtagaaatgaaactatccattacaatgtatgtatctcttgttctttttttcatgccatggctttagccctcttacaaacttaaaacataaatagaatctctaactaaacacattgattctcagggaatcgacaatatcaactacgagactgaataccggcgagaatggtgtagcagtaaagggaaaccatcaccgtgcttcctcttcgccaggaagttcactcgtcccgccgctctccgcatactccgtgaagtaaacttttctttgactatcatagcttaaact

SEQ ID NO: 172630 - DNA, 801 bp, Arabidopsis thaliana landsberg
gaataattaggatttttttggatattttagttattttgtgtatttttaaatatattcaagcaaaattactagtgttgttttagaaatttttaaaattttcaagtaatttaatagatttacatacaaaattttagtatttcaatatataaataaacccaaacccaaacccgacccaaaatcttaaattacccgaacgggtcttaaatttttaaacataaaatacccgacccgaacctgacccgaatatccgaacgcccggggtaagtttggacgtgctgtcgtaatatacattcttttgcaaaatgtgaaggtgatgattaccaataggaaggaaagagcagaattgttagaagctttggtcatcagcaacaaagatgtgacaatccctcgttttcaacaggtatggtcatatataaaataatatttctccatactataagaatgctatatatatttatacaacttaaatctaaaatataattaaaatttactacttaacgcatcaattgatattattattcttttttggtttggcagaaaatacatcttctgtggggcgaaagtgatcaaatttttaaccttgaatttgccaagagcatgaaagagtaagtttcaatacagtacttttttcttctttaattacataaatttagtctcgtttatattttgttttaaaggcaactaggcgaaaatgcaacaatggagagtataaaaaaagcaggtcacttggcacatttggagagaccttgtgtctataacagacgtctcaaaaagtttcttgcttcagtttactccgaaaac

SEQ ID NO: 172631 - DNA, 713 bp, Arabidopsis thaliana landsberg
acggtttacaagggttgcacaagaagatttcgaggtaagctcttattgaattgtggtatttgcaatgtatagagtatcaattatgttaagactttcttgtctttgtttcagatgtcacatttacagatggagtttctttgtagctatctttcggagttgagcatgttagactatcaatctgtgaagtttctttcgtctactgtggctgcttcagcggtgtttctcgctaggttcatcatccgtccaaaacaacatccctgggtaaagcattttgcaaagtggttctcgttctaattctgtgttctctactttatataagaagctaaagctctggtgttgaatgtaacagaatgtgatgttggaagaatacacacgatacaaagcgggtgatttgaaagaatgtgtggctatgatacatgacttgcatctgagtagccaatggggagctctataagctatcagagaccaacacaggcaccataaggtaaccctaaatactattaaatgataccttgaagaacactgttcttgagattcacatgccattctttctatttggctcaatacaggacaagtgcgtagcgacaatgcctgtatcaccacagctgactcttacggtttttgcagacgtcaacatttatagacaacttttggtcatcgtgctcaatagtataaaaccaggaagcggatacactggtttctttccttggtga

SEQ ID NO: 172632 - DNA, 854 bp, Arabidopsis thaliana landsberg
atgttttctgcagttatgctctgttcgacaaggctggtaaccaagtttctcaagagttggtgacaaaagttggcgaaaattttgagcacattctggaagaggtgtgtacttggtgtccactttctcttttattatgttttatggatgttgcgcctctttgatttactaaacagttgtttcacaaatgcagatctgtaaagtcagggatgagcaggacgaagacatgtcaatagctcaagccttttctattgtatttaagaggaaccctgaattgaggtatggaaacatattgtctcaactcattccgttgatttgttacttatccgcttttatatttgttgcatgcttaattagattttcacttataggttggagggacttgcccataatgtgcttcagtggtacttgtgccgcatggaaggatggtttgctgctgatgctgaaaccatctcggcaaagtgttgggatcaggttagtaacttaacttctatgtctgtcctcggtttagtggttgaggtatgtccccgtttattgatttgttaattgaaacattcacaggaagaactgttgcccggtggacatggtcttatggttagagggtatcgccctgtaatcaacactctctcgaaaggtcttgatatacgactaagccacaggtacgattcatttgtcgaaggagtttccaccatttaacgagtctgcagctaaaaccttattggacttttgttttgtcagagttaccaagatttcaaggcgctacagtggtgtgaaggtgactacagagaaaggagacacgtttgttgcggatgctgcagccattgctcttcctctaggagtcttaaagtcaggaatga

SEQ ID NO: 172633 - DNA, 2169 bp, Arabidopsis thaliana landsberg
tccggaacgtcccaaagattctttttcccatggcttgttgcttggattttcgtctttttaggtttgcatataactgggcccagacttcaggctcttccccatttgagatttaacaaggacggcaatcttctagccgttactacggcagataacggatttaagatcctagctaatccagctggtttccgatctcttcgagcgatggaaactccagcttctgaaacgatgaggactccagttgatttcaaagctgtaatgtttctcaactttgtattacattttttcccttttttacatccactgtcattacaagctgtctcggtttacacactttggtatattctgttaggttcctggtgctcctgttgcgtctgtcaattgtaaagttgaacgaggctctcctgttagacactcacaaatgctggtaaaatcactcattaaatgctatgtttctagccatttctataatttattattctgttctggattttcggttgtaaatgaagtgaacttccatttgtcgaaattgtagtttactattctctgactatagtagttgactgtttccgatttttttgtcatgtttaaaaaaaatatttactaatcttttttttctgaatatcctcaagaatggagttgatccctcaaagtcgagaatcgatgactcaacagacaaaccaaaatcttggcaattagctgaaatcttggacccttcccagtgtttccaagctactttacccgataccgctggttcttccacaaaggtttgtgcagttatctttctcagaaagttgttggatttctataaatgttttgaaattgaggcttaattttctcatgctgcgtgggaaagcaggttgttcagcttctgtatacgaattccggtgctggaatcttggcactaggttccaatggtatccagagactctggaagtgggttcccaatgagcagaaccctagtggaaaggtaatcgaaaaaaagagtttgagagagcttaatgcatgctgtctgcggttttaaagagttagagatagcttaatgcatgctgtgtgcggttttatttaagtactgtttattatgcaggcaactgctactgttgttcctcagcattggcaaccaaacagtggtcttcttatgaccaatgatgtgtctggtgtaaaccttgaaaacgctgccccatgcatcgctctctctaagaacgactcatatgtcatgtctgctgctggaggaaaagtctcgttgttcaacatgatgacttttaaggtatatattatctatatgaacttaaaaaaagccacaagatttctaactgaaaatgttctcacactaatctagtaaactcttttggttgttctaatttccacaaaaaaactattggccttataggtgatgacaacattcatgccgcctccaccagcatcaacgtttttggcgttccatcctcaggacaataacgtcatcgccattggaatggaagactctacgattcacatctataatgtccgagtggatgaggtaagtagtttctagtactaaccattgccacttatgtagtctttttgatctatgacaaggaaaaacttgtgaaccttacgttttttgaagaaatggttctcatagcttcacatatgttttacagtttaattttcccctcactgctaatgttgccttaaaactctatcaacgatctgaaacttgcatattgtgttccatcaggtcaaatcaaagctaaagggtcaccagaaacgcatcacaggcctagcattttctacagccctcaacatcttggtttcatctggtgctgatgcacaggtgtgttatgctgcgtcttgttgttgttgttgttgttgttgtcctgtagtaaatatatctcaactgaagggaaaaatgcttgattattttgtattgtttccttgctggattttctaccgttagacttatctaatctaggaggatacttattcttcctgttgccttctcttagatctgcttttggagcattgacacatgggagaagaggaaatccgttgcaatacaaatgcctgcaggaaaagccgtcaatggagacacgcgggttcagtttcatgtggatccagtgcgtattctggtagtccacgagacacaactgggcgtatttgatgcttccaagatggaatgtatccgacagg

SEQ ID NO: 172634 - DNA, 1511 bp, Arabidopsis thaliana landsberg
atgggtatacaagggcttttgccgttgttgaaatcgataatggtaccgattcatatcaaggatctcgagggttgtatcgtcgccgtcgatacatattcatggctacacaaaggggctttatcttgtagccgagagctctgcaagggattacccaccaagaggttcgtctctctccctcctctcaagttgcttgatgaatcccagatatagattgataatgattttggttttgcccaattagtagaaagtgggtttctttgtctcgaagtctatggtcctaattcgttatgtaaactctgaaaaatcaaaccttttctgggtagtatttgatgggcatttcgatttctatctcttgaggatgttaggtaaaccaaactcgaaagatttgggtgttctagaattttcaccattaggcttgttgggtaacgtgattgagatctcgttttacactttaagatgtgttctcgtgttactgttctggttctggttttgtagaagataatgagttttactggtgtttaatctttcaggcatattcaatactgtatgcatagagtgaatttacttcgccatcatggagtgaagcctatcatggtctttgatggaggtccgttaccgatgaaactagaacaagagaataagcgtgctaggtatgcaaacattggctaactaatataagcagaatatgcaaatgtatgtttgttttcttggttatcatcttacaagtttcaaaccaagtcatttcttttctataacaatcaagttcaggtccagaaaggaaaatcttgctcgtgcattggagcatgaagcaaatggaaattcctcagctgcttatgagtgctactcaaaggccgtagatatttcaccttctattgcacatgagttgatacaggtaacagtactcttctcctgataaaaagattcatagttgtctttaattgctttgttttccatttctttgaaccgaagttttctaatttctaccattcaaggttctgaggcaggagaatgttgattacgttgttgctccttacgaagctgatgcgcagatggcattcttagctattactaagcaagttgatgcgattatcactgaggattctgatctcataccttttggctgcccaagagtaagcctttctgttacactttgcatgagatatatgcagttcatcagaatttccatttcattactggtatatagaattttaattccttatcgacacgacactagagtataattcaaactttcactgctaatttttatgtaatagatcattttcaaaatggacaagtttggtcatggtgttgagtttcaagcctccaagctacccaaaaataaggatctcagtctatcaggattttcaagccaaatgcttctcgaaatgtgcatattaagtggctgcgattatttgcagtcacttccaggaatgggactcaaaagagcacatgcactcattacaaaattcaaaagctatgacagggtatacattcttttctcacttaacaag

SEQ ID NO: 172635 - DNA, 1431 bp, Arabidopsis thaliana landsberg
tgcatcttctagtaatccaccaagaaaggcgaggctatcaagaaatttggtggcgctacttagttatgcaggagtccctaatgacttctttttgaatatattgcgcaacacgttggaagagtccaaaaccatattctacagtgaacgtgctgcgtttaaaggtgctaagaatcttaaagctttcttgtttgtttgcagtttcttactactcctgaagctactgagttaaaatatgctcggaagtttgaggagacactcaatgggtctttttattaagttcatttgtctgtgcagctgccattaattatggggacgaccagtacactgcagatatgatcttggttggtatccctcttgatgaaccatacttgaaggatcgtctttcttatctcttaaagacagagaggaatgctctcaaagcaggaaggtttcctattgacgaatcatactatatcatgggcacagtggatcccaccggggagcttaaggaaaatgaaatctgtgtcatcctgtaggctagcaaattcttctctttctctttcgctttgagttttgcatgtaatcatcaaaaaacagtgattagcttccttggaattatgagttcttccctacaagtagctgctcattttcactgctttcttttcatggttttgtagccattctggccaaatttccggggatgtgttagtttacagaaatcctggattacattttggagacatacatgtacttaaggctacctatgttaaggccttagaagactatgttggaaatgccaagtttgctgtgttcttccctcagaaaggtccaagatccttgggcgatgagattgctggtggtgactttgatggcgatatgtatttcatatccagaaatcccaaggtactctgctatatccatcacatttgaaaataaactcttcattgctgagacctgacctgtgaaccggaattcgtctatttagctactggaacacttcaagccaagtgaaccatgggtgagttcttctaaacctagtaaaatttgctgtggaagaaagccaagtgaactatcagaagaagagttggaagaagagctattcaaaatgttcttaaaagcaagattttgtaagaggtacataatttaactgtcggcttactttcaagctcacaatagttcgtttagttaacatatgccttgttttcacggtttacagagacgtttagttaacatatgccttgttctcacggttaacatataccttaggagatgagagtgctaaggaaaaatatgaaaggaagaagaatattcttaagttgattgatatatactatgatgctcttgatgcaccaaaaaagggggctaaggttgatctcccgcccgatctagagatcaaaaattttccacattacatggagcgtgaccctaagagagatttcaggtccacttcta

SEQ ID NO: 172636 - DNA, 942 bp, Arabidopsis thaliana landsberg
  unsure (1)..(942): unsure at all n locations
ttaactgaaccacttatactggttgtgtttagaaatttgacnatttgtatcaagtggaatgaggtcaaatcactttctgagtctccaatgcaccaattgttgttgtcagaatggaaaacgtgaaagcatgacattgcaaaatggttctctatatctcgccgtggtgttggcgaaatagcacagccggatagtaaaagtgtgtttaactcagatgtccaggctagtcgtaaaagaccaaaacttgagattcgacgtgcagagacaacaaatgcaacacatatggagtctgatacttcgccacaaggattatctgcaattgactcagagtttttcagttctcgaggcaacacaaattctcctgagacgatgaaagaagaaaatcctgtaatgaatacaccagagaatggtttggatctatgggatggcattgttgttgaagcaggtggttcacagttcatgaagacaaaagaaactaatggactgtctcacccgcaagaccaacatataaatgaatcagttctgaagaaaccatttggttcgggaaataagagtcagcaatgcatagctttcattgaatcgaaaggaaggcaatgtgtgaggtgggcgaatgaaggtgatgtttattgttgcgtgcatttagcttctcgtttcaccacaaaatctatgaagaacgagggctctcctgctgttgaagcacctatgtgcggaggggttactgttcttggtaccaaatgcaagcaccgatctctacccggatttttgtactgcaagaaacaccgtcctcatacagggatggtgaaacctgatgattcttcatcttttctggtgaagagaaaggtatcggaaattatgtcaacatctagaaccaaatcaatgtcaagatttggtgcaatttgaagaaccagaaggtccatcttttgagaaacaggagccccatggagc

SEQ ID NO: 172637 - DNA, 624 bp, Arabidopsis thaliana landsberg; identical to SEQ ID NO: 39770

SEQ ID NO: 172638 - DNA, 610 bp, Arabidopsis thaliana landsberg; identical to SEQ ID NO: 26268

SEQ ID NO: 172639 - DNA, 1323 bp, Arabidopsis thaliana landsberg
atagatccatgatacagcttgaacggtaagcatatttgatacataatttctggattttagacagactattacactgtagcacttgctgtgatatactaaccatataattactgcatttcctcttgtggtgtagttttgctgttgcattttatggcggtactacacctccgagattggttgctcttgttgctcaggtgagagaactctataaagacctttcttccacataagtatattccatcttgattttaaactttatttcctttttgttttgtgcgttgttaaacaagttactcaaatgtctttttcttaaacccaaacaggatgaaatcgagagtgatggtggtcaagtggagccaccagggataaacatgatatatcttccatatgctaatgatattagagatatcgacgaggcaagaaagaattgcttttgaaaagctacttggttccaacgttattaatgtttgttaaattttgactagttggtggaattttggcagttgcattcaaaaccaggtgtagctgctcctcgcgcatcagatgatcagcttaaaaaagcatcagctctaatgcgacgtctagagttaaaagacttttcggtttgccaatttgctaatcccggtaagttcaactctctattagttgtactgagctcctgatccgtaaactgttcatatatagaatctgaagtcgctctttgttgcagctttgcagagacactatgctatcttacaagccattgcactggatgaaaacgagcttcgtgaaaccagagatgaaacacttcctgacgaagaaggaatgaacaggttttcaacaaactttcatattctcctttttaacattccatcttataaagcaaaagaaaaagaaaaaatgttgggaacttatcgagtgagctctatttctcgttcttgcagacctgcagttgtaaaagcaatagaacaatttaagcagtcgatttatggcgatgaccctgatgaagaaagtgactcaggggcaaaggagaaatcaaaaaagcgaaaagccggtgacgcagatgatggaaaatatgactatatagagcttgcaaaaaccggaaaggtgaaagcaaaattctaagcattaatttagatttctgcttaatgatttcatctttttgtttcattgctttttagatctctacgtttaaataagctatcttcatgttctgttttctttgtttagctgaaggacttgactgtggtcgaactgaagacatatctgactgccaacaatctcctcgtcagcgggaagaaagaagttctgatcaatcggattctgactcacattggtaaataa

SEQ ID NO: 172640 - DNA, 1848 bp, Arabidopsis thaliana landsberg; identical to SEQ ID NO: 3754

SEQ ID NO: 172641 - DNA, 929 bp, Arabidopsis thaliana landsberg
acgtcagtactattgtcactctcatttttggtgatgagatgtatcaactatgtgtaggtcgagctctctgcttagctcttgcagagaaaggagtttttgtaaccgtctctgatttttcggagtgagaaaggacaagagactacttcgcttgttcgaaaagcgaatgccaagtctcatcacgggataaactttccttctgctatctttgtgaaatgtgatgtgactaatagaggttagttagtgtattggtttagctttaatgatgaaacagaaaactctgtcttagtgttgttattcattctctggtttattggaaacaggagatctcctcgctgctttcgataagcatttagccacatttggaacacttgacatctgtatcaacaatgctgggattagcactcctttaagatttgataaagatgacactgatggatctaaatcatggaaacacaccattaatgtcgatctgattgcagtagttgaaggcacacaacttgcggtaagtctcgtattccttggcttgtaaagctctgatttttgttatctcggttttatctgattatttatgattttcaacttttgtgtagatcaaagctatgaaagcaaaacaaaagcctggagttatcattaacatgggatcagctgcgggtctttatccaatgcccattgatcctatctatgctgcctctaaaggttttatgttacttgtgtcttattgtttctttcatttgttcattgaattatataaagatgtttaattctttttgcttatcccatatgttacatttctgcagccggtgtcgtattattcactagatcattagcatattacaggcgccaggggattcgcatcaatgtgctttgccctgaagtaagacaaatatctgaatattcaaaatgtttattaatgctctattgggggtttg

SEQ ID NO: 172642 - DNA, 353 bp, Arabidopsis thaliana landsberg
tgttccaagcccttgaattgacgcggaatgccgcgcccgcgacaatagccgacttcgtttcaggtgcaccgctcggcaacgcgttcgagccggtgctgcgccgccgcgaaccgaccgtcgaggccgcgttcaccgcgctggcgcgggtcggcgagccacggttgaccgggtcgggcagcggctgtttcgtggaattcgaggatcgcgcctcggcgcaggcggccctgcagtccttgccaccgggcctgggcggctggatcgccgggggcgcggcacggtatgcgttgcatgccgcgctggacgcgttccgcctgcaggggcgtcgccaagtggtccaaggcaccgggttttga

SEQ ID NO: 172643 - DNA, 3363 bp, Arabidopsis thaliana landsberg; identical to SEQ ID NO: 55398

SEQ ID NO: 172644 - DNA, 780 bp, Arabidopsis thaliana landsberg
tttagaaacaaaaatgatggtttccactatttcctttggtgttttattcagtcagaagatgaaagagagatgtgttcaaggaccatctactgcacaaatgttgacaagaatgtaaatactttttctccgttaaagtttagattgcgtttgcatacttgttctcggatttgagagattcctataaattgcaggccactgaagatgatgtcaataccttctttcagtctgcctgcggtgaggtcagtctagaatccgaaaacttgctttttctgctctcataaagataatatgaaatttgtaaaacaacaataacattcaacttttttctatcttctctctctgtacaggttactcgcttaaggcttcttggtgaccaagtgcattctactcgcatagcttttgttgaatttgccatggtaaactcctgttaaaactcagcttctgtgtcctcttttgttagtgttaacaagtaaagctgaacttttcaaggcttagtttttacttaacaactgaatatgcgtttgtttacgggataaaaaggcagagagtgcagttgcagcgctaaactgcagcggaatagtcttaggatctcagccgataaggtacacacattatttctcttttgtgacaaacctttcattgaatataaaaacaatttgaaatgaaatcttttgaattcttcagggtaagcccttcaaagacaccagtgagatcgcgaatcactcgatcaccatcgccaaactaggagaaaacagaggctttgttgatgaaggagagtga

SEQ ID NO: 172645 - DNA, 617 bp, Arabidopsis thaliana landsberg
gtctcttaatattataattcatgataaactaatagataataatatgattttctcatccaaattatttatctgctgtattgctaattatgttttctttttacttgtgaaggtgcacgtcctaccacgagagatgttgggtacttcaacttttgggctgtccatgttcttactgaaatggctgcccatccggcttgttgaccgtttccttttggttgtttcccggttcatcctcggggatactacccttttaggtcttaacaggccccggttaggtccactcgagctcaaaaatatctccggtaaaactccggttctcgacgttggcacgctagccaaaatcaaaaccggagacattaaggtagtgtataatctaatcaaagaatatatgatatgaatacatactaaaaaccagtttactgattgtgatagttgattttgttaatggtaaaaaggtgtgttcggggataagaaggttaaaacgacatgaagttgagttcgataacggaaaaacagagagatttgacgccattatattagcaactggctacaaaagcaacgtaccctcttggctaaaggtattcaataataatgataatattgttattttacctgtgtcc

SEQ ID NO: 172646 - DNA, 3296 bp, Arabidopsis thaliana landsberg
atggatcctcgtccaaatactgcaaaggtggtatataggatccaacaactgtatgctctgttcttcggatttcattgtcctgtgattgtaactctctgtataaacgtaggtgggggatgagtttgcaaggcagtactataacaccttgcaaaacgccccggagaatctctataagctttataaagataagagtacgatttcacggcctggactagatggaacgatgcgtgtcttcactttatcggtaaagatacttttcctgattgacttagtaactttggtgaaatctttgttctcttgaatgattcctaatcttggaacagaaagatcttaaatggcgatctcctggtagttttgattcggttaagataaccagcgtcacgtcccaagactctcttaagcagggtatcctcgtcgttgtttatggctacctcactttcaacgagagacctgcaaggcacttcacacaagttttctttcttgttccccaagaaaaaggctacattgtttgcaccgacatgttcaggtttgttgatatacccgaggtcaatgcagccattcctcctgctaatgatggtgagtaacagttcaattataagcagcctccatattttgctttgcgaggaagtaagtgtctaagatcttggtttaatgcgaatggttcagtcatagaggagaaagttccagaaacggagggagctgctctgagagtttctgaaccaaatcatggttttgataatgttcccaagctatcttgtgcttctgagggtgcagccatttgcgctaaaaaacttcctctagatgcaaccattgcctttgttgagaatgcatttaagcagtttggagaaattagaagaggtggagttgaagttagaatcaactgggtaaaatgttattccactaacaaccttttttattttttgaacactttcttcttcatggaaacactaatttgtctacttgtataaaactggtagcactgtactgggaaatatgcttatgtggagtttgaagaagcagaggccgctaacagggcaataatggtcggcgctttggaccttgatgacccttgtttaattatttgatcggtgttttgataatgctggcatgaatcttattcaggcgtctcctataagtattgatgggtacagaacttacgtggagaagaagtacgcttacaataaaagtgagtattagttagtcactgtaactgtcaaggaatcgtgttaaaggctttagttttgtttggtttagtcttgtgatcactcaacagatataaaagctgatgctggtgctgatactggaaatgggaacagtcaggactctcaaggtaaaaagtttgtcttttctccttcccgtttatgtatacagtgaggagtctcaatttccgtaaccttttgtgtgtttatttaccagctataactgaagatgcacacattcgtgtaaaagaccttcctccaaatgcaaccgttgccttggttgagagtgtatttaagcagtttggaccaattaaaaagggacgaattcgagttataaaccctgctaattcggtaagtgttgagtgatctactaacaagcatttttcttattaatggaaaggctaatttggttacatttgtgtgaaactggtagaactattggtatgcttttgtggagtttgaggaagcagatgctgccaagagagcaatacaggtacttgctttggacctggacctggaccttttttatacatttgttctgaatcttggttaggattcactttgatctcttgaagccttaagtgttagattgactttgacaatgctggcatgatcttattcaggcgtctcctctaaatgttaatgtccgcacacaacttacgtggagcagaagcaaccatactatgaaggtgagtatgtgggagttattagttagtctatgtaacgatcaaagaaattcctgaagggtctagttttgtttggttttggaatcaggttactatgaaagtccatccgatggaccaggaaacataaagagaggcgagggagtgagaggatcactaggtaaccccatttgtaactggcagaagatggaggaagtgagaggagcagatgtttatgacttgcaaaactggcaaaagattatgaatcaatcggaggagcagatgaagtttcaggaggaagaagggcgacaatacaatcaaaacagatatacaagcgaggaagtgagaggaacagaaggagttggtctggaggaagaagaagaagaagaagagaaccaaaactgggaggaacagaggaagattcaggaggaagaaggaacagaatctcacgaaggtaataatggtgggtaacaatggtatcaactctgtttttatcaactctacttttgacatatctctttgtttatctatcagcgtccgttttccttagacgtcttcctctagatgtaacctttgccttgattgaggatgcattgaagaagtttggaccaattaatgccatttcaattataaaatctggtccggtaagtgttcaagtaatatattaacaagcatttttctgaacccttcttcttattcttcatggaaacactaatttgtctacttgtatgatgaaactgttagctctataaatttgcttttgtggacttcgagaaagcagatgtcgccaacagggcaataatggtacactacacgctttgaaactggactattcttaaatgttttgtgggattcgatttgatctcttgataatgctggcatgaatctcttattcaggcgtctcctgtgaggatttgtgagaaaaacgttaacgtgcagaagaagctaagtgcaggtgcagggaagcgttacacaagaccaacctgcagagacacctcggtgccgctaggtgcaggtaactttcattggctaaactcaaaaacgtgcaaagaagggtgctgaataggcttcttttggtttgacttttcagaatcaggtcacagcggagcaggtaagtcaacgcagatatggaagcgagcaagtgagaggcacagatgcttctcacttttggggctggcagtggcagaagtcaaaggaggaacagagtaagcttcaggaggaagagggagaaatacaagttgatcattcttgggaggaggaacatagcaaggttctggaggaagagagtaagcttcaggaggaagcggtagaaacacaagttgatcattcttgggactatgagcagataatggaggagcaagaagaggaagaatcaaaacagaaccagactagttatattgaagatattgcggcttttttttcgggtgttttatga

SEQ ID NO: 172647 - DNA, 357 bp, Arabidopsis thaliana landsberg
gtggtttgggtaattgggtatttgggtataaggtaataggaaggttgaaacctaagcccttggttcccgaaggtggagaaaggtggggacggcggtggcgaaggtggtggtagtggacctggtggtggtggtggtggaggagaaggtggtggaggaggaggtggtggaggcggtggtggaggagtaggagatggatatggatatggccgtggatggggtggtggatatggaggagtaggcggaggaggatggggatggggaggagatagcaacggaggagtatggggtcctggaaacggcggtggttgttggtttcccggttgtgaatataaaaagtcaacgaaaggtcaacactga

SEQ ID NO: 172648 - DNA, 563 bp, Arabidopsis thaliana landsberg; identical to SEQ ID NO: 22447

SEQ ID NO: 172649 - DNA, 515 bp, Arabidopsis thaliana landsberg
gtatcgaacgggagattacatctcttcaactagaggtaagtttaatcaacaatgtgagcttctctcttagttatattctttactaacattaagttgcatttaggagaagagactagttgcagaaattaagaaaacagctaagactggaaatgaggcaagttcttcatttcaatcactttcttgcggaaaaaaccattttccaaattctgagaacttcactaactgatttttggaatgttgattattcataggctgccacaaagattttagctcgtcaacttgttcgactgaggcaacagattaccaacttacaaggaagtcgtgctcagattaggggtgtaacaactcatacacaggtttgcttctgtagctcatcatcagctaaactaatagttcaactagaataatccgatgttaatacttaattactgttttcttccttccgacacggctctgtatgccagcacttcgatttaatcaggtatgaaaggtgctaccaaagctatggttgcaat

SEQ ID NO: 172650 - DNA, 989 bp, Arabidopsis thaliana landsberg
atggacaaggcatgggcttggctgccaaggtatgcatatgtcagatattttcatagatagttttacttatcgtgatattgaatgtgttgttgttttatattatcttaggaatagccttgagtatgagattggagcaaagaattttgtctctggagcatcaattagtttggggaatcatactgagatgttctgtccctgcgttgattgtagaaatgtctgccctcagctgacagagacagtattggatcatgtagtgatcagaggtatggatttgaagtataagaggaatccatgttggagtaagcatggggacaagagagacagaacatttgttgatgttcccacttcacaagaagaggcttatgagttgcttaagacaacgtattttgactcttaagttagtgatgaacaaccatctgataagtgtcaaactgtagaagaatccgattttagtaataagttagaggatgctgaaactccactctactcaacatgtcagaagtacaacaaggtttctgcaataacagtcctttaccactttaaagttaagagtgggatgacagaaaacttctttgatcaggtattgacgacagtaaaagacatgttgcccgaagataatgtgcttccaaagtccactacggagatgaaaaagttcttgaaggtctttgggtttggttacgatctcattcacgcatgcaagaacgaatgtatactttatcggaagtagtatgctcagatggaaagctgcctaagatgtagtgcgtcaaaatgggagttggataaacgcagtggtgaggaaaagaaggggattcctgcaaaggtccttcggtattttccaatcaaagacagactgaaactgatgtttagatcaaaaagaatgggtgagaatctgcgatggcatttcagcaatggtagtgaagatggtataatgcgacatccagtgaaaaagttacttgggcaagggtgaaaaataaatggcttgagtttga

SEQ ID NO: 172651 - DNA, 532 bp, Arabidopsis thaliana landsberg
  unsure (1)..(532): unsure at all n locations
gcttggaagncacagcactaaattcttactcataattctaggtgctgggtgtatggttgctgccatgtgtggatcgactgaaagagaaccaatagttgttgggaaaccatcgactttcatgatggactttctgctacaaaagtatgtgcacatgaaagcctgtctcagttcatagtgtgcattatatacgacagagtgctaaagaggtgtatttcttgtgttacagatttgggacggaaacgtcaagaatgtgcatggtaggtgataggctagatactgatatcttgtttggacagaatgctggctgcaaaactctcctcgtcctaacaggtcattatcattaactgtttgatactcttttgaattttgcaagccaatacaagtcgatatctggacagtaactgacagtgattgggtttgtcaaaataggggtgacaagtgaatctaatctactagataagggcaacaagatagaaccagactattacacaagcacagtctctgatatcataaaactgatggagtcccccta

SEQ ID NO: 172652 - DNA, 1872 bp, Arabidopsis thaliana landsberg
tctcggaaccatcaaactaccagtccgagccaaaggaataacaaaaatcgtcgatttttctgttaccgaccaaccgaccgtgtataacgcgattatcggcaccctatggctaaatcagttccgagctgtcgcctcgacatatcacctatgcctaaaatttcccacacacgacggcgtgaaaaccatgtggagaaaccagaaaaatgctcgcatctgcttcatggcagcgtacaagctcaggaaccccgtcactgaatcgacggccaacgcgaatcataagaaggccaaacttggccgagccgaagaaaagtcgatctccgagcagttgtagcaactaaagatcgaagaagctcgggaatctacgataccaactcccgatccggtcatctcaatttgccttgacgacgcaaagcccgagcgatgcgtagaaatcgacggagatctagaagaagaactaacagctgaactcaccactttcctcaaagaaaacgtcaatactttcgcctggtccctagaggatttgcccggagtaagtgttaacatcgtatcacacgagctcaacatcgatccaacttttaaacccatcaagcagaagaggagaaaattaggtcgggaacgagcagaagccgtaaaagccgaggtagaaaaattattgaagatcggatccatcaccgaggtgaaataccccgactggatcgcaaacccagtcgtagtaaaaaagaaaaacggaaaatggagagtttgcgtagatttcacagacttaaacaaagtttgcccaaaggacagcttcccattaccacacatcgatcgcctcgtggaatcaacttctggaaacaagctactgtcgtttatggatgctttcgctggttacaactagatcatgatgaaccccgaagatcaagaaaaatccgctttttacacagagcaaggaattttttgctaccgagtgatgcccttcggactcaagaacgccggggcgacctatcaacgcttcgtcaacaaaattttcgccttacagatcggaaagacaatggaggtctactttgacgacatgttggtgaaatccatggaagagaaagatcacgtaacccacctgcgcgaatgtttcaaacaactaaacctatacaacgtcaaactcaatcctgcgaagtgtcgcttcagagtaagatccggcgagttcctcgggtacctggtcacatatcgtggcatcgaggcaaatccaaagcaaatcgaggcattgttgggaatggcatcgcctcagaacaagcgagaagtgcagcgcctaaccggaagagttgcggcccttaaccgtttcatctctcgatcgacagacaaatgcttagccttttactatgtgcttcggggaaacaaaaagttcgagtggacgatccgatgtgaagaagcttttcaggaactcaagaagtacctagcaacaccacccatcctcgccaaacccgtaatggagagccattgtaggcatccgcctcgcctcgccaacgggagaaatcctcgagcagtcattcaggttaaacttcgaagctaccaataatgtggccgagtacgaagcactcgttgccggacttaatatagctcgggggctaaagatagaaaaaatctgcgctttttgcgattcccagctcgtcgcgaatcaattcaacggagaatatacagctcgggacaaaaaaatggaagcctacctggttcatgttcaaaagctagaaaagaattttgacgaattcgagttaacaaggattccatgaggagaaaatacatctgccgatgccctagctgctctagcctcaacctccgacccgagcctgagaagagtcatcccagtggaattcattgaaaagccaagtattgagctcggcg

SEQ ID NO: 172653 - DNA, 474 bp, Arabidopsis thaliana landsberg
atgccctgttttgacctcacggccgccctgcatcggcggcaagggccgctgtaccgccaggcggcccgccatttgcgggcggcgatcaccgagggcactttgaaggtcggcctgccgctgcccaccgaggcggagctggcccagggcttcagcatcagcctcatcaccatccgcgccgcattgcgcgaactggaggaccaggggctgatccgcaagcgtgccgccaagaccgccctggtggtcagcgccatcccgcttgccgagcgcacccgggaagtcggcacgctggccgatctcgccgccgaccttgccgactcggcgctggaaatcgccagctatcgcctgacccgttcggtggaggcggcgcggacactggggctggacggccgcaccgtgctgccctgtctgcgcggcgtgctggcgcgcgacggcgtggcacgcaccgacatcgccatctatctgttgccggaactc

SEQ ID NO: 172654 - DNA, 982 bp, Arabidopsis thaliana landsberg
aattttgtattgctgaaaacaacacttgttgacgatactgtattggaccgttttggactttttggtgtccgatttgcgacccgtttgttttgctggtctcatgtgagtattagaaacattttgtaatcatgagatcactcgttcgctgatatgttcatggtttgagcacttgcttcatctcaattgaagtgaagtgttcattttcagtgtttggaagcaaaatatgattggctcccattcacccccctggtcgccttaccggtcctacaattgatatcagagacgattaaggatttatctaatcggtttgaaatccatgtaggaggcatggaacgaggtgttggcaaacctccattcttcgatgggaccaattacccgtactggaagattcgcaagtctgcatatctttagagcatcagttactgtgtttggaaaatttgcctcgatgcgaatttcgatgctacaagtgaccggatcactccaattcagatggagtaccatgattcgaataacaatgctcgaaatgctttgttcttgtgtctctcgctttgcagagtttaagcgagttggacattttggtatgtctcatgagatcaggtccaccctcgagaaatttcatgagggaaatgatcatgtaaaccccagattttttgagacgtgtcggcaagagtacgagaactttattcagttggctggagagatgatcgacacaatgttctctcgattccagtcgattgtggacatgatacgtgcaaacaaggcatagcttccctatgatgatcatgagaaagcattgaagttgctacatgctctagattagagggtttgggaggtgaaagtctcggtggtcattgagtcaccaaattatgagactctcactgtggatgagctgttcagcaagctcaagtccactgaggttgacaccaaacccaggccaagattgagaacttggtgcacccacaatggcctggtctctagaggc

SEQ ID NO: 172655 - DNA, 423 bp, Arabidopsis thaliana landsberg; identical to SEQ ID NO: 69316
  unsure (1)..(423): unsure at all n locations

SEQ ID NO: 172656 - DNA, 514 bp, Arabidopsis thaliana landsberg; identical to SEQ ID NO: 77793
  unsure (1)..(514): unsure at all n locations

SEQ ID NO: 172657 - DNA, 1617 bp, Arabidopsis thaliana landsberg; identical to SEQ ID NO: 8176

SEQ ID NO: 172658 - DNA, 1447 bp, Arabidopsis thaliana landsberg
atgaggttgttgctcaaggtacacaaagtttgggatactgttgaaccgggatcagaagacgtggacaagaacgatatcgccagagccctcatcttccaatcagtacctgagtctctaacccttcaaatcggagaacttgagactgcgaaggaagtttgggaatcgataaaaacgaaaaacgttggagcagaaagagttaaggaggcaagacttcagactctcatggcagaatttgagagagccaagatgaaagagacagatacaatagaagactttgcagggagactttcagagataaccacaaaactgcagcattaggagaaaagattgaagcatcaaaattagtcaagaaattcctaaacagtctaccaaggaaacgcttcatacaaatcatcgcctcacttgaacaggttctcgaccttaacaagacaagctttgaagacaaagtggggaggatgaaagtctatgaagaaaggatatgtgatgaagaggaggatcaaacaaacgatggaaaacttatgtatgcaaaccatgattcacaatctcagcaaggtagaggcagaggacaaggagatcgcttctatcaaagagggagaggtcgtggcaggtttggatatcagggttacaaacaagagcgtgatacgtcaaaggtggtctgttacagatgtgataagctaggacactatgcttcttcttgtcctgatcgtctacttaagctacaaaaagcaaaagaagaagaagacaatgacactcaagaagctgaagaactaatggtgcatgaagtggtatatctcaatgagaaaaatgttaaaccaagcgagtttgagacaagttcggatgcaagcaacgtatggtatttagataatggagcaagcaaccatatgttaggaaatcgagcttttttcgaaaattgatgaatcaattacaaggaaagttcattttggagatgactcgagaatcgacataaagggaaaaggctcagttctgttcattagcaaaaacaaggaaaagaaaattcttgctgatgtatacttcatacctgatctcaagagcaacatcataagccttggacaagctacagaatcagggtgtgaagttcgaatgaaagatgatttgctcattatgcatgacaaggatggaaagctgctagtaaaagcaaatcgatctaaaaatcgattgtataaagtattcatggagattgagcctcttaagtgtctacaagcaatggtccttagtaactcagcaaaatggcactcacggttaggccatattggagttgagaccttgaagacgatggtgaagaaggatcttgttatcggaatgcctcaaatggacagtgaaaaagaaacatgtgcttcatgtttactcgggaaacaagtaagcaaaagcttccctcaagcttcatcttatcgtgctacacagaacctagagttgatacacggagatc

SEQ ID NO: 172659 - DNA, 354 bp, Arabidopsis thaliana landsberg
tcatttccaggtagtacaagggctaaagttaccgctgagtttcattcaaaaaaaaaagttaccactgagtttggagacacagttactgtgacgcctagagcaaggcatcaggcgacaatagtttggcttcatgatctcaacgaatctggctatgagtaagcaaaattctttgttttgctagcttctttgtcttgaactagctgtgaaaagatcaaagcgatctcttgttgtctcacataaaagtcaaagaacgaaactccatcttctctcttaactctcatatgtgtctttgttacagttcctctgaattggaaagagcttctcgctttacaatgtaagatttcttcaatatat

SEQ ID NO: 172660 - DNA, 569 bp, Arabidopsis thaliana landsberg
  unsure (1)..(569): unsure at all n locations
tgacgaagaggcccgtcgcggcctcgagcggggcctgaacgccctcgccgacgcggtcaaggtgacgctgggccccaagggccgcaacgtcgtcctggagaagaagtggggcgctcccacgatcaccaacgatggtgtgtccatcgccaaggagatcgagttggaggacccctacgagaannnnnnnnnnnnnnnnnnnnnnnnnnnngccaagaagaccgacgacgtcgccggtgacggcaccaccaccgccaccgtgctggcccaggccctggtcaaggaaggcctgcgcaacgtggccgccggcgccaacccgctgggtctgaagcgcggcatcgagaaggccgtcgagaaggtctccgagaccctgctcaagggcgccaaggaggtcgagaccaaggagcagatcgcggccaccgccgggatctccgccggcgaccagtccatcggcgacctgatcgccgaggcgatggataaggtcggcaacgagggtgtcaacaccgtcaaggagtccaacaccttcggcctgcagctggagctcaccgagggcatgcgcttcgacaagggct

SEQ ID NO: 172661 - DNA, 561 bp, Arabidopsis thaliana landsberg
tctactaaattgcctttcatgtatagattttttcacttcctcctatcagtaataccttttatcacttgacatatttggagctatccacatataaacctaagtggtggaatctgcttacgctcatgctcgacacttctcctaatttacaagtcctcaagatcttcgatttcatgacagtaagttcatctttcaacaatgtttccagctcagttttgcggtttaatgatctaatttatgtgatttattttgtgtttcctcctcgttagtctcaggaacagaggccttgggagaaatggaatgaaccgaagaatgttcctgaatgtttgttgctccacctcgaaacatttgtgtggacatgttatgaagggaaactagaaaatgagatagagctggcgaaatatatcctaaggaacgctaggcgtttgaaaaaggcaactttctccataattgaaattaatccggacaagagagttgagatggttggtgagctcaaaagcgtggtcagggcttcaaattcatgtcagcttgtgttcatatgaaacttatatgtttgtgagaatc

SEQ ID NO: 172662 - DNA, 1728 bp, Arabidopsis thaliana landsberg
tttttaggatcaagacaaaaaatggttggtctgataagagtttcaatgaactccttggaacattgccagagatgttgcccgcagacaatgtgcttcatacatcattgtatgaagtcaagaaatttctaaggagctttgatatggggtatgaaaagattcatgcatgtgtaaacgactgctgtctatttagaaagaggtacaagaatctagaaaattgtcctaaatgcaatgcgtcacggtggaagagtaacatgcaaactggagaagctaagaaaggagtcccacagaaggtattacgatactttccgataattccacggtttaagagaatgttcagatcagaggaaatggccaaggacttaaggtggcattatagtaacaaaagcattgatggaaaacttcgtcaccctgtagattctgttacatgggataagatgaatgacaagtatcctgaatttgctgctgaagaaagaaacctgcgacttggcctttcaacagatggatttaatccattcaacatgaagaatactaggtatagttgctggcctgttctgttagtaaactacaatttgccgcttgacctatgtatgaagaaggagaacatcatgttgactttgcttattcctggaccacaacagcctggtaatagtattgatgtgtacttagaaccccttatagaggatctatgccacatgtgggataatgggaaattgacatatgacgcttatagtaaatcaacatttaatctgaaggcaatgttgctttggacgattagtgatttccctgcttatgggaatctagctggctgcaaagtaaagggaaaaatgggatgttgtctatgtgggaaacatactgatagcatgtggttgaacatatgctttgatctgttctaacagatacactaacttagtactttgtctatcatttacttttacagagtgtgaacaaaagaacacaaccaaaatgtttcttacttgattgggctggttctgatgcaaaagttgctgagggatgtattatttcttctgatccgggtgaattagtgaatgactgtcgcttaggccctacggatgttaaagtcttgattgacactgttattgaaccagaagcattcctttggagacctgcggctaatatgttcaccattgagaaagttgttggacatatgattgcatggcctgctgctatgtgtgttagcctacagcaggagctcaatccagaagacattgcacatgtaaaatgttatatattcagagtcatactaagccattggtttaatgtgtttgacagggacccagacccacttatggaaacaagtgcaaaccactggatttgtcttccaatccggttattgttgcagaagcaagttgacagacaaaagaccaatttgcattagttaatgggcttcctctcggacttgttgcagtgacagtatttgttgatgtaatacttcaacctgagacgttcatatggaggccaacgatggatgtgagtcatgtgacataccttgaggactgtttacagtcttttgtatcatggcctgcccaccaagtttcctatgaaaacaccacagattcagcagttcagaaagctcctcttcagagttctcaatcaacttatccaacaacatcagccaatgatatatattaatgacgtaagctcccaccaatgatatatattagtgaaaattatatattttgtataaactatgatgctcactataaaact

SEQ ID NO: 172663 - DNA, 1018 bp, Arabidopsis thaliana landsberg; identical to SEQ ID NO: 31861

SEQ ID NO: 172664 - DNA, 759 bp, Arabidopsis thaliana landsberg
ggtaagttctgagacattgggttattttccattcttacatatctacactaagaaacccactatttcttctttggcaggtacatggtttttcgaggagctaacaaacaaaaacatatctttaagaagaacccaaaaacaccaatatggggcaagcctccagtggtagttggtggaaagttactggtttcaggctattggtatgttatatttatcttctcttgtttctttgcttggtttcgccatctctgtgtttgattgttcatcatgctgggaataaagagttgaaagttccgcaatgacacatttccgataacttaggtgctgttttgtatatatgacaggggaattgcaaggcactgtaattaccttggcgacttgatgcttgctctgtccttcagtttgccatgtggaataaggtaacttcttctgcttgagttcatcttacagctaccaaaagtcatgtagaaactaataccaatatcaaaacgttcgaagttgatttggctgacttaaagatattgatctctaaccatcatttgaaaagtctaaagctttcaagttcatttcccaaagctgtttttatgatattttgtcttgtgtattctcagttctccggttccatatttctacccgatataccttctgatactattgatatggagagaacgaagagacgaggttcgatgtgcagagaagtacaaggagatatgggcagagtatcttagacttgtcccctggagaatacttccttatgtttat

SEQ ID NO: 172665 - DNA, 615 bp, Arabidopsis thaliana landsberg
gtttactctatgttcatgcctgccccatcagcagcaagtattgcttggaacacgatatatggccaattcgacggatgttcaagaacttgcttcttcattgcactcttcctatacatatccctagttgctcggatcaatttcttcactggatttaagtaagtccatctcgggtttaaatattctcgattgaagatatatgttgatgatactaagtggctacggggttttgcaggttctcagtggcgtggtggtcatatacttttcctatgacaacagcatccgtagcaacaataaagtatgcagaggcagtacctggttacccgagccgggctctagcactcactctttccttcatttccacagcgatggtctgcgttttgtttgtctccacgcttctccacgcctttgtctggcaaacgttgttcccaaacgatcttgcaattgccattacaaagaggaaacttaccagggagaagaagccttttaaaagagcttatgacttgaagcgctggaccaagcaggctctggcgaagaaaatatctgcagaaaaagattttgaagcagaggaagagtcgcatcactgatgtaaaatcatggaatacagaagtatctttt

SEQ ID NO: 172666 - DNA, 2729 bp, Arabidopsis thaliana landsberg
atggcaggaactagatcacgatttgaacaaatgattgccgaacaaaatcaagagatggacaagatgattgctaaactgttggaagcgattcgactgcgtggccatcaacatcaacaattagagaactcggaggtggagaatctacatgttgctgcttttccagcgattcagagccaagacaaacctcgaagctcacgtatggcgactaaagctcaagcgcagcagcatcagatcacggggatggtggatgaggatctgtcttcgtgtgttgagattttggaagttaaaattgagaatcaaaatttgaagatacataagcgatttgcagcgatgcctatgttattaaggtttggtccatctcataacatcgatgtgcataatcaatttcgatcctcacaagcatctgctagtttctcttcagatccaaatttttttgagaatcaatcaggttatttctaatacttatgctgatgctacacagcctgagaagttagactttcctcggtttaacggtgataagattcaagagtggttattgctagttgagcaattctttgagatatatcaaacaccagatgagttcaaagtatgtttagtatctatccattttgatgggctcgctaatgcttggcaccaatcaatttcacattcagttatgtgggagcatgttaggcatgattggtggagttacaaactattgttgcaagtgagatataatgagcatgttgatgattcaattgcaaaattgacacaattgcaggagactgaaggaatagaggagtatcatgctcgatttgagttgattagcactagagtgaacttcggtgaagattacttggttagtgtttacttggaaggtttgagaactgatactcaagtgaatgttaggatgtttggggccagtaacttgtgattttaagaagttagagatgcagttccatataggacataaaaaggttcttcttcaaggtattaggcaaggttccgtcagagacgtgaaggcattaaagcttaataagatgagaataattagccgagaagggattgatgataatcaatatagagttcaatttggtagagaatgagattaaaaaagacttgctaaaagttaatggtgcaaagtctagtgatgataatcaaatctcggttgctggggaagtgcttgaattcaacatagaagagtgtgaaacagattcatggatggaacataatccgttgattcaagatcaagtcgcgtttcactccacagacatagaaggtgtctcacaacctcagaaggttagttcaaaccttaaggactttgataaagtcgatgcaagaatgaatcaaatgctgtcatcaattggatttgttgttgatgaattacactctagttgtggaagtgctactgtccatgtccagaagaagcctggtaagtctaccaaatcctcgaagttcaaatttaaaaccagctcacaagactgcaaattgatatccaccaagttctggtgtgagttggtggtcgtgaggtatcaatgtgtggttcgagatgttaccattggatttgccaaagtaaaacgaaggcttgaagtcacatagagccaaacctttgaccctggaatcacaagcgatctaaaaactcatattccaagtagagttgcttcaatggttttaatcaactggactcgggaactatggagaaaagcgacataagagtcctctttgtttctcttcatgactaataattcttatgagtaggggctgtttacaactatgagaagccagatgctctctaaccttcaaatggagtgtagaatggcattttacttgcacattggtttgacttctttacaaaaccttgaggtcaaggtttctcgaacgagggagattaaatacaggaaaatggaagagtaggtgacgtggaagaatagaggaagatgattggtggagacgtgaatgatgcgttggcagctaacgtggagatagagagttggagctatatagagaattatcgatcatttgcagaaaattaaccagaaaatattaatttgtgtaatctttttcttcttcttcatttctctctattaactcttaaggtttgatatttcattgttgatagagctgtttctacttctaagctttatcacatgagatttggatttttgttttatgaacgacgattcaattgatgtaacttgttcgattgaatttgagtgagatacaatttttctttagcaaaggtatcagagccattcgtttcctcggaatcaatggcaggaactagatcacgatttgaacaaatgattgccgaacaaaatcaagagatggacaagatgattgctaaactgttggaagcgattcgactgcgtggccatcaacatcaacaattagagaactcggaggtggagaatctacatgttgctgcttttccagcgattcagagccaagacaaacctcgaagctcacgtatggcgactaaagctcaagcgcagcagcatcagatcacggggatggtggatgaggatctgtcttcgtgtgttgagattttggaagttaaaattgagaatcaaaatttgaagatacataagcgatttgcagcgatgcctatgttattaagggtttggtccatctcataacatcgatgtgcatatatcaatttcgatcctcacaagcatctgctagtttctcttcagatccaaatttttttgagaatcatcaggttatttctatacttatgctgatgctacaca

SEQ ID NO: 172667 - DNA, 465 bp, Arabidopsis thaliana landsberg
atgacgttgttctctgcgatataaaaatgcccaagctcgatggtatggaatttctgaccagagccatggagctaaattccgatacccccatcatcatgatcagcggccacggcaatattgaatcagctgtggaagcggttaaaaaaggcgcttttgattttattagtaaacctccggacttaaaccggttactgattaccatccgcaatgctacggacaaaaatgtcctgagtaaagaaacgaagaccctcaaaaaaagagtcgccaaggtccaggaaatgattggtcagtcggaagagattaataaaatcaaggccaccattgacaaagtggcggagacggatgcccgggtgctcattaccggagaaaacggagtgggtaaagaactggacccagatccttcatgcaaaaagtaccgggccggaaaaccaaaggtggaagtcaactgtcagccatccctcggaa

SEQ ID NO: 172668 - DNA, 3074 bp, Arabidopsis thaliana landsberg
  unsure (1)..(3074): unsure at all n locations
atatctaaacaccgctcagggcanacatcttttaaagctcgtgcccggaaacatgtaagttgtgtcagttactttttcagacaatgaacttatgcacactaatgttgactgattaatgaactctcttttgcagctgaaaaaaccgggaactaactcctgatttccttcaagtcctagaggagactcatagaaagcctgatggttcttttactgatggaaagtcggagtccatatacaaggaagtctcatcaaggatacaagagctggaatctgagctttgtgctggggagaatgagagtagtgggtctggtgggctgtcgattcatacaaagaacaagatctacacagaggtaaaatttaaagttaagattatggctgttctttgagtctttgttgtctggctggaataactattgttgctgttctttgagtcttgttttgtttctggaaaaacagcttgagctttgagtcttgttgtgtctgaaaatagttgtaagtagttgtgttcttctgtctcgcatatagagattgttagtgctagttgtgtctgaaaaacagttggtctttgagtctttgttgtttctgaaaactagtgtaagtacctgtgttgacctgacttgcatatatagattgttattgctagttagttctcagatttttattgcccttattatttaattgtctgattttgatgatgatgatgcaaatagttaggatgtatgcttagcagtttacttgttgtaatgctccatcgatttaaagattgttagttttgaatcaaagcttacacatggattgttttgttggcaggttgctccgagaaagaaaaatagaatttatggtgttggttctttgcagcaagaagcagcctctgcctatagcggtcctcctcctccagctgaagatcctgttcttcttgcggagaagcttgcacacgctgaagcagctcttcaagctcaggcgacacaactacaaaagagtgccgagaagatgcaccaagtctttgagtaccttgccaagaaagatcctgtgtttgctgcaatgttagagtctgaaaacgagtcaacggccaccaacacagaagcaaaccgagttagcactcctcagactacaccggtgacacctttgacgggagaaaacatgggagacaaccccggtaatggtaccgcaaccgcaaccgcctctttatctaagtccttttaaacaatgtcactctttcttaacttgtttccttgtaaccaactttctaagacttttgaatacaacatttgaattttcaattttaatttcaattccagttcaatttcttcttagcttttgaattgttttctcagcaaaatcaaattacaaaataagagaaacagactgtaacagttcagcttggccttgcatattcgtcgcaaacacatgctacgagattacaatagaaaacaaaaacctagcaaatgcctcgcaatatttgcgacggacgtacgacactaaaattagcaatgacattgcaagtaatatgtccgtcgcaaaatacaaggcgtttgcgacgaaacaccggtctactgttcatgaatttgcaacaaaagcaatgtcgcaaatgcctcgcaatatttgcgacggatgtacgacacaataattagcaacgctattgcaagtaatatgttcgtcgcaaaatacgaggcgtttgcgacgaatattcttccttccacaatttgcgacgaatacttttcgtcgcaatagttgcgacggattagcaacgtatcccgatttgcgagaagcgtattgcgacgaatattctatcgttgcaattcccttgcgaatgaccttttgcgagggattacctacatattcttccattgcaaaacggttgttttcttgtagtgaaatatataaatttttttggttatatacaaaattatacattccaaataataaatgtatgaaattgaatatagatattcaagttctaacccgttactcaatgagagtttttgttaaatctattcttggttaaaagaaatatattactcaaatctgaatttttgacccattacaagttttctatcatagattgaacaatttcgattcgtttttcaaaattcaaataatggcatatgcagaaaaaaatctagcttttctttatatgaagatttatttgtttcacaaaaatagaatcatgtaaagatgaaaagaaaaatatatgattaataataaattaatatgctaagttagatatcaaaatcttatatgtttattttgattggtcattttcttaattaataatgtattttcctttttagaatttaaataaattaattaaattagtatttaccttatttatccttagtattttctttccacagatgccattatttgaactttagtacaacaaaatcaccaaaataaaataaaaaactaagaaattttgatgcacatataaataagtattttgacttatattcaaattgtgtggaaacaatgataatgatatccttcctccgataaaactaatcttttttgtatgtgtgggaagaagaatagagaaaaactataaataaggttagagttaatgccttataaagtgagaattagggtttagttttattttcgttagtttggatttaggaagagacttagtgggctttacaattaattcagttttgaattattaatgatttattttatttgttattttaaatagatgacatgtcaacttttaattggttattagagaagaggtgaatgtaagaattgttcatattttattatcatagatggtcttttattctcacttattaaacataacgaatcctcaaatgcctcaatgcaaagagtatttaatagtacaaataccctttaatacaaaacgaatgtaaggcatgcttgggaaaattattggccaacacatatcagaaactatactaacggttccacaacattctttcttgatcccatggacatgtccatgtaaaattccttttatgctttcgagacatcctcctgatgtgcttttaaacgccttaaaacacccctccgaatccgttggttgagcactcgaaggagaccaagtcattgcaaaaaca

SEQ ID NO: 172669 - DNA, 781 bp, Arabidopsis thaliana landsberg
atgatgttctcatttcctagagagaccagcttggcttatagcggctgctaacttcatggtttttatccatgtcataggaagttatcaggtctagttttttccttatctttttggtcccttagaaaaactctccaacttttattaaaatgatcatcttgacaggtttttgcgatgattgtgtttgacacgatcgagtcttatcttgtgaaaacactgaaattcactccttcaacaacactgcgtctagtcgcacgtagtacatatgttggttagttctcatttaacttcttttttactcatttttttcatggagaaatggaaaactaagataattcttggtttgtgcagcattgatttgtcttgtagcagtttgtatcccctttttcggaggtcttttagggttcttcggcggtcttgtcttctcatcaacctcgtacttcgtaagttatacactacaaaaaaaagaatgaacatataactctttgcaaacactgtatggataatgatacctctttaatatttgcagttgccttgcattatatggttgataatgaagcgaccaaaaagatttagcgcccattggtggtgttcttgggttagtctttctttcttaattcaacaaggcttagtcacacaatctaattaacccaataatactttaatccgtttctttaactaacaggtagcaatagtcactggtatctcgatagcaattcttgcgcccattggaggaatgagacacattattctttcagcaagaacctacaagctcttctcatag

SEQ ID NO: 172670 - DNA, 1774 bp, Arabidopsis thaliana landsberg; identical to SEQ ID NO: 24600
  unsure (1)..(1774): unsure at all n locations

SEQ ID NO: 172671 - DNA, 993 bp, Arabidopsis thaliana landsberg; identical to SEQ ID NO: 9834

SEQ ID NO: 172672 - DNA, 447 bp, Arabidopsis thaliana landsberg
gccaccattgagcgatggatacacctttgagtacttcgtcatcggaaagtcgaaggagctcgccgccgccgccgcccacgcttgcgcccaggcgccaggcaaggtctacaacccgctgttcatctacggcgacaccgggctcggcaagacccatctcatgcaggccatcgcccacgagatcgtcctccggaagcccgagacccgcatcaccttcatcggcaccgagcagttcaccaacgagctcgtcgcggccatccagaaccgcaccaccgccgatttccgccgccgctttcgcgagaccgacctcctcctcgtagacgacgtccacttcctcaagggcaaggaggcgatgcaggaggagttcccccaccccttcaacgccctctatgaaggcggcaaacagatagtcctcaccagcgatcggccgccctccgagatccccgggct

SEQ ID NO: 172673 - DNA, 1252 bp, Arabidopsis thaliana landsberg; identical to SEQ ID NO: 4568

SEQ ID NO: 172674 - DNA, 665 bp, Arabidopsis thaliana landsberg
aggggttttaccatggcgacctgtcaaattgtgaacagttttatgacaaacttggacgtacagcacagggtagatatcatctacacaagagtttttactttttgagcttttttgtggttcttgtcttttgagtatggtttctatgttttttcaggttaatattatttgtgggaactgtagtgatggacggtgtaaaggtgtgtttgcttctggttcttttttgtttgttttgcttcatcaacatccaaaatgcttccaattcttggaaagctattcatttttattctttcttttcctatatcaggtggacttggatgcatatgtagtgtcacccaagattcaacttgtaggtctgtctgctactattgtctattgtctcttggtatagtcgattgttcttacaacgaattcctgctctttcccactggtccagagttactgtcgacttggctattccatgtgagaaacctggtccgcgggtgtttaagggatttacagtcggtttgcatcctcgctcatgggaaattgtaagaaacgaacaatcccaattttctggttacagctttttcttcaaactgaacataaacttaaaattggatttttcacctgcagatctataatgggatgacacagtttggatttgataagccccgtcgtgagtttag

SEQ ID NO: 172675 - DNA, 742 bp, Arabidopsis thaliana landsberg
atgctcaagggatttactcgctcaagcactagtcctcagttgtgcagcctttacttcaaaggtttggttggcgatgactcattggctggatttggggttgcaatttgcgggcatagagatgatatcttgtttcagctgaatggaccaattcatggctccgcaattactgttttggaggctgaacttatggcattgaagctaggactaatggaagccgtgagtttggggatcactcatatctcaatatactgtgataatcctgagatggttggattggtaagttttcttggctgttcatttaggttcacatgcgtttgcttcaatatcgtaatcgatgttttgccttgaataattaggtcatggggagatctgtgcctaaggataagaaaatcgccttgctaatggatgaggtgcaacgcataagacaacaattttcatctagcatcccttttcttgtggctagtaatgaaattaagtttgtgtataaacttgcaaaggaaacactagtttctaacatcagcatacctaggcctcggaagaagacttgtggtaactgctttaacgatggtatcaaaggtgagaacatgttttccgctgatttatgcagtcattacttctgtgtggagtgcatgaaggaacatatagaagtcagtctaaacgagggaggtttaccgagatgtcctcatgatggctgcacatcaaacctaactcttagaggctgtgaccatctttgacacctaac

SEQ ID NO: 172676 - DNA, 551 bp, Arabidopsis thaliana landsberg
catggacaaatatgatccggacaaagatggtggcgctgtatgtcaacgaatggggcacatggtacgatccggaaaaagggtccaatcccggattcctgtatcagcagaacacgttgcgcgataccgaagttgccgttctgacgctcgacatcttcttccgccaaaccgatcgcgtaaagctgacggcgatcgcgcagatggtcaacgtgctgcaggcgatgatcctgaccgacggcgacaagatgctgctgacgccgacctatcacgtgttccacatgtaccgcccgttccagggtgcggtgccctaccctgccacggtcgaagggccgcgctatcagcagggcggctccgatctgccgatggtaaacgtgtcgtcggcgcgcggcaccgatggcaagctctacctggcgttggtcaatctcgatccggaccaggcagcgcatgtcgtcaccaacgagacgggaacggcacaagggcagatacatgaccggcccggcgatggacacgcacaacacgttcgctgcgccgaacacgatccatccggtgtcgta

SEQ ID NO: 172677 - DNA, 523 bp, Arabidopsis thaliana landsberg; identical to SEQ ID NO: 76925
  unsure (1)..(523): unsure at all n locations

SEQ ID NO: 172678 - DNA, 1248 bp, Arabidopsis thaliana landsberg
  unsure (1)..(1248): unsure at all n locations
gaatctctcgtaagtgaaagctttgaaggaaattcaggactatgcagctcaaagatcagatatcttcgtccatgtccgcttggaaaacctcacagccaagggaagaggaaacatttgtcaaaagtcgacatgtgtttcattgttgcagcgatacttgctctgtttttcttattcagttacgtgatctttaagataagacgagataagttgaataaaacggttcagaagaagaacgactggcaagtgagctctttccggttactaaactttaatgaaatggaaattattgatgagatcaaatcagagaatatcataggcagaggaggtcaggggaatgtttacaaagtaagtctaagaagcggtgaaacactagccgttaaacatatctggtgtccggagagttcccacgaaagctttagaagctcaacggcaatgttaagtgacggcaataacagaagtaataacggagaattcgaggcagaagtcgcgacgctaagcaatataaaacatataaacgttgtgaagttgttctgcagcataacgtgtgaggacagtaagctgcttgtctatgagtatatgcctaatggaagcttgtgggagcagctgcatgagcgtcgtggtgagcaagaaattgggtggcgtgtgagacaagcgttagctttaggagctgctaaagggctggagtatcttcaccatgggttagatcggccggtgatacatcgagacgtgaagtccagcaatatattgcttgatgaggaatggagaccaaggattgctgattttggatnnnnnnnnnnnnnnnnnnnnnnnnnnnnnnnnnnnnnnnnnnnngctcctcttgtcaaaggaactcttggttacattgcccccggtatgtagaatcttcaggttttcttctgaatagccatatgacattaggtcaacatatctttacgtttcttgcttatcaagctttaaattcttccatttcaatccacagttttataacacctgtaaattgcatatcatttctttgttgttcacagaatatacatatactaccatagtgaacgagaagagcgacgtgtacagcttcggggaggcgttaatggagttgtggaccgggaagaatccgctcgagtcagattgcggctaaaacagtgacatattcatgtggctaggtagctcaagctaggaaacgacctgcgaaatgatgatgaaattactcgatccaagcttagctgacgaatacactgaggatgctctcaa

SEQ ID NO: 172679 - DNA, 498 bp, Arabidopsis thaliana landsberg
  unsure (1)..(498): unsure at all n locations
tcgatgctcgctttaccccggggnnnnnnnnnnnnnnnnnnnnnnnnnnnnnnnnnnnnnnnnggtggcgcccattctgcatcagaaagaccatgtgctggaagggcccggttccgagcgggttacctccgccggacgggttgcaccgcacgatgagctacgcatcgtcggcgctgcgggcaacgaggtgccttacggcacggtgggggagatcgtcgtgcacggtgggcatgtgacgccgggctactggaacaagcccgaggaggcagcggcggcaatccgggatggctggatgcacaccggcgatggtggtcgaatggaccacgacggatacgtgtatgtggtggaccgcatcaannnnnnnnnnnnnnnnnnnnnnnnnnnnnnnnnnnnnnnctcaggtcgagaacgccctcgccacccatccggcaatcgctgctgtggctgtgctcgggctgcccaatgatcggtggggcgaacgcgtacaagcggtggtgc

SEQ ID NO: 172680 - DNA, 819 bp, Arabidopsis thaliana landsberg
  unsure (1)..(819): unsure at all n locations
aatgtacccatgaaggtgtttagcaaaagcaaggatcttgaaaagtcagagaagctgttcgatgaaatgcttgagagagggattaaaccggataatgcaactttcactacgataattagttgtgctaggcagaatggtgtacctaagagagctgttgagtggtttgagaaaatgtcttcttttggatgtgagcctgataatgtcactatggctgctatgattgatgcttacgggcgtgctggtaacgttgacatggctttgagtttgtatgatcgagcaaggactgagaaatggcgtattgacgctgttactttttcgactttgattaggatttatggtgtttctggaaactatgatgggtgtctcaatatctatgaagaaatgaaggctcttggggtgaagcctaatctggttatttacaataggttnnnnnnnnnnnnnnnnnnnnnnnnnnngccttggcaggctaaaattatctacaaggatcttattaccaatggctttactcccaattggagtacttatgctgctcttgttagagcctatggtagagctcgttatggcgatgatgcacttgctatctaccgagagatgaaggagaagggattgtctttaactgtgattctttacaatactctcttgtccatgtgtgctgatatcggatatgtggatgaggcttttgagatttttcaagatatgaagaattgtgagacttgtgatccggacagctggaccttctcttcgttgatcactgcgtacgcttgtagtgggagggtttcagaggcaaaggaaactcttcttcaaatgagagaagctggt

SEQ ID NO: 172681 - DNA, 1594 bp, Arabidopsis thaliana landsberg; identical to SEQ ID NO: 4070

SEQ ID NO: 172682 - DNA, 273 bp, Arabidopsis thaliana landsberg
gctctcttggaggagctaacaaataaagcccctgataaaagtaacatgataggcaataaatttgtgctgtacgcggcaggggataagagaattggaacgaagaatgtgtatgcaatggtgcaatgtacgaaagacttagtgactacaacttctgctgcgtgtttcgaatggattttcaagatgttttcaaagtgctgtgaaggaaagcaaggagggagagttttgggtacgagctgtaactttaggtatgagttatatccctttcttagaaat

SEQ ID NO: 172683 - DNA, 1773 bp, Arabidopsis thaliana landsberg
acatatctcaagaagttgcaagtgaccaagaagaagtggtgaggaagtcagatttggaggctctcataagatccatcgcctctctaagagaatccggtacctctttcttgacctatgaaccaaataaaatgctaaaggaatgcggtacatctttctttacttccgaaccaagtaaaactcttgttatagattcgggcgcatctcaccatatgatcaacaatcctagtctaatcgataatataaaaccggcgttaggcaatgcagttatagcaaatggagataaagtaccggtaaaaggaataggagagttaaacttatttgataagaaatctaaagctctatatatgcctagctttacttcaaatcttttatcggttaagagagctactaatgatttgaattgctatacaatatttggtcctaatagtgtacattttcaggatattaagaccggaagggtactcggaaaggagatgctaaaggagatcttaatgtgtttgagaaaaccccattgagtgattttacttcagtttcgcttaactcatgtttagctagtattcttaatgttgtgtggcatgctagattaggccaccctcatgctcgtgcatttgaatgaatgttgccaaatgtttcttttgataactctacttgtgagtcttgtattcttggtaaacattgcaaatctatctttccaaagtctttgactatttatgagaattgttttgacttggttcactcggatgtttggacttctccttgcatgtctagggataataagaagtactttgtgacttttattgatgagaaatcgaaatatacatggatcacattgttaccatctaaagattgtgtgatggatgcctttataaatttccaaaactatgtcactaattacttcaatgctaaaattaaggtacttacatccgacaatggtggagagtatacaagtcacaaattcaaagagtaccttgcaaaacacggcatcattcatcaaacgagttgttcttacacacctcaacaaaatggagtggcggagagaaagaaccgacatctcatggaggtggcgcggtcaatgatgtttcatacaagtgttccaaagagattttggggtgatgcggtcttaaccgcgtgctaccttatcaatcgaacaccaactaaagtcttaagtgacttatctcccttcgaggtacttaacaatactaaaccgttcattgatcacttacgagtgtttggttgtgtatgttttgttttgatacccggagaacaaagaagcaagctagatgcgaagagcactaagtgtatgtttcttggctactcaactactcaaaaaggatataaatgctttgatccaaccaagaaccgcacatttatatcccgagatgtcaagtttcttgaaaaccaagactacaacaacaagaaggattgggagaacctaaaagatcttactcattccacctccgatcgtgttgcaactctcaagtttctattggatcatttgggcaatgactcaacttcgacaactcaacatcaaccggagatgacacaagatcaagaagacttgaatcgagagaatgaggaggggtctctacaacatcaagagaatcttacacacgtgcaagaagatcctccaaacacacaagaacactctgaacatgttcaagaaatccaagatgactcaagtgaagatgaagaacctacacaagttcttccacctccaccacctcttagaaggagtacacgcattcgacgcaagaaggaattcttcaactctaa

SEQ ID NO: 172684 - DNA, 1812 bp, Arabidopsis thaliana landsberg
atggaccgaatccgacatccacaatttgccccccaagtcctcgaagtgatccagttcggggacttaagaaaatccgaatcgtattatcccaagaatcacggatcgtcacctcgagaacgaaaatccttgacgtaaaaaaaaaaaaaaaaaaaaaaaaactaaatcgcgcgattaccgagactttcctcgaatagtgaccaactccaagacgagctgagcttgaggacgagctgaggagcttgaagagcttaacgaagaggagcgagctaacgagctacttgagaagctcgtcctacttgagttttgcagtcgagagatgagccgatagctagatgaggagttggacgagctgactagctgacagctaggcgaggagatggtcgctgagtgatgggaagagcttaaaggcgagctgaagagcttgacaaagaggagcgaactaacgagctacatgagacagacgagctacttgagacggacgagctgactagcttcgtgagacgactcccgcccttcgcctcgctcatctcgtccccgacttgaggagaagaatactggtgcgggaaaaataaagaagacccgaaagaggttcctccaagcctcgttctttcgtctcgggaatctgaagctcgcaggtcggaacctcgcagcactcccccagaacgtatttttattccgaattgacatgacggtatactatggcatctcacattgttatgcttttgccgtcgctaccccgtcttcctttgcccacatcatgaggactctcttggcccccagttctgccatcgcccccttcgacgaaatgagggaggtgaacaaggataacttcgcttcgctgggaaactcggcaaggcaaaagcctcgtttgatttaccaggaaatccgacgtaaaaccgagactaacgtcacctttgatcttgcagctaatcttggaattcaactccgtctactgcagccacgaagatcagctttctgacaaggatagcgaacttgacagcttttaggcgaaatgaagacgagaacgctcatacggtggagagggccagcatggtgctgaagcggatgaaagacgccgagctgcgggtccaggaactcgaggtaaacaatattgatctcatggcgaaactggaagtaggtaaaaatgcctatcttgctgcggtcgacaacgagagccaggcccgagctgaactcaaggttcgcgaggagaagctaaggaaacttgaagaggagcaagccgcaaaaattgacgtcgccaggaaggaagagaggaagaaggtcaaagctcggtttcacgagttctcgtcgaagtatgggaacttcttccgggagtccgaagaagttgaaacgctgaaggtcccccacttgttttccttaaaacttgaatttgtttaaattggccacggaggcccttttgtttttaaatacttaattttatgttggccacggaggccttttattttgaagtacttgatttttgaggtcatagagaccatttattttgcttgattttagcttattttccgaattacgagctaagctcggtttatccttcgtatagaaaattaagcaaaacaaagatgacttccctaacgaggtagactcggtgttagtagggacgtcatttatgaccgcgaatcacaagtcttggacttagttcgggtatattcgaagcaaatgatgacttccctaacgaggtagactcggtgttagtagggacgtcatttatgaccgcgaatcacaagtcttggacttagttcgggtatattcgaagcgagggtttggacgtgaagatatccacccgaagcttat

SEQ ID NO: 172685 - DNA, 1115 bp, Arabidopsis thaliana landsberg
aacttcatatagagaaacaatctcgagggaggttcaaacctgcaacatgggtctcttggcaggtaaatcacgggagctaccacttccatactcagctgcaaccagaataattgcggcctaaccaactacttatctctgaaaaaaacagacattatcattatgcaatcagatttaaacccataaaatttccttggaaaaatgaagccaagaaacacgaaccatgacaacatcgaagaatctacaggttttccattgaaataaatgtttactaccttttcttgtgtctgcttaggtatagccaaaccctgccaagaatgtgcacatacaatcaagaaagtagcacccaccaagggcctccacagcaagtttaaatcaaatagatgctaaacaaaaatacacctccatataccaagtataattgcttaacttgaacccaactttactgtctaaacacgagtgtcagtcagctttcatttcttttaaaggaaaactatcatgtggcctgtgaaaagataataatatctttatagtggtcaatcaatgaaataatacttagtggttaaaaaaccaacaaaactcatacctcttagatccggaatgcaaggttcaacactatccatatttgtattccatagaaaataagtaaacaagcttttgctgaggctgaatttattcaaaaaaagagtaaaagaagtcgattaaaaaccaaaaccaaaatatgaagatacaaatccaagaaatgagaagacaatttcgcacctcactatagtcaacaaacatgttatttgcccgaagatatggtttaatcatgactacctgcacctaaatagttatggcaactcactgtctcatcgcttcttccactcaatttgagataccatagagtaacagactgaatccaacaacgtacactacaagaaacatgcaatagacgactacgaaaagtgaccatcaacgtactcgtctttttgtgcgactacttaacgacgatttgtcaactattttacgacaacgaggtttttagtagttgagtagtcgtttattagcgactaacaaaattagtcagaaaattgtcgtctattaacgactatttaatgattatattattgaaggga

SEQ ID NO: 172686 - DNA, 593 bp, Arabidopsis thaliana landsberg; identical to SEQ ID NO: 56599

SEQ ID NO: 172687 - DNA, 508 bp, Arabidopsis thaliana landsberg
  unsure (1)..(508): unsure at all n locations
tctcggttagatctgacagttaagattcgtgtttagaaaagggagaagcttgtatgcagaagatcccaaaatcttttaannnnnnnnnnnnnnnnnnnnnnnnnnnggcgaattgtgttgctgctggcaatgtgaagaaatccgaactggtgtttaacaaaatgaaggacttgggttccctctctctggatttacttgtgatcagatgcttctgctccacaagaggatcgacaggaagaaaattgctgatgtactattgctcatggagaaagaaaatatcaagccaagtcttctcacttacaaaatcctgattgatgtcaaaggtgcaacaaatgacataagtggtatggagcaaattctggagacaatgaaagatgaaggtgttgaactggacttccagacgcaagnnnnnnnnnnnnnnnnnnnnnnnnnnnnnnnnnntaaagataaagccgagaaagtcttgaaagagatggaaggtgaaagcttagaggcaaatcgccgggca

SEQ ID NO: 172688 - DNA, 547 bp, Arabidopsis thaliana landsberg
atggccgcacggaaagcagcggcgtccatacggcctgccacgcaggcatgcacggtggccggttttgccgcgggcaggcgagggtcatcaagctctccgccgacccggcaagatgacgccaagtgccggttgacagtggcgttgtcgcagaaccatactcgaccgtatggaaatgtccaaacgcccgtttgatatcgcgaccggacggctgcaacgcccggatggcgctgcgttggcgtgggaatgcgtccgccctgatggccgcccggcagtcctgttcgcgcacggtttcgggcagacgcgacaggcctggcaaggcagtgcacggacattggccgcgcacggttgccgctgtgtcagttttgatacgcgcgggcatggccaaagcgggcgcacgccggacggcgcctacgccatgcagcagtttgtcgatgatctggccgccatggccgccgcgcaacccgcgcccccggtgctggtcggcgcgtcgatgggcggtttgatgggctaggtgctggcgggcgaggcgcagccggcgccgtttcgc

SEQ ID NO: 172689 - DNA, 461 bp, Arabidopsis thaliana landsberg
gaaatacggtgggtgctatgtttcaaaacatgggcttaaaacgatttttgagtatgggtttagcgagccgctgagaaatgatggatcttttgaccgtggattgtatctctcgccggataattctcctcttgattggtaagtttctctaaatctctaaaagtttcaatttttcgaaattcattggtctcaaaatctcatttttggtgtttgtttgtttgattagtttgaaggattcagcttcagaatcagaagatgggatgagattcttgttgctttgtagagttctacttggaaaatcagaaattgttcctcaaggctcgactagatcatgtccaagtttcaccagaggtttgattctggtgtggataatttagtttctacgaagtagccctatagtgtggagtacacacatgaacacaaatgtgttgcaaaaatttcttgttgaatcaaagctccattta

SEQ ID NO: 172690 - DNA, 1303 bp, Arabidopsis thaliana landsberg; identical to SEQ ID NO: 26313
  unsure (1)..(1303): unsure at all n locations

SEQ ID NO: 172691 - DNA, 2501 bp, Arabidopsis thaliana landsberg
accttctggacctcttcggacttctctcttggctacgtggttcgagctcttccaagtctagcttcgttttctgtgtgttcctcttctcttctcttcgggacgcttgtgcaggtaagcctgggttcttttggcttctgttgcaggttttgtctttctttggccttcttttgtttttgagtttgaaggccttatattcggttgttgagcttgtcctttctgttttgggctgtgtttgctgtttttctgttgtttagttgggcctgcgtgcctggtttgtaggcctgttggccatgtatgttttttcttttgaatggaaatttatgaaaaaaaaaaaaaaaaaacattaaaagaatcggttatcgttagacgtcattctagtaattagttttttgacaacgaatctgttacaatgtgacatatttgtttaacaaaattatgaatctgccatcacttaacgtaaaaaatcatccacaaaaaataaatctgtcaaattatatgaaaatctatggttgaataaataaaaattctgtcaatcaaactaaatctgctataatttataaatctgtcataactatcttctaaaaaagtctgtcaaccaaaaaaatctgccataaaaaatttgtcgcagttagaatagtctacgaaataagaataaatcttccataactaaaccatatacttttgtaaaatcgctagaattttttgtaaagagtatttttatatttattttatttttaacatatgagaaaagggtattttagacaagaaaataactaatttaaccccaatattttctaagacattctaatcattaatctcattatttgggttaatcttgttttttcccttgattaaaaaataaacttgtccccacataaactgaaaatctaactcttttgtcccacattggtaacttcaaacatttttttgtatataaaaggcctactcaagagaactggagtccatgtatttagataagctctagcaagagcaatagagtgtgagttttctaggttttttgacgtcaatatggcattataagaaaataggtgatttgcgtgaagatatgccgaggaactatatgcgtcgctaaacagtgtgtaatgagtatgaaaattgtttcaaactaacatgtgatactacttttttgctaatttacttagaaacaatttgtcacaaaatcaaagccgacatgcgtcgaattagcgacgaattagagtggaactggtgaattcttcgcaaaacacatggacatttgcatcgaatttgcatagacatgtttgatgcaatgttgagatgcatttgagacgaatttatagtggtaagtaagaaaggttttaaaatatgctaccgactttgctttctttgtaatattatagctaaactaccacgcaaatacctcgcaaacagatttttatgcttatataaactgatgttgagatgaatacgtgagtaaggaacaacatattttctcttcaaaattaagcatttttcttcaaatctcctattcaaaaattttatatattttagtatattgataaatatgttattaataatgttgttaaaagatataatcataaccaaaatgctttgaattaattatatggacacattttcatactattttatcggaaaacggtctatttccccccccccccctccccgaaaactatcgtatccggccagataaaacccgatctttgacctctatctagatacccatgaaatggaagttaaacgtttatttctccaccaactgaaagtccgagagcttgatgtccctgaatcgtaagttcgagatttaaaaccccatagcattgggctttatctgctaactgtataccaaaccaattatttaaccaaaccaattggcaaaaagtcagagtcttcacctttcaccggaaaatatcaccttttcaaccggcgtatgttcacatgaacggcacaacatcatcaatcaacttcttgacctccgacgatgacgcgtcggcggcggctatggaagctttcattggaacaaaccaccactcatctctctttcctccaccaccacaacaaccacctcagcctcagttcaacgaagatactcttcaacaacgtctccaagctttaatagaatccgccggagaaaactggacttacgctatcttctggcagatctcacacgacttcgattcatccaccggagataacacagtgatcctcggctggggagatggttactacaaaggagaggaagataaagagaagaagaagaacaacaccaacacggcggacgaagagcatcggaaaagagtaatacgtgagcttaactcgttaatctccggcggaattggagtttccgatgaatcaaacgatgaagaagtaacagatactgaatggttcttcttagtttcgatgactcaaagcttcgttaacggtgttggtcccccggagaatcttcttaactctcgtgtgatttggttatcgggtctggtgctttaccgggtcgggttgtgaag

SEQ ID NO: 172692 - DNA, 1281 bp, Arabidopsis thaliana landsberg
atggataccatcagcacttcgggagctaggcttggtgttgttccggttcgggtgttactcaaggaaacacaccctaagccgggtgcgatgaaacattgtgacccaggggaacaccttagataaacgatacttggctcgggtgttattccagaaaacacacctgagccgagctcaactatatctcggggatcgcttcggttcgagcccaaggtagaatatccacccgaggaggatacttatacaaattcagtgaagggtcaagatatcatttccgaaaaatccggtgaaggatatcaaaaaatcttcgggatattatcgaatatggaagttttccgaaactcccaaagaataaggaagatttccatatagaaaatatcccctatcgccgacccggagataactggaaatcttccaaggaatatcgcgagaggcgggttaccaaggtcctatataaagcgcctcgaggaacgaacaaaggggacacgcataaagacgctctcaacttcaggctatcaaaacgctctgactttgaaggcaaaacacctattttttacttttctaaacacttgtacgatcgaatcatcatcttttcagtaataagatcaagagcaccgtccacggtaatcaaataattctgttgttctttgagagtctcacaaagatctgttctttgaagaaaccctaaatacaatttgactatgtgagtttcgactcgcacaattcggcgctagaaggaggggaaagagatttctcttactccaagaacacagaaccgatcgatcaagcaacgatgaccaacaaccagatccccgctaccaccgttgacatggagggaaaccctgttcctccaatccagacaaatgctcccgaagtcgccgctcccgcagtcctagcaggactgagaagcatgatggcacaactccagaagaaggggaacgaccaagagcaagcaaaccgattcttggcccaacagctcaaagcggctacttctcaaggacaggtcaggaccaatcgctttggcgcacgacactttcctgatcggcgagcagcggtagatctcaatccaacaagacttgtgttcaacacacccggtaacacaacgaggccatttcggcaaactcctccagggctcagcgaaacccgagcagaaccagtagcctcgggagagaatatgatggattaagggaaagaagccgacccgcgggatccaattccccgagccgaagttgacgaggttgaccagatcgaagtctccgatggcgaagattggaagaaagggtt

SEQ ID NO: 172693 - DNA, 638 bp, Arabidopsis thaliana landsberg
atgcacagaggattcaaaagtaagatttctctctatctcttgctcaaaatttgtttgtgtatgggcatgttccttttttttgttgacaggtgagagctagctagcgatccaaaaaaaatatatgtatctatattgcttggagtacaaggtggtagagagcatcttgattaggtttttttacttcaaaaactttcttttactacttaatttatatgtatggtaatccatatctccgtttctatatatagtgccaggggtcaaacgtgtgagagttcttaagatgttaagtcacatttgtttatggtcactggataatttcaccatcaaatttgttggtaatctcggaaaacatcacacaagaaccggagctcatcagggttcttcaagctttgcgattgaaggatcacaacgttctcttagcacagcctgatcataataatgtccaagcggcagctgtaactcacacgtctgtaagctcatcgatatggcgttcgagaagcctacttgatcgaggaatccttatcaaacaaagcggaaactcacaacatgatgagactcgtgctagtagcggatgctgacacgctgttgagaataagctcgccagatgcgtaagaagccacaggagcgtaagaagcgga

SEQ ID NO: 172694 - DNA, 441 bp, Arabidopsis thaliana landsberg
aattgacttcaatgctggcaaagaagacgttttgggtacgcatgagaagccagttcgatgtgttgagtattcttatgctgcaggttggtaaaaattggttatgatgttcgtgatgttttggtgtttctaatcatcccatggttttgcttgaacactatgtttatgtggcgttatagggcaagtgatcactggaagttgggataaaacgattaaatgttgggatccaagaggtgcaagtgggactgagcgcacacagattggaacttatatgcaacctgagcgtgttaactctctttctcttgttggaaatcgtttggtagtggcaacagcaggaaggcatgtcaacatttatgatcttaaaaatatgtcccagcctgagcaaagaaaagagtcctcacttaaataccagacaagatgtgtgcgttgttatcccaacggaac

SEQ ID NO: 172695 - DNA, 492 bp, Arabidopsis thaliana landsberg; identical to SEQ ID NO: 40488
  unsure (1)..(492): unsure at all n locations

SEQ ID NO: 172696 - DNA, 565 bp, Arabidopsis thaliana landsberg; identical to SEQ ID NO: 53555
  unsure (1)..(565): unsure at all n locations

SEQ ID NO: 172697 - DNA, 373 bp, Arabidopsis thaliana landsberg
  unsure (1)..(373): unsure at all n locations
aagcttccccttgaaaaannnnnnnnnnnnnnnnnnnnnnnnnnnnnnnnngaagcgcgcatgtccgccggtcccgccgccgacgtctatgtgaagctcgcctccgaatattccgaactgcagcccgtggtcggcaagatccgcgcctatcagaaggccgtggccgagtttgccgatctggaagcgatgctggaagacaagtccgtcgatcgcgagatgcgcgatctcgccgagcttgaatatcccgacgtcaaggagcgcatcnnnnnnnnnnnnnnnnnnnnnnnnnnnnnnctcttgccgaaggatgcggcggacgagaagagcgccatcctggaaatccgcgccggaacgggtggatccgaagcagcgc

SEQ ID NO: 172698 - DNA, 486 bp, Arabidopsis thaliana landsberg
gagggtgtggccatggtggccgaagaagtgaaagaccccaaaagaacgatctcgcgcggctatatttacggcatcctcacattggtggtactggcattgacggtgatgatttttaccggcggcattgcgccgtggcagcaattgagcgacatcgactatcccctgcccgcagcattgggcattgtactcggccgcgacagcgggctcacccagctctttgcgagcctgggcctctttggacttatcgcgtcctttcatggaactgtaattggttattcccggcaaatttttgcgctcgcccgtgaaggttatctgccttcattcctgggaaatgtcaatgcgcgcttccaaacaccgcattgggcgctggtggccggcggcattgcaggttgcctggcgctatcactaggcacgcccaatcaggccattatcctcgccgcattgggtaaaagtggtgataaacattatcagtatggtatcgctttt

SEQ ID NO: 172699 - DNA, 391 bp, Arabidopsis thaliana landsberg; identical to SEQ ID NO: 43047

SEQ ID NO: 172700 - DNA, 412 bp, Arabidopsis thaliana landsberg
atgggaaaaagagcaactactagtgtgaggaaagaagagttaaacagaggagcttggactgatcatgaagacaagatccttagagattacatcaccactcacggcgaaggcaaatggagcactctccctaaccaagctggtactaatctctctatctaccgatccgtctttatatcttctacgtacaataattgtcttggcacacataaaaggtctcaagaggtgtggcaaaagctgtagacttcggtggaagaactacctaagaccggggataaagcgcggtaacatctcatctgatgaagaagaactcataatccgtctccataatcttcttggaaacaggaaattcactaaccacatagaattttctttttgtagtaaagttatttgttatgtgacattataattaaag

SEQ ID NO: 172701 - DNA, 712 bp, Arabidopsis thaliana landsberg
aagtgggatgacaaatctgaccacgatgatgtaacaaagatatatgtaaattattctcttagtggcatagagtccattcgtttcgactatgtcaaaagtggaaaaccaaaggatggacccttccgtggtcaatcgtataatacttacacgcacacggtataagatgacattagaattttttttttctctttttatctttctgtcaaaccctttttcgcttttttcgcatgtgggaaattttgtaatatcattttttcaccaaattttgcagtttgagattaaccatctaaaatatgaacatctcgaatctgttgagggctactacacagaggacacagggattgaagcacttcaatttaaaaccaacttgcggatttctgaaccgattggatatcctggcaaggatggtattaagttcatattagcagtagagggcaaaaaaatcattgggtttcacggaacaacttattttaggctgtactctctaggagcatatttcactcgggttactcctacaagaattgaagcgatagggggcaaggtaggcacaaagtgggatgatggagtcgaccaggcaggttttacaaagatacatgtacgaagtggtcaagaaggcatacaattcatcaagtttgagtatgttgacaataatgggcgtctgagagatgggtcaatccatggttctatttatagaagaggttccccacacgtg

SEQ ID NO: 172702 - DNA, 823 bp, Arabidopsis thaliana landsberg
gaccctccttccgtacaaatccctgttgattggctagtacagttagtttcaccgctaaaaccaagagctttttggatgggttcgtttcctttggcccaccctgccgcagtacatttgactgtaagcatagtatcatggatcacgccttataagagaactcggaaaggtctgtgctcctcttggcttgcaagcctcgcacctgaacaaggttagaagtttgtttcttctttaccataactgtgaatggctcagttctctatttctgatatgttttctttgttttcggttgtggttagaggtaaacataccggtttggtttcacaaaggctcccttcctgctccatctcagtcgcttccgctcatcttagtgggacccggaaccggatgtgcgccattccgtgggttcatagctgagagagccgtacaagctcagtctagcccggttgcccccgtcatgttcttctttggttgcagaaacaaagacacagactttctataccgcgatttctgggagtctcacgcaagagaaggaggcatgctctctgaaggaaaaggcggtggcttttacacagcgttctctagagaccaaccaaagaaggtttacgtgcaacataagatccgcgaaatgagcaagagagtttgggatttactctgtgatggagccgctgtttacgtggcgggctcgtcgacgaaaatgccttgtgatgtgatgtcggctttcgaagatattgtgtcggaggagacaggaggaggatcaaaggaggtagcttcacggtggcttaaggctttggagaagacagggaggtacaatgttgaagcttgg

SEQ ID NO: 172703 - DNA, 549 bp, Arabidopsis thaliana landsberg
agtatgaaaaagcttatgtcattcttttgccacaggggtagtaagccaggtgaatcaaaattcagaaattttattggttttgagagaattgggaatgcctcagaagttgttgttccccttgctcatctagcggaaaaatttgaagaatcactcaacaaggttgttgagattggttttgatccgaccactttaaagtttgtcaaacctctccacgtcttttaccaaatgagcgacaaaacaatcgaagaaaaggttaggctttgctgtgggaaatcttcaacaagtggccttgctctttgaaattctcagaggaaaagataagtcagacgattgaaaccttgaagatatgtggtttgaacgaaaacgaagtccttcaagtgttgaagaagtatccgcatttcatacgtattttgttaaaattgcatcatcttcgtttgtttcattccattgactttaatgttcttttgaacaattattaaatatgtgttttgctatttatcatctaatatagatgtcatgttttatattatctcaattgttcaagtccat

SEQ ID NO: 172704 - DNA, 1206 bp, Arabidopsis thaliana landsberg; identical to SEQ ID NO: 10781

SEQ ID NO: 172705 - DNA, 3296 bp, Arabidopsis thaliana landsberg; identical to SEQ ID NO: 16590

SEQ ID NO: 172706 - DNA, 1317 bp, Arabidopsis thaliana landsberg
accgagtcgctcataatgtatgataatggtaaggggatgccacatgatgacattccaaatatgtttgggagaggtaaaatagctaatgaccaccctcacttcctctattgatttagcctggcatatcaaccttataataaacctttatattgaggctaagtttacaaattgttcttcttacagttttatccgggacgaagtatggactgaagcaaacacgtggaaagtttggtctgggtgcaaagatggtaataatctattcttatcaagtttgatatctgagattagcctgtaaaactgcatgaaatgctgaagtggtttatcagtttcaaatttgcagcctttagatggctcgttcctaggtttacaaaaggaatatatgttgtatatgttgctttaggaggatttaatcattggctttgatttgcagctggtcttttgtttttgtattcatattcataacatatctatgtttcccttcatatcgatattttttccagagaacttgtttaacccttctagtttctctaaattttcctggcgtgcaggccttaatctggtccaaaatgagtacaggtctccccatagagatctcgtcatctatgaagagccaaaactatgttactttctgcagactggatattgatattcacaggtacccatctgaatacatgagcagcttctcgaaagcggatatcaatctaattttttatgtttgggcatttgacataatagctatgaatccttcggattttccacgccgtataattgtcttcaaatggttaaaattttcaggaacattcctcatattcatctgcacgaaaagaagggcaacaaagagaaatggcatggggctgaaatacaggtggttatcgaaggaaactggacaacatacagagtacgtggtctagctcgtccttctgctgtatattatttcttaagtgttcattagacatatatgcacgcaaacttgtttaacacattttatttttttgttgtatccagtcaaagatcttgcactatatgcgccaaatggctgtcattactccttatgcgcagtttctgtttagatttatatcagagacaccagagtaagatcactatctttctgtttttttgctgctctgtcacatagctctttatgtgcagcattatcgggtttttaaatcttcttttcatgtaggaaaaatgtcactattaagtttactcgaagaacggatgtgatgccccctattcctatcgagacaaagcaccatccatcgtcagttgacttgctgcttatcaagcgccttattacagacacttccaaaaagaccc

SEQ ID NO: 172707 - DNA, 2032 bp, Arabidopsis thaliana landsberg
  unsure (1)..(2032): unsure at all n locations
tctctgttactttcctgatttgagtgtgccttaggttttattctgatggtgtcaatttttagcaattgggatgcagagcataatgtttttaagcttactgtctagtatctctacctgaaacagaggttttgcaaggatttaaatcattgatttgtctaaatatccctttggtaccaaaaactgcatttacacaaagtatttatagtttcgtacatttataaaggcagagcaactaattgcattttgagttatttgtgctatgactacttttctttgacaattactacaagacagataaccacagggtttttcacagagaatactatagttttggcacaaggtgaaatgcataacggtatctttcaggtaaaatagagctgtcaagggtggcacattcataggttgtacagttttcaatcgattgttgttcattgtaaaatacacttttggtaaaggtgattgcatgcggattccctcctttagagaacagggataaaagatacattctgaaaacgactttttcggatgtggctcgccaacaaaagacgagatggtaatccctgagtcgtcgtttgttcttcttggttgagaaagttgtaaatgtcaagtccgactccttacctaggaaattcacagcagagtctttttgcgtctgaccgcagattagacttgcagacttggaaaaacaagtggtgaacgacacctttgtcatattgtctgacatatggctggatggtgaagaggtgatttggagtactaatttactgtattttagcttcaatctttgtgcttagagaacattgcttgattggccaaaatgtgttgtccataatgaaggttcttgggaagctggaaacgttattgatggttttgaaaatgtaaagatagtgccctctttgtttcttttcatgggaaacttttgttctcgcccatgcaacttatcttttggctcttattcaagcatttggtaagggatcattaatgtgcttagaatctcctcgattgtcatcaaaactttaatcttatataattgttgagtacatgcatccattcatttttcaggcagcagtttgataaacttggaagaatgattggaaatcatccacggctaatagcaaatatgagtccatgacgcatgtacaatctccttcactatccaataaataaagccagggtccatgaggagacatgactaataaaaactcattatctgtgacaggtctctcgacagtcttgccaagatgcggtttaccagagtatttaaccgaagagcttcgagatgttattaccaatgcaatattttcaagcaatccttgcaggtgagttttctatacgatgtgtgaactctctattgctcatcattagtttttttttctttttcttntgaattgtgaacattggccacacataatcttgtctttgtaaaatgcagagtaaagttctataaccaagagattgtgttcttccgacaagatcttctgtatcggatgcgtcgttcatgcttagtaaccccttcctcagaagaaacgaatgacccttttaagcatgtaaacacatctctcgtctctgttattttcttacgtatgatttaaaagttttcctggtaaatgatggaaactcctgaaacgtgttgttacagcttgtctacacaataactcatcagagccatctatgtcctctacctctcatggtgcaacccatcatttggaactacgatcacgctcttcgactgtacccaactcctcatacggtattcataaatcttcttatttctatatcaaatcctgcacgaaacccgccttataactaagtattgttgttgtttcaaaacagatagtattaggtgacaagagtgagcaagaggtttgcaaatttgggggaacaacatgtttcaatccaggctctttctcaactgatagcacattcgtagcttatcgaccttccactcaagaagtcgaactctctgctttgtgattctccttttaacattcatcccaggagatcaattgagtgccatttttaccagacaagc

SEQ ID NO: 172708 - DNA, 602 bp, Arabidopsis thaliana landsberg
tgggctcaagaggcctgaaattggaccgttagagctgaagaacaccgcaggtaaaactcccgtgctagacatcggagccatttcaatgatcaaatcaggaaagatcaaaatcgtagcgggaatagctaagtttggtccgggaaaggtcgaactcgtggatggtcgagttctgcagattgattcagtgattcttgccactggttacagaagcaatgtcccttcatggcttaaggtagacaaaaatattatctttttcagatttttgtctcaaaagataacattttataggagtataggaccatagaatcccggtattgatagttatgggaagtttggtaaaaactaagacgttgattggtgattgatttattgttatgcaggaaaacgacttgggcgagattgggatagagaaaaacccatttccaaaggagtgaaaagggaaggccgaattgtatgcggtgggattcaccggaaaaggactctcaggtgcgtcgttcgatgcaatgagtgtagctcaggacatcgcctacagcgggaaagaagagtctaagcaacagaagaaaactgtcgctactcgccatcgtcgttgtatttcacatttc

SEQ ID NO: 172709 - DNA, 505 bp, Arabidopsis thaliana landsberg
cgattagaaataggaaaatatggtatctttcgcaaccgtaagctatttttctgaccgttaacacgctccgatgacgcgcaatcccacccctgaccctttccttctggcagatatggaatcttagtttcggatttttcggtatccagttcggatggggcctccagatgggcaacatgagtgccatttacgagtatctcggagcccggcccgaagctattcctttattatggctggcagcacctttaacggggatgctcgtgcagccacttatcggcagtttaagcgaccatacgtggaaccggtttggcaggcggcggcctttattttttcataggagcattacttagctcgcttgcgctcctttttatgccgggatcttccgcgctttggatggccgcgggctttttatggatcctggataccgctatcaatgtcagtatggagcccttccgggctttcgtggcggacgtagtgccaccaaggcagcggacccatggatttgcga

SEQ ID NO: 172710 - DNA, 639 bp, Arabidopsis thaliana landsberg
gaaactctccagctttcatcggttaccgggggcagcaactttgtaccaagtcttataagattatgctctgtgcgggaacgtttggttgtagaccaaaacagaaataaagatctggttaatatcaatgtgcctactttgaggagcttatctatcgataacaagagaaggggacatgtgccactcggtagcttttggataaatgttccttctttgatgtttttgaacattaaggatacattccaaacaatatttgaatctatgcctgcgatgatcaaagcgaatatcgaggttgctcatgaccaatcgcaatctgtgaagttcatagaatctcttacctcaacccgacatctttgtctttgttctccaacttcagaggtaaaaactttcttactccaataaatcatgtctccatttatgttttgttattctcatcactgaaaaataacataaactttataactacagaatccatatcctaatggcacaaaattctccaatcttgtacatctaaagctatgtacatgttctgcgggatggcagaatctacttgcgtgtatgctcaatgacgctcccaatcttcgttctcttacacttaagttggtatgtactatgtagaatgcaactttttactagtatgaa

SEQ ID NO: 172711 - DNA, 1345 bp, Arabidopsis thaliana landsberg; identical to SEQ ID NO: 34428

SEQ ID NO: 172712 - DNA, 525 bp, Arabidopsis thaliana landsberg
gaagactgtatgcgtcgtccatctactcaataaaaaaatggtacaatcctttgcaaaagtaagagaagaagagataagtgtaatgatggagaaggtcgagaaagcaagttccgattcttcacaactaaatctaagcaagcttcttataacacttacaagcgatgtggcaagtagagtttcttttggtaaaaaacatagcaacgagggaagcatgagcgatttcaagaatcaagtgagaaaaatcactgagctggtaggcggatttccggttagcgaatatatcccgtgtttggcgtggatagatcaaattcgtggtctgtataatagagcggaggaagtgagtaaaaattttggagatcttatggataaagtggtgcaagagcatttagatgctacaaataaaccaacaaaggatttcgtcgaaatattgctgtcctttgaaagacagagtaaagatgaaaaagaagtaagacgaagcgacattaagttcataatcttggtaagatcagatataaaagcttacta

SEQ ID NO: 172713 - DNA, 651 bp, Arabidopsis thaliana landsberg
tcgcattcatgtagctatcatattcttctcccttgtctctgttttcatcggtgtcttcggaactatcttcgcactctcctccaccggtcctgcttctgtttatcgatgcggcggatctaaagacacttctcgggttgtgtctgcttcaagaaagctcggaggagatggtggtaataatggtgttgttgttgaaagacgaaagcttttagggtttgttgggatccagactggttttgattccggtgatcgtagaactgctttgagaagtacttggttcccttctgatcctgattctcttctaaggtatctaaaaaatcttatcttgtttattagaatgatacattgcttcaaattctgaattgctggttactgagattcatcggtattgtatgattggattttgtcacctttaaagtttgaatcttttgatatcatttcagttactatagcgattttggagttcatattctctgtaaattgtgttaggcttatcgatttgagcggttttttcaatgccgaaaatgcagctagataggattgctttgatgttttgttggttactcggaacagtgtaagtcaaacaaaggatattattagcctcacttttgttggatcagtttacatctgtttattttagatttgaatccgatg

SEQ ID NO: 172714 - DNA, 765 bp, Arabidopsis thaliana landsberg; identical to SEQ ID NO: 12369

SEQ ID NO: 172715 - DNA, 592 bp, Arabidopsis thaliana landsberg; identical to SEQ ID NO: 2909
  unsure (1)..(592): unsure at all n locations

SEQ ID NO: 172716 - DNA, 486 bp, Arabidopsis thaliana landsberg
  unsure (1)..(486): unsure at all n locations
accggtgctacctaccacattcacttctgaccctggtatactcacctttgatcgccctccttcctctcttccttcgtccatcatggtgacgaatggcacgtgtcttcctgtcacatctgtgggtgcgcggccctccnnnnnnnnnnnnnnnnnnnnnnnnncttgttgctccttctttggtccacaatcttctttctattcgtcgttttactgctgataattcttgttctgtcgagtttgactcctctagtcttactgtgaaggactcggcaactcggcgcccctcctcagatgtgacagcaccggccccctctacacccttcgcgttccgcacgctacatcttattcgtcttcgtcacctgccaaagttgctgcttttgctgccacaacgtcttctaccacctggcatcgtcaccttggtcacccacggacgtgatgtcttgatgcagcttactcgtagtgccactatcccatgtactagatcac

SEQ ID NO: 172717 - DNA, 1818 bp, Arabidopsis thaliana landsberg; identical to SEQ ID NO: 26369

SEQ ID NO: 172718 - DNA, 444 bp, Arabidopsis thaliana landsberg
agagtgaagaagattggcattatgataccgcctctacggagtgggtattaccaaagctttttcacctctctacctacccattcaccaattatcgagttcagtcatgtgttaatatattgcttggataatttgcaatcctctgtttgtttgggaaagtacggcattatgaccatgtcttcaagaggtggttaccgtctctttctcaacctcgttaacccgtcagcctcctccatggagcaccttttcaaaagctcggatgcattatttgcaagagtcacttttgaccacaatgtggtcgaggatttcgcgaagcccgccttcatggtcgaatccgccaaggcctcaacagatttttcaatcattggaaaactcatgaagcttctatctttattttattgtatcatcataatctcgttgtatgaacttccctctcttgaggtttga

SEQ ID NO: 172719 - DNA, 1894 bp, Arabidopsis thaliana landsberg
atggagacaacaatgcagcaaattattccaatcttcaatggtgaatcgtatggcttttggaaaatcaagatgataaccatcttgaaaacaaggaagttgtgggatgttatcgaaaatagaattacgttgagttcgtcgtctgaaaactcaccggcgttaactagagagcgtgatgatcaagtgatgaaggatatgatggctcttcagattcttcaaagtgcagtttctgattcaatatttccgagaatcgctccggcatcaagcgcaagagaagcttggaacgctttggaaatggagttccaaggaagttcacaagtaaagatgattaatcttcagaccttgagaagagaatatgagaatctgaagatggaggagagtgaaaacataaattttttcacaaccaagttgattaatatgagtaatcaactaagagttcatggtgaagaaaagaccgattaccaattggtttaaaaggttcttatctccttgccgcaacagtttgatagcatcattgcggtctttgaacaaacaaaggatctatcaactctctctatgacagagatgataggtactttgaaagcgcatgagaagcgcttgagtctccgagaagaacgtatcaatgagggtgcgttttatggagaaaagcttggttcaaaaagaggaaacaagcaagacaagaaacaccattggaagaccaaagagtggtgtggcgtttgtgaaagaaacaatcacaatgaggtagattgttggtaaaagaagaacataggtgtgtgatagacttagacgaagtggaagagcacatctaaattttgaagagttagaagatgacaatgaagatgaatgtcatatgctatttagtatcgttaaagaggaagaagcgtcaaaaggaattgacaaaacatggttagttgacaacggatgcactaaccatatgaccaaggaagttaaatatttcatcactcttgatgaaagtgtaagagttccgatcaaattggggaatggtcaacatgtaatgacggcatgaaaaggaaacatcgaagtgatgacaagccaaggagagaagatcaacaaagatgtgtttctagtgtcgggtttagcgagaaatatgttgagtgtttctcaaatgatatccaatggatacagagtcttatttgaagataaaagatgtctcatcaacaatcctcaaggaagaaggatactggatattaaaaggaaacataagagtttcccattgagatggagaaagtcggacacaagaagtcaaacaaatgaagttgaagagatggctcatatacatgagatgtgtcttataacgtccaaaaaaactcagaatttggagggagcaatggagacgtgaagtggatagaagacatgagagaagagttgatgatgatagaaaagaacaagacgtggcaagtgttggagagaccaagcaattggagctgatcagttgaggacaagaaaagtacaagtggctatgtctttacttctggataaggtgcattttgttggaatactagcaagcagaagaacgttgctcaatgaacgaccgaggcggagctcttaatcacatcaaggttcgaagttctacgagaacaactagacgtaacgatgaagccatgatcaaggaggagtgttggaagtgaccaagtcatcgtcttatattataagagtcatatattatatagttaagtaactgatttatgtatattcgtatcacacatcaaagagatacgaatagaatcgttagttgcaaaacagttacatgtgtgtatgtgtctctacattgggttgtctttctagagacgtgtcccttagtcaaaatgtatcatgtaaacctttaaatacagtttatatatctaataaaaatgtgtggttttgatttacaaaaacg

SEQ ID NO: 172720 - DNA, 667 bp, Arabidopsis thaliana landsberg; identical to SEQ ID NO: 1598

SEQ ID NO: 172721 - DNA, 769 bp, Arabidopsis thaliana landsberg; identical to SEQ ID NO: 56159

SEQ ID NO: 172722 - DNA, 550 bp, Arabidopsis thaliana landsberg; identical to SEQ ID NO: 75494

SEQ ID NO: 172723 - DNA, 1012 bp, Arabidopsis thaliana landsberg
tgtcaaattatctgcaaaatcctttccctacaaaagcaatagaagatgatgtcacaccgatcgaaaagtggagtggtcataaaccaacagttgaacacttgaaggtttttgggagtatatgttacatacatataccgaaggagaagagaaggaagctagacgaaaaggcaatgagagtaattttcattggctacagcaacaaatccaagggatatagagtactcctacttgataaggagagagttgagatatctagagatgtggcgtttgaagaaggaaataagtgggattgggtaagacaagttgaagtcaagaagaactgcagtacacccacaagtgtttctcaatcacaagaagaacaaagtcaaagcatctcaagttcggttttgtctcagcttcatgatgaagatatcagtcaagtaggagaaaaatcgtcgacaccaccaaagaaatacaagacaatggttatggagattgcccaatggtggatctcgcgaaacagaagcatgttttgtagtctctgaagacctcattcctacggtgacacatgggcagttaagaatggcgagatgctataatgaagaaatcgagatgattgacaaaaacagaacgtggtcactcatggagaaaccagaaaataaaaacgtcattagcgtgaagtggatatatcgtatgcaaactgatgcaaatggagtttcattcaattataaagcaaggttggtcgcaagtgggttttctcaagaatacggtgttgattatctagagacatgacacaattcgagtcgttcttgctctagcagcataaatgaagtggaagctttatcaaatggatgtaaagtcggcatttctaaatggagaactaaaagaggagatttatgtcgcacaaccacctggattcatcgttaaaggcgaagaagaaaatgttctaaggctaagaaaagccttatatggcttaaagcaaacccctcaggcttcgtatgagagaatcaacgttcaaaaaatcgttaggcgc

SEQ ID NO: 172724 - DNA, 1366 bp, Arabidopsis thaliana landsberg; identical to SEQ ID NO: 70885

SEQ ID NO: 172725 - DNA, 1123 bp, Arabidopsis thaliana landsberg
ctaaatacataatctattattcaactatacgaattttactcaatatataaattttattaaaaaaatagcctcgcgggtcaaaatctagtagttgacatttgtgagtttatattggtatcacgtctacttcgaactcttttaaaaattgccaacaagggatagtgcttatagaatattatgagacgatataacctgttcaaatataaaagacatacatccacaaagtcaagtgtctaaggcttttgcaatttgaaaggttgatacaaaaaacaaaacatagtttcaatcttactcatatttttagatccttcaactcgatcttgtggcaatggtagatgcgatcacagagtttgttgtgggaaagatcgacaactatctcatcgaagaagcgccaatgttgataggagtcaaagacgatctagaggagctgaagacagagttgacgtgcatccaagtttatctcaaaaatgttgaagtttgtgacaaagaagatgaggtctcaaaagagtggacaaaactggttttagacattgcttatgacgtcgaagatgttttggacacctattttctgaaactagaaaaaagactacacagactaggcttgatgagattgaccaacataataagcgataagaaggatgcgtacaacatacttgatgatatcaaaaccctcaaaagaagaactttggatgttactcgcaaacttgagatgtatgggataggaaactttaatgagcatcgagtagtagcgagtacttcaagggtgagggaagttcggcgtgctcgatctgatgatcaggaagagcgtgtagttggtttggcagatgatgctaaggttcttttgacaaagcttcttgatgatgatggggataacaagacatatatgatctccatattcggcatggaaggtctcgggaagacttctcttgcaagaaagctttttaactctagcgatgtgaaggaaagctttgaatatcgagtatggactaatgtttctggagaatgtaatacaagagatatacttatgagaatcataagctctttggaagaaacatctgagggagagcttgaaaagatggctcagcaggagttagaagtttaccttcatgatattctacaagag

SEQ ID NO: 172726 - DNA, 1391 bp, Arabidopsis thaliana landsberg; identical to SEQ ID NO: 29413

SEQ ID NO: 172727 - DNA, 998 bp, Arabidopsis thaliana landsberg; identical to SEQ ID NO: 35646

SEQ ID NO: 172728 - DNA, 487 bp, Arabidopsis thaliana landsberg
  unsure (1)..(487): unsure at all n locations
annnnnnnnnnnnnnnnnnnnnnnnnnnnnnnnnnnnnnnnnnnnnnnnnggtggaggaagaagttgtttcttccacgccacaggttcccaaccgcctagtgcggggcactgctgctgtgcactctgcgcggcacgatacaactgcacagacatcccggactccatcgagggcgactccgggggcactgtcggcagccagagagttgctgcgtcactctccaagctccacggcctcaccaggggccatgaagcagtggcgagatgacgtcgaccgattgctcggcatggcacattctacctcgaccaggtcgaggtcacggtcatcccggcgccaacatgaggcgtcggcgtctgtgcgctcaccctcagtaagggcgcacagaccaacgacctctaggctaaactcaaccgcagacgtgtgggagaatacgcccggatctctttggaaagggcgcgcgcgcactgaaaacgatcggtggtcgcaac

SEQ ID NO: 172729 - DNA, 909 bp, Arabidopsis thaliana landsberg
gcattttcacaaacacttggaagactctttttacaagcaacgcgtttccgaccaaatgggtgaggagacgctaatctccggtaatgggtttcttcacggcgatgaagagaagatgaatttggatttgcaagctaaggttatcgaagctaaggtttggtcaagtacgataaacgagaaaatccctaagattgtggctaaaactccaatagtgacgcctcctggagagccagagacgatcaatacatgggaattgatggaaggtcttgaagatgttagtcctttacgatcaccgaatcacttgaggagcttctcctttgattttgttcgtatccaacctagtcatgatcatgatcatgatgttgctgtttcctttgatcttcctaaatcaaggtttcatgagaatgttaagtccagttgcagagttgatgatttggatccacctgatatagtttcaaggttcaaaagaaagactttaggtaaagaaagagtggtactttacttcacaagccttagaggtataaggaaaacatatgaagactgctgcaatatccggataatactgaaaagcttaggaattcggatcgatgagcgcgatgtatcgatgcattcgggtttctaaagatgagctgaagaagctcttggagggtaaattcaacaacggcgttggaataaccctgcctagagttttcttggggaacaagtatcttgacggagtagaggagattaagaagttgaatgaaaatggggaacttgaaaagctgataaaagactgtgaaatggttgaagatggctcaccgggttttggtaacgaatgtgaggcttgtgcagatgttcggtttgtgccgtgtgagacatgttcaggcagctgcaaactttaccacgaaggcgaagaagaagacgaaggagtta

SEQ ID NO: 172730 - DNA, 399 bp, Arabidopsis thaliana landsberg
  unsure (1)..(399): unsure at all n locations
catacacanactttttatcagcaatatggcaaaaagaacggcaagccaggtgaaatgtccctagcactctgcgtatttctgtcgtcctgatgaaaacctcagtgatcttcctccacggcggtcctggcggccagacctctagcagcagcaccatcttcttcgacccatccatctaccgtgtcgtgctcctcgaccagcgcggcgcagggaaatcgaagccatccgccgacctccgcgaaaacaccacctggcacttagtctccgacattgaggctctgcgcacacatttgggtgtaagcaaatggcacatggtcttcggcggctcgtgggggtctaccctggccctaaactacgcgcaatcacatccagaagttgtggggtcgctggtcctcaggggca

SEQ ID NO: 172731 - DNA, 1831 bp, Arabidopsis thaliana landsberg; identical to SEQ ID NO: 1694

SEQ ID NO: 172732 - DNA, 1110 bp, Arabidopsis thaliana landsberg
ttgtaggtttatgcatccgggggctcaagttgggtaatcgacagcgggtgcacaaaccacatgacaggggagaagaagatgttctcctcctacgagaaaaaccatgatccccaacgagctatcacattcggggatggaaatcaaggtttggtcaaaggattgggtaaaattgctatatctcctgatcattccatttccaatgtttttcttgtagactctttagattacaatttgctttccgtttctcaattatgcaaaatgggctacaactgtctatttacttatgtaggtgtcactgtctttagaagaagtgatgattcaatagcatttaagggagtgttagagggtcagctatacttagtaaactttgatagagctgaactcgacacttgcttaattgctaagactagcatgggctggctgtgcatcgccgtctagcacatgttgggatgaagaactttcataaacttctaaaggcagaacatgtgttaggtctaaccaatgtatttttcgaaaaagatagaccttgtgtagcttgtcaagcaggtaaacaagtgggaagcactcatcacaacaagaatgtgatgacaacatcaagaccactggagctactacatatggacctcttcggacccgtcgcctacctaagcatcgggggaagtaagtatggtcttgttattgttgatgatttttcccgcttcacttgggtattctttttgcaggataaatcagaaacccaagggacccttaagcgctttcaaaggcgggctcaaaacgaatttgagctcaaggtgaagaagataagaagcgacaacgggtccgaattcaagaatctgcaagtggaagagtaccttgaggaggaaggattcaagcatgagttctctgctccctacacaccacagcaaaacggtgtggtagagaggaagaacaggacgcttatagacatggcaaggacgatgcttggagaattcaagacacccgagcggttttggtcggaagctgtgaacacagcttgccacgcctttaaccgggtcaaccttcatcgcctcctcaagaagacctcgtatgaacttctaactggtaacaaacccaacgtatcatactttcgtg

SEQ ID NO: 172733 - DNA, 1540 bp, Arabidopsis thaliana landsberg; identical to SEQ ID NO: 21313

SEQ ID NO: 172734 - DNA, 108 bp, Arabidopsis thaliana landsberg
tcagctatactcttggcaatgaagtgtatgattggtttcgacaactaagatgtagcattttttacagactttttagatttggtgaagatggtatcttcttcaaccgaa

SEQ ID NO: 172735 - DNA, 541 bp, Arabidopsis thaliana landsberg
ttctggtcccggtgtgtggtcgccctgtgtgcgtggcgtgcaagtggtggcaatggcggctgtgtgtgcactgggtgccgcgcaagcccaggcagctgatggcgacatcacgcagtacaaacttgcaaacggtttgcgtttggtggtgaagaaagaccaccgcgcacccactgtggcacacatggtgtggtacaaaattggcgccatcgacgaattcaacggcaccacgggtgtttcgcacgcgcttgaacacatgatgttcaaaggcaccaagaagctcaaacctggcgatttttccaaaattgtggctggtctcggtgggcaggaaaacgccttcaccagccgcgactacacggcttactttcagcagattcaggcccaaaaacctgaagcgcatgatggagctggaagccgatcgcatgcacaacctgcaggtgttgcccgatgaattcaagaaagaaattcaggtggtgatggaagagcgccgcatgcgcacggaagaccaggcccagtccaaattgtataagcctttcggccacgc

SEQ ID NO: 172736 - DNA, 1723 bp, Arabidopsis thaliana landsberg
acactttcttccaagcttaatcaggataagacctcacacacactcacaagtgatagatggcttgaaagaaagcttaggttagggtatggggaaattgctctaaagatgagagtcagctgtttggatcaacaagtgtggtgaaatggataagaagatccaaatattctagggtaaccatgagtttaacaagcaatgcatagtatgataattaaaagtcaaatttatggttcaaattgatagggaatagcttcaaatcacagcgagtttcgactaaggaagatcaagtatatgaattcaaaagatggtgctgttttacttcaagatcaatcggttaagcactagacaactaacaacaagggcattgaaactatctagtgaacattgcaaatttacaaggctatgatcatcattatcccctatgcaagtgcaaaatgcaacaacctatatgataacattcttaaaacagccctattaatgcaaatgcaaactacatgacactctattttttttggaatcattttcgaaaattttcaaatttttatgggttttctatgccttagatgatgcaaaaatttgaataagaaaacatgaaacaatgttagatacatcttgaaccctcccccaaacttaaattacacagtcccttgtgtaataaaaattcaaagaagaattaaagagaaataaccacacaaagcaagaaataaaagaaatgcaataatatgtacagtgaaatggagtgatacctcaacatttagacgaagaggttctggacaaactcgtccaggcggtcttgtgtgtactcaggatcacgtgtggaggtgttggggttattggcgttgtactcggttgaccggtcgagcatgtatcccgagtagtactcctctcggcttgggtcagcgttcaaaaccaactggttcactggaccgggtgggcggctgttgaaacagcgatctgagaaggtggagctcctcccgagctcataatttgaggctcttggcgggtcgaaacgagcgtcccttcgcggtgccacactcgttgagttacttctcctaaactcgggtcgaggtggtggtgatctctgtcttcgttgcagctcctgaatctgaaccgccattccatccattgctctcttcatcttcctcaccttcttcttcaacccactgaacaacttcctctgaaacttgcccagacctttgagcattcccaacttcttgtgaacttgaccgggatctctctctggatcggactcagcataatcctcaaagaaaaactgctccgctgcagcttcgcacgaatcttcttgttcatcaaactgttcagcttgactgaactcagcttgctcaaactcgtcctggccatactcggccgagtataggcttcctgctcagcttcttcttcattccactctgctccttcttcttgagactcacttcctatgctcggctctgcttgtaggggcgcaaggacattgactaagatcgattgaggaggatcaaagtcaatgttgttcccaatccactacaagaaaacagacaaacaacgactacagaaagcgacaacagatgtagtcgtcgtttttggcgactaagtcacgaccgttttacgacgcagatacgacaacatgaacattagtagtcaattagtcgttattttacgactaaatatgttagtcggcatatactcgtatagtaacgactatttaacgattatattatagaagaaa

SEQ ID NO: 172737 - DNA, 2200 bp, Arabidopsis thaliana landsberg; identical to SEQ ID NO: 21526
  unsure (1)..(2200): unsure at all n locations

SEQ ID NO: 172738 - DNA, 546 bp, Arabidopsis thaliana landsberg
  unsure (1)..(546): unsure at all n locations
gtttagttgtagctcggcgcctccattacagagggacatatgtgtctgattcgcatacggctttgtgcgatgatctgagtagtgatgaggaaatggaaatagaggagcttgagaagaagatctggagagacaagcagcgttnnnnnnnnnnnnnnnnnnnnnnnnnnnnnnnnnnnnnnnnnnnnnnnnnnnnnnnnnnnnnnnnnnnnnnnnnnnnagagcactctagtaagagaaccatgtacaaggcacaagatgggatcttgaagtacatgtctaagacaatggagcgatataaagctcaaggttttgtttatgggattgtgttagagaatgggaaaacggtagcgggatcnnnnnnnnnnnnnnnnnnnnnnnnnnnnnnnnnnnnnnnnnnnnnnnnnnnnnnnnnnnnnnnnnnnnnnnnnnnnnnnnnnnnnnnnnntctttctgatggaagtgattcagggtctgagattggggattctaccgcacagaagttgcttgagcttcaagatactactctggagctctgtatcggctctc

SEQ ID NO: 172739 - DNA, 943 bp, Arabidopsis thaliana landsberg; identical to SEQ ID NO: 29064

SEQ ID NO: 172740 - DNA, 315 bp, Arabidopsis thaliana landsberg
cctgttatatgtgcggaaagtcgggacattttgcacgagattgttcaacggtcgtacagactaaagtgccaaatctggcatttgttacttgttatacttatggggagtcgggacatgtgtcgaatgcatgcccgaataagcaagggggactaaagggtaactgagtcggagcttgtttcatttgtggagacctagggtattatgctaacgcatgcccgaataggcaaataaggcagcatacccaccgccagttcagaaagctaagggaccaccggtaaagaagcaagccactccagcaaatgtttatgccttaga

SEQ ID NO: 172741 - DNA, 601 bp, Arabidopsis thaliana landsberg
gaaaatgtcaataaagcattggagttgataaattgcgatgtaatcaaaaaattggcacggaccgctaaacacggtgtggtcattcttacaaatggtgaattggctaagttaactccggaagtgaaaagcattgttcagacaacatccggttatctgaatgctccggcactggggattttattattagtgactttattattgatcaaaggaacacaggaatcggcatttataaatgggatcatggtattcctcaaagttgcgatcgtactcgttttcatcttcattggctggcaatttatcaatccgtccaatcacacgccttatttgattcctgaaggagttgaaaatcacaaagaaattttcgagcacggttggaggagaagttgtcggtggagctgccattgtattctttgcctttattgaatttgatgctgtttctgcagctgcacagaaagcaaaaaatccgaaacgggatatgcctatcgggattctcggatcattagttatctgtacgattttgtacattttgtatgcacaagttttgacaggtgaagctccatgggaagaatacgaaaaagcaggtaaagaagcatcggtaaca

SEQ ID NO: 172742 - DNA, 2340 bp, Arabidopsis thaliana landsberg
ttggggaagtttaacaaccaaattttccaggaaaattcatcttcttccatcaatcttcttcgtttatcttcgatttattcaattcatcaccatctaaatcgattccacacatcatcttctccattcttcatcgtttctcagctcaaattgctgattttttgaagtcgaaaagcaacatcaagctttcgatctttctttttcatcatcgcttcattgattcacattgaatcttccattatcatcacttcatttcattcgtttctggatttggttgtttctttactcatcttcttcaacaatgtctcaatcgacggatcaatatgacaatacattttttcttcacggctcggatcatgctgggctcgtcttagtatcggatcgattaacagatggggcagactttcattcatggcgacaaccagtgcgtatggctctgaatgttcgaaacaagcttggatttattgacggtacaatcactaaacctactgggaatcataaagattttggatcttggtcaagatgcaatgatatgcgagcaacatgggtgatgagttctgttagtaaaaaattagacaaagtgtattgtttatcaacactgcggaagggagatggaatagtctaatgtcacggttctaacaagatgatgctccaagagtgttgaaatagagcagaggttgaatgctattcagcagggaacaatggatattagtgcatattatacggagttagtaactttgtgggaagaatataggaattttgttgagcttccattgtgcacttgtggaaagtgtgaatgtaatgcagctgctttgtgggaaaagctacaagcgagaagtcgtgtgatgaagtttttgatggggcttaatgactcgtatgaggctacacgatgacacattcttatgctcaagccgattccttctatagaagaagtgtttaacatggtaacaaaagatgaaaggcagaaaaatttgaaaccatttcacaagagtgataatgtagtgtttcaagcttctgataatgctaagttctctgttgatcagaatcctgcagcttatactgagtactcatataatggtcctgcagataataatgcttgtgcagtacagaatagttataaaccaagaggtgcttctcgtcctttatgtacttactgtgggatgacaggtcatgtaattcagaagtgttacaaactacatgggtatccacctggatatattcctggatacaagagtaatccaacatctccagggtatcaaccaaggtcaccatcatctcaacaatcgtttgctcaaccatcgtttcagcaatcatttggtcaacctcctcaacctagagcgtcgttctctagtcccagacctcctctacatgctgtagctaatgtcatgactggtccattcaacacacctaatgtctgtgttccaccggtggttactcaacagaacacacctgttactaatgtggacttcaatcagatgaacaatgaccagattcagactttggttcagcagcttaatactcatgttgagatttcagaacaccacgaaccatcttcatcagtttctttgattactgaacacggtgctatgcatctgtcatcttcttctggtactgtctcatttccttcaacttctcttagatatgagaatgataaattgacatttcaacatcaatgtctttcaaccctttattcaaatcttccacatggaagttggataatagacagtggagccactagtcatgtttgttcagatttgggattttttaatgaaactgtaacagtgtctagagttacagtctcattgcctaatgacactagggttgacatcacgcattgtggacacatacatttgtctgaatcattaatattgcatgctgttttgcatgttccctcttttaagttcaatctcatatcagttagtagtctgttaaagcataatcatttgtaagctcatttttatccggatttttgctttattcaggagtctattcagggcttgatgattggtagagggattcttctgtacaatctttacattttacaacttgatgcatcatcaccaccatcatctgcagtatcttcatcacattcatctcatttctctggatccttggcggtcgatggaaagatttggcatcaacgcctaggacacccatcttctgacaagttaaaagttctttcgtgtacactttctttgtctaagagtcatgtgttagagtctcattgtgatatctgtcctttagctaaacaaaaaagattgtcttttgagtcaaataataatcagtctgttaggccatttgatttgatacatatggatgtgtggggtcctttttcagtagagt

SEQ ID NO: 172743 - DNA, 591 bp, Arabidopsis thaliana landsberg
atggatgagacagagtcgtcatcttcaaggccagagagagaaaagagagaatatgatagcttcagaagaaaagctgagataacccgagggaagagagcgatgacagagaggtatgagctgatagatgaggatctggaagacgagtacatgcctaagcatactcgcagagccaccaaacttctgcacaaacccgatgtattgcctgctgaggaatatattaggctcttcaagctgaacgagttctgtagcacgaggtatccttgctcgaccacagttgcacaactcggattgttggaggatgtttagctcctgtaccagagttgtcatctggacactctgatggcttatccgtatgtagcatatgaagatgagacaattcaattccaatccacgctgcaagtggagctctaccaaggtatgacctctgatgagttggattgtgaaggattgggattcttgagattctctgtgtatgatcatgagtataggttatcaatcaagcgcttggaaggattgtttggttttcccagtggaacgggaactaagcccaagtatgacagagaagagttgaaagacttgtggatcaccatt

SEQ ID NO: 172744 - DNA, 1121 bp, Arabidopsis thaliana landsberg
atgtcggaatgtgatttgtatgaccttaaatactcatgcaacttcatgtcttggcggggaagaaggcatagccacttagtgagatgtcgcctggatagagctatgtcaaatagctcttgggtggaagcttacccatcagggagatctgaatatttgagatttgaaggctcgatcatcgtcctattgtcacctcctttgatcctgtaagacgaaaacaaaaaggattgtttagatatgatcgtcgcttaagagataatgaggacgttaaaagactagtgttgtctgcctggaatctaaatcagctagactcagttgagaagagattaggtagatgtcgatctgcaatcattgaatggaataaagagcagcaatgtatcagtaaaaaacatattgaatagctgcagatgaatctttaagaagctttgtcttcacaagacttagcagcagagtgtgtggagctgattagtaaagaattaagcttagcttaccaagcagaggaagagttctggaaacagagaagtcgccagctgtggttagcgcttggtgaaagaaactctggctactttcatggtgctactagaggaaggaaagcaataaacagttgttcagtgatggaaaatgatgaaggtctaattgtttatgaagaagatcaaatagctgtaaccattgctgactactttaaaaagatttttacctcagaggcttcagtttgtagggacatagtcctggaagcgctgcaaccttgtatttcccatgaactcaatgaatcactcattgccccccccccttcaacggcagaaattaaaatagcttgctttgcgattcatgcggataaagctcctggcccggatgatttttctgcaagctttttccagtcaaattgggagtcaataggaggtgtagtggttcatgcagattcatagattcttttcttcagatgtcttgcttgcatacatcaatcgtactcatgtgtgtctttattcagaatatctctagtcccagaagggtgtctgttttgcgtcctaaggctctgggttctgtgatctacaagatagtgtccaagctactctccaatagatggcagccagtcctgcttcacatcttgatcgtgataacctaat

SEQ ID NO: 172745 - DNA, 1517 bp, Arabidopsis thaliana landsberg
agctttaggcataatgagtagcacggcacatcaccggtgactttatattagtgatttgagttctagaacggtttgctaataatcctaatcatagcttgatctgttagtcatttatttcctaagaatgtccctctgacgcttttctccatctgatatatatcttgacttttattgcttttctttgtttcttattttataacctatttgtttagcttaatttgacatcttcacgggtctggtggatagaatccgacaacgaactctgtcttggtctacaaggttcctgtcaagagctggcaaacaagtcctgctcaaagcagttttagctatgccctcgtatgctatgacatgcttcaagctccccctctctctatgtaaaaggatgtaatcggcgttgacccgtttttggtaggatgatacaccggataaacgaaaaatgagttgggtagcattggagaagctcactgcgttaaaatcagagggaggattaggttttagggaggtggctactttcaacgattctctattggcaaaaattggctggaaacttttgaagaatctagaatccctcttggctcaagttctacttggcaaatactgccactcttcaccttttatggaggtcacccccttgtctaatgcattccatggatggagagggattctagcgggcagagaaatcttaagaaaagggttgggatggacggtgggatccggagaagacatatgtgtgtggtactccctctggctctctacctcaagcccaaaatcccctttgatccgccaaataaagactctgctactttattggtcaaagacttgatcttccctgtttctcaccaatgggactgtgaagatattcgtagggaattacttcatcatgaggaagatatactcagcttgatattgagttctacaaaaagaccataccgactttggtggctccctgcaaaagcgggagtttattctacaaagtctggctatggcaatggcaaagtctaatcttgtcccctgcttggaggagagatttaattggaaaactaacaactggaaggtgtatacgtcacctatgatcagaatgttcctctcgaaagctacaaaaaaggcgctcccaattgggacagcactttcagcaagaggtatagtggtggaaacagggtgtaaacgatgtggggagatcgaggatgctctgcatatcttttttagatgtcccattgcagtcaaggtctgggacttggcgacacttcttcccaaaccaagagcaggttcagtagtctacgtcaagaagatcctggaaaaggggcgcacttgtctcagtttacctcctttaggtttaggaagcacccctctgtacccttggattttgtggttcctgtggaaggcccgcaactttgttattttcgaagaccggattctcttcgcagaagacacggtgcaaaaatcaataatagaaaccaaaaggtggcacaatgcaaagctccaacaaacccctacatcgccaaccctgagtctggcgg

SEQ ID NO: 172746 - DNA, 916 bp, Arabidopsis thaliana landsberg
  unsure (1)..(916): unsure at all n locations
ggaagggaacctggagaagaagtcagctacatcaacaaaacccagggtggctacattggatacaacaacttcaaaaccaacaacccgaacctctcctaccgcaacaccaacgttgctaatccacaagaccaagtgtgtcctccacagcaacaacaaggtcagaacaaaccttttgttccctacaacaaaggttttgttcccaagcagcaatttcaggggaactaccagccacaaccataacttgggtttgtacctcagcaaaaccaaggtcctgctgctcctaacgctgacatgaaacaaatgcttcaacagctgctacagggacaagtatctagctccatggaaattgctaagaagttatctgaattgcaccataagctgaactgcagttacaatgacctgaatgccacagtggaggcattgaacacaaaagtcagatacttggaaggacaatcagcatctacctctgttcccaaagttacaggacatccagggaagtcaattcagaatcccaaggagtatgctaatgttcatgctatcaccatcaggaatggaagagagttatccattagagagagacccaagtcagtcactaaggacagtacataccaagatggggaggatttcagtctcaataaagatcaagctgacaaacaactcgagcaatcactcgaccagtcactcgagcagccactcgacaaatcactcgannnnnnnnnnnnnnnnnnnnnnnnnnnnncactcgaccactgtactcgaccgacattcccagcaatatcaccatctactctgaaaccagttgttgtcaaaaacaaagaaaaggtcttcattcctcctccctacaagcccccacttccatttcctggcgacagaagaaagagttagaagataagtacagagctctgtttcctggcaa

SEQ ID NO: 172747 - DNA, 686 bp, Arabidopsis thaliana landsberg
atgttcttcttggtgtttgctttctttttgatttctccggtgagatcaagcgatgttgaatctctactgagtttgaaatcatccattgatccttcaaactcgattccatggcaaggaacagatccttgcaactgggaaggagtcaagaaatgcatgaaaggaagagtctcaaagcttgttcttgagcatttaaacctcactggctcactcaatggcaagagtttgaaccaattggatcaacttagagttcttagtttcaaaggaaactctctctttggctcaatccctaacctctccgctttggtcaacctcaagtctctttatctcaatgataataatttctccggtgagttccctgaatcactgacgtcgctccaccgattgaaaaccgttgttctttccggaaatcggttttcgggcaagattcctacctcgttgctccgtctctcccgcctttacacgctttacgttcaagacaatatcttctctggttccattcctcctttcaaccaagagactctcagattctttaatgtctcaaataatcagctctctggccatatcccaccaacacgagctctaaaccggttcaatgagtcgtcgtttaccggtaacattgctctctgcggtgatcagattcaaaactcatgcaatgacaccactggaatcacttcaactccatcagc

SEQ ID NO: 172748 - DNA, 408 bp, Arabidopsis thaliana landsberg
  unsure (1)..(408): unsure at all n locations
nnnnnnnnnnnnnnnnnnnnnnnnnnnnnnnnnnnnnnnnnnnnnnnnnnnnnnnnnnnnnngcgttccggcccgatcatcgacctgaactatgtcgaggctctcgccaaggcgcaggactatggcggcttcgaccgcgtcctgctcgccttccattccacctcgccggagagcatcctggtcggccagcatgtcgcggcggtgacccgcgacctcaagctgatgatcgcgcatcggcccggcttcacggcgccgaccgtcgcggcacgccagctcgccacgctggaccatatcagcggcggccgcgccgccgtgcacatcatcaccggcggcgacgacgccgagctcgcccaggacggcgaccatctcaccaaggacgagcgctacgcccgcaccagcgaatatctc

SEQ ID NO: 172749 - DNA, 65 bp, Arabidopsis thaliana landsberg
atggatgcatcagattccaacatgaaggacggatttaacgtggaggaaaagttccagaaagtgag

SEQ ID NO: 172750 - DNA, 490 bp, Arabidopsis thaliana landsberg
  unsure (1)..(490): unsure at all n locations
tcagcatgggccgcaaacacccgatcttgaaccgggtacgcaaacatgaaggcatcgantacgccgcgcccagcggcacgcccatcaaggcggccggcaaaggcagagtgatcttcgccggcgtcaagggcggctacggcaacgtcatcattctcaagcacggccagaagtactccaccctgtacgcgcacatgcggcggttcgccaaaggcgtccgggtcggtacccgtgtcgatcaggggcaaaccatcggttacgtgggcatgaccggcctggccaccggcccccatctgcactacgaattccgcgtcaacggcgtgcacaagaatccgctcaccgtaccgctgccacaggcccagggcgtcagtgacagcgagcgcccccgcttcctggccgaggccagacaattacgcacccaggtcgccacgctggcggacaccgccaccctggccagcaaccgtgagctctgaacatgagctctgacgacctg

SEQ ID NO: 172751 - DNA, 526 bp, Arabidopsis thaliana landsberg; identical to SEQ ID NO: 13101

SEQ ID NO: 172752 - DNA, 1687 bp, Arabidopsis thaliana landsberg; identical to SEQ ID NO: 74621

SEQ ID NO: 172753 - DNA, 590 bp, Arabidopsis thaliana landsberg
cattaaaatatgctggaaaaaagatatcaagccaaaagatatcatgacacgcagggcatttgaaaatgccatcacagtggtaatggtgtgggagaaagcactaatgccgtgttgcacctgatagctatggccaaagcggcaggcgtgaaacttacgcaggatgatttccaggcgatcagtgaccgtgtacctgtacttgccgactttaaacccagcggtaaatatcttatggaagacctgcatgaacatggtggtgtgcctgcagtgatgaaatatttattaggaaaaggattactgcatggcgactgccttacagtaaccggcaaaacagtggcggagaaccttgccagtgctcctgatctcgattttaccaggcaggatattatcgttccattggaaacaccgttgaaggcaacggggcacctgcagatattatacggcaatctcgccgaaggcggcagcgtggcaaagatcagcggaaaggaaggcgagcgttttgaaggaaccgcacgcgtatttgatcgtgagcccgacctgatcgcaggactctccaaaagccgtaagcatgcaggtgatgtggtagtgctccg

SEQ ID NO: 172754 - DNA, 158 bp, Arabidopsis thaliana landsberg
ccgccccgctcatcgagctgcacatctccaatgtgcatgcgcgcgaagagtttcggcgacactcttacttgagcccgattgccagcggcgtgatcgtcggcttcggggtgcgcggttacctgctggcgctgcgctacttggtcgagtcgtcgggggcc

SEQ ID NO: 172755 - DNA, 266 bp, Arabidopsis thaliana landsberg
atgaagctcgtactcgagggagtagactcatttgagacattaagagtggtgggaaccttcaactatattgatccagattatgttggtaaattagattatcataatctgacttaatcttcagctcattatatgtataagtatttgtgttaatttaactattttcaaaataaggaaaaatataaaaaataatattttcgagtatatttgtaggttctaagagggtcatcaaaaaagcggatgtatatgcatttcaagtgattctaatg

SEQ ID NO: 172756 - DNA, 526 bp, Arabidopsis thaliana landsberg
cggcgtcaagtattttcgggcgacgagattttttcggcaaacgacgtcatttcttcacaaggttagatcttttctattaaagatatagggtttatgtggtttattttagtcaagatctagggtttataatagtcaagatctaggctttattttagtcaagatctagggtttattttagtcaagatctagggtttagtcaagtatttgatagttttatattttgtatttgacagacatgcctatctcttttaacggaagctccgactcctctcctagtgagaaatctgacggtttcgactactacaatgcaatacgggacgggaattggggcattccgactaagtgctattgtggaagagacgttgaaaagggtaatgtggttggtggcaatctccacgggaaaacaagattccgatgtccactaaatctgaccgaggtggatggagaacacttgcataagtggtgggaggaagccattgaagaggagttttcgaagtattgtagccggaaggacaagcgagaagaa

SEQ ID NO: 172757 - DNA, 260 bp, Arabidopsis thaliana landsberg
atggtgaaaaaaagcaaaggtcgtcaaaaaatagagatggtcaaaatgaaaaatgaaagtaaccttcaagttactttttcaaaaagaagatctggacttttcaaaaaggctagtgagctttgcacactttgtggtgcagaagtggccatagttgtgttctcacctggtcgaaaagtcttttcttttggtcatccacaatgttgattctgtaattgatcgattcataaacaataaccctctacctcctcaccaacacaaca

SEQ ID NO: 172758 - DNA, 527 bp, Arabidopsis thaliana landsberg
gaggaagaaggagaagaagagcagcaaatggtgaggagactatgcaggaggagattcttgactcgattgatgagtcagcaagagaaatcagaagcagtaggagcacacttaaagaaggtttggccaaaatggaagcagaagaaggatattggtggtggacagaacagaggaggagatcatcatgttcggctaagttcaagtaccctccttatatgatggatgtaaaaggtctgaatatgatgatgaatggtgatgggacatcatcctcagttgctgtcttgaacccaacaatgtctattgggcagatacttagtaggaaactacttcttgctgatgagtcagcgatgatgatgaatggaagagtttcgttgggtcagattcttggaaagactaactttggagatagagagaaggaaaaaaggttcaatgggaagaggaagcggttcggattcgcaaacttgtctgtgatgttggataaagaaagtaagaagaagaataagaagaagaagatagctttgaacttaagt

SEQ ID NO: 172759 - DNA, 223 bp, Arabidopsis thaliana landsberg
ttatgaggattagataatatgttactaaacctttccctgtattatgctaaatgatctcctccccttgaagaaatagacggagaccatgatttccaagagaagtttgcttgcccattttgtgcagagtcatatatatgataacattggcttgtactgacacatatgtgatgaacattttatgaagtcaaataacaggttattattaacacattaatggaaaaat

SEQ ID NO: 172760 - DNA, 529 bp, Arabidopsis thaliana landsberg
atcatcaatcatcaccagattcagaaactccggatcatcatcatcatcatcatacactctcgcttctcgtatctgcacagctcaagagactcagattcaatctccagctaaaattccaaatgatgtggatcggagtcagtattcaggtttgccaccgacgagagaaggagagaagccgagagtagtggttctcgggtcgggttgggcgggttgtcgattcatgaaagggatcgatacgaatctctacgatgtcgtttgtgtttctccgagaaaccatatggttttcactcctcttcttgcttctacttgtgttggtactctcgaatttaggtctgtcgctgaacctatctcacgtattcaacctgcgatttctagagagcctggttcttttttcttcctcgctaattgctctcgtcttgatgctgatgctcatgaggtattgcttccgtttatagatgcttcccctttctgagattatgtttctaagtaaaggaaattttcagatcaatttggttagtgatgatgcagc

SEQ ID NO: 172761 - DNA, 607 bp, Arabidopsis thaliana landsberg
gattactttagacaatgctaccaataataataatatgcaaaataatttcaagggacaacttcaaatgattagcggtagtggtttaatctgttacgggaattatttgcatcattaggtgttgcgctcatattcttaacatcattgtgaagaaaggtttaaaattagttaaagatgttttacacaatattcgagaaagtgttctataagtgaacgcatctccacaaaggaaataagcttttacagcttgtgtcgagagagtgggaataagaagtggggcagggttatcccttgatgtgcctactagatggaactctacttacgaaatgcttgctagatcattaaaattcagaaaagcctttgatagcatggaggcttttgataggaattataagtttttaccattagatgaggagtgggatcgtggtgaaaagatctgtgacttaagtcatttagtgtaatctctacttacatttcaggctctaagtatcccatctcgaatgtatacttcactcaaatatggaggattgaattattgctaaagaagtatgttgcttgtgatgatgaggatataaagcaaatgactatggaaaatggaaatgcatataaa

SEQ ID NO: 172762 - DNA, 277 bp, Arabidopsis thaliana landsberg
attggctatacatccttcgttcgttctaaaagtttcccatctagacctcacccacaaccttctcatgtcgatgagcagttgtctcgtttgagatcttctgaggaatccttaacatcttcaagctttcttatcttccaaagacttgacaaccttcaggatctacatgaagctcttgacaagcttatttacctactcttcacacaacatgctctagctcaagaacatataacaagaaagctgttgaacaacttcttgatggatctatgaagatcttgga

SEQ ID NO: 172763 - DNA, 401 bp, Arabidopsis thaliana landsberg
cacaataaatggttatgtatttccgaaacttcccattgttaagtactactgaagtaaatccgcttatgaaggattatgcagtgaatctattcctcctctacgatttgacattatccctggtacccaggtttttatatgaaaacacaggacaacacagactaggaacatggtacacgcttggcctcgtagcaatgtactatgggatttggtcggaaggtacacaccgctggtgaaatggctcaaaattgagaatagaaaaagactcacagttgcgattttgttgcgttttttcctcattccggaattctacttcactgccaagtatggtgatcaaggatggatgattatgctcatttctattttgggattgactaatggacatctcagtgtttgcattctca

SEQ ID NO: 172764 - DNA, 899 bp, Arabidopsis thaliana landsberg
agagagaagctgaaatggttgaccgtgccgctgctaagaatctcctgaatgaggatggactccaatttgaaggagaacatcatggagagtttcaggatccaccacctcctgaagccattaatcgtcctactgctagtggaaagagttgtccgtgtagctgctgctaatgctgctcatttagccgcgttgaatgctaggcttgcgcctgttcgacaaactctaggagatcacgatgctcccaatcttgaatttttccgagacaggaaccaacacctcactatcaacaggaatgattttgagatcaagatcgggttgttgactcttgtgaagcataatcagttttatggtctttcctgtgagaatccggtctatcatttagataattttgaagatatatgtgggacaacgagaataaattgagtgtcagatgatcttatcaaatgtagactatttatattctctttggcagacaaagcccacctctagtttcagtcattggattctacaaatttgagaaattgagaagactacaaagctgaatttttgggacagtatttcacgcaatctaggacggctatcctgagataattctaactcaagcaggctcagggataattccaacctcctgcaggtactgctcatgtgtcttcatctggaatagtgagattaaattgatgatgtagcagattgtttaaggccaaaagaagaatgttgttgatatcaatgtaaaggtggatatcatgtacaatgatctcattgggaagttcacaacgctatcctcacatgtcaagactcttgagaatcagttctcgcagattgtttctgcctctatgcgacaacctggtgctcattctggaaaaaacaaacccaagggaaaagagcagtgttatgctgttatg

SEQ ID NO: 172765 - DNA, 624 bp, Arabidopsis thaliana landsberg
caacagctttaatagggaggctaataagaacacggtatgttggggttggaaaagaacctaggcctaatgagtttaagaaaaatactgagacaagaattcagcctcaatgtttcgtactggaaagcgtggagagcaagagagattgctatggacaatgatatggggtcagcaatgagaaattttgcattaatccaaccatacttcaaactactgatggcaacaaaccaaaactcaattaccgcactaaaaacagaaacggataatttgggagttatccgttttaagtatatgttctttgcattaaacgtgtcgatcaaggggtatgattacatgagaaaagttgttgtaatcaatgagactcacttgaggggcaggtatggagaatgtcttgtcgcggcgagcaatcaagatgcaaatttccaatgtttcccactaacctttagaattgttaatagtgaaaacgacgagacgtggacctagttcatgaacaagctaagtgacgttgttccagacgacccagacctggtcttcgtctcggactggcatgcctccatctactcaagtattagaaaggtacatattaggagcaaaaaaccggaaaccacagagagaaatgagagagat

SEQ ID NO: 172766 - DNA, 281 bp, Arabidopsis thaliana landsberg
  unsure (1)..(281): unsure at all n locations
atgggaacttataattttgaaacgtctaaagcctttattaatacaatacaagtcttccccttaagctcaggcaaactcgataatttgacctttgctgtaaaagacctgattgatatagcagggcaaatcacaggatgtggcaatcctacttggctacaacaatctctgcccgcacctgctaatgctnntatgtgtgagcaattattatcagaanggcgcacttgtcttggttaaacgnataccgatgaattcgcatatagttggataggggaaaaattttt

SEQ ID NO: 172767 - DNA, 504 bp, Arabidopsis thaliana landsberg
gtttgttgatgaaaatgttgcgtgtaggatgagttgctatggggatcggcttggctacatatagcgtcgaagaaacgagtgtatagagagttcattgtgaagaaccaagttattctaagagctggagatacgatccacgaatttggttgggataataaacatgccgggattaatgtcttagtctccaaaatggtactaatgggaaaagcagattattttcagagttttaagcaaaacgctgatgagtttatctgttctttattgcctggaatttctcaccctcaagtccaatactcacaaggaggattattagtgaagagtggaggaagtaatatgcaacatgtaacatctttgtcttttttgttactaacatactctaattacctaagccacgcaaataaggtggtgccatccccgaatctcagcttctcctgctcttctccgaaaagtcgaaaagcgaacaggtaactaaactaaccaacattcctctgtgttagcatagag

SEQ ID NO: 172768 - DNA, 1602 bp, Arabidopsis thaliana landsberg
ttcttagtcgactcccacaacaccagacactcaaccctgacgagaccaaaaagaagcttggaccctgtatgtcgactggtcttctttgtcctgatgatccggaattggcatccgtctcgtctcaccaaccggtgaaatacttgaacagtctttttgtctacgttttcctgctacaaacaatattgccaaatacgagtcgctcataaccggactacgcctggcacagggaatgcggatcaaaaagattcacgccctcgtagactcgcagctcgtcgctagtcagtacaacggagattacggggccaaaaacgataaaatggaaacatatttgaagatcgtccaaaaactagcaggaaatttcgaaaccttcgagctgaccaaaatcccaagaggggataacgccccccgtttcgcactggcatcactcgcttcaacttcagatccggatctacgacgcgtaatcccagtcgagagcatcgaccaaccaagcatcgacgagcaggcagccccagcaatggtaaactcaatcaaatatttttgagcacccgacccaacagacgaaacagattggcgagtagaaatccgggatttttatccgacgatgcaatcccacatgataaatgggcggctcgacgtctacggataaaagcttctaggtacaccttgttaagggaatttctgtgaaaagtcagcgcttctggcgcaatgctcaactgcatccacggtaacgaagtcactgaaacaatgaaagaaactcatgagggagctggaggcaatcattctggtggacagtccctcgctctaaaaataaagaagctcggcttctattggccaaccatgattacagactgcaacaaattcgtagccaagtgtgagcagtgccagcaacacgcgacgacgatctatcaaccaacggagatattacgcaccggcgtcgcaccgtacccattcatgagatgggccatggacattgttggaccactacccgctttacggcaaaaacaattcattctggtgatgaccgactacttcacaaagtgggtataagccgaattctacgcaacgatccgagcaacggacgttcagaacttcgtatggaatatagcatctgccggcatggcctcccctacgagatcatcaccgataacggctcgcaattcatttccttaaccttcaaagacttttgcgcgagctggaaaatccgactcaacaagtccacgccgcgctatcctcaaggaaacggccaagctgaagcaacaaacaaaacgatactagccggtctcaaaaaatgactcgacgcaaagaagggagtcagggcagacgaactcgacggtgtactctggtcgtaccgtaccacacctcgcgccgcaactgagtataacaataagaaggttcaaaaccgccacttcgacgtcggtgacttggtcctaagaaagttttcgaaaacaccgccgagttgaaggcgggcaaattaggagcaaactggaagggccgtatcagatttctaagatcgtccatccaggaaactacgagctgcttactatggctggaactgaagtcccgcgcacctggaactcaatgcatctcaagcgatactattat

SEQ ID NO: 172769 - DNA, 941 bp, Arabidopsis thaliana landsberg; identical to SEQ ID NO: 6191
  unsure (1)..(941): unsure at all n locations

SEQ ID NO: 172770 - DNA, 252 bp, Arabidopsis thaliana landsberg
tccctgcccgagtcgtccgccaccttctcggatcgcataaaagcgctgatctacagggtcggcagcgtcactgaaatcgcacgaatgtgcggtttttccgaaggtgtcgtccgtagttggcgagatggcaacaccgacccttcgcgagcgcgctgcgtgaccctggcccgcaccttgggcgtctcgctggtctggctggtcgcgggcgaaggggccatgcaggtcgacccgtccgtcaatgcgccgatggac

SEQ ID NO: 172771 - DNA, 788 bp, Arabidopsis thaliana landsberg
acgacatggtcggcatagatcccgaggtttcttgccatgaattaaacgttgacccaaccttcaagccaattaaacaaaaacgacgaaagcttggtccggagcgctcaaaagctgttaacgatgaagttgataaacttcttggcgctggctccattgtcgaagttaagtaccccgaatggctggcaaaccccgttgtcgtaaaaaagaagaacggcaaatggagggtttgcatcgatttcatggacctcaacaaagcatgtcctaaagatagttttccgctcccccatattgatcggatggttgaagccacgaccggcaacgagttattgtcattcatggatgctttttctgggtataaccaaataccgatgcataaagacgaccaggaaaaaacatcttttattacagacagagggacgtactgctacaaggttatgccgttcggactaaaaaacgctggggctcgctatcagcgattggtaaaccaaatgttcgcccctcagctaggaaagacaatggaggtttacatttatgatatgttggtcaaatcgaaaaaatccgcagatcacattgaacacctaacagcctgcttcgaaacgttgaacaaatataacataaaattgaatccggctaaatgttcattcggtgtaacgtccggcgagttcctcggatatattgttacaaagcgcgacattgaagcaaacccaaaacaaatacgagcaatcctagatctcaaatcgccgcgcaacatataagaagtccagagattgacagggagaatagcagcg

SEQ ID NO: 172772 - DNA, 1397 bp, Arabidopsis thaliana landsberg
gaagtcggcttgcagaaatttgaaggttcttctgaccctttggaagctgagaaatggcttgatcttgttaaagaggcgctggggtatttgggggttcctaaggcttttaagttacgaatggttactcaccaacttgctggagatgctcaacattggtggagaagcattgttacttcccgtcttggtgtggagatgacttgggatgattttcagggtgcatttatggatctgtacttccaagagtctgttagatccttgaggatgagatttgaggagctcaagcaaaaagataagacagtaagagagtaccaagttgagtttgatcgtttatctcgttatggcgcacatattattccagatgaccgctctagagctaaacgatttgagcatggacttcgagactccatcagagttgtggttagtaaaaaccacttaagttaattatttatctgtattatttaattttgcagaccttcataacttttgggtatgaaattaggtggaaccagagagattaccaacatatgttggagtgttggagtgtgctctcattgtcgagggaaatgagaaaaagacaccaacatatgtggggagtggctcttcaggaaacagtaaccgggtggacagacacaagcgtccagatgttcgtggaactccatatggcaaatcaacaatgcaaccaaggccagcacaaggagttaacaaaggatgtgctcattgtggtcggacaaatcattcgagtgagatatgtcaccgagctaagaatgtatgttttcgttgtggtcatgctggacatttcatagcggattgtcctaataatggtcttgctaaacctgcacaagtttctcagaatcaaggtctttgtcacctgtgatctagcgcctggtcgtcaaactggtgcaagtcgcgtctatgcattaggcaattagggtgagactgaagaggcagatgctattcagggtatgttatccatccttggtaattctgctttcgtactttttgatactggtgccacccgttcctttatgtctgtcgattagtttgaaaaattgtctggagtggagttagtcccactatgtttgcctattcgtacttcgggaggaggaatattacattctcttgggataatcagagatattaaggtattggtaggagatgtatctcttccagcagaccttattgtactccctttaaaaggagatgatattattatgggttttgactggttatttcatcatttcgcgaaccttaattgtcgtgggaggaagattacttttgaaattccaggttcttcgattgttgagttttgtggatctaaagtaactcctcggttacccattatatcatgtttgaaggcagaaagattgataaatgaaggatgtatgggtttcttagca

SEQ ID NO: 172773 - DNA, 330 bp, Arabidopsis thaliana landsberg
tatttaaaaagttggctttgttgtttaccagaggagttctgtggggcgaaccagcggcaaagagttgcgttggacagaaggaaccacttttggggacaaaatatccagcagagattgccagcagaagtgggagttttgaagagagcactcgggaaaatatcgaaaccggtgacattgctagacattacgatgctttcgttgcttcgcaaagatgctcatccttcggtttacggtctaggcgggcgaaactcctccggtgactgcagccactggtgtctctctggggtaccggatacttggaatgagattctttacaattatatggttgag

SEQ ID NO: 172774 - DNA, 1390 bp, Arabidopsis thaliana landsberg
  unsure (1)..(1390): unsure at all n locations
gcactcagcggtaagtgcagcacttgttcaagagaagcttgaaggccaagttaagagacaggccccaatatattttgtatctgaggttctcagtttatcaaagaaaaattacacagagttggagaaggtactgtatgctgtcttgatggcctccaggaagcttcggcactattttcaagcttacaacataattgttccttcttcacaacctctgaaggatattatgaggaaccgagaagctactggaaggattggaaaatgggctgcagactcaatgaattttgtattgaatatgttcatagatcttcgatgcagtcccaggcgttacagacttcattgctgactggacgccaggggctcaggaggaagaaacaaataaagacgccgaagcatggacagtgttttgcgatgggtcttggggaccttcggagcgggacgcntgctgtgttggtttcacttccaaagttaaaccttgttatgccgcaaaacttgattttagttgcacaaataatattgctgagtatgaagcccttctgttgggccttcggaaattaaaagcaatgggaataagaagagcagtccttaaaactgattctcaggttattgctggccatgtagacaaaagcagcaaggcaagggatccgaagcttgaaaaatatttggatacagtccgaaggttggaggcttctttcgaaggtttttctgtaaaaaatatcccaagaggggaaaatgagcatgcagatctgctagctaagtcagcagcacaagggctccctctaccttcggaagtattctttgagacaataatatcaccttcggttgaacttctggagagagcagtgcttgcaatatcacatgtacatagtgaagattggaggactgaaatcatatctttcctctaaggtaactgtctttcggatgacgaagtttataataaaagaatggaagcaaggacaagaccatatgtcataatagaaggggagttatacaaacatggagtctgctctccacttctcaagtgtttatctagaaccgaaggtatagagttaatgaaagaaatacatgcaggcctgtgtgatctcacatcggatctaggccgttacttggaaaagttttccgtcaagggttttactggccgaaggcagcttcggatgcagcagaattggttcaaaagtgcgaaggttgtcagaaatgtgcaagagatcaaaaacaaccttcgtccttaacacagctcatacaacccacttggccattgcaaaggtggggccttgacttgttaggtccgttaccaccggcccaagggaacctgaggtatgttgtagtagctgtggagtatttttctaaatggattgaggcgaagcctttagccacaataacttcggctactgtc

SEQ ID NO: 172775 - DNA, 2287 bp, Arabidopsis thaliana landsberg
  unsure (1)..(2287): unsure at all n locations
gttcacagtcacacatatccatgagactccatcgaacattgacaacaaccaaatggaccatcttcatatcttgaaggactaaaaagcttaatttttcaccggtgacgtgtaaccacgcgttattgtactcgccacacttgaaccatgagtgatcagtcttgtgttcagcatggtaatgacggtagagatctgtgtacacgncggtgtacttgcactctggttcagggcagtagcaaagagtgaactcgcataccctctcatgggctgattctgattcattgtcatatggaatcttctcggtgcagccatatttggcgtttgggcatgacacaacgactgcttctacgattttttccagtattctagatcgaaaaaaaccaatccgcaaactacagtaagggcatttgtacttcacctttttacagcaagaagaacatgctatatgtccattgtcacactgaaattcaaaactcagacttagttaattatcaaagttttatgaactagtctagtgtaacttataaaaatatctaatcaaaaaaatgaaaaagaataacatcttatcaactcaatgtggcagtcaagattacatttgagaaatcgagaaattcgtaaattcatcaaagtaacatttgaaatacatgaatttcaagcaaattgatgattgttatcctaaaagtctcatatcaacaaattaaaggactcgtcagtgccactaattgtttttagtttccctagaagaaaagttataaaccaggaaaggaagagagagacctgatagataggagccccaagtttgtggtagcaaatgggacannnnnnnnnnnnnnnnnnnnnnnnnnnnnnnnnnnnnnccacctcacttccactcgccgttcctccaacattctccatggagacaggtctttgcctctttggtcggtcgagggatcgctcggagttattcgtgatgttttccatctctatcgaaggataagagatgaggtacggtgtcttaagacttcgctacttatagatagaacgatgccaatagaccctactttccttatacttcctgttgacggttttttaaaagtttccattagatttgagaatccttatgtgggtgacgctatgttagcttatttacaggtacatcttatagaagaaaatctaaactctttaatatttaaatttgtttctccttttttaatgtaaaattttctttctttcttttattataggataactaagagtctaaagactttactgcaaacaagaaagaaaaaaaaaggttcagatatatttcagggatcctttgttctttttgtttttttatgattacatatgttccaagataataattagataaaacagatgttaaaaataaatatgtttagtaaaattattaaaaaaactattttgccatttaaataaatagtcaagaatctgagatattttaacacgttaacggcgttttggttctccgttatctttcttagaagccgttaaagtggaactgttaggtttaggtttaatagttatcgtttcattttcatctagtcttgccgctttcttcgcaattttgaaggtacatggacgaagacggagagaaacatgttcttaccaaacgatcatcttctcctgaatcatccgacaaaagatttggtgatgaaggtgattgggtacgaagaaatttgccagaatcgttgttctttcaagttctcctcaacattccaacaaaagatctggttaagactaattaaacgtttaagattttgcaaatgttcattagacaatgtaaacgttttacgtgtgagatctcagtctctattgagcttcaactattatggccctagttcccgtgatcttcattttaaagatctagtggttactattgatgccccaaagcttgagatcctcaagctctctcatcaagtaacttcaagtttcataataaataaatcgagttcccttgtagaggcaaatatcaaggttgagtttaacttttgtgtggggaaaaagtttaatccgaatgatctgtcaaagagaaatatgattcttcattttcttgtcgccatctctcgtgtcaaaaatatgaccatcgctgcatctactcttgaggtaacgtttgttgaatttgctatatttattgttttactttatcctctataagtttattttatcctgatacttttcttgtttttggtggttgttgtagatcatttatgattactcaccatgtcacccggttcccttatttcgtgacaaatcttaaatgcgtgttgaattctatcaggacagatgg

SEQ ID NO: 172776 - DNA, 1832 bp, Arabidopsis thaliana landsberg; identical to SEQ ID NO: 34861
  unsure (1)..(1832): unsure at all n locations

SEQ ID NO: 172777 - DNA, 223 bp, Arabidopsis thaliana landsberg
acggatttacgtttatggtagaaaaattacgggtgtacattttttccggaaaaattacgggcttatgtttttcgcgtaaaaatcacaggtttacgtttttttggcgggaaaattacggatttacgttttttggatggaaattataggtttacatattttggcgggagaattatgggtttactttttggggaagaaattaacagtttatgtttttggcgggaaa

SEQ ID NO: 172778 - DNA, 464 bp, Arabidopsis thaliana landsberg
gctgttgttgctttgaattgggtgatcgaaccaaaatatcgggattgttgattccgagtatattctttatatgggtcttcctacattaggaggagggtcagctgaaaataaggcttgaaactggctctcttgtcatttcttcatactactctacatgacatttatttaggaagtaactatagttactgcgtatcagcagacagattcatggaagttcgataagagcaagactccgcatgatgcacacaaatcatcatcagtgtcatctggtatatctgaggtaagtttctaaccagtttggtgtttaaaaagaccatcgagagctttgtctggctaaaatctctattcaaacaatgatcattacctacgttcggaagcaaacttacgccgagttagagacttttaaacatagatggaaaaatgctgcgaagaacgatgattgctggatagaccgaccccaaaca

SEQ ID NO: 172779 - DNA, 1770 bp, Arabidopsis thaliana landsberg
atgagtagcaacgacagtcaaagttccggcgaccaagcctccaccctcgacgacatcaagcaacttcttcagcaattgtccgataagactgaccaacaacagcttgccgtgacgtccctctccgacaagttcgtgtccttccaagagcaatgcaacggccagctcgcagcattggcggcgaaccattctgaaatcagatcagccaacaacgcgtacgcggagcgagtcgattcactttctgcattaaccacgcggactactggagctcaaaagcgactcaattttaagggcaccgtcagcccgagtgtccaaaattcacaggaagcctctgaccagcagactctgccgcccccggttgaagtcgggacgacatcgactcagaatccaaccacctcgtcttcaccagcaggatttgccgcagtttcagatgagacaatagctcggacgccagttccacttgatcctgccatcagactaccaatctccgatcctcgacaagagccaagcgtagtcaattcagagcttcaaagccttcaagatcaaatttgggccatgaacgcaaaagtccatcaagccactacttcggctcccgaagtggaaaaggttattgaggcaacgaggagaacaccttttaccccaaggatctctaagttgcgtatccgtgagttccgagatttcaagcttcccgtttataatggaaaaggagatctgaatgagcatttgacttccttccaagtcatcgttggacgggtccccctagagccatacgaagaagatgctgggctttgcaagttgttctcggaaaatttgtcaggacccgctctcacctggtttacccaactggaaaaaggctcgattgacaatttcaagcaactctctactgcgttcattaagcagtacggatacttcattaagagtgacatcactgaagcccatctttggaatctttctcaatccgcagatgacccacttcggacgtatattatcgtgttcaaagagatcatggttcaaatacctagcttatctgactcaactgctcaattcgcgttaaaaaatggtctttggcatgagtcacgcttccgcgagtctttgacagtaaaccggcctgagacgattcaagatgcacttcattgagcaacgaactggataaacgcagaagaagaacgagcttttctagccaaaaagttcagtgcttcaaatgttgcaccaaaggcgcctcaacccgtaaccaccaaaaaacccgccgagccctgaaaacctgcagcaggaactttttccgttgagaaagaatcatcgaagtcctctcctaaagcttcacacctttctctcctaagggcaaaaacggcgcttttccgagtaacaaataggtccaagatccgaatgcgtactgtgatattcataagatgaatggtcatgcaaccaaggactgcaaagctttgggcagattgttaaaggcgaagtacgcttcaggagaaatttccgaatttgacatcacagcgatcgaattggcttagaccgcgaacgaaacattagaatcagaggaagcttcaccttcgagcaagaaatggaaaagtgacccagcccttgtaattcctaaagggccgaagaaaatggtcaaagtgattatgggaggttcaaaactttttcgtgattctattagcgcgataaagcagcatgagagaagaactgtcactccgatcgcaaagaaaccaaaaacgggtcgaactgattgtcccgagatatcctttactgaggaggaaaccagcagac

SEQ ID NO: 172780 - DNA, 1400 bp, Arabidopsis thaliana landsberg
tatgaatgcagagttacgagctttagaaggcaccgctacatgggagatttgtagtttaccatcagataaacatgctattggttgtcgatgggtctataaagtaaagcttaatgctgatggtagcttggagcgttacaaggcacgcttaattgctaaaggttatacacaacgtgaaggagttgattttgtggacactttctctccagtggcaaaaatgactacggtgaagactctgttggctgttgcagctgctaagaaatggagcttacatcagttagacatttctaatgccttcttaaatggagatcttgctgaagaaatatatatgactttgccgccagggtacacaccaaaggagggggacgttttgccacctaatgctgtttgtagactgaggaagtcattatatggtttaaaacaagcctctagacagtggttcttgaaattcagttacacgttaatgtctctcgggtttcgacaatcacatgctgatcacacactttttgtgagaaatgtgaatggaaagtatgttgctgttttagtctatgtcgatgacatagtcatcactagtaacgatgatgatacagtatcacagttaaaagatgatttgaagaaagcttttaagcttagagatttggggtctttacaatatttcttaggtcttgagattgcaagatccagttcgggtatatttgtttgtcaaagaaaatatgccttagatattttggaagaagttgacttattaggctgtaagccatcctctattcctatggaaccaagtatcaagctcgttagtgatggaaaggaaccagtcattgatgatcctgcttcatatcgaaaattggttgggaagctgatgtacttgactattactcgtccagatatcacttatgtcgtgaatcgtttgtgtcagtttacagcagctccaaaagattctcatatgaaagccgcttataaggttcttcattatatcaaaggaacagttggtaaaggattgttttattcagctacttcagatatgactctcaaagggttcactgatgcagattgggcttcctgtcgtgacacaagacgctctacctcaggatactgtatgtttctcggtgaatctctcatttcctggaaatcgaagaaacaacagatggcttcacattcttctgcagagtccgaatatagagctatgcagtatgctgtcagggagattgtttggctagtctatttgcttgaagatctacaggtatcacaaacaaaacctgttgctttcttctgtgattcgactgcagctattcatatagcaaacaactcagtttttcatgaaagaaccaaacatgtggagttggattgtcacattgtttgagacaggatactcagtggactgattaacactcttcatgtgaaga

SEQ ID NO: 172781 - DNA, 540 bp, Arabidopsis thaliana landsberg
atgttggcattcgtgaaatgcttctcgttgaagcgagcaaagcatcctcgtggatatgaggatcctcatgttcttgcatccgaaactccctgtaagtcaaaccaaacaaacaaaaaccgcaacatctctatgtaaaaattgaataacataattaattacgaaagataaagaagagttaataaacgatcatctataaacgaatatgagctgtatatagatgcattttatgaagctatttatagagtttatgtataattgatgtatgcagtcaccgtgaatgagattgaggctttacacgatttattcaagaagctaagtacatctattatcaatgatggtctaatccataaggtaacatttatttcttaaatggtttttcatttatacaaaaaaaaaaattgtatattaaatctaaaaatcacatttttttagggattctgatttgcatctacatgcatgacctaatattatcagagcaggaagagtttcttatggctttgttcagaaacggcagtatcgaaatctatttgaaacagggtt

SEQ ID NO: 172782 - DNA, 456 bp, Arabidopsis thaliana landsberg
  unsure (1)..(456): unsure at all n locations
gactgatcgttgaaacgacttctgtataagttttctatcctatttataggttacctcttgnaggcacttggttcagaggtcggtgtttgctcctcggagatgctgctcatgctatgcagcctcatgcgggccagggcgtctccatggcactagaagatgcatttctgctctcacgccttctagaggatcagaatcgtcctctaggcgatatttataagcgatttgaccagattagaagacctcgagttgacgaaatcgctaaacttgcttcacgaaatgcggaagttaggaaaaaggctggaccctggggtttgcggcttaaagagctcggtatttggacatacatgtgtgttccttgggcttttggcgtgggggctgtgcaaaagcatctgatgtatgacatagacaaggaagcactctaagtcaaattgaggtgccggagcgtgcgctaacttt

SEQ ID NO: 172783 - DNA, 334 bp, Arabidopsis thaliana landsberg
  unsure (1)..(334): unsure at all n locations
caatcactacaaaaacaatttcggagcttccatgggcnaatatctaaaggaggattcggaaaacgaatacattcaattgctcaaagccgtgatcaaatgcttgacatatccagagaagtattttgagaaagttctacgtcaagccatcaacaaattgggaacagatgagtggggactaacgagagtggtcactacacgagcagagtttgacatggaacggatcaaagaggaatatttacgtagaaacagtgttcctcttgatcgagccattgctaaagacactcatggtgactatgaggatatacttctcgctcttctcggacatgaccatgct

SEQ ID NO: 172784 - DNA, 598 bp, Arabidopsis thaliana landsberg
ttggacatcaagctcctcaaatctttgctcaaaaaatcagagccgattccggaaatcaacaatttcagcctgatcaagttcattgaagatttcgcggtcatcatgttaaaagaactggatttcatgaatgaactttcaaacatgatgcgtttaacccacatgtttaaggaacacgaccgggtttatgttcgaaaatcagcagcaagtattccacatccaagctattgatcatggaatatgtcgaaggggaagccccggataatttaccgaatcttgtttcaaagggatttgatccggcaattattgcagaaaacggtatgaatgtaattctcaccatgatcctgaaacatggattcttccatgctgatccacagtcgggaaatatgtttatccgtggaaataatcaacttggtcctgcatcgaacttttggagactgtggtgcgagtcgttaaagaccaaaagcaaatatgacgggtttcattcatttcctgatcggttccgcagatagcaatccgcataaaattgccaaaacacaaaagtatctgcccgaagtggaaaatttccgcgacatggaaagcctggagtttaaatcacaaa

SEQ ID NO: 172785 - DNA, 342 bp, Arabidopsis thaliana landsberg
gtttctttttgaaaaacccaaattgataatcgttccaattctagcggccgttattcttcttccccatttataatatcatcgcaccatctccgatctatcatcgcgccatctccgaccaaatcctcacaccgatcccttcagaatcagtttctcttacaacagaatcaatttctcttacgatagactcagtttctcttgcgacagaggcaatgattacactttcacgtctgattcaaagcccttcgagatggctattgatgccgatcggaacagcaaaaacaacaataagagtgtggatttgtcatttccgaaatcttcattcaattgtaattgataatggaa

SEQ ID NO: 172786 - DNA, 628 bp, Arabidopsis thaliana landsberg
actcaagagaagttggggatgattcagaccttgttgactcacatgattcaacaacagcaacaccaacaagagatgcaggaaagccagcgtgcagaatctcctgaagaaggtcttaaaactggttatgatgatgaaggatcttggtgttcggaagttgaaaggagagcataatactgttttagcggataagtgtttgaggaacctggaaatgaattttgaaacttgaaggtgcccggaggactttaagggccaaatagcggtaaactttttagatgcggatgttcgagcatggtgggatagtgttgtttcatgatactgcgaccagcctatcacatgggaaatgtttaagaaggagtttgagtctaagtattttccacctgaggcacgtgatcgtctggagctacagtttatgagtttggaacaagggcaaaagagtgtcagggcatacgagcaatttttttcaagacttcgaagatatttgtacaatggaagggttgatgaagctatgatggtacgaagttttttaagaggactaaggcctgaaattaggggacgtcttcaggctgtgacttataccaacgtgagtgaattgactgatagggccgtgaatgttgaagaagggattgag

SEQ ID NO: 172787 - DNA, 559 bp, Arabidopsis thaliana landsberg
aaatcctagcacttatgttcatcatcacacgaaaaaagcctcaatggttttaagtgagcaagaaatagaggttattctacaaagtaataaggagacatataatgaaaaattagaaaaaaatacgaaagagaatgctgagaaagttggtattgaagaaggaaatggttcatcttcaaagatcacgccatgcattttctacacatctgatgaaaaggcacgattgaggtggtcaagcgaccttcacgattgctttgttaatgctgtggaaaaacttggtggacctaacagttagtaacctaattaaattcttaattccgattattagtttatatttcttgagtttcttcaatatttcttcacttatattgatttactttaaacattgcatgttttatctatcataaaattatacatttctccatattttctttggattttaagactaattatgaatacatacagtcatacatgcatgtaatatattccgaaactaatctttatagatttgtgatcagatacatgaatataaaagtttatattcaaaaaaatcagttttatc

SEQ ID NO: 172788 - DNA, 505 bp, Arabidopsis thaliana landsberg
tggtgtgaacgaagacaaaatgacacattgcagactagtggtggacttgaggcaaagagtaaatccaccgcttgagaaagattgttttgggaatatggtctatctttcatcagccataaccaccgtggaagagctcttggatcgtggtttgggtgaggctgctttgcaaataagaaaattagttagctcgcaaacgaatgaaacttgtaaaagttttgcagaagattgggttagaaatattaagaacctaaattcaggcattggcagtaaagtaggtaatactatagttatcgcaagctctccgcggttcgaggtgtacaacaaagatttcggttggggcaaacctattgcaattcgagctggaccatccaatagtatcaatggcaagctttcagtttttcagggaatcagtgaaggaagtattgatgttcaagcaatcctatggggtgatgtaatagtgaaactactagctgatttggaatttttagagcatgtaactattgca

SEQ ID NO: 172789 - DNA, 1298 bp, Arabidopsis thaliana landsberg
ttcatactatgagcaccattaaactgcctcagtctacgcttgagaatttgataaaatctctcgctcttttctttggggcagcacagcggagaagagaaggcagcatttagttgcttgggacagagtgtgcttaccaagatgtgaggggggtctaggcattcgttcagcaactaacatgaatagggctttgatcgctaaaattggatggagagtattacatgatcgttccagcctttgggctcaagtagttcgaagcaagtatcgagttggagaagttcatgatggatcatgggctctcgctaaaagcaactggtcctcgacttggaggagtgtaggcctggggctgcgtgatgcattttgcaaggtgttaaatgggttatcggggatgggagacaaattcgattctggacaaatatgtggttatctaatactccacttattgatgaaattacagctccaattccaccgaatttggttaattgtacagcccgagatctttggcagaatggagaggctgggacatgttgagagtagcgccgtttgtcacagagaataagtggttggaactcttggcagtggtagtagatggcctcacgggagttttagacaggctagcttggggagagtcctcagatgggctctttacggttacatctgcttatcatatgttgactggaaatgaggctccgcgtcaagatatgagtagtttctatggaagtgtgtggaaagttctagtgcccgaacgggtaagagtctttctctggctagttgtaaaccaagtcgttatgatggattctgagcgaaaacgaagacacttgtgtgagtatgatatttgtcaagtttgtaagggaggcgttgaaacaagtttacatgtgctcagggattgtccggctatgacaggtatttggctccgcattgtacctaggcgcatgcaaccagggttcttcactatgtctttacttgagtggattcacacgaatctgcgacagagtggtaataaagaaggtagtgattggtcgactttgttcgccttggcgtgttggtggggctggaaatggagatgtgggaacgtttttggtgataacaggagatgtcgagatagagtgcgtttcttaaaggatgtagctgccgaagtttctctagcgaattcgaaaaaaagggaacttaggccggtggtggatcgagtgggcaggttaatacaatggacggctccaactgtaggatggcacaaactcaatacggacggtgcctcacgggggaacccgggcttaacttcagccggaggggtcttgcgggat

SEQ ID NO: 172790 - DNA, 330 bp, Arabidopsis thaliana landsberg; identical to SEQ ID NO: 80606

SEQ ID NO: 172791 - DNA, 324 bp, Arabidopsis thaliana landsberg
tgacaggtagttgtactgaaattagatgtttattgtgaaaaaaccaaacaaaaagctatgtcaactgtatgttgtctctcaggtataaacaacactcatcaattgctaattttttttttttttactcataagcctctaaattctcttaatcaattgattaaatcataattaagtacattttgatttttttttgtattgaaggattatcttttcttttggtattgaaggagttaactcggtggaggtgaaagatggtaaactaacggtgacgggagagattgatgcctatatgattgtgaagaaattgaagaagatatgtcatac

SEQ ID NO: 172792 - DNA, 590 bp, Arabidopsis thaliana landsberg
  unsure (1)..(590): unsure at all n locations
gcaccgttgactgtctcgctcatgcttatgtggtaaattatgttttctttccaccattattatatttaaagaaagtttttgaactcaaagcatttatacgatatcatttcgcttaatcctattttcaggcgaaaaatgtttgtggcagaaaaagaatatcaatgtttggagttttagcaggtgtcagatcaatttcaggagtttgtgcaacattctcagctcgtttgttacccataacttcaatttttcaggtatcggaatttcatacctattaaccaaactgaaaaagtaaaaaaataaatcaatttctcattttctgaagtgttatttttcatacctttatatattggttacctacccacaatattcaaaaaaatatataagaaaattataataattaggttgcagctatatcatttttctttggcctggtgtacatgagagttttcctaaaagagaggttacatgatgatgatgaagacgactgtgatgaagatgataatactagtggtccaaannnnnnnnnnnnnnnnnntctaacgatgtaaacagaacatattttaagagatgcaccaactaagatacatatt

SEQ ID NO: 172793 - DNA, 1613 bp, Arabidopsis thaliana landsberg
tcgggatcaacagatccccaaaatatactataatcagagacaagtttacaaagatcactcaagtgacatctttggatctttactgctaccaaagactcactcataacactctgtaacacttaagataactctccccaagcttacactcttacaagttttctctctacccgattacatctctctctttacattgtgtctctctgtcactcttctttaggccgcttggcttgcgacaaccaaccttgtgtgtcttcaagagtacttatacagagacactccttagacctaatgcttctaccaaacgctccttttgcaatcacaaatggacaaagtgtccttcttggccagcaatgcacaaggctcctccttgtggtcccaaaagcataactcaaccagagattaatatacatttaactctagttagctttctttatttttccttgtatatttgaacatattgttctcatttcaacagtaacaagttctcgaatacatatagttttgaattttattaatcatccttgacagtccacttatccagcaagctttaccatagaggtttatcaaaatcatatgaacctaaacacaatattagccgtacactcttgtgtccaaaactcaaaactcattctcattggaccacaaacttataaagatgaacaaacccataacaataattttattatatccattttatgcgaacaactgtgcaaaaaaaaaatctaatcatattcctgaccatttaattttcattaactcttttttcttaaactctcttcccctacgtgccttccctgcaacacaaacttcaaggtattttttttttctattttttgttctctttgtcctattatagtattatctcttatcattcatcacaattaatattcgtagatgccagattcaagtcaagacactaatccctgtgaaaaaaaggaatgcaaccgatgatccttcttcgacggccaaaaaacaaaatgttcaacggtaggatgtatgggaccactttaccaagctcaaaaatgatttagtaaggtgtgggtgtaactattgtggtgcaatacttgggtgaaaaccatctagtgggacgagtactttgtgaaaccataataaaatctgtaaggcatacatcaattttaaccaatttgaagctcagaaaaagttagctcagaaagaatcaggtggtttagatgttatgaaatattgtccaattgcttgtcgaagtgcattagcgaaaatgattgtgctggatgagctgcctattgttttcgttgaaaaggttgggtttaggaatttttgtagtatctatacctcattttactattgaaaaaattcttttcaaagatcaatcattatagatattgtcgagctgtactatcaagaaaaggctatgctaatgctcttttttagtgcgtataagcaaagagtttgtctagctacagatatatggttagcgccaactactactaccaatctttaagatgacattttagagattgacccgtgatatatcgtgggtcgatattttcgttagaaagttagagatttttattttaactaatattatttatatatgaataacatattaagaggtatactacatgcctataatt

SEQ ID NO: 172794 - DNA, 606 bp, Arabidopsis thaliana landsberg
gtttcctctgttctgaagtcgctgcttctgcttcttcatcttgtcttcttgattctgcttctatcgtcaattttcttcctggtttccctttgcgctcgaaaccgggtttgttttcaatctctttgtgtgattaaatctgtgttctgtgtttggagataatctaaaagacataggatattgtttcttgtggatgaaggtatattggtgctacccaggaacaggaagtgcaactgttctactacttcatcaagtctgataggaatccaaaagaagaccctcttcttctctggctaactggaggacctggctgctctgccatctctggccttctttatgagaatggtgaaacaaaaataaacatggataaactttttgtgtgtctaggatttactcgttttaattctatagatgtatataagcaggccctttgactatgaagcttgatgtttacaatggaactcttccttccttggtatctactacatattcatggacaaaggtaatacaaaagtgtataatgatatatatgatcgagatcatcaaaacccagtgatcaatgtatattcttgatcatcattctcctcagaattcgagcatgatattctt

SEQ ID NO: 172795 - DNA, 549 bp, Arabidopsis thaliana landsberg
agagtgtgaattagaagtccaaaagttaattcatttacagagcttagcaaatcagttgccctatgcatttactgacccaaaagtgtgatcaaatcacatataccggttgcaaatgatccaataagaataaatatctcctaaggacaaaaacacgtttaaagcgtggttacctattggctcaaaaataaaaatccttaaaaaagaaaagggacagaaattggcataggtaaaatagaaaaaataattacaaatgaggaatctcccgaagagactttagacatgacacagaaagaaattcagttacctgacaattaagagatctcaactggttatgtcatgtctagaagaaaatagaactgaaagcaaatcgacgtcgatgatattttgcttgcaacatagcagttgatgttatggatgaggatcatgaaccaacatctattgaagagtgtacacaaagaagtgatttgccagaatggaatgaagcaatagatgcagaattaaaatttcttgcacagagagaagtgtttggaccagtagtctgtacacccg

SEQ ID NO: 172796 - DNA, 450 bp, Arabidopsis thaliana landsberg
ttcttcgtgtttagtaataataatggatacatgtatgaaagcttggtgtccacttcaagaacactttcttcctcggagagcttccaaggaaaatttggacaggttccgccatggatttcgactatgctcactacgatctaaccgaaggaagaaaagctaaagtcgatgaggtaacttcgctgtcaagaaaagcctacatgaagcaattggctaagggctataaatttgaatcgcacccggattctcgctttcagaaacaaacctcaagctctgtttcctagtaatcactctgcttttcttcaccagcagcgttaacccgtaaagcctcgtaaaaacatttcctcagacttgtgagagaatcttgaatgcaagtggcattgtggatgacttctaccttaacttgacaagcctatgtatttcctatctactaacccatctaaagcccatgta

SEQ ID NO: 172797 - DNA, 815 bp, Arabidopsis thaliana landsberg
taatcaatttatttgccaggagggtttggttaattgggtgatcatgtgcaacccatacgcaattcagtgcagtatgtgagttcttctatttcaaggtgtgattcattgacccagaaagttgtctcaggcaagatgattagagggagtttaccgttggacatcaaaacaaggtggaactctacttacttgatgctgaaaagggctatggagttcaggttggcatttgataaaatggacgctgaagataagttgtataatgactacttcaatgaagtagacgatggaaacagcaagatcgggccacctacaagagctgattggaatgcagtcgagaggttagtgagatttctgatcatattctacaactccactttggtcgtgtctgcttctaattcagtagcttcttataagtgctatggtgagatagtgactatagagacgaatttggtgtcactaggcaataattttgacagggatctgaaaattaaggctaaagctatgttaggaaaatttgttaagtattgggatggaacaagaaacattaatgtttatctgatagttgcaagtgtctttgatccaaggaagaaaatgcagtttgctaatatgtgttttgcaaagctttatgggaaagatactactgatgctaaagagatggctgaaaaggtcaacaatgttttgacttccttgtttaaggagtatagtagtcgttttcagaaaacatcaagtagtagtggtccatcatcacagtccacttagactacgtactactgctagccaaggtgagccctctgatttgatgtctgatagtatggggt

SEQ ID NO: 172798 - DNA, 1142 bp, Arabidopsis thaliana landsberg
agccaagatgacctaagaagaatccaatctaggatggtaggtttcgatgagagcatatggagacttggaacgggcattaatcaactagaagataatgatgcgaaagaagatgtggctttggaggacctgataagaagacaaggtgaagttgaggagaaccaagtcaagaacgttgatgatcaatcaaagatctgggcatcacttacaaaagtgacgatggaatcctcaaggaaaaacgtggaatcgcttgataggattcttgatttggacaagaaagctgataacctaacaacacgcatagaagggcatgaaccgatggagagcgaagaagaagactcaagccctcatgtgctttgcgatgtggttacaacttaccgagaacctcacgaccttgaagaaggagagatcgacgaaaggaatgaagatccttcgggaagaacaaggcgttacaaccggctcactctcctagaagaccagtggcatccacgcatgataagcttgagaagacttggagactttacccgagccgtttctaagctacctcgaggtatccctttctctaaagcttgttcggtttaccatattgaccatttctttcttgagagttgcgaaccaaggagagagatgaaggaattgtacgaggaagccttacaccacttgaaaccgttcaacactcttcgaaagatagagagcccgagaagattccttgtgacttgttctatacgatgtgttgaattcaaggatgccctatgtgattttggatcatgcatcaacattatgacaaaggagacatcgaaggatcttagaatcaaggagctacaacctttggatgtgcgaattggacttgcagactcgtctttcatggttcccgaagggatagtctgcaacgtctatgttcaggttggaaggtgcaatgtgccgaccaatttccatgtcataaaggtcgagaaaggaagaccctctcaactcatactaggaggcgggttcctagccacagcgggcactataatggattggcttaatcaaacagtattcttcgccaacatcgatgatgaagtgttccacaagatggtgccgtttaccccgggctcaaaaaggagaaggaggtcaaatggcgagagcacggaagaacctcccaagga

SEQ ID NO: 172799 - DNA, 1078 bp, Arabidopsis thaliana landsberg; identical to SEQ ID NO: 17518
  unsure (1)..(1078): unsure at all n locations

SEQ ID NO: 172800 - DNA, 382 bp, Arabidopsis thaliana landsberg
gcgggcgctacaacaggcgaaaaccccctcataggcggcgctccagacaccgcagccaaagacagtgaagtctaccctgtcgtcgtcatacaacaatcaaatcggaggataccgatccggattcgggtcgcctcgtggatcggatgcgggtcctgctttccgtacctcaccaactacaccgacccgacctggttttatgaacatttgggagaatggcttggaggaagaaccggcgatggaacgggtcgagtcgggtcgtgaactgcgagcgcagctgttcgagaagctgagcaaagagaattgcatgggtcggattgaaccggatccggatcagggagcgggtgatactcctgatgtcgggtgggtctctgacttggttatg

SEQ ID NO: 172801 - DNA, 581 bp, Arabidopsis thaliana landsberg
aataagtaccggctgcaaatgcgaaactcattatgcctgcctgaatcagaagtagatacgctgaagacaaacgggacaccgtatgtgatcaggatcaaaatgcctgaagatgagaccgtatggctaaatgatatgatcaggggagatgtgagttttgacacatcgcagatagatgataaagtattgctgaaagcagacggcatgcctacctatcatctggcagttgttgtagatgatcacttaatggatattactcatgtatttcgcggagaggaatggcttccttctgctccggtacatcttttattgtgggattatctgggatggaaagatagcatgccggagtgggcgcatttgccattaatattaaaacctgatggtaacggaaaactgagcaagcgcgacggtgagcgtcttggcttcccggtgtttgccatgaactggaacgatcctaaaacgggaatttcaaaccagggttttcgtgaacccgggttccttccggaagcgttcatataataagcttgctttgttgggatggaatgatggaactgagcaggaaatattcacgatggatgaattga

SEQ ID NO: 172802 - DNA, 1253 bp, Arabidopsis thaliana landsberg; identical to SEQ ID NO: 31515
  unsure (1)..(1253): unsure at all n locations

SEQ ID NO: 172803 - DNA, 346 bp, Arabidopsis thaliana landsberg
atgtcaagtattcggaatactcattggtgtcacagatgtcaacgtgctgtttggcttcgagctcgagatgctgtctgttcatattgtggaggagggtttgttgaggaaatcgatataggaccgagtagagctcacagggatgttgagcgtgatccaacctttgatctcatggaagctttctcagcctttatgagaagccgtttagctgaaagaagctatgaccgagaaatcagcggaagacttggctctgcgggttctgaaagcttttcaaacttggctcctctattgatctttggtggccaagctccctttcgattggctggtggtgataatagttcagttgaag

SEQ ID NO: 172804 - DNA, 202 bp, Arabidopsis thaliana landsberg
ggcctgaaactttttatccaaactgacccaaacccaactggacccgacccgaaccgaatatttagaattattctattaggtagtaaatcatatacccattaatcccaaacccgaacgggttctacccgaactcgaatgggttactcatatgcccagccctattctctgatttaattatctaaaaaatcccaataaaacatat

SEQ ID NO: 172805 - DNA, 247 bp, Arabidopsis thaliana landsberg
ggtatgaacatatctggtgcacacgtcaatcaagcagtctctaatggtgcattcataggtagtgctgtcactgtcatcaatggatgcctagaggcaatgcatgagattctcggtacagcagtcgccggccagtgctattccacaggccctgggtgtggtggtatgcatgggtaccctttagacgtctatgagatctctgtttgtgcctctattttctgtcacgtatatacttgccctcttgacgatt

SEQ ID NO: 172806 - DNA, 333 bp, Arabidopsis thaliana landsberg
aattagacacacgctcaaaagactttcagactcattaccactttgtccgagaaagagtggcgttagggtcccttgttgttcagcatattccagctcacttgcagcttgcggacatatttaccaagccattgccgtatgctgagtttgcttctctcaggtataaacttggtgttgatatgttccacccacacaaagtttacggaggagtattagagagaagctcaaaatagagcttggtgaaggattaggattgggctcagttgttcagcccaataacaacattcaaaccgaaaggcccatcaagcccactcaacaacttgtcacaaaaggcaa

SEQ ID NO: 172807 - DNA, 639 bp, Arabidopsis thaliana landsberg
  unsure (1)..(639): unsure at all n locations
ctcatttttctcatcgcattcatctgtattttgagataagtggagtttacaatggaaacaagttttgtcnagcttgtgcccttccagtcaatgaagggaatttgtatgtatgtgtgggatgtgatttcatcctacacgaaannnnnnnnnnnnnnnnncgtagaaaggtccatccattacatccccatccccttaaactaattttttatgaagacaattgcttccactgcaaagcttgttggcgtacgagtactgcttttggatataggtgtatcaaccacaattgcaagtacatgatagatatagtgtgtgcctcgactgctgagccgtttgattatcaaggccatcgacatcccttattcttatcgttagnnncaaaagagaagccaatgtgccacatttgcaggtcaacaaaagataagaaggtacttaactgcattgaatgtgactttattgtatgtttcgaatgcgccaccttaccatacatgataaggtataagcatgatgaacattacctcacattttgtcatggagatgaggcaagtgactcagattggtgtgaattatgtgagggaaagttagcaattggaggaaaagaaggattctatgagtgcaaagattggtgggcgacactttata

SEQ ID NO: 172808 - DNA, 1414 bp, Arabidopsis thaliana landsberg
tttcatttgattgttgtgtatgcagcaccatcggttagtagaagaagtggcttatgggaccaattgaaggttgtggttgagggaattagtgaaccagtggtaattgggggggatttcaacacaataataaggttaggatgaacgcactgggggtaatgggcacttgtcagcggattcactagcgtttggagattgggtgaacgattcatcccttattgatatgggctttcggggtaataaatttacgtggagaagagggaaggagacgcggactttcgtggctgaacgtctggatcgtattctgtgctgtgctcagaccaggttcatctggcagcaggctgtggtgacgcaccttcggtttatggcatcggatcacgctcctctctacttgcagctgtccccagaggttatttgtgatgcgaggagaagaccgtttcggtttgaagcggcttggttatctcatgatgggtttagggacttgttgtctgcttcctggaatcgtcaaatgagtacccccgcggcgctaatcatgctaagaaaaactttaaggcgatggaataaagaagtttttggagaggttcaacagcggaaggagaagctgttgacggacattaaaacacttcaagatcagcttgatttgaatcaaacggacgctctgttgcagcaagaggaagtgttgattaaagagcttgatattgtgttggaacaggaggagacgatttggtatcagaagtcaagagagaaatggattacaatgggtgataggaatacttcttatttccatacatccactattatcagaaggagaaggaacagaattgagatgcttcaggatgatgcggggcgttggatttctaatgcaggggagttggagaagcttgctttagaattttttacacgcttatactctcttgatgatgttgcagctgtggttgagaaattaccaaaggaggggtttgtttctctggaggcggctgaatgcacagaactttcaaggcagttcacgcgggtagaggttgagaaggctgttggcagtatgggcgcttataaggcgccgggaccggatggatatcaacccattttttatcagaagtgttgggatgtggtaggggattctgtggttaagtttgttttggaattctttgagacagggtttattcctccggagcttaatgatgcgttggtggttcttataccgaaagtgggaaaaccggataagattactcagtttcgacccattagtttgtgtaacgttctgttcaagatcatcacaaagacaatggtggaaaggctgaaacaggttatggttaagttgattgggcccgcgcaatcgagcttcataccgggaagggttagcacggataatattgtgatagtgcaagaagcgggtcactccatgcaaaggaagaaaggt

SEQ ID NO: 172809 - DNA, 235 bp, Arabidopsis thaliana landsberg
tccccaggcggttggaggctcatccgaaagactgagtgagatatggtttcgacaaagttgctgacattccactgccactaaggagatggtgtgttgagcacgatggatcgtcaccgaattggtcgtttttcgcggagcaaatcccattgaggaggacgatgaacctgatgatcgaagttactactggagagtggatgagcctccacgcgagtatcctcctgactctctctttcaa

SEQ ID NO: 172810 - DNA, 834 bp, Arabidopsis thaliana landsberg
  unsure (1)..(834): unsure at all n locations
tcatatcactcctttctcaaaaatattcggattcatcagagttggagttggacctggattcggacttcacgtcgctcgttaataaaacactgcgtttggagccggagccaaagcttatatcactcatccttgagatagtcactcttgtcttctccatgtatacaaagtgggagaatcttatttccttatgccctcgcttagatgtaagtttgaaagatggaaagtttcatgtggggaacatatacatgtgnnnnnnnnnnnnnnnnnnnnncccttcaaactgggtgaaattccggttcacaggaggagaactcgcttcccattttctctgccaaggttgcaatggcgagaaccataaaggttatatcaaggctccagttgagatcaaacacccttttcatcctaaacattctcttctcctcgtctccttgaaactgtttagtagccggaggaaatgctattgctgcgaaaaatctctcaagaagatattttattattgctccgcttgcgattttgctgttaattttgcttgtgtgcagaaaccaccagacttgtctatgcaccatcccaagtggcatgaacatactcttgctctgtttccaacacagactccgtttccttgcagcgtctgtgccttgacacattcaagctgtcctttctacacatgtcccccttgtgactttgtcatccatcaaaagtgtttcagcttaccacgtgtcataaggatatctcgccatccccatcgtatctcgtttactccttcttttgaccccaagaatgttggtcttgtcatatttgtcgcataaagattgacaatgattatgggtgctattc

SEQ ID NO: 172811 - DNA, 262 bp, Arabidopsis thaliana landsberg
agaaattgcaagggagacacaatgaaccctaggacagatcctaacatatatagtaagcagtgtataagttggatggattgtataaataaaggaaaagaagaagaaagaagagggttgtttagcccagctacgagcatgaacagcttcagccatttaagaagaagtgcttagaccttgaagatcaaataaacaagaaagagggaagatttgttagcagctagataaagttgataaattgataaagttccttgatgacttgaga

SEQ ID NO: 172812 - DNA, 1209 bp, Arabidopsis thaliana landsberg
tctgcttcttcatcttctgctgcttctttgttgcttggaagggaggtggatgtcttcctgagtttctgctgccagactagccatggatattttcaaaatattttgattcgaaatggcattagaacttttttatcctacagatgcttggagaagagattcggaccaattggtcaacggacactcaaggctttggaagagtcgagagtcgcggttgttatgacctctacgacgaaaccttgctccgttggcttcctagaagagctcttagtgatactcgagtttcaggaaaaaggttcactcatggtcatacccatttttcttacagatttatcttttaatgtggaagaaatatgcagacaacatccggagaaggcgccaagttggagaactgcacttaccaaattgaccaaccttgccgctgagtatccattatctcaaaatcttgcaggaatggatcagtcagatctactcaaccaaattgctcgtgacatatctcttgtcgtgttctactccggatcaaacgattcgaatgcccttgttgcaatggatcgtcacatgaaagtggtttatgacttgttggctttagaagttaacaaagaggttcgtacaattggcatttggggtagtgctggtgttgggaagacaacacttgcaaggtacatttatgcagagatctttgtaaactttcagacacatgttttcctagataatgttgaaaacatgaaagacaagcttctaaagtttgaaggagaagaagatccaacggtaataataagctcatatcacgatggacatgaaattaccgaagcaaggcgtaaacaccggaaaattctccttatcgctgatgatgtgaacaacatggaacaagggaagtggatcattgaatatgctaactggtttgctccaggaagcagagtcattcttattagccagaacaagaatttgcttgttgacgccggagtgatggatgtgtacgaagtcagatctttaagatatgatgaagctcttcaagtcttctctcattttgctttcaagcagccttatccaccttctgatttcgaagagctcgcagttcgtgctgtccatctcgcaggctttcttcctttgggccttagactgttagggtcgtttttagctggtaaaggtcgagaggagtgggtagctgcactgctcaaactcaaggcaaagcaaggtggacatataatggaa

SEQ ID NO: 172813 - DNA, 650 bp, Arabidopsis thaliana landsberg; identical to SEQ ID NO: 22782
  unsure (1)..(650): unsure at all n locations

SEQ ID NO: 172814 - DNA, 352 bp, Arabidopsis thaliana landsberg
atgctggatctcggcatcggcactgggctgttgagcgaagcggtcaaaaaggcgtttccttcctgctccattaccggagtcgatctgtcccaggccatgctcgataaatgcgcggagaagaagatcgccgatgagctgaaatgcgtcgatgcgcaggcggatggcctgccttatgcggatgaaagctttgacatcgccgtctcgagtggcgtatttgagctgctggaacaaccggaaaaagtcatcgcggagatgagccgggttctgcggccaggcgggctgctcgcttttaccaacctcaaaacatcattctttggcgcctttaccgacatcgcccatccggacgcacctt

SEQ ID NO: 172815 - DNA, 764 bp, Arabidopsis thaliana landsberg
gcttgttgctggtctcctgaagagaaactcctgatttatgattacataccaaatggtttccttggttctgcaattcaaggtaattttagtgtcaaaatcgcataaatctatgaccatagttaagattcaagactgattcataaaaatttatgacaggtagacctggtagcgtgtcatgcaagcaactaacctggacggtccggttaaaaatattgagaggaatagcaaaaggattaacttatattcatgagcttagtcccaaaaggtatgtccatggacatataaacacaagcaacatactactaggaccgaatcttgaaccgaaagtatccggtttcggtctaggtcgtatcgtcgacacgtcttgggatatcacatcagaccaaatctctcccatggagacaagctcaccaatcctctctagagaatcatattaccaagctcctgaagcagcttcaaaaatgactaaaccgtctcagaaatgggatgtgtattcattcggtttagtgatactcgaaatggtaaccggaaaatctccggttagttcagaaatggatttggttatgtgggttgaatcggctagtgagagaaataaaccggcttggtatgttcttgatccggttttagctcgtgatagagatttggaagatagtatggttcaagtcatcaagatcggtttagcttgtgtgcagaagaacccagataaaagaccacacatgagaagtgtattggagagcttcgagaaattggtaacttctatttaa

SEQ ID NO: 172816 - DNA, 953 bp, Arabidopsis thaliana landsberg
aattggtatcaaagctagtgcttcattaagagcctaactaactcgaagtgatgtctggagatcacgccaagaggtcatgatcgacgaaaaggccgcaagctcggggaggactctctcaaagggagtccaacaacaaacaaaggaggaatcctcttcctccatcaagtcgcatctaagaggtgacaagaagaagaagatgaagaaagtggtctactacgagaccgactcttagtcaccctccacatcaagctccgagtcgtccaatacttctaagcgccatgagtgcaagaagtatagtaagatgcccctacgctatcctcgcatttcaaagcgcgctccattactttccgttcccttaggaaaaccaccatattttgatggtgaggattattctatgtggagtgataaaatgaggcatcacctaacctcactccacgaaagtatttgggatattgttgagtttggagcacaggtaccgaaggtaggggacaaggattacgattcggatgaggtcgaccaaatccaacacttaaactcccaagccactactatactcctcgcctctctaagtcgagaggagtataataaggtgcaagggttgaaaagtgtcaaagagatttgggacgtactcaagaccgcgcatgaaggagatgaggcgaccaagatcaccaagcgggaaacgatcgaggggggggggggggggctcggtcgattcatgctcaaccaaggggaggagccacaagccatgtacaaccggctcaagaccttggtgaatcaagtgcgcaacctcgggagcacaaaatgggatgaccatgaaatggtcaaggttattctaagatcacttgtttttcttaaccctacacaagttcaattaattcatggtgatcctagatataagctaatgtcttttgaggaggctataggaaagcttgtgagctttgaattgatgatca

SEQ ID NO: 172817 - DNA, 456 bp, Arabidopsis thaliana landsberg
ctagatgatcaatgttatccctggatgagccaatttgaaccgggctcagtgatatatatagttcactagggaaccaagtcactctcgagaaggatcaacttcaagaactctgcttaggaatggagcttacaggtttacgtttgttatatcggtaaagccaccgagaggataatctaagattcgataagctttactaaatggctcaagtagcgggtgcagggtggtgggctttgtgaaccattgatatttcatatttgctcatccatcactaggctggtatatgaatcattgcgggttcgaataactgtggcggtctctggcaagtgattgccaaatactctagcttatatttgtttgatcaagttatttaaacactagatttatgaattaatgcataatctagtggatgatactaaatattgaatgaaaagacttgatctgatcgattaggtaaaa

SEQ ID NO: 172818 - DNA, 384 bp, Arabidopsis thaliana landsberg
atctcacttgtattcggtgagacggtgaagccaagccgttggttcacacagactgaaccacgtttgttctctacgatccgtacgattacgtcttacgaggcgttctcagcaagccatctcttgaagcctcatgttgcatatcggcttggattggaggtatgagattcgcttgcgcgattactttggaaaagaaagcttcgactaaggaggaggacgcgaatcagaggtattcagagcacgcatccaccggtggagaccaaggaatcgcgaatcagagcaaaacagagaacgaatccagcggtggagatcaaggaatcgccagttattagggttacacaaccttcaggtataatttcctttcttactttaaaaaataaatcgtat

SEQ ID NO: 172819 - DNA, 473 bp, Arabidopsis thaliana landsberg
cgacgttttgatgtgtttgtagaggctgaagcgaataaggccgcaagaaagtacgacaatgcctcaatagattaccaagtagagttctacaagaaggaaggtttaacaccttatacggaggctaagcttccaataacaagtggtaatggttttaaccatatgaggatgataaagttccacaattttcttctgttcaatgatcacaattgaaacatttcaaatcgtttggcagatgtccctgaaggttgtaccatcataagagaacacataccgatcacaaaccttttcacatgtgtatggttcaacgaggtagatcggtttacttcaagagatcagctaagctttgcaattgcgagagacaaaataagagagaaagttgattggagcatcaatatgttcttggactgtgaaagacgccactttgtgaaacagggtaaagccgaggaaactacagttttggttcgggtttgaat

SEQ ID NO: 172820 - DNA, 251 bp, Arabidopsis thaliana landsberg
  unsure (1)..(251): unsure at all n locations
accattatgggagctcaatggaaacaagccgggcgcgaagcaaacgcccaaaaacgcggccagatggtcgtgaagctaacccgtgaaatcatggtcgccgccaaattgggcgggccagatccggacttgaatgcgcgtctcgccgccgcggttgaaaaggcgcgaaaaggttccgtcacaaaagataccattgagcggtcgatcaaaanaggagcaggcctcaccgatgagaagatcacttacgaattggt

SEQ ID NO: 172821 - DNA, 484 bp, Arabidopsis thaliana landsberg; identical to SEQ ID NO: 3175

SEQ ID NO: 172822 - DNA, 763 bp, Arabidopsis thaliana landsberg
gactccgttcgcatttgtcgtcccaacaatgttctattgttgtttagacaatgtccccgtttttatccaagaacgatacattttcttaagagagacaacacacaacgcgtacagaacatcttcatacgtcatatcacactctcttgtgtccctgcctcagctacttgcaccttccttggtattttccgcgatcacattctggaccgttggattgagcgggggattagagggttttgtcttctattgcctcctaatctatgcctccttttggtctggatcttccgtcgttacctttatatccggtgttgttccgaatatcatgttatgttacatggtctccattacctatctcgcctactgtttactgttgagtggattctacgtcaaccgagatcgaataccgttttattggacgtggtttcattacatttcaattctcaagtatccgtatgaggctgtcttaatcaacgagtttgatgacccgtctcgttgttttgttaggggtgtccaggttttcgacagtactcttctcgggggagtgtctgactccgggaaggttaagctccttgaaactctcagtaaatctctgagaacgaagataacggagtccacatgcttgaggacggggtctgacttacttgcacaacagggtattacgcaattgagcaagtgggattgcttgtggattacgtttgcttcaggtctcttctttaggatcttattttacttcgccttgctgtttgggagcaggaataagaggacg

SEQ ID NO: 172823 - DNA, 572 bp, Arabidopsis thaliana landsberg
tggataatttcggataaatatcgttaatagatccataatacttgtttgtgataatctctaatgtgattgatagtcagattactcagatatatatttcatcaaataccattttgaactttgctttgcgtttttgctctttacaaatttattttttcctttaaaattactactcaccttttgaatcgtgatatactgctatgtaagtggtatatcacgtgaaacataaaattatcataatatattacaatagtaatgatagattcaagtaaaactaagattgagagcggaaattattatagatataatggatcacttaccactcctccttgtaagcaaaatgttacatggaccatcattacaaaggtatattttattttaatcatccttctatcgttatttaccgttttttttcttcgttaaaacctttatatatcaccaatgggattaattatatttgtttaaaaaaaagagtattacactttttttttttttggaaggattcgagttcaaatgcaaggccggttcaaactacaaacaagcgtgagttacacttatacagaccaaaattttca

SEQ ID NO: 172824 - DNA, 853 bp, Arabidopsis thaliana landsberg
cttctctctccgacttttcctattttttttaatattattttatcaaatgtatctatcttatatacttttgatggagaatgctccaatgataaaaaatagttgacccgttagccacgctagtaacatagtagttctgcataccattttctcttcattctcaattgcgtctgtttaaaatcaatgattgtgattttctaactttttcatattctattggatgggtctccaggtcaaggcgtcaagccaggtaatccagtggttagcagacttttcggaggagttcccgcaaaattttttcttttctttgaatttaatgtgtatgcaaacttttttttaacataattataaatttctatatcctggatgttatctcgatgtgaacaacacttggagtcctcccacaagcttctctacattcccttgccttagagtactcaatcttgaccatagaaacgctgcacatcttgttgtattgttcccgcaaatcttttttgataaaggattcaggctaaatcccaaagtccaaatagccacgtgattcctcaaccctaaatgccaagacttgcacataataagtttgaaccatataaaaaataaaacgcctaagcctaaatcccatctaacaaaacttgcttacaccatgtgtttgatgtaagaatgatatccctctttccaacaatcttgcttcttccctgatttgccataattcaccactaatttggtaagttgtgaagaaacttccatgaggggtaacatgaaaagaatcaccagatctacaatccatgagctatcgtcagcgacaatgttgcaaatattactttgttcaatgagatatacatctacatcttcatct

SEQ ID NO: 172825 - DNA, 254 bp, Arabidopsis thaliana landsberg
ccggctacgtctaatcacgatggctaaacccgaacacgcagggggcgccgggaaccaaggagaagatcatgcttgactgggaccctacgggcaaatcaggaccaaagacaccattgcctgatgttgtgatcattcatgctcctaaagatgatgatgtctactctgcacctgctcaggctgctgctccagatactcttgtgcaagaagctccactcacaaccgtagattaccctgagatgattcctccagtggcc

SEQ ID NO: 172826 - DNA, 310 bp, Arabidopsis thaliana landsberg
gggtgctgggtgcggcattgccctgtcgaccgtgttcgccgccatcgcgggactgctgatcgcgccgctgtacagcgtgcatgccgacatgggcaccttgttcggcctgaaggccttcgccgtggccatcctgggcggtatcgccagtgctggcggggtgttcgccgccgggctgctgttcggcttggtcgaagcgctggtgaccttgtacttcggctctgcgttcactcagttgctgtgtttcgcgctggtgatcgtggtgctcgcagtacgtcctgacggcctgttcggccgcaaactctgggtgaaa

SEQ ID NO: 172827 - DNA, 881 bp, Arabidopsis thaliana landsberg
gagtaattgagcttgtctctgtgtaatcttcagtttaattttacaaatcgatttaatggaagagaagataataggataagcaaattactgcagcttccgacaaaagattatgtcaaaagtagtgttttgtccaagaggtggaaaaactctggcttccttgaatttagatgccaatgaatttccagattacaatgccttagtgagttttgctgatagatctttagattcctctaaggattcatgcttgtacaagctcaggtaaagtgtgtctggaggattgagaatgaacagttttgtttcagtgtcacgcggtggatagattctgtggttaagcgttaacttaagcatctagatgctaagtatcatgtgaagcattagtgttttaatggtgattccactaagtctttatatatgttagacattgatgtacttaaagactccatcaggttttgatgtgtgatttctagtcagtttctgaaaatttagtcaagttcatgcttttagaacataatgtatatgccaattatgaagctacacagtagcttcattattccacaaggctagtgataatgttaaggtactaggtgtccacttctcactcattattcattattgttgaatttaaggcacagggtttttgattgatgcccatatgctcacgtatctgaatttcgaagatgatattatagagagtaaaatcataagcatacaagttctttagccaagtttaatgtagttggcgccttaatctggtattgttttgctctcgttggcttactgatgcaaactttgatccgtaaatcttcaccggattctcgagagttaattagcccttggcatactgcagtctgcagaggtctatgtcttaattaccaaattca

SEQ ID NO: 172828 - DNA, 283 bp, Arabidopsis thaliana landsberg
ttgttttgcatacttaggcatctaggatcatcttgcattcgcattgcatgttttggtgtgttttcaggtgcagaaggagctaaaaaagactctactcgatccattcactcaatccacacagctatagacgaggcatcatttcactcaacctctttactcgatccaggatgctacagaggaggctgtagtttactcgaccctcttactcgatcaaggcaacctctgatgaagcagcaaattgatctactcgccctcctactcgatccactactcgatccactac

SEQ ID NO: 172829 - DNA, 1603 bp, Arabidopsis thaliana landsberg; identical to SEQ ID NO: 8509

SEQ ID NO: 172830 - DNA, 410 bp, Arabidopsis thaliana landsberg
atggtgaatgtgtttcctccgctaaggttaaacgctcttcttcttcatgacagtactttcagtgacgtcatgacgctgcatctgtatcatcactcccgttttctatggaggaatctctgttttcctcggagtgttggaaacttgtgtaatcggaactgttctctcatctctccttcccttgcacgctctgcgaaggtgatacttgtacttgtatcgttcaattctgagctatttagatgtggtttttactcttgttatgtagtctacatctgaatcatggctctgattagtttgatatacagattttctgaatcaattgaatgtttctttcgcgacatttctgtttactataaactcaaaattgatctctgaaggatacttattacttcgttctaatgttaaaataaaca

SEQ ID NO: 172831 - DNA, 2056 bp, Arabidopsis thaliana landsberg
atggcaccaccaaagaagatagggggacttgggtttacagatcttcatgtttttaaccaggccttattggcgaatcaggtatggaaaatggttcaacgtcctactagcttaatttatcggttactcaaagctagatacttccgggatagctctctccttgacgcgacacgaggctcacaaccctcctatggttggaactctctccgtttcggacgcgatctgttacgaactaacatacaaataagcattggtgatggtaagaagaccatgttgggaaccgatccatggttaccatccgcaccacctcgagcgcccaaagtgttacctcacgttgatgtcgatactaaggttgaggccatcattgatcctatctctcgccaatgggatgagactaaaatcactcaactcattgaaccggacgatcatcatctcgtctacaaaaactatctaccttagtacccaacagaagacacatacttatggagccctgcaaaagagagaaattacatagtcaaatccggttactggactgcattaaatgaatcgttgaatgatgaaaccccacaaccaccattagcaaagcattccgggttctcatcatcaactatatggaagttagacgtcacaccaaagctaaaacatttcatctggcgttatgcttcatatgcgattggaatagtagagaatcttcgtaggcggaacataaatgttgatccttattgttcaaggtgctgtacagagctggaaacaaatgaccataccattttctcttgtccccaggtgacaatggtatggcgtgcggcaggcttcccgaccaatcatctgagtaacacaggcatctctgtccatgataagcttactcttctcttccagatgcacactgataaaaatataaaccgtttttctcgctatttacctttctggttaatgtggagaatctggaagagaaagaatgatctggtattcaaccgagtcaatagatccacaagtgaaattgtggaacaagctattaaagatacaaaagagtggctggataacaggtcgatcgacaaggagcagagggagacaaaccaacaaggagtttctcgtattacgaagtggtgcaaaccgaatagaggatggctcaaatgtaattatgacgccttacatcgggagggaaatcaagattcaggacttggctggataattagagactcacatggcacggtgctacactgtggtatgggaaaatatcaaggccgcctcaccgctgaagaagcagagtgctcagctttaatttgggctttacaagccacatcggctcttggttatgcgaggatggagtttgagggagataacttgaacattaaccgatacataaaggagaaaggttcaaacccacgactacgtcattaccttgcaactatccagagctgggcgcagagcttcacggcgatcaaattttctttcagacctcgggaacaaaataaatgtgcggatcttctagctaagaccgtattatcatatactgatcaatgggctatgtatcagacttgtccaccatttttatggtctcttgtaaaaaacgaacaaacgtaacgtacgtaataaagttttaagaaggaaaaagaaaaaaaaatagaattaattttaaatcagaatttaaattctcttataataatatagtgtttggtttctacaatattacttgtttcacggacgcggcttggaacgcgtcctctggctcttgtggtatgggatcgatttttaagactcaataccaaagagttatccatcagggctcgtcttctcgacttcatacaccttcggccttagctgtcaaagcccttgcgattaaatcggcgttgactgcagcgttgcgaatggaatttacctccattacagtttgctcaatacagagaccacaacgaatgagcttcaggggatacttcatggtattacctgtttgtgtctttcactcctatcttttaaagtctgctttatttcatgtttagctaatgtttcagctaatgcagtaggcaaagagactatattttctttggaattctctgttgta

SEQ ID NO: 172832 - DNA, 559 bp, Arabidopsis thaliana landsberg
  unsure (1)..(559): unsure at all n locations
tcatcataagatgcaaaggtatagtgttcgtacgatgtcggtgtagttgtatcgnaaccgttcaccatgactgcatcaacatccctatactttacttggaaagcaacaatcagtgtcactctttaaaagacctatagagaataatcccttaaactgtacggtttgtgaggagtactctttatgcatgaggtgcgctactttaccaaggaaagtaaaacacaggtgtgatgatcattttttgtcactatgtcaaggtattggaaactcaagcggtgacttgtggtgtgatatttgtgagacgaagacagatccgagtgtatgttactatacttgtgaggagtgtgggctaagtctccatattgattgtgtacttggagatatatattatttgaagctaggacacctaacttctggtgttgaaatatgtcccaacaacgaggctactcgacctctctgcgtcaattgtggatttcgttgcagattccacttcttcgtgaggtatacacaagaactatcttgtcgttacgcttgttcattagtcttatgcctatttaagaac

SEQ ID NO: 172833 - DNA, 812 bp, Arabidopsis thaliana landsberg
atgcattgatgtatcatgtaccaagctgcgttttccaaaagttcttacatgtaccaatacattgtaggaattgaagctgggaatgagaggaaacctggcctttactgttgtaactattgcgataaagatctgtctggtttggttcgtttcaaatgtgctgtttgtatggactttgatctttgtgtggaatgcttttctgtcggcgttgaacttaatcgtcacaagaacagtcacccatatcgtgttatggttagtttccaacgccgagcagtatatttgaattcaattcaacgctttgtcagctgaaaagtaattagattagtgattgtgtttaaaacaaagaaaatgttctatggttgtatttttgtttgtattgaatctacccttttgtttgacaggacaatttgtcttttttgcttgttacttctgattggaatgccgatgaagagatactccttcttgaggtaatcattaatcgtttctgattgtacactcccatgtctatatagagattccatctgactattgggaagtaaattgactgtgttaggccattgtgacatacgggtttggcaattggaaagaagttgcagaccatgttggtagtaagacaacgacagaatgtattaaacacttcaattctgcttacatgcagtcaccatgctttccacttccggtaaggactgatgaaaacacatgatcgtcagatagttgaacctagcttgtttatttactctagctccccgctctgtaggacttgtcccatactattggaaagagcaaagatgagctgcttgctatgagtaaagata

SEQ ID NO: 172834 - DNA, 736 bp, Arabidopsis thaliana landsberg
gtcaatcatactctccaccttcatggagccagactgtatcgtcattcctaatttccagttcaacaacttcagcgctgaaagattggagggaaagtttgcacctggtcagatatggtcattgaacagcaaagaggatggcttgcccaagtgttacgcaaagattcagcagatagtatggaggccggtattcaagttgcagataaaccggctagagccaaaatcattgcttgagaacgttatacagtggcatgacaaaagaatgccagtcagttgcggaaatttcactttgaaggaaggccgggacgagacactcactaaagtgactgatttttcacatcagattaaggcagaaaagcatttcaggataaacgagtacattgttgtccccaagactggcgaaatttgggcaatgtacaagaactggagtgaaacaatcaaggccacaagcttgaagaggtgtgaatatgaggttgttgaggttcttgatgacaatgacagtcacatcgaggttatgctgttggaacaggttgatgggtttatttcagtattcaaggaaaaattggaaggaggcatcgatgtgaaaaagaagatcccaaggtatgaattgttgagattctcacattatgttcctgcattccgcttaactggagagagagatggagctcttagaggctatgttgagctcgatccaagtgcgtttccccttaacttgcgcaggtcttagactaattcttgt

SEQ ID NO: 172835 - DNA, 906 bp, Arabidopsis thaliana landsberg
ccgctaaatttggagacgacattacaaaaatttgaaagactctgattttagttttgttgagggtactcatgagcagtccttgcaagctctaaatcctagctgccttgcccttttgaaccatcttcgcatttacattcccaaggtaaagtttctctcctctcaactcttctctgagcttaaaaaccattccatttatcatttcgaatcttctttttgttggaccgcgcagctttttccagatctcaacaagatagtgttgttggatgatgatgtagtagtacagagcgatctttcgtctttatgggaaacggatctcaacggtaaagttgttggtgctgtcgttgattcgtggtgcggagacaactgttgccccggaagaaaatacaaagactatttcaacttctcacatcctttgatctcatcaaacttagttcaagaagactgtgcttggctttctggtatgaatgtctttgatctcaaagcctggagacaaaccaatattactgaagcttactctacatggctaagactcgtgagtgtaaatatagaacgatctcagtttttgcgttatgtattccgtactctaactagttacacaaattctgatgtttaattttaatgcagagtgttaggtcaggactacaattatggcaaccaggggctttaccaccgacattacttgctttcaaaggacttacacagtctcttgaaccatcatggcacgtcgctggactaggttctcgatccgtaaaatcccctcaagagattctgaaatctgcttcggttttacatttcagcggtccagcaaaaccgtggctagagatcagtaaccctgaggtacgatctctttggtatagatacgtaaattcctccgacatcttcgttagaaaatgcaaaatcatgaac

SEQ ID NO: 172836 - DNA, 1122 bp, Arabidopsis thaliana landsberg
tcatcagcaatttcctctatctctccacaattcccctcaccgaaaccaacatcttcatgtccttcaatccctattcgaaaacgaatccctaatactaacttcatcgtcgatctcttccgcctcccacaccaatcatcctccgtcgctttcttcctctcacatttccactccgatcactactccggtctctcctcttcctggtccaaaggaataatctactgctcacacaaaaccgctcgtctcgttgcagaaatccttcaagttccttcacaattcgttttcgctttacctatgaaccaaatggttaagatcgatggctctgaagttgtgttgattgaagctaatcattgtccaggagcggtacagtttttgtttaaagtcaaattagagagcagtggatttgaaaagtatgttcatactggagattttagattctgtgatgagatgagatttgatccgtttcttaatggttttgttggttgtgatggtgtttttctcgatactacttattgtaatcctaagtttgtttttccgagtcaagaagagtctgttggttatgttgttagtgtgatagataagattagtgaggagaaggttttgtttcttgtagctacttatgttgttggtaaagagaagattttggttgagattgctaggagatgtaagaggaaaatcgttgtcgatgcgagaaagatgtcgatgttgtcggttttggggtgtggtgaggagggaatgtttactgaagatgagaatgagagtgatgttcatgttgtggggtggaatgtgttgggtgagacttggccgtattttaggccgaattttgtgaagatgaatgagattatggttgagaaagggtatgataaggttgtaggttttgtgcctacagggtggacttatgaagtgaagcggaataagtttgcggttaggtttaaagattcgatggagattcatcttgtaccgtatagtgagcattcgaattatgatgaacttagagagtttataaagttcctgaaacctaaaagagttattcctactgttggagttgatattgagaagtttgattgcaaggaggttaataagatgcagaagcatttctctggattggttgatgagatggcaaac

SEQ ID NO: 172837 - DNA, 327 bp, Arabidopsis thaliana landsberg
  unsure (1)..(327): unsure at all n locations
ttcacgcttcgtcagcttcaatatttcgtcgcagatcgccgagcagggttcggtgacgcctgcggtgcagaacctgtccatgttccaatcctcgggcacagaggcgctgaaagagctggaaaccgatcttggcgtctcgctcttcgatcggcatccgcgcggtctgaccatcacccatcacggccaccagattctgcgccacgccacgaagatcctggcgaccgtgtgggacgcgcgcnnnnnnnnnnnnnnnnnnnnnnnnnnnctatcgggaacgctgaacatcggcggtacctcgctcagggtcggctatgtgctctccgatct

SEQ ID NO: 172838 - DNA, 359 bp, Arabidopsis thaliana landsberg
accagtagtaaaacataccgaccatggtgttttaagattaaggttgtatcacgtattcaaaccaataacatgtgttagtgatttattctattttttaagaaaaacatttgtaagagctcttgattggattatggtttaaagtttgacacgatgatggttaattgatgcagggtggtaggaatctttggagcattgatccttgcgaatgggatatggtcgaacacagagtcaagaataagatgtagattcacaaacaaccatgtgttctctattggagacaaagtgtgtttccttcatgccattgtttctggcatatattacatatcgtctattgtagcaagggctgggcattttcaccg

SEQ ID NO: 172839 - DNA, 428 bp, Arabidopsis thaliana landsberg
atgggtagggtttttatggttgatctggaagggaacatctacatctgcaaactctgtaagacccatctttctacagaccaagacatcatgtccaaggtttgatcttttcaatctccatgatctggctcattttttcttgtcataaatctgattatagaattttagttttacgttttcttcgaattttcagtgattccttctaggatttaccatgtgatttttaatgtcaattctagttttttgaatatatagagtataaatattggtcttgagtgagatcttcatgtgtcgatcccagagttgtatattttgatcttctctttctgatccagtcattacatacttagtgatgactatagtagtggtacatttaaacttgtgcagtcttttcaatgcaagaacggaagaacttatcttttaacaacgtg

SEQ ID NO: 172840 - DNA, 597 bp, Arabidopsis thaliana landsberg
  unsure (1)..(597): unsure at all n locations
gcatatgtggatgttgttgctttgcacggctcctatgnaaatatatagtgtctgttggtttgtgtcaaacggtgttcccgtccggtattcatgtagggaacatggcctgttgtgtggatttgactgttgtatttatccaccaaactataagaatttggggagtgaaaggtttgtgagaagctattttaaagaagaaggagaagaagaagaagaagactaagaacaagcaaaagagaaaaaaatagtggtcagcatcaaagctgtgagagagaagctacattccatgggagaatgtggagagcggaaacaaatggcgatcgtttttttcttaagcactgtcattgcacctaagaaaaagtttgggttcatcgatgcttttatatatcgaattgtggatgatttagatgcttgtgaaacgtgtccgtgggggagatacacatttgacgataacattaaaaacatcttccatatgataaaatattttaagggtcgtgtgcagcaaacatggtgttttccggctttcttaattcctttggaggtatttatgaagcaaaactctatattatgtaaatcatttatgtttcttatgaatattgt

SEQ ID NO: 172841 - DNA, 279 bp, Arabidopsis thaliana landsberg
ttattttgcatacttaggcatttaagatcaccttgctttcccattgcatgttttggtgtgttttcaggtgcataaggagctaaaaaggactctactcgatccattcactcgatccaggcagcaaaagaagaggcatcattctactcgacctccttactcgatccaggatgctacagaggaggctgcagtttactcgaccctcttactcgatcaaggcaacctcagatgaagcagcatattgatctactcgcccctcctacttgatcctctactcgacca

SEQ ID NO: 172842 - DNA, 1123 bp, Arabidopsis thaliana landsberg
tatggaacaggtctgtttgtcttgtcagtgtcgtctgagtatatcagtaaagatgattgttagatgtctgactctagcatcaaggagggatatcatgctgtgctcttagttttatgtgcaaggactcgtattactcaagaggaagagatcacacttagaaacttacagtctgtatttgggagtcaaagtcttgattatgtagtcgctgttttcgccggtgggagcgtgctagaagagcgcagcgagacactagaagataatttgggtagagattgccgtactttcataaaggtcggtactttggatataatgatttttatcataccattttttagatatatgattcttaaaagtatatgtatactagaagctgtccacgcgatgcgtggattatatattcgggtttaattttgaatataaaataatatttatattgaattatatataaaacttatctataattgttaatatatcgctcaaaataattaattatagcaattttgatgtttacaagatgttctttacaaagacatttcagttgattaaaagttatgcactcaattttaaattatttttttgtgaaacagtatgtttttcttccaaaaaaataaacataaattattcagtatttgtttttgtaaaattgcaaatgcatgtatgaccaattttcttgaaagtcaaaacaatagatgaaccttcttcacatttaaaaatttcaagcctatgatttaagataactttcaatgaaaaactctctaacttgactaaagatcttatatgtcggttcaaaaaaaataagtcatataaaatcttataaatatattgaaagacgttaagttatatatataatttatttaaaaattgttaatatatcgctcaaaattaaataaaatttcaatttggatgtttacaaattattatgatgtgttaaaaagacactttagttgattaaaaatgttcaatgcactaaactgatttttttttttttgtgaaaacggtatattttactatataagaacttaaaatattcaagaatgtatttttttttgttgtgaaaatgaatatgcatgtataatcaattaatcttgaaagtcaaaaaaaatagagggagatttggtaaaac

SEQ ID NO: 172843 - DNA, 593 bp, Arabidopsis thaliana landsberg
tgttcgaaacacgtggcagtgattggagccggagctgccggtctcgtaacggctagggaacttcgtcgtgaaggtcacactgtcgttgtctttgaccgggaaaaacaagtgggaggtctctggaactactcatctaaagctgactctgacccgcttagcctcgacacaacccgaaacatagtccacacgagcatctacgagtctctccgaaccaacctcccgagagaatgtatgggttttacggactttcctttcgtgccacgcattcatgacatctcgagagactcgagacggtatccgagtcacagagaagttcttgcgtatcttcaagactttgctagagagtttaaaatagaggagatggtccggttcgagacagaggtggtttgtgttgagccggttaacgggaaatggagtgtccggtccaagaattccgttggtttcgccgcccatgaaatctttgatgccgtcgttgtttgtagtggtcactttacagaacctaacgttgctcatattcctggtaaagatccatttctctatacttatttcaaataacccggtttctttgttcttagtctctgggaataaaaaaa

SEQ ID NO: 172844 - DNA, 376 bp, Arabidopsis thaliana landsberg
  unsure (1)..(376): unsure at all n locations
ttgaaaaacgtcgtgcttttgaatgaattgatatgaaatcatatatatgatgagaacttgataatacatgtagcggagtacgggtggggttaaaaaggcggtgagggctttcttttttgcggtgacgacgccctttggagtggttctagggatggcactatctaaaacatacaaagagaatagccctgaatcgcttataacagttgggttgctcaacgcttcctcggcaggactactcatctacatggctttagttgaccttctagctgccgattttatgggtcaaaaaatgcaaaggagcatcaagcttcaatnnnnnnnnnnnnnnnnnnnnnnnnnnnnnnctggtggcatgtccgtcatggccaagtgggct

SEQ ID NO: 172845 - DNA, 901 bp, Arabidopsis thaliana landsberg
agaagaaagaagagcaagaagaatggtctctaaccgggaatctgcaaggaggtcacgtatgcgcaaaaagaagcagatcgaagagctgcaacaacaagttgaacaactcatgatgttgaatcatcacttgtctgagaaagtcatcaacttgttggaaagcaaccatcagatcctacaagagaactcacagctgaaagagaaagtctcttcctttcacttgctcatggcagatgtgctattacccatgagaaatgcagagagcaacatcaatgaccgcaatgtgaattatctaagaggagaaccatcaaaccgtcccaccaacagtccctttggtaagtaaaaaaaaaaactttcatcttccactcttctagttcttggtgtgttaacttaagccagtagtactatgattgatgccatgtatgcgactagtgactactacagtagcaattacttacttgcatttgtatgtagatactagataacaacaatgttaacaccgagattgtgtatcacattattggtctaaagaagcaaattaactgaagtaaagggttccattcaaacattgttaacaccgaaaacagaacaaagaaaaagaaactaaatgggaaaatctggtttctcgccaacatcacaagtatcctctaagacagtacctccattggagatttcaccatttggtatttctgcagaagctgaatctatgacctcttcttgttcttcttctacttctcctacttcatctacttcttcttcaacctcttctacctcttccatttcttctacttctcctacttcttcttcttcaacaatgcattgtggcgggtctacaaacgaagcatccgggtctgcataccaacgtgcacaaggcaacctaaaagcaatatccaaaaaccaagat

SEQ ID NO: 172846 - DNA, 1454 bp, Arabidopsis thaliana landsberg
gattcggtgggtaagcataactaacatctcagaataatcaagtcttagactatgaatgagaccagtggaaccggtggtttatgttggtgcatgaattaacacattcgacaataccgacttaaaccagagagattgtgaataaatcgaaaaagagaagacttccatttaaaaaaggaggatctcacgaaaaatggaaggaatgaaaattcaatctttagataattaaaagtttagcatatccttaaactgtctaaatattgtataaatagagggatttgtcctctattcaaatcatctgcaacttaatatagaaaccctatttttcttacattgttctgaagcaaaagccctaccttcgttcttaagcaaccatgttcttcttttcatctagtctttggttactttagagctaagagagaagtgaatttatctaactccttagtataaattcattgtttgatttacaaaatcaacaattggcgtgccttgtaggggattataaacaaattttctctacgctctcgcaagaaaacatggttcaaacgatcatcgatcccgtcatccttccatttaacggtgacgatacgaaatctagcctccttaccggaggagatcctccctccgtggcagaattagctgccaagacggttgaagatcaattacctcgagaagcgaatcctatcgccccagccgtcgctccattgtccttatccttggaagacctcaaagccatcctcgcgaccgtgacaaaagatctgtcgcagagactaaccgccggctcgacgagttagcaaaaggaatcacgccacgtccgaactctgaagcaacaccgccaagaacgatccaaccgcgcggtcttagcgttgacttcacggacgcacagtccaacatggtcaactctaggttcccaggatcgcaccatcccgccaatcaggacggcagaccatctatgccgcccctgatgtcatccggtcacatttttatgccagcagctttggaccatgacgggcagatagacgatatctatctgaaacttcgagagatcggatcataggtccataaggtcgtcagttcggctttagagattgatcgaatgattgaagaaactcataagacttctttcactgatcgaattacgcgcacgagagttcctcaagtcattcatgacctccttcatgacaacagtcgccaaagctcacttctcagttgagcagagggacatcggttgctaccaactcttcgttgaaggtctcgtcgggaaagctttgacctggttctccaggtaggaggcaaactccattgacaacttcacctagttgtcaactgccttcttaaagcattaccaagtgtgtattcagcccggagcctctagttctgatctttggagcatgactcaggagaacggcgaaccactgaacgcctatctaggtcggttcaaagaaatactttcaaaa

SEQ ID NO: 172847 - DNA, 1986 bp, Arabidopsis thaliana landsberg
tcagggggacaatggacatagggcttgttcgacatgctgtaacaaattgaggaacaaatgtccttagtgtgctcttcccattggccatattcgctgcagagcaatggagagggttatcaaagcagaagttttcttatgtccaaacgccaagtttggttgcacacagaagttttcttatggaaaagaaataactcatgagaaggaatgtactttctcattatgctcatgccctgcgcgtagttgcaattacactggctcttatgaggatatatactctcactttaaaacacacaagggtgaaagaggaggtaagaagattaccatatctgacgatggcgacgagtgataaaagaaggtggagatctttgttgttcttaacttctagtgaaagtttttgtctgaacgttcgtaaaatatgattaactaggttttaacccgcggtacaccgcgggactattttgttcttttaagaataaaaatataatttgtttagtcgattaaaaatatatatgatttaatattttgtattttctgaatatacaactcttatatctgtatattatttagtatacaattactatgtttaacttttactgtttaaaatataagaacaataacgtacagttcattaagttaaaatctagattataactaaataatttaaaatttaattatatttttattttataattgttttgtttagtatttaagataatataattatattttgattgttatatttaggacttcacacgtggtataccgcttcgtattactatcgactcaaacccgtcctaccctctaatcccgttcagtgaaactaaacatatctaatgaattttaaccgtgctatactgtcacgtattactatcgacccaaatccgtccgaccatctaaccacgttcaatgaaattaaatattattttgttatttttgttctaataatattttaatttaaaagatatataattcaaatcaatttaaaagatatataattcaacatatatcgtagagaagaaatctcggaaaatgtatgttgggagtatttagttgatgaaaaaaatctcggattataaatatgtgaataaacccgtgtagaattttttggagaggtttttgaaaacgtttgttgagcgcaatataaaatatttaaatttttaaatctgaataattaataccaattagatatcttgagagatttttggaacctatgattgaatataatatcttgtatttaattatcaacagaaaatatttaatgctaatggcatgccattgtaaataagtgtcaagtacatgatttatttgctaaaatgatggcaaaaaaatgtatatgtagatttttcaaagcttaggaaattttacctaatctgtgtgttggttacaaaagcaaagaaatctatataaagagatttagagtttaatcctttctgatattttttaacacaaagaccttttttatgtaaataatagcgaccaatgaaaagtgaaaactctattatgcaattatatgtatttacacacttttgtatttttattatcacgcaatcatgatttcagattccatccctaaagaactcatcctcgagataatgttgagattgcctgcaaagtcaatcgcgaggtttcattgcgtgtcgaagcaatgggcatcaatgcttagtcgtccatatttcacagaattgtttctcaccagttcctcaactcagccgcgtctcttattcgccatcaaaagaaatggtttatggtgtttcttctctttgcctaagcatcagagtccgtatgataattcatcgtcatctcttgtagtagcggccgactttcatatgaagttccttccaaacaaaatacagatgtattcttctagtgagaaccgaaaactatcttgctgttatgcctctggtttgacttatttctatgatatgtactctgaagtgcgtgtgatatgtaaccctataacgggccggtatgcatccttaccttatc

SEQ ID NO: 172848 - DNA, 367 bp, Arabidopsis thaliana landsberg
  unsure (1)..(367): unsure at all n locations
gtcgatctgaaagcttcttcctaggaagagaactaggggtggaggatgcaataactccgacgcggcgaaaactgatcacaatgattcaatgatcacagtcagtaataaaatccttgacgtgatacaaaaaagagaagaaagccatcaaaaagaagcagaaaaaagagaagaagcattgaagcacgcaattgaggaaagggaagctcaaaaaagaaaaaccaatgtttgggatgcaatgaaggagattcctgatttggatgagcatatccgatacaaagctgttaccatgattcattcgttaggaatgaaggatgnnnnnnnnnnnnnnnnnnnngaagaacgttttggttggatcaagagtaacttt

SEQ ID NO: 172849 - DNA, 447 bp, Arabidopsis thaliana landsberg
atgatgcttaatcttcagcaacacgcaaagcgaatcctcgcttacagtaacaggcctcgatttttctgctcctacaccaacgtaacactatcgtctccggcgacgaaccaaactctgcagagtcggatcgaagcggcttcacatcagaaagcagaaatcacaacggtgcttgagcaatggctacagcaacaacaacaacaggggaagcagttaaacccttcgttattaagaggaatcgtcgagaagctcagaagttctaaccgacctcgccaagccctagaggtatcagactggatggtcgaacaaaagatgtacaatctcccggaagacttctcagctagatttcatctgactgaaggttttaaatttggaagaagcagagaagttctttgagagcatcccggagaatatgagattcgagtcaatgtacaattctctattaagaag

SEQ ID NO: 172850 - DNA, 1426 bp, Arabidopsis thaliana landsberg
cactgagtatcaaatatttttttcttgggtaggcaaacgaggaaatcatcatttcacttgctgcttggatcgtacgatggcgaacaatgaatggcacaccttattcttggaatcaaaaactgtcttctaagaatttggggaatcagatcagcgaccattggtcacacagattttagcgcaaaaagaaaaaagacggggtttctttaattatgatagtagactcactcacaaaaaaggttttagagatacaatccttcataactggcatagagatgacaacatagagaatcatgctgctcttctacacaaaaagctggttaattgtagaagagtaatatctaaatggaagaaggataaccgaatgaatgctgaggaaaatattagattgatccgccataagcttgataaggccattgcgacaagaaactccacagtaaatgaaaaaagaactttctaacgggaactgaaccaggtatacattgatgaggagctcttttggaagacaaagagtaggaacagatggcttaatacaggaggtcgaaacacaagatacttttactccactactaaaacaggatgagtacgaaatagaatcttatcaatccaagatgaagcatgtgtgatacatagaggagatcaaaacatagcaagggttgggactaataactttgagaatatgtacactgcaatgcctgtaagagaggctaactacaatgacgcttttcaaggatacactagcaagataacatcacatattaacaatgatctcacaagactaatgactaagcaggaaatcgaagaatccatatttgcagtggaaccattgaaagcaccaggctcggatggtttcactggcgagttctatcagcatttttggtcgaaaataaaaggctccattattcaagaggtaaacaacgtttttgaagaaaacaagctatacgagaatcgtaaccacactaatctctgtctcatccccaaagtggaagccttgtcaccaatgggtgatttcagaccaatagctttgtgtaatgtaagctataagataatctctaagattctgggtaatcaactaaagaaacatcttacaggagtgataacagataatcaagcggcttttgttctggggcgaatgctaaccggtaacatcattatggctcatgaagtttattatgctctaaaagcaagaaagggtcgagcgtcctcaaacatggcaataaagaccgatattactaaagcctatgatcggttggattgggattttttggaggaaactatcaggccaatgggattcgatgacaaatggatatcttggatcatgacctgcgtgacattagtgagacactcagttttgattaatggagcctcacaagggcactataaacccgaatgaggtatacgttaaaggagacatactctcaccatacct

SEQ ID NO: 172851 - DNA, 648 bp, Arabidopsis thaliana landsberg; identical to SEQ ID NO: 45698

SEQ ID NO: 172852 - DNA, 571 bp, Arabidopsis thaliana landsberg; identical to SEQ ID NO: 14766

SEQ ID NO: 172853 - DNA, 1059 bp, Arabidopsis thaliana landsberg
atctagcggtctagccagaggcgaacaagggttcttgaacgcaaccgttatgaaaaacggagacgtggcgtttggttctgcggttcctgggtctagccttgatgctcagcttcaagacactgtagcagcactaccgtttaacatctctgtgcttcatattagtagtgctataatgattgatgttaaaggtgataatgcacctactgcttctcctttgtcaccggtatcatctccaccacgccctgcagaatcacctaatgatgatggtcaagattttgacgagccaccatcctctgctcctggtgctgctgctgatgaaccttccgaaaacgccggctcagctaatggagtttcaagaatcgattctcagcccgctttcgcgtttacgctgttgatgtcattcatttggtggttcatggctcgacttcgatgagaaacagtgtgcaaagaactaaacagatcagttcaggtttttgtaaggaaagccaaaaaaaaaagataaaacagacgcagctcggatggctgcaaaaacatgaacactaaaaagtacgaaaagatttagcttgacaagttctatgggaaaaataaattgagcgatacaataaagacagaaaaatgtaacattcaaagttcttggatattatctttacttaagttgttgaaagcacctattagttacaaaacacaaactgcaaatttttgttattattcaacgagccagaagaaactagaatatagatctttattagtttttagctatgaaaggtaaaaagtaacccaagaacaggaagcacattcatatccatgtctctccccaaaccctaacaacgaaaccaaacaagttttcaagacaaggaaacaaaactcagggactatacatgtcgacttgcttaaagaaagctttgattaaaagcaaaaaagcttaaaaagtgcagtaaaattgttcctttctcgagtcagtggtgaagcccgtttccattgctatagacattgccgttctgatgaactttccccattgcagatccattggctactccatttttcgaaactatgttcacc

SEQ ID NO: 172854 - DNA, 360 bp, Arabidopsis thaliana landsberg; identical to SEQ ID NO: 55392
  unsure (1)..(360): unsure at all n locations

SEQ ID NO: 172855 - DNA, 214 bp, Arabidopsis thaliana landsberg
  unsure (1)..(214): unsure at all n locations
tccactgaccctatatccnaccctttctcctccatcctcaccaagatatagggcaggtttgatccgttccttgagccccaagtcaaaacatacaccagaaaacgcttgtaagactaagaaatcatctcttttaatggaggctggagaggctacaaggttcaccagtaaagatgcttgcaagatcctgaggaatgatgaaatcatcagcttggag

SEQ ID NO: 172856 - DNA, 350 bp, Arabidopsis thaliana landsberg
tggggattatcaatgttggatcatgtcgccactctttcggaagctgagacaaaagcttttttagattcgatatgcaacaagtttggttaagaggatacaagatggttcagtttgaaggcgattgtgaggtgctcattcaagcgatcaatggaaagtcgtcacagtgtgaaatttatagtcttctataagagttcacaaaaacattgtttcaagcacagattcaaataatcagcatttgtggctcacaaacctcctttgtaaagatttattcttctaaataaaatttagttttcagtaaaaaaaaaaaagaagcaagagagctattgagttacggattttataatagtggg

SEQ ID NO: 172857 - DNA, 345 bp, Arabidopsis thaliana landsberg
caatctaagaagtgattagtaaaaacccccatcaatattctactaatgtctgaccagaaatagcctaatgtgtattctctcgtccataaatatggacctgcaacaatgcattacttgccttttccccttctaatctctctcgcatctatacattttgagaacattttagagtgtcctctcttttattttccgggtaagcaccatgatgtctactatttccccggttttctcaaccgaaccgggtctatcaacctctggcctcccagctttagaaaccagtttcactccatgggacatttcacacctcttctcggtcttcgattcattaatcgatccaaacccggt

SEQ ID NO: 172858 - DNA, 456 bp, Arabidopsis thaliana landsberg
atggccaactcccacgtggcagttctcgcttttccattcggcagtcatggtcaggctatcctcgccgtcacccgtcgtctcgccaccgcagctccttccaccgtcttctccttcttgaacacctcacaatccaacttctcgttgctctcctccgatcttcctccgaacattcgggtccatgacgtgtccgacggtgttcccgagggatacgtgctctcgaggaatccacaggaggcggtcgagctgtttcttgaagcggcgccggagatttttaggagagaactcgcggtggcggagactgaggttggtaggaaagtgacatgcatgctcacggatgcgttcatctggttcgcgggggatatggcggcggagatgaaagtgtcgtgggttgctttctggacctccggccgtcgctcactgctcatctatacacagatctcatcagagaaaccatcg

SEQ ID NO: 172859 - DNA, 1589 bp, Arabidopsis thaliana landsberg
  unsure (1)..(1589): unsure at all n locations
tcttagtaacatttattaagaatatatatatattggatcttttatccttcagtttgttttttagaattaataataaacccatggcatttgcctaaccttctatggggcagagacggatctgtatgagattggaggtgtggttgaattatgtttctttacccgtgtgattggcttgtcatcggatccagtcacttgcgatagttgttcttgcacatgaaccggaactcttctttggtttacttgctcactcccaacaccttgagtgttgagtcattatgtaggttgttatcgtattttatccttaactttcttaaattctcttgttgtttcactttcctttctgaccaactatacataaaattaaatagattaagatttgtgcatggcacggactcttacctagttaactttaaattcttgcttgaataacactttcttagacaaaatatatgaggtagtgaatcagactagttgactagaggaataaaaggcaatgcgttaggtgacaggacaatattaaactcaatacggaaaatttagtctatactactagtattaatatatataaccaaaagtttggaagaaaaannnnnncaccgatgttgntgaatcgttatccaacataaaacctagtagacgaaacaacagtatgcaagactcaaaggaacaaaacagtgtttttataattaagtaaaagttttactattcatcaattgggactccctgattgttttccaaataaaaaacaataataataagaagaagaagaaaaaaattactttccacatcgattccaattatagaggagaatctttgtagtgaaactgacacgtgttctccaatattcttatactcattgactcttaccaaagtaactaagattctctaagattctctaagattcttcatttcacaaagattctcatttttctcccaaatataatttctaattattacagtaaaaaatcaaataaaatccggaaacattaacttttcttccttttacattttaacctaactaatcgggactatataactgtcttcttgccaaagatttcattacacaactcaaagaacaaagactcatactcaagattatctttctcttttaatggctctacgcagagcaatcactaaacgtctcattgactgttacagatccgatgtaacacaacaacactcatttttcagacaactctcaccttataacattaagatccatcgtcagtacatgacttcaccgaatggtccgaatcttacggaccggattgtcgggatccgcatcgagtccgtttctccgccgaggcgggaggaaacaccggtgatgggtttatcggttagtgagactaagaagttgttgaggctatatcaaatggagaaagtgaaagagagactcagagagattcctaaaagctctgtttcttattgggaatttgttcagatctgttgtgagagttgtgggaatgatgagcaagggtctcaaatggctaagtctctggatcattcaggatgtgtcgggggtttaggagacaatcttttactacatccctatcaggtgagataacaaacactggtgcttcatttttaaa

SEQ ID NO: 172860 - DNA, 876 bp, Arabidopsis thaliana landsberg; identical to SEQ ID NO: 38674

SEQ ID NO: 172861 - DNA, 711 bp, Arabidopsis thaliana landsberg
aaaggacgtcgtcaaaagctccgttaggacaaagcgcacaggcgcagaatggtggtgcggtggttatccctccggtagttacgaagaagaaaggtaaagaaagtggattagtccttggtttcaccgctggtctcgcttcgcttatagttcttggtctttgcctcgttgtgttctctctggtgataaagaaacgaaccgtcgatggaatatatgaaccaaatccaaaaggagaagcttccttatctcaacaacagcaatcacaaaaccaaactccaagaacaagagcagttccggttttgaactcagataccgaatctcaaaagcgagaaaaagaggttcaatttcaagaaacagagcagcgaataccaaatagtgggaatcttgttttctgtggagaatctagaagtcaaggaatgtacacaatggagcagctaatgagagcttcagcggagttattaggaagaggatcagtagggattacgtataaagcggttcttgataatcagcttattgtgacggtgaagagactagacgctgctaaaacggcagtgacgagtgaagaagcgtttgagaatcatatggagattgttggtggagttagacataccaatcttgttccgattagatcttattttcagtccaacggagatagacttatcatctacgattatcatcctaatggcagcttattcaatctcattcacggtaagc

SEQ ID NO: 172862 - DNA, 651 bp, Arabidopsis thaliana landsberg
tagtatatgtacaagatactcacaaatcatcatgcataataaataggtgccaaaacaatacatagtctatatataagtgtaaataactaaatatgtgtggaaagttggcagacaagtaaataggtgcagaatagagttatagagaagctttttctatcatatgttgggacttgagaacaataaggaaattaacaaagatgttttcaaaaggccataatatatatatttttaatccatttcatcatatgttgggacttgatatgtattatcatttcactttagaatagttaataggcgtctcccgaaaataatttataattttgttgtagtatctagctcatgaaggaatttgctcatcctaaaagaattaattatttcgtatttttctgcttagcatgaattagatcctgcgagttacaataaagacaacaatgctaataatgaagatcatgggacgactgaagaatctgatcagagggcatcagaggttggtaaatacgccacatggagaaatcttgttacttggtcgataactcaacaaccggaagagattaatatcgacgaaaatgtcaacggagaagaagaagaaacgagggacaaccggactttaaatctctttccggttagggagtaccaagagaaaacaggccg

SEQ ID NO: 172863 - DNA, 694 bp, Arabidopsis thaliana landsberg
cccaacctttcagattctgttgaatattgtcactgacttgcatatccacattcacggttcattaaagttgcatttatatggttttattttatcttgtagcttttgtataatttccttacttttttcctgcagaggaagtgtgacctgaagcacccacctggtgatgaaatttaccgaagtggtaccttgtcaatgtttgaggtaatatcctgagataggtctctggtcttcttgctctggatatgatgtatcgttagctttctcttatgtttttttttttcgtatatggatgctgattagtttatctctcatctggttatgttctacattagcaggaacgtttttctctaaccgtactctcatcttacaggtagatggcaaaaagaacaaggtttatgcacagaatctctgctacctggcaaagttatttcttgaccacaaaactctttactacgatgttgatttgtttctattctacgttctttgcgaatgtgatgaccgaggatgccacatggttgggtacttttcaaaggtaatatagcaaagtagttacatatatgtttggtttccattttcctgtttgctcataaacgtaacttctactgggtccaggagaagcattcggaagaagcatacaacttagcttgcattctaaccctgccttcatatcaaagaaaaagctttggaaagttct

SEQ ID NO: 172864 - DNA, 584 bp, Arabidopsis thaliana landsberg; identical to SEQ ID NO: 61866
  unsure (1)..(584): unsure at all n locations

SEQ ID NO: 172865 - DNA, 466 bp, Arabidopsis thaliana landsberg
  unsure (1)..(466): unsure at all n locations
agtcagcggagggaagcccggacaagcagaccgaagagcacatcgcgcgggcgatttcggaagccgagatcatcgtcgatgccatgctcggctcaggcgcccgcggcacgccgcgagcgccgctcgaccagtggatcgaactagccaacgcggcttccgctcagcggatcgccgtcgatatccctaccggactggatgccgattcgggcgcgccggcacaggtcacgttcnnnnnnnnnnnnnnnnnnnnnnnnnnnnnnnnnnnnnnnnnnnnnnnnnnnnnnnnnnnnnnnnnnnnnnnnnnnnnnnnnnnnnnnnnnnnnnnnnnnnnncccatcgaactggtcgaagagttgctggcgagctagttttctaccgcggaggcccggagggagcggagaagactagtcggtatcatcgtcgcctgggggtggttcgtagttaacgctttcacttcnaagggtgt

SEQ ID NO: 172866 - DNA, 508 bp, Arabidopsis thaliana landsberg
acatgcttttctactgggtctgtgcagataatggacacactttctgagattcaggaacgccatgacggtgggagagatttagagaagaaactccttgacctgcaacaggtaaacctcgatccgattcaccaaaaactctcaagaattctcatcattgattcttctcttttatgtttccggttaggtgtttctcgatatggccgtgctggtggatgcacagggagagatgttagacaacatagagaatatggtaacaatctcttcagtacctgtttaaatccctgagcttagatctcttcaaaatcctttcttactctgtttctgttctaacaggtctcaagtgctgtggatcatgttcaatccggaaacaatcaactaacaaaggcagtaaaaagccagaaaagttcaaggaaatggatgtgcattgccatccttatccttcttatcattattatcattactgtcatctctgttctcaaaccatggacacagaaaaatggtgcttaag

SEQ ID NO: 172867 - DNA, 618 bp, Arabidopsis thaliana landsberg
acacaacatgttgctcgcacacgcttctgcaacaatcttatacaagcaacagtacaaggttcttctctctgcctctctcccatcttccatatgcattgcactttgttatgtcctcttcattacacagtacaagcaacatggatcagtaggcattagcgtatacacatatggagctgtccctttaactaactctgtgaaggataagcaggcaacagctagagtgaatgacttctatattggttggtaagtcattaagaacctaatgttgaagcatcacattgactatgacttgattcgcgctgagtttcttgattcggtttttgtaaggattttacatccgttggtgtttggtgattatcctgagacgatgaagaccaatgttgggtctagattgccagcttttacagaggaggagtcagaacaagttaaaggcgcatttgatttcgttggagtgataaattacatggcgctttatgtcaaagacaactcttcctctctgaaacctaatctccaggatttcaacacagatatagccgtggaaatgacctgtaagttatatgatactgtctgagaattaaaagttaaaaatctgcaggctcactggtttctccattttgc

SEQ ID NO: 172868 - DNA, 520 bp, Arabidopsis thaliana landsberg
gtgtggagaagcatataccgatgatacatatcatatgataaaggtgaaaaaatctcttgcatatattctcctcagatatttttgaaactttaaaatgatcaaatctcgtggtatcttaggaagagtcagagaaactaaggaagcatcatgaggagctggaatcaaagaactattcagaagaatgtgcagctgaaatgaagaatcagtcacttatattgtataaggagaatttgaaacaaatgtcagagcaggtaaaagatatgatcataaatcttatatgactacttccggttttccaatattaacaagctctgagtatattttgttaagttggagaagaagctcaaagatgctgcggaggcgcaagaaaaagcgctaagcaagatgacacaagaaaacaacgagctgaacctggcgcttaagattcacatcccgttgccgccaattactccatgcaacattctttgaaaaatgtcttctttctaacaaaggggtttctcaagaaatatcagtaactatt

SEQ ID NO: 172869 - DNA, 565 bp, Arabidopsis thaliana landsberg; identical to SEQ ID NO: 4371
  unsure (1)..(565): unsure at all n locations

SEQ ID NO: 172870 - DNA, 1280 bp, Arabidopsis thaliana landsberg
ccgaaaagtgtacattcactaataagatgttatttttttgcttttttgccggaaaagataaagtgacaaaggcgttagggattggtctgtccaaaaatcatcctctcatgtacacatctttcatggtcttgctaccttctataggagatttataatacattttagtactattactcctcctattactgagtgtttgaagaaaggaactcttcattggggtttcaagtaagagaaaagtttagacttatttaaaagaagctttgcacttcaccacttctagcattacacaacgcgttatacgttgaatgtgatgctagtgtagtgggagtacgggttgtcctgctccaagaaaaacgactagtggctttcttcagtgagaaattgagtgaagcttgacagaaatggagtacctatgatcaaaacttctatacagtatttagagctctaaggcagtgggagcattatttgattcagagagagtatattttcttcactgaccaccaagctttgaagttttttcacagccaaaaggtgataaacaaatgcacgctcgttggataagttttctgcaaaaatttccttttataatcgagcataagtcaggcgcacttaataaggtgacacatgcattgagtaggagagcgtcagtgctacttactttaacacaagatattttgggctttgagtttatgaaggagttgtatgaaaatgatgttgaattcaaggaactttgggccaagtgcaacgagaagcatccttctgcatattttcatgtccgagaaggctacttgttcaaaggagatcgattgtgcatttcttgctcatcactaagagagaagttgatccaagattctcatgggggtggtattagtgggcatttacgtagaaacattgctaatatgggagagagatattttggctatatttgagaagagacgatggagctattgtcaaaaggtgttatacatgtctgaagtcaaaaggtcaatctcaaaatattggtctttgtatgcttttacctcttcttgatggtatttggcaagatttagctatggattttgtgttaggattgccatgtacactacggcttgtggattctctgtttgtggtagttgacagattttccaagatgacacatttcattgcatgcaagaagaccgctgatgcatccaacatggccaagctgtttttcaaggaagtggtgcgccttcaaaaagttcctagtcgatcactttggatagggacacaaagtttctaagtcatttcttaattactctatg

SEQ ID NO: 172871 - DNA, 1689 bp, Arabidopsis thaliana landsberg
gtgcttgtcgacgggcataactgaattctaaaagacaatgagtataatgtcctgtgtgattcccaagtatttatgtcgtttaccaaagcattctgtttaagataatttcttgttgatttcagctctccgaaggtgtcaagaagtatgttggtgtcaaacatgagttggaagctggattttcatggtctctagttcatagggaatgcacaaattcagatttatccttaagtggacaccctcatattgtggaaaacaattccaagcttgcattagctttgacagtcatggatgaatgctttctgcccattattgacaggaggagtggggtgaatatagtacaaaatgtcctttacaattgtgggtaagcttttcagcactgcaaaaaattttgtctgcgtaattttactacagtgattttctttggtatttctttgtgttggttcgtttgcttatacattgcttttcgtaggtccaacttcaatcggctgaactttggtggattctatactgctcttcttgaaagaggcgacgaaatagttgcttcagcatctattaggttattcccctccttataatcctttgttttagtttcaatcctatatgtgagatggcaacaatatggcagagataaagctagtgtcaagatatatttgtctgtgcatgcttatcttatacacttgatttcgtttactttgatgcatttttttcctgtttaagggatctactgcttagtgatgatatttgcttttctctttagatttcatggtaaccgtctagctgagatgccgttcattggaactcggcatgtctacagacaccaagggatgtgccggcggcttttcagcgtagttgaatcagtaagttcaaccgctgatgtagcgaagttaactgactctttctgtataactctgctaatttgttttctggttctctgtgtcttttgatgtgaaggctcttcaacatctcaaagtcaaattactaattatccctgcaactgccgactttagccatgtttggatatccaaattcgggtttcgacaagtcgaggattctgtgaagaaagaaatgcggtccatgaatctgctaaccttccctggcattgatgtgttacagaaagagctcgtagcaccacgacataccgagtctgctgtcgacacaggttttactttaagaacaatttagcttcttcttcttcttcttcttcttctttttcgttcctatcgatattcttactttggctccattgtttgtcaagaagactgtgacccatgcaatgaaggcactaattcagcgatcaagactaatgaagtttccgtcttggagaccacatcaccgtcaagagataaactggtatcagattatttggtcgaacaccaaccatatgaggatgtaagttctgcttcccgggatagtctagtccacgatggttaccccaaaatgctagagactgcgttcaaaacttcaaccatggcgagatcatcagatatggagaagcacatggactgcaaaacttcctatagtcgatttgatggagaagatgaggaagatagtttaattgagtctcctcctcaacgaaacagcgacatggctttcttagatcacatcatccgctctccggtagacactggtgcaacggaaaacagagatgtctatggttcaggggaccccgattctcccgaaacgcaatga

SEQ ID NO: 172872 - DNA, 500 bp, Arabidopsis thaliana landsberg
cgggttcccgctgcttgacgacgagcacgtcggtacgaagacggtgatcggcccgagcgcgaagcggccactggttcttgatatcccgctgttcatcagcgacatgagtttcggcgcgctgtcgcaggaggccaagaccgcgctcgcggccggggcgcagctcgcgggtaccgggatctgctccggtgaaggtggcatgcttcccgaagaacagcaacagaattcgcgatacttctatgaactggcttcgggcagattcggctggagtctggaaaatctcagcaaggttcagactctgcacttcaaaggcggccagggggccaagaccggcaccggcggccacctgccgggttccaaagtcgtgggaaggatcgccgaagtgcgagggttgccaccggggacggctgccatctcgcccgcgcggttccccgactggacatctatgaaaacgttcaaggagttcgccgcgcaggtgcggaaagcgtccgggggtgtccctg

SEQ ID NO: 172873 - DNA, 505 bp, Arabidopsis thaliana landsberg
  unsure (1)..(505): unsure at all n locations
gaaaaggggcaagagcaaaagccccaaagaccagaaagacaagtccagcatagcttccgccgagcctaccnccggtcctagcgatggagaagaagaggagatcattcgatgcatctgtggagaatacgaggaagaagaagatgtcgagcgtgacatgatctgctgtgaccagtgctctgcatggcaacacaatgactgcatgggattgacctttgccaagggccaagaacccgatcaatactattgtgagcagtgcaagcccgagaaccacaaggtcnnnnnnnnnnnnnnnnnnnnnnnnnnnaagccttgggaagaagtcgccgagagacgacgacaggaggccgaggacaagaagtccaagcggaagaagggcaagaagggcagccggaagagtcaaggcaagactgaagtcagcactccagctcgtgctggaacctctgccacaccaggacctggtccatcccctgccactggcgcctctgcgtcagccgagccgaaatag

SEQ ID NO: 172874 - DNA, 518 bp, Arabidopsis thaliana landsberg
gtatatatttttggtcttgcgtttcagatgatgtattcaagatgtgtggaattacatgtcttttcaaaccttgttaagctttattttgaaagtaatgagaaagaaggttgggaagtgcttccgcgtctgcttaacaaatctccaaagctagaaacgttggtcctcaaggtgtcgcaatctgaactttataaagagataattaattcacttgtgcgttatacaatcctaactttgtatatatggtgctttatttgtgatgcttgctttagggtttgcattgtgcaagtgatcacggagtttgcgttgatcgaaatgaagtgaaggtgttggagatatatgggtttagtggatgtggtagagaagtgagacaagtgaagtgcttgttgcgggaaatgcagtgtcttcaagtgatgaaagtggaaattgatgctcatgatgataacaagaaactgagagtcatcaatcaccttcttgatcttcctaaacgtccatctaaatttcatatccagttcttgtga

SEQ ID NO: 172875 - DNA, 810 bp, Arabidopsis thaliana landsberg
ctagtcactgaatttatgcccaacagtagcttggcaagccatcttcatggtatgtttgaataagaattgttaataatttgacattttataaaactttttgtgaatactaactatttgaattatatgttcgcagcgaataattccgctggattggattggataacacgtttaaagatcataaaaggagtagcaaagggtttatcttacttgtttgacgagcttccaacactaacaatccctcatggtcatatgaagtcatcgaatattgttttagacgattcattcgagccattgttaacagattacgctctaagacctgtgatgagctcagagcacgcacataacttcatgacagcttacaaatcgccagagtatagaccttcgaaaggacaaatcataacgaagaagacagatgtttggtgttttggtgtgttgatcttggaagttttgacaggaagattccctgaaaattacttaacgcaaggttatgattctaacatgagtcttgtgacttgggttaacgatatggttaaggagaagaaaacaggtgacgtgttcgacaaggaaatgaaagggaagaagaattgtaaagcggaaatgattaatttgttgaaaattggtttgagatgttgcgaagaagaagaagagaggaggatggatatgagagaagttgtggagatggttgagatgttgagagaaggagaatctgaagatgattttggttctatggatcatcgagggactcataataatgtgtattcttccatgttgttagacgatgatgactttggtttctcgatgaatcgatga

SEQ ID NO: 172876 - DNA, 1028 bp, Arabidopsis thaliana landsberg; identical to SEQ ID NO: 8709
  unsure (1)..(1028): unsure at all n locations

SEQ ID NO: 172877 - DNA, 616 bp, Arabidopsis thaliana landsberg
atggggcatgtgctgggcaaccaggcgctgaccgagatgctgcacaggctgtgcgcccgcacgtggttgatcttcgcgcactacgacacccagggcgaaagcgcctgctggtacctggaacaccaggacatgctggaccagctttggcgcggcgccgacgacgcggtcaaggccgccatgcatgatgacctggaagactgcgaacaccgcatgaaccaggccggaagcgaaccgggcgacccctggctcgccttcggggtcaaacgttaacccccggagcaccccacatggccagcaaagactacccccgcgatctcatcgggtacggccgtaccccgccccatgccaattggcccggcaaagcccgcatcgccgtgcaattcgtcctgaactaccaacaaggcggcgaaaactgcgtgctgcacggcgaagccgcctcggaacaattcctttcggaaatcattggcgcgcaggcctaccccggccggcacatgtccatggaatccctgtacgaatacgggtcgcgcgccggcgtctggcgcatactgggcgaattccaagcgccggggctggcggtgaccatcttcgccgtgggcattggcctggagcgcaaccc

SEQ ID NO: 172878 - DNA, 1099 bp, Arabidopsis thaliana landsberg
gtactgatccagaaatgttctgatgcttttcaggttaagactgttgtaattggtcttggagcaggattacttcccatgttcctccatggatgcttgcctttttcagtatttaggggatttagtttaagggtttatcccggttgagtattttctatcgccactcatattgtgtatcttgttgaataggcggttgagcttgacccagtaatgcttagtgttggcaaggattactttggtttcacacaaaatgatcgcttgaaggtaaaattctccctctttacaacaaaagtgctggttaaactttaacatgtttatattctattctattatatgcaccatcactcagctcgttcgcattcttataataggtgcatattgctgatgggatcaaattcattagagatataacaaactctgaagcttcgtctgaggaatcgtcaaacattggctcaaatggagattcaaccactcacaatacacaaggtggaatttgtcctgacattttaattatagatgtggattcagcagattcaaggtaaaagacatggcaagtaaattcacatatctatgaatttacccacatggtaagcctgattgttttcttgtttgatctcttgtctgcagcggcggattaacctgccctgcatctgattttatcgaagagacatttcttctttcggttaagcaagctctccctcagcacggtcttttcatagtgaatttggtcacgagatcacagtccgtcaaagatatggtagtatcaagaatgaaaaaggtaaagcaaatgtgattcattccttgtaaattctctgcatattttcacaaatctgatctgatactattgcacggaaattgagtcatagaattgatctctattgttttgttttttgccaaggttttcgatcatttatttggcctgcaactagaggaggaagatgacgtaaacgtagtgctctttgggctttgctctgaatctgtaatcagcgagaacgatattccagaatctgcaattatactggagggattgctcaagtgccagagattggaaacgaagcaaagcatcatagacgctacaaagaagctgaaatgctggaaataa

SEQ ID NO: 172879 - DNA, 949 bp, Arabidopsis thaliana landsberg
actcctgggactcgagtcaagatggctatggagactgaagattcttctcggatcacatggtttcaaggcatcgtttcctctacttatcaggagaccggtccatggcgtggatctccatggaagcagcttcaggtatatgatgtttttgaaatggtctttgctcttcttatctctataatgttgagttaatggaacaattcagaatcgatcttgtatctgttgtgtgcaagcctttcatgagtagtttaagtctcatcctggttattcaaatgtcaattgggttttgaatgttgttttgattgctgtgttgttgttttgaaggtaaatattggaaacaggataagttaattcatacgaaaatgaatgttctctctcagattcatcttctataagatggaattgaaactgtttgtgttgagcgtccgtgatgtagagttgcttttcattatccttctttggccacgcattgtacattgtgtttgttaaactagagttcctctgattagtcttatgagatactccttttttgccaatatattctacttcctctgattagttcctttgtttttaacttgcgtagatcacatgggatgaacctgagattctgcaaaacgtgaagagggtgaatccatggcaagtggaaattgctgcacatgcaactcaactgcatacccctttccctccagcaaagaggttgaagtatccacaacccggaggagggttcttgagtggagatgatggagaaatcctttatcctcaaagtggactgtctagtgcagcagcacctgatccaagtccttctatgttctcgtattctacatttcctgctggcatgcagggagccaggcaatatgattttgggtctttcaatccaaccggattcattggaggaaatcctccccagctattcaccaataacttcttaagtccgcttcctgatttgggaaaa

SEQ ID NO: 172880 - DNA, 809 bp, Arabidopsis thaliana landsberg
atgaattctaacaactggcttggctttcctctttcaccgaacaactcttctttgcctcctcatgaatacaaccttggcttggtcagcgaccatatggacaacccttttcaaacacaaggtaatatatctatacatatatgcttctctttttctgtataattatatacgaaagataacaatttgttaatttgtagagtggaatatgatcaatccacacggtggaggaggagatgaaggaggagaggttccaaaagtggccgattttctcggtgtgagcaaaccggacgaaaaccaatccaaccacctagtagcttacaacgactcagactactacttccataccaatagcttgatgcctagcgtccaatcaaacgatgtcgttgtagcagcttgtgactccaatactcctaacaacagtagctatcatgagcttcaagagagtgctcacaatctacagtcacttactttgtccatggggaccaccgctggtaataatgttgtagacaaagcttcaccatccgagaccaccggggataacgctagcggtggagcactagccgttgttgagacggccacgccaagacgtgcattggacactttcggacaacgaacctcgatctatcgtggtgtcacaaggttagatatgtgactcatcactcttttacttgattctttaatgattttgtgatctttatttgagtgtaatgatgaaatgtgcacatatagacatcgatggactggtcgatatgaggctcatctatgggataatagttgtagaagggaaggccagtctaggaaaggaagacaag

SEQ ID NO: 172881 - DNA, 463 bp, Arabidopsis thaliana landsberg; identical to SEQ ID NO: 14525

SEQ ID NO: 172882 - DNA, 1156 bp, Arabidopsis thaliana landsberg
tgtaatgatacctaaacgatatccggttaattcgtatagttattactaaccagtcggtattctaaacgattgagttattggttatgtgagatgttatttaaggaagttgcttaatccattagttgaccataaaatcactaaaacgaaagaaaacaaatgttcaactaccatcttctcaacgagctctcccctctaatcacctgtacgagtccttggcttgaaaaagtacaaaatattccaaaggggcgattcattcgaactaagagttatcatagcaaataaaccgtaatatatatttttttttttgcatgttcctgattttaacaatttttcagtttctgaataggggatgaggatggaggttacaatccaccgacggtttttgccttctacttcgacaagatctctgaaaataaatggatcgtgttaaccaacttcaaggttatacgtaattctgatcaagtcaagactacgacggctgaatatgggatttacttgatggacgagacggttgtaacatccgtagatccgaacaccgctatccagttcaacaatttcacttccttcgacaacatattggaggggactttcgataccgactaactggtcggtaagtctatgtttattaacttatcaattgattcttattaacaacatttttgagggtagggtttgatctaaacttacgctgaacgtacagatctcgttggtgctgttgttgaagttggaattctgtctcattctggtgatcccgacgatggcgtagaggggatgatcattccttttaaattaatggacagatagtaagttttccggcttaaattcccaaaaatattataattttgtgtgtttcaaattgttagatgttttcctgctgcagcaaagaggttctagactgtgaggccactgggagaaaggcattggaatttgatacctgttaccggcgctatggtcatccaaaaattgttgtgtcgcttgctcgatggagggtggttagggagcctgaactggttggtgtgcgcaaaaagaaggttaaaatcgtgagttatggtgcagtttcatctgtttacctggaaccatcgtttgaagaagttgaagaaatcaaaatggtaagaattcatcttagatttacacgtatggttcacatatgataata

SEQ ID NO: 172883 - DNA, 226 bp, Arabidopsis thaliana landsberg
atggagacgccgaacgatttggtgaaagaagagaagagacaaggagcttctgaaaatcaagattggtccaagctttgtcctgatcttttgcgaccgatcctggaaagcttgagctctattgattttcatcgagcaaaaaccgtttgttcacattggtattccgtttggaaaacatgcgtgagtcagtctctgcgtccatggcaggtcacataccttaacgttgttt

SEQ ID NO: 172884 - DNA, 594 bp, Arabidopsis thaliana landsberg
aagcagattctcaagcagattctcatcaagattctcaagcagatagtgacgaatctaagaatgaaatattaatgcaagcagattctcaagcagattctgagacagatagtgacgaatctaagaatgaaatattaatgcaagcagattctcaagcaaagattggagaatcgctagaagataataaagtaaagggcaaagaagataatggagatgaagtaggtaaagagaatagtaaaactatagaagttaaaggaagacacgaagagtctaaagatggcaaaacaaatgaaaatggaggtaaggaagtttcacctgaagaaggtttcaaagatagtaacatagttgaaagaaatggaggtaaagaagattccataaaagaaggctccgaggatggtaagacagttgaaattaatgcaggtgaggaactttcaactgaagaaggttccaaagatggtaagatagaagaagggaaggaaggtaaagaaaactctacaaaagaaggttccaaagatgataagatagaagaagggatgccaggtaaagaaaactctacaaaggaaattcatgaaaataaaaaagcaaccatggaagaag

SEQ ID NO: 172885 - DNA, 1504 bp, Arabidopsis thaliana landsberg
gatgccttatgagttggccaaggagttcgacaggttgagtctcggatttctgaacaattcgcgaggagtcacagtcgagttggaacctaccttagagcgcgaaatcaaagaagcgcatgaaaagatcagtgagattcggcgactgattctagatggcagaggcaaagattttcgagaagatgcagaaggcgtgatatggttcaaagaccgcttgtgttcccaatgtccagtccattcgggagttgatccttaaggaagctcatgagacagcttattcgattcaccctggcagtgagaagatgtatcaagatctgaagaagaaattctggtggtacggaatgaagagagaaatcgcagagcatgtggctaagtgtgatagttgtcgaaggattaaggcagagcaccagagaccagttggattgttgcaaccgttgcaaattcctcagtggaaatgggatgaaatcggtatggatttcatagtcggattgcctcgcactcgtgccggctacgattccatttgggtagtagtggaccgtttgaccaagtcagcccacttcatacctgtcaagaccaactacagcagtgcagtattggcagagttgtacatgtctcggatcgtctgtcttcacggtgtgccaaagaagatagtgtcagaccgaggaacgcagttcacctctcatttctggcagcagttgcatgaagccttgggcacacatctgaatttcagttcagcttgtcatccgcagacagatggtcagaccgaaatgaccaatcaaattcttgaagacatgttgagagcctgtgcgttgcaagacaagtcaggatgggacaaaaggttaccttatgcagaattctcctacaacaatagttaccaggccagcttgaagatgtcgccgtttcaggcactctatggacggagttgtaggactccgctgcattgggaccagcctggagagagacaggtgtttggccccgacattttgcttgaagccgaagagaatatcaaaatggttcgagagaatctgaagatagcacaatcaagacagcgacgtatgcggaccgaaggagaagagagctgagttttgaagtgggagattacgtctatctgaaggtgtcacctatcaggggagtcagaaggttcggagttaaaggcaagttagcaccccggtacattggtccatttccaattcttgaacaatgtgggccagtggcataccagctcaacctaccagagagcttgtctgctgtgcataatgtgttccacgtgtcacaattgaagaagtgtcttcgggttccagatcgaaccattgaagtaacagatgttgtccttgaaccagacttgacatattcagaacatcccattcgagtcctgaatcaaaaggacagggttacccgaagaaaaactcttaagttctataagatacagtggaaccagcattctgaagatgaggctacatgggaaactcaagactttttagataagaatttcctaggctttttagcc

SEQ ID NO: 172886 - DNA, 1077 bp, Arabidopsis thaliana landsberg; identical to SEQ ID NO: 10138
  unsure (1)..(1077): unsure at all n locations

SEQ ID NO: 172887 - DNA, 1050 bp, Arabidopsis thaliana landsberg
ggtgccattattaaaaacattttaaaagcaggatcaccatatggttcttgggtttttatattttccaatctgcttagaatgtggacaaacggagaaacagagcctgtatattccttaaacaaaatgttttaaaggacattctactaagacgtactaaattgggccgggcagctgaccttgctcttccttctagaatcgtatgttcctttctctcccttgtctgatataaatgaagcttggtatagttgcttccgagcttgatctctacatataaatttagatctctctgaggcgagatgcactaagtgtagtagaagctgatttctatgaatcactatacaaagttagcaagacaacatttgatgggtaagttacttttgttctatggattttcactggtttctgctccatgctttgtgtaaactgaattttattattaaatctgacatgtacatttgtttctgcaggtatattcaggctgggacattgatgaataactatgcacatatatttggtcttcttatccgactgagacaagtgagtggtatcgatagttttgttgttctatttacaagccagtgcatgttttggatgatataggtatatagatttctgatgcattttcttgcaattttttcaggctgttgatcatccatacctggtgagttattctagtcctagtggcgctaacgctaacttgcttgatgcgaacaaaaatgagaaagaatgtggtttcggccatgacccttccaaggactactttgtaagtgttccagtcgatatattgttgctatttcatactatctcgactcttgtttcacagttactgtatcttctgtaactatctgccaccatttatcactttcttataagaaacatcggatgactaatggtggacttgtcctgtccggttaatatgtctttggttctcgcactttgaaggtgacttctagtgaacatcaggcaagcaagaaaaagcttaaaggatttagagcctctagcatttttaatcggataaacctggatgattttcaaacaaaaacaaagatt

SEQ ID NO: 172888 - DNA, 783 bp, Arabidopsis thaliana landsberg
  unsure (1)..(783): unsure at all n locations
ttctctataattatatgacaggaagagctggattggaatgaagaattggtagaacgttacgtgggacgagtggtatgattatctttgattttgaaaaattaattagtgtagagatgggcacggtatgaagatctagcaccgagctgtgttgtattgttgtaaaagctactaaaagtctaannnnnnnnnnnnnnnnnnnnnnnnnnnnnagagtttgaccaagttgaattttgtaaactgccctatcatagagatctgttattaaagaaacaaccaagttggattttgcataaagtacataatttctctcttgctaagctatcatcgcgacagttgtttggacaataaagatagttttgtaaacagtttgttgtcatgctactacggagataattgaattagtgacttatttgagttgttatacttttttcttccaggcactatggcttcaccggcggttcctctctcttaattggataatgtatttcgctcgcaatcattcagatgcttcacctgaaaccggagagagtattattatgaatgaagaaattgccatcttcattgataatgaaatccgtcttctggaatcttctatgaccgtcccggataccaaatttgaacattttcaagctcaagcattgcatgctgctgtctacatgctatggctgacaaaggtaacagtggactcttcttgtcccaatcaagtcttcataaaaattgccacttctgtcaatcacacacgtgcaaacaaatagatcgggagtctgccggatagcataacga

SEQ ID NO: 172889 - DNA, 676 bp, Arabidopsis thaliana landsberg
atggctggaggaggaggtggtagcacttctggagaaggtcctagagagctcgatcagacaccgacatgggccgtctccactgtttgtggcgttatcatcttgatctctatcgttctagagctcatgattcacaaaatcggagaggtaataaaaactaacacaatttctcaaagattgctctacattttatgatttcttattacaccagtcattgattgttctttcgcaggttttcactgaaagaaggaagaaagctttgtacgaagcgcttcaaaagatcaagaacggtaccaaaccctccaattgatttttttttttttttttttcgtgggttacaagttttagaactttttgtgttattgattttgcagagcttatggttttgggattcatttctttgttattaacatttggacaaaactacatagcaagtttgtgtgtggcgtcaagatacggccatgcgatgtccttttgtggtccatacgatggtccaagtggtgagtctaagaagccaaagactaccgaacacttagaacgtcgtgttttggctgatgctgctccagctcagtgcaagaaggtcaaaatctttctatatatatatttttttttgcttaattagataacatggttgaaattgatgaagatgaatgtttttgatgtatgcagggctaatgtc

SEQ ID NO: 172890 - DNA, 1598 bp, Arabidopsis thaliana landsberg; identical to SEQ ID NO: 28427

SEQ ID NO: 172891 - DNA, 776 bp, Arabidopsis thaliana landsberg
ctctttttctcatccctggtctcttcatctctcggcgactaaatgttcctttgtcgttgacaaatatcctcagattcatcaaaatcatagcttctaaatacgatgatgcagaagaaaggaacgagaaacggtagtttggtttttactaatcatagtttctacgtatttatgcatcttttgctattatgaaagtatactaactttgtttgttcttattacttatttgtagtggtacaatgggagagaaacagaaacgagggagaaatataatgccaaagcatgtggcggttatattggacggaaacagacgttgggctgaaaaacgaggactcgggacatcggaaggccacgaggccggagcgagaaggctcatggagaatgctaaggattgtttcgctatggggacaaacactatctcactctttgctttctccaccgaaaattgggaaagaccagaggtgattacacaaaacgttccaagagttttaatctgcttttgagtacccaagaagttatggactaaaaccaaaaaaaaaaaaaaattgtggaccttacgaatataacttgcatgcatgttaattactaattagtattttcttctcaccgcaggttaaaatttgtgaccttgaaaacttttgtgttttatataattcattttgattcagttttttctttttctttgatcaggatgaagttaagtgcttgatggccttgtttgagaaatacttagcgtctgatatgccttacctccgaaggtatctactccaagatgtttt

SEQ ID NO: 172892 - DNA, 1340 bp, Arabidopsis thaliana landsberg
aattaccaggttctctccttaaggaatataatctagaaggcagtgatactgaaagcactgggtcctcgtcaataggggagcaaataactaaagaaactgaggtttaatacttgatattcctgtctctgttccttacttcagtgctttatattgattgataatttgcagaaaagtgttcttaatctggatagtttcgtgaattaggcctttcctaactcaaccgaggggctgaaagatagttacatgactgaggatggaaagttggtacttgattttctggctgccattcatgcagctgagaagcaacaggcccatttagatgcccaggtttttgctgaagaattacgagccttgaaggttggttaaaagacagaatatgtcgtatgagtatttattttctgtagtgtctttgctttataagaggttttaacgtatacactactgccaattgttttgattgtactcaggagaagtatgaaaatgagttaagagaccttagggcacgtgagctaatgcgtatagaggaggcagcaatattggataaggtgcgtttatctttttatctctacttgattactcagtccaggacatatgtccagtggcactgctcatatgcatcagatgtttactttgtattttactaatctataagtatgggcaatttgatgcgaatttgtaatggattcttgtaagcatctatctattctcggtttcatgttcctgggtagacgcatacgactataattgaactgccaatgttgctttattcaggagctaaaaagagaacgaacaaaagcagcagctgctattaaagcaatccaggagagaatggaagataagctcaaagctgaacttgaacaaaaggtctgtgtacatttcaggaaactgaggataaaagtgtattgtgacttaggaaatcataactcacaatttgtatttactgtaggaaactgaagcacagttggctttgagtaaagctgaagaattggcaaaagctgagatgatttcgacaattgcaaaagaaaaggcagcacagattgaaaaaatggcagaggcagatcttaatgtaagtaaaagacgaaatggtgtactatctaatggttccaacctcatggtatagaatattgcacagactgttttgaaatcacaattaggaagaatgtgtaggaatccagatgtgcgttagttgttactgcactctgcagaaaacatttcatcagaagatgttttagtaaagatgttgaaagtgaaacctctattctaatggagtcatgaatgttttgcatactttgaagtaatcaaacccacattataactttccactttacacaaacttgagt

SEQ ID NO: 172893 - DNA, 656 bp, Arabidopsis thaliana landsberg
catgaacatggtcctgttcttgagaaagtgattgggtaactaatcatcctcattttacctggttttagtttttctctgatctgtaactcaagtcttttattgtgatgtttagaacggacatagaatggtttccaggtaaatgtttgactcataaggttgttgtgaagaagaaaacaaagaaagggccaaagaaggtcaacaacatccccatgaccaaaacagaaaactgcgagagtttcttcaatttcttcaagccacctgagattcctgagattgatgaagttgacgattacgatgattttgataccattatggttagactaccttctctcttttcttttaccaatggtttcttcagcagctaatatcgctttaaaatatcgaaaatattgcagacggaagaactacaaaacctgatggaccaagactatgacattgcgtaagcttacagtttcacattctctgacattgtgagattcaagaaattaattcttaactattgtttttttttttggttttacagtgtgacaatccgagataaactgatccctcatgcagtttcatggtttacgggagaggctcttgttgatgaagacgattctgatgataatgatgatgatgataatgatgagaagagtgactaacgagaagaaaaa

SEQ ID NO: 172894 - DNA, 989 bp, Arabidopsis thaliana landsberg; identical to SEQ ID NO: 21375

SEQ ID NO: 172895 - DNA, 1518 bp, Arabidopsis thaliana landsberg
cattggagaagggttcaagcgagtatgaaaaagcatcaggtcataggagaggcacaacgcgatacatgtctccggagcttatacgacatgggattgttgattacgctgttgacacgtgggctttcggatgcacagttttggaaatgttaacgggacaacaagtatggggagaacatagtgatctcggttctgtagattgggacattctcatcggtcaaagctgttacattccttatataccggattggttatctgaagaagcacagcattttctcagcagatgtttaaaaagggaccctgcttcaaggtgggggattggtgcactcttgaaccacccctttttgcaatgtggatctataattgtttactaacggttttgtttattagttttaagttgtaagatgaagtatccaactccctatttggtatgtgtttgtggaagttttgattagcataaatcgtacttgcgagataaatgataagagacttttataactttcttatagaaacaccaaatttaattgagtattatagcaaatcacaatcttgtttcatgaagatagaacagattctgatgtctaaagctaacaagaacaaacacaacaagaccaagtgttccatattagacaattccaccaagcaaagctaacattgccatgaagtaaaagagcaaaatcatcattggtgagaagagctgctgcaacttttgatatcccatgaaatatgcttgtcttcttcctcgtagaaagaaataaaaccttcataaacttgagcaaatgaaagaggaagcaacaaggctatggtgtctcttgaataaccaatgatcactatcagctcccccttgtcttggaacacatgtcatgtcatttcttgtaaaagacagtgtagtgtttgtgctatcaacaaagagaagaagaactggaattggaacacatctctgagcagcaacatgacacaagcatcacgcaatacatcactcaaaattgtgtggtgtattggactgaaccacgctctctgcgacagaaaccatcaaaaccaccaagctctcgagcaacaacatcatcactaacgaagacaattccagaatctgaaattatcattcattccagaagctaaattcatactgagaaagggccagtatccatgaacatataacatcaaacatgaaccagagagtatgaatgactttctggtggtcgcgtaagagatccaacgatgtaaccattataccaaatcctgttggtttagcagaatcatgagctggcatgagcatcacctgagaagatgtaaccattttaccaaatctcaaactagtagctgagatctatacgaagctcgtttttggcgatgattcgaacagaaacacgatcaattttgatgaatcaactggatattgaacaaattgaatactttgatcggagaagaaacagatcgaagaaacaaatcggaaacacacacggattgatcggaaaaatcaaccaatcggagaaattaaactatcaaacgaaacgaaattga

SEQ ID NO: 172896 - DNA, 572 bp, Arabidopsis thaliana landsberg; identical to SEQ ID NO: 71028

SEQ ID NO: 172897 - DNA, 780 bp, Arabidopsis thaliana landsberg
ttcactcggatcgctagagtcgtgacaagtaatcacacagcaactgctagtccccatctctctaacaatatcagaaagcactatatagagctcgatatcataacttgaagatattagtcgcaagagaatatatctctttctacgaacaagaagaagatcatgacgagacgctgctcaagtttgcaaaactcaacttcaactattgccagctacattatatccaagagctaaaagatctgaccaagtaggttgtgttagttcatgtcgtcaatctttatatttgtatgtcttgctttatttaaaatgtttatgttcattaattgcagatggtggaaggagctagatcttgcatctaagctgccttacatcagggacagaattgtagaggtctactttggggcactcgcattgtattttgagccacggtattcactagggagaattatagtcactaaaattaccatgattgtgactgtttttaatgatacatgtgatgcatatggtactcttcctgaagttacaagcctcgttgattaattccaaaggtgttgtttttcactcctaactcctatttccatgattaaattgaaaaataggtaaaatgacatgcaaatttttttgtccaggtgggatcttggggacatagaaaagctaccaagctatgtaaaaatcgtctttcgaggtgtatttgaaactttagaagagattgaacaagaaataggccacagggaaggtcacgcattgtgcaagtagcgggtgatgatgtgagtcctccacact

SEQ ID NO: 172898 - DNA, 880 bp, Arabidopsis thaliana landsberg; identical to SEQ ID NO: 43943

SEQ ID NO: 172899 - DNA, 1232 bp, Arabidopsis thaliana landsberg
ttttttacttctcaggttccgatttgggatctgttgaatgggtgtatcattctcctgtgcgttcgcagagcaagatttcttggaagctgctctagactctgtcacggttaagtccataagctttggcgatgacgacgaatgcaaaactcctaagagatctgttaatttcaatgacggtactttagagcccacgattttgaaatctatgggatctggtaaaatggttgttgagaaatctgttagcttgaaagggatgcagctagagagaatgatctcacttaacaggtctgttaaagacaatggctttgagattgctaaagagttctcagttcttgatccgaggaatccgaaacacgaagctgctattaagttgcagaaggtttataagagctttcgtactagacgaaagctcgctgattgcgctgtgcttgttgagcagagctggttagtttgacaactcaaaactctcaaaacgttccatttgtagaaacttttgtgttgtgatctgatgttgttgttgttttgtttctattcttaggtggaaacttttggattttgctgagttgaagagaagttctatatctttctttgatattgagaaacacgaaaccgcgatctcaaggtggtctagagcaagaactagagcagctaaagttggtaaaggtttgtcaaagaatggaaaagctcaaaagcttgctttacaacactggcttgaagcggtaagttaaacattattctcattctgttttttatttttgttacagatgttttggattgaacgtaatctgatcttggtttggtttaacagattgacccgagacatcggtatggacacaacctgcacttttactacaacaaatggctccattgtcagagtagagaacctttcttctactggtaattacttctcacagactcattatctcattcctgcaaattcttttgtcctaaatcaagaaactaaagttatatatacgtttgattcaaatgttgcaggcttgatatcggcgaggggaaagaggtaaatcttgtggagaaatgtccgcggttgaaacttcaacaacagtgtatcaaataccttggtccggttagtatccatccctttatctcttctcatcaagtgtatttacgaaattagaacttatttcttattgttttcatgtttatgtataaaaagaaagaaaagcttatgaggtggttgtgaaaacggcaaattcttcgcaagcatagtg

SEQ ID NO: 172900 - DNA, 445 bp, Arabidopsis thaliana landsberg
tctctctggtaactcaaaaacttatctttctacgttttttcaagttctaaccctaatcgcaaaagctctcttactaatttggttgttgtaacataaaataacagagcttgattcaaagacaaaggaaatgctgagcgtgattgatgaggttgaagatgaaggagattccttgatgaaacgagcaaagattaattacgagaataagccaaagctcattgaattgctcgaggaattataccgttcacatcgctctttggcgcagaagcatgatctcttgatcaaaacctcttctctgaattcggacagccataactcatcatcatgcgacgagatccgatcggaagtgtgtgaagaaacagagtcgtctgatgttgaagctgaaactgaaaaagaccaaattgttgaatttgacgatggtgatgagacaatgaaggaagagtggaga

SEQ ID NO: 172901 - DNA, 2404 bp, Arabidopsis thaliana landsberg
atgagtttattgcaatgtgttaaacatgcaatcaaattccctgatggttattcgtctgatttgagtagttgtgttgatatggagaatggaaagttatcaggtatgaagagtcacgattgtcatgtttttatggagcggttacttccatttatctttgcaaaactcctcgaccggaacgttcactttgcattatcaggtaaaataagaatataatttactctttatatcatatatgcacttgagatgatgcaatttttttttccaggggttggcgcatttcttagggacttatgttcgagaactttgcagaaaattcgcgttcaaattcttaagcagaacattgttttgatcatttgaaacttagagaagatcttcccaccatcattttttgatgttatggagcacctgcctatacatctcccctataaagcagaattgggcggtcctgtccaatataggtggatgtatccttttgcgaggtttttcaaaaagttgaaaggaaaagcaaaaaataaaagatatgcggtcggatcaattgttgagtcatatatcaattacgagattttttatttctcagagcactactttgccgataatatacaaacaaaatcaaggtacataactaatagcaattaattaaacatctgcaccaagcaagttttctatgcgcaaaaataaccatgacttacctcttttggatcaggttaacaagattcaatgagggtgaagttcttgtatatcatgttcttggagtacctaatatatttagttctgttagtcgtccaagtggagaaatacgtgaagtatggctatcagaggaagactatcaatgcgcacatggatatgttatacggaattgtgattattttcaagtaattgagaggtatataacaaaagtcatactcccattttaagttaattataaatgtttgtttaccaacccttatatgttgtttttgtctttatagtatgttcgaagattttctttctattaaatatccaggattgaatgaaaaagaactctttgtgaaaagaggcgaggaatatcatgtgtgggtgaaagattatgtatgtctaaataatttatctatatattatttgcatttatttattgttattcttatctataatgatgtttatttcgaaattttcatacatgttacatattggaacctagtaatccatttccaacttgggtttaaggttttaggtttagtgttgaggagcaaatatactttaaaaattaaagtaagcacaatatttgtaagcgttttggaatcaaatatcacaagatgataggtggatgatttagttttagggctaaaagcacaaccagggctatgaacctaaatttatctttccttgttagaagatccaaaaccaaaaatcagacggacttaggctacaccatcaaagctttgaggagcaagaagaatctgggttagcatttcggagtgaaatatgagtagatgtcatgtgtatgattgaatataaaactagaacctcaacgagatcccgaagagtaaagtagtgcttccttgttatacgattcaaaaccaaaaattgttaagaacttcgggttcaccatcaaagctttgagaaatcatgaagaagcttggtttgtgtttttgtagtccaaattgacttgatgctttgtgtatcattcagtataaaaactagaaacgcaataagaacctggaagttaaagttggattcagggtttaaggtttaaggttaaggttttgcgtttaaggtttaggttttaaggtttagggtttaggtttagggtttagagttagggtttagggtttaaggtttatggttagggtatagtgtttagggtttagggattagggattagattttagggtttggaatttaccgtgcccggccactactacaggagactctttacataatgagattcgaaaaacgagtctgtcgtaggccatccagcagatcattcatataaaattagatctcttgaaagattttctttacatcttttctaataaggaactgtagttttatgaaagagggacctttaagaaattccataaattaatgaggacacatgtctcagcttatatgtctataaattatagaatatgtatgtatgcgatactccaaaaaagaaacagagtggaggtagttagatgatatttggcagctagcataaaatggtaaacaaatgaagcgaaagatttaacacattttcttatttagtgtttagtgtatagtactcgattatgcaaagccacactttacaacaaatcatgtttggtcgtgaatcatgtgctttatagtggacccttctattttgtacgcccatgcatttcatgttgatgagcatatgtggtcattagcccccccagaaaaggaatagccaacaagaagaagagta

SEQ ID NO: 172902 - DNA, 1330 bp, Arabidopsis thaliana landsberg; identical to SEQ ID NO: 9620

SEQ ID NO: 172903 - DNA, 899 bp, Arabidopsis thaliana landsberg
ctacatcacatgtatcgactaaattggtgacggtgcctatattacgtcggggcgagccacaacttcaagacctgatttctaaggcaaaggtagctttggctctttttatctccatttcgccgagagacaacaccgaacttaactcggtggttcccaatagcccgtcttggttatctcatgttgacaagaaagatctatatctcaattttgaggtaataaaacgaaaccctaatatttttaagttataatttgataatcgtgaaaaacaaattaaggatagacttgatactcaagtaacaaatatttaggatttgtatatttaccttttattgtatttacttgtagataaattctttttccttagagatcaccagttctataaatatagaccttaaggtcacgtaaatcgatatctttgcatctcttaacaaaccttttatcatttttctctttctttctactgcttatagaatttcttctgttttttataaagcaggctctaaaaaagattgtcgatgttgtggtcgcgaaagatgggaccggaaagtacaacacagtgaatgcggccattgcagcggcacctcaacacagccacaagagattcatcatctatataaagacaggcatttatgatgaaatcgtcgccattgagaatacgaaacccaatttaactcttataggtgatggtcaagattcaaccatcatcacgggcaatttaagcgctacgaatgttagaagaacgttctacactgcaacttttggtaagagtttgtgttctattcttgaataatttatagttttatcttctttatccaaactataacattcttaaagacaattctaattatactaaaaatatgtttgaagctctaatggtaagggattcacggagtagcatg

SEQ ID NO: 172904 - DNA, 620 bp, Arabidopsis thaliana landsberg; identical to SEQ ID NO: 13392

SEQ ID NO: 172905 - DNA, 950 bp, Arabidopsis thaliana landsberg
tttagcaactaagaatgttatgaaggccatttcttgttgatcataacatgagctttcttttctatttttaggacggtgaggcatatgcgtacctgcttaatgcccttgctccagaacacagtacacatgtggcattagagaccaaagaccccacagaaagagcgaaaaaggttcttgagcaggctgagaagctggattgtaaacgatacctttctcccaaagacatagtggacggctcagcaaatcttaaccttgcatttgtggcgcaaatatttcagcacaggtctgtagcaactggctgctttaaacaatttgagtgcattttttcagttgtgtttggattattgattatcttaaaatcccaatgatgttcgtgataatgtgtggcaatgtttgcatttgttatgtctctgatagtgtcttgacgaagtttctaaatgagtaagaaaatgatgataatgatttctgttctgctacattactagtgctgttttgtttgttgcaggaatggattgactgttgacgattcaaagacatcatttgctgagatgatgacagatgatgtggaaacttcacgagaagaaagatgtttccgcctctggattaacagtcttggcacagccacttatgtcaataatgtttttgaggatcttaggaatgggtgagctatggagttttgtttgaggacgttttatttttgtatctgctttaatctaaacctcattttattcaggtgggttcttcttgaagttctcgacaaagtttcacctggctcggtcaactggaaacacgcaaataaacctcccataaaaatgccattcaaaaaggttgagaactgcaatgaagttataaagattaggaagaaactgcgcttttcccttgtcaatgtagctgggaatgacattgtgcaaggaaataagaaacttcttctcggggagttgtccaaagga

SEQ ID NO: 172906 - DNA, 846 bp, Arabidopsis thaliana landsberg
tatacagagaagataccgcggtgtttgtgagtcagtctggtgaaactgcagatacactacttgcttttgactatgctcgagaaaacggtgcattatgtgtcggcataactaacaccgttgggagctccatagctagaaaaacacactgtggtgtccatataaacgcaggagctgagattggtgtcgcaagtacaaaggtactttttgtaaatccctgaatgtatattcatacatcttcctggatttggaggttaaaaacctttgcgttcacaaacattatcaggcatatacaagtcagattgtggtaatggtaatgctagctttagcaataggaagtgacacaatctccagccaaaagagacgggaagctataatcgatggactacttgatttgccgtgtaagtcgagtaaattagagaaaagttacttcctctgaagactgtttttaagcaatcttatttgactgcagataaggttaaggaagtactaaagctagacgatgaaatgaaagatctcgcgcaactcttgatagacgagcagtcactgctagtgtttggcagaggatacaactacgcaacagctttagaaggagcattaaaagtaaaagaagtagcacttatgcacagtgaaggaatacttgcaggagaaatgaaacatggacctttagctttggttgatgagaatctccccatagctgtgattgccactcgtgatgcttgtttcagtaaacaacaatctgtgattcagcaacttcacgcacgcaaagggagactaatagtaatgtgctcaaaaggtgatgctgcatcggtaagatcgagtggatcttgtcgagcatatcgaagatat

SEQ ID NO: 172907 - DNA, 1317 bp, Arabidopsis thaliana landsberg; identical to SEQ ID NO: 27887
  unsure (1)..(1317): unsure at all n locations

SEQ ID NO: 172908 - DNA, 553 bp, Arabidopsis thaliana landsberg
acgcgtttcttgttttcttcttttctgtgtttcaggtgtatgtctaggcaaacaaggagcaaacaacagaaggagctgatcaacttttctgttttggacttgagaaaacttgaacgcaccaaccgaaaaacccaaagattagcaatggctgacagaatcattcgagctgatgcaaaaggagttttgagagatgagtatgggcaagcctacaatgaggctggacagagattggatgatcatggactcatcctacctaaggacgcattagggctcggtgtcgagcgacaccaactaggtgtcgatcgacaccttcgggagcagaatgcagatgcgattggtgtcgagcgacacaacagaggtgtcgatcgacaccaaccccagattatgcagctattcctccagctacggaaccacgtcgtactcttggggatttcaacaggcctggcttgttctatgctaatcgatcagatatcgtacccccacccttccagaggaacgattatgagctgaagcctggctatcgagtgctatgaggaccttgttctgagcatca

SEQ ID NO: 172909 - DNA, 1830 bp, Arabidopsis thaliana landsberg
gcatatgtccagcgaatcttctgtcaaccttgaaccgaaagttactcctccatcaccaaaatcaacggaagaagattctatggaaccagaagatactctttcaagtgaaaggggtcgattggaaatttcatccaacactaaaagtcaagacgaaactgctaaaggttatcctcagttgacaaatattttgaactatgtatgcaaaacgtttctgatacttcttttttccatttaccgccttcaagatatggaaaacatgcctggagaagatttactatctgaaaatttggagtcagcacataaaaaagttactagatacaattcagctcttgacatgaccctaaaggtaaagcagacaccagccaaaatacgattcaaaaatctgagctctcttctactgattcagctcattcgttattttcatattaaatctcttttcttactcatttccgctgacaaattatgatacgtgcaggccctcttgaacattaaggttcttcaagaggatttggtgcacaatcggcaaccatttcatggaaacttggaagaacaagttccctatgcactgcaaaatctattttctgctattgtctcggaacagatagcagaagagggactctacagttacctcctgagcaacttacttgcttccctagaaggagttcattccatggtttgtgcagataaatataagctgctgagcttgactgtcattccaaagttttacatgtcattcaattttttactcttttcagtcaagtgatgccgctgacgtagttgtcgcgattctcgagttttttcattgctggaaaagtccagaaagagaaagcttggtaactcgcctttttacgttggcggaatatgaaagaatgagttgtaaaaaatgcaaaaggaagccaaattatccagagcaaagttcttatggaattgttatggctgcaaattcaatcagaaacctgaaggtatgtttcattttctatatttttcatttctacagcaactggtacttaaaatgctgcgctgtggttatttatatatgcagtgtgcttttgggaatataaagtttgaggacatcctcaaaatgggccgcatgaaagatggaatgatatgtgatgttaaaacaggtggctgtggagatataaactttgttcaccatactataagtagatgcccgcctatcttcacaattggtaacttttgacgatgattttgttcttatctgctcacttcattattgtggaatgataaaacagtgttgctgtttttgtgggttttcaacattagtgttggaatgggtgaagaatgaaactgaaaaagatatatctgaaacaacaaaggcattggactgggagatagatatcagcagggtatacgaaggcttagaagaatcaaacattaagtaccggcttgtgtcaatggtaaaatctgacacattatcacaaatgttgtgctattcattttctgtatttctctgttaccgactcataatatggaaatgcagattggttgcgttgttgaaggagaatacatttgcatggcttataagaagaaccggtgggtcagtctcagacatgaagctttagcagaagaggtacgacgaaacagttgtctttctcttttatgagttgaatttgagttttgataggtgagccatgattgatatgtttggtgatcccttaggttgttggtaactggaacaatgtggtcagattctgtggagaaagaaaggttcggccagagattttgttttacgaagcatttcaatggcctaacaagtggcaaaagttaatatcaagaaaatatcaatatgaaaacctggcattcatgtaa

SEQ ID NO: 172910 - DNA, 511 bp, Arabidopsis thaliana landsberg; identical to SEQ ID NO: 80846
  unsure (1)..(511): unsure at all n locations

SEQ ID NO: 172911 - DNA, 608 bp, Arabidopsis thaliana landsberg; identical to SEQ ID NO: 54494

SEQ ID NO: 172912 - DNA, 1825 bp, Arabidopsis thaliana landsberg
tgcagactcgaaggaaatcctgtatgcacaacagctctctccaacacaaactactgtcagattcagcagcaacaagtcaaacgaatatactcgaccagtcttgctaactgtggaggaaagtcttgtccattagaccaaaaggtcagccctcagagctgtgaatgcgcctacccttatgaaggcacactctacttccgagggcctatgttcagagacctgtccaatgtgaacacataccattctttggagatgagcttgtgggtgaaattaggactcactccaggctcggtctctctacaaaaccctttcttcaacaatgatgattatcttcagatacagttggcacttttcccacctatgggcaagtattttaacagaactgaagttcagagaattggatttgacttgagtaaccaaacatataaacctcctcctttgtttggaccttactacttcattgcatctccctacacattcccaggtaacattacatacgaagcttatacacctttttggagttaaacacatcgtctaacaatcgaataatttttggcagctgatggtaacggacattccttgagctctcggatggtcactgggataataactggttgcagtgctttggtcctgtgccttgttgcgttaggaatatacgcaatgtggcagaagagacgtgcagagcaagctatcggtttgagtagaccatttggtaagtccgatgttctaacaggtgaagttatcttagaaacactaccattttagattctctgaggttcacctgaaaaaaaagaaactctacattaacttacatgatagatttactgttaagtagaagactgacaatgatattttgattcactcagtttcatgggcatcaagtggaaaagacagcggtggcgcaccgcagctgaaaggggcacgatggttctcctacgaagaactcaagaagatcacgaacaatttctctgtgagcagtgagctgggttatggaggttatggaaaggtgggtttttgaaagatcgatcttgaaactatctagggcttcactttcagggtttgacaagtaacgctcctctgtttctctctgtaatctccgcaggtgtataaaggaatgcttcaagatgggcacatggtggcgatcaaaagagcacaacaaggatcaacacaaggagggctcgagttcaaaacagagattgagttgctttctcgagttcatcacaagaacctagttgggcttgtcgggttctgcttcgagcaaggcgagcagattctagtctacgaatacatgtccaacggatcactaaaagatagcttaaccggtactgaaaaatctggcctttaggtgctcaataaatcacaaacacaaaacttgaccattacgtattgtttttagggcgatccggaattacgctggattggaaaagaaggctgagagtggctctaggatcggcaagaggactcgcatacctccatgaactggcggatcctccgatcatccacagggacgtgaaatcaactaacattcttttggatgagaatctgacagccaaggttgctgattttggtttgtccaagctggtttcagactgcaccaaaggccatgtttcaacacaagttaaaggaacattggtaagttttagataaatcaacgagtcatattgctttcaatttttaggaacttttgtttctgatgattcaatggcagggatatttggacccagagtactacacaacacagaaacttacagagaagagtgatgtgtacagcttcggtgttgtaatgatggagctgatcacagcgaaacagccgatagagaaaggcaag

SEQ ID NO: 172913 - DNA, 684 bp, Arabidopsis thaliana landsberg
ttgttgttgtagcattggaagcctaggaaattcaaaattttgggaagaagttagagacataacagttgatacggccatcttttctgacactgcgaatggtgttcggatcaaaacatggcaggtgattccatcttatcaaagttcccatttacgttctgagatgaaaagaacttaacttgcttgctccctctttctttcaaccagggagggagtggtttggtctcaaaaattatctttagggacatcaagatgaacaatgtgtcaaaccccatcatcatcgatcagtattactgcgattctaggaagccgtgtgcgaatcaggtaaagaacttgtgccaaatctttcttttgtagctcaatattgaacctgaaaaattgtctaaaactcaaaaactgcagacatcagctattagcattgagaacatctcatttgttcacgtgaggggcacctcagcatcaaaggaagcaatcaagatctcttgcagcgatagttcaccatgtcgcaacatacttctacaagacattgatcttgaaccatcaaacggtgatggtttcacagagtctttctgttgggaagcttatggttctagttcgggtcaagtgtaccctcctccttgtctttcagatgacacaagcttcttagaacagtcggttcagtccgggatcacatctgcatacctttga

SEQ ID NO: 172914 - DNA, 1085 bp, Arabidopsis thaliana landsberg
gcaaatacgtgaagccgacccctgtgcagcgtaatgcaattcccatattggctgcaggaagggattagatgttttgtgctcagacaggctctgggaagacagctgccttttgttttccgattattagtgggattatgaaggatcagcatatagagagaccacgtggagttcggggagtctatcctcttgctgtcattctctcaccaacaagggaattggcttgccaggtctgaataactggtataatatcatagtttatatgcatttgttgatcacatgaagatttcatgaaaagacatctcttttatgatttttctgcagatacatgatgaagccagaaagttctcctatcaaactggagtgaaagttgtggttgcttacggaggaacaccagtcaaccaacaggtttctgttactgttttataaatgcttcattttccacgccttatagactcttgtgtatgtgtgtgagagagagattacttgtgcttttccaggctgtaattatactttagttttttggtgcgccttgttaaattttgttctgacagttgctttagctcttagtttggatgatgaaatgtcctggctgttctttgctctgtaacataccattactcctctcctgtatatgtgggtttataataatgaacaattgtgtccttaagatgaaaagctgcaggaatcagctacatttcatgatagtaagtctagtgctcttgctaatttgttcttgttttgctgttgtacagattagggagcttgaaagaggagttgatattcttgttgcaactcctgggagattaaatgatttgcttgagagaggtagagtctcattacagatggtaagattcttggcacttgatgaggcggacagaatgctggacatgggttttgaaccacaaatcaggaagatcgttcagcagatggacatgcctcctcctggtgtccggcagacaatgttgttcagtgctacatttcctagggagatacaggtttgtggaactcgttcacatgccatttctatgttttctccttaccggagaagattctcagctatctctatcttcagtctttcttgctct

SEQ ID NO: 172915 - DNA, 373 bp, Arabidopsis thaliana landsberg
  unsure (1)..(373): unsure at all n locations
gtttgtactggcaccattatgcgagatcgccgctgatattgtacaccctgtagtgcataaaacgatccggcaattactggctgaatgtcctgacgagctggatgtgcaaaaaaaaaccatcacagagaactgatgccggttaattttggctcccagcaannnnnnnnnnnnnnnnnnnnnnnnnnnnnnnnnnnnnnnnnnnnnnnnnnnnnnnnnnnnnnnnnnnnnnnnnnnngcatttcaatgcaaggctgatactggaagaatttgccgacaatcccttccttcccaaattttaccaaaccccggatcagtatgctttcccgctaaagctattctttatggcggaacgttacaagcaactgaaacacat

SEQ ID NO: 172916 - DNA, 1696 bp, Arabidopsis thaliana landsberg
aaaattattaggtctgagatttatttaccttaattcttcttttacttgaaccccacgatttcctgacgcctcaaattaaggctgtcttagttagtgactctgaatccgaagacgactttgatggcggagcaaaccaagaggacgagggtgatgattctcttcaagggggggaagatcccaaataaaaggacgagggtgatgatactaatccagaggacgaagatccccaacgaggggacgagggtgatgatactcatcaaggggacggagatccaaaacaagggaacgagggtgatgatgagagtgaaggaaggtctgaccccggtgatcaacaagatgatcagaccatgaacgaagtattcctcatttaatccttattatatcttttattgcgattagcaaaccttttgttattactgttgctatacatccagaagagcttcttcaatcctcaaaagttgatcctcatcatctatccgatcgacaggtatacatctatgtgtttttccatcttttgttttctataatggatctgacatcaatctttgtcctatagggtaatgcacatgctggtgtgcctctttcagagacttctccctgtaggattaacagaaaaagataggttgtagaaggggatccttctaagtttatgcttcctcccagaagggcaagaaaaaaccccagcgtttttgtgagacagttactgtctcagtagtcaaagggccccatgatgatttgcacccaattgccaaagtaaacgatgaggttcggaaaagctttttgtccactatcatagcttatcgccaaaggtaattaagttttccgctgaattattgttttggtaactaatattcttttacgtatctattaatcattattatgaatgaatggtcaggaagtacgttatcgagggacatgttgtccctaaaacatttttcaaggacatgcacactcctcaggctgctgtccaccaggaggtatgtaccaaatcaatgctaaacctgggaatatgttaaaatttactcagatctaactagttgtctttatgtaatccaatacatcgaggctatgctaagcctgttggcgcggaggtatggcgatgagttcgtacagagtatggctgttatactagattcttcgttcgcacttaactttgttgagctctatccacgttataagaaggccaaaagtaaatctgactggtcgtggaacagtaagatctgggactatgtgaaaggtatcctccctggccgtagcatccgataggcttggttcgctgatgtcgacatcttgtacactcctttacatctcactgccggccactgcgtttccattgtcataaatcagaaagagggtaccataggtgtgctagaccctatcgctgactcgaagactgccaaatagatggacggttttgatgaaaccttttattgtcctgattccgcttattataaagtcgcttgtcccccaagacctgaggacaaatgaagtgccccttgagttcgcttatgatcgtctccctgaggtcttccaaactgagcatgcagatgacagtggcccgcttgttgtgaagtttattgagcttcattttcaggccattagccatgactccataactgaggagtccgttgaagatctcaggatgagatttgctgtagacatctatgaggagtttattgaagctcttcgtgtttga

SEQ ID NO: 172917 - DNA, 1633 bp, Arabidopsis thaliana landsberg; identical to SEQ ID NO: 4733
  unsure (1)..(1633): unsure at all n locations

SEQ ID NO: 172918 - DNA, 604 bp, Arabidopsis thaliana landsberg
atggccatcagacagctctcagaaacgctcatcaaccagatcgccgccgtgcgaagtcatcgaacgcccggcgagtgcggcgaaagagctgatcgaaaacgccctggacgcgggcgcgacgcgcatcgagatcgccacatcgggcggcggcaagggtctactgcgcgtcagcgacaacggctcgggcatggatgccgccgatctcgagcttgcggtaaaacgtcactgcacctcgaaaatttcagaaacgctcgacgatatccgcacgctcggttttcgcggcgaggccttgccctcgatcggttcggtcgccaagctcagcatttcgagccgccgcaaggatagcgccggcggcagcgagatcgccgtctccggcggcaagttcctgcatctgaggccatcggccctgaaccccggaacgatcgtcgaggtgcgcgacctgttcttcgccaccccggcgcggctgaaattcctgaagaccgagaaggcggaagcggcggcaatcaccgaaatcgtcaagcgcatggcgatcgcctttccgggcgtgcgcttcgtgctctccggcaccgaccgcagcacgctggaatttccggcgaccggcgac

SEQ ID NO: 172919 - DNA, 474 bp, Arabidopsis thaliana landsberg
gtacctttgccgactttccaattcaatgccgtaacatgaagccggtcgatccaatctccgccagccgggtacgacagactttctgtggctatcaccgtaaaacaggatcagacacatgaaattatcccagtttaaatttgaccttccccttaacctcattgcccagaaccctaccaagaagcgcgaagacagccgcatgatggtggttgaccgtaagagcggtcatatggagaacaagcatttccgcgatatcctcgaatattttgatgacaaggatgtatttgtggtgaacaataccaaggtatttcctgcccgcatgtacgtccgcaaggaaaagaccggcgccaagatcaaagtattcctgctgcgcgaactgaacaaacccacccgccttagaatgtgatcgagaatcccgcaagaaagatccgcgtaggcaacaaattatattttgttaaaataaggggggttccaagg

SEQ ID NO: 172920 - DNA, 1549 bp, Arabidopsis thaliana landsberg
tgtacctaatgaactcagtattcatgccagaattggacaagttcgtggtcgttttcattgatgatattctggtctattccaagaatgaagacgaacataccgagcatctgcacatcgtgcttcagcgactgcgcgatcatcatctttatgctaagttgtctaaatgtgaattctggctaagggagattaaattcttaggtcacacaatttctcaggatgggatatcagttgatcctgagaaggtacaagaggtaatggattggaaaccccgactacagtgaggcagattcggagttttctgggtttggcagggtattatcgacgatttattctggatttctccagaattgccaagccaatgactgaactgttgaagaagggagtcaaatttgagtggagccaaaagtgtgaagatgcctttcataccttgaggcagcatttgacaacagccctagtgctggcccaacctgacaacaccaagccatttgaagtttattgtgatgcttctggtaccggattgggatgtgtcttgatgcaagagaacagagtgattgcttatgcttcccgagcactcaggccccatgagcagaactaccctacacatgatctagaattggcagctgtagttcatgctctaaagatatggagacactacttgatgggagctcactgtaacatctacaccgatcataagagtctcaaatacatcttcactcaagcagatctgaacatgaggcaaaggagatggttagaattgatcaaggactatgatttggagtgcattaccaccctggtaaggccaatgttgtggcagatgccttgagcagaaaggcccagtgcaattgtatgaacatggatgtgggagtgaccaccctgtgtgatgagttgtgcagattgaacctggaagttgtttcttcgggtgacctaagctatatctcggtggagcccacgttgcaagagcggatagtcagggcacaggttgaggataagggtgttcaggttatcaaagatatgatccagcaaaaggcagaaaaatacaagtgcttccgacaggacagcaagggaattctatggtttggagatcgattggttgttcccaaggaccctgggctcagaaagcagatactagatgaagctcacctttccaaattctccatgcaccctggtagcaacaagatgtaccatgatttgaagcttttgtactggtggaccagaatgaagagggagatagcccagtatgtatcagaatgtgacacctgtcagaggataaaggcaagccacttgaagtcagctggagctttgcaaccactgtccgtaccttcgtggaagtgggatgacatcagcatggatttcattgtgggtctgcccaacacctctcgtcatcatgattcaatttgggttattgtggaccgattgacgaaagtggcacattttcttcctgtgcacaccactgataaggctcagaaatatgcagaattgtatattgaccggatcgtgtgtttgcacggatcacctcccaccattgtttctgaccgaggagcccaaaatg

SEQ ID NO: 172921 - DNA, 520 bp, Arabidopsis thaliana landsberg
atggaagaagaaactcaaaccctaattctcatcacaatcctaatcctaaccctcatcactctcacattcctcatcaaaaaccacaaaccaaaaccaaacctccctccatctccaccgttctcacttcaactcatcggccacctccgccttctcaaaccaccgctccaccgtcttttcctcaccatctctaaatccctaaacgattctccgatcttctcccttcgtctaggaaacaaactcgttttcgtagtctcttcacactcaatcgtcgaagaatgcttcacgaaaaacgacgtcgttctcgcgaaccgtccaaagtcaattgcttctaaacatatctcgtacaattacgcatctatggtatcagctccgtatagtgagcattggaggaatctccgacgtattggcgccgtcgagattttctccaatcatcggcttaatagcttttacactatccgccgcgacgagatccggcgacttatcgctcgtctctctcggtctccaaacgcttcactcgtaa

SEQ ID NO: 172922 - DNA, 634 bp, Arabidopsis thaliana landsberg
ttttttacctttctttagtcatttcaagaaccatcactagccattagcttttctttataagggtttagatttgaaacaatggcgttggattcgtctgcacttcacgtggtgaatgattggaaacctgagagaactctagttttactcggtcgaacgggtaatggtaaaagcgcaacgggaaacagcatcctaggtaaaactatgtttcagtcaaaggcaagaggaaaattcattaccaaagaatgtaagctacataaatccaagctaccaaatggtctaaccatcaatgttatcgacactcctggtgagtttgtttatcaattcacacatattcttataacatatatacactataatgagactaagaccatatctaatggttgtctctatttttactcctacggttcctaaaaaataaagatctctatttgttagatgaaaaaatagagggaaaaatagagatgagttggagtcaaatagagtcaaaaatagagtatagagataaatatagagatgggttggagatgctctaatataatggtactttcaggtctgtttagtgcttcctcgacaacggatttcaccatccgagaaatcgttagatgcttacttctagctaaaggcggtatcgatg

SEQ ID NO: 172923 - DNA, 1815 bp, Arabidopsis thaliana landsberg
atgagtgacaaacttcgaaaatcggttcaagacttgactctgggaattgatgatgaaccggtggctctcacaccggaattttgttcacaagccgctcatgtgaaccgcttttcccttgttgtgacgacggtgaaccctcgtaaacagaatcttcgtgctttgatagggcagataccaacggtctggggtttccctgattcgtgtgttggtcggattctggacagaggcaaagtccagtttaagtttcagacagaagaagcgatgaaccttgtgcttaggcgcggtccatggagtttcaattactggatgctctcaatccaccgatggtatccaaatatcactgaggctgaaatgaagatcatccctttctgggtgcagattacgggtatccctcttctttttctcaccaatgctatggcacgatgtgttggaagtagattaggacatgtggttgatgtagactttgattaaaattcgaatcatccgagatttgttagggtgaagatcaattggaatttagatgatccacttcgtttccaaagaaactttcaatttgcagatggggaaaacacagtgattaagtttcgttttgagaggctaaggaacttctgttccaaatgtggttcattgaagcatgatgtcaaagaatgcactcttgcttttgatgatgaagatccagccgtgatcagtgaggatgatgatgatgataatgatgaagatcatcaagatgacaacaaggacaaagacatgagtgatacagatgctctacaaacggtggaccctgttacccttatccctagacttcaagcatcgattccaagggagactcaaagtaatgtcatgaaaaggccaatctcttcagcatttctaagagccttcgaggacacagacctcaatgttgaacgactccgctaccttcatgcgaaattggcaagagtcagaacacacacacccgttgaaagcgatctccttctagattcctctgacaatgcacagaatcctttcgtcttcatgaagaggaagagagttcagtttgagcaactgtttcaagaagttgaagaagcagaggagatggcggttttgagcctactttacaaaaaggagaggaaaacagagtcgacaggctcctgttcgatacgtaatggaatagacggaggcatgggggcccggtacccctaagggatcgaataggaggatagcctcatggaattgtcagggcattggtgtgcacgtgacgcagttacggctttcccgtttaactcgtatctataagtatgttattcttcttctagttgaaactcttaatcagtttgatgtattatgtaaattagcgtgtaatttaggatttcctaatataataactcagcccccattggaaggagtggtggcttagctcttatgtggaagaacaatttatctttgttcttgatttctcataatgaaagactcattgattctcatgtaacatataataataagagcttctattatatttgtcttggtgtatggacatcctgtacaaactgaacgtcatcaactatgggaaaaacttgagctaatttcagacaatcgaaatgaagaatagatgttcattggtgattttaatgaggtattgtccaatgctgagaaaatccgtggccctttaagaatgaactttcacagatttccgaaacatggtttcttatcgcgaccttgaagacataagatcaagaggagataaatacacttgggtgggaaaaagacacattcatatagtataatgttgcttggacagagtcttttttagggatcctggagattccaggtgcacctgca

SEQ ID NO: 172924 - DNA, 1592 bp, Arabidopsis thaliana landsberg; identical to SEQ ID NO: 28480

SEQ ID NO: 172925 - DNA, 885 bp, Arabidopsis thaliana landsberg
atgacgaactcttctcagtcgcggaagcctcaagtgttcatcagtttcaggggtaaagctcaaaggaaaaccttagtgagctttataaagtcaaagttagaggagatcagcgaaatcaatgttttcatggacgagtacgagattagagggaggccaatcacaacactcttcgaacgaatcagagagtcaagtatcgcactagtcatcttctcagacaagtaccctgagtcacgctggtgcttagacgagctagttgagatcaagaagcaaatggagacaggatctattgttccctttccaatattctacaaagtgaaagctgagtccgtcaagaatcagactggtcacttccgtaatgttctcctcaaaactgaggaagacgttcgcaaaaaggttgataggagcaacatcaggtcaatacttgaaacagaggatatgatttggggatggaggcaagctttagtctctgttggtggaagaatggggttttcttataatcataaatgtgataacgaattcgttaacgatattgtggtccagatcaagaaaatgttagccgatttatctccatctccaagaaatggtcttaaaatcatagagaggcctcagatgcatcctcaggaagaagtaacgtcattgttacaagctctaaaccttaagaaatctgatcttgaagatcttattcatatcaatggcgtcgtttcccatggcactgatcgtctggtgtttcttgacctgatctctcttcagaatcctatcctcgctgatcgattaatcgagctagttcaagctggaaggaatctcttggtgttgttaggttctctagaatactacaataatgttagtttcctcaaccccctcaaagtctcttcactgaattgttat

SEQ ID NO: 172926 - DNA, 408 bp, Arabidopsis thaliana landsberg
taagctttgacaaataattaaagactcacgcgccttttaaattaatcttggcaatcttctgctatctctccttcttccttggagaaaacatgtttgtttccgataacaacaatccttcacgggacataaacatgatgatcgacgatgttacatcaaacggagatctacagccacaccagatcatcctcggagaaagcagtggaggagaggatcatgagatcatcaaagcaccaaagaaacgagcagagacatgggcacaagacgagactcgaaccttaatctcattacggagagaaatggacaatcttttcaacgcttccaaatctaacaaacatctctgggaacagatttctaagaaaataggaggaaagggtttgaacgataaccatctatgtgtacggacaagtg

SEQ ID NO: 172927 - DNA, 1294 bp, Arabidopsis thaliana landsberg; identical to SEQ ID NO: 32045

SEQ ID NO: 172928 - DNA, 428 bp, Arabidopsis thaliana landsberg
cgggcacgtggggggcttatcggatggggggggacttcatcgggaaggcgatcgagcgggtcagcgggcgggacctggaaacctatctgcgcgagcacgtgctcggcccgctgggcatgtcgagcaccagcttcgaccttagcgacgacctgcgtgcccacctcactcccctgtaccagcgcactccggaaggcttcgagccactggagttcgaggtcccgcaggaccgcgagttctacctgtgcggcgccggcctgtacgggtccccggctgactacctgcggctgctgcgggccctggtcaacctcggcactctggaccgcgtcgaggtgctccgccccgagacggtgctggaagcacggcagaaccagatcggcccggtcgagatcggtccggtcacctcgctgaacctggatagttccggccac

SEQ ID NO: 172929 - DNA, 399 bp, Arabidopsis thaliana landsberg
  unsure (1)..(399): unsure at all n locations
atcatgctggcgctgcgcgcgcgcgacaagaatggcgaaggccagcacgtgnacgtgtccatgatggaaggccagatcggcctgctcggcggcatgatcagcgccttctgcgccagcggcacgctgcccgcccccatgggcacggcctacaaggcggtgctgccctatcagacctttcgcaccgccaccgacgatgtggccatcgccgtgggcagcgacaagctgtggaaggcgttctgcccggccataggctgcccggaactgaccgacgatccgcgcttcaacaccaatgccaatcgcgccaacaaccgcgccgcgctcattcccaggctgcaggaagccttcatgaagaagggctacaaggaatgggaagagatcctggtaaagtcgacgtggcgg

SEQ ID NO: 172930 - DNA, 1173 bp, Arabidopsis thaliana landsberg
atggaagattctatgaacacaagaggacatggacgcaatcaagaacatgcagataacttgccagaatcaaagagacagaagcttcctgctttggcaaggtaactcatattttatatgttagtgtgtcgtaaattcgattgttttggctaattctgaagtctttttgtatcggaccttgttttgagttgttcattagttacactgtccaaagagcatagtactgtggaaatatcatacttttcaaattttcgatagtcttgcttagcctcgcaaggcctcaaattttctcagacgtcgttgtatgaaaaaaaaactgtcttacagtgtcatagtggaagctgtcaaggtagatagtctgcagaggctatgctcgtctttggaaccattatttcgaagaattgtgagtatgatactattccgaagtttaacttccacatagaccaaatcttgagaagcctgtaagagcgataaacttggtaatgatgtcgatcaatggacaggtcagtgaagaggtggaacgtgccatatcaaggttggagaactcgaaatctacttcaaggtattttatctagctatatacgatatcattttctggactggttccatgatctttacatcaatttgagttttcagatctacagaaccgaataagattcaaggcctcgatggaagaaatctgcaacttcggttcagaacacgaatgcctcctcatttattcacaggtgggaaagtcgagggagagcaaggctcagccattcacgtggttcttatagatgcaaacacccccaatgtaatccaaacaggagaagaatcaatgacaaagctgaatattgtcgtgttagatggagacttcaatgatgaagacgacaaagattggacgagagaacattttgagagctttgaagtgaaggaacgcgaaggaaaacgtcccatcttgactggtgacagacatgtgataattaaagaaggtgtaggaactcttggaatacttactttcactgacaattcgagctggattaggagcagaaagtttagacttggtgttaagcgtgcaacgggatttcacatccgtgaagctaacccagccccatttgctgttaaagatcacagaggagaacgaaagtatcttaaaactttggactgacttgataagcagagagagatatggttttt

SEQ ID NO: 172931 - DNA, 540 bp, Arabidopsis thaliana landsberg; identical to SEQ ID NO: 3155

SEQ ID NO: 172932 - DNA, 722 bp, Arabidopsis thaliana landsberg
ttaacctttttgttatttcataaatagaatttttgaccttttttgttagttgatccatatccaactatagtaacatcattaatgtatttgttagtgatctcaaataggagaactactttggagatttacaaaatttgttcatgaactctcctctgcgtgtgtataggaagctattgggacaaggaattgcttcttgttctctagaagagcttcaagaaatcgatagtcaactccaaagaagtctgggaaaggtccgagaaagaaaggtacatatacttcatcactatctaattggtatatgatgatgatgtaatgtaactatacaacacatattgacttgaataatctccatctcagtcatctagttatagtcctcatttagatatgaacttgaacacagatctttgcaaccttttagcgacatatctcaaccaatatactaacattgatcaagagtcaagtcacatgtgtgttttgtatattagtgttgttatcatggaaatgaaaaaaaagttggacaaaatgttttataggctcaattgttcaaggagcagttggagaaactaaaagcaaaggtttgatacattatgttataatatataagatatgtatatcatacatgcaattttttaactagctttttatatgaaattggtgaaagagtgtcggttgtgtttcaagagaaacaattgttagaagagaacgtcaagttacatcaaaag

SEQ ID NO: 172933 - DNA, 373 bp, Arabidopsis thaliana landsberg
atgacagtacaccgcgtgaagtgtgaggagatcatcatgcgagcagcagtcgtccagggtttcggccagccgctcatcatcgaagaccggccggtgcccgttcccggtcctggccaggtactggtccggatggaagcttccggcctgtgccacaccgacatccacgccgcgggcggcgactggccggtcaggccaacggtgccgttcgtgcccggtcacgagggcgtgggcatcgtcaccgccaccggcgcgggagtcaccgccccgatggccgggacccgcgtcgccgtgccgtggcttgactatgcgtgcggcacctgccgttactgcctgaccggctgggagacgctctgccccgaccagcggaataccg

SEQ ID NO: 172934 - DNA, 1051 bp, Arabidopsis thaliana landsberg; identical to SEQ ID NO: 23303
  unsure (1)..(1051): unsure at all n locations

SEQ ID NO: 172935 - DNA, 613 bp, Arabidopsis thaliana landsberg
  unsure (1)..(613): unsure at all n locations
gcagcatcgagcgccacttcaacaggtggttccactacncngtcgtcttcctcaacgacgagccctggagcgacgagttcgtggccaccatgaacgcgagcgtcagcgncggcgcgcgcttcgaggttgtccnccgcgccgagtggacctttcccgagtggctggacccgtcggtcgcgcgcgctagcatctccgagcagggccgtgagggcatcctctacgccggcctcgagacgtaccaccacatgtgccggttctactccgggttagctttcacttctccgtgccccgtgtcacgctcgatttctgtctctctctctctctgtgtgtgtgtgccgggctaacctttttttttgtgacaacacagcaagttctacacgctcgacgccctgaaggattatagatggtactggcggctggagcccgacgtggacttccactgcagcatcacgtacgacccgttcgccgagatggcccgccgcgacaaggtatacggcttcacgatcgcgctgtcggaggagccggccacgtgcccctcgctgttccggcgcgtggccgactggaaggaggcccatggcgtgccgacgtcgccgctgtggcgcgccgcggtgtc

SEQ ID NO: 172936 - DNA, 835 bp, Arabidopsis thaliana landsberg
atgtggactgtttttggtggacatcctcttagattctctttagttgagtttggttctgtaactagtttgccgtgtggtgaatttccggaggagtatgaacctgacttcttccctagacgtgtcaatgggacaaatgattactgggatgttttgattggggaagataagaatgcaacactagctgatgtttcctctaagttccaaactttaaaagggattgaagaccctttaaaactccccctggctctgcttttgattattgatggagtccttattgctaataaccagactcatcgtccaactttcaagtatgttaagatgttagaggacattgactcattcctggctttcccatgggggagagaatcttttttgaagactattcagatcatgaggcctgttagaaaaaacccgtcaatggttgattctaagagaaaaaggtctcgtcctggaatcaagctagaagatcccatccaacaattcacaaatcagatgcaacagcagagtatagctatttatggctttcccttagccctgcaacttcttgcttataggaacatttctggtctactggacaaaattcctggttctgcagatgagagaacgtttttggaatggcattcaattgggataccgaaaagcaatcttactatcaacgatgttcatctccttgaacgtgttcctgatgtaagtaattgtaaacattgttgtggtatcttttctttcatgtgctcttatgactttttttatttggtctaattttctgagtctgtttcttcagatgattgttatcctgaagctatttgtaaacactaatgaggatggttggggtgag

SEQ ID NO: 172937 - DNA, 1271 bp, Arabidopsis thaliana landsberg
  unsure (1)..(1271): unsure at all n locations
atttttcgttgtgaaagacttcacaatctgcttgttaaatgaatgctcagtctgatagagacaaaaatctagaaagtgcttgacagttatggctatgaagtctgaagcagatgcactaactcagattggaaccgatgaactcaaggggaaggttggttgtctatctcttgtcttggtatttctatgnnnnnnnnnnnnnnnnnnnnnnnnnnaaatttgtttcagaggtaaaatcttgcattgattagggttcgctgctttatctaatatcttctacgactgatagaatggtctaatctggtttactgtttgtttgttggtaggagaagaacttgtatatctagcaaccatcttgacattaacgtgtatttctttgtacatgcagtttcaaatgcttgaaacttcatctgtggatgatgatcttgcagacttgaagaaagaattgtctggaagctcaaaggtttgtaaaacgtcaatcatcttgttagttccgtagagtttataatctcatcattcgcgaaaatattgtatccacaagctaccatatgtccatattgcaaattaccgtccgaagagactaatgggttcagcaatttgggatggttcactaaaatcaacaattcaaactactcaaattacttctatgtttaccttactgtcttgtttcatgtttgacgatagcctactttgctactaacattttacttaactgagttaagagtctgtgaaacatacatcttatagttatcctctgtttatatgatatggagcagaaaggagagcttcctccagggagaagcactgttgcagcaagcacgagataccctttcaaagactcagagatcgagaatgagttaaacgaactgcgaaggaaagctaacgacttttagatatcggctgtttccgaattgtgactgggttacattacgttcctgctgtaaactatcttgtgtcttgtagaaagacacaaaaagcatgtgtactcttaaagtaaatatccagctatctaatccccatttatagttgggttatgtacattcagacccttttgcaagtgtggtttccattttgactcactttgtgtcaagtggacacgtttttttataagctgttttactcgcataaccctctatcagcctctaaggcataaaagaaagagattcgtcgatttaagatagaaatgctcgtcttccatgttgacttgtctttccagtaaaacatgttgccatattttcctagattcctagccaatcgtcttcagaaactacaag

SEQ ID NO: 172938 - DNA, 532 bp, Arabidopsis thaliana landsberg; identical to SEQ ID NO: 2911
  unsure (1)..(532): unsure at all n locations

SEQ ID NO: 172939 - DNA, 1776 bp, Arabidopsis thaliana landsberg
tcattgaacaattattctgacaaggattcaatgcatcaaacaacgaatctgagtacgaagccctcatagctagcattaaactagctcaaggaatgaggatccgcaaaataaactcttatagcgactcctaacccgtcgccagtaccacggggaattcgaagctaaagacgagcgcatggaagcgtacctcgaactagtcaaaaccttggcctagcagttcgaatcgtttgaactaaccatgattcccagaggagaaaacacctcggcagacgccttggaagctctcgcttccacgtcagatcattttgtcaaaagaattattccggtcaaaggaatagaatacccaagcatcgacctaacagtcaaacacgctgggactgaacccccggcaacttcacacgagtaacctgaagcaccaccgccgcagctagagcccttgtggcagttgcagaggcaaagtgcgacggaaaaggagccaaagtacgaaactcctgaacaacttgccccgtacgaacccgaaacgtacaacgactggagaaatccaatcatcgattacatcgaacgagggatcacacctcccgacaagtgggaggccagaaaactcaaagcccagagtgcaaggtactacatcgtggaagggagtcttatgaaacgcagcgtcgcaggtccctacatggtgtgtacctacgggcaacaaacaaaagacctcgtgaaaagcatgcacgaaggacaatgtggtagccactatagtggacgtaccctcgccctcagaatcaaaaggcaaggctacttttggccaacaatcctatcttattgcatagctcactcactcaggtgcgataagtgccaacgacacgcatctactctgcatcaacctcccgaggaaatgtcctcgatatcttctccttacccgttcatgaagtggtccatggatgttggtcccatggaagcctccggtgggaagaagaggcaaaaaaacatgcgggtcctcaccgactactctaccaaatggattgaggctaaagccttccaacacgtaaccgagaaacaagttgaggacttcctgtgggaaaatatcgtatgtcgacatggcataccatatgagatcgtcatcgataacaggactaacctcacctcgagaaaaatcaccgcattttgcgacaagtggaaaatccgtcttaccacatccaccccccgttacccacaaggtaacggacaggcagaagccgccaacaaagctatacttagcaacatcaagaaaatacttgatgccaaaatatcaatgtggtccgacatactccacggagttctccggggctatcgaactacacctcgcaaatcaacgcaagaaacaccgttctctctcgcctatggtttagaagcagtaatccctgtcgaaaccatagtaccaagcgtgagaaggaccgccagtcctgctaactcggacctgaacacgcaaatgttacaggacaacatggatttcatcaatgaacgcagagatcaggcaatgatccgagttcaaaattatcaacaagctgccgcccgctactataactccaatatcaaaattcggagttcgaagtgggagagctcgttttacgaaaagtgttcagcaacacgagagagctaaaccctggaaaactgggaactaactgggaaggtccctatcgaatcaccgaggtggtacgtgacggcgtctataagctcgtaaaagttatcaacggagtacctgagttacggtcttggaatcccatgcatctcaagaaataccacgaa

SEQ ID NO: 172940 - DNA, 1093 bp, Arabidopsis thaliana landsberg
atgttatgttaagaatttgttcaggaaaagtgaagaactcaaataagatggtttttagattgtcactaaaacattgttaagatctttcaaacactagatttctagatcataatagaaaaggcggttttagctgttactagatatgttatggattttgtgcgaattttacatatatgatcatgtcatatatatatatatatatttgattttaaaatatagtgtgattcaggtcggacaaggattttctatgcaagattcgaggagaagccataaaagccggtgttacggtggtgaccatcggtgatacggtagggatcaacatgccacatgaatacggggaactcgtgacttatctcaaagcaaacacccctggaattgacgatgttgtcgtcgctgttcattgtcacaacgaccttggtcttgcaaccgccaactcaatcgccgtacggaactaactcttttgtgtgtgtgtgtgtgtgtgtgtgtgtgtgtgtgtgttagatatattttcatatatatatttactaatatagattctcaatgtgacaaaaatatgaacatataaccaatgagtttacataatatatgtatatatatagggtatacgtgcgggagcaagacaggtcgaagtgacgatcaacggaattggtgaaagaagtggcaatgcgtcgcttgaggaggtatcatcatttttgttaccataatctcatcactaccatgatcatgatcatgatcatcattatcaacatgaccatttaaatggtatgtaggtggtgatggctttgaaatgtcgaggggcatatgtgatcaatggtgtttacacaagaatagacacacgtcaaatcatggctaccagcaagatggtatatattcacacatgtatatataatataattattatgaccttcataataattaactaacaaaaatttatgtaaactcttgagcaggttcaagagtacacgggcttgtatgttcaagcacataagcccatagttggagcgaactgttttgttaaagagagaaacattcatcaggttcgtaattggtggtaaacacggatattaagaaattatataaactattttagcgt

SEQ ID NO: 172941 - DNA, 1260 bp, Arabidopsis thaliana landsberg
taaaaccgaatttttgaggtatattgtatgaatcttttatgtaaaggttcaaacttgagattgtggtggatccagagctggcctcaaggttgaatcgccactcattgatcatcctagttataggtagaatgtgaaggctctccaaagcaagaacctgttgcctttcttactttggttgctttacttaggatttaaagtattctgttatgcccttaggtttctcagttgttctactgaagagtttgttattcttgaatcattgctttacatcaattaaaaattcttgtttgtatttgtttggtttacattgctgcttttttttttggttacaggttttggcagaagtaatattttcttgtttgtttcgactgttctaggcattggcagctaaattaacgtggagtgaatgcgattcttgctggctttgagatcacgttgaattggttgattgatatggctgcaatagaagaacttcctacatatgagtttaaaccagcttcttcaagcgggactgaattagatgatgctgtcactgataatgtagaggctggaacgggaactaaaaactgttgagtcaaagaacttcatcaatgaggtttgtcaatgagattctagattctaaattcgcagacttcaaggagcttcaagcggtgtgtgatgtagatattacttccgaggaatctgaaaaagcattaacaactcttgagaaagtactggcttacctttgcagtctggttcaatagggaacaactcttttatccgtgagaatgtaactgctgaatcaggagttactatagatgttcaagttctggatgtgcggtcaagaaacaggtagaaaggtcatcttgtgatgcgaagttgcttataacgacatacgagggaaaacatgaccatgatatgcccccaggaaggacatttgctcactagaagatactgaagcaagaaattgatgaagttaagagcaaagatctgagttgtatagcagaagatgccaatgcgactccacagagtttagcccttttgaccattacaaaaggccaacttgatgatgacagtggcgcttcaatatggaaaatcaggcaaacaaagactgatgccaaatctttggagtaaataataggagaatcagatgaaaccaaagacctagctgccaatcaggacatgccacaatcagaacaccaaagcatagcttgtcaggagaatgcggtgagaacagtgtctgtacaacgataaacattttgttgcaggtttaaggcttat

SEQ ID NO: 172942 - DNA, 2622 bp, Arabidopsis thaliana landsberg; identical to SEQ ID NO: 68913

SEQ ID NO: 172943 - DNA, 629 bp, Arabidopsis thaliana landsberg
  unsure (1)..(629): unsure at all n locations
acgcactcaaggcccagaatctctgcccgacacttgaagcatattgcagatgtctcaacgcttgaagttcatcttgcagctgagtccaagattgatggagagagtgactggtatcggatattgtctctaggcgcctttgcagatgaagaggaggtgaagaagcaatacaggaagcnnnnnnnnnnnnnnnnnnctgacaagaacaaatcagttggtgctgaggaggccttcaaactgatctctgaggcgtggagtgtgttgtcagatactagcaggaaggtggtttatgatgagaagagaagaaatcattctgttgtcaatgtaaccaatggtatctatacttatgataagaaggcaaacaagagggctcgaaagaatgccgctgctgcagctgtgccgccgccgctgctgcagcagcagctgagactaccactcatcctgttggggttgatacattctggacatcttgcaaccgctgccggatgcagtatgagtacctaagaatttatcttaatcataacctgctgtgcccaaattgccataatgcattcttggcagtggagactgggttcccatgcaacggaagcagttcatcattctcctggtcaaccaagcagcagccacagcag

SEQ ID NO: 172944 - DNA, 772 bp, Arabidopsis thaliana landsberg
tactggtcctttatgtaagttccaattgtggttccaatgcatttgaactaaagagatttgaatccaagaactcactttgttctctacattgtttcagtttctacaacaatgcagttgcagagaccgatggcaggttctcaggttccgttttgtccactcgaaaagaaaatgtttgattcttggtcaattattgagcctggtagtttccgggttcgtagcaaaacttatttcaggtaaacttacggagagagcttgttgtttcaagtacctgattatatgttctgttactaactttaactgatatttcgttatttggtagagataagaagaaagagcttgcaccaaactatgctgcatataatccatttggtgtcgatgtatttttatctcaacgtaaagtaaaccatatagcgcaatacgtggagcttcctgttgttactaccaccccgattaagctcccatcaatccttgttgtaaatgttcaggtatattgtctagttccatggttaaactgttcctcttttgcatcgtctttggtgtttcggtttaatgatgatgttgctatcggaatcatagattccattgtatccagctgcaatttttcatggtgagactgatggagaaggaatgaatttcgttttatactgtgaactttcggataactatttaaaggagcttccaccacattttcaagaaagcattcaggtagtttaatcttccacgtcgtgattctgtttttatgtgctgcactcatgtgttgcaagcgcatttt

SEQ ID NO: 172945 - DNA, 953 bp, Arabidopsis thaliana landsberg
gacattgcaggtatatctccagacgtatcatgcataggattcaccttgaggatgagtctaagtcttcagtcgaacataagagaaggctgaatccgaatctgaaagaagtggttaagaaagagattatgaaactgttggaagcagggattatctatccaatgttagatagcagttaggttagtccagttcatgtggttcctaagaagggaggtgttacagtagtcaagaatgagaaagacgagctgattcctactcggacaatcataggacatcggatgtgcatcgattacagaaagctgaatgctgctaccaggaaagaccatttccccttaccatttatcgatcagatgttggagaggttagcaaatcataagtactattgcttccttgatggataaacaagattctttcagatcccgaatcatccaaatgaccaggagaaaacgactttcacctgcccctatggtacatttgcttatcggagaatgcccttcggtctttgtaatgctcctgcaacatttcagagaggtatgatgtctatcttcacagacatgattgaggatatcatggaggttttcatggatgatttttcagtttatggatcatcgtttgaggatttctaagagaatctttgcaaagtgttagcgagatgtgaggagaaacatttagttttgaattgggagaaatgtcacttcatggtacaggatggaatagttctcggacacaggatttctgagcatggtatagaagttgatagagctaagattgaggtcatgacaagtcttcaagcgcctgataatgttaaagcagtgaggagtttccttggacatgttggtttctacaggagattcatcaaatacttcatcagaatcgcaagaccataaactgaattactttgtaaagaagttaaatttgagtttacacaagagtgtcatgatgcctttaagcagata

SEQ ID NO: 172946 - DNA, 917 bp, Arabidopsis thaliana landsberg
  unsure (1)..(917): unsure at all n locations
atcatctcatgctcacaacatttcatcaggcattatctgtctctcagacagtgatctgacaggtttcgtcntgtgtgcagttgtccatctacctgaaaagcatatgcaggcaccatggaataatgcgatggccctcccgaaaaatcaagaaggttgggcattcgttgaagaaactccaactagttatggactctgtccaaggtgcgcagggctctatccaactcgattcattctatacaagcttcccagagttgaactccccaaatatgtctagcaatggcccttccttgaagagtaatnnnnnnnnnnnnnnnnnnnnnnnnnnnnccgataatggtattatggcagaggaaaaccccaggtcaccatcatcttcttgcagcaagagctctggttcaagcaacaataatgagaatactggaaacattctagttgctgaggatgctgatgcggtgttaaagagagctcatagcgaagcacaactgcataatgtgaatcaggaggaaacaaaatgtcttgcaagaacccagagccataaaacattcaaggagcctcttgttcttgataattcatctccattaacaggtagtagcaacacgagtttaagagctagaggtgccatcaaagtgaaagcgacatttggtgaggccagaatacggtttaccttactcccgagttggggcttcgcagagctgaagcaagagattgctaggcgtttcaacatagatgacatttcctggtttgaccttaagtacctggatgatgataaggagtgggttcttctgacatgtgaagcggatctcgtggaatgcattgacatatatagattaacacagacccacacaattaaaataagtctgaacgaagcttctcaagtcaagctaagtggttcttttggcaacactggtctttcctga

SEQ ID NO: 172947 - DNA, 522 bp, Arabidopsis thaliana landsberg
gtctgtgaaggtctgtgagggaggtgagaatttcagcgtggggcaaaggcaactgctgagtctagcgcgtgcattgctaagaagatctaagatccttgttctcgatgaagcaacggcatctgttgatgtcagaacagattctctgatacagaggaccattcgcgaggaattcaagtcttgcacaatgcttgttattgctcacaggttgaataccatcatcgactgtgacaagattcttgtgcttagttctggtcaggtaatgccaggattacttattcatggaactgacttattatatattctcttcagaaatggataaaagggattcttgtgtggcttacataagactattggaaatgccaattttgttaggttttggagtatgatagtccacaagaattgctatcaagagatacaagcgccttctttaggatggttcatagcaccggaccagcaaatgctcagtacctttccaatttggtctttgaaaggagagagaatggaatgagtgtgggtggataa

SEQ ID NO: 172948 - DNA, 1654 bp, Arabidopsis thaliana landsberg; identical to SEQ ID NO: 27464
  unsure (1)..(1654): unsure at all n locations

SEQ ID NO: 172949 - DNA, 260 bp, Arabidopsis thaliana landsberg
gcaccgaccccggcgtgctgctgctggacgagcccgcggcggggacgaacccgtccgagaagcgcgacctcgccgagctgatccagcgcatccggtccgaacagggcatcagcgtgctgctgatcgagcacgacatgaagctggtgatgtccatcgccgaccggatcgtggtgctgaacttcggccgcaagatcgccgaggggacgccggccgagatccagcgtgaccccgcggtgatcgccgcctacctcggcacctcg

SEQ ID NO: 172950 - DNA, 1085 bp, Arabidopsis thaliana landsberg
atggagcctatcgtgaagcaagagaatccggtaactacttctactctctccacatggaaacccgccgctaggaacaaaaccattccgccgccagaatccgtcatcgaacttagtagtagcaacgaaggatccgagttaggcgaaaatctcgacgaaatcgctgagattcaaagcgtagaccgaaccggtggtgatgatgtttctggaacgaagagagcgcgaagtgattctatagcttcaccggcgaagaaactagcggttatgattccggatgatgacgaagagtttttactatcgactacttctggacaagcgattttggctcttccggctacgccttgtaacgttgtggcgacgccttcgtcttggggaagttgtaagcagttttggaaagctggtgattatgaaggaacatctggtggtgattgggaagtttctgcaggttactttgctatgtgatgattcttttataattgatttttaggataatacttgagattgttagtgttggaatttgagtaaaattgtggttttaggtggctttgatcatgtgagagtacatcctaagttcctgcattccaatgcaactagtcacaaatggtctcttggaggtacgtattgaatgaagtttgattcaatctattgaatgaacaatgttttctgcaatgactataacgatgttatctcttgcagcttttgctgagcttttggacaatgctttagatgaggtgggattatattttttttctacatttagaagtatctcaaaggttggtagtattggtttctcatcttttgattatcaggttcgtagtggagctacatttgttaatgtagacatgatccagaacaggaaagatggaagcaagatgatcttaattgagggtatacaattaattttagtatatcttttgttgtgttgagtgttgacgatgcagcgtttttcttgatcctcatattcttatgtttgatatgcagacaacggaggtgggatgaatccccaaaagccccggcattgtatgtctctaggataaactgccaagagtaaacttgcagataccattggccaatgtaaccatgtcttc

SEQ ID NO: 172951 - DNA, 1788 bp, Arabidopsis thaliana landsberg; identical to SEQ ID NO: 8118

SEQ ID NO: 172952 - DNA, 1218 bp, Arabidopsis thaliana landsberg
atcatgtagttgatgcccgccttagagacatgatctctaaagctaaatcttctaggaacaaacgtgattggataagtgaggacacatggcagtctatgttggagtattggagcactgatgaagctaagaagaagagaaagacagcctctgccaatcgactctctgaccgtgacgggtttgggccacatcgacacacaacaggtgctagaacttatgaacaactctgaaatataattgtaagtgaattcaaatttattacatttttgttatcttcttaataagtaaacgtgtccttaatgtgttgtacatgttttctacagcaacaaaaagaaggtgttgagccttttgatgctccacatccttagggagactcatcctaaagttgatagcacatatgtggatgagaaggcaaaggcctttgatgaaggaattcagagacagcttgacgagatcgagatctctagaaactcatcaggtccttctgctgatgatagcaccaattccacaggcctcactcgtcttgacgaagacaatatatactacaaggtaacgagtttctagcactaaagaaactgaagttgttaatatggtctaaagttgtttagcgctttaagaaatttttggaaactgaagttgtttggtccaaaattattaaaaaatgaagttgtttagcactttaagaaactatagaaacagaagttgttttgtccaaacttattagaaactttatcaactgaagttgtttagaactttaagaaactttagaaactgaagttgtttggtccacacttattagaaaacttagaaaccgaaattttctttttttggtctttgatttctttacaggttatagcacctcaaaatggaaggatttttggtgttggagatatcagtacacgcgagcgaggtgaaagctcaacagctgttgctttgggtagagtcactcttgaacgccaagtcataaccttgcaagagcagctggcatctgttgtggagtacatgaaacaatacatgccaaatggtgcaccaaactttggctcgacgcagcatacagaaggaaccgacacttcagtgaccagtctagaccgtgctaacaacattgagaatgaacatactgatcgggaccaagatgatgacattaaaccatttaaccctttgaatgaggatgctgatgaggatcttgatggtgaggatgaagcaggttctgctgccttttaa

SEQ ID NO: 172953 - DNA, 1025 bp, Arabidopsis thaliana landsberg; identical to SEQ ID NO: 24744
  unsure (1)..(1025): unsure at all n locations

SEQ ID NO: 172954 - DNA, 472 bp, Arabidopsis thaliana landsberg
tcaccatcgacctggaggccaaggtcgacgccgaggtgctgaagaacggcatcgccgacggcgtctcatacaccatcggctccggtgagctgctggccggcatcgacgacaccgtgaagggcgtgaaggccggtggcgaggccaccttcacctccgagctgaagggcggctccgcggcgggcaaggaggccgaggtcaccgtcaaggtcacccaggtcgccgcccgcgaactgcccgcgctggacgacgacttcgcgcagctcgcctcggagttcgacaccctcgacgaggtccgggccgacagccgcaagcgcctggagagcatgaagcagtacgaccaggccacgcaggcccaggagcgcgtgctggacaagctgctcgagctggtcgagatcccggtcccccaaccctcctcgaggcgagatcaacacaaaaaaaacaacctggagcaccaccagctcggccagatggt

SEQ ID NO: 172955 - DNA, 1949 bp, Arabidopsis thaliana landsberg
atgtgactgatgttccgcgtttcaaatgatttattactaatcctagttgagtctatttatgaattttgaaaacccacagggaaagctctgatggcgataaaaggctctttcagcaacttagtgaatatgcttttggattgggacgatgttcacaacagtgacttgtgttcttggcgaggtgttttctgcgacaacgttagctactccgttgtctctctgtaagaatcttatttgagttcaataataattcttgtgttgttgaaaaatgtctctcttttgtggtcttgtaatattctgctttttttctatttttactttgtgaaggaatttgtccagtctgaatcttggaggggagatatctccagctattggagacctacggaatttgcaatcaatgtaatggttttttttccctttctttctctgttgatttgcatgtttgaactttgaaatgttgtagcttttgttcataaaggctttttccaattgcagagacttgcaaggtaataaactagcaggtcaaattccagatgagattggaaactgtgcttctcttgtttatctgtaagtcttattaaacttgtttttttgagttttcaattttcatgtctttagttttgacgtccatatcctctgttgtacagggatttgtccgagaatctgttatatggagacatacctttctcaatctctaaactcaagcagcttgaaactctgtatgtgttatacttcaacattttgtttttccgattaaagttcaaattttgtctacttgttctttttttttttcgagtggatttttgtgaacctttgaacttgtggatgtatcaggaatctgaagaacaatcagctcacaggtcctgtaccagcaaccttaacccagattccgaaccttaaaagactgtgagttctttagttacatcatttactcatgaatcaaaatttgggaatagattttgaacttactcattttcttttttccaatcatgatgttgcagtgatcttgctggcaatcatctaacgggtgagatatcgagattgctttactggaatgaagttttgcagtatctgtaagttcgtcagagtcattttctctgatctcaatatagtctacaccatagaagaagttaattttctccatctaatactttctttctgcagtggattacgagggaatatgttgactggaacgttatcttctgatatgtgtcagctaaccggtttgtggtacttgtaagtggatccaacgctctgccatcttttgagtcttgtatagatcctggtccttctctgattcattcaagtcgtgagttatattttttaacttgtgttttgatgttggaagtgatgtgagaggaaataatctaactggaaccatcccggagagcatcggaaattgcacaagctttcaaatcctgtatgtgccatcttaaattaaacattagacttccactataggagtgaattttggactcataccttttgatattacagggacatatcttataatcagataacaggagagattccttacaatatcggcttcctccaagttgctactctgtgagtattgagcctcttttaccttagtttcatcagtaaattgttaacatgcggttattgaattgtgtattattactttttgaaggtcacttcaaggaaacagattgacgggtagaattccagaagttattggtctaatgcaggctcttgctgttttgtaagttcaattcatatggaaaagtaacgacaaagtacattcttgaatttggctcgtctgactttgtgaatcctattcaattcacagggatttgagtgacaatgagcttgttggtcctatcccaccgatacttggcaatctctcatttaccggaaagttgtgagtcttttttgtataactgtagtatctcatatgaacaaccacaacagctcttggcatatgcattgat

SEQ ID NO: 172956 - DNA, 611 bp, Arabidopsis thaliana landsberg
atggtgcaaatctcacgaactgaaggtgagtgcctggggagatcgtcaatcaggaaatacggtgtcagtcagccgcagctttatccggcaggcacatgtcggcgatacaatttgtgtctttgtctatcccggccgcttaaaattgccgtggtatgagataggcgcatgcccggcaacagggtcttaatttattgtccgcatccgccaaccttgctatgaccgcacgacccgccatatagggcggaaacggaagattatctgcttatgaccaggctggcacccgctgacgatatcaatacccgcaccagcgtgctggcgaccggggcgcgcgtgatgcgcaccgagggcgaggccttgttgctgttcgccgcctcgctggacgagcgtttcgtgcaggcggtcgagaccatgtacgcggtcaaaggccgcatcatcatgtcgggcatgggcaagtcgggccatatcgccgccaagatcgccgccaccctggcctcgaccggtacgcccgcgcagttcgtgcatccggcggaggcctcgcccggcgatctcggcatgatcacgcgcgacgaagtggtggtcatgctcagcaattccggcgagacctcggagct

SEQ ID NO: 172957 - DNA, 943 bp, Arabidopsis thaliana landsberg; identical to SEQ ID NO: 24416

SEQ ID NO: 172958 - DNA, 575 bp, Arabidopsis thaliana landsberg; identical to SEQ ID NO: 78806

SEQ ID NO: 172959 - DNA, 716 bp, Arabidopsis thaliana landsberg; identical to SEQ ID NO: 43080

SEQ ID NO: 172960 - DNA, 719 bp, Arabidopsis thaliana landsberg
cgttcgctactcatctcacgcttaagtacacgcttcggatgggatccaacgccatgtttcaaaccgcctttaaggattccgagaccggaaaggtcagcaatcgtggccgttttctttccggattcggcgccggtgttcttgaagctctcgccattgttacaccctttgaggtaagtcttgttgccttttcgagacaatgaaatcacatggcttctctaatgttttattagattatgaatcgatttaaaactatagtttaatcatcagagtgttagttgagtcaaagatttggtgtaattgaaattgttagattattcttgcaccagaaaatcatctctgttcatcaattatttagtatattttagtcaaagagataaaaaatgatttgttgagatctgttttgatgcttttggccaacgaatctctttggtccctattgttcatggcaactcttgattcggagaatcgtgttcatcataatcataagcattttgagtctgacacagattttgcttacatttactcaagtaaaacactgttgagttctctgttttatctccaggtggtgaaaattagacttcagcagcagaaaggattgagtcctgagcttttcaagtacaaaggaccaatacattgtgctagaaccatcgtgagagaagaaagcatacttggtttatggtcaggtgcagcaccgacggttatgcgaaacggaaccaacc

SEQ ID NO: 172961 - DNA, 1064 bp, Arabidopsis thaliana landsberg; identical to SEQ ID NO: 13071

SEQ ID NO: 172962 - DNA, 1077 bp, Arabidopsis thaliana landsberg
atgaaagcgaaacagagcgagtttgagaagaaggggaaggagtttgatttggaactgaaggcagaggttgagaagaggaaaggagaagttgaacagttggagaagtttacgacgaggatggaatcggtggagaggttttctgatgagaagttgatggaacttggtgtgagagcaacagagcttgaattgaagatggaagaagtagagaagcatagagaacggattgtcgctggagataccgttgagaggtgagtttgagccattggtttcgttgttggctaattacatgggcttaagtgtgacaatgcctgtaaagggttcgactttatacctgaacgagaatgcagatgagatggttaagaaaaacacagccttggcgagaatggttccgtatttggatcctgcaaaggtggttttggatgctatagaagggtcttttaaggaatactggaagaaagatttaggagaagctgatgatagagtagttaatagttggattgttctgttagagaatctgataaagatgaatctgaaaatcacaccgcaggtgaaacaggaagcgactccacttgggattgcttggttaggcaaggctaaagccaatatgaagaatgaccccccgcatgtttttggttgtgcgttgtttctggctgcttacggtttgggctctctgactactcatggggtgctcttaacccttgtagagcggttccttttgtatgatcatgccccaaaactgtttcggcttctggggttagaagataaggtttctggtaaggcctgcttcttgtttttagactaagtatcagtagttgttgcccaaaaatctgtaacttcatgtgaattgctctgcaggtgcggttgaaacgctaaagaaaaaggaagagtatcttgcaacactgaaatttatctgtgaattccggttatacaagctttgtccaggaggaagaccaggagaacttttgcttgaattctttgattcctcagataaagctgccccagtgattgctgggactggaacttcatggaggcgcaagtaagctaatatctctctctctctctctctctctctctctc

SEQ ID NO: 172963 - DNA, 1728 bp, Arabidopsis thaliana landsberg
gtgcagtactcgttggattttgtatacttgagtgtggctatactattttcatcatggttaggtaaataaaaatacattaaaatcaagtaatctctctgagatatataattcttttctaattagaaaacaaatttaaaaaatggaaacagaggttgcatgttggatgcatacgggagagagacaagcagcgaagattagaaaagcttatttgcggtcaatgttaagccaagacataagcttattcgacaccgagatttccaccggagaagtcatctccgccatcacctccgagatccttgttgtccaagacgctatctccgagaaggtacgctataccaagatcaaaccggtattggtcttaaattttggatgttggatttttaattttcctatagcaagcatgcatcttgtctagtcctaaattttttaaatccatgcataagggatatatcatatattggctcagtccaataaaagtaaaagattttggcatgcataatttaaatcaggttaatcggtatttttgtcgcaggtagggaatttcttgcactacataagccggttcatagccggttttgcaattggattcactagtgtatggcaaataagtcttgtcactctatccatagtccccttaatcgctctagctggcggcatctatgcgttcgtcgccatcggacttattgctcgtgtccggaaatcatacatcaaggctggtgagattgcagaagaggttggttacttcttggacaaggaaacttataagtgtatagttttcagttatttttcatattagtgtctagtgctggtgtgtatcatatatctatgtgattattcaggtgatcgggaatgtgaggaccgtacaagcgtttacgggagaagaaaaggcggtgagttcgtaccaaggagctttgaggaacacttacaattacgggagaaaagccggtttagccaaaggactagggcttggttcgttgcattttgtcctgtttttgtcttgggctttgctcatttggttcacaagcatcgttgttcacaagggaatcgctaatggtggcgaatctttcacgaccatgctcaatgttgtcatcgctggcttgtaatacataacttcttgattctttgctctgcacattacccttatttttttcgaattagtcataataaagctctgtttttgtataggtctcttggtcaggcggctcctgacatttccacattcatgcgagccagtgctgctgcgtatctcgatttttcagatgattgaacggaacacggaggataaaacaggtcgtaaactcgggaatgtaaacggagacattctattcaaagacgtgactttcacatacccctctcgccctgatgtggtgatctttgacaagctaaacttcgtgatccctgcggggaaagtcgtggctcttgttggaggaagcgggtctgggaaaagcaccatgatatccttaattgaacgattctacgagcctaccgatggagcggtgatgctggatgggaacgatatcagatacttggatcttaagtggttaagaggtcatattggtttggttaatcaagagcctgtcctgtttgcaaccacgattcgcgagaacattatgtatggtaaaagacgatgccacctctgaggaaattaccaatgctgcaaagctctcggaagccatctcattcatcaacaacctaccggaaggattcgaaactcaggtatgtcgaaca

SEQ ID NO: 172964 - DNA, 515 bp, Arabidopsis thaliana landsberg
  unsure (1)..(515): unsure at all n locations
gttatggcaatctcggaaactgatcttctctctgtctctctaaccataatctttgtctctcttaccatagccaccaacttacctttcttnnnnnnnnnnnnnnnnnnnnnnaacccttttgggatgttactacgaccgacaccgatcaagatccagtccttgggtctaccggctcatgtcgggtcagatgagtgttgggtttggaccaaagcatgttctgatgagattcttaggctgacttatcagccggataacgttgcgtggcttaaacgcgttaggaggacgatccatgagaacccggagctagcgtttgaggagtatgagactagtaggcttgttaggtcggagctggaccgtatgggtatcatgtatagatatccgttagcgaaaacgggtattcgggcttggatcggatccggtggaccgccttttgttgcggttcgggctgatatggaagcactacctattcaggtagacacagtaattcttttcttaactatatcttttgatgtatt

SEQ ID NO: 172965 - DNA, 443 bp, Arabidopsis thaliana landsberg
aaaacccacaagaaagccacgacgtcacacacaggttgatgattcaacttttagtagtattgagtcgagagtaatgacggtgacggcggatagtccgagactcaatgcttcggggaagatcgtgtttcatggactcgagagaagctcaagcagtcccggtaacttcactggaggaccaagaatgaagcttcaccatggaatgccgagatctcactcagctaatgtcagaatcactcctgttctcaatgttcctgtctcttctctccgtagcgggcccaaatcaggcctcttttttggccagcttttcgcttcttcttcttcagcttcatcgtcttcgtcgtctggaaacagagcacagttgcagagcaataacatcaagaaccgtaccaatcgaagcagacttgaaccgacaagcgaactctaagtaccgaaccggattctaa

SEQ ID NO: 172966 - DNA, 554 bp, Arabidopsis thaliana landsberg
tgggtgtgtgctaatatctgttccaatctatgaccgcgtcatcgtccccttattttgacagtttacaggcttatctaaaggattcacggagctggtaagaatggggattggtctttttgtctctgttctgagctagacacttgcagctatcggtgagacggttcggttacagttagctagagatcttgatctattggaaagtggagacattgttccattaaacatcgtttggcatatccctcagtacttctctaatgggcactgttggagttttcttctttgtggggaggattgagtttttctatgagctatctccagattcaatgagaagcttgtgtagcgcttgggctctgctcattactacactaagaaactactggagctcgttgatcattacccttgtggcgtatttgagcggaaaagattgttggattccttcagacaacattaacaatggacatcttgattacttcttctggcttttggtcagtcttggatctgttaacatacctgtttttgtcttcttctctgtgaaatatactcatatgaaggtt

SEQ ID NO: 172967 - DNA, 205 bp, Arabidopsis thaliana landsberg
aatgaggagcaaatgacatcgtatgtgcagcatgatggtgatggcgatagtgttgaaaatgcagaagttgcagaggctatactcaatgataacaatgaactgtctcatattgagcgagaagtatataatgattttattttaattaattagacggatattagcttatgcatgttatcgatatatgatggtatatcaaataatgatt

SEQ ID NO: 172968 - DNA, 780 bp, Arabidopsis thaliana landsberg
atgttcggttggttttttccattcaggaggtgttttatgaagaattaaaggatctaacagatcaaggaaagaaaaagtttccacagtatggagtcaacagttcgatagagggtctcgtattgggaggattagctggtggtacgttagaattagatcagttataaaaaaaatccgtttcaaatagcttatccaacatattgacccatgtatgtctcctcaggactaagtgcttatctcacaactccactggatgttgtaaaaacaagactgcaagtgcaaggatcaacgatcaagtatgcctcgtgtgttaacagattaatatgatcaactaaatatcatccgcaattagattcaagaacttgtttcgattaagctttggtaacctcgttgagttttaggtacaagggatggttggatgcagttggacagatatggaggaaggaaggtccacaagggtttttccgaggaagcgtcccaagggtcatgtggtatcttccggcctcggcactcaccttcatggccgttgagttccttagagataacttcagagagaaaagtaataataataacaatgtcgtctcaaatttgagcatagagagaaaaacatcttctacttcagtgcatgaaggttagtgaggactagcgagattcttgtctccaagtataaagagtgagaggagcattcacaaacttgtctataaatggctcagtgtttcgttttctcttctagctgactgtgaacaccaatctgattccttattaataagagactgtgcttaa

SEQ ID NO: 172969 - DNA, 566 bp, Arabidopsis thaliana landsberg
  unsure (1)..(566): unsure at all n locations
acatgaatacattgcccgactgggtaacccgttcaacaacaggaagatcgtganctctctgttnnnnnnnnnnnnnnnnntgagcatgcctgttcggcttacgctccctatgctacagaggatgtaaagccttatgaaagccgccccctgggctccaaagccgaagggtttccttatgacctcagcaattttgcgggcaaggattatggcaagatatcttccactccctggggcaatacccttactgtggaaatggccaaagcagccattgcaggcgagcagttgggcaaagggccggtaacggatttcctcacagtgagcttctcctctcccgattatatcggccacgcattcggccccaattccatggagcaggtggataactatatgcgcctggatgaagaactgggcaggctcttcacctatctcgatgctaccgttggtaaagggcagtacactgcattcctcacagcccctcacgctgtagcacatatacccggctttctgcaggaacacaaactacccggcggattgttcgaagaatccgcagtacgcaaagcgcgcaa

SEQ ID NO: 172970 - DNA, 933 bp, Arabidopsis thaliana landsberg; identical to SEQ ID NO: 21427

SEQ ID NO: 172971 - DNA, 735 bp, Arabidopsis thaliana landsberg
gcttgggggttcatggttcacaattttggggttatcaaaaatgaatggctccgttccttgtatgaagagagagctaaatgggctccggtttatctcaaagacacgttttttgcaggaatcgccgctgctcatcctggagaaaccctgaaaccatttttcgagaggtatgttcacaagcaaacaccattgaaagagtttctcgataagtacgagctagctcttcagaagaagcacagggaagaaactctcagcgacatagagtctcaaaccttgaacaccacggagcttaaaacaaagtgttctttcgagacacagctctcgagaatctacacgagagacatgttcaagaaattccaaatagaggtagaagaaatgtactcatgtttcagcacaacgcaggtccatgtcgatggacctttcgtgatcttccttgtgaaagaacgggtccaaggcgaatccagcagaagagaaatccgcgatttcgaagttctgtacaatagatcagttggcgaagtacgttgcatttgtagctgcttcaacttctacggatacttatgcagacatgctctatgtgttctcaatttcaacggcgttgaagaaatccctttacggtatattctacctcggtggagaaaagactacaaacgcctccacttcgctgataacggcttgactggctttgtcgatggtacggaccgggttaatggtttgaccagttgtataaaaactctctta

SEQ ID NO: 172972 - DNA, 417 bp, Arabidopsis thaliana landsberg
acatgggcgttgaatacatcgagcgtcaatcgccgaacgtttctcgcattaaactgcttgggcccaaggtggtcaccgtcttgagtggtacaaggacgttaaaagacgctatgaacaaagctttgcgcgactgggtcagcaacgttgatgacacgttctacatgattggtacggcggccggtcctcacccgtatccattgctggttcgggatttcaacgccgtcgtgggtcgtgaagtgattattcaatcgcgtgaggcttttgtaaaacttccagatgtactgattgcctgtgtcggtggaggctctaatgcaatcggccttttccgcccgcttattccgttcaccgaagtgaagatgtacggggtggaagccggtggtctcgggcttgctactggtcagcgtgcgagcgccatta

SEQ ID NO: 172973 - DNA, 1006 bp, Arabidopsis thaliana landsberg
atgctaattgtcaacgccgtcactgccttggattccacgttttatttcgataaaccctttctcccttgccggatccttgttcctcacgttacggctctggtcttgtccctaggtttccctcaagatgacgaaagctcgatctcgcttcgtcaggtaatatattagggtttttactcattctcaatttaaggacttaaaaaaaaccaagatttcactttctttcaaaatttcgtagctgatggttaatgaaggactcattccatctcttgaagatgaggtgaaacgaagaggtgttatcaatcagctacgaaaggtacattcagttttgtttcttgagtagttggacagtgattactgatgtctctgagtttctttctaatgaacagatagttgtgagatgggttaagaatgttgcctggcaacaccgtcttccacaaaatcagattgacgccaccaacgccaccattttaccttatggttcttatggtcttggggtgagatttctctttcacttgtcttctttttcaaaatctttatatatattgttctagtaaacgactctataatgctgaaacttttagctaactcttgttgtctttcattgtcatccaggtttatggttctgaatcagacattgacgctctctgcattggtcctttctttgcctctattgctgtgagttttccttgtttcgttgaatgatctgattcacatttgtttttgtttcccgtgaagttgagattcttctcttattggtacaggaggattttttcatctccttgcgtgatatgttgaaaagcagacgagaagtttccgagcttcattgtgttaaagatgcaaaagttcctctcatccgctttaagtttgatgggatcttggttgatcttccatatgctcagcttagagtattatccattccaaacgttcgttttcaaaactttctatagttctagttgctttacttagagacactaaaatgattttgatattaactgcgagaacttca

SEQ ID NO: 172974 - DNA, 868 bp, Arabidopsis thaliana landsberg
gcatattcctgttacattctccaatttaacaaaactgctcgttgccaatctctatatttattccttcgaatccatgctcccacttgacatgagtggattccaaaacttggactattttaatgttggtgaaaactcattttccgggactttgcctaaatctttgttcacaattccttcattacgttgggctaatttagagggaaacatgttcaagggacctatagagtttaggaatatgtattcaccatctactaggcttcaatatctatttctttctcaaaacaaatttgatggcccaatccctgatactctatcccaatatctcaatctcatagagttagatcttagtttcaacaatctaactggatctttccctacgttcttgttcacaattcccacgttagaaagggttaacttagagggaaaccatctcaagggacctgtagagtttggaaacatgtcttcatcgtctagtctcaagtttctaaactttgctcaaaacgaattcaatggctcgatccccgaatctgtatctcagtatctcaatcttgaagagctacatcttagtttcaacaatttcattggtacaatcccaagatctatatcaaagttagccaaacttgaatatttttgtcttgaagacaataatatggtaggtgaagtaccaagttggctatggagattgacaatggtggcactttctaacaattctttcaacagttttggagaatcatcagaaggtcttgatgaaacacaagttcagtggttggatcttagttcaaattcatttcaaggaccatttcctcattggatatgcaagcttagatcgttggagatcttaattatgtccgataatcgcttcaacgtt

SEQ ID NO: 172975 - DNA, 1126 bp, Arabidopsis thaliana landsberg; identical to SEQ ID NO: 15596

SEQ ID NO: 172976 - DNA, 1291 bp, Arabidopsis thaliana landsberg
  unsure (1)..(1291): unsure at all n locations
actcattnttctgttttatgtatcatatcgagaaaaggcacgagcttgcttccatttagtagtttttaagcttgatccatttgatttagaatgaaagtctcagaagtgctatatcttctgattattttgcgagagctgtaaagaatttttttgttgggctgtgtctcttctaaattttctcttttaagtgaaaaaccaagtccttgcctgtttatttgttacagatgaaagttctggttcagaaaaaaaggaagctactttctccacgcatttagaaagtgtcgcgattaaaagaaagatctgaaacagagaagagcctactcaagatgaatgcattagttctgaagcttatggcattgaaaacagagagaaaggagtaaaacagtctactgagaaaaacttgaaagctaaagtagtttcttcaaaagatatctcaaaagaatggaagaatgtgcttatttgtgatatcatatccatgttatccaatatgtttgatatgttaagttgaattgtatgtgttttaatcagtttggtcttttgcagataaaaccactcagagttagatatggtactggtctatctggatcagatcatgacatggaagggcgtatggtaactgctgaattcgactccttctacttgataagtacttatgtccctaattctgtagatggcttaaaaggactggtactcctcaaattaaatgcgtgtagttgacatagatattctacttttcttcttattctaacgaatggactccgtgggttttcacatacaggatcgaagattgggatcgaacccttagcaatcacatcaaagtatgaaaacgtttcttcagagtttctttattttgttgtatatgtccttcttacacaagctcaatggctcttttccatctgcaggatctggagaagtctaagcctgtagtcttgactggtgatctaaattgtgctcatgaagagattgatatcttcaatcccgcggtaactaactcgagttcttccctcccctgtttttccatcgaaaagtaatctctcaggtttcataattctcccccatatcttataactaggggaacagaagaagtgctggttttgcgatagaagaaagacagtctcaaacttcttagataagggatttgtagatacatttaggaagcagcatatctggtgttgtcggttacacttattagggttatcgccatggtggccgcaaaaccaacaaaggtacaataagttcgtttgatacatatattcagattcaagtcctcacgaacgcccttgtttttttc

SEQ ID NO: 172977 - DNA, 852 bp, Arabidopsis thaliana landsberg
gtaaataaaggtggtttcctctataaatgagcagaatttggtatgacaatgttcctcatcccaagcttgttgaatacaagaaggaacaaatttgggttaaaaaagagggtgaatttctagtttttcatgaagaaggtactcaattcaaaatcggggtaactcattacgttgagttcatcgaaaaggtcagcacttttttagctctgtttcccctgtttttcttgaatagaaagcatctatctttgtgttgaaatcatttcatattcacaggcgttaccgagtatcaaatgggggaaaaacataagggttgtattagatgttggttgtggtgttgctagctttggcggatctttattagataaagatgtcattacaatgtcgtttgctcctaaagatgaacatgaagctcagattcaatttgcgttagaacgaggaatacctgcaacactttctgttattggaacacaacagctcacgtttccgagcaatgcatttgatcttatacattgtgcacggtgcagagtccattgggatgctgatggtatttcttttgttccattctttttcctcttagcccatttgcttcaaggttccaatgatcattatggtttaatttgttaggtgggaaaccgttgttggagctcaatagggtacttaggccaggaggtttcttcatatggtctgcaacaccagtctatcgagataatgacagagatagcagaatttggaatggttcgcaacaatcatgttttttttatttgatcattcaacactgatgttgatctctatggttttaactgttacaattctgttttgcagaaatggtttctcttactaaatccatttgctgga

SEQ ID NO: 172978 - DNA, 674 bp, Arabidopsis thaliana landsberg
cttttttaaatctacttaagaggatttatttggtaatcacaattcatcaacttcaatgttagtcactggtgtcattgttagttaaaagattgttcttttacggcgttggatcttatagataaacacgtaatttcttctgttaaagtttcttaatccattaaaaactcggtgtttgtttgtgtaaatcttaatcccacggcgcaatgctattggcaggtttgagaagatcaagtttcagaggcctgaggaagtgtctaaccgatcctcgttatctatccatgccgtggttttcgaggtagaggaccgggaaaacattggaggatctgcttatggtgggcaaagagctgtgtgttgcacatctgatctggcaaaactcggtgtttgctcacacggagatgtcatttaccgtccttctgctaaagattctggttggccacaagtgtttggtgtctcgttggctgagaatgagttttctgttatactgcctacaagatcgatccaggtcactaggaccgggatgtacaacctctacttcattcattgtgattctgatctcaaggatttggttgttgaaggcaagaccatttggaaaaaccctactggatatctacctggtagaaaggctccattgatgtacttttacgggttcatgtcgcttgcttttgtgttgcttg

SEQ ID NO: 172979 - DNA, 547 bp, Arabidopsis thaliana landsberg
actagtgatcaaacatcttattgccaaagatgcaagaagtggttgtgtcaaccgttcagtggaaagggtgatgccatccgcgaggagatgaaaggtatcgagattgtgtacaggcctctttcagagatgtacgaagctgctgctgaagctgatgtcctattcacgagcactgcatctgaaaccccattgttcacaaaagagcacgcagaggcacttcccacaatttccgatgccatggatggtgcccggctttttgtcgacatatctgtcccaaggaatgtcagcgcgtgcgtctctgaaattgctccgcgcgagtatacaatgtcgacgacctgaaagaggtggtggaagccaacaaggaagaccgtctcaggaaagcgatggaggcacagacaatcatcgccgaagagctgaaacggtttgaggcgtggcgggactcgctggagaccgttccaaccatcaagaagctgaggtcttacgccgacaggatccgggcctcggagctcgagaagtgcctgcagaagatcggggacgacgctctcaccaa

SEQ ID NO: 172980 - DNA, 1337 bp, Arabidopsis thaliana landsberg
tttgactagtagcttgtcttgaagtaataatgttgctcgtgggtaagcaacctctaatggttgggaaattcatcatctcgatgtcaatactgcgtttctacatggtgaactcaaagaagatgtatatgtgtctcaacccgaagggtttgaaaagaagggagaagagcagaaggttttcaaactctctaaagctttatatggcttgagacatgatccacgagcatggaacacaaaacttgatcagattttaaagagcttgaagttcaaaaagtgttcgaaagaaagtggtgtgtaccacaagtcaaaaggtacaaagctacttcttattgccatatacgttgacgatctctttgtaacagggaactctttgggaattatacaagaattcaaagaaggaatggcatccaagtttgatatgacaaatcttggaaaacttacttactatcttggaattgaggtttgacaagacaaagatggtattgagttaaaacaagaggcatacgcacgaagaatcctaaaagaagctggcctagacggttgtaacccaactcacattccaatggagtttggtctagtattgttcaaagcacaagaagaagaacccgaagtagatgctacattatatcgccgaagaattggctgcttacgatacttgttgcatacgagaccagatcttgcgttctcagttggagtggcaagtaaatatatgcaagacccgagaaaacaacatggagacgctttaaaacagatcttaagatacctacaaggaactttgtgttttggcttaaccttcaagcgtggaggaacaaagaagattgtaggatacaatgatagtagtcgcaaggtcgatccaattgatggtaaagcacaggcggtcatgttttttactttggagagtcaccaatcacttggtgctcacagaagcaaccaacggtcgccatgtcatcttgtgaagacgagttcatggctgcaacagaagctgcaaagaagctatttggctccaagatttgctaagcgaattgacgggtcagagttttgtgaagtcaaaaatatacattgataacaaatccgctattgagctcacgaagaatcccgtattccatggaagaagcaagcacatccatagaaggtatcatttcatccaagaatgcgttgagaatgaacaaatcgaagtggagtttgtaccgcgtgaagagctacgtgcggacattcaaacgaaggcccttccaagaatcaagttcaagtcaatgagaagtctatttggagttcaagacctctctaaagtcaacttgaagcttatgggggagaatgttgggtaaacttcaattgactaaagg

SEQ ID NO: 172981 - DNA, 1234 bp, Arabidopsis thaliana landsberg
gtcttaagttttctcttattctcaggtgtgccacttgacaagattaggaaatgtattggtgatcctgatgctaatgtggagaatgaagttttaaaagctgagcaagcacttcaggtcttggctctcttcttaaatgcgtctatatttgaccgtctttttaaaccgattcactgagatttttcttctttgttacttataggtaggacaaggtgaccgcggagatgtcacaatcttaccaacattgatcgtcaacaatgctcaataccgcggtttgtttcattccttttcattgtaaatcagttaccgaaaagttaagattcttaagttctttatctgattttattgctcaggtaaacttgagagaaatgcagtacttaaggctatatgttctggattcaaggaaagaaccgaacccgggatctgtctaagtggaggttatagaaattcccttgtaagcttatattcatgtgtggtaatagaatgtactaaagaactcttgttttgtttacactgttgaaacagatattgaaacaaatgaatgtctcgaagcaaatggagggtgttgggaggataagaagtctaatgtaacagcttgcaaggtacttgattagaaccaatgaacttaagggactacatttttatagatatttggttagttttatacctgaaaatggattctatcaggacacatttagaggaagagtctgtgaatgccctgttgtgaatggtgtacagtataaaggagatggatatacatcatgtgaacgtacgttcttcaacttctacattgatatcttgtagaaacacttcattataaacattttgtgttgtgacttgaatgttataacagcttatggccctgcaagatgctcgattaatcaaggaggttgctggtctgaaaccaaaaagggcttaactttctcggcttgctcggttagtgactcttctttgttatggccttttcagtaataatgccataaagtttgaaacttacatattttctccaattgttgagttcagaacttggagacatcaggatgtcgctgccctccaggctttaaaggagatggtcttaaatgtgaaggtaaaaactttattttctttaggtttcaaaatctctcatcatgttttctttaaactggttcatcttggttataaactatttataggacattggatgaattgtaaggaagcaaatcagctttggcaaatggggatgggatggcaacttgta

SEQ ID NO: 172982 - DNA, 230 bp, Arabidopsis thaliana landsberg
atgtctccgacgacgacatcgttacgatccctaagcttctcgctttacgcttcttctaattctactccgatttctacaccaattgaggcccgacagttactgagttcatgcaatagattctacggtctgtcctcttcgagctcttcttcctcccttactacttcatctttgatcggaaatcttgttttctcatcaaggaatcagtctctctccgtaaaggtatacaattt

SEQ ID NO: 172983 - DNA, 1218 bp, Arabidopsis thaliana landsberg
atggatgtcaaaacgacgtttctccatggatttttggatgaaacaatattcatggagcagctagaaggctcattaatgagaagaatccagataaagtgtgtctgttacaaagatctttgtatagcttgaaataatcacccagacaatggaacaccaggttcaatgatttcatggaggctcataactatgagaggagctcatacgacagttgtgtgtactttaagaaatatgcagacggtgattatgttttcatgttgctatacgtagatgacattcttatagcctccaagaatatgaagcatgtaagtgaactcaaagcactgttaggatctgagtttgaaatgaaggacttaggtgaagcaaagaagatcttgggtatggaaacagacttaaatgtcccctttctatctctcaggagggttatctttcaaaactattgggaacgtttaacatggatcagtctaagcttgttttaatgccagtgggaatacatttcaagttgaggtctgctacagatgaggaagctaagagtcagtatgaatcaatgagagctgttccatatcaaagcgtagtgggaagtctcatgtatgccatgataggtacaagaccaaacttagcacactctattggtctagtttgcaggtttatgagtaaaccacttaaagagcattggcagggagtaaagtgggttctcagatatattcagggttcactcaagcgaaagttatgttacagtaacaaaggggatttcataattttaaggttactgtgttttagatcatggtgcagatcaagatgggaggaggtcaacttcaggagtggtattcactgtaggtgggtaatgttgttagttggaggtctagtctatagaaagtggtagcattgtcatcaacagaagctgagtatatggcattaccagatgcgtctaaggaagcagtttggttgttagggctcatgaatgagcttggttttgagcaagaagcagtggatatttacagtgactcgcagagtgccattgcattagctaaaaatacagtccatcatgaatggacgaagcatatagagatcaagtatcacttcattagagagctgatctacaatggcttagtaagagtgaagaagattgctatagaaaccaatcctgctgatatcttcacgaaggtcgtaccggtgggcaagcttcaggaagctctagagttgctcagagttactgagaac

SEQ ID NO: 172984 - DNA, 995 bp, Arabidopsis thaliana landsberg
gatttgtggctaccttgtagttgttggttcaactaacgtaaagaagtaccaacttataactgccactttatcttccaaggaaaaatagctaatctcctttatttattgatcagttgatcacagccagtgaaattttcaatactcattctactttattcgctgatcacagtccgttaatttctgggatttcatagtaggctgattgggaatccatttcgtgtctagtagtgatagcacaaacttcaccaatagttgtgaagtgatcggacctatcttagaagaaaagctttattggaattttctgttattctcaacatttctactaattccacaatataggttgccaagcttttccaaaaaatccaagagatggtggaggaagatggaaatctggtatttgttttgatcggtgagttatgattttttcataactttttatatttgcatgcttatttcttgtgtaggcctgagattgttttgcctgcagatgaagtagaaagtcttgctgctgctcgaaaagctgcattgtctggctcagaaccgtcagattctatccgggtagaccaactagcttctaaatttcgtatacacctagaatttgtgaaaagatcaattcttaacccttgaaaacctaatccccctattcatatgttgcaggttgtgaatgcactactcacccaaatggacaaattgaaatcagcaccgaatgtgataatccttacaacatcaaacataactactgctattggtagcctattttgatcctgtcctcagcctcatgactttttctctaatataatagatctttgttcttccgcataatattcacgttttgtgagatgtcacagatcaagatatttgttgcagatgttgctttcgtggatcgagctgacataaaagcttatgttggccctccaactcttcatgttcgttatgaaatattaaggtcttgtgttgaggaattaataagtaaagggatcatatcaagtttccag

SEQ ID NO: 172985 - DNA, 957 bp, Arabidopsis thaliana landsberg; identical to SEQ ID NO: 17003

SEQ ID NO: 172986 - DNA, 441 bp, Arabidopsis thaliana landsberg
tttgaaaagtttgcttatgatcccccattattaccccccttgtccccaacctgtcctgcttttaggaataggtaagccctcaggccactctttcctcccggtttttcttcaagccaaccttggtggtcttcaaattcttcatccagactcttgggtcgatgtctctcctcttcctggagctctggtagtcaacatcggagatttcttgcaggtaaagtacccatctggaaaaccaaaaaataatagatccctaaaaaattaaatgtcttttgcttatatatgttgctttgattttgcagctgatacccaccgataagtttataagtgtggagcatagggtactagacaatacacaaggccctcggttttctgtggcgggcaaaaacagcaaaagtgtgcgtgagtattccccagtttatggtccgatgttagagggtgtgt

SEQ ID NO: 172987 - DNA, 937 bp, Arabidopsis thaliana landsberg; identical to SEQ ID NO: 51400

SEQ ID NO: 172988 - DNA, 1492 bp, Arabidopsis thaliana landsberg; identical to SEQ ID NO: 33733

SEQ ID NO: 172989 - DNA, 625 bp, Arabidopsis thaliana landsberg; identical to SEQ ID NO: 13697

SEQ ID NO: 172990 - DNA, 872 bp, Arabidopsis thaliana landsberg
agaattttaaaaagaaaaactatgaaatgaatcaaaaatattaccagtttcatatatgtgagaaaaaggagatagctttgctattttgtattattgggaccgtcaatttgacaaaattttccttaccaataaatattaatttgttgtcgacaaaagaaaaagaattaggttgtatatcttaattgacattaaaaaaatagattttatagtcttaagtttacagaaaaaatttactcacactaaggaattgcagagcaaaaggagatactaaaggagaaaaaagaaaaggaaggattaaggtgggaggacattgagaaaatgagatattcatggaatgttgcatgtgaagtgatgagaattgttcctcctctttctggcacttttcgtgaggccattgatcacttctcttttaagggtttttacattcccaaaggatggaaggtaaggctactccaaaatccttaagacagtttgacatacatatcaagctcatgcacaaaatcatatatatgttttgatcataaacatagttatattggagtgccaccgcgacacatatgaatccagactacttcccagaaccagagagatttgagccaaaccgtttcgaaggaagtggtccgaagccttatacctatgttccatttggaggaggaccaagaatgtgtccagggaaagagtatgctcgtctagagattcttatattcatgcacaatcttgttaatagatttaagtgggaaaaagtgtttccaaatgaaaataaaatagttgttgatccattacgaataccagacaaaggtctccctataagaattgtcatcaatcttgagtccagtctgaacttgatatggacactagttggtgctacgtag

SEQ ID NO: 172991 - DNA, 539 bp, Arabidopsis thaliana landsberg
cacagaagagcgcacattgcggccgtgccacgcaataaacataaatccaattaagaaaattcacaaacacagaatcaattggtttattaagtgacaagaaatataaaataattctcatctcgcctattaagttacaacccttggctttaagatccttaaatttctcctgtaaaaccccaaaaaaatggcaataagagcagattatataacgaaataagcaattgcagggatatataagaaagaacatttcgcacatgatcgggagaagcgatgacatggaaatcagagggaccactccgagatgggtcgcagcagaggaagatttcggcaccgttaagcttgaaagcatcgagaagtgtgtcgaagacttcaggaggcaccagattccgagacataaaaacatttgcccctttgaacagttgcgtcgtcttcatcgccgccggaaaacctaaccacgcacttctcgactttgtaagagcttcacggggttatcggagaaaattgaaaccctagaatcgtcggaagaagatggatattag

SEQ ID NO: 172992 - DNA, 1079 bp, Arabidopsis thaliana landsberg
  unsure (1)..(1079): unsure at all n locations
gctttgggaataaagagtggtttgattgcttccggctttctaatcaagtttttcttgacatgcgtggatctgatcatcgcccggttctgatcagtctcatctcgtctcaagattcttaagaggacaattccgtttcgataagagatttttgttcaaacctgaggtacagattgccatttcaggtgcttggaaagctagaaatcggtcttnnnnnnnnnnnnnnnnnnnnnnnnnnnnnnnnnnnnnaaaagctttaagctcttggaagagaaataataatatgaatgcccaggacaagattcatatgtgtgaaaatgctttggagaaggtccagtctgaagtgtggcctagtttgcagaaagttcatgttcttaaaagagaattagctatggcttatagagatgaggaacttttttggcatcagaaatcgagaaagagatggcttcgttgtggcaacaggaattctaagtactttcatgctgcggtgaaagaaaacagatctagaaagaggattgataagttaaaggattcaaatggagttttccaaaagtctgaggctgcgaaaggggatgtggcggccaagtactttcaaaaccttttcaaatcctctaatcctgttgccttccaagattggttcattgggttcattccacgagttactgaagaaatgaacactggtcttttggaaaaggtgtcctcccaggatattaaagaagccgttttctcaatcaaagctgacagagctccgggggccgatggtatgtctgctctgttctttcaaagatattggaatattgttggagttcaagtgatttcagaggtgcagcgtttttttgagatgggagttttacctgtggaatggaattttactcacttatgcttaataccaaaaacgattcatcctacagaaatggtggatttaagaccaattagcttgtgctctgttttatataagataatatccaaggtcattgttaagagattgcaacctcttcttccccaaattgtatcctgtgatccagctgcttttgtctctgagagattgaccacagataatattttggtggccgatgaattag

SEQ ID NO: 172993 - DNA, 521 bp, Arabidopsis thaliana landsberg
ccaattccatatatacctaatcaccaaaaagacttaatgatccgatgttctttatttattttcagcttcttgttggttctttcatcggtgcaagattcggaacctcaggaaccggaacattgacgccagcaacagcagactggattcttgctttcatatgtgtgtacgttgcaggatttgcatggtcatggggtccattgggatggttggtaccgagtgagatatgtccattggaaattagaccagcgggacaagccatcaacgtctcggtcaacatgttcttcacttttctcattggtcaattctttttgacaatgctttgtcacatgaagtttggtctattctacttctttgcaagcatggttgcgatcatgacggttttcatttactttttgttgccggagaccaaaggtgttcctattgaagagatgggaagagtttggaagcaacattggttctggaaaaagtatatcccagaagatgctattattggtggacatgatgacaacaataccaattaa

SEQ ID NO: 172994 - DNA, 657 bp, Arabidopsis thaliana landsberg
tcgagttcatacaagagctttaaaagatcaaacacattatgaatgtttgagaaacaagaaaccgactatcaatcatcttcgagtgttcgggtgccttgcacatgctaagatcgagccggtgaacttgaagaagcttgatgaccggtctcaaatgatagtgcaccttgggataaagccaggatcaaaagcgtatagactctataacccaacaactagacaagttgttgtcagccgagatgtgttctttagcgagaaggatagttggacttggaagggagtaaatgacaattcagataaacctcagggatgtttcgtatggtttagggagaagtcatggatgaaggacaaggaccatatgtgaatggtaatggtcaaaaagaacaagatactgacaacatccctcaagaagacgaagatggtaaagacgttaatcaagacgagtctcatgttgatctcagtaataacatagatgatactaatgatgatttggttgttgagaacccaccggatctaagaagatcagtaagacaagtacaacgtccaagctaccttgatgattatgctcttctagcagatatcaaatgtgagaagcttctactatctatcaacgatgagcaaaataattatcaagaagcaaaggagttattcgaatggaca

SEQ ID NO: 172995 - DNA, 497 bp, Arabidopsis thaliana landsberg; identical to SEQ ID NO: 9356

SEQ ID NO: 172996 - DNA, 678 bp, Arabidopsis thaliana landsberg
caaatttgcataatacatatatattttttgccaaaagctcttcttgaatcaattgtttttcttgaagtgggaggctactccatggggtcttgaaggtattcttgagtatataaagcagagctataacaatcctccaatctatattcttgaaaatggtacaacacttcattctcttttgttttcttactctgttgtgtctgcttgaaagcacactttcttgttctttaagattcttcaacttgcaattttttaaatataaaaacaggtatgccgatgggacgcgactcgacattacaagacacacaaagaattgaattcattcaagcttacattggtgctatgctcaatgccatcaagtatgattctccttctgcatcttttagtcctcatattactacattaggattcatggtctaattccagttttacttactgatcaggaatggatcggacacgagaggttactttgtatggtcgatgattgatttgtatgagttactgagtggatatacgaccagcttcggaatgtactatgtgaatttcagcgatcctggtcgcaagaggactccaaagctctctgcttcttggtacactggtttcctcaatggtacaattgatgttgctactcaagatactattcagttgcagagcaacatctctggctcttcttcattgtaa

SEQ ID NO: 172997 - DNA, 622 bp, Arabidopsis thaliana landsberg
ctcgaaccatgcgccgatcccgctattccagcgggtcaccttggccaggcccggcgatctcggcgtgcacacgtatcgcattcccgcacttgccgtggcgaaagacggcacgctattggcaagctacgacgcacgcatcgatgcagcgcacgacttgcccggcaacatcgacgtcatgttgcgccgcagccacgacatgggccgcagctggagcgcaccgcagcgcgtggttcactacggcgacgggatcggcgctggcgacagcagcctgctggtcgatcgcgacaccggccgcatcttcctgttctacgcctacgctccgcgcggcatcggctatgtctcgtcgcagacgggcaatgccaccgacagcaccacgacactgcatccccgctacatgtggtcagacgacaacggcgccagttggcatgggccgcgcgacctgactgcaaccatcaagtcgcccgcatggaaaggcctgtttgccaccttcggccacggcatccagttgttcaacgaccgagccgcccgcggacgactgatccagccctatgtctttcgtggcccggaccatcttaaccatgccgtcaacatctatagcgaagatcatggcgccacctggaaa

SEQ ID NO: 172998 - DNA, 940 bp, Arabidopsis thaliana landsberg
atggggagcttggggtcagatcatgagatatccggatgacatatatccgctcctgaatatgatacgagcgattgataaatcggataagcagatccctcctgaaccacactggggtttatgctattcgatgctccacaaggtttctcgaagcttttctctcgttattcagcaactcaacaccgagatccgtaacaccgtaagttcttctcgctctcggtctatgtgttggtcaacgtcttcaatttttggaggaatccagatatctgacactcatttattgttgacgtcgtcgatgattggtttcttctgtagaatccgatggctttgagagtttgtgttccacttagttcaatatgagttatgcagattcttattaattgattctgcagtttcttctgagctgcagtaaatgcagattgtattttagtgaactatgattcgatatgtttccacataaaaaatggtgtgtgtgttcgatcacatgctatcagtgtagctgtgttcagtcttgcagcattttcttattcaatttttttcattttttcattttgtaggtgtgtgtgttctacttggttctccgagctcttgatactgttggttagtgtctcttaactttgctttcaagattaccttgatacgatgaggcttctccaaaatctgctatatttctgttttgaaatgcttttatgttagagccatctttcttcttcatgcttctgctgctaatattattttttgtacgacagaggatgatactagcataccaactgatgaaaaggttcccatcctgatagcttttcaccggcacatatacgatactgattggcattattcatgcaagtctgaagagtctcttaacatcttcatctttcacattccattaatctttgactgtctaacccccccattttacttgttcaactttaggtggtacgaagga

SEQ ID NO: 172999 - DNA, 2111 bp, Arabidopsis thaliana landsberg
cgcatcaacttcgtttacatagcaattctccaccttttatcaaccactgcttctcgaaacgtctctggttccgtattcacactcacgactgcaaggaacacaagacatggtgctggaaaaattgttgttcaagaaattgtgacaaaggatacaaactcttttcatcagatttgacttgaattattgtgttcatcacataatctttaaactttgcaggaagttgtgtttgtctcttcccaggtcccaatatcacttcaggtccatttataacaacctcttcatcagaatctgaaagatgaatctcctctgtttcaacctgttgatcgtcctttgtttcaagagaaggatctttgtctgtttaaacaaaaagatctacatcattattcagctcattcccttctcgtgaatactgtcctcgactacgacgtcgtcttcacctcgcggcgtgatcacttcgcccataatcttcatttcgaccagtaatctcatgggccttactctttatgggcttactctccatctacgtggcaatcttcggttggtcccaaactccggtgcaggatccgacaccaacaatgttggaatctctccaagaacagtgatatgggagagattcagggggaagaagagtcatcaaaccgcatgattctattgatccatcggctgttattcattggacatatgttatgcaatgggagtttgaacagttcaagctaagcggagtgtagaatgttatggattctggtacgatcttccgtaaccagaatactgaagatggtgtggctatcagacacaagactaggttgattgctcaaggatatactctgatggaggaagtctcagttcgttttgttagatttggctccatcaggacactgcttggtatcgcgtgtgcatcaaattccaggatacatcagatggtggttaagagaggtgttctaagtgatgagtctcagaaggaactctatgttgatcaaccaaaaggttttgaaaactcaagtcatccttaacatgtttatagattgacaagagctatacactgtttgaagcaaactccggaaatctattatgaacggttgccgacttttcttgaggatcaagggtatgtacggagcagtcgagacaagatagtgtttgttcttacaaatgacagtgggatgctaatagttcaactctatggggacaatataattttcggttctaccagtcaagaacatgttgaaagatttatcgaaagcattaccaaggagtttgaagtgagtatgtacggcgtactgaactactttctgggcttgtagattaacgagatgtatgaaggcatcctcatatctcagagtacatatgccaaaacttagattgagaagtttggattgatggccaatgaagaagctagaaaaccaatgggtgtttctgacaaagtctcaactgatgaggaaggagagggtatggtaaatgcatgtaccgaagtatgattgaaagtcttcagtatctgactgccatcagaccatacatctgtcaagcagcaagtgtttgtgctcaatatcaggtcaaaccaaaaatctcccatatgacggcaataagaaagatcctcaagtacgtgaatgctacatcaaacttgggcttatactacattaaagacactaccgggagtctcatgggttattgtactgcggattgggctggatcactggaggacggacggagtactaatggagggtgtttcttcattggaaacaacatggtttcatggcataacaagaaacataacgacttggctttatccacacctgaagcagaactcattgctcttgaaagctgctgcacacaactcatgtagatgaaacaagacagtggtatgatctttgactctccactaattttgtgcaataatcaaagtgttgtaggtagtttcaaataacctattcgacagtctcatactaagcacattggtcatcaacatcattatattcatgaacttgttgaggcgaaatttatagctattgaccatgtgggtactaaacatcaactcgctgatttatttaccaaacctttggactctaacagattttgtaatatgcaaatgttcattgcaatgtttaacatgtaacttg

SEQ ID NO: 173000 - DNA, 3807 bp, Arabidopsis thaliana landsberg
cgtctttatctagaaggtaaatcaccactacaaaacaggagcataaaccattgctgctttgtttcaaatatctttaagattagatcaagattaggtagtgatgtgtggaaaggtttgttgaaatcatcacttggtgtctttataaagtttgctcatgcggaatatatatgggctggcaaaactgttcactacttctttacaaaccagctgagtgtcaacaactttcaggagctttgatctgtgattgatggatgaccaactagattttctcttactgaatttgtggatataacaagtctcaattgtgattttcttgacaagtcaaccacttgtgaaattgccccctatgagttttgcaatataatgggtgttggaacatacgatggtcccttgtttattgagttgaagcatgtaatggatattagcaaggaatggagttatgaaaagaggttgatggttggtaggttatgcttgttatctgttggagttcatgggatttatcacggttgtagaatccttttgtcaagcgctaaattagttcttgatccaaaggcatttgagaaatatctttggggtcgagttgcatttgagtctctagttatttctgtgaagattgttgactacaaaaaagacatatgtgattcatggatgtgtccgggccttgttgatttggatttgtaagagcgtgcctggattgagagaactttatggaattaaaatagcaacaactactggtgttctactacttgattggagaataaatcagtcacatatcaaattttaaaaaatcgttgaaactgagaaggctgcccatggagaggtttgtgtgatcttctttagttctttatttaccttgctttagatctttaataaattctgagacatgtaactaacctaatcttttaattttatgttgttaataggtgtgggtcagacatatgattcctgtttctgaggaaaacatgtaccgtaaatggaatgacttgtctagagatcaacatatgacgtatgacaacttgattagagatatcatccacaataatttaagaaacaatgcgtggaaacatgcggaatcagtgcgtaggaggaaacgaaaagaatcaagaaatgaggatggtgagaatagtgtcatttccaaaggaaaagaaaggtaatgagtcaacgcctatagatgatgaaagagcacatgtttctagcagagaacagggaaaacacatatagaggtccaaatttttcccatttcacaatctacatatacatttttggtagacttttggccaaaaatccttatattatttgctaataacatacaagtccttacaaattctatctcaattaaaaattctttttttcttttgaaaataatgttaaattatattcaaaagaaaaataacgtttttacaacaagtgcatctttggattgaaaacagctgaaaatctacaaatcaagagaggttaattgttggattcaaaccacagttgtagtcccttatcatatcgtcgatcacccatctgtctttagtgatgatttggacacatacttccgtcggtgcagctttacatatataatacatataatccagtgatgctttgtgatcacgtttgtattactccaagaaaggtgatgctttgtgattatctgctttgcgctaaaactggatcctgagtctcttatcttcaatacgaatatgtgaagctgcagagatctctttcatctctatttaaggagatgttcccattgactttttagtgtcagcgttttttcagttcacttgaatttcttaacaacatctttaatcagggattctccatatcttaaatagttacgttctgcttcctagtaacttggaaatagaggttaaaaacaaaaacaatccctaaagctacactcttcaagttcgtctctatctctgcttctatatgtgatgcatctcagctcatactcaatacgtctagtccattaatttaactgcttttaacgttactatacagagcttaacaatatactaatcttatcttcggttattgttggacccatatgtgaaccgggaaaaatgggagggacaaagtcatacaatcatttaagttgattttatggagaatacaagctatcatgtttttcagttaaccggtcactgtggatgtcggattcggtccacttcggactaatccgcattcaatgggcttcgaggtgaattgggcccaattcgcagcccagcgtgagcctggccgtttaaagaataatccgacattaatacagaaacggaaggatcacgacttaaaccacgcattaaagtcccgagttgaagattcgtaacgtacgacgtaaataaggttagatccgcagcgtgaaatcagcaaatagtttaatacgtttgatccgatgtattgagtataaatacgagttgatgacaattgtaatggggacgattcatgaaatactaatactatacacaaaattcacaaacacattcttctcttctcgattcgatcattgttcgtttaacaagactaaagatcctcgtaaaaacaaccacaagattctaattgcggattccgacatccacaatttggcgctagaaggaggggaataaagtcttttacttcagagcaacgatcaatccaccatgagcaacaccgacgatcagagttccggcggccaagcctccaccctcgacaacatcaagcagctgcttcagcagctatccgagaaaaccgacagacagcagctcgccgtaacgacactctccgataagttcgtatctttccaagagcgttgcaatggccagctcgccgctttagctgtaaaccattccgagatcaggtcaacacacaatgcatatgccgagcgggttgattctctgcaggaacggcatggactacaggtgttcgaacacgactcaactttcagcgcgccgcgagcccaagcgtccagaattcgcaggaagcttctggtcagcaatctccttcacctccggttgacgtcagagcaacatcgacacaaaatccagtcatccaatctccgtcagcaggtcttgctgcagtctcagatgagacaatagctcgggcgccggctccactggatcccgccatcagactcccgaattctaatccccgaccagagccgagcacagtcaactcggagctgcagaaccttcaagatcaaatgtgggcaatgaacgcaaaggttcatcaggctaccacgtcggcccccgaagtggaaaaagttattgaagcaacaaggaggacacctttcacttcgagaatctcaaagcttcgtattcgcgatttccgagatttcaaactccccggttacaacggcaagggagatccaaaagaatatctgacttttttccaggtcatcgcaggtcgagtcccgcttgagccacatgaagaagatgcagggctctgcaagctattctcagaaagtttgtcaggtcccgcacttacctggttcacccagttagaagagggttcgatcgataactttaagcaactctccactgctttcattaagcagtacgggtactttatcaaaagtgacgtcactgaggctcagctttggaacctctctcaaggagctgacgatccacttcggacttacatcactgccttcaaagagatcatggtccaagtgcccaacctgtctgattcggcagctcaatccgccctcaaaaatggtttgtggcatgagtcgcgtttccgtgaatctctaaccgtaaaccgccccgaatcgattcaggacgcccttcatcgagcaacaaactggatcaatgccgaagaagaacgggcttttttggctaaaag

SEQ ID NO: 173001 - DNA, 677 bp, Arabidopsis thaliana landsberg
ttggcttatgccaaaggccagatttctgacttctggttagatctttaatctttgatggacattatacctgttgacatggttgcaaacgcagcaatagcagccatggcaaagcatggttgtggtgtcccagagttcaaagtttacaatttaacttcttcatctcatgtgaaccccatgcgtgctggcaaattgatagacctctctcatcaacatctgtgtgactttccattggaagaaacagtgatagacttagagcatatgaaaatccacagttccttagagggtttcacttctgctttatcgaacacaataataaaacaggaaagagtgattgataatgaaggaggaggattgagcacgaagggaaagaggaagctaaactattttgtgtccttggcaaaaacatatgagccttacacattctttcaagctcggttagtaacatacatggccttgttcttttattaagcaaaaagctatcagattttactgatcccataagtcaatactataggtttgacaacaccaatacaacaagtctgatacaggagatgtcaatggaagagaaaaaaacgtttgggttcgatatcaaaggcattgactgggagcattacattgtcaacgttcatcttccaggtctcaaaaaggaatttctttctaagaagaagactgagtaa

SEQ ID NO: 173002 - DNA, 1443 bp, Arabidopsis thaliana landsberg
accagtggctcactttacggtgcattatttggctcaattgtggcttttactatcgctgacgttataggttagttttacttctcactatcttcattttgtaggcatgagtatttagcaatgtttgcttgtggaaaaagataaagttttggttttgttgaatttggaaggaagaagaaaggagctgattttggctgcattattgtatctcgttggagcccttgtgactgcactagccccaacctattccgttctgataattggacgggttatttatggggtctcagttggactggtaagactgatcatgcttctttattgtttgacatctaaagactttcttatgcatgccaatggctcaaacgttatatattatgcatttggcggtgtactaagaatcgcacatctgttaggaggggagcaaattaatgctttataggactttagggcacccacactcttaatttatagtggtgactactttccaaggtcttataatattttaacttgttcccctcctaaaggatgtggagttcttatcatgtatataatcaacctaacttaacctttccaatgaatctaacagttgatgcaaatatatttccatctattgctgagcatgggttgttatccagtgcatcatcatagaaacataattgatgtctattctatgtacatgtatacagagtacacatatattgtgactgtattcttcgtccttcgtattttttatgtttttccagcttaaaagccagtgactagaaatcttgtttacctttcgaaaatattgtttatccatgtgcttttgctgtggattacatatagcagtactcttgctacgggaactgaattgtttccctacatttaggcaatgcatgcggctccgatgtacattgcagagactgctccaagtccgatacgtggacagctggtatcattaaaggaattcttcatagtccttgggatggttgtaagttcctgcaaccctgagatttaggacgttgattgctttatgtgaagcagttgagttgaaatctttgttcaccaagttaatctcacatatccccatacaaaattttacacagggaggttatggaatcggtagtcttacagtcaatgttcattctggttggcgatacatgtatgcaacaagtgtccctttggcagttattatgggaattgggatgtggtggctcccagcatcccctaggtggcttttgttgcgcgtcatacaggggaaagggaatgtggagaaccaacgagaggctgcaatcaaatctctctgctgccttagaggccctgcttttgttgattcagctgctgaacaagtaaatgagattttggctgaacaaacttttgtgggcgaggataaagaagaaaaatttggaaattagtttcaaggaaagtgcttgaaagctctcatcataggaggaggtctagtcttgt

SEQ ID NO: 173003 - DNA, 527 bp, Arabidopsis thaliana landsberg
aagtataaaggcaggttcatattgcgcaaggaactttatttatgcactgaatacgtgggcattttggtagacaccaatataaccatcacaaaaaattctcacctgcgttataaaaaagtgcgccaggccatcaattatgcaataggcaaagagaaacttatcagatacctgcgcaatggagtcgggataccggccacttcaggctttatcccaaaagggatgcccggttttgtcagcaccgcagtaaagggttatctctacaatccaaaaaaggcagccagcctgcttgcagaagtcggctttccaaatggaaggggaatgccccaggtcacactgagcacaaccacaacctataaagacctgatcgaatttgtgcaggccgaactgggcgagatcggcattaagaccaaaatcgacgtgagccccagcgccagtctgcgtgatctcaatgtccaaaaatgaagtgaattttttcagggaaatcatgaaatagccgattatcccgatggcgaaatctacctggccat

SEQ ID NO: 173004 - DNA, 631 bp, Arabidopsis thaliana landsberg; identical to SEQ ID NO: 8584

SEQ ID NO: 173005 - DNA, 532 bp, Arabidopsis thaliana landsberg; identical to SEQ ID NO: 21516

SEQ ID NO: 173006 - DNA, 1115 bp, Arabidopsis thaliana landsberg; identical to SEQ ID NO: 32656

SEQ ID NO: 173007 - DNA, 740 bp, Arabidopsis thaliana landsberg; identical to SEQ ID NO: 6354

SEQ ID NO: 173008 - DNA, 534 bp, Arabidopsis thaliana landsberg
catcgactatccatcgatcgggaccggcactattacagcgttccctaccagctggtggggcaacgagtcgatgtccggctcaccgagcacaccgtcgaggtgttcgcccgcggtcagcgggtggccagccaccggcgcagccatctcaaaggccggcacactaccgaccccgcgcacatgcccgccagccatcgcgcgcatctggcctggaccccctcgcggttgatccgctgggccgaacgcatcggaccggccaccggcgagctggtggcgctcatcctggacagccggccacatcccgagcagggataccgatcatgtctgggcatcttgcggctggcccgccgctacaacgaccagcgcctcgaagcggcgtgccggcgggcgttggtcatcggcgcccgcagctaccgcagtgtcgactcgatcctttcccacggcctggatcgcgcgcccctaccgggtgccggccctagcccagcgcaaggcccgcgcgcgcacgaacacctacgcggcgccagctactaccaataa

SEQ ID NO: 173009 - DNA, 731 bp, Arabidopsis thaliana landsberg
tccgcggaaccctaactttaccctctcccctcctcagcgtctttcttaccaattcaattctctttcacgaatccagaagcctctccttctcttgcttctcttcttcttcttcttcttcttcagcagcttatcttccttcactagaagagtacccatcagctaaaggtgactacttttgtttaaccactgtttcaacttcggattttgagttaaagtttgctgaggaatgtagtaattatctatctttaaggttctgtgaagagagatgataaccagaaggtggtcttgaagggtatgacttatgcttcgctccaagtacgtcccttttgcaattctcaatcttttcttcatttggtttatgatctttgaggtggaattggggatatttcaacttgtaggaatgggttcaatctcatgggtttagaccaggacaggctttaatgttgtggaagagattgtacaaggacaatatatgggcaaataatgttgatgaacttgaaggtttgtcttctgatatgtctttgctcagaagtttttgtgatttagcaatgaggattggttttcatttatgtgttcattcttttaggtttgaacaaagatctcaagagaatgattagtgaacatgctgagtttggggcattatcttttaaggatattcgttcggcttcagatggaactaggaaggtgaatagatcgttttattttttcgtctaatgatgtggatgagtcaa

SEQ ID NO: 173010 - DNA, 489 bp, Arabidopsis thaliana landsberg
cgctcgatccgaccggccaggtcacgatcgcggtggcgctgctcggtctgctggtcgccgtcgtccagggaccgaccagcggctggggcagcggcctcgtggtggacggcttcatcgtgaccgtcgtgttcctcgccttgttcgtcgtcgtcgaactgcggagccaggcgcctctgctgcagttgcggctctacggccaccgcccgttagccgccgcggcgatagccaacctgctcagaatgttagcctacatcggcaccggctacgccgccagcatccgactgtagacggtacagggcttcagcgcactggagaccaacctcgcattcgtcgcgctcaacggcatgtcggtggtcctgtacccggtgatccagagggcactgtccgggttccacccgcgctttgtgctgcccacccccctggcgctgaccgccatcggcgaaatctaaatgatgaccgtgtccgtcagcaacgtgtcggtggtcccgc

SEQ ID NO: 173011 - DNA, 2443 bp, Arabidopsis thaliana landsberg
atgtcgtggaggaagctttggccgaaccaagaagatattcgactcgctcgaagaccaatcttcttaaccaaggtatttcggactacccaaacacttggacaagaaccatgatggttgtgatatctttccaagacgattggtaatgggctaagtgttgctttgggtgctctttttccctgctaaggttttgtccgattgggttttccttagtaggtttttaacgaggcctaagtaacacttccaaaaccccctattatcaatccggcccaagcccactaagaggaccacgaatttggaaggccaggggtctatattttgttcaaattttcatttatgatttctccttttccgagtttttttggagcttgttctaagactaactcttccccttctcttcttctctatttaaactcttgtatttcctcattgtaaactcatctatctttttactctcaaagtcttttaagctacatcaaaggtaaatcaaacgccatccgcatcctttgtgtgaccatttgctccacatcctttggttttcgtgatctcatgatctcttaaatgcaaagtctatcctctacttaacctcaagattgtcgatcttagggaagtcatattaagtggtatcagagcacactctgaagttgagtactctatccttcatcacttcatcatttcgttgcattccattcattatttcatcaccttgtttcattttgtccgttcatcttcccatccgtctgttcatcttcgctatcatcttgttttaattttcataaataattggcttgcgataaaattgcaaaatcaattgatttgaatctaacacgagtctagtattttagaaaattgtttatggaatttttgagcatgatttgataattaaatctgtgcgatcttctttatctgttcttagaaaaacgtttagtattctccttgaactagtgactggtttagtgttgtttgttggcagaaaatggtgacaaccgaatcaagctcagagaagagtgttaataaccaagccatcatcgatgctatcacgttacaaatggagaaaataattgatgtcgagcttaagccaatcaacaatcaacttaaagcgaaagggaaagcacccgttgaacaagttgtcatctcggaaggagagcaatctcgaaaggagatgaatagtcgaatccatgacccaaggaaggacctagtagacccaaacgctcaagaatactacaaccatggtcactcatctcaccggagtaacctaagaccaaaatatggagagaagaaagagatcttatggttgagaatcttggtggctataagatgaaggttccaccttttcgtgggaagaatgatctggatgcctatttggactaggaaaagaaaatggaacttgtgttcaattgtcaaaactacgccgaggttaaccgcgtgaaggtcgccgcaaccgaattctttgactatgatcttagttggtgggatcaaatcgtcactacaaggtggcgtaatggagagtatcctattgatacatgggaagggttgaagcttctcatgaggcgtaagtttgtgccaagccactatcatcgtgaacttcattccaaacttcaaaagctcgtccaaggtactcgatcggtggaagactattacaaacagatggaaactttgctgttgcgcagcaatataaaggaggatcgtgaagcgactatgtcaaggttcttgggaggattgaatcgagaaattcatggtcatgtcgagatggaacattatgaagaattggaggaaatgctacacaaggctatcctagtggaacaacaagttaagaggaaaggatcatcccggccagcctatgatagatcatcccggccgacctatgactttaaccggccaagttatcgtagagaagcccaaccagccttcgttcctaaaggcgggcctaaaacatttccgactatccaagggcaatacaaaaccaggcccgatagcgccaccactactaaaactcgtgatcttcgatgcttcaagtgccatggatgtgggcactatgctaatgaatgtatcaacaagagagtgatggtcataagggaaaatgtcgagttgaaatccgaagacgagttcgtgccagaacctgattcttcgtccgacgagtgtattgctaagccggctaatgggaagctcttgatgtcgaggaaagtttctaaggatccggaagagaagcaatacgtgagctcatcctcggatgagtatgaagaacagctcgtagaactttacgtggcaaaaaggactttaagcattcaaacccgaaccgaagaagaagagcaaagagagaacctacttcattcgcgatacattgtcaatgagaaagtttgtagcttgatcatcgatggaggaagctgtacgaatgtggcgagtgaaacaatggtccaaaaactcgatttgaagccgcagaaacatc

SEQ ID NO: 173012 - DNA, 1302 bp, Arabidopsis thaliana landsberg
tcggaacgggcaacaatttcgggtagatgtcaactgcattttagttcctgagtgcttcacccatgaatgtcatgcataacatcggttattcatatccaccttcagtaaggacgagcgtgaaattcgctgccaaggttgcggatggagatattgtcgatatcgtctacaatgcgttttatgcgaatttgctatatgctacacatgcgccacaattccaactgtgttataccacaaatatgatgataatcctctctctctttgttacggagaaaatggcgtggatgacacgtactggtgcgaagtatgcgaggaagaattagacccaacggaatggttctacacaaacaccaagctgtgcacaacaatccaccataaatgtattttcggacgtaatgtttatttgaagtctggtcatacattcaaccactatagtgatgagttggaagttgtgtgccatggtagtagctctcgtcccatatgtcatacatgtcacaaatattgcccaagtcctgtatacttcaaagtctatatgccggatgggactgaatttgatatttgttctttagactgtcataagatctaattatgttatgagatataaccagagtttaaatttgaagctgatttgtttttcttttgtcaacgattcgtttgtattatcatttcacgcatgttgaagaataaatttattttcgaataatgttgtttgtattacatctgaaaatgaacacatattgagaagtgaatatttttctccaatttgactgttattacttgagatatgtcacagcttgattataaatatacatgtctcaatcaatagagaggatgatgacaagtaaattcaattcatattacaacaacaaatctcctcccgctaaggccatcttcatcggtagaattggtaggagtatctcaatatattgttttttaatcattatcatataatattattatttatttaaataattattctgaaaataattatttaacctgttaaaatatgacatgtggcaagaagagtatttcatggtttctctgcagagaaacttttcttactctctctcctactttattattattttatattttttagtgaaagagaaaccatgtgagagactattgatggaaatgctctaagtcttctagaaaaatgtaaaaaggttaattatggccagaccggaagaccaaattttatttgcatggtttggcaaagtgccactaaatcaatttgtgaaaatcacaatccaatttgtgtgtttaattacgaatatacataatttcaccaacgtgttttggcca

SEQ ID NO: 173013 - DNA, 1410 bp, Arabidopsis thaliana landsberg
gcaggtcgactctagaggatccccaatgaatggggacatttggtatatatatgcatgcgaccaatataatagaccatttttctatcttggtttgggatataatgaagtttaatccggttaatgcaggccggtttggaaggtgaaaagaaagaggtgtacacagaggaaggatctaagaaggtgaaatgggagaaagatggtgaacgtaagcatcttacgtggtacaaggtaaacacataactcaataaaacgtttcttaatatataagatgtttacgcatttgtcttaatcaatggattcacagacctactttgagacaccagagggagtgaacgcggtcgcgattaggatgaaaggaatggggaagggattgatttgggttaatggaattggcgtagggagatattggatgtctttcctttctccactgggagagccaactcaaacggagtaggtttctatagatatgacttgcgggacaagaaactgattagagactaaacccctatatatatggtggacaggtaccatataccgagatctttcatgaagggggagaagaagaagaacatgctggtgattctcgaggaagaaccaggggtgaagttagagtctattgatttcgtgttggtgaatagagacacaatctgtagtaatgtcggggaggattacccagtatcggtgaaatcgtggaagagagaagggccaaagatagtttcgagaagcaaagatatgaggctaaaggcagtgatgaggtgtccaccggagaaacaaatggtggaagtacaatttgcaagcttcggagatccgacaggaacttgtggtaacttcacaatggggaagtgctctgcatctaagtcaaaggaggtggtcgagaaggtaatgtgtgatgattgaagcatcttagttattgagtcatttttatatatatagttgatagctttgtgttaatttatggaacaggagtgtttgggtaggaattattgttccatagtagtagcgagggagacttttggggacaaagggtgtccggagatagtgaagacattggcagtgcaagtcaagtgtgagaagaaagaaggaaaacaagatgagaagaagaagaaagaagataaagacgaagaggaagaggacgatgaagatgatgatgaagaagaagaagaagaagacaaagagaacaaagatacaaaggatatggagaacaaaaatcaagatatgtaaacaagactacttctcattattttgagtcttggagtttttaaactctcttttttgttattagaaaaaaacaaatatttaattagtaatttatagcatgtggttttgttatcttttgttcaattaattatagcttaatataaaccactaattatgtaatttgtttgctaaattccttttactcttacactt

SEQ ID NO: 173014 - DNA, 478 bp, Arabidopsis thaliana landsberg
gaaaccaaaggaacctcgacttcactatgatttacctccgagccctccgactcttcccatcattggtcatcttcaccttcttctctctgttctagtccacagatctttacagacactctccaccaagtatgggtctattctctatcttcgcgtcttcagtttccctgtagccctcgtctcctcagcatctattgcttatgagatcttcagggaacacgacgtgaacatctcgtctcgtggattccctcctaccgatgattccctttttgctggatctttcagcttcacctctgctccctatggagattactggaagttcatgaagaagctcctggtcacgaacttgcttggaccccaggcactcgagcggtcacgaggattccgtgcagatgagctagatctgttttacgagaacctgttggataaagcgatgaagaaggagagcgtggatatctgtgtggaggcgttgaagctcggt

SEQ ID NO: 173015 - DNA, 426 bp, Arabidopsis thaliana landsberg
  unsure (1)..(426): unsure at all n locations
gatctacgtgcacccggagtgagcatgcgggacctcagcgctgtgggccacgcaggacctgccgccggaacgcaccaaggtgctgtccacgggcgggatgctgaccgccgcccgctcgacgtcggcgacctccgtgcnnnnnnnnnnnnnnnnnnnnnnnnnnnnnnnnnnnnnnnnngcgaacccggcggtgtcctgggaaccggtgaacgagagcgcggtctgccactacatgaagatgaccaccgcctcgtccctggaacgatgcctgcgggacggcgtgaccgaggtcgaggtgcatgcccacgtggcggcacgggcccggcgcgcggtcgaggcgatgatcgcgtgaacggggacggcggctccgggccgggcggcgacccggtccccggcgctcacccgggcggcgacccggtcaaaccg

SEQ ID NO: 173016 - DNA, 3438 bp, Arabidopsis thaliana landsberg
atgggtaaccttgagtgggtaaagggtcggaatgtgtttctgaacctcggctactctatgggaattcatttccattgtggcgtctccgggccgtgccggactggccgagttttagcgcggaccgggggcgttagaatgggtggtatcagagcatggttttagggcttttgggatctgtttttttttcaaacgttttatcgagtaaatagtcgcaaaaggcacttaggataatccgagtcgttcaccactattaggataggggggaaatattagatacctaagatcgttgttggattggatgtagatgtcaagtcaggtgtcggacgagaaccagtcgagagatgtgatgtctagtcgtggaaactttgcgcagtatccggagtcggataactagataccgagtgagagtggtgagataaatggagattatattcacttggagccgtatggattatctgaatgggaacccctgatttcacgcccagacactcgccgccgggatcgatgtcttcgaaacatcaaatgagagttacttgcggtcttgatcgcataacctcgtacaatccccatcgattaagcaaaatcatggaaaccctatccctggaaccgagaatcaaggagcccctgaaacgcgacagaccttaggcattattcagagtctattgggtcatatgattcaaacacaacaacatcaacaacaaattcaagaaagccagcgagaggaatcaccatccgcaaagttcttgaagctcgtaatgatgatgagagacttaggaattcgcgtgtttaaggagaacaaaacacggtcgtgacagataaatggctacgagaccttgagagtaattttgagatttctcgatgtcttgacaacttcaagagacagatcgtagttaacttcttggacgaggatgcacaaatctggtgggagagcgtcactgccaggaaccaagaccaaatgatatcatgggaagcttttagaagagaattcgaaaagaagtactttccaccagaggcccgtgatcgattggagcagcaattcatgaacttagcacaagaggcaaggagtgtccgatcatacgagcaagctttcacgcgactaaggaggtacttatacaacggacaagacgatgaagcattgatggtgcgtagattcttgagaggactcaggccagagatatggggccgactacaagcagtcacatatggcagtgtcaacgagttaactgaacgggcaattaatgtagaggagggtattgagttggagaagagtgtaaccaacaaggaaagcgatcgatcgggagggaggaagactaataacacggagaccaaaaacaacgcttctaaattcacactaaatcaggagagagactatgatcgaggaagaacaaaggctagctataacaacgataggggaagaaacgattttgatccaaggggatgttacacatgtggaaagttgggccatttcgcgcgagtttgcccagtggttacccaaccaacggcagcgtatgtcacatgttattcctgcggtgaagaaggccatcgttccaatgtttgtccgagtaagaagacaggccaagtgaatccaaagggccattgttattggtgtggaagccaagaccactactctcacgtgtgtccaagtaaacccacgggacctgacactcagcaaaactcacgacccccgccagcatcaggagaaagaggacccccgacgaaacgtcaggccacggttgctaacgtgtacgcgttagatttagaatcgacagaaaccacaggacctcttaaaggttccgtaacaggtttgtatgggttctaactctttttttaaaatagtttttagattttgtgtgtgaattgtgagaatgttttggctagtgtgtgtgaatgcgttgccagggactgtaagtattggtggtgtacccacatgtgtgttatttgactcgggagcaaccaatagcttcattacgcctgcggtggtcgcaaagttcaccacaatttttaaggaaaaggaagttaatatccttatccataccgcgagtgatcaaccaccccttcaaacccgtagaatcctattaggagtacccgtagtaatccataggacaaccttacccgcaaaccttttgattatgcccatgaggaagtttgaagtgattttgggaatggattggttatccggataccatccccggatagagtgtgctaagagtagagtggtgttcgagttaggagaccaaaccaaattagtctatactggagtgagcccgagtgtcagagcagtttttgaatcagcccttcgtgtcgagagtatgctaggccaaggggaagcatatctagtaacccttaacgcggttggaggagacagtgatgaggagatgaaagtggaagacattccaaccataggtgaattcgtggatgtgtttaaagcattagaaggctggccaccgtcccggagcaatccttttgccattaatctcgaagatggagctattccgatagccaagtccccttagagaatggcgcctgccgagttagcagagttaaaacaacatttaggagatcttcttgaggaaggattcatacgcccgagttcatcaccatggggagcctaggtgttgtttgtgaagaagaaggatgataagttacaagagatagttacagagttgaaaatgctagacggacctaatgctagcggttatcacatggcggacgatggtaccctgttattcaacggaagaattatggtaccagatcgaggaaacttacgacaagagatccttcgtatggcgcactcgtctacactgagtattcatccgggcagtaccaaaatgtataaggacatacgccgatattatcattggccaggaatgaagaaatcggtagctaaatgggtaagtcagtgtgattcttgtcagcgaataaagattgatcctcaggttccaggtggactgctttagagcttattagttccaatgtggaaatgggaatcgatctctatggacttcatcaatggattacctacaaggaaggggcagaggaacgatttagtttgggttattgttgatcgattaaccaagctgactcattttataccagtgaggagcatcgatcaagctccaaatctagcggagaggtataaaaagaagtgatcaagctccacggtataccagccaatctcgtgtcagatcgagatccgaagttttcggtaattttttggcaagatctccagaaggccctaggaacggatgtcccatgagtacggcgtttcacccgagaccgacggacaaactgagcggacaattcgaaccattgaagacttgattcgaatccgtcccttagaatggggaagaagttgggaggagatctacattcatcgaattttcttagacaacagctccattcaagtattggtatgtcccattcgaactgtgtatggag

SEQ ID NO: 173017 - DNA, 676 bp, Arabidopsis thaliana landsberg
atgtcgaagcaaacatacaaagtctgtttctgtttccgtcggaggtaccgacacactgtgtccgtagctcctcctgagatcaaaacacttttcgacaattactccgacaaaggtctcatgactaccgatctcctcctcagattcctaatcgatgttcagaaacaagacaaagccacgaaagaagaagctcaagatatcgtcaatgcttcttcttctcttcttcatcgtaatggtctccaccttgatgctttcttcaaataccttttctctgttaccaactctccctcttttttctcttgaggtaattcgattttagattgaaatttagattgagactgaagataaatttaaagagagattgatcgttgaatatatttttgcaggtgcatcaagatatggatgctccattatcacattatttcatatatacaggacataattcgtatttaacaggtaatcaactaagtagtgattgcagtgaattgcctatcattgaggcattgaaaaaaggtgttagagttattgaattagatatttggcctaactctgatgaagatggtatcgatgttcttcatggaaggtatttattacttattagtaatgtctctgttttcttaaagtttcgatttttatatgttctgatcgaagttaatgattaatataggactcttacatc

SEQ ID NO: 173018 - DNA, 1209 bp, Arabidopsis thaliana landsberg
catatcattaatggacctggatacacgagaattgttcattgtaaccaacctcatttgcatttggctaaagtccttaggtacacttcaaattatgtgtccaccactaggtataatctcattactttcttgcccaaatgcttgtatgagcagttccaccgtgttgccaatttctacttcctcgttgctgctattctctctgtctttcctctctccccattcaacaaatggagtatgatcgctcctttgatttttgtggttgggcttagtatgggtaaagaggcgttggaggattggcggaggtttatgcaggatgtgaaggtgaattcgaggaaagctactgttcacagaggggatggtgattttggtcgtaggaagtggaagaagttacgtgtaggggatgttgtaaaggtggaaaaggatcaatttttccctgctgatttgctcttattgtcatctagttatgaggatgggatctgttatgtggagacgatgaacttagatggtgaaaccaacttgaaagtgaaaagatgtttggatgttactttgcctttggaacgggatgatactttccagagtttctccggaactatcaaatgtgaagatcccaatcctaacctctatacctttgttggaaatcttgaatatgacggtcaggtttatccgcttgatcctagccagattctcttgagagactcaaagctcaggaacacgtcttatgtctatggggtggtggtttttactggccatgacaccaaagtcatgcagaattcaacaaaatccccttcaaagagaagcagaatcgagaagagaatggactacattatatatactctctttgccctccttgtgcttgtctccttcatcagctcattgggttttgcagtgatgacaaaaatgcatatgggagattggtggtacttacgaccggataagcctgagcggttaacaaatccaagaaatccttttcacgcttgggtcgtccatctgatcactgctgtcttgctttatgggtacttgattcccatctcattgtatgtttccatcgagctcgtaaaagttttgcaggcaactttcataaaccaagacttgcagatgtatgacagcgagagtgggactccagctcaagcacgtacatcgaatttaaatgaagagctgggacaagttgacacaatcctttccgataaaactggaactttgacttgtaaccag

SEQ ID NO: 173019 - DNA, 1363 bp, Arabidopsis thaliana landsberg
atgactgacatgattccaccacatctgaggaaactttgggacaaatggaacatacgtggagtcataatactcagtcttttcctccaaacaatccttattttctttgcacctagccgaagacgcaccgcaaagaagctcttccttgtcctcatatggtcagcttatcttcttgctgattgggcagctgattacgcggttgggcaaatctcagacagccaagaagaagaagctgaatcaaacaaaccatccaagaaccgtgagctgctagcattttggtcaccgtttcttctcttgcaccttggaggtccagataccattacagcacttgccttggaggataatgagctttgggacagacacttgtttagtcttgtctgtcaagcggtagccactgtgtatgtgatcttgttgtctataccaaataggcttctgactccaacattaatcatgtttgtgggaggagtgatcaagtatgtcgagagaacagctgcgttgttctcagcgagtcttgacaagttcaaggactctatgctcgacgatcctgaccctggtgctaattacgcgaagctcatggaggaatatgaagctaggaagaagatgaatatgccaactgatgtaatagtggtgaaggatccagagaaaggacgggaaggcaatactccagttaggcccgacaatgaattgaccgcactacaagttattcagtatgcttacaaatactttaacatcttcaaaggtcttattgttgatctaatcttcacaaatcaagagcgcgacgagagcaggaaattctttgacaagctgactgcagaagaagctttacgtatcatcgaagtcgagctcggactcatctatgattgtctgttcaccaaagcagagattctgcataactggactggagctgtgttccggtttatagctttggggtgccttgttgcatctctctgcctcttcaagatgaataagaaagatcaatatgatggattcgatgtcgtccttacttacgcattgctcatatgtggaatagctcttgattccattgctcttctcatgttctgtgtatctgactggaccatcgctagactgaggaaactaaaggaagacctggaagagaaagacaccttgacagacagagttctcaactggatcctcgatttcaagacgctgaggtggaaaagatccaaatgttcccaggatggacatgaagtgctcaacagaaactttatgtttcgcagatggtctgagtatgttcatgcttacaacttgattggcttctgtctgggaatacgtcccaagagaatccattataccaagggtaagatacacagtttctttcaccagaccattcgcatttttttcataa

SEQ ID NO: 173020 - DNA, 483 bp, Arabidopsis thaliana landsberg
gatcacgataggagctgaaagattcaggtgccataaggttcatttccagccgtctttgattggaatgaaagcttctggtattcatgagaagacttacgattcaatcatgaagtgtgatgatgatataaggaaggatttgtatggaaacattgtgttgagtggtgggacgacgatgttccgagggattgaagagaggatgaccaaagagatcaatgcgcttgcagccgctaatatgaggattaaaattgttgctcccccggaaaggaaatatagtgtttggattggaggctccattttggcttctctaagcacatatgaacaggtaaataagataatactaattgtattattaatttaacgtgcgtatctcttttgggatgttgtaatgtcaagttgttgtgatgtatatatatgcagatgtggattactaaagctgagtatgaagaaaatggaccggccattgttcacacgaaatgcttttga

SEQ ID NO: 173021 - DNA, 1199 bp, Arabidopsis thaliana landsberg
gcagcacacgatgagaccaaccttctgacattgatatctgggacgaaaaattctatttcagtttacacactactcgggtatgacaagtggacactcgcaaggcagttcaagaacgtatcaatggaggaatcagatcttgaatgttggaacgtggttgcatatgacggcaagtgtctagtggtgagggagaaaatgatacgttctagtgacattgagcttcatgtgtacgacatggaagctgacagttggggagtttttgagacagccaaatgttggtcccaagacttctatacgtttaagccctcctttttctctattgaggatgacgagcagacaaaggtgcttgtaccttctgatgaccaacgcctttcctatctaactacaattatggaaatgatacaaccaggtaaactatctcattgtttgattattttgagtcaatttattattcttaatcatcctactcccttgctcatctctttctaactgattccttgaaccagtaaaagagactcacaaagatgactagtcaaacaatcttcagaacgacttacccatccggtcattatccttaagctttgcggggtagatggattaagcatttcatccaaacattattgatgcattttctaaagatcatgttccaaggcattatgattaacttcatatataataaaatcaatcattactaatgtttaaactacacatcaaattctactacacttaatcacagtaacgtcttacataatcaaatctcattaaaaaatcccaatcaggagcagagagtgtgagaaagagagcatcagcagaccagtagttatcaacaagcgaacttacctgtgaagttcagagatcaagtgtatcccatcatttgctctccctctctctttgcaccataagttatctaatcctaactcagaaaagactgtaatcaattcaagcaataacactacacaaacggcaaaaaaccttaatctaatcgaacaaacatataaagactacaaagcaaagcaagaggatccatggacgataaaaagatcaaaatgttatccttagttatggcggcgatgcaggagctcctcatatataccacagcaatttcacccaaaccgaacattttaaaatcagaagccctagcaaaattaataaatccaaaccgaaccggatggccgacgcagcaaaccgaaccggatccttga

SEQ ID NO: 173022 - DNA, 1321 bp, Arabidopsis thaliana landsberg
cgccggagatttatactaattacaaagtttcgccggaaatctctcgaatccgtttctctatacaatctctccttgctcacattcacaacgaggcaatgttgctttctcaatgtcggagatgacagctgcaacagtttcaccttctttcaacgcaaacgctaaacagaacaaaccaccgtcgtttccatcggaatcatcaaatcgccgcccaaaaacacgagatgtagcatcgcgataccttggcggtacttcttctttcttccaccaatcatcaccgaagagatgtcaatctccgatcgttactcgaccggtgactccgtcgtctgttgctactaatcggccgcaatcaacaccacgtcgtgagtctttagaccgacgagaagtttctaaagcggagaggatgttgttgacttctgggagaagcttgtttgcgtcgtttcaggcggattcgtttactccaggaacattagagaggaggaagacgacttcttcggcaacaatatctaagagtggtggaggtaaacaagagaaattgaaactctctgatcaatggcctaggtctctgcaacctagttgtttaagtagaagtgtagatttcactgatactaggaagaaactgatcggatctggcaatggtgtagctagagctctgcagcattccatggttagtaatagaccggtttcgcgtgagcggataacgagtgttgatctagagacagagagtgtttcttctggaagctctaatggaagagggaaaatgttatcagctcttggcaatgtggttaaggccagagttttgcaatcgcggtcgcaggatcggttcgagcctagctcgcatggactgaggaagatatctgtggatggtcctgtattgtccccaaaaggaagccaattgtttccaaaaagtgagcagattcgacctgcttcacctagtaaatttggtatgaatgcagctttgtcaaatccgagaggaactagcattgctagaggtttgagcccctcgagaggggttagtccttcagatagaatgagtccactaagagtgagaagctcgctgagtaaaaacacacctttgattccgaattttgctgtggatggtaaagagaagatcagagataatggggttgctgatgctcacttgttaaggctattatacagtaggttgctgcaatggcaatttgctaatgcacgagcaaatggtgttatctctcacaaatgatgagagagaaggttagcgattttcttcctgaatgctttagaatcttgattattgattagcacaataagtgtctgcatttttgacatttggtactaatgatga

SEQ ID NO: 173023 - DNA, 372 bp, Arabidopsis thaliana landsberg
ctactacctattttgtgggaagacaagcgccatactataagaatgtgccaaatcaccatccaaatgcagaaggaaatcgcagaagccgaagctaagcaaagtcaaccgaagcaggtcctgcacactgcttcgtgtcattcaccctacataccagaatatgtgggtaatcatcctgcagcttcggttgcttcggctagtcagccacaggcttcttggccacaacttccacctccaccactactacaacctacttattaacgaggtcagcaaccagaagggagccagcagacccatcagcagcgagatttcagggaggaatccaaagcccgcacagtcaacagtactgtgccggaatcaaaacacatctattaa

SEQ ID NO: 173024 - DNA, 1043 bp, Arabidopsis thaliana landsberg; identical to SEQ ID NO: 1701

SEQ ID NO: 173025 - DNA, 579 bp, Arabidopsis thaliana landsberg
atgtctgttgctgttgttgctttaagcccgattcatagaggatcggcgtttgctgttggtggtttcggacaatcgacgacgacgcattactctgttaaatcggttttggtgttccttagtgtttctggttctacgatgcctatgttcatcttggagtctgattctattgctgaggttaaacttaggatccagacttgtaatggttttagggttagaagacagaaacttgttttcagtggtcgagagcttgcgaggaatgcgtcacgtgtgaaggactatggtgtgactggtgggagtgttttgcatttggtgcttaagctctatgatcctttccttgttactgtgattactacttgcggcaaggtctttcagtttcatgtggatcgtcgtagaaatgttgggtatttgaagaaacggatctctaaagagggtagaggttttcctgaggttgatgatcaagagatcttgtttaaaggagagaagcttgatgacaacagaatcattgatgggatttgtaaagatggaaactctgtgatccatttgctggttaagaaatcggtggaagacactgttgaaaag

SEQ ID NO: 173026 - DNA, 552 bp, Arabidopsis thaliana landsberg; identical to SEQ ID NO: 3199

SEQ ID NO: 173027 - DNA, 997 bp, Arabidopsis thaliana landsberg
ttcaggaactggcatatttggacactcttgtttcatactgagtactgactatacagggcatctttcatatctatcccaatgcagaaacgtttgtgagagcggatggtgcctttattccttttgcagaagatttcaacacgagcaatgtaactacgttgataaagggcattggtgagataggagatgtgcacgttatagacttgcaatccccaattgatagccttattgggaaacaagttgtcaaagttggaagaagctctggatataccaccggaaccataatggcttatgcattggaatacaacgacgagaaagggatctgtttcctcacggattttctggtcattggtgaaaaccagcaaacttttgaccttgaaggtgacagtggaagcctaatactcttaacgggtccaaatggtcagaagccacgaccagttgggatcatttggggaggaacagccaaccgaggaagacttaaactaatagccggtcaagaacccgagaactggacaagcggagttgatcttggtcgccttttggatctcttggagcttgatctcatcacatccaaccatgaacttgaaggttttagaactcttttcctagcacttgtatgacaatggttcccaagttctcatgacttgttcttttgacttttgtacacttgcagcagcagcagcagcacgagaagaaagaaacacttcggttacagcccttgattcaaccgttagccagtcatccccgcctgacccggttccatcaggagacaaacaagatgagagctttgagccatttattccgcctgagttccatatagaagaagcaatcaaaccaacacttgaagttgaggaacatatcttcattgctcctatatcggttaacgagtctacttccgccattaaagggcaagagatacccaaattggataatctcatggctttaaagaacagttccgaagaagaggttaacatatcgttgcatctaggtgagcccaaac

SEQ ID NO: 173028 - DNA, 2333 bp, Arabidopsis thaliana landsberg
acctaagatgaggaggaaaccatgaggctgcacagagtaaaagttgcaaggggaaaaactgttaagcttgccccaaatgggagtttattgattcaactcgatgaaatgaccactaagacttttccagtaattggagacaacaggctgagctgcatgatgaagggttctctgccttcacgaggaatctatgatcctatgacaccggttgatctagccaaattgcataaacttaaggattatttgtcaagtcccgacaggtatggccttttataccttaataagttgttaagtacgacatgcttacactatttgtgtatattaactttttattatttgttagcaaaaaatcgttggacactggaatagacgaggttgatttctacggagttatcatgaccaaaagaaagttctggctagattcaaattatggatggttgggtgataaagtaagttattgttatattctgtctgagtttgtctactttatggctgagttatcgtgttgttcaggctgagttaaataaattatagctggtctattctggtgttcagactgagttgtagttgattatgtctaagttatggtattgttctgcctgagttaaactagataatggctgatttatttaggtgttgcggctgagttttacttggttacgcctgaattaatgttgtgttgtgtctgggttggttttatttttgtacagcaaattggtgcgtatatgaaagtcctcgccctgaggctccagcgagatccatgcccataccacaacgaacacgtcatgattcagacctgtggatcacgacctattgggttacagattacaataagttcaagatcaaactgaagaggttttctttcaaagacaccgcgtatcaacagtggattaacggtatgggaggagaagtcccgacacggaagaagtggataacagatatagatcacttgtatattatccaccaaaccggaggtaatcattgggtgacccttcaggacgtgaacttccttaggtctcacattgattgctatgattgcatagttaaagagcatatagacgagagcgatggaaaaatactggaagcttgtaggccgttcacgaggatgatcccacagatgatgaacgaactgattccttctgaagtccgtatcccgcattacgaccaattttcattccggcagagggacaagaaaaaggtcctgcaaaatactcagaggggactgtggcgtttacgcgttaaagattctcgaatgtttattgcttggtgtttcttttgatggcattactgatgcaaatatccaggctctacgggtgaagattgcagcagagatcttcgatgaagcaccggaaaggatccctgcacggtttctagagacgtgattagcttttttgaacatatgtctgtgtcttttgggatttttagcatgtgattatagtaaatattgacactttaggattgataaccagaattatgtctgtatgaatctattattatgttaattataccaaaaaccaatgtaatggctgacttatcatcgctcgattcgttttacggctgatatatgctaacgtgaaggctgacttatcatcgctcaactcgtgctacgcgccctgagtcattcgatgtttaattcgatgtttagctgagttattataacccggtggctgacttgtcatcagacaaatcgtttgatggctgagtttgtataacgtggtggttgactagtcaaacccaaacttccttcccatcaaataaaaaaaacgtgactttaggactatacatacaccggtttacgacacccgaatagtcaagaacccaaacgtcgttagaggaccaacgttgtttatgttagaggaccaaacgtcgttacgttagaggaccaaacgtcattagaggactatatttacactggtttcctcttgtcttttcacttgtcgattcttagcaactacaactcttcattcttctcttgtcctttctctgagaaacaaaaccattccgagatcatggatgcatcaggttcaggttcaggttcaaacaagcggcggtgtgtggatgacggtcccaacaagtggccgtctgtggatgacagccccaccctaaagctgtatgaataggagaagcgtttcaaatccgtcatctcttacatcaggagcaacataagggagacggcggaagcacacttgctcgatatcaaactgcatgagaaggaagtgctggcgcaggttggcaaggcctacagagcgcagcgtgaacgcccggtgagtagtattgattgggagaaactggggtatggatcgaccgggcgtccaatttcggagtccgacaaagaa

SEQ ID NO: 173029 - DNA, 544 bp, Arabidopsis thaliana landsberg
  unsure (1)..(544): unsure at all n locations
agcatgccnataagcagcttacaatggaggctgcacaagcggaaatggctagggatttaagcaacgaagtaagcaaatgcaaagccgattatcagctgttgatctatttcatttcaggccatttattatagctgtgggttgatgagtttgctttgtacgtatctttagctatatgagattgatctgcagctggagaaactccgggaatcagtagttcagagatgcaggtataaataacctcttctgttgatcatttttacccttaatgaagggttcgtaaccgagtttttggtgtggttttggaaataaacagaaaactgtccactcaagaaaagaaaggactttctgcagctctaggtcgtctctcacctgaggatctgtctaaggcgttaaaaatggtttcagagagcaacnnnnnnnnnnnnnnnnnnnnnnnngaagtcgagcttgacattgatgttcaggtcaccaccaacatcttccttatttctttgtggttaagcatcagaaattcaggttttaacggtttcctctcttgtttgtg

SEQ ID NO: 173030 - DNA, 1326 bp, Arabidopsis thaliana landsberg; identical to SEQ ID NO: 29850

SEQ ID NO: 173031 - DNA, 1629 bp, Arabidopsis thaliana landsberg
gtgctataagacttagcccagctgggttactgaaggacgtacagcatctgttcgagaagtgtcatctggagacactcatgccttacccttaccctgcctataaggaggagacaatcgattttctttccacgctgcaagtggagatgtatgagggactcacagactttgagttggataccatgggactaggtttcttgacgttctcagtggatgaacagcggtatcagctttcgatcaagaagttggaagaactgattggtttccctagtggaaagggaaccaaaccacgatttgacagagaagagcttaaggacttgtgggccactattgggaacaatctaccgctaaactcggcgaggtccaagagcaaccaaatccggagtcctgtgatccgctactttcagggatcggttgccaacgtcttttactccagggagtctacaggcaccgtgtctaacacggacatggagatgatagattatgcgcttacagggattctccactggacgaagggagagaatgtcttgagtggcgatctcaacaacgcaccaccagtaatgcctctgttgatccatctgtgtggatacaggaagtgggcgttgacgaacgggaaaaagaaggtgagaggagcactatgcgtgggtggcgttgtgacgccaattatggaagcttgtggagtaccgctcaaggaaccagggttagcaccgaggatgatggacttggatcatttgcgcagatgtgagttcttggagtttgacatggctggcgactttcaccgctacaggttcgagcattcatcgattaaaatcgccaacattcttctcccctgcattgatgctactaggattctcgagggcagaaacattgacttcaagcctgcgcttgaagaactttatttagagggcagtccgccaactgaggagatcagtcataccgaaggaggtacaacagaagatattgatgagactgatgatatacatgaagcggagtttgacacgagcatgtatcatttcagggagcatataccttctgcgagggaaagcaagagtttgagtgaagctcacaggaacaacagcaagctgcagaagtggtgcaagaaacaggacaagttactcgccaagtgcttaagggctatcaagtttctgaaggacaagctcagctgctcctcttccactacagctattccgcagggacatctccctcaggacatgccttcgaggagatatgacgcgcccgagccaagtcagcgcaggcctgagcctagagagcaggagattccgcatgtccctgcgaggcattcatcattcgagcctcgtgaatctgggaggaagaggaggaccacactcactcgatctagcagtaggagcggacgacttctgcagtctcgtagtttacgcgaccgcggtgctggccgcaacagaaggagagaggtcgagtttcctcatagcggtgctggccgcagcagaaggagagaggtcaagttttcctcagagcggtgctggccgccagagagctgatgaggtcgagtacccacctgctggagctgatacaaaacaaggtggttcgtctatggccagagagcaatcacaggcagccattgacgagcaactacgttcattcttcgactaa

SEQ ID NO: 173032 - DNA, 1058 bp, Arabidopsis thaliana landsberg
tctctatagagtagtgatggtctccgattgataggctttatggtgggttaaactgatattttcaggcagctacaacatcgggggactcaatctctagtccaatctccgtctcggaacaaacattccctaatcgcgtggcagctgaagatattgatacagttgttagaaatcatgatattagccttcatgatatcaatacgcttgattgggatgagctgctagtaccaaccgatcttaataaccaatctgcaccaaccgtaggttaggaattgacaatatcagttggtgtagttaaagaaactatgggatgatgttgaaaataaatctttctttttatctgtgatcagataatctttcatatttcacagaaccgctccaaaatgctgcaaatggcactgcagagcatgggaatgcgacagtggctgatggatctcttgatgctttgcttaacgatggtccacaaagtcgagagagttttggaaggtggatgaattcatttatcagcgaatctaatggctcactggaggatccttcctttgaacccatggttatgcctaggcaggatccattagctcctcaagctgtatttcattctcactctaacatacctgagcaagtgtttaacataaccgatgtttcacctgcttgggcctattcttccgagaaaactaaggtatgtgctatcatatgaataaaataattggtttggattacaaaatggaaaagcataactttctcatatactgattctgcagattctggtaactgggttcttgcatgacagttatcaacatctcgaaagatcaaacctttattgcgtttgcggtgacttttgtgtccctgcggaatatctccaggctggagtctaccgttgcatcatacctccacactcgcctggtatggtaaacctctatcttagtgcagatggacacaaaccaatcagccaatgtttcagattcgaacaccgtgcagtcccagttcttgataagaccgtccatgaagacaatcaagattccaaatgggaagagtttgagttccaagttcgactttctcatcct

SEQ ID NO: 173033 - DNA, 524 bp, Arabidopsis thaliana landsberg
  unsure (1)..(524): unsure at all n locations
ggtgaatatgtacctccagcgaggcagagcaagagcagaagtggtgcaagaagcaggacaagctgctcgccaagtgtttcaaggctatcaagcttctgacannnnnnnnnnnnnnnnnnnnnnnnnnnnnnnnnnnnnnnnnnnnnnnncctcctctggagatgtcatcgaggagatttgatgagcctgcgcacaggccttagcttagcgagtagagagtctcacatgtcctggctaggcattcatcatttgagtcccgggagcacaagagaagaaggaaggctacactcactcgatctagcagcagatcacgcctcattcactcgaggagatcactcgaccgcggtgctagccgcagcagaaggagagaggtcgagtatcctcagagcggtgctggccgccacattgctgatgaggtcgagtacccacctactggagctgatatagaacaaggtggttcatctatggcctgggagcaatcacatgcagccattgacgagcaactacgttcattcttcgactga

SEQ ID NO: 173034 - DNA, 509 bp, Arabidopsis thaliana landsberg
gtctgggacccggccagccacttttctacgtcgaggatgagcaggtggattttcagaagttgattaatgcgccgttgccgagagtgccgaggtagatcagttttactggtacctactcctcttcttgcctggtgtgctgcttggtatgggttgcgtatggctaacctacggtcctgctatttagcacactggctcgcagtcgaaggcgtacaaccgtctataccgcaaaacccgacggccgcagattcgcgtaatcttgaactaatgtccaagggcccgaacgccaacgctacgctgtcggctatgagcgggaatggaaacgtcgcggttaagccgctggtcaagcatgtcctgtctaaggagcaacagctctactttgagaaagtcggcaatgcattcctggacgagtcgagcgacaagtatcgcacatcgcggtccccgagcttgcgcgaagatccaggttaacaacagcttgtcccctatttcgtccaatttatatcggaaaaggt

SEQ ID NO: 173035 - DNA, 387 bp, Arabidopsis thaliana landsberg
acatctccgacagcggaaagtatgccaatattgctgaaactgtccaagtgaatgttgccaacttgtgccgttgccaagcccgctgcgaaagccagtgaaccagagtcaagtttggcatttggggaagaaactgtcacggaacccgacgtacccacctcgctcgcaccgccagtgaagattgcgtcgcctcatgcactgtgtgtagagcgtccaccctggatgtatacagggccggcgtttgcattggctgagttaccaccggacactgagactacgccaccgacgcccctctgtgagttgcctccttgaaagtcaatggcaaagccattaaaaatgccagagctagcaccaacttcgatatccagtgaacctcccgcgcctacaata

SEQ ID NO: 173036 - DNA, 1718 bp, Arabidopsis thaliana landsberg
atgagtggttttctgcgaaaggctgttcaggaccttgattttggaattgatgatgacccaattgcgctttcaccggatttcgattcacaagcggctgttgttatccttttctcattgatcgttacaacagtgaatccaaggaagcagaatttgagggctctaatcggacagatgccaagagtttgggggttttgcagactcttgtgttggtcggattattggtcctgggaaagttcaatttaacttccattctaaggaatccatgaatctggttttgcgaaggggtccatggtccttcaatgactggatgttgtctgttcatcgctggtatccaaacatcactgaaaacgagatgaagataattcctttttgggtacaaatccaaggtattcatcttctctacttgactaatgcaatggctagggctgtagggaatcgactgggatatgttttggatgttgattttgatgagaacagcaattagatgggtttcttaagggttagattgggttggaattttgataacccacttcgcttccaaaggaactttcagttcaatgcaaatgagaacaccatcatcaaatacagatttgagaggttaaggaatttttgcactaagtgtggatctcttaagcatgacgtgaaagagtgtgagttaacttttgagaatgacaacgctgctaatgaagagggagatcatgatggggacaatcaggacaatgatcaccatgatgaacaagagatgtctgatgagaattgattgccaagcgctgacatggctagtttgatctcgggattacagaggcaatctacacccgtttacaacaaaggatcatcttcagattctgtgccttttgatttggcgagtgtctttgaagacacagagttgacaacagagtgtctcaggtaccttcacgcgaaacacctgcgggagcctctactgcaacaaaaagaaacaagtctacttgtagaggtgtctgacaatgcaacacatgagtttgcttttgtcaaaaggaagagggtcagtttcgagactctgtacaatcaggcataggctgcagaagaatcagcggttctaggacatttacgcaagaaggacaagaaggttggctttgctacatctggttctttcccaattttgacggacggaggcgcggggggcctggtacccccacagcctccatgagagtcggctcctggaactatcagggccttggtgcaccgttgactcaatctcaccttaataagctatgtaaattattgaagtttgatgttttattcctcattgaaacgctaaacaagagtgatttgattagtagtatagctagtgtattaggatttcataatgtaataactcagccccctcaaggtcatagtggtggcttggccttgttgtggaaagataatgtcagtttatccaagatttctcaggatgaacgacttattgatgtatctctctctatcaataataccaaattatatttatcttgtgtggatggtcacccttgttaaagtgaaagacatcatctatggactcactttgaaaatctatcaataacacgcaatgacgcatggattttaataggtgattttaatgagatattatcaattctgaaaaaataggaggacaccaagggagactggactttcagagatatccggaaaatgatagctacttgtgatttggaggatacagatcaaagggagacagattcagt

SEQ ID NO: 173037 - DNA, 297 bp, Arabidopsis thaliana landsberg
cacagaatggggggcgtgaagagaaagatttctatagagctgatagagaagaaagattcaagagctgttgctttctcaaaacgcagtaggggtctatatagcaaagcctctgatctttgtcttctctccgatgcacaaattgcgatcatagccactccggtctcttccaaatcaaacgtttctttctacacctttggccattcctctgttgataacgttgtagccgctttcctcacgaatcagcgtcctcgggaaggtctaaagttagactattggtgggaagatgagaggctttca

SEQ ID NO: 173038 - DNA, 437 bp, Arabidopsis thaliana landsberg
tgtggtggccgaggccgccaaggtcatcgagaacactcagcgtgacgccaacattgcgctgatcaacgtatttgccctgattttccaccgcctgggcatcgacaccacggatgtgctggaagcggccggcaccaagtggaacttcttgccattccgcccggggctcgtcggtgggcattgcatcggcgtggatccgtactacctgattcagaaggcgcagtccgtgggttactacccggacatcctgcttgcctgtcgtcgtatcaacgacgccatgggccagcacgtggccagcgaagtggtgaagttgatgattggcaaaggacatgccatcaagaacagccgcgtgctggtgctgggccttaccttcaaggaaaactgcccggacctgcgtaacacccgtgtggtggatcttgtggccgaattcgaaagctttg

SEQ ID NO: 173039 - DNA, 220 bp, Arabidopsis thaliana landsberg
ctaagcgaggaaggaagagaaaagccgatccaaatgtttcacagagacctggagcgtctaaacccactactgtgaaaagaaaccctttacctagtgaatacaacttcacacccgcgggcgagattcctcctgctcagtcttcccaagggcgagtccgagttcaaccccaacaagcaaggtcagcagctccacgagtgtccgactatccgcctcctcgagt

SEQ ID NO: 173040 - DNA, 1910 bp, Arabidopsis thaliana landsberg
tttatgaaaactggagtcatcatttcggtgcggaagactgggtatcgtatgttggaggagaaggcgatgagggatactattatcccaatatgtaaggagcgcctgattgggatgtttctggaactacactggaatactccttaccaaggtctgtgcactatagcacatctgaagggtcacactcaggaacaagaccacatgttcctgtgtatcaacccactacacacccaaatccgtcgctgccaagagaagttaatgaaggaaatgggaaaagtcataatgttcaaagtgtgctggagactcaacatacgttgggaatgattgagaccttgttgactcaaatgattcaacaacatcaacatcaacaatagatgcaggaaagccagcgtgctgaatctccttcggctaagttcttaaagttggttatgatgaagaaggatctgaagtttaaaggagagcaaaatattgttttagcggataagtggttaaggagcctggaaatgaattttaaaacttcaaggtgcccggaagactttaagggccacatagtggtacactttttagatgagtatggtcgagtttggtgggatagtgttgtttcacgatatcacgaccagcctatcacatgggaaatgtttaagcaagagtttgagtctaagtattttccaccagagagtgttcgggcgtatgagcaaatttttacaagacttcagagatatatgtacaatggaaggaatgctgaagcaatgatggtacgaaggtttctaataggactaaggcctaaaatttaaggacttcttcaggctgtgacttataccaacgtgagtgaattgaccaaaagggtcgtgaatgttgaacaagggattgagttagaaaagggagagaagttacgggagaaaagtccgaaggcaagaaggggaataatctagaatatcagcctggtgttttgaggactaatcagtcaggaggacgaaaccagaataatgatcgtggaaagcctaaggttggtaaccaaggaggacgtgtaatgaccacttacgatccgagagcctgctatatgtgcggaaagcctggacattttgcaagagattgctcaacggtttgtacagactaaagttacaaatatggcatttgttacttgttacacttgtggggagtcgggacatgtgtcaaatgcatgctcgaataagcatgggggactacagggtaaccgagtgggagcttgtttcatttgtagagacctagggcattatgctaacgcatgcccgaacaggcaaataaagcagtataaccaaatggttaaccacccaccgccagttcagaaagctaagggaccaccggtaaagaagcaagccactctagcaaatgtttatgccttagatgtagaacctaccaaaccttcatgacccgcaaaaggtcccgtaacaggttagtatgggttcttactttttcttgtttatgtgtgtttgagtaattgattgttgtctgcgtagtttactagtttaaatttgcatacatcatttccatatgcattagggacattaattgttggttgtaaccccacgcatgtattgtttgattcgggagcgacaaatagttttgttagttctgacgtggccgataagtttaaccacgggtatgagaaaagagaggtgaatgttttggtacataccgcgggaaatcagccacccatgcagacctgaattgtgttaatagaagttctagtagtaatccaggatacgatcctactggcaaaccttctggtaatgccgatggaaaggttcaaagtcatccttgggatggattggttattgggatatcatgccaatttggattgcgggcggagtagagtagtgttcgaattgagaaattgaccacaactcacttaatgggaatcaatccaagtatgc

SEQ ID NO: 173041 - DNA, 931 bp, Arabidopsis thaliana landsberg
tgctcaaaaccgcgcacgaaggagatgagctcaccaagatcaccaagcgggaaacaatcgagggggagctcggtcggtttcggcttcgcaaaggggaggagccacaacacatgtacaaccggctcaagaccttggtgaaccaagtgcgcaacctcgggatcataaaatgggatgaccatgaaatggttaaggttatactaagatctcttattttccttaaccctactcaagttcaattaattcgtggtaatcctagatatactaaaatgacccccgaggaagtaatcgggcattttgtaagtattgagtgcatgatcgaaggctcaaggaagatcaacgagcttgatgatccatctacatccgaagctcaacccgtcacattcaaagcgacggaagaaaagaaggaggagtctacaccaaatcgacaaccaatagacgcctccaagcttgacaatgaggaaatggcgctagtcatcaagagcttctgccaaatcctcaaacagaggagggggaaagactacaagtcccgctccaagaaggtttgctacaaatgtggtaagcccggtcattttattgctaaatgtcctatatcaagtgacagtgactgaggcgacgacaagaaggggagaagaaaggagaagaagaggtactacaagaagaagggcgcgatgcccatgtttttcgggagtgggactccgacgaaagctctagcgactcctccgacgacgaggacgccgccaacatcgccgtcaccaaaggactcctcttccccaacgtcggccacaagtgcctcatggcaaaggacggcaaaaagaagaaggttaaatctaaatcctccactagatatgagtcctctagtgatgataatgctagtgatgaggaagataatttgcgtaccctttttgccaaccttgtaactccgctcttgcaa

SEQ ID NO: 173042 - DNA, 344 bp, Arabidopsis thaliana landsberg
gagtttgtactagtgcttatgttcagcacaggcctttctttccaggtatgtggcaatatgatattatacatgttcctaaacgttgctttagccatcttcacctggaattttggctgcttcttgttggtttccaggttccagtcattcagttactcctgggacaagtaggggttgtgtcgggagatcaaatgctatcaatttggagatatgtggtggtaggtgcggtggttgcagcagctgttgtcacaccctcgacagaccctgtcactcaaatgctcctagcaacaccgcttctggggctctacttgggtggtgcatggatggtcaagctcacgggtcggtga

SEQ ID NO: 173043 - DNA, 851 bp, Arabidopsis thaliana landsberg
ctctcatcttaggtctgatgttacccatattgactattttctgacagtgcctttttggtgatttgtaaattgtaatgtaggatttaaaaacgaggagaacacaaacaaatccgtacagtgcttaaatgaaatggttaccaatgcgttgatgcatattgaagattgcctgaaatacatggtttccttgcgtgatccttccatatttcggttctgtgccatccctcaggttagagaacgaaatatcacataattgttaagtctttaaacttcacattgagaactgtttatattgttttcctcttcatatggaattaggtattctcctctttaactacgtctgcactaatatagaatgccttagaagttaatattgctttgcctgggtgtattttcttgattagatcatggcgattggaacacttgcattatgctataacaatgaacaagtattcagaggcgttgtgaaactgaggcgaggtaagatgttaagccttagaaattatgtaggccaatccctaagttctatttatgagaaaggaaaacccgttatcttttattatcaacgagcttgagaacgtgtagtagctagccttattatctgaaggctaatatcgctgatcaactatctattgtttaggtcttactgctaaagtcattgatcgtacaaagacaatggctgatgtctatggtgctttctatgatttttcctgcatgctgaagacaaaggtagtcatcagttccatgtttgtgattagtttttcactcagtttctgtttaaagaaaagaatcatatgtgaattttcaatcgacatatatgacataggttgacaagaacgatccaaatgccagta

SEQ ID NO: 173044 - DNA, 453 bp, Arabidopsis thaliana landsberg
agatatgtttatagacgttccaaaaggagatgcaatcttcatgagggtaagttatatacatatacatacgttatacatatacatacgtatcttgaatggaaaattttatgattactataatttacaaactaaaattgtttacgtagcggatattacgtgactggaacgacaaagattgtgtaaagatattaacaaattgttggaagagtcttccggaaaagggaaaagttataatagttgacatggttgcaccatcagaaccaaagagtgacgacattttctctaaggttgtttggtacggacatgttgatgttaacacaatgttcgggtggtaaagtgaggtcttttgctcagtttgaagctttagcctctgcttcaggttttcataaatgtgaagtaagtggtcttgcttatacatattctgttatcgaattccacaaatagatttggaat

SEQ ID NO: 173045 - DNA, 1194 bp, Arabidopsis thaliana landsberg
tactcgttgtgtgttgagctcgctttgtgtgatgaccttggttttatgtattgattggtttcttgttgttagggttaatgaagcaaaaatgatagaataaattgcaaatgatgttttgcttaaactgaatttaactccatccaaggatgttgaggattttgttggtattgaagatcatataacaaagatgagttcattgctgcacttggaatctgaggaagtgaggatggtcgggatatggggtccctcgggaattggcaaaactaccattgcaagagctctatttagtcgactctcttgtcagtttcaaagtagtgttttcattgacaaggttttcatatctaagagtatggaagtttacagtggagctaatcttgttgactataacatgaagttgcacttgcaaagagcctttctagctgaaatttttgacaaaaaggacataaagatacatgtaggtgcaatggaaaagatggtaaagcaccggaaagctctcatcgttattgatgatttagatgatcaagatgtgctagatgctttagcgggtcaaactcaatggtttggaagtgggagtagaatcattgtggttacagaaaataagcattttttaagggccaatcggattgatcacatttacaaggtctgtctcccatctaatgcgctggctcttgagatgttttgtcgttctgcttttaagaagaattctcctcctgatgactttttggagctttcttctgaagttgcattgcgtgctggtaatcttcctttgggcctgaacgtattgggttcaaatttacggggcataaacaaaggttactggatagatatgctaccgaggcttcaaggtttggatggaaaaatagggaaaacactaagagtcagctctgatgggttgaataacagaaaagatgaagcaatatttcgtcacattgcatgtattttcaatggtgagaaagtcagtgacatctacctattactagcaaatagtaccttggatgttaatatcgggctaaaaaaccttgttgatagatccctaatctgtgaaagattcaaatctgtgaagatgccctctttcctacaagtattgggtaagaagattgcccgtgttcagtccaatcagcttggagaacgggagttccttgtgtatttgggggatatttgcgatgtatcttgtacacaacactgtaagttttt

SEQ ID NO: 173046 - DNA, 923 bp, Arabidopsis thaliana landsberg; identical to SEQ ID NO: 20556

SEQ ID NO: 173047 - DNA, 516 bp, Arabidopsis thaliana landsberg
aagaaggggagtattcgattgaaatgatccgcgctcgttatattgccagcgcttggagcatttgcgtaacttgggttttaaccgcctgagcttttggcgtgcaggactttaacaccgtttgtgcaacaggccgtgcattgtgtgcaatctttccaccaggtggaaaccctcatgctgttggcgcgcccccatgggttcccactccatgaatgccgacctattttgcggtttgcctaggcctagcgcccgcgactttccgtgaaaccatcacgcagatttatttcgttgcgcccgatccgcattggctttgtacggactatgcgctcctgccattaccgcttcaaactcgcagcgccgtattttgcagaatgacctgcccagtacggtcgataaaattcagcctgttgtccgagtcgatccagcccctgatgcaggccggttatgtgtatatcggcataaaccgcttcgctttgccggatgatgcgctggctatcgccgcccagcagggctggctac

SEQ ID NO: 173048 - DNA, 601 bp, Arabidopsis thaliana landsberg
attagctttgctattgtcgatcagcaaatcatagcaacctggtagtatccctggaagcagttaaatgggttataggtatttaagggaggctcaagacctgaacttggtcttaccaaaagaaaaagacttccctgtaacaggatactgtgattctaattatgcagcagacctagacagaaggagatccataagtggatatgttttcactattggtggcaatacagtgagctggaaggcgagtctgcagccggtggtagctatgtctactacagaagcagagtacattacactagcggaagctgctaaagaagcaatgtggattaaaggactgttacaagacatgggaatgcagcaggataaggtaaaaatctggtgtgattcacagtctgcaatttgtttgtctaagaacagtgtttatcacgaacggactaagcacatagatgtgaggttcaattacatcagagatgttgtagagtctggtgatgtggatgtgttgaagattcacacgtcgagaaatcctgtagatgcactaaccaagtgcattcctgtaaaaaagttcaagtcagctttaggtgttctgaagctgatgaagtgggactga

SEQ ID NO: 173049 - DNA, 505 bp, Arabidopsis thaliana landsberg
tgtggttgatccatgggcagcgatcgtatgtggcttcgtggcttccctcgtccttatcggatgcaacaagctcgcagagctcttaaaatatgacgatccacttgaggccgcacaactacacggagggtgtggtgcttggggtttgatatttgtaggactgtttgcaaaagagaagtatataaatgaagtttacggcgcgagcccaggaaggcactacgggctatttatgggcggaggagggaagctattgggagcacaactggttcaaataattgtgattgttggatgggttagtgccacaatgggaacactcttcttcatcctcgaaaagctcaatttgcttaggatctcggagcagcatgaaatgcgaggaatggatttagcaggtcatggtggttttgcttatatctaccatgataatgatgatgattccattggagtgcctggatctccagtacctcgtgcgcctaaccctccagccgtttgattttcaagctgttttgaa

SEQ ID NO: 173050 - DNA, 1158 bp, Arabidopsis thaliana landsberg
atgttgcttttgaaacaaagctcagctgctgttcttgtcgttggaaatacaactccagtccttcacacttctcgctccacctacagagttggaccttttccagtgaccagaacgcagtcgttccagagtttgactatggcaaatttgcagaagcttcccacttcttcgtctgggaaattgaatacggcttcagctgtgccctgtagctctcacgatgcttctcctatcaggtacctatgtcccctgtattgagtataatggtgtcaaccattcttcttaagtattttctcgattcttattattttcttggctattgtggcgtgttaaaagataaacgagattggatcaattaagctgaaagttgaaagtcgttgtatttaaaccacatatcaattaagcctgcatatattaatctgtgaaaatgaagaaaaatttctcttttcttgtaagtttcatggacatgagaagttgcatagctgttgtggataagattgcatcacaccaattgcaatgacgaataaaatatagaaactagctgtgcttccctgctcgtttctctgttactagacacaaagatttgaaaatagtaagactggggaaggaatttctaatgttatttatctttcctctttgcaagtgagaatcgcgagaataaacatgtccatggagtttctgagaaaattgtgggagttcttgggggtggacaattgggtcgtatgctttgccaagctgcttctcagttggctatcaaagtgatgattttagatccttctaaaaattgttcagcaagtgcattgtcctacggtcacatggttgatagctttgacgacagtgctacagtagaagaatttgcaaaaaggtctcttcttttgtttgtttcttgaatgcttcaggttctcaattcttattttcattacaatattaatggttatttttgtttattgtcgtagttagatgtggagtcttaactgtagaaattgaacatgttgacgtggacacactagagaagcttgagaaacaaggagtggattgccaacccaaagcttctactattaggataatacaggtttcataacctctcaaatatttcatcaaatggagttatgtatagtcaaagtttttcagcaattttatttatatgtggcagtttgatgttcc

SEQ ID NO: 173051 - DNA, 546 bp, Arabidopsis thaliana landsberg
ccaaatgatggagaaagacgaagatatcgacaagaaattagatatgtaagtagcaaagtctcctctttagagtatatctatgctcttttccccatataagaattcttctacttcgtgcagaggctacgacgcagaggaatcatcacttaatatgatactcaaggtttttcaaaactttaaaatccccaaagaaaaaaacaaaacaaagcgtgaatctattttgatcgatcttgttttagttttcaagaatgtgatttttttgcagtctctgtggcaaattagcgttttcgcaagacagaacatagtacggcaaagcttcacaggctcatttcttaaacgttcttatggtatgatcatcactgctgattcactccgagaaaccaaggcaagtcattttttttttgtctctaaatcttttaagcgaacaagtctttcatgaaagtgaggctagaaacgtatttggttatcgcagggattattcgagaatcttacattcgaaaagatcgttcaaatcatcaggataagcttaaagatgccctgtataag

SEQ ID NO: 173052 - DNA, 1421 bp, Arabidopsis thaliana landsberg; identical to SEQ ID NO: 21874
  unsure (1)..(1421): unsure at all n locations

SEQ ID NO: 173053 - DNA, 1048 bp, Arabidopsis thaliana landsberg
ttattatctgtttttgggctaaaataaaagaaaatggcaatcacggtgggatttataagttgacttttgacttagaatgagacaaagatagtgttgtgcacatctcttaaattgtgtaaaatggtctactactatactttactaactttacccttaaaacattgaattatgttgttaattattaaattaggattagcttaatatgcggatttaagataagaaaaatattaattgatttttttctttacaaaaatttaatttgtatatttatgataattacattacacctattttagataatatcacacttcggttaggcaacgtgtgggaattagaaaaggacaatatacagtattcgtagatcgagggtattattattaacaaacaaaccttttaaaatgtgtaaattatatgcatagaagtcttacattcggagatcccaaaaagaaatgggagaattttcaatgcggcattggaagtcactttccattcgataatgcagtttgcatcaacggggcaatctattacaaagcaacagaaaaggatccggacggtagttgtgttttggtgagttttcgatgttaggtctgagatatttaatcaatgtccagactcccaataacataacgattagccatagaggttccactcttataaactaccaagggaagttagcatggatatttcgcaataacatgatcaacgaggatgcggatatgtgggttatggaggatgccgagaaacaagattggtccaaggttactttttctggcatgcttcaaggtttaattggtccgatcacatttgcggatgtcactcatcctggtggctggtgatgaattcgttatactccatcattggagtaagtatgcaacacacgtttactattactaccaaaacgaaatagacgtagaagagttcaaattcaaactagaacgtcgtcagcaagaatatcggctgtcacggatcatgttgagaatatcatgtgtttataattcgttgcattaggttgagagttttcaaatataacttatatggtactaacttt

SEQ ID NO: 173054 - DNA, 528 bp, Arabidopsis thaliana landsberg
gattctgatcctattcatcaactgggtgctgtttctgtataggtttgtcttgctgaattgaagccgcgagcatcagacggagatgtcgattgattcagacgtggatccgtcagaggtttccacggctaaaagaaaaccatcacggagttggctcctcatagacgctgcagggaatagtacaatgctcaatgtagacagttacgcgatcatacgccgtgtccatatctacgctcgtgacctcagggtcttcgagtcaagcatttcttcccctttaagcattcgaacccgagagggagccattgtgctgaacttagaggttgcctatttttgtttctgagttttttctttatacgttattgggttttttcaaacgtgttaatcatttttggtattgcgctgtggtccgatgaagcatattaaggtgatcatcactgccgacgaggtcagcttactttctactcgctgccttccatttttactagactactttgtagtaggtaggttcgactttgattatatattcgcatg

SEQ ID NO: 173055 - DNA, 1468 bp, Arabidopsis thaliana landsberg
atgagttcggtagaaccagacatggaagatctgttccaggagaagaagcgtgtcaggaatcctctcgttcctctcggtttgtgtcttctccatttcctatttcttctgatctcatttcacgaattttcttttggactttcagatgtttataggcttctctttaccaaattggtgattttagtttctgggtttttatctacccgatccctaaacacagttacttgttccgtttgaatcatgagattcagaaatgattgtgaaaatatgtaattgaaattcaatttgtggattttttttgtttgtttgttacaactctgtgtcggtatgtatgattttgtctttacagaatctcaattctcaagaatcatggtagatgtcagagctatatagagagtaccttcagattgtagaaactccattcattatagatgtaggtgattgtttgtggagttgaaaacacatttgaaaattagtgagaacaaacctcgaattagtctttatgttctcttgctggttcttatctatggaggttgtttcattggcaaattgtatgagaatgtgtaactttggacctcagcgagcaaatccatgactatatgtatctataaacattgtcagagacaaaactgtttcattgtgtcaatcactgacaaaatgcatggcttcccctgtaatgagattttgaactattgaggattgtttaagttttgttttgttgatgttctctgaatagactccaatattctcttggtcaatactgttagacatttcaaaaattgataatttctttcaatattgcaggtgcacttatgaccgcgggcgtgctcacggctgggttgattagtttcagaagaggcaattctcagttgggtcaggttttgatgagagctagggtggtcgtccagggtgctactgtcgctttaatggttggaaccggttattactacggtgataatccgtggaagaagtgagctccaactacttgttcgttttcacataattgagatgacactcgggaaatctgcgggcaaaggtgtgtgtgctctcgctctgagtgtagaaatatgcggtcttgctaggatttagtaagggtacattacatgatttgaataatttgaagaacgaacaagtatcgttgtatcttgatcaattgattatattgatttaaggaaattctccgaaaaccatctttactctatctgtcaaaatctcattatctttctgccgacaatctctgtgttgtttatttacttacacttatgtttgagttttgacttcttgaaagatcctttgagaaacatgggacaatgcattatcacatagactctattatcaaaatatataatggcaaataagtgggagtgaagagactatgtattagaaggcaagctatgtttaatgatttcagaacatcttagtggaagacaatggtgggcctaatagtttcctaatcatattcttgcgtttt

SEQ ID NO: 173056 - DNA, 430 bp, Arabidopsis thaliana landsberg
acatcggaaagatttcaagaacgcaaagtagtgagatcaagagagaaaaaaggggagttacaatggttgatgagaaagtgattgttgatgaagttgagacaagagacgcttatagagttgcgtacgtgatccatttcttgttgggtgctggtagtttaataccatggaacgctttgatcactgccgttgattactttggctacttgtacccggacaagcatgtagagaagactttcactgtggcttacatgagctgttcggttcttgttttggttttgatgatgacttggaacacaaggatgagctacagagtgaggatgaacttggggttttccatgttcatcatcgccatgatgatttctccccttatagattgggtctggaaaggtgaaaagggtgagaatgttttttacatgttgatggttggatc

SEQ ID NO: 173057 - DNA, 633 bp, Arabidopsis thaliana landsberg
atgcatccgattaatgcggtggttgcggcgaggatgttagccggaatcagtcaatctaacgccttacaaagcgaggcgattccgtttggatcgcttgagtggatcacttacgccggaatctcttgtttcctcgtactcttcgccggaataatgtcgggtctcacactcggactaatgtcccttggtctcgttgagctcgagattctccaacagagtggttcctccgccgagaaaaaacaggccggtacgcctctttaatttttttcgactttcgatatctgtgtgttgttggctcaaaattacatacctgacttgttcaattcgtaatggctatagaatttcttaaaacttgatttctaatttcttattctgtaatttttgttaaaagcagagtgatagagtctctatttttactcttgacggagatacttgaattgtttttggatattgcagctgcaatcttaccagtggtaaagaagcagcatcaacttcttgtgactctacttctttgcaatgcagctgctatggaggttaattattgttgatttgttaccctagtttttctgatttacaacgatcaaatactgtctttgtgcacctcagaaataaagaattctgttcttggatcttttg

SEQ ID NO: 173058 - DNA, 396 bp, Arabidopsis thaliana landsberg
gtggctccaaagaagaaagggaggatatatggggcatgttcattgcagctagaagcctcatcagctcacataggtccttctgttcctcgagaagatccggttgaacactttcaaaagatgcctgccgctgaagctctgattgcaaaccaagcggagaagctcagtaactttgatgtgtacttcgactaccttgccgataaagatccagatttcgctggcctctttcgagcgggatcctctaggactgaacctctcagctccaacctgagacctgaggtgccaaatgctacaactggtacatctgctgagatcgcacatgtggctgtcgaagctgaaactgttgcagctgaagcagttggggcaaacactggatactctccatctcacattttctaa

SEQ ID NO: 173059 - DNA, 572 bp, Arabidopsis thaliana landsberg
ggagtggaaggccgggcacctcttaggggtaaaaaatggccatcgggttttgccgaaaaattactggctggcactccaacagacaagtattaaaacgctcttaagtcgacaaacttattatgtttttccaaatatgagcccagatgcgaccgaaccaatattttgccaaaataaagagcgaacgaagtggaaatgctaaggcgaccgacgacgatcgcgatggtaaaataaatgaagatggcgcagaagacctcgacggaaatggtaagattacctggatgcgtattttagatccgacaggtacttaccgcttaaaccccgacgatccgcgttcgcttttgctggctgatgcggctaagggcgaaaccggcaagtatattttgctgcccgaaggaattgataacgataaagacggcgaatttaacgaagatggcgaaggcgggatcgattttaataaaaattcaagctataattataaaccttttgctgccggtgcaggcgaatatgcggtgtcggagaaagaaaaccgggccctgttcgatttccttttcgatgcttttaatgtttatgca

SEQ ID NO: 173060 - DNA, 1981 bp, Arabidopsis thaliana landsberg
  unsure (1)..(1981): unsure at all n locations
gtcggtttaatcaaaggaaatctgcgnagcaagctgctctaccaatcttggtctaagaggtttagaagtgatcgatgatgctaaagcccggcttgagncggtgtgtccaggagttgtgtcatgtgcagatatacttgcacgtgctgctcgtgactctgttgacttggtacgcaagattactaaacctagttagggtacttaattcctttgctagtgttaaaattactgatatcagctgagctatgtatatgtatgtatgaaaacaagagtgatgggccaagctggcgagtaccaacgggtcgtaaagacgggagaatctcgttggcaactgaagcatcgaatctaccttctccacttgactctgttgctgttcaaaagcaaaagtttcaagataaaggattggatactcatgatctagttactctactaggtatatctatctatctcttttataataggaaattggagaacttttaaggaagattattttctactttattgttgagtttgtttattttttagggaaatttgggtgtataaccataaaaaatttaataatttaataagtaaccattcaaaaagttggatatgatattcagcatatattgtgtagtatatacacatttgcccttgtttatacacgtgcttctctcctctctccaacatgatgcatatatcatcatctctttcttctccaacagtttttttttaaagcaaaattcttttgtaactcttttcacaacagtcattttctctctttgtcatcgccaaaacaatttcatctacgacaatggagatatagcaaaggaggatctcacatcagcctcacacaaaaagttttcaatttcgatgacgatgagtaaatgtttacaaaagtgaattttaaaaacatggattagctaattagtttttaaaattgcttataataaataggactataaatctcacaggaaattctagtgagattaagtcaaacaaatcattttttattttaggaaaattttgcaagatactattctattttgtaaataaaaaataattttctattcatttatttattttaaccaatctgttacctaataaaaacatatttaattataaaatttaatatacaattaaaatgaaaggatatatctatttgggtttacaaaaaaaatattagggttttagattttatgattaaacaatgttaaatattggtttgagtttataaacaagtttaaattttacaactaaacgaagtcaaatgtcggtttgggtttagaaagtacaattagggtttagattttataattaaacgagtaaaaatgttggtttgggtttacaaacgagaattagggtttaaattttgtaattaaacaagattatatatcggtttggatttatacaagaattgttaaagttttgattttataattaaataattttaagtatttattagttgaaatattttgattggctagaataaagaatggtgaatataagaacccaaatattgttctttgtgaatatactgtttacgtttatgttatactaggtgcgttaaaactgaattgtttgttttgattgatattcattgtcatgatagagtgtttttattggccaaaccacaatgtttgaaattgaaatactatttgatattgcatctatgctttcttgtctatactatttcagtttttagaacaccaattttttttacttacaactatttttctattttgtaaatattggttcattttaaaaaattcaaaccacgacataatcagaaaaaaatctaatgtttttttaatatagctagaagtctaaatcagtttattttagagagatttttaacaagaaaatgtaatggggtgtgcaaaataatattatccaaaaacataaaattaatcttttctcttgtatgttcaccacgtcagctcgtccaaagccttgcaaatgaggagtttgtcgacatttcatgtcatctacatgttacttactt

SEQ ID NO: 173061 - DNA, 524 bp, Arabidopsis thaliana landsberg
ccagcccgtttcgtcccagcccccagtcgccgactgctatgacctcgtcgtgatcggcggcggcatcaatggcgtgggcatctctgccgacgcccgccgggcgtggcctcaaggtatttctctgcgaaaaggacgacctggcccggcacacctcgtcggccagcagcaaactgatccacggcggcctgcgctacctggagcactacgagttccgcctggtgcgtgaagcgctgcccgagcgcgaagtgctgctggccaaggccccgcatatcgtcaaaccaatgcgcttcgtgctgccgcaccgcccgcacctgcgcccggcctggatgatccgcgccggcctgttcctgtatgaccacctgggcaagcgcaagcgcctgggcgcctcgcgcagcatgcgcttcggcccgggctacccgctcaagccggcgatcacccgcggcttcgagtacgccgactgtgccgtggaaaacgctaacctggtagtgctcaacgccatggctgcccgcgaacatggcgcgcag

SEQ ID NO: 173062 - DNA, 494 bp, Arabidopsis thaliana landsberg
aactcaaataaaagaatgggaaggccacatgttgtggtcataccttaccctgcacaaggtcatgttcttcctctaataagtttctcacgttaccttacgaaacaaggaatccaaattacattcataaacaccgagtttaaccatacccgcatcatcaatgccttacccagttcacctcatgaagattatgttggggatgggatcaatcttgtttcaatccctgacggtttagaagattcaccagaagagaggaacattccagggaagttgtcggagtctgttttgcgttttatgcctaaaaaagtagaggaattgatcgagaggatgatggcagaaactagcggtggtacgatcattagctgcgttgtggcggatcagagcttgggatgggcaatcgaagttgcagctaagtttgggatcagacgcgccgagttttgtcctgctgcagctgcgtctatggttcttggatttagtattcggaaacttgtcgatga

SEQ ID NO: 173063 - DNA, 659 bp, Arabidopsis thaliana landsberg; identical to SEQ ID NO: 15111

SEQ ID NO: 173064 - DNA, 1384 bp, Arabidopsis thaliana landsberg; identical to SEQ ID NO: 3497

SEQ ID NO: 173065 - DNA, 450 bp, Arabidopsis thaliana landsberg
  unsure (1)..(450): unsure at all n locations
ccctgggcatgtggtattcgggtcggggtcgggtcggatctttcgggttcgtatggtcatatcaacaatttcgggtcgagttcggttcggcttcacttcaggtgcggtaattcaggtattagtcaaaaaaaccataagtaaccaaannnnnnnnnnnnnnnnnnnnnnnnnacccaaactttgtccaaatatacccaaacatacataaaaatatccataaaacccgaaagatctgaaattagaacaagtttttccttaagccaataatataaaacaagaagtaaaccttgttttaagcttgttccataactcaaatcattaaacaagtcacattattagtgcatatatatcctcatatgtatatatagnnnnnnnnnnnnnnnnnnnnnnnnnnnntaacctggatcctgaaccgaaaaatcgggttggggtgggttagggttttaagaa

SEQ ID NO: 173066 - DNA, 660 bp, Arabidopsis thaliana landsberg
actggttttctgggagcaaatgattactagtgttcctcaatgtttgttgtcgagtctccaaactttcaagtggttaggtaacggtgattccatagaagggaaagatctggcgacatttattttgagaaactcttgccagttaaagactgcaacaatttcgatcggacaaggacaaaacaagcttgagatagagaaggaggtgaaatgttgtttacgtggttcacccacatgcgacctcaaaattcagttgatgatttaaatcactaggtttgaaagagatatatatcttaaagactgtaacaatcttgcaaatgacatcttaggatttgatctattaaagctttttgtttttttatgaataaatctattaaagcttttgttgcatcagaatatggacaagatcagtgggatttccgatgatgtattgctagtaaagattctatcgtttcgtccaacgaaagttgctgtaagcacaagtgttttgtctaagcaatggaagtatcttcggaagcgggtgctaaaacttgagtacgatgatactgagtgtaaaactaaactgtctaaatcatcacataagaggttccggtgtttcgttaaaagattttgcaaatagatagagagtccaacttagaaagcttgtctctcaagtttagtactgca

SEQ ID NO: 173067 - DNA, 465 bp, Arabidopsis thaliana landsberg
cgccgtcgggccatctcattcatctcaccacacccacgtaagccacgttcgagtggcgctccgcggagttctttttcaatgaaacaaatgaagctcgaggacctgaagcggaaatcgcccgccgagctcgtcaccttcgccgaggagacgggtgtcgagaatgcctcgaccttgcgtaagcaggaattgatgttcgcgacgctgaagcagctggcgacgcaagaaaccgaaattacggcgaccggcgtcgtcgaggttctccaggatggcttcgggtttttgaggtcgccggaggccaactaccttcccggtcctgacgatatttacgtctctccctcgcagatccgccgatttgcgctgcgtacgggggatacggttgagggccagatccgctctcccaaagacggcgaacgctatttcgcgcttctcaaggtctcgaacgtcaatttgaagaacccagaaggc

SEQ ID NO: 173068 - DNA, 859 bp, Arabidopsis thaliana landsberg
tagattcagtagatagaggggactcttccatgcttgagatagacatatcaaatggacatgtggaagagagggctggtgaaacagtaagtactgctgatggtactaccaatgacatttctcctacaactgttgcgagatttagtgatcacaagctagctgcaaccatagaagaacctccagcacttgaattagcttcttctgcttcaggcgaggtgaagattaatcttagttttgctcctgcaactggaggatcaaatccccatttaccttctatggaggaactacgaagagcaatggaggagaagtgtctccgatcatacaaaatactggaccccaacttttctgtgcttggttttatgaacgacatctgtagctgctacctggacctggcaacaaacgggagagattcagctaaccaattgccaaaaaacttgccgtttgtcacaacgaacattgatgcattgaagaaatctgcagcaaggatggcttatacttctcaggccagtaatgatgttgttgaaatctgcagcaacgaacatatgcgtgatgctgaaaacggtgcagttggtgattccatggctttggtagttgttcctgaatgccaactttctgcagatgagtggagattgataagcagcgtcggggacatcagtctagggaaagaaactgttgagattccctgggtgaatgaggtcaacgacaaagttcctccagttttccattacatagcccaaagtcttgtgtatcaagatgctgcagtgaagttttcgcttgggaatatcagggatgaccaaaactgctcctcttgctgtggagattgcttggctccgtcaatggcatgcagatgtgaaactgcttt

SEQ ID NO: 173069 - DNA, 426 bp, Arabidopsis thaliana landsberg
ctacgatagtttttatgatttttttcacttattactgaaggagaataaagtggacttgtacataaatggtcatgatcactgcttgcaacacattggttctcacgggtaaaattataagtacttatttgttgagtttaaaatgtttctttctctattaagttgttatattttgttgaaagaaagaaaacttaacatatattttggaaatggtgaagtaaaacccaatttcttacaagtggaggaggatcaaaggcatggagaggagatgttcagccatgggatccaaaagaactcaaactgtattacgatggacaaggtttcatgtctcttcacatcactcactccaaagctaaattcatctactatgatgtttccggcaatgttcttcaccgatcctcattgtccaaaagatctgctcatctttaa

SEQ ID NO: 173070 - DNA, 695 bp, Arabidopsis thaliana landsberg
attgtggaagcacatgttgaggttgcatgttccactgatgatatccttacatctcttgcatcagtcaaacgcctcttgctatgtttacccacagaggtaagaattatgtttgtgattaaatcaaacttgaagtctttacgcttatttgtatttttttttgtactgcagcctgagttacctactggtaccatcttccaccagcttgaacacttggagttttgttcttgttgcacagaatgggatatacttatgtttatgctcaaacattccccgaaacttcgatctctcaagcttaacgaggtaagtgtgcccttttgaaactatgaaaaactttgcgtgttatcttgactaaatgttctttaatggtctaataatgaactcagacccacggctacactattgtttctcaaagtgatcctatgtttcattgggaggaaccaagctctgttcctgaaactttgatgtttgttcttgagactttggagtggagaaactacagagggttgaagatggaaaacgaactcgcaagttttctcttgaaacattcaagacgtctgaagattgcaaccttttcgccagcagtctgcaaacaagtgagaatcgaattacgtacgacagttggaatgaaatatcgtatactcatggagttggcgcgtttgccaaggggttctgcaaagtgtgaggcttgtgtcttg

SEQ ID NO: 173071 - DNA, 726 bp, Arabidopsis thaliana landsberg; identical to SEQ ID NO: 777

SEQ ID NO: 173072 - DNA, 1407 bp, Arabidopsis thaliana landsberg; identical to SEQ ID NO: 20771

SEQ ID NO: 173073 - DNA, 510 bp, Arabidopsis thaliana landsberg; identical to SEQ ID NO: 9003

SEQ ID NO: 173074 - DNA, 731 bp, Arabidopsis thaliana landsberg
tgagagctcctcctgaattcagattaggctccgccacctatcgttcagggatccttggttgttggctccttctcaatcggcgtgtcagtgggttctcctgatgtgtttgggacccgttcaatccgggcggccagttaggtcatacgccttgtggaagctgacgaatagcgagcctaaggttgatctcccctgggcttcaaagtttaaagcttctcttcgtaacgattcgtaacgtacaacaaatgaactctcctacttttatgcgaagatggtactccggtggtcattgctcctcccagtgttcttctgaagtctgtggagatgtggaagggccatttggtggcccaattccatggtctttctccctttcctgccaagatcttcaatgatttaaatcctatttggggttgttatggaggtatcacggttagagtgatttcgcagaccgctgctatggcaggcaggaaattgttcttgtacggtttaccattggtcttcggagggacatcgcgaactcaaagagcttcagtctgcccatacttgggcgatcctaaagaatgtgcctcctcaactctatttccttgacggaatcagtgttatcgcaagtggtatcggagagcccctacacacggagaagtccaaattggaccccatcaacattggcaccactaaggttaaagttgtgattaagcttgatactccgctgccagattctgtggtggtgaaagaca

SEQ ID NO: 173075 - DNA, 2183 bp, Arabidopsis thaliana landsberg
ctccgctacgtgctgcgcctccatttcccggcgtcaaacaacatggccaagtacgaggctctaattaacgggttgcgcatcgcgatcgagctaggggttcgacgcctcaacgctcgtggcgattcgtagcttgtcatcgaccaagtcatgaagaactcccactaccgcgacccaaagatggaagcctattgcgacgaggttcggcgcgtggaagacaagttctacgggctcgagctcaaccacgtcgctcgacgatacaacgagaccgcggacgagctggctaagatagcctcgggacggacaacggttcccccgaacgtcttctcccgagacctgcaccaaccctccatcaagaccgacgacacgcccgagcccgagaaggcctcggcccagcccgaggcatcctcggccgccgaggtgaggcactacgtgtcaagggagagcggaatggggtcatgcataatcaaaactagcagaccccgtacctagaatatctccaccgaggagagctacccctcgacaaggccgaagctcggcgactggtgcggcgcgccaagtcattcgtcttactgggtgatgaaaaggagctctaccaccgcagcccctcaggcattctccaacgatgcatatccgtcgccgaaggacaggagctattgcaagagatacactcgggggcttgcggtcaccatgcagcatctcgagccctcgttgggaacgccttccgacaaggtttctactggccgaccgcgtggccgacgccactaggattgtacgctcctgccaagggtgtcaattctacgcaagacagacacacctgcccgctcaggccctgcagacaatacccatcaccaacgtgctccagggtcccccccctatgacacgggggctgggtcccacacgtcatgcaagctggcccagaacagaagaagccaaaccgccgcgcgcggagcgcgtaaccgccccgcggttacaagcactcctccatcctcgccgaaaccagcggttaaaagggcggaccgccatgcaggtggcgtgcaaccgcaccacggggacgcgccccttcgacttcaacgcatccagcaaggaggcccaggcccacacgtcatgtaaccagcgcgccggttactacgtgcgagaaactgcacggccactcgcgccagtaccgcgccttctcgactgcggaaccgatgccgcgactcgaggcgaccctgcgcatgacccaatggtgccaaccgagcacatcggtcatgggtcagtcagccgcgggagaaggcgcgacggtcgatacggccagaaatgggccggcagtaatggcggtggcaggcaagcggaagcagccgtcaagtcatcagccaagctcatgtcccctcttgggacaacgagagaacactctcccacggcgtgaagatggcgcacccgtgttccgttcctcgaacgactcgcgcacgcgcaacggctgccccgcgaaccacttgccccgtcgcattaactccgcggcgggacaggcggcaactttggcaggagaagcgggcgacgcttcgccttcgccataacgaccgcgtcaaaaaaggtgtgccacgtcgtttcgatttcgtatccttttccttttcctctttctctctcttacaacagggaccggaaaaggggataccccgaaagggatccttctccgcgaaggaaacgggccccgagcccccctactaataagaggttcgaaggctgcccctcggagggttcaacggccgcctcagagcgcttgggttctgcgcccactactggtcagaggttcgatggccggcccctcggaagggttccacggccgcctcaggccgctcggctctgcgcccactactgatcaggggttcgtaggttggccctcgaagggttcacattcgcctcagacacagagcgagggatgaccctgggtacgttcgatacataaccaaggctcgggtacgctcccgaggtaccctaggacatttcggagaccagtgggagcgatcttgtaacggaatcccatcagagggaggcatcgagccctcgaaccccgtcaaaggggaccgggtccggcagatcacccgcaggtacttttggagcgcgctccgggcctctagccgacccctagcaaatggggcacgaggtccgctcggattacccgccagcagctcaccggaaacaccatg

SEQ ID NO: 173076 - DNA, 582 bp, Arabidopsis thaliana landsberg
gtgcccggtggctcggtagccattgccaatcggcaaagcgtcgtttacccaaataccagcccggggggctggcatgtcattggcgccatgcctcatcccttgtttgatcctgacaaaacgccgtatacatttcttttgcccggcgaccgcgtgcagtttacggctatttcgcgtcgcgaattcgtccagttgaagcagggcgggctatgagcatgaacgtagtgaaacctggtgcgctgtcgctgtttcaggacaacgcccgttttggtttccagaaacttggtgtgccggtttgaggccccatgtatgactatgcgcaccgcctgaaatattagctggtcggcatccctgttgcgcgaacggttcttgcaatgacgtttatgcgcccgaccttgcagttcactacgccggcatgtatgtcagtgactcggcccggtcttgtcttcagcataacggtcagctttagtgtctcatcgccatacataagtaggcgcataccaaactcattttatgttcaggaaggtaggtaataagcctgtacgcgccgtgcatgacggctttgccctgagcggctcttggcag

SEQ ID NO: 173077 - DNA, 1035 bp, Arabidopsis thaliana landsberg
ggggcctggttcaacttagaatggtccactacattacaaaaaaagagctaacacacctccaagatggggagagtcttactattaaggaggtgagttacctacagaatcaaggtggctacaacaaaggtttcaacaactacaaaccccctcatcctaatctctcttacagaagtaacaatgtgacaaacccagaagatcaagtctaccctcaacagaaccaacagactcaagcttttgtaccctacaaccaaggctacaaccaaaagcagaactttggacctccaggcttcacaccgcaaccacataccacttcagcacaagactcagagatgaagactctacttcaacaacttgtgccaggacaagcctcatgtaccatgaccatggataagaagctagctgagctcaccactaggattgattgctcttataacgacttgaaaatcaagattgatgcacttaacactagagtcaagagcatggagggacacattgcttctacttcagctcctaagcaccctggccaacttcctggcaaagctgttcaaaacccaaaggagtatgcccatgctatctccacagttcatacttctgacactgaggacagtgagattcaagaaggggaggttttgagaccgagatcaagataagagaatgaactagacttctttgctcgacttgtcgaacgagcacatgacccgagcaacccaatccctattccaccgccctatgttcctaaactgccatttccagaaaggattgcgcagattgacgaaaggatcttctagaaacagaagatgatgttcatcaagtgcatcaaagagttagaagagaaggtacccttggttgatactcccaaggaagtgattatggaaagaccccaagaagctcaggaaatagttgaattgagctttgagtgcagtgctatcataaaaaggaaggtgatactaaagaagctagatgatctaggttccttcactctaccttgttccctagggcccttagtgttcaacaagagtctttgtgagtgggagc

SEQ ID NO: 173078 - DNA, 549 bp, Arabidopsis thaliana landsberg
cgttttcggcgttctggaagaagatcagggcaaagcgaccgatctgatcatggcgtggtcgcaggagttgcatacatccgcgcaacgcatgtcgacaatgctggatatcgcactcgccctgctgctggtgatggcgatcggcttcccggtctatgtggcgaccggcgtcttccgtccgctgaaccgcttgtcagccatgatgggcatgttgtcgtcaggcgacaattcactgacggtgcattatgtagagcgtgaggacgagatcgggcagatggcgcgttctatcgatgtattcaaagaaaacgcgatcaagatcgatagcatgagcgaacagcagaaccgtgaactgcaggccgctgaagacaagcgtagcacgatgacccgcattacggcggctttcgaggagtcggtcagggatgtcgtgacgcaactggcccgcgccgcttcacacatgcaggcgggggcgcgcaacgtgacgtccatcgcctctgaaacccgtgaacgctcaaacgcggtcgcggacatctccaacgatgcggcgcaggcgtc

SEQ ID NO: 173079 - DNA, 704 bp, Arabidopsis thaliana landsberg
acatcacaccacgtggcagtaatcggtgctggagcagccggactcgtggctgctcgagagctccgccgtgagggccactctgtcgttgttttcgaacgtgggaaccaaatcggaggcgtgtgggcttacacgcctaatgtcgaacctgacccacttagcattgacccgacccgatccgtaatccattcgagcctctatagttctctccgaacaatcatcccacgagaatgcatgggtttcactgatttcccgttttcgactggacccgaaaacaagtctagagatccgagacgacatccgggtcatatagaggttcttgcatacctgaaagactttgcgaggaagttcaagatggaagagatgattcggttcgagacggaggttgtgagggctgagccggcggcggaaaatccaaaaaagtggagagtcgagtttagaaactccggtgatatctccgacgagatttatgatgccgtagttgtttgtaacggtcactatacagagcctcgtcatgctctaatccctggtaataattaaccaacttactcgtcaaaataaatcaaaaagtttataaatatgaattatagctaatatttctggtggctctgttcaagacaacccctatgcatattttctctgcatgacacactctgtttccgttgaaacttgtaatgcaaactaaaaaaaaagtctttaaaaacaaa

SEQ ID NO: 173080 - DNA, 511 bp, Arabidopsis thaliana landsberg; identical to SEQ ID NO: 2988

SEQ ID NO: 173081 - DNA, 468 bp, Arabidopsis thaliana landsberg; identical to SEQ ID NO: 61505
  unsure (1)..(468): unsure at all n locations

SEQ ID NO: 173082 - DNA, 358 bp, Arabidopsis thaliana landsberg
aagattgggccagtaacgccattcgtgattccgagcatcagtcagaagatggtagaaatctattgacaatgttgtcttttttggtgtgattctatttgtttctaagtttcactctttttggtgtcccgcattgcaggtgaagtaaaagatgctaagaggcttaaaagacacaaagctgagccgcgtaacatagatggtaaaagagcagtgacgatatggtttggtatacttaaaaagactatgcctttatcgagttctttggtgatatctttccttgcttgtcaccaacgcgggagcgccttgttctacccacggatatcgtgagatgggcacgagaaggaaagttaccgtatttgtc

SEQ ID NO: 173083 - DNA, 635 bp, Arabidopsis thaliana landsberg
tggaaggttatgtaacagagatggctggatcttgacggcgatggtggtgacagagttttctaacgtaggagtaaacactctggtcaaagcagcgacgtccaaaggacttagcccatttgtggttctcgtatactcttacacttttggatctcttcttcttcttcctcttacattcttctccttcaggttcttcattctcacgattctgtttcaagttttatgtgaagtattaagtaatttttcttacatagacttatctctacagatcaagatctctccctccgttgacattttcaattctatgcaacatggggattcttggtctaattgcgtaagttacttttattttggaaacactatatctagtagcatttgcaatgcatatatcttcctagctaggtttcaaaaccaattattagttggttcttgaattgcatataagtgtgtattcaaaaaaaattgttttatggaagaaatttcttacttaaatttgttgtatttgtacttcataaaaagaacagaagtgcgtttcaaatcttaggctacaatgggataaaatatagctcgccgactttatcttcggccatgagcaatgtcaatcctgcttttaccttcatcctcgccgttgtttttcg

SEQ ID NO: 173084 - DNA, 260 bp, Arabidopsis thaliana landsberg
atatacatttaatttagtaattgcaaacgttatcatcagttgccttatttgttaaattttcaaactatatcttctacaaacaatatatataaatgactataatgtttgttcatatatgacttcattgttattgatcttgaacacggtgctggcggaattcaagaggcactcaattgcattcacgctgttgatgcggcatgatcatctaccgctctttttgttctggatagttgtcaagcatgggtacatatgcctcgagg

SEQ ID NO: 173085 - DNA, 215 bp, Arabidopsis thaliana landsberg
tgggtttcgttgatgatgttgtgatgcaacaagaaagcattagagaagtttccattcaagacataacaacagaagatgttattcacattgacctacagaacagagagttagaagacatcaccacagacggttccgaagaagaagaacaagaagacaaattcgacgaatctgatgaaaacgttgagcaagaaaatgattataatgattaagaaaat

SEQ ID NO: 173086 - DNA, 656 bp, Arabidopsis thaliana landsberg; identical to SEQ ID NO: 35242
  unsure (1)..(656): unsure at all n locations

SEQ ID NO: 173087 - DNA, 836 bp, Arabidopsis thaliana landsberg; identical to SEQ ID NO: 42645

SEQ ID NO: 173088 - DNA, 343 bp, Arabidopsis thaliana landsberg
agtcgccgtttgagcctccggccgtccacggcgcgagttcctatacgtcgacgatctcgccgacgcctgcctttttgtgatggacaactgcgaaggcgaaggaacgatcaacgtcggttccgacgaagatctcaccattgccgcgctcgccggcgtgatccgcgacgcggtttgccctggcgtcgaaatcacgtttgacgctagcatgcctgacgggacgccgcgcaagttgctcgacgtttcgaaactccgcgccctcggctggcgccaccagacgacgctcgccgccgggctggcctcggcctacgagtggtactgttcccgcctcgcggtcgccgccgcc

SEQ ID NO: 173089 - DNA, 521 bp, Arabidopsis thaliana landsberg; identical to SEQ ID NO: 11433

SEQ ID NO: 173090 - DNA, 377 bp, Arabidopsis thaliana landsberg
tccaaacaaacggaaacagatacgacttctctataggttttgtcactgagaatgttgacgtctacagggttggattcatcatgctaagtcttttgacatgaaagcatcaatactatcaagaaccgggtaatggtgacagttataacctgattatgctgcgtgattatgttgaaaagtgtttaaggcgaggactgttaactaaactgatagacccatcgatgttaaacagtgcggatgacgacatttctgatcattcaaaactgcaaatgaaaacattggttgatcttgttttgagatgtgttagattcagaataggagaaaccaagcttcatatgataggtgttgcaaaagaactcaagcagatagaaaaacagacc

SEQ ID NO: 173091 - DNA, 735 bp, Arabidopsis thaliana landsberg
tgaataggcttgtaatagtggaaagtgtgtctgactcgaggaagaaaatgaaatttgctgagttatattttgaaaggctatatggtagagatagtgtggaggctactcatctttcagattcagtttatgacatcatgactgatttgtatgatgagttcacacgagccaatttagtgaccaaaagtggtagcggttctagtagtggaccaactggtgggtcatctactcagtctcagtctgaaagtggttggagtcagtctcaagattcttttaggagacctgttttgcgtaatggttttttatatgaggatatggaaaacgtatttgtagagactgtgaaggagacatggaatgatacatcacatgaggtggatgtttgaaagagaatgtggagactctggtcattcttaaaggtatataatatgatttgctatcttggtggaaggtctataccggaaaatatcatattctctcactcattgccaaggagatacttgcaatgcaaatggcgtccatagcataagaatctgcattcagcacaagtgatagagttgtgaatccattcagaagatgtctctcgcactacatggttgaattgttgatgtgccttgagcaatggttaaaatgtgaaatccatatcaatgaaagaggtgtctccacaataaagcaaatactttctgagatcactttggaaaatggtcttatgagaagtaagttctgattttgatctttctt

SEQ ID NO: 173092 - DNA, 330 bp, Arabidopsis thaliana landsberg
  unsure (1)..(330): unsure at all n locations
ccagtggtttcaaatgggttggagaccatgctcaagtcaaagttcctatggcaatatatgatcagaaaatcatgttcatgttcttgtcctccgccacagagtaagagccannnnnnnnnnnnnnnnnnnnnnagcaaaccatatatccattcgggtttgcaaaacgtgtcatgtctaatgaaggatccaccctatcgctaccaagtattcatgaagtctgctatcttccgtaactctgacacattggtcactagggcnnnnnnnnnnnnnnnnnnnnnnnataatcagcaagatacactaaaccaacttcagcttctgctggaggcctta

SEQ ID NO: 173093 - DNA, 192 bp, Arabidopsis thaliana landsberg
ccttgttatagagtaaaacgatcaggacatgtaaccaaatgggattgtagtattaccgtcactacatcacgagccgttcatgaaattccggtagtagaattcatccgtaatttcaacaaaactccatatattttggatgatctagagagagcacctttgtggacaatgttattttttggtggtaatcataaa

SEQ ID NO: 173094 - DNA, 740 bp, Arabidopsis thaliana landsberg
  unsure (1)..(740): unsure at all n locations
ccttactctaaaaaatggggacgtcagccccgttctcatgaaatcattaagcgaaatttcatatcgatgtacagatagattatgggataaaatttctttatgttattgttcatcttagtgggcagagttatggcgaacatatctagtagaagaaagggggtacaaaagagggatgcaaaccaagcttggaagaatacacgcaaaatgcttggatttcaattgctgacccaacaatgttaattcactttgactgtgctttctctgaccatgtctcaatccaaatcttgaagtttatcacaacaccgtcaacaaatcctccgtctagttaatgacctcggaacttcgctaataaataacgaatcttcttacttctagtagtgttgagttataaaatcaatttaaataatcaacctactaacttctagttgtgagtgtttgattaggatgaattggcaagagacgttctaaaatccaatgttacatgcatgagaccggactactggagcatcacaggaaaaggcacgtaagtacgtgcagtagatgattagcaacccaagggactaggtgaactacgatacaaaaacggcatgcaactttctannnnnnnnnnnnnnnnnnnnnngaacctggcacgcatgttgcaatgaatgtatcaacatggcgatggtcatggctgtcccgacaaagccaagaccgttgatcatgtccaatccttcctcgttgatccaataccattatat

SEQ ID NO: 173095 - DNA, 583 bp, Arabidopsis thaliana landsberg; identical to SEQ ID NO: 9510

SEQ ID NO: 173096 - DNA, 1439 bp, Arabidopsis thaliana landsberg
atgaaagctattatgaggaagagattcgtccctagtcactacctccgtgagctgcatctcaagttgaggaatattacacaagggaaccgttatgtcgaagagtactacaaagaaatgtaaactttgatgttgcgggctgatatttcccaggatagagaagcaactatgtcaaggtttcttggaggtttgaacagagatattcaaaacagattggagactcaatactatgttgaaatagaagagatgttgcacaaggcgattttgtttgagcagcaagttaagacaaagagttcttcatgatctagttatggttcaggaaccgttgttaagcctacttaccaaagagaggagagaaccagcagctataagccgattgtcagttcaggggctgaaattaaccatatgccgcagttcaagattacaaaggaaaggctgaaatttctacatctagaattcgtgatgttaggtgttacaaatgtcaagggaaagggaaaggacatcatacaaatgtcacgaataacttggataatggagatatagagtccgaggaggagattccagatcaccttcttcattgaaagagaatgaggagctgccggctaagggtgagttgttggtatctaggagaactttgagcgtccaaaccaagaccgatgatcaagaacagagagacaacttgtttcacacgcgttgtcatgtgcacgggaaagtttgcagcctcatcattgatggagggagttgtaacgaatgtggcaagtgaaactatggttaagaagcttggattgaaagtgcaaaaacatgtgaaaccatacgatctttagtggcttaatgattgtggcgaaatgagggttaaacatcaagtggttgtgcccattgttatcgggaagtatgaagatgagatcttatgtgatgtattaccaatggaagttggacttattcttcttggaaggccgtggtaatctgatagaaaggtaatgcatgatggttccactaatcttcattcatttaagtttaaaggagggaagactattctggtccctataactctgcctgaggtttatcaagataaaatacatctgaaacaaaagaaagaacaagtcgtcaagcagcccaacttctttgcaaaatgtggtgagcttaagagtgcttattcttctaagcaaccaatgttattgttagttgataagtgtgcattttacatgttttgagcatccatttgttatcactattgcatcatatcaccactgttttataccatttctcatcatttgtcatcactttgcaagtttaggatagttttgcatgcatgttgcatatttgtgttcatttcaggtgattcggagctattgacgagctaattggaagaaggggacctgatcatgtcaaaccactccaccccctggtggagtagatgcttcacaatcacaacagaccactcg

SEQ ID NO: 173097 - DNA, 754 bp, Arabidopsis thaliana landsberg
cttcttgcgaatcccctcgttgaaccgacggtggaattcatcgccgccctcacaaagccaccggagaatccagaagataaagacatcaagttcttccgtttctgcgtcgccaattacccgggatgcttctccctcaagctcatgcgtgtctactcctcgaaagagccacgcgtcccatacgagatcagagagggtgcgatgagatgtctccacgttatcttcatcatagaagaagcctccttgaatttagcagtggttcacatactctcgcctatactcatatcatgccttgaagaacaagttgtctcggacaccagtttaaagattctttcaatgctcgtgaaccgtgtcgctttcgagatattcaccattcaggaagaaacgtggtatgacctgcgtgagtttatctcgtctaaagcggaatcagagtttgtgaaagtggtttccgtgttcaagagcttgtcgatgcctttggatggagaggagtttttgattcctctcatggagaatcttcttccagcgatcttaaaacgtttaggtaacaaagaggaagagagttcgagccagtggggtttggcctttgtgggtggtttctgtgcggcggttcacttgttggagacgacacgtgttgatttggtggagaatcttgcgaatgagatgttgaaatcggtgaagagaggaatggaattagggtttcttgggaaagctcttagggaagttgaaaccgctgtagtggaacaattatggtggtatt

SEQ ID NO: 173098 - DNA, 625 bp, Arabidopsis thaliana landsberg
  unsure (1)..(625): unsure at all n locations
gatcatgaagacaagtggtgtggctccaaacgctgtggtttataacacttgcttncatgctctntgtaagattgggaaagtcgggagagctaggagtttaatgagtgaaatgaagganccaaatgatgtaactttcaccattttgatttctgcgtactgcaatgagcagaagttgattcagtcaatggtgttgttggagaaatgttttagtttgggttttgttccggatgttgtgacggtaactaaggtgatggaggttctctgcaatgaaggccgtgtgtctgaggcactcgaggttttggagagagtggaaagcaaaggaggtaaagtcgatgttgtagcttgtaacactttggttaaagggtattgtgcgctagggaaaatgagagttgctcaacggttctttatagagatggagagaaaaggttacttgcctaatgtggaaacatacaacttgttgatagctgggtattgtgatgttggaatgttggattcagctcttgacactttcaatgatatgaaaacagatgcgattagatggaactttgctacatttaacacgttgatcagagggctttcaataggggggaggacagacgatggttaaagatattagaaatatcag

SEQ ID NO: 173099 - DNA, 549 bp, Arabidopsis thaliana landsberg
caggaaatcatgcttcttctctgataatctcctctgatgttccatctgatctgaataatcacacggcaacatctttggttcgtgagatatgtttgcatgagaaaagtgcagagattgtggattctaagagcagtggtagtaatgtcgatgagccgcttttctggccatatgaacagagatttgattggacacctgaggatattttgaagcatttctcaatgtcacctcgaagaaagaaattattgaatgccaaagtttctgcaggtagctctccaagatccatgagagcacaacttctccaagcaagaaaactagatcttaaagatggtagtaagagaaagcttgtgttcaatggccctttaacaaacgcagccaagattccagagctcaaaagaaataacagcaacaagaaaaatgacagcatcaagaacgagcccatcaggaactgcgtgaagaggaacaaaagtttgccgtcaaggttgaaaaactcgagcaaaacatgttcaaaggttgtaccttttgaagttgcagaagaagtgattcagcaga

SEQ ID NO: 173100 - DNA, 550 bp, Arabidopsis thaliana landsberg
tataagtagtaaccgggtctaattaatgacgcatgtacatgtattaccaagagacttttttggtctatcaacatttggaatagccatgacactactgaaatggtttcctctaaagctggtggacaaatttctcctacttcttgctaattctacgttggcaataccgaccttttaggccttcgacgacctaagaccggaccaattgagctaaagaacgtcaccggtaaaactcccgttcttgatgtcggtgccatttctttaatccgatcaggacaaattaaagtaagttcataatttttcttcttcttaaagtaatactaaccatctagagtaaattacctttttagctaaaaggttagatatatgaaaagtttgcatgcgtgcgtttgtacttgaactgatttgtcttgtgggtattaactattaggtgacgcaagccgtgaaagaaataacgaggaacggggcaaagtttctgaatgggaaagaaattgaattcgactccataatattagcgactgggtataagagtaatgtacccgattggcttaag

SEQ ID NO: 173101 - DNA, 502 bp, Arabidopsis thaliana landsberg
  unsure (1)..(502): unsure at all n locations
nnnnnnnncattcttgccgaggctttgacatacgaggacgtttaccttgtccccgcctactcccgcgtcctgccgcacgaagtgcagttgcagacacggttgacgcgcaacctcaagctcaacatccccatcatttccgccgccatggacacggtgaccgaagcgcgtctggccatcaccatggcccagtgcggcgggctcggcgtcatccacaagaacatgaccgccgccgagcaggccgcgcaagtgcgccaggtgaagaagttcgaggccggggtcatccgcaacccgttcaccgtcggcccggacacgccgatccgcgaagtgctggacattacccacgcgcacaacatttccggcgtgccggtggtggacggcgaacagctggtcggcatcgtcacttcgcgcgacatggcgtttgaaaagaagctggacgatccggtgcgccacatcatgacgcgcaagggacagctggtcaccgtgcgcgagggcgccatgccga

SEQ ID NO: 173102 - DNA, 478 bp, Arabidopsis thaliana landsberg
atagcagattggtccttgcttccgaatgacttactagaactaatcgtgggtcatcttgagacatctttcgagattgtcctcttccgatccgtctgcagctcatggcggtctgttgtacctccactagatcattcccgctgtttaggtatcaaaactcatgatatatcgttcaatgccggtttttcgttcagcggccaaccaacggatcatcctctgtttggaagcacactaacaaagatcccaatttatctagtgaaattctggactccgtttggtgatgattatttattggcagagatgcgtgaacgagagggtggggaaccgatgttattgttgtcgtccttgtcatctaatgatattaaatatggaatgagaataaataaagtgttgttcaactctcttacctcaccaattatcccatttggacaatactacgaggttggtgttcaaaagctcatattattttttcaaattttta

SEQ ID NO: 173103 - DNA, 1260 bp, Arabidopsis thaliana landsberg
tatcataattctgtcatgggtgccattctggggtactgcgtactgttaaacgactagcacaaatgttttattggccatcgatgcacaagacggtaaggtagtttgttgcagcatgcgatatatgtcaacgggcctagtatgatagtctctcaccagctggtctcttgcaaccacgtgcccattccaaatcagatatgggaagacatatcaatggacttcgtcgacaggttaccttcctccaaccaacacacctccatcatggtcgtcgtcggccgtctctccaaagcagctcatcttgttcctctctcgcatccatacaccgccaagtctgttgctgccaagttcacggagtacatcgtcaaactccatggtgtacctcgatcaattgttagtgacagggacccggttttcgtgagtgctttctggcgggagctctggcgcctttccggaaccaagcttcgcatgtcctcagcatatcatccgcagaccgacggtcaaaccgaagtcatcaacagaatcatcaaacaatttctcagatgttttgttgcagatcgccccactcactggagctcgtttttgccttgggctgaatactggtacaacactacttatcattcctctacaggaatgtctccgttcaaggcacaatttggtcgtgatccaccacccctaccaggttatgaagcgggctcaacaacagtactcgaacttgatgagcagctcctcgagcgtgacgcaatcatcacggagctcaagcatcacctcacgagggctaacaacaagatgaaacaggcagctgatgctaaacgacgggatgtcacctttgaggtcggtgactgggtttttcttaagctgcaaccttatcgccaacacaccatctttcgttgcacgtctcagaagctggccactagatactatggaccatttcaggtggaagctagcattggacccctcggttaccggctcactcttccagcgggtaccaaagttcattctgttttccatgtttcgctacttaagaagagagttgggtctgatacaccgacatcgggtactttacctcctctccgttccaccggtttccttcgccttcaatcggaacgagtcttgcaactccgccgcggggtacgtgatggtaaacacttcgaggaggcgctggtgttatggcaaggcctggcaagggacgatgccacctgggaggacgtcgtccaacttcgctgcagttttccttctctgaaccttgaggacaaggttcttctc

SEQ ID NO: 173104 - DNA, 841 bp, Arabidopsis thaliana landsberg
gtttcctctgttctgaagtcgctgcttctgcttcttcatcttgtcttcttgattctgcttctatcgtcaattttcttcctggtttccctttgcgctcgaaaccgggtttgttttcaatctctttgtgtgattaaatctgtgttctgtgtttggagataatctaaaagacataggatattgtttcttgtggatgaaggtatattggtgctaatgaggaagaggaagtgcaactgttctactacttcatcaagtctgataggaatccaaaagaagaccctcttattctctggctaactggaggacctggctgctctgccatctctggccttctttttgagaatggtgaaatcgaaaacatcgaataaacttgttcttttgcgtctctgattactcgttgtaactcgatacatgtctatataagcagggcctctggctatgaagcttgatgtttacaatggaactcttccttttttggtctctactacatattcatggacaaaggtaatacaaaagtgtgtattcttgatatgacgatcagcaaaacccaatgatcaataattcttgatcatcattttcctcagacttcgagcataatattcttggatcagcccgttggaacggatcagccagtaagtataccccttgagagacacgctaaggtcagtaaaagagatatcccagtcgggagtgaagtcaaaaaccttccatgaatcagagttaaaattgtagatttcaaactcataaattcggtagttcgcgacggatccatcattaaatatcaagatcttgtggttacgaagtgagttgttcttcttgttctcgtatccgatagcgtacttgt

SEQ ID NO: 173105 - DNA, 468 bp, Arabidopsis thaliana landsberg; identical to SEQ ID NO: 17628

SEQ ID NO: 173106 - DNA, 515 bp, Arabidopsis thaliana landsberg; identical to SEQ ID NO: 74078
  unsure (1)..(515): unsure at all n locations

SEQ ID NO: 173107 - DNA, 974 bp, Arabidopsis thaliana landsberg
agaagaagttatggcgatcactgtcatattacccaaatacaaaattgaatctaaatcatatgatatttttttgttttctttgtcaactatgaattattggtctaaaaaaacatttttgctgtttattaaaatatttttcaaacttattgttggaaattgggcagatattttgttggccatgagattttggaattttgcgggaaagtattcattcaatttataaaaagaaaatattttgattggggaataataatgatgattgttgcgttggaatatttggaaaaggtaaaagcaacataagcgtgaagtaccagctaccaaacgaagatcttgacgcgttgatttccgtatcaacggacgaagatgtagagaacatgatggacgaatacgaccgcgtcgcacagaatcaaaacccacgcgcctctcgtcttcgtctttttctcttcaccaaaaacgtcgccggagaagaagataacgatagtcgagctagcagtatcagctctctcctcgatagctctgttaatcgggagcaatggttcctcgacgctcttaacctcggttcttccgccgccgcaaccgcggtatctaacggtgggtccggtagagtctttgagcgagttagatctgaagtctcgtcgattgtttctgaagttcctgattatctctttggattggataatttcgatgaaactgctccgccgcatgagcttcgtgatcgtgatccgagagctaagatacaacgagaagtctcgacgctttcggatcctggttcgcctcgtcgcgatgttccttcgccgtatggttcgacgtcttcggctcctgtgatgcgaatatctacaccggaactttcaccaccagtttttactaaaccggaaagtccagaaccggtttcgactccgaaatccaatcctcaaccggaacaagtaatgcaacagagtaatctcccggttaactcgcaatggcaatatgcccct

SEQ ID NO: 173108 - DNA, 852 bp, Arabidopsis thaliana landsberg
atgtcgggagatcacgccaagaaggagatggagaccagcgaaaagcccactacaagcaatgagaaagctctatcgggagagtcccgcaacaaggagaagaggaaggaaaagaagaaggacaagaagacttcttctcacaagtcgcatcggagtggcgacaaaataaagaagatgaggaaggtggtctactacgagaccgacacttcatcaccttctacctccggctccgacgcgccctccataacttctaatggccatgagcgcaagaagtttagtaagagccccttacattatcctcgtacttctagacatactccattactttccgttccattaggcaaaccgccaacttttgatggcgaagattatgctaggtggagtgatttaatgaaatttcatctaacctcactccacaaaagtatatggaatgttgttgagtttggagcacaggtaccatccgtaggggatgaagactatgatacggacgaagtggcccaaatcgagcacttcaactctcaagctacaaccatactccttgcctctctaagcaaggaggaatacaacaaggtgcaagggttgaagaatgcaaaggagatttgggaccttctcaagaccgcgcacgagggtgatgaactcaccaaaatcaccaagcgggaaacgatcgagggggagctcggtcgcttccgtcttcgccaaggggaggagccacaagatatgtacaaccggctcaaaaccttggtgaaccaagtgcgcaacctcgggagtaagaagtgggacgaccacgaggtggttaaggttattctaagatctcttattttccttaaccccactcaagttcaattaattcatggt

SEQ ID NO: 173109 - DNA, 213 bp, Arabidopsis thaliana landsberg
  unsure (1)..(213): unsure at all n locations
atgcagtttctttctgttttaaatgcaaagaaggcaaaactgagagcactaagggacaaagaagtttcagnnnnnnnnnnnnnnnnnnnnnnnnnnnnnnnnnnnnntgaaagcttcgagagtggaagaagtgatgatgagaagagcgaggaagaagtctcaaaaaaggcaacaagcagcaaaccccgtggcgggaagagagctgcacgaatc

SEQ ID NO: 173110 - DNA, 487 bp, Arabidopsis thaliana landsberg
tgtattattgtattagaataagtacaataatggttaaactattattatcaaaatgttgaaaatcgaatgtacgtaggagctgcaatatttgacatgaaatatgggagatggctagaggatcatacccggcatatgtcggagattcgaaccggtcttcaggctcatttatctgacaatgatttaaggttgatcgttgacggttacattgctcatttagatgagatattccgattaaaagccgtggcagcgaaagccgatgtttttcacctcatcattgggacatgaatgtccccagccgaacgttgttttatttggatggctggtttccgtccatccgacctaatcaaggttcgacttgttcttccttactttaccccatgattacaaacgtaagttttaggttttgcgtttgaaaaacaaaatgatattcgcgttagtaaattacatcaacaaatctgaaacattgctgcaaaatgtaatcagcaat

SEQ ID NO: 173111 - DNA, 1408 bp, Arabidopsis thaliana landsberg
ggcgtccttagttggaattgtcaaggcttgaggaatccttggacaattcgacaccttaaggagatgaaaaaaaatcatatctcggacattttattcttcatggagactatgaatcctgacgagtttgtttcaaaagttattgattggcttggttataactatatgtatacaatagaacctcaagggagaagtggtggcttagcaatcttttggaaaagccatttggacattgagattctttttgatgataaacatcttttggatcttcagtgttcttctagaaataaagtatgctttgtttcttgtgtttatgggcatctggtgacatatcttaggccttaggtttgggataagttgtgtagtcttggatcacatcggaagcaagcttggtgtatgataggtgacttcaatgatattaagtcgaaaacgggaaagagaggggtccgagaagagtaccttcttcgtttcaatcttttcaagacatgttgaatacttgtgatatgcatgaactaggtagtacaagcaatggctttacttggggagggactagaaatggtcaatggattcagtgtagattggatagatgctttgggaattcctcttggttttctttgtttccaaattctcaccagtggtttctgagagatttggatctgaccatcgtcctgttttagtcaagtttattaatgataacgagttgtttcgtggacagttttgttatgacaaaagaatagctgatgatccttcttgtattcaagtgatttccaactcttggaccaatgcaatgtctcaaggttctcactcctctatctttagtcttattgaatgtcgaagagctattagtgtatggaaaaaaatcagctgatactaatgcttagagtaggattcaaagattgaggaaagatttggatttgctgaaaagttatgagtttccaaattggcctagaattgcatatattaaagatcaattgggtcttgctgatgaggatgatgaactctttaggagacagaaaagtagtcaaaaatggctgtttgctgaagataaaaacattggttttttcatgcttctttgaaatcttctagattagggaactctttgagcttccttctggatgaaaatggacaagaacacaccaagattagtgagaaagggaaaattgcttcttcgttctttcagcatcttttttcatcttcttatccaataggccaggataattttttgaatggttttcaagcaaaggtttcattggatatgaatcagcaattaactcaagatgtcacagaattggaagtgtataatgcagtgttttctattaattgtgaaagtgccctaggcctagatggatttactgctttgttctttaaacaacattgggatttggttaaaactcaggtcttaagcgagttt

SEQ ID NO: 173112 - DNA, 379 bp, Arabidopsis thaliana landsberg
agaaccaaaccacaaagcctactctgttctaatataatgatacttttctctcaagtattgttcattccttttttttttacagcgaatacttcatgactggactgctgaagactgtgaaaagattctcaaaaattgatgcaaagcattacctgagaatgggaaagtgattgtcatggaagtagtcctccagatgaagcatataatcatgatgtgatatccacacattgcttttgatatggatctgttgatgctcactcaattatctggaggtaaagagaggtcgcgggccgagtatgtagctatggctgctaactcgggttttccgcgttgcaactttgtatgcagtgcatatcatttgtgggtcattgagttaacgaaa

SEQ ID NO: 173113 - DNA, 290 bp, Arabidopsis thaliana landsberg
ggaatggctttatttgggttggggaacacgtccaagaacaagatcctataattgtggataataagatgttcaaactttctccactcgagactcaaaaaagtattgtcagaatcggaaacgcgatacgggccttgtctaatcaaggcttcacgttaactctagaagtgatcatggaaactattaacttaagcaacatggagaatattgacgtacatgacatgcttggatcagagtttcacgttttcctcgcagagaatgaagctgaaagaagaataagacctgcatagagg

SEQ ID NO: 173114 - DNA, 688 bp, Arabidopsis thaliana landsberg
ctttaactttcagttattctgaattttttgtcactgccaattgacagaacagtgtgcagattgtcttttacctccatttatagttaaatatcttactgtattgtgaataaattctcaaagtgtgctcttctcaggtcttctctaggtacggaatcattgaagatatttatatggcacttgacgacatgaagatttgtcgtggtatgtccgttgcccctgcatattgtggtgtttgactctgaatcatacttgtttcagatatcctagttagtttctcctctagtagattacggatacttcatattgcttagtaacttaatgtaaaacttccatatagacctaacaaaagaatgcctcaacatagtaaactgttatgacagccttacattgcctaaaagtgatatttttgatagcatgaaacctgattagagctgcttatatctaaattctttgctctctgcagggtatgcatttgttcagttttcttgtaaagagatggcactagcggcaatcaaagctttaaatggactctttaccatacgggtagttgagatagttttttgttgtatcccaatggctcaatgtatctttggcgtccactattccataacttcacgtattcctgtcttccttacagggttctgataagcctaaaattgttagatttgctgatcctaaaaaaccccgt

SEQ ID NO: 173115 - DNA, 928 bp, Arabidopsis thaliana landsberg
gtacaagccttgtgacctaaccttgattcttgctgataggactttaaggagaccttttggcctgttagaggatgtgcctgtaatgattaatggagtagaggtccctattgattttgttgtgcttgagatggatgaagaatctaatgatcctctgatcttaggaagacctttcttggcttcagctggagcagtcatagatgttaagcaaggaaaaattaatcttaatctcggggaggatttcaaaatgaagtttgaaatcaggaacactatgaagaagccaacaatagaaggacaaacctttttagttgaagaaatgggtcaactagctaatgaactgctagaggagcttactgacaaagatcaccttcaaactgctttgacaaaaagtagtgaagctggatttctctccagtgagaccttgagctatgagatgtcattagactcacacaacaaagtaccaggatcagagatttttaaaggtgtcattgggttagaaagagaggatgttgcattgaacgaggaaggctcaattgatactagactagagtgctcaaccaaacccgtaaagtcaagcatgagggcattaaatgattggttagaactcaaggagaggtctaattggcacgacaaagctattataagagagctgaaagatcaaattaaggagctccatgggaaagccaaccacgcaccactcgacatcaaggacatcccaaatgatgaagttattcctatggttagaaaagaaggatgtgaattcacattagaacagtctagaaaagacgactatccagatgatgaaaaaggagcttaccaagaaagggccattgagtactcaattacagacctgtcacgagagtatgctgaatttgatgttgtatctactaaggaaggagaagagacgtcaattctactctatcaccctcct

SEQ ID NO: 173116 - DNA, 1822 bp, Arabidopsis thaliana landsberg
cttgataggagatcaagagaagtgtcgaaactaactaacacaagcatgcccatgaggaaggaagggataacgaagaaactttatgagttggcaactctctgcgacatcaaagcatgtgcggtaatctatagtccgtacgagaatccagtggtgtggccgtcaatcaccaacttctgtaaataacaataattcaacgttagagaaaaaagaagaagttatcatcaaaacaattaactaaaagtgttttgaaagatttacaagggattttaaaagggttttataagatttacaagagatttttaaagggttttaaaagatgtacaagggtttttaaaagatttttttaaagaatttacaagaaaaccctttaaaaactcttgtaaatttttttaaaaccttttaaaatctcttgtaaatcatttaaaacctttttaaaatttttttgatggaaaatagatttactagggattttaaaagagttttaaaatatttacaaagaatttttaaagggttttaaaagatttacaatggatttttaaaagatttttaaaaaatttacaagagattttaaaagggttttaaaagatttacaacggattttaaaagggttttaaaggatttacaagagattttaaaaaggttttaaaagatttacaaaggattttaaaagatttacaaaaaatttacaagagattttaaaagatttacaagagattttaaaagagttttaaaaaatttacaagtaattttaaaaggttttaaaatcccttgtaaagggtttaatttcaaaatacttttaaagggtttaaaagtgttttgaaaaatttacaaaggattttaaagccctttaaaatcccttgtaaatattgtaaaacccttttaaaatcccttgtaaatcttttaaaatctcttgtaaatcttttaaaacctttttaaaatctcttgtaaatcttttaaaattcttttaaaatcccttgtaaatctatttgccgccaaaaaatatttacaaaatcccttgtaaatctatttgccgccaaaaaatatttacaaggatttttaaaatcattcttttggctgaggaaaaaattgttatgaaaaaaaaatttggcgggagatttttttttttttggcgggaaaaaaaaattttggcgccggcgggaaaagttcagtttcctattacatgtttctattagatgagggtaatttggtcattttgttcaagagaaggggtatttttaaaaatgaacaacataaaaggatattgttgcaaaagagtagttttgcaaatctcccaaacaaaaaatggttttctaatctacctatggagtatggacaatcaaactgttttcaaaatctaaatatatatattatatattgatgaaaacataaatcaactagggtttgtgagcaaacttttttctccacaagaaatttgatgtcgatttgtatattcagtgggtcatttgactttaggtaaatgtaataatttccctaaacttttcgtacactaataacatgatcactgatcagagagaggatcttgatcctctatggttgggagaattaaataatactatatattttcatgataaagagcatcaaaaatcgaatttttagtccactaatcaaaattcttgtaaaatagacaacataaaagaatcttatatccgggtcaagtatttgaaattaaattattaaattcactcacacaaaataggtaaagacaattgttaagtcgttttcaatacagaaaaataaataaccaaaaacaatacagtgtaatttattaaaatttacattcttctaaaattgataaatctgt

SEQ ID NO: 173117 - DNA, 748 bp, Arabidopsis thaliana landsberg
  unsure (1)..(748): unsure at all n locations
tgttcccaaaggcatcacatgaacattgtatatgacatttgtctcaaaacattaagaaatggttgacaggtgacaaggatgtaggtattgaaaaatctagggaatgtgctcatatttataatcaggctgagttcatcattaagtatggagattttatgagaaagtatcctaaagtacctaactatctcgataagtcaattgggcttgagaaatgggctaggtgctattccgagggagacaagtacgacatagatactagcaactctgttgagtcaatgaacgctgtgttttcaggaaataaggaagtaccatcttttactaatgatcgatgtgattttggagaagttttctgagtggttcaacaaacannnnnnnnnnnnnnnnnnnnnnnnnnncacaagacaagtgatgcctgttgtgaagaatatattacacatctgttgtccaattgctgcaaagttaagtgcaactgaactaaacagcttccgacaagaatacatcgtatatcgaaaagatggtttctcttatttcgtggacttggaaaagataacttgttcttgcacatgttttgatatagataaatacccatgcgtccatgcaatagctgcaaccataaagcgatctaagatggaataaccgttcgatcttgaatgtaagtatctatggtctttgctcaaaatattacttgatcgagacgtgggcattagcatattacagaacgatacatgtggtgccgcatcaggctcac

SEQ ID NO: 173118 - DNA, 814 bp, Arabidopsis thaliana landsberg; identical to SEQ ID NO: 5940

SEQ ID NO: 173119 - DNA, 126 bp, Arabidopsis thaliana landsberg
caattcaaacagtttgagatatttgatgctttcagagatcaagatgtatgttatctatgtaattggactgtcaaagctgatggtgcttgcaggcttggtaaagagcataaatgttttccttagaaa

SEQ ID NO: 173120 - DNA, 714 bp, Arabidopsis thaliana landsberg; identical to SEQ ID NO: 12879

SEQ ID NO: 173121 - DNA, 1270 bp, Arabidopsis thaliana landsberg
ggtataagaattagggaggtaaagatccttaaagaacaaccgaagatgttgcttttgctgttgcaagatatttccaaagatgaggagctttccaaaactactacatcgtaaaaaaaaaaattataatatctacatgttaaaaaagtaataatgaaactttaacttaattgataaagtaagaacatacattaatgatcattaaaaaaaaataatgaatgtttatctttgtttttgtagtatcatggacgtaccaactttgatagaaccgcgggtggtccgttcatcacaacaacatatgattacaatgctcctcttgacgaatttggtaaatatataaaaactatattcatatttaaattaggttaaaaattttaaaataaaaagtactaacatgatgaatatttattaggtaatttgaaccaaccaaaatacggacacctgaaacagcttcatgatgttcttcatgctatggagaaaactctcacttatggaaacatttccaccgttgattttggaaatttagtcacggtaattctcattttctgcttattttttcagttaatatatttaaatgtgttactcttgaatttattcttgaacacatattattataggcaacagtttatcaaacagaagaaagatcaagttgtttcattggaaacgttaatgaaacgtcagatgcaaaaatcaatttccaaggaacattttatgatgtcccggcttggtatgtgagcattttaccttattgcaaaactgagtcttataataccgccaaggtttgtctttgttacattcaaagttttttttacagtttttcttaacagtgatcattattacattcaagttataatccttaatacattggcttttttttatggttttatatatttctgattaacactcaaacttctgtgatggttaagaaaatgaatgaagctgagaacgagccttcgatttaaaaatggtcatggagaccagagaacatagacaatgtcctcttgaaaggaaaatgagaatctacagtgagacaattgtttgatcaaaaagtagtaagcaatgacgaaagtgattttctttggtacatgactacggttaatctcaaagaacaagatccggcttgggaaaaaaatatgtctcttcgtatcaacagtactgctcatgttcttcacggttttgtcaatggacaacatacaggtaagtaaatgacttatctagttttaaacaacactcaatacataaagaaaacattttatgattattcgttgttttt

SEQ ID NO: 173122 - DNA, 392 bp, Arabidopsis thaliana landsberg
  unsure (1)..(392): unsure at all n locations
ttaggggattgtctgagggatgagtaacaatattattgagctgcgcggcgtttctaagtctatacatgatcatagcattttgtatgacattaacctcgaggtacgtaacggcgaatttctcaccttgctcggcccctctggctgtggcnnnnnnnnnnnnnnnnnnnnnnnnnnnnnnnntgaagaacccaccaccggaaaaatttttattaatggcaaagatgtagatggtttgccaccgcatttgcgtcatgtgcatactgtttttcaaagctatgccctcttcccacatatgagtgtttacgaaaacgtggctttagaactaaagttgccaaaaattaccgaaagtggaaattgaagcccgcgtgagtgaagtgttaaaaatagttaaa

SEQ ID NO: 173123 - DNA, 529 bp, Arabidopsis thaliana landsberg
gcgccgctgaagtgaacaaagctgtagaacctttcaataagaacctcaaagctcttgtctatgaattcaaccgagattttgctgatgctaagctcaccttcgttgatgtcctaagcggccaaagtcctttcgcgaacttaatgttacgcatgtaaactctgtatacatttgacctaagctatagtccctttcttaaattcataaagataagagttatttttttggcacagatatcaattataaaatccatcaaggtagcgacatgctatgttcgatttttttcctataatttaatcataaatttatcacatatatttttgtagggtttagggtaacagacaaaagttgttgtacggtaaaaccacgggaagaactttgtgcgacaaatgaaccgcactggccttttcaaacacactaagtgtactgggacaatgtccacagcacagaagcagccaatatggtggttgcaaaggctgcttatgccggactcattacgtctccttacagactttcttggcttgcacgatta

SEQ ID NO: 173124 - DNA, 346 bp, Arabidopsis thaliana landsberg
  unsure (1)..(346): unsure at all n locations
tnnnnnnnnnnnnnnnnnnnaaacgctaacttgattatatcattgacacggtatccgcgcctcatgattatgatttttacatgtctttactaaaagacaatggcgtgcatatctgcgtgggattacctcgggagggctccagttaaaagggttaccgttcaacagggctatcacgggatcttctatcggcggcattcccgaaactcaggaaatgctggatttttgtgccgagcaccaaattacctctgacgttgaagtcattaacatcagttatgtcaatgaagcctaccaaagggtactgaacagtgatgtgcgttcccggttcgttatcgacatggccacgctc

SEQ ID NO: 173125 - DNA, 746 bp, Arabidopsis thaliana landsberg
atgatgacagtaatatggagcttgtgtttaatcttcggcctctctaactcaatacttgtcattgctaaagacttgtgtcttcccgaccagagggatgctcttttggagttcaaaaacgagttctacgtccaagagttcgatccccatatgaattgtgaaaaggcaacagagacgtggaggaacaagactgattgctgttcttggaatcgtgtctcttgtgatcctaagacaggcaaggtcgtcgagttagatctcatgagcagtgatctcaatggccctttgagatctaatagcagcctgtttagactacaacatcttcagaagctgtatcttggctaccggaatcgtattgttttaacgattacttcattcggaagtctttcttataatgatggtttgaagggtgagctaccggattccatcggcaacctcaaatatttgaaggttttgagtcttcgtggttgccatctctttggaaagattccttcttcactcggaaatctttcttatctcactcatcttgatctttcctataatgatttcaccagaggaccagattcaatggggaaccttaaccgactaaccgatatgcttctcaggttgagctcgctcatctggatcaaccttggtaataaccagttcagaggtatgctcccacctaccatgagtagcctctccaaactgaagaatttaaatattagtggaaattcattttctggaaccattccctcctccctcttgatgct

SEQ ID NO: 173126 - DNA, 490 bp, Arabidopsis thaliana landsberg
  unsure (1)..(490): unsure at all n locations
attgttgcaatcaaagacgtaatcttgcctcccaagagagattcattcaaaaatgtttacattgtgaatgaattgatggagtttgacctttatcgaaccttaaaatcagatcaagaactaaccaaagatcatggcatggtttgtgtttagagttattgtttcttgaaacttaaaaatcattttgattagtgagcttgacacaatcttcaaatttttggcagtatttcatgtaccaaatcctgcgcggattaaagtacattcattcagccaatgtgctacacagagatctaaaaccaagcaatctcctcttgagtacacaatgtgacttaaagatttgtgatttcgggctcgctcgtgcaactcctgagagtaatttaatgactgagtatgttgtcgcnagatggtaccgtgcacctgagcttctgttgggctcttctgaatntaacncagcaatagaagtatggtcatgttggctgtattttcatggaaa

SEQ ID NO: 173127 - DNA, 298 bp, Arabidopsis thaliana landsberg
agcaaaatgttggggataattgattcaatgccttaatagcttcaatgcaacaagtatggaataaagggttcacttcaatatgctttgaaagtgattgcgaggttgttatccacgttgtcaatggacgatcggatgatgttttaactgaaggaatatacaaaaacattctctatttgggcatcccgattccaatatatcagctttacttttgctagatgtcattataacatttttgttcatctcttggctcaacaatggttgaaatctcgctagtttttattctgctagttctaattct

SEQ ID NO: 173128 - DNA, 939 bp, Arabidopsis thaliana landsberg
cggctgtgtactgatgcaagagggccgagtgattgcgtatgcttcaaggcagttgtgccgacatgaggagcattatcccactcatgatctggagctagctgctgtggttcatgccctaaagatttggcgtcactatctgctgggaaatatctgtcacatatatacagatcataaaagtttgaagtacatcttcacccagtcagagttaaatatgaggcaaagacgatggcttgagctcattaaagactatgaactggagatccattatcacccaggcaaggccaatgtggtggcagatgcgctaagccgtagggttgcctgccactgtcttatggcgaagatcttcgagaacactttgtgtcaagaaatggaaaagctaaacctggggatcattcaacaagggactctaaatcagttaaggcttgagtcaatcattttgcaaagaataattgatgctcaaaaggataatctgggtatgaagcacattcgagagaagataaaggctagagtagccaagtgtttcaaggaagacgatcaaggtgtgatatggtttaaaaaccgcataattgtgccaaataacgaatagctctgtcagcaaattctggatgaggcacatcttactctttattctattcatcccggaaacactaagatgtattaagacttaaagcaacattactggtggacgaaaatgaagattgaaatatcacgctatgtggctcaatgcgacacctgcatacgtgtcaaggccatacacctaaaagttgtcggtccattatagtctctaccaataccgacatggaaatgggaagatataagtatggactttatcgtgggattgcccaggactacaaaagggtatgattctatctgggttataattgatcggcttatgaagattgctcactttttaccggtcaagacaagttacccagttac

SEQ ID NO: 173129 - DNA, 468 bp, Arabidopsis thaliana landsberg
ctatgaccatgccgatgaggtggtcgaggcttgcacggcgctctggaacagttgggggccggatgcgctggtgctcgaccggcaggccggcattttcggcgatccgtcgaaggtgcgctacgccaactatgccggcaaatatgtcaggacacgcggcccgttgatgacgccgcattcgcctcagggcagtcccgtgctgatgcaggcggggtcttcggaccgcgggcgtcagtttgcggcgcgctgggccgagatcgttttcacgctgcagaacaacaaggcggacatgcaagccttctaccgcgacgtcaaggaccgcgtctcgaatgcggggcgcgacccttcgcactgcgccatcctgcccgcgaccgatatcgtcataggcgagacggaatcgatcgcgcgcgagcgggcggactatatcgattccctaaaaaaatgccgagcttggcctttccgagatgtcga

SEQ ID NO: 173130 - DNA, 771 bp, Arabidopsis thaliana landsberg
tgtcgttgagatagaaaatgatgacaactgggatggtttttaagacatctatctgcaagtttggggctttgtcaaatggctaatatagctatcctctcttataaacaatctgttagtttttttaactttgtgtctttgttaaattggtttgttgttttgtttactgatttttggtcatgttttatgtcatattgcaggggctagtcaaagctatccatacaatacttccacatgctgagcatcgacaatgttcaaaacacatcatggataattggaaaagggagagccatgatttagagttccagcgtctgttttggaagatagcacgaagctacacggttgaggagtttaataatcatatgatggagctacagcagtacaatcgtcaagctcatgaatctctgcagcttactagtccaatgacatggtcaagagcatttttcagaataagtacatgttgcaatgacaacctcaataatttgagtgagtcttttaataggactattaggcaggcaaggagaaagccaatattggatatgctggaggatatccggaggcaatgcatggtcagaactgcaaagagattcctaattgctgaaaaattgcagacaaggttcacaaagagagctcatgaagagattgaaaaaatgattgctgggcttagacagtgcgagagatacatggccagagaaaacttgcatgatatatatgtgaataatgttagctattttgttgatatggagcagaaaacgtgtggtgcgggaaaggcag

SEQ ID NO: 173131 - DNA, 1105 bp, Arabidopsis thaliana landsberg
agctgcaatgtgatcttggtcagagaaggacacaatgtttgggaaaaactcaatacagaagacgagatggaacttgctggtatcaaccgacacctactagtgtcgaacgacaccatatggtcatttgtgtgacgaatctgctaatgaagctttctcgaatagagaacgtgagcatcgattgacagtcaaagctagtgtcgactgtcaccatcagggtgttatcaacaccaaacccataccaagcctatgtcaacgttcaacaatgtagacttgtcatcaattaagagagatggattgacgaaagcatagagtgtcgatcgacatactccaagtgtcgatcgacaatgggtatgagctgcaccttatgaggttttcattccaacgaagcgaatttgctaaccaaagacatgagttccattttgttgaaaaaggttaagaaggacaagacaaagaaggtattgttttctgagcatgtaaggtccattatcgattgtcagatcacaaaaaagctgcctgatcgagggagttttgtcctcagttgctcaatatcatcggaagtgttcagccactccctatgcaatctgggatgaagcatcaacttgatgcccatgtttgttgctgtgagactaggcatgactacctacaagccaacacatataactcttcccttcgcggatcgttccaaacgagtccatgaaggtttcctcgggatctttctagtgaaagttggcaattgcagcattcctacttattttgtagtcttggcctatgacgaagaactcaaggatcctctaatcttgggtagagctttcctaggtacacaaaatatttggaaaacaaacattttttacaatacaaatatcagattgcatttttgttagttattattcatactaaatgatttagaaagaaattagacatgctaaagttaattgaccaaaaaacatttgttaattttccttttggttaataaaattaaaatttaattttttagatttacacatagtatatgtaaattttttctattgtgactttttatatttcttaagagagaacaaaaagaaaactcttttcaaagacatgtcaacatctgatcgacacactt

SEQ ID NO: 173132 - DNA, 823 bp, Arabidopsis thaliana landsberg
tagatttctaagcttgaaatctaatcagttcgttgctgatattctcgatgctcgtcttgttcagatgactcctactgattactgcttcgtcgtgaaatcagttggtcaagagagttggcaacgagctcttgaggtttttgagtggctcaatctccgtcattggcactctcctaacgctcggatggtggctgctatactcggtgttttgggacggtggaatcaggaatcccttgcggtggagattttcactagggctgagccaaccgtcggagatagggttcaggtgtacaacgcaatgatgggggtttattcacgtagtggtaagttttcgaaagcacaagagctgctcgatgcaatgcgtcagagagggtgtgttccagatcttattagtttcaatactcttatcaacgctaggcttaaatctggtgggttgactccgaatttggctgttgagttattagatatggtgaggaattcgggtcttaggcctgatgctatcacttacaacactcttcttagtgcctgttcgcgggattcgaatttggatggtgcagtgaaggtttttgaggatatggaagctcatcggtgtcagcctgatttgtggacttataatgctatgatttctgtttatggaagatgtgggcttgctgctgaagctgagaggctcttcatggagctggagcttaaaggttttttccctgatgcagtgacatacaactctttgctgtatgcgtttgccagagaaagaaatacggagaaggtgaaggaggtgtaccaacagatgcagaaaatggggtttgggaaagatgagatgcacatacac

SEQ ID NO: 173133 - DNA, 544 bp, Arabidopsis thaliana landsberg
tgctcgttcattagacatatgattaattaacatctcactattctaattaattgagtattgcaaacatgttttatcaggacctggctctcaatccaaagtctacaatcttgttttccacccgttaaccggactttgcatgcaacaaagtatcttagatccaaccaaggtcactcttggtctatgtaatgaatctcaaccatggagctacactcctgagaacaccctgacactcaaagacaagtctctatgcttagagagcaccgggccgaatgcgccggttaagctcagtgagacgagttgctcgagccctaatttgtcaaaatgggagatcatctcagcctctaatatgctcttagcttcgaaggaaacaaataaatcgctttgtcttgacgtggatgaaacaaataacttcatggctagtgactgcaagtgtgtgaagggcgaagatagctcgtgtgatcccataagccagtggttcaagattgttaaagttagcaaataatgaggttttctcatacttaaataacgtttaagtaactcattg

SEQ ID NO: 173134 - DNA, 235 bp, Arabidopsis thaliana landsberg
attatgttttgaaattagaagaaacacgtgacatgtgtgaggagttgcgagaaaaaataaagaaaaatcgaattattttaaataacacttacggcgcaactttttcgtaccatgagtgttgggtattcaaacgcttccttgcgcgatgatgtgttacatcagatttggatcctttaagaatttttgcaaagaatattacctttggtggtttgtaagaagaattagaaaaattttc

SEQ ID NO: 173135 - DNA, 367 bp, Arabidopsis thaliana landsberg
aacgaacgattcaatggtggaatcatttaacattccattctacaatccaaacgaagaagaggtaaaagaagttatcttaaaggaaggttccttcgagatcaccaagatcgagaaattcgaccatgttgtcccatacaaaattgaccgtgaggaagaagatgaggagcaatcacttcagttggaagctggtataaagcatgcaagctgggcaagatgcatcaccgaaccattgctcgttgctcattttggagatgcaattatcgaacaggtgttcgacaagtatgcacactatatggccaagtatctaagtgtctcaaaccatcgccctaatatgacactcgtcatcgtagtttcgttgactaggaaa

SEQ ID NO: 173136 - DNA, 936 bp, Arabidopsis thaliana landsberg
taagttacgtattcttcttctacggaataacagctttcaaacttatatccctgggaaaatatgtcagcaatgagtatttggtctgttagacttgtctcacaatcatgttcagaggccccataccatcatgtttcagtaaaatgtcttttggtgcagagcagaatgaccgtaccatgtcacttgttgcagattttgacttctcatacattacattcttgccacattgtcaatatggatcacatcttaacttggatgatggtgtcaggaatggttatcaaccaaaaccagcaaccgtagtggattttttaacgaaaagcagatatgaggcgtatcaaggtgatattctccgctatatgcatggtctggatttgtcgagcaacgaactatcgggtgaaattccaatcgagattggagatcttcagaatatcaggtccctgaatttgtcaagtaaccgcctcacaggctccataccagatagcatttcaaagctgaagggcttagagagtcttgatctatccaacaatatgctagatggaagtatccctcctgcgctagccgatctcaacagtttaggatacttgaatatctcatataacaatttatcaggtgaaatccctttcaaaggccatcttgttacctttgacgagaggagttacataggcaacgctcatctctgtggacttcctacaaataaaaattgcatctcccagagagtccctgagccaccaagtgtgtcaacgcatgccaaagaggaagaaaatgaagaagaaggtaatgtgatagacatggtgtggttttactggacttgtgctgcagtctacatatctacatccttggcattgtttgctttcctctacatagactcacgatggtcccgagaatggttttatcgtgtagatctatgcgttcatcatattctacagttcaagcgttcct

SEQ ID NO: 173137 - DNA, 1701 bp, Arabidopsis thaliana landsberg; identical to SEQ ID NO: 65003

SEQ ID NO: 173138 - DNA, 483 bp, Arabidopsis thaliana landsberg
  unsure (1)..(483): unsure at all n locations
atttaacttgtgtatcaagtcacagttgaatcatctttctaaactaaactattatctttactcttagttttagatcacagttttaattagttcaatttcaggccttgtgcaacaaaaaattacatttgcaacagatctattttttctcttacttctacatattagttagcaaatattatctactaagatcacattcattcttttcttttcttttttattactgtgagtagacatcaggaatccgatccgtaacattgagcagcacgcttctaacaatgtcaacaagattcttctagtagggaacaagaggcagatttgattcaatatcaaaagagtatatctactgtctaccttctccatccatgtgtagtagtattgtccagcttatgattcncgtgagttataagccgtcgcttcctttttaatatgctgatgaatcaggaatcaatttttttttgtgagcatatatatctaatgggttga

SEQ ID NO: 173139 - DNA, 330 bp, Arabidopsis thaliana landsberg
ggatgtgacgcatcaatcctactcgagcgaagtgggaccaacagttcactgagcttgattcagttgagaacttaggaatcaaaaagagggacctgattggctctatcaaaacctcactggagcatgagtgtcccaagcaagtctcatgctctgacgtcatcatcctctccgccagagacaccgtggctctcacgggaggcccactcatttccgtgctattaggacgaaaagactccctctccactccaagcaaacacgtggcagactctgagcctcctccctccactgctgatgttgacaccaccttaagcctattcgctagcaatggca

SEQ ID NO: 173140 - DNA, 1303 bp, Arabidopsis thaliana landsberg; identical to SEQ ID NO: 1381

SEQ ID NO: 173141 - DNA, 351 bp, Arabidopsis thaliana landsberg
gctctctttgatcaaaagcaccagagttccagagctctgccgtgtatgcaaggtgtttttgagaagtgttctcaagaaacctgaggagagtgatcagcttcggagttgctgttgcatccgtttttgaccggagatgagaagaagggttcttccgtcgccggtggagagaggacggggatggtgttgaggctcagaaaacctccgccgatatcgaaagatattccaacgaagccacggaaattgaaggttatttcacaaaagccccaacagttaaagaaagtctcgaataaacccctaaaggtgaagattgttcctccgagacccccaagatccgattttgtccccgttcta

SEQ ID NO: 173142 - DNA, 537 bp, Arabidopsis thaliana landsberg
tgttcacttcaccgtcaaatatatgtagattcgcgccggatccatcttattgtagatcggttcttccaaaccagcccggagatatatattcctacggacgtttgtctctacgaagatccctctcacgagcccgccggttcatttcgatgatcgacgctgaacttgaccggaaaggcaaagtggctgctaaatccacagtaggggctctcgaagactgcaaattcctagccagcctgactatggactacctccttagtagctcacagacggctgattccaccaaaacactgtcgttatctagggccgaggatgttcatacatttctgagtgctgccatcaccaatgagcagacttgtcttgaaggacttaaatcaacggcgtccgaaaatggtctttccggtgatcttttcaacgatacaaaactctatggggtgtctcttgcccttttctccaaggtataaacaaaagttatccaacatgcacgtaattcccattttttttggtcatatatgatactttaaatatacacgtaatcgt

SEQ ID NO: 173143 - DNA, 678 bp, Arabidopsis thaliana landsberg; identical to SEQ ID NO: 39847

SEQ ID NO: 173144 - DNA, 440 bp, Arabidopsis thaliana landsberg
gtgggggtgaagatggaggtgtggaaacgtgtttcgtgagaatggaaaatgtcgtgatagagttcgatttgtgaataatatagttaggaaagtttctcaagcgtggattgtgagtagtggtgggttggggcagtattcaagggttgagagactaattgcttggacccctcctttggtcagatgggtaaagctaaacacggatggtgcatcacacgaaaatccaggtttagagacgacatgcggagttttgagagatggggagggacaatggattcatggatttgcttttgttcggttccagccccgactctaggcatgtgttaggagtgccatagctcaaggtctattcatgtttatttttttttctaaaaaaatagggtccaaaaatataaagaaaatatctcatttttcttttcagctcaggacttgagtttgtgagt

SEQ ID NO: 173145 - DNA, 1699 bp, Arabidopsis thaliana landsberg
ttgatacttttagcttcaaaactcttaaaaccttcttggcacctataatacgtgtttctcctcttattggctctagaatggcaccaaatgctctctgaacataagaaaccaatagctaaaacgggttaaaagttgtgttatcaatacgcggggccctaggtttaatggtagagtagttggttgcatgcatatttaatttcattgcgcattgtttatgtatactcaatggagtatatacatttttttgttgcattgcttggttgcttgctgcttgttgattggggttgggttgggttattatcatttttagagatcccggacttattgagtaatcttagattactcagtattctactttttgtcttacaggtaaccttagttaggaagacctaacgaagagcacggacgttggggaaccagtgtagagtttgttgtctttgtaaagttagatatgtagttgtactcgatttaagtattaggctcgagagcccaatccattgtaagtatttcaatgtttattgaaaaaaaaatattttctttaaaagccttgtgtactcctgatattagtcttgtctcgactaacacaacttacggacatggtacgggttgaaaagccttaggccgtcttcttcgtgaggaacgatgttcacggatgaactgaccttggtaccggatgtgttctgggaactcggtcagatcgtctacgggcatcacacgtaacgcttccggattcgttcttagttctataacggtttgagagtattacagatggcattgaatatctttgcataaaatctaagaggcaatacctattggaagaattgccaatgttatctttcggattatattgcacaaaaataaatataatcacaacaaatgttatagtaaactctcgagtttactagtacatttaagacatgacatgaaagatttggacatcctagttcagtcatgacgcaaaagtttttgcaaagttctaataaccatccattgaaaagccaaaaaatattcaaatctgatgagttttcatgtaacgcatgttctcaaggaaaactcataacaaggccatcaccaactaaaattgggaatgaaagacctgaattcttgtcttgaattcattgtgacatatgtggaccaattccacccaccgtgcatgttgttttgatattttatgatattaatttacgcctctactagatggtcacatgtatgtcttttgactacacgtaacacgactttcgcaagattcattgcctaaataatcaagttaaaggcacaatttcttgattgtgctataaagaaagtcagacttgataatgcaagggaaattacttcgcaagcttttaatgactattgtgtatcgatgggaatcgatatagaacatctagtctctcatgttcatacacaaaattgcatggctgaatctttaattaaaaggttgcagatcatttctataccgttaatattgagaacaaaaatcccaatttctacatggggtcatgctatattgcatgatgcggctttggttctttggatcagattagactaagtccagataatgaatattctcctttacagatgacatatggtcaagtactaaatgtatcccatcttcgcattattggatgtgcggtatatgtgtctatagcaccaccagaaagaacagaaatggggtcccaaaagagattaggagtatagt

SEQ ID NO: 173146 - DNA, 1249 bp, Arabidopsis thaliana landsberg
cttttgaggcacatatatcagcgagggtaaatatgcatatactatataaaatatgccacatatcaccgcttcttttctcaatggttagttattgaattataaagtttttgatggttatacactgcaatttcccaaatttttatatcggtagtcttaaaaaacaaaacaattaaaccgtaaaactgggtccctcactcctcagcataaaaaaacaaatctttcttttcggccggtctcttgtaatcaatttttctgtgccataccggttatgaacttatgatcgagatgactcgtttctaacagagtttgcatctacaagatttaaaatcaagccaaagaaaccaaattaccaaactgtgccaaacagacaggaaccagttccagttagttgatcgaaaagcaaagatgacagaggcaataccaaagccactgaaagatatgtgggacaaatggaacatccgtggccttgtcatattcagtcttgtccttcaggcaatccttgttcttctctcaccaaatcgaaaacgaacgccgaggagactttttcgacttctcatctggtcggcttaccttctagccaattggtcggctgattatgccgtgggacaaatctcagatagttctggagacaagcctgaaccaaacgagtcgcccaagacaaacgagctcttagcgttctgggcaatgtttctactcttgcaccttggtggtcctgacacaatcacagctcttgctctagaggataatgagctctggctcaggagtttgttcggtttgttgtgccagttcattgttactctctacgtgttcttgctatcattacccaacagtctcgtggtaccaacatcactcatgcttgtggctggagtcatcaagtatgttgagaggataggagcactgcgtggagctagtctcgaaaggttcaagcattcaatgcttggggaccccgaaccagggattgactacacaaggttcatggagcaatacaaaaataggaagatttcgaaagagcgtagccagttagttagggtcaaggaaccagaaaacggccaaggagttggggtaccagtaagaccagagcttatgacccatcttcaggttgttcaatatgcttgcgagtacttcaatatatacaaaggtcttgtggtagattttatctatggttcacaacagtggatagagagcaagcaattttttcagtcattggaggcgcatcatgctttgaggattctagaggtagagatcagct

SEQ ID NO: 173147 - DNA, 820 bp, Arabidopsis thaliana landsberg
atatcaccgccgataaagaagagccgacgtggtcctcgctcacgtagctctcagtatcgaggagttacgttttaccgacgaaccggaagatgggagtcacatatttggtaaatcacataataccttttaaaaccatatgtagtgttatcatttgaattattttcataaaatgttttggaatattatgcagggactgtgggaagcaagtgtacttaggtatggttcatatacataaaaattacgatttaacttttgtgtcttcgatttatttgacaaaacaaagggttttgtttccttctaattgttgttacatatatatgcaggtggatttgacactgcacatgctgctgctcggtatattttcgaacctagctaacgcattactatactagtatcattttttgttcattattttgttattggctataatatgggtcaataaatatttgagacagagcctatgatcgagcggcgattaaattcagaggtgtagatgcagatattaatttcgacattgaagactaccttgacgatttgaaacaggttctatataagtcttttatggatatatctactttaggttatactagtaatttaattacttactactcagaagaaaacacaatgaaatattggttttttttttttgcagatgggaaatttgacaaaggaagagtttatgcatgtacttaaaaggcaaagcactgggttttcaagaggcagttctaaatacagaggtgttactttgcacaaatgtggaagatgggagtcacgtttgggtcaattcctcaacaaaaagtatttaaattttttccttttt

SEQ ID NO: 173148 - DNA, 410 bp, Arabidopsis thaliana landsberg
gggggggacttgcaagagcaactcaaggagagaattctagctattagtcaatctgcgcaaaatacaggagagtgtagatgctaaccatttcctcaccaaaccaattattcttacttttttaatcaacaactatgtaacaagagaagaatctatattggttcatatatccttttaaccggcttcattgctcctaacatttttctttctttcttttcttgtggattcattaacaaaagatacttgactctactgaggaggccattgagcaaagcctatcgagcacaggacacgcgacaacaagagcgacaaagatatattcacaaagctcaaagacaagttgcttccagtggctcttgatcttcgccatgatctgtgtgttcataatggttgttctgttgatccgggtcaca

SEQ ID NO: 173149 - DNA, 1721 bp, Arabidopsis thaliana landsberg
ccccattcttaagtactatctgaatctagcctcttcgtttatcctttcaaaatcaatcctcccgggagctcaatcttaccctcagtccctcaccgtaacttctcagaggaatttgctttacttgatcgctatttcggtaagctcaatgcaggaaccacagatggcatgtctactctgcttcttctactgacgaagttgcagtttgcgataaacccgtgtacacaatggagacttgcatgactggtctagacaagaaaaatgattttcaacttcagcttctgagatgactactagctttgggatcaggaacgaaaagaactaagtatcagagctaactcgccagcttccaatcccgggaagaaacccagttcacgcgtcgtgggaatacaatacacagaacagaagaaagatgcacctgagagtaaaaataaaaatattctctgaggacaacgattaccacaggaggagcaaataggtcgagacatccacagatagttaggcagaatcaatagcgctccacatgagagagaccaggatgaacgaggcttcaagtataagtccttcccaagcaaacatgtaatgtgtaggtggacacaacaatactcatcacacctataaaacccttcttctggatttatttttccctcacaagcttcacaccaatacgtcatgctacttgtcttcttcccataagaaagagggagtatgtgtttatcatgcttatacctcacttgttgtggtaaagtagcacatttgaaacacaaagcatagtcacactcctcctcaatgcaattgaaggtttccttggtgtactcgcctggcgctttggcgcaaaccgaacagtttctttcctcatttggtttggatgttaggaataaatgatgcatatgacttggatgaagtaaaggctctgaaattgtggcgcactgcacatgtagcctaaaatcgcaatctcttttactgcatttatagaagaaaccagctatacacaacgaaggacaagctgaacaataatcacgatcataactattccaaaactcgacatatctgagagggttatctgatactaaagtgagtagatgtggatgtattggatgatgtaatctacgagagagatttgcacattcttcatgtagaatgaaatcacattgcaaacaagagtaggagttaccaaaataaattggcatgatgcatgcttgacacagcttattctcgtcgttatctttgctcgtgttctcatcaagtgtcaaatgatgatcttcatgactgaaatgttgtatgattccatcgcttatcgtcacgaatggctcaagttcttccacttcttcttctgactctccttcacgttctataccatcccaaacatttggttgagtggcacattttgaatgaaccgcataaagacaacctttcttgatgcaatgataccccccgtaatcattgttaatcttccggcggcaaataccacaaatccaatctccttttgggaaagaatgggtaaaaaagataaaatggaggtggcgagaaatccgtatgacatgaggtaagctgaaacagctttgatgggcgataaagtagcaagggggacatatatagaaaagcaaatttgaatgtttcaaggcgcataggctgcaagtttggggatcttgacttggaaacagggcaagtgtatgctcatgccacttgggttggtcgatagacaagactggtgatttctttgc

SEQ ID NO: 173150 - DNA, 988 bp, Arabidopsis thaliana landsberg; identical to SEQ ID NO: 19773

SEQ ID NO: 173151 - DNA, 331 bp, Arabidopsis thaliana landsberg
taccattttcgctgaaaaattgcacccgaggatgatcgagcacctgggggaaccattggatatcgagcgggtggcagaccatgtagctatgagtccaagaaactgcacccgggtatttcatgagcaaacaggcacgtcacccgcgaaatatgttgaaaagcttcgggtagaagcggagcgcaaatatttggaagatactcttctttcactcgaacagatcgccaaagaatgcgggctcggcggcctggtctccatgagaagaacttttttacgtcacctgatggctagtccttccgagcatcgcagggcattcagaacctgcctgtcagat

SEQ ID NO: 173152 - DNA, 733 bp, Arabidopsis thaliana landsberg
atggatcccaattcatccaattcatcgggatctggcttaccagtttagatcccaaacgatgacgttacggacgggcacctcccaacggatctctctctccgaaccagggttgatgctgtccataacgctgatgcggagaacatctcccaaaactcgaattcttctggatctgaccaaatcactccccctccgcaaacaaggggcggagaacgaaacgtcacgatacagcctccaaacggagataacccggccaacctgtctaatcaggtccctccgcgacctgccagcgaattagccgagctccgcgcaatgatcatgaatttgattaatttaaccaaaaaccaagaaattgcgcatcgcaacctcgccgcgattgtgggtcagcagagacgcgatcccactcgcatggcacatgaggtagagcgcgataccgcgggtaaggaggttccccccccccccccccgcaaaactaggcttcttgcccaggtccccatagaactgacaagtaccgtctccccgaccgatcctactttgaaaactcgtctggattttgcctcgatagaggtttacctcctatcaatcggcaggccgcctttttacaggcacctgcgaaggctctcgtcgaaaacctggcaagaggaaacgaaacaagcgcaacgcctgctttcccaagcctacgggcccacctttattccgatgggttgttcgcccctaggtaacgtggactagaacc

SEQ ID NO: 173153 - DNA, 292 bp, Arabidopsis thaliana landsberg
tcaacccccaccgacgtgccacaacacacccgataacccccgaccaagcaacaaaacacatgccgtaagactcaacagaggcgcaccgacgaaatacaattacccacacgaaggcaaaacgctccgacaaaagccaagacacaagccgacgaggacccacccaacaacaggcaagaggagacgacacaaaaggaacacggagcctacaaaggagcaaacagagacgaaacactgcaggccaaaaaaagaaacaagacttcaaaaaaagacgaccaaaacaacaagtcacagg

SEQ ID NO: 173154 - DNA, 623 bp, Arabidopsis thaliana landsberg
aattttttctgaccgatctacatgaagagagaagcaatgaagattcatcaatggaagattgttgcatagaagaggctcaagtcggaaaagatcaaagagtcttcagattcagagaaagtagtgaagagaagagaaaatcctcatcatcaccattatcaccactaacagagtttagggatatggagagtttgacgtattacatgaggcaaaaaaggatgcatcgaagaagaagaagatcatcaacatcaccacattgttgccataatgtagtatacaatgagtttaaagtgacgaaggaagaagaagaggaagaaagacaaagattaacaaccaaacgtgttcattctaagcttcatgaatacgaacaatttttaactcagtttaaaaagaagaaggaagaagaaaacgagagacgaagattatcacccaaagactttgagcctacgcctcctgattacgaccaagtgattactcgctttagagtgctggagaaggaagaagaagaaagacaaagattagcaacaaaacatgttcatcctaagcttcctgattacgaccagattgctactaagtttaaactcctgaaggaggtagaaaaagaaagacgaagattattaaccaaa

SEQ ID NO: 173155 - DNA, 200 bp, Arabidopsis thaliana landsberg
gaaagcaggcatcaggaaacagctgaatcttctctgaacagcatagttattgtatatggaacatgtgatactggtagatgaacaggataacgccataggcactatggaaaaaatggcagcgccccccccgcccgtgctgcaccgggcgttcagtgattttatttttaataacaggaaggaaatgctgctgcaacaacggg

SEQ ID NO: 173156 - DNA, 869 bp, Arabidopsis thaliana landsberg
gcattgtctgcagcctatccggtggggagctgagccaaggagcatgatttgctccatatccattttcttcaattctagttatgcatgccttgagatccacgtacctaagataaacaaagaatcagtcagaggtgacaaacctaggacaaaagaagttgcggaatcgaacaaattttggcctaaggaacagaagcaaggcatatcaaatatcacaagtctcaaggtcttggatctctctgagaacaatcttgatggatctctcccttcatctcctgggatacaggcatgaaagaatctctcgtaagttcatcttcgcttttgcgtttcatatacagcttcactatcgtaatacataacttagcagtgaactggaagaattcaaagcaaggtcttgccaacaataacgtctgcctctacactctgatagacctctccataacaagctattcggagaaatcccatattctttaggcaatctcaaaagcttaaagcttttaaacctctcatacaacgacatctctggattgatcccacaaagttttggaaatcttgagaaggtagacctttcacacaataacctctcaggcgaaatcccgcagaaactatccaagctcagtgagctgaatgtatggagttgagcaacaacaaacttataggtagaatccatgagagtcctcagctagacagattgaacgatccgaacatttacgcaaacaacaacaaaatatgtggaatgcaaatccaagaaccatgctcgacacagaccaagcagccagagaagcaatgttttcatggaaagctgcagtcataggttgtccttgtggaattctaatggcagttgtctaaatgtatatggttggctatttcag

SEQ ID NO: 173157 - DNA, 1254 bp, Arabidopsis thaliana landsberg
  unsure (1)..(1254): unsure at all n locations
ctgcggacagtgggattcaagaaggggaggttttgagaccaagatcaagacaggagattgaactcgacttctttgcttggcttgtcgaacgagcatatgacccgagcaacccaatccctattccacctgcctatgaacctaaaccatactttccagaaaggattgcacaagttaatgcaaggatcttccagaaacacaagatgatgttcataaagtgtatcaaagagctagaagagaagatacctttggttgatactcccaaggaagtaatcatggaaannnnnnnnnnnnnnnnnnnnnnnnnnnnnnngagttttgagtgcagcgctatcattcaaaggaaggtgataccaaagaagctaggtgatccaggttcctttactctaccttgttcactcggacccttagtgttcaacaacagcctttgtgatttgggagcttcggttagtttgatgcctttgtctgttgcaaagagattgggatttgataagttcaagcctagcagcatttatcttattctagctgatagatcagtgagagtgcctcatgggatgctagaagacttaccggtaaagatcggatcggttgaaattccaaccgactttgtggttctagagatggatgaggaaccgaaagagcctctcattcttgggagaccatttttagcaactgcgggcgctcttatcgatgtgcaaatgggtaagatcgacttgaaccttggtaagaatctccatatgagctttgatattgctaagaagatgaagaagcccactatagaagggcagcttttcttcattgaagaaggaaatttagatgctgagttgttgagtgggttggaaaatcctattccgtactccattccgactcgccacctaggagagcccgagaagcttcttatgttagaaggaggacctagcttagaggttgagactaaggggaacaatttttatgttggtcctattgctagagagcttatggagctcaggaaacagtatggagctcaaggagagaccatggaaaagttggacctcaagatggaggagctgaactacgctatcctggagcttaaggagatgattaaaggttatccaggtcctgagatcgatgaatactttgaggaacccgatcttggagaagaagactatagtactgataagaaagaggcttactttgaggaaagatcaaatgagtactccacactccagctatcaagagaaaatgcggagtatgattcagactttgaggattcaacaa

SEQ ID NO: 173158 - DNA, 560 bp, Arabidopsis thaliana landsberg
cggtaatatgcctgtgaagaactctatagattgtgatgagaatttgaagattgtgatttgttctgatccaagagttttagttgctgttgagaggtttaatttgaaggtttttaaatctattgtgctcttagagtacgaaactccggttaacggatcgaaactagacgaatgcgatgtttcttgtaggtttaggaataagaaggagaagtcatggaggagatacagagatttcaggaggtttaggtttggatttggtgagaattgtacttataaagtgtttcatactagtggttggcattctggtgttaatgctcgtaggcctaggattagtagaccgagctcgagtcgaggagctcgcggtggtgattcggagattaatgatacgattccgactcttggttcgcagactagttttcgaagagggaagtatttgtattattcacggggtggtgattattgtaagggtatgaatcagtatatctcgagccctcttgtgtggtttaggtgaagcaatgtataagaataggacttttgtgatggatttgagtttgtgttggtct

SEQ ID NO: 173159 - DNA, 349 bp, Arabidopsis thaliana landsberg
atgtttaagttctttgatttgtttttgagtgatttcttgacttcactttgtctcttttgcaaaggtatgggaaagacaaacgacgctgcaggcacttctcgagcacgcacgagcacttcgggggcatcgacaaaagaagatcctaacaagcgtcctgttaccggcatatgggataaggaagacacaaagctactggcagcatattgatgtgaggccaacgcgagtcgcttccaaaccttctctacatgtgcttggcctgtacgattatgtcgtgacggtgttttaaacactcagtgtgggacggtattgggaaatggatgaggatgtatatcgtaaacttgtgaaggag

SEQ ID NO: 173160 - DNA, 93 bp, Arabidopsis thaliana landsberg
atgacgaagttcacatcagaagaagctctggaaagtaaaacgccccccatggaagtaaccaactccttgatcttgaccttcaaaagaattgca

SEQ ID NO: 173161 - DNA, 2137 bp, Arabidopsis thaliana landsberg
gcttagaagtagtcaatagctttgttagtgtttctatggtcaaaatttgtcacaatccaaaacatttgactaattacatgaggtagagatggattaggaatgtttagacaacccttataccaatttttttcaaaaagaggctaaaaccaataaaaaattgcttataagtagtaaatagttttgttagtgtttctatgctcaattataagagttagagatagattcggagtgtttagacaacatttaaacccattttgtccaaaaagagggtaaaaccaacaaaaaattgcttagaagtagtaaataactttgttagtatttctatggtaataatgtctcacaatctaatacatttgactaatcataagagttaaagatggagtaggaggttttagacaacaattatacccattttctcccaaaagatgctaaaaccaacaaaatattgcttagaagcagtcaatagctttgttagtgtttctatggtctatatgtgtcacaatccaatgcatttgagtaactataacagttaaagatatattaggtgtgtttagacaacccttatacccattttcttgaaaaagaggctaaaatcaagaaaaaattgtttagaagtagtaaatagttttgttagtgtttctatggtcaacatttgtcacaattcaaagcatttgactaattatatgagttagagatggattaggagtgtttagaccacacttatacctattttcttccaaaagaggctaaaaccaaccaaaaaattgcatagaatgagtcaatagctttgttagtgtttctatggtcaaaatttgtcacaatccaaagcatttgactaattatatgagttagagatggagtaagagtgtttagactgctcatataccatttttctttcaaaagaggctaaaaacaacaaaaaattgcttagaaacagtaaatagctttgttagtgtttctatggtcaaaagttgtcataatccaaaacatttgactaattatatgagttagagatggattaggagtgtttagacaacaattatacccattttgtcccaaaagatgctaaaaccaacaaaaaagtgcttagaagcagtcaatagctttgttagtgtttctatagtaaaaatgcgtcacaatccaatgcatttgagtaattataacaggaaaagatggattaggagtgtttagacaacacttatacccattttgtcccaaaagagactaaaatcaacaaaaaattgcttagaagtagtaaacaactttgttagtgtttctatggtaaaaatttgtcacaatccaatacttttgacgaatcataagagttagagatggagtaggagtgtttagacaacatttatatccattttctcccaaaaaatggtaaaactaacaaaatattgcttagaagaagtaaatagttttattagttttcctatggtcaaaatttgtcacaatccaaagaatttgactaattatatgagttagggatgaattaggagcgtttacacaacacttctacccattttgtcccagaagaagctaaaaccaaccaaaaattgcttaaaagtagtaaacaactttggttagtgtttctatggtcaaaatttgtcaaactccaatgcatttgactaattataagagttagagatggattaagaatgtttagacaacacgtatacccattttgtcctaaaagaggctaaaaccaacaatcaattgtttataagcagtaaatagctttgttattgtttctatggtcaaaatatgtcataatccaatgcatttgactaaatagaagtgttaaagatggattaagagtgtttagacaacttttcctcctcctaaacctcctgatttcatcaataagaccttcaaatttccaaaaactgttttacggttaagcaagccacgagtttttcgtcgagcgcttgttctttcttctaatgcttttgcaggacaaaggagtattccacccatacctgagttccaccctgctgatgctcctctcttcctagatagacctcatacactaattgcttatacaccagtatggatgatgagaggtctttctccgcaatatttactgccaccatctgatccacctgatccccaaattccatcaaagtcaagctat

SEQ ID NO: 173162 - DNA, 579 bp, Arabidopsis thaliana landsberg
atttttacaaatcccatggagacaatttgtcttcacaaagcctttaggtctctctaaatcaaccaaactcgacgaagccgtgacattgatagagaattcatcatcctcgccgtccaatctctccactcccgaagcttacacagaccttcttcatgcttgtatctccgctaaatcactccaccatggtataaaaatatgttctttgattctcaacaatcctagtctccgtcacaaccccaaattgctaagcaagctcattaccctattctcggtttgtcgccgattggatcttgctcggaaaatctttgacgatgtaactgattcgagtctacttactgagaaagtctgggcagctatggcgattgggtattctagaaacgggtcaccaagagacggtttgatcgtctatgtggatatgttgtgtagcttcattgagcctgggaatttttcgatatccgtggcgttgaaagcgtgcgtggatttgaaagatcttcgggttggtagaggaatccatgcccagattgtgaaacgaaaggagaaggttgaccaagtagtgtataatgtgctcttgaagccttt

SEQ ID NO: 173163 - DNA, 500 bp, Arabidopsis thaliana landsberg
taacaggacagtgcagcgattgttataaagcaaccaaagaaatcaccattattcttaaggatgattgttttagtgtttgctatggtttgtggtctctacatttgcgctgtttgcttaaaacagttaagtaatgtcagcttccaaacctcccaacttgtccaaactagtcctattgattctcactcgctacgctttgttactcggattcattatccaaagcctcagacttttaataggtaactaatataccagttctgttcttgtctatgtttttgactctctttggtttgttcctttgtttaaatctttgttttgggttgtcttaaactagagctgaatgtggacataatccggtgaggtactttgcgatattgtcgatgcagagatcaggaagcggttggttcgaaacattgttgaatagtcataacaatgtgagttctaatggagagatttactctgttttggatcgaaggaaaaacatttcttcaatcattcagact

SEQ ID NO: 173164 - DNA, 1550 bp, Arabidopsis thaliana landsberg
tgcatatcatttgctcgttggctaaaaaaatctgtagcctttgaggctttgacgaataaatcggttggctttttaaatatttttcttctcaagtatgtaaaaattggcgatcaagattcaagtgacgactgtaagataaaattgaaaattacaaaacttgttgtcggttcagagagactaaaaccattcaacatgccggttttttcgcagaatatgtaagcacatcttaaataaagttgttcttctataaaatcagaatcatgacgatacattcttaaagatcccactaatctgttacgaaagaaaacaaatgtgtagtataagcaattattttctaatagatcaaattgtcactttctgcaactagtaatatcaatccaagaagaagatgatcacatcaacatgactaagttggtagtacattttttttttttttttcacagattaagttgttaagtacatacatattttgagttccggacaagaaaaaagttgtgcgtgtttagtaatgggctttttaaaatattttggatatatatagctgggctttgtgataaacccaaaaactcaaaaagctatgtcattgcaaacaaatatctaggtttacaatcggtggttgataacgtaatggcagaggcagacgacggcggaaacggagacggtgccaccgccggtgactgctacgctcatcatcactacagagatgtcaaactagcaagagatgcaagtgaaaatatagactcaatcagctcgcttcctgatgtgatcctccaacaaatcctctcctctcttccgaccaatttagctatcagaacttcagtcttgtccacacgatggaggcatgtatggtctgacacaccttacatatactttgatggaccaggaactttgtataggggactgaaggctgatacgataaacaaaaccctagctcgatacaagcttcccaagattatgagttttcacctctataccaaaatattttagacaatgttctttacattgatgaattctttgctaagaatctttgtggttttccgtttctcgaaagcttaaagttgttttatgttgttaatctgatggttctagatctaagtaaatcgttgcgtctaaaaacattagccaaaccaagccgaatcagagagtttcctctggagtcttattggctatgttatatcaaatctcattttaaaatcatactagatgatgaaaactttttctttattttgttggactatttaggaaatattattggactatagtataagttttcttaaaatatatagtacaattcacaatagcaacgttaaacatcaaaatgcaaaacaccagaatttcattaaaacacttttatgtgtaaaaaataagtcaaacgactatttcttgaaatttaaacgatcattacgctgtttaagctctgactcaaacctatcatttccataatcacttcttttttccaaccaactgatgacgtcggcaaagacaatttcgatgttctctggtgtctcgccggtgagcaaaccgtgccacctaccagggtacaactttta

SEQ ID NO: 173165 - DNA, 425 bp, Arabidopsis thaliana landsberg
ataacgctagtgttttggatgctagcatatgatcttcctgcagatgccatggacgagtacatgaagataggcgaatcaacgacaatcgaaaacatgaaaagattctgtcgagccgtagtggatatattttcagaagagtacctacgatcaccaacacctaatgatgtttctagacttctttacattggtgaaaaacgaggttttcccggaatgcttggtagcctggattatatgcattggaagtggaaaaattgcccaactgcttgggcgggacaatatgcaggccgtcgtggatcacctactataatacttgaagcgttagcagattatgatctttggatatgacatgcatattttggattgccaggaactaataatgatatcaatgtgctcgagttttcccatcttttctccagactcgctta

SEQ ID NO: 173166 - DNA, 844 bp, Arabidopsis thaliana landsberg
atgatcattatgcatgattaccctcttgatatggtcgagcatcctggttttgttggttttctgcaggctcttcgtccccgcttcagtgtctctagcttcgacaccattcatgctgattgtctcgctatgtttctatcccaaaagcagaaaattttggacattattggagagattcctgggggagttaatcttacagtagacttgtggtcatcaaagcaatcagtggcttacgcttttgtggcaggacactttgttgataaagactggaatttgactcaccgccttctaaatggttgtggtgtggcttctcctgattctgattttgcgttaaaccagcctataacagcttgcttatcgggctggggcttggagggaaagatttcgagcatcgctgtcagccaatcattagtaaataaaacctccatcgacaatctcagaggtttcttgtctttcaggaaccagcatgtgttgaatggtcagttgttgatggggagatgctatgctcgcatcttaagcagtatgacgcaagatgcactcacagctgagcggcttcaagaacccataaagaaagtccgagatagcatcaagtatatccaaaccaacgaggcttgcggagacagatttgatgaactgaagagacggtttccatccccttcgctttacaaagatcttcttattgacaaccaaacgagatgggacacaagttacaatatgttgttggctgcctgtgaacacagacaagtgttttctaatttggaaacctgccatcctgactacaaaatatcattatctcctgaggaatggaaaaagattgagagtctttgctcatgcttgaatgtacttg

SEQ ID NO: 173167 - DNA, 1421 bp, Arabidopsis thaliana landsberg
tcggtttctgcccaatgcaagtggagatgtatcagggtctcacaaagtatgagttggagtttataggattagggttcttgacgttttcggttgatcaacagcgctatcagttgtcgatcaagagtttggaaagactgtttggcttccctagtggaaagggaaccaagcctaagtttgacatggaagagcttaaggatttgtgggctactattgggaacaatgtgccgctaaactctgtacggtccaaaagcaaccaaatccggagtcctgtgattcgctactttcagcgctcggttgccaatgttctttactccagggagtctacaggcaccgtgtctaacacagacatgaagatgatagattcagcgcttatagggattctccgccgtacaaaaggaaagaatgtcctgagaggagatcttaacgactcaccaccagtaatgcctctgttgatccatctgtgtgggtacatgaagtgggcgctgacaaacggcaagaagaaggtaagaggagcactatgcgtgggtggcgttgtgacgccaattctgaaagtttgtggagttccgctcaaggaagtagggttagcaccgagaatgatggacttggatcacttgcgccgatgtgagttctctgagtttgacatggttggcgactttcaccgctacaggttcgagcattcatcgattagaatcgccaacattcttttcccctgcatttacgctactaggattctcgagggtaggaacattgacttcaagcctgcgcttgaagatctttatttcgagggcagtccgccaactgaggagattagtcacaccgaaggagctacaatagaagatgttgatgagacatatgatatagatgaggcggagtttgacacgagcatgtatcatttcagtgagcatatacctccagcgaggaaaagcaagagtttgagcgaagctcacaggaacaacagcaagctgcagaagtggtgcaagaaacaggataagttactcgccaagtgcctcagggctatcaagtttctgaaggacaagatcagctgctcctcttccactacaactattccgcaatgacagctccctcaggacatgccttcgaggagatatgacgcgcccgagccaagttggcgcaggcctgagcctagagagcagaagattctgcatgtccctgcgaggcattcatcattcgagcctcgtgaatctaggaggaataggagaacgacactcactcgatctagcagcaggagcagacgacttctgcagtctcgtagtttacgcgaccgcggtgctggccgcaacagaagaagagaggtcgagtatcctcagagcggtgctggccgccacagagctgatgagatcgagtacccacatgctggagctgatacggaacatggcggttcgtctatggcctgggagcaa

SEQ ID NO: 173168 - DNA, 777 bp, Arabidopsis thaliana landsberg
  unsure (1)..(777): unsure at all n locations
gccgntgccttgctccaagaaaaggttttgattcaacttctattattaaaaattaatcttattttagatctaaatcttgagatttgattaataaaacgttaattataatttgtgtaaaaaaatcaggaaatcaagagtaaaaagagtgattagagttccagcagtaagtagcaaaatggctgatataccatcagatgagttttcatggagaaaatatggtcaaaaaccaatcaaaggctctcctcatcctcggtaattattttttacattttttaccatcgatatatatactctacacatacatcacaatcactcactagattcaacaccaaaaatcaaatattggctagaaaattaagcaacttgtgtattgtcaatattagtaccagagagattgtcaatattgtttttttctatatcggttgtaccaaacatgttgtctagtagtacagtagtgggttcagtttcacgctctttttgacttgttgtttcctatagaataaatttgaaatagaaagccgagagttaagttgactatttctgttctcattaattaataagaactcgaactaactggggaggactcggtgtaatggttatgacaggggatattacaagtgcagcagtgtaagaggttgtccggcgcgtaagcatgtggagcgtgcactagatgatgcgatgatgctaatcgtgacgtacgaaggagaccacaaccatgctttggttctcgagacgacgacgatgaatcatgacaaaactctttagtttctcgcgtcc

SEQ ID NO: 173169 - DNA, 392 bp, Arabidopsis thaliana landsberg
  unsure (1)..(392): unsure at all n locations
actggttcaccctctgccggaaacctgataaaaccataaccggtaaggagagtggttatgctttggctagagtcccaatcccgcattctcctaatgtacgattttcgagtctcgtgcggttggctctgatatctacaacaatggggtaagccaagataggttcaagttaagagcttgctcctcgagcgtctcgattctggattgccggtctcannnnnnnnnnnnnnnnnnnnnnnnnnnnnnnnnnnnnnnnnnnnnttctgctggcgtcctttatggaaagattgatgtagcaggaaattccccagataggaactccatgacgaaatctgtcgaggtgttcaagttggacataaaaacacaagtttgggatcctgagcctatccattgca

SEQ ID NO: 173170 - DNA, 451 bp, Arabidopsis thaliana landsberg
ggtctgtcaccattttgtaagcactttgatataaacttaaatatttaatacaaataaagttaaaaaaaattctcatatcttgtagcctcaagaacctgaatacgaatgcgttgatatctacaaacaaccttcgctacaacaccctaaactccaaaatcaccaaatccaagtatatttctatatatttacatttgtttgtcgatttcctgcacctaatgtttatcatgatcatatacttatccctatttgattgatatattttttgatgcatcacatagatgagaccgagcgatgaagtcttagccatgctctcaggagatacatcatcagaaaacttatcaaacgatgaaatggttgctgagtttgatataccagaagaaggatgttcttaaggacaagtaccaatccataaaccaagaaataattttcaccacaccgagaaacattttca

SEQ ID NO: 173171 - DNA, 1526 bp, Arabidopsis thaliana landsberg
atgtgagccttgagggcccaaggagagaggttagggttgatgcgctgcagccgcaactggacgccacgtggcagagagtggccacgtgagcgggtcccacggggcgggttgttacagtaacatcaacaatgagtgtaaatatatggtatacagaattacagatatcatgaagtataattctttgagtggcaagaagttgtaggcttactcccccgttctccttcctgcagatttcatgttttttcttgtggataactagcatcagaagaatgtcacttgatcatcatcctggatttgattcggtaagtcgccagccagtatattgggatcacttttaagcatattttgaattgtatattgtaggactattgttatcttgtatatctgcccttctactgtcatttagtcaatgtttttggaaaatgtcttctgctacactttgatagaatcctttgctccattgctttcagggtggagctttatggtttcagaatttgaccgaaattcccaatggtctttatggtccacttttcccctttttaatagctggtttgcattacacaaacacacaggtatgtactgtttggttctttgttggatcatgaaacgttaagtaacaattatgctacatctcatcaactataatcatttcttttgaactatacttcctgttattttctgcagtcctgcttgtttgaattatatatacattttcctgcagataacttttacagcatcctcagttcacaaagttgataaattcacggaattggcaaaagtgagtttttttttctactttgttgtgcagtttgattataggatgtctatatttgatcatatatacttcaaagaactttggccgaaaaagtaactgggacttggttgcctggcattaagtaaaaataccaaattctgacgaaaaagaagaacatcttaagtgttcattatgctacttaacaattgatgggtgttcatttttcttctgcaggcttacaagacatttctgaatcttttgacatgtgctctgtatttcctttcattccaaatgcctcaggtagattaatctctgataatataccgccttttgaagttcacatattcttgtttccggtttgttggtacaaagaggttctaataaagacatcttctaattgaacatgttagtgtatgatactgcgaactctgggtatgctttatctttgtggccatgactatattttgattctgttttagcttaaggtccttcaactaagtctcttaaaatgcaaaagttcaaattacttgactcttactcttttgttaaaacccttaatggtgactaatcttgaaactatgccattcaaactacaccatcttcagagtcacatggagtttattattaatctagtatctgagtgagttctgtttaagagctactgctctcagtttactattaccccctggaacagctatttataacaccattctttctattaggaaaatactgtattttttaactgccacctgttcaaaagtttaatttcttc

SEQ ID NO: 173172 - DNA, 574 bp, Arabidopsis thaliana landsberg
ctgcagaaaagggagtatcgatgatgcattgatagagttgagatatatctcaagctgatgtgatggagaagaaaggctttcaagctgatgcttttacttataacgcggtttgctaagtaaatcaaaacgatatggtgaggcaaagcactggttgttcacgatgattgatagaagtgagcgtaaaacggttgaccatactaatctgattgatatttactgcaaaatagagaacttcaaagaggcaaagaagctacttgaagagatggccatctgagggagaacaacaacctaatgttgtcacttaaaatgtgatgatcaatgcgtactgcaagcaagggaaagtaaaggaagctcggaaactaaggacggacttggaagacaaaaggatggttctctttgacgaatggggctcaaagggtttggttcaaaacgttgtaacatacaccgcaatgatctcatcgggtttgtccaaggctggaaaatcgaacgaatcatttggattctaggaaaggttaaaaaaatagtaaatagggtttatacagcacgtgttcaaagtctgcattcagctgggact

SEQ ID NO: 173173 - DNA, 788 bp, Arabidopsis thaliana landsberg; identical to SEQ ID NO: 52302

SEQ ID NO: 173174 - DNA, 395 bp, Arabidopsis thaliana landsberg
cgtgtcgatcttcgcgtccgcctataatggcggaggttattcgcggcggtctcaagcccattccgaaaggacaatatgaagcggccgatgcccttggtctaaactacttccacaaaatgaccttcatcgtgcttccgcaggccatcaagctcgtgatccccggcatcgtgaacaccttcatcggcatgttcaaggatacgtccctcgtcacgatcatctcgatgtacgacctgctcggcatcgtgaaggcgagttttggggattcgggctggatcacgccggtcacgccgctgacgggcctgatcttcgccggcttcgtgttctggattttctgcttcggcatgtcgcgctattcggccttcgtggaacgccggctcgacacgagccacaagaga

SEQ ID NO: 173175 - DNA, 800 bp, Arabidopsis thaliana landsberg
gtcttaagattaatttgacctacatcaaataattccttcaacatccaacatcaatatcaatgatttgccatcgaatcctgctaaaaaaaagagatagtgaactatcatccagatcaacgagacgaggtaagacacaaatatcttgatagaagttcatgtcaaccttatggtcatacgtttaagaaaacaatgatgagtaatgctctgaggcgatttgaccctgcttggtttgaaaaatatggttattggcttgagtatagcagatcaaaggagagctttttgtttatgttgctacttatttaacgatgacgtacgaaagcaaggtgggagtaatgtgtttgtgaaagaagggttttgtagatggaataattaagcatgagagattaggcacccatgtgggtaaacccaacagttctcataattatgctattgagaaatgtgttaatttgatgaatcaaggtcaatctattgtgcatgcgttgtttaagcaggatgatgtgatgaagaaagagtatcacattcctttaaatacttcgattgatgcttctagatatttgttgcgacaagggatagcttttcatggtcatgatgagtcagaagagtctgccaataaaggaaattatttcggaactcgtgaaatacacatgagaacataatgatgctttaggcaaagcttttttgaataatgttccaaaaaataacatggagaattcttccacagattaaaaagagatggtaaaatttttacttaagaagtagtgaaattttgttattgaaaaatttgaccttggctgttcttg

SEQ ID NO: 173176 - DNA, 1172 bp, Arabidopsis thaliana landsberg
atttagatccacaaagcatgctagcgaaaacgctcccagaagtatcatcataagatcttgtcttcgtccgctattactcaatggacataatgcgagaagagccattaaagaggttggtgatcctcctggtcttggatctatgttcacaaaatcttgtttggatccggaaaacctttccgggtatatataaattgtcggcttgatcatcaataaatcaagtgccttatatgttttaactctaacagcatgtttgtttggtattttgtcttctccattcaactagaaatctattgacaagtatacacatttactctcttggattcatgaacatgaattcctttttggatccattgtcagcctgctcgaatataaaagatttgaaaattgttggagtgtaagttagagtgcctactttttcttattagctatattccttgtatgcatgtttaaatttcatgaaatgtcctcttttttttgccttttatttctttatagagatgcatcttctattgaattctttgggaacattatctctttttttttctttgtcaggaatgttttgttagagccgatattagagttacttgcgagaaactgttgcttgatagagcatcttttcttagataactgttctcaaggtaaaacttttacatggtggggcttcctttattttttcctcacaagtttgcttaagcttaattacttacttttgcgtctggttgattttgattttaggcgtgataacatatccaaccatcgaattttttgtgaccaactgcctcaagataacttctctaacactcctaaattttaggctaaatgacgcaatggcccaaatccttgttacggtagggctcttcttcctttatgtcttctcacttcatttaatatatgtatatataagcttctaaaccaccaaaaatatgttgggattatttgcagggttttcgcatactgaagtatatcaatctatccaacacagctggaatcactggaagctttttgaggttcatatggtttaatacacaatgaaatgatataccatctttgtttctattagcaagatctctcatgacagaaaattttgatggtagggatttgggacatagacccaatgacagtcctctcgagacactaatactacgtgattgtttttctctccaagaggtgac

SEQ ID NO: 173177 - DNA, 567 bp, Arabidopsis thaliana landsberg
atggatgagacaaagtcgtcgtcttcaaggctagagagagaacagagagaatatgatagttttagaagaaaagttgagacagcccgagggaagagaaaaatgaaaaagaggtatgagcttatagatgaggatctggtttacgagtacatgcctgagcataatcgcagaggcaccatacttctgcacaagcccgatgtattgcctgctgaggaatatattaggctcttcaagctgaatgagttatgtagcacgaggtatccttgctcgaccacacttgcacaactcggactgttggaggatgttcaacacctgtaccagagttgccatctggacactctgatggcttatccgtatatagcatatgaagatgagacaattcaattcctctccacgctgcaagtggagctctaccaaagtatgacctctgatgagttgaattgtgaaggattgggattcttgagattctctgtgtatcgtcatgagtataggttatcaatcaagcgcttggaaggattgtttggtttccccagtggaatgggaactaagcccaagtatgacagagaagag

SEQ ID NO: 173178 - DNA, 356 bp, Arabidopsis thaliana landsberg; identical to SEQ ID NO: 15822

SEQ ID NO: 173179 - DNA, 412 bp, Arabidopsis thaliana landsberg; identical to SEQ ID NO: 75529
  unsure (1)..(412): unsure at all n locations

SEQ ID NO: 173180 - DNA, 511 bp, Arabidopsis thaliana landsberg
cctcagggatcattgattctttggggttattaagtgacaagtttggcaaaagagctggtaacatgaaggtaccattatccaagattctttgtaagcattagaaatcttaggaatttatatattgaaggtcattgtgccctattttgtagatggcaagtttggctgcctattttggtcttggagttcaaaagcacaggtacctaatcatatatgtttgtatctataactgttacgttttccttaaggtgaaataacgcacatatgtcatataattgcaggagtctcgatgatgttcgaatgaatttagaggtcctcaagcattgtgcaacagtgcttttcttgggatgtcgtatactcataattcttttttttctttcaagatttttatttcaaatatacaaattaactcatttgtatatggggttatatatcacctaaatatacaggaatgtacactttccaatcatttggaagggaaaaggctttttttttctaggagggtgacaagaag

SEQ ID NO: 173181 - DNA, 475 bp, Arabidopsis thaliana landsberg
acccttaatgtacacttacccgctgtgataacgtaagttctagattcttagatgattgtgtcatgatctctctcgagttgaggtttatatatatgcatcaactaacctgcatatgtcaatttgttcactgcattctttgtggaactttttttgtgatcactcaaattattaagcaaactagcatttaagctttaatagaaaggtgcaacaactcttgttttgtttgtaacagctcttgatgttacaatgcagaactgatttgaggctgaaccaaccaagatatgcatcactccctaacataatgaaggcaaaatcaaagcctataaagaaaatgacggtgcaagatctgaaagtagacattaaatccgacatagagatcttggaagtcacggagcctccaaagaggaaatctggggttatggtttcttcggtggatgagttgatagataaacttaaaaatgaagctcatgttgtt

SEQ ID NO: 173182 - DNA, 778 bp, Arabidopsis thaliana landsberg
cataacatcataaagcatcaccgtggaagttcacctgaaaagattaagcggattctcgataagtgcgggatagacttaaccgaagagcttgttttagaagtggttaatcggaatcgatctgattggaaaccagcttatatactttctcaattggtcgttaaacaatctgttcatctatctagctcgatgttgtataacgagattctcgatgttcttgggaaaatgcggcgatttgaagagtttcaccaagtgttcgacgaaatgtctaagagagatggatttgttaacgagaagacgtacgaagttttgttaaaccgttacgctgctgcacataaagttgatgaagctgtaggagtctttgagaggaggaaagagtttgggatagatgatgatctggttgcgtttcatgggcttttgatgtggttgtgtaggtataagcatgttgaatttgcggaaactttgttttgctctcgtagaagagagtttggttgcgatataaaagcgatgaatatgattctcaacgggtggtgtgtattaggaaatgttcatgaagctaagaggttttggaaagatatcattgcttctaaatgcaggccagatgttgttagctatgggacaatgataaatgcattgacgaagaaggggaaattgggaaaggctatggaattatacagagcaatgtgggacaccagaagaaacccggatgataaaatctgcaataacgttattgatgctttgtgtttcaagaagagaagccctcaggcacatgaagtatgag

SEQ ID NO: 173183 - DNA, 541 bp, Arabidopsis thaliana landsberg
gctctcaatgtatggattcattctttttgcacagtgggtcgtttgagttttgcaattagtttacttagaaatagagtaatcagcatcgatactgttacttataacactgtgatttcgggtttatgtgaacatggtttagctgatgaggcttatcagtttctatctgagatggtgaagatgggtatattgcctgatacggttagctacaatactctgattgatgggtttagtaaagttgtaaactttgttacagctaaggctttagttcccgaaatctcggaactaaaccttatcactcatactatactcttaagctcctactacaatctccatgctattgaagaagcatacagggatatggttatgagtgggtttgatccggatgttgttacttttagttcgattattaaccgattgtgcaaaggtggaaaagtgctggaagggggattgttactgcaggaaatggaggagatgagtgtatatccgaaccatgtaacttatactaaaaatgttgattcgttatttaaaaaaaatatttccg

SEQ ID NO: 173184 - DNA, 463 bp, Arabidopsis thaliana landsberg
gctcttttcctcgaccatttgccccttccgctacgacgatgacagcggcaagctgaacgagaaaggcaaacggcatttccgctggatcccgaacggcatcccaggcgtcgaaacgcggctccccatcctgttttccgaaggcgtcagcaagggccgcatcgacatcaaccgcttcgtcgctctgtcatcgacgaaccacgcgaagcaatatggcctctatccgcagaaaggcacgatcgcgatcggctccgacgccgatatcgcgctatgggatccgcagaagcaggtgacgataaccaacgatatcctgcaccatggggcagactatacgccctatgatggtctcgatgtccgcggctggccggtcagggtgctcctgcgcggcaagacgatcgtcgccggcccgtcctcgcccggcacgctggggcagggcacctatctcaagcaaaagcggtctagctaa

SEQ ID NO: 173185 - DNA, 1100 bp, Arabidopsis thaliana landsberg; identical to SEQ ID NO: 12550

SEQ ID NO: 173186 - DNA, 732 bp, Arabidopsis thaliana landsberg
gaccgttggatgatctttacgagtaatcattcaacggtagagatccatgtcctctttagttctattattctgtttctgtccgttggtctagcctttttctggtcagaatggtacaagtttgtaataactaaaagaaaataaattaaaaggcaaaaagaaaaggaacaaagcatgttgcagtagtgttctactttagaggtttcgtgacgaacaagcgtatacaagttgatgagttgcatttacttaggaagataaattgtttcttttctccatttccaattctgactttaatccttttttaaacaatatctacattataaattttatttcaaatattgtcattgtctattgtaagaaaagattattaccttcgttttaagaggtaagctataaacactaaatataatcaatacatttctcatcatattaaaatttggacgtgaatagtgcatttatatatttaattactgaacaagaacattctatttataaactatattagttaaagttttggtttggtcatggcagtaacgctggagggtcagcttcaactaccacagtgggaggaacgccgtcaacaaccgtcggaaacagcccaatgacgacattgaggccaccgtctggcaccacgacatcaccgtttggaataggtggcggtgggcttaatccacaaggaaccactactacaactaacaccgatgaatctggatcttatataataaacaagagtac

SEQ ID NO: 173187 - DNA, 415 bp, Arabidopsis thaliana landsberg
tgggatggggaatggtgagcatggtggcggctgacagacggctactggcaaatgctctgcttgacgccggttaccaccgcatcgtcctcctctcggcatcggacattccacgctttaacttctccaccatttactcttacctcacaaactcgctacactcctacgctcgatgtctacgatcttcgcggaccagcaaggtctcggccgctactaaccgccgtatgtccaccagtcatcagatgcaccatctggcgaaaaggctctcagtggttctatatacaccgtgatgtagctttagcggtattatcggacacaacttactttagtgtattctacacatatagcctttgcaattcttatgacgttgagcattacttgtctacatttgtccacgccatgtgtcaggcgaacaatg

SEQ ID NO: 173188 - DNA, 264 bp, Arabidopsis thaliana landsberg
gatcaaagtcaatgttgttcccaatccactacaagaaaacagacaaacaacgactacagaaagcaacaacagatgtagtcgtcgtttttggcgactaagtcacgaccgttttacgacacatatacgacaacatgaacattagtacgacacatatacgacaacctgaacattagtagtcaaatagtcgttattttacgactaaatatgttagtcggcaaatactcgtatagtaacgactatttaacgattatattattgaacgga

SEQ ID NO: 173189 - DNA, 350 bp, Arabidopsis thaliana landsberg
atggcttcggaagaaggacaagtgatcgcctgccacaccgttgagacatggaacgagcagcttcagaaggctaatgaatccaaaactcttgtaatcttcttctcccaaatttcttgatttcattttgtttttgatgagatatggatttgctattattcttgatttggtttgatttgggttgcgtttttaaatagagtctttgatctctcatactgaagcaatgtaatgatatgattcttttttgtatgaattcatgtttgaattttatgacaattcttggatctgcattaccatagattagatcctaggattggtaggagatcataatgacttatattacgagtcatgtt

SEQ ID NO: 173190 - DNA, 286 bp, Arabidopsis thaliana landsberg
atggatttttttttgggattgcctagaactaagaagggtagggatagcatgtttgtggttgttgatcgattctccgaagtggctcatttcaagccttgtagtgagactgatgatgctagcaatgttgctgaattgtttttaggtagataattcgtttgcgcggtattcacaacactatagtcgcggatagtgatgttaagtgtctgagtcatttctgtagatctctatggaatagattgggaactgatttgctgttaagcaccccccgtcacccccacacagatgg

SEQ ID NO: 173191 - DNA, 1425 bp, Arabidopsis thaliana landsberg
  unsure (1)..(1425): unsure at all n locations
tcagcacagaaggtatatatgnatagttctgaacgtaggggtgttgaattgtacgtgaaagcttcgtgtaacgagaataaaagtggtttccgtcaaatggtcagggtaagatcaaaaaggtttagtgaatgtgttggtacaggaaactcagtctctaatagttgttatgatactgatgcatcctcagttggtagttgtagccctattagttatgatgagagtgacaaaccaacttcttttctagatggtgccgactcttgtagtagtgatgctgaatcttcaaaagaagcatctggatgcagagatgaagctaggcgaaaacattcattatcaggtaatggatcagtggtnnnnnnnnnnnnnnnnnnactttacacttaccgtagtacactgacgaagttatttgcttctggctccctaagttgggatcaggaagcatccctaactgatctccgactttctcttaatatatcaaatgatgaacatttgatggagctaagaaatctcaagtctgccggtacccacagttaattttgttagtatctattatatctttttgatccttgacagtcttatcttcaggtgttggccatacttccctgcaatgtggaatcaactgttgtatattgttctgttaccggaggattgttaaaatgattgtatagacagcagaagggaaatatctctgactgaaaatttcaaatcctctttgtgatgttttcttcttatagtctaattttctttgttgtactttccggatgattaaacttaaacaaaagttacagtatctgtgttctaagatgagtcatgtcttttcttcatatatatactttagtttattgtgtttaagcttctggataagtcgagtcatttgtcttctcctcatcagtgatggattattgaacttaccttacatttttcaggaaaactgtagccatgttgggtgactgcagatcttgcttgcttctagagatcttactctgatgcatgaggttaactgaatggtgcaaaacacaatgccccttcttcctcaaaattcataatttaaattgtgctgtgttttctttttggctgtacataactgatctgtttcaggtgttcttggatatatataccctctttacacaggctgtgaactgttcctagccgaaggataatcatttacagtctgcaggttggataagtttgccgacgattggtaagtattaggttgaaagttctttatgaactgtgtctatctgagacagtattgaggttgtgtggaatacttttactctttcagcaaatgtgaccagtagattgtggaactgtccatgcttgtttgttggtggtatatgtacagttggcctggtcaacaaaatctacagaaaagtactcaatttttataaatcaaggctatagcatttcaagctgaaaaaccgaggt

SEQ ID NO: 173192 - DNA, 1228 bp, Arabidopsis thaliana landsberg
gcaggaaagtacgtgtggaaaacatacaaagaagtatacgacattgtcataaaacttggaaattctctacgtagttgcgggattaaggaggttcaaattcatatttactatatatttttcatatgtcctcaaataatggttttagtgttccttaagtttgtctcttatgctctgatatgtggaaatgtagggagaaaaatgtggtatatatggtataaattgttgtgagtggatcattagcatggaggtatgtactggaatgtataatctttgctaatacgagcattcattgtttttactttgacttgattgatagtgcacttgtgatgcaggcatgtaatgcacatggcctttattgtgtccctttatacgatacgttaggtataaatgtaccaacctttatcatgtttttggatgattctactcttttgagtgttcgagtatagtaacattctggttttgaacacaggcgctggtgcagtggaattcatcatttctcatgcagaggtttcaattgctttcgtggaggagaagaagatccctgaggtattattgcaactttgtttttaactcttgagataggctagtgcttttgacactttttatgataatttaacccctttttcccttttgggtaccagctttttaagacttgtccaaactcaacaaaatatatgaagagtgagtaatactaattgaacctttcactactttttttggtatacttgtgatgctaatgatcaattgtgattaatcgaaaatgaagctgttgtgagctttggcggtgtcaaaccggaacaaaaagaagaagctgaaaaattgggattggtaatacattcatgggatgagtttttgaagctggtaagagactattatttgcttctttaacaatgatcattcacatataatatggtataatgtatattctgtcaatgacattaacagggtgagggtaagcaatatgagcttcccattaaaaagccaagcgacatatgcacgattatgtatactagcggaacaactggtgacccgaagggagttatgatttcaaatgaaagcattgttactataactactggagtgatgcatttcctagggaatgtgaatgcaagcgtgagttttatttcatttgtcatgatttcacatgaagcgacagcttttaagttttaagttggactgaattttgcaaaacaaatcagctatctgagaaggaatgggtttatttctt

SEQ ID NO: 173193 - DNA, 636 bp, Arabidopsis thaliana landsberg
ctcatatgctaactaccctttgtaacccttgttcaggcaaacagcgaactcaacgacatgattgaaatactatgagaggttgttgctcgacagggaacaagaggtattggcctggaaagacatgttttcttccctcgagtccgagctccgctcctcaactgatgcaaggcaaaaactagaagatcaattggacaatctttcctctgaactcatgaagtcgaacgacgagctgcaggatcaataccagaggtatgacaagatccaggaggaactctcaaacgctcgggacagactctcggaatctgaatccagtgcctacgacttgtccaaccagctatctgaattgcagctcaagtacaaggcaatcgccaaacttctggatgctgagtaagcgaggtcggcatcgaaagccagaaaggaagtgaaaggtcacgggatggagatgcaatcagacatcaaggagtaccagagcaatctctctccttttggacaaaacccatgaagatgacttctccaaggaacgagagagggacgagttgaaggccgtcctggaagagaagcgaaatcggttagctgcccttcattcctcatcgtgcaaccctcaacagttcgaggagttcttcgctgaatcgcctc

SEQ ID NO: 173194 - DNA, 355 bp, Arabidopsis thaliana landsberg
  unsure (1)..(355): unsure at all n locations
gtcgccccggtgcgcatcgacatcgaacaactgacgctgtccttcggcgagaccacggtattgaagggcatcgacctttccatcgagcccggcgagttcttcgccttcctgggcccttcgggctcgggcaagaccacgctgctgcgggccatcgccggcttcggccccacgccgcgcgggcggatactcatcgacggggcagatatttcgggcnnnnnnnnnnnnnnnnnnnnnnnnnnnnnnnnnnnnnnnnnnnnnnnnctgtggccgcacctgaacgtggcccgcaacgtggcctacggcctaaaagaacggcgcgtcgcgcggccccagatcaaggcgcgcgtgcaggccg

SEQ ID NO: 173195 - DNA, 834 bp, Arabidopsis thaliana landsberg
  unsure (1)..(834): unsure at all n locations
tccaagggatgctttatggtgtggacgaataggttgcctgtataccaccaccatggaaagaggcaatgctgggaggccaagtanctatgctagaaggaaaggtagaaatgaagatgcagctccttcaaatccaaacaagatgtctcgggaaaagagaatcatgacatgctctaactgccatcaagaaaggcacaacaagcaaaggtgcaacaatccaactgtcttgaatccaacaaagagaccaagaggtcgtcctaggaaaaatcaggtttgtgactctcatttctgactctcctttttaacaatgcaacattcatttatgactctcctttttaacaatccaacatgtgtttctgactctcttttttaatttaggaaccagaagtgtttggatctcaatcttatcttggatcacaagagcaatcacaatcttatcttagatcacaagagcaaccacaatctcatcaaggatcacaggctgatcttgaatcacaaggaccaagtgctgcaggtcgtggtcttggatcacaaggaccaagtgctgcaggtcgtggtcttggatcacaaggaccaagtgctgcaggtcgtggtcgcggagcacaaggaccaagtgctgcaggtcgtggtcgcggagcacaaggacaaagggctgcaggtcgtggtcgtggagcacaaggacaaacagcatcaggtggtgatcgtggagcacaaagacaagcaggtggaccatcacaaggaccgcaacctgatagaagacatggttcagcacaagcacaagcagaaccacaaggacttcgtcgatttgaatcatggtttgagtgttctagacaatct

SEQ ID NO: 173196 - DNA, 724 bp, Arabidopsis thaliana landsberg
atgtgcatccacctcctccgcttacatcgccgctaaagccgtcaccgacggtctcaacgttcaacacaaaatgtagtttttgctcacaaccaccaccaccacctccatcaccggaacacaaagctccagctcctccaccgccgcctcctatgtcaaaagcatctgaaagtggagagttttgtcaattttcgaaaacgcattctacaaatggagacaatgctccgtcgatgccggcacctacagcaccaccgggtagcggaagatccttaaagaaagcaactagcaaattaagaagatcagcacaaatcgcaaatctctattgggctctcaaagggaagcttgaaggccgtggcgtagaagggaattcccagaatgcaagtaaagggcaaaatagtgttgcagagaaatctcctgttaaaggtgcaagatcaggaatggctgatgcacttgcagagatgacaaagaggtagatgacttgcgccacaagttaaatctatatgtcttgagtttgacactgtctttcatttgtgtcataggtcaagttatttccagcaaatcgaagaagatgttcagaaatacgctacatcgatcgaagaactgaaatcctcaatacatagtttccagacaaaagacatgaaagagttgcttgaatttcatagcaaagtagagtctattcttgagaaactaactgatgaaactcaagtaggggatcctctagagtcga

SEQ ID NO: 173197 - DNA, 1849 bp, Arabidopsis thaliana landsberg
  unsure (1)..(1849): unsure at all n locations
ttctatcttttgaaaataacattatacaatgtcattntcgtccggctccgatttaacggtttccggtatataattatatatgaataaatatacatttattatacattatattggaaatttgataaaatattgtcccatgtgagcatttttttaaagtatatatatgaggcctagtaatgcggagtgcaccatgcgaggatgtttggtaaatatgtttttattcacaaattggatcaaaacccattttttgtgtttcttatctttattgatatttttgtttccgaatcaagtaattaatctctaccgtcgattagtagattacctatctttacagttttcaccaactatcttcttcccaatatgaatcgttgattttattttagtctatagtcacactttttctattaataaatataaagtatacttactatgaatatggattaaaattttaaaatactctattgaaagtccagttcaactgttatattaatatagaaaattcccccaaaaagcagagattttttcagcaaaattttaaattttgtaaaacgaaaaagttatgtttatttgtttaatattaaaaaattgtgaccaatagatgtgtgtgtagcggcacgtgccggcctgcaacagtaaagctaaaaagcgtccggctcctaatattccccgtcaagaccgtgacttcttcttccttaactcagatccaacggctattgttatacgctttcgttaatcaaccgtcagattttcatctaacggtcaatattaaatctaactccttttttcttgtctcttaaaataatcccaaacccgacgcaaagcttctctctctctttctcgatctctcctaagcaaagtgagcttcttcttcttcttctccttctttttagcttcgccgtgaaaactctccggtatcggaaaacaaaaacgacgtataagaacaagatattgctggagttgagagatcgctcgtcttcttctccgttttgcgatgcttggcacggtggtgcagtggtggttaacatattaccgtttaagatttggccggaaaaatcgagaacgaaagtggtgattctactcttaagccttcaaaatcaaagcttttttttgtttctttgttctgttttttgcaaaaaataatttccgcggagatgagccaaaagaaactgacgaggactcaatcgtcgttactcagatcatctccgacgattcgatcgtcgatccaaagcctttcttcaatcactgaatgtgatgacttcaacgaaacctctcaccaccgccgtgaacaagatctcgaagccggtgagaaagaggaaaaacagaggaggagaaaaccggttaaatcattcgggtcaatgaaccgaattaaaccgggtctcgcattcacactcgcttgtctctctttcctgagtctctcatctttcttactgttcttcgttgatgagattttcacgtcggagaatctcttactaggtttgattttcgtcgctcttgctctgttcttcgcgtcgagaaacatggcggttattaaccaaaccgtaatcgcaatcaagcagattcgtgtaaggtctcgaatcaaacacaaaccgaaaccggttcaatggtacatcggagattcaaaaccggaaccgatcaaagaagaagaaacagagacttgtcgttaaagaaggaggttcaattctttagcaatggagatttttaccaaggtgaattctacagagggaagtgttacggatgtggagtttataattattacgttaatggaagatatgaaagagattggatcaatggaagggacgaaggttatggaatctagtgctggtctaaaggaagtaaatataaaggacag

SEQ ID NO: 173198 - DNA, 511 bp, Arabidopsis thaliana landsberg
  unsure (1)..(511): unsure at all n locations
atgtataaacaaatgataggggcaggtttgttggcattggtgttggtaacaggctgcgaggggcctgctattgttgagcaggcagccaacacatctgttccggctgcatacggtgcaggcaatgatactgtaaatacagcagctgttcagtggcggaatttttttacagaccccaacctggtgaacctgatcgataccgcattgcggaataaccaggaactgaagatcaccctgcaggaaatagagatagcgcgtaacgatatcagggcaaaacagggagcgatattgccctcggtgggagcgcgtgcaggcataggtacagaaaaagtaggacggtataccagccagggagcgggcgatgcatctaccgagatcacacccggcaaggaagtgcctgatgtgctgatggattatggcgtatctgcatatgccaactgngaagtggatatcnnnnnnnnnnnnnnnnnnnnnnnnnnnnctgcggtaaccaggtacctcgcaactatggaag

SEQ ID NO: 173199 - DNA, 414 bp, Arabidopsis thaliana landsberg
ggccacgagcgcgccactgccctgcgccatgtcctcgactccgcgatcccgcctagacgtctcgctgccgccgcgccagaccatccgcgcctggctcggcgaattccgccatcgccgcacgatccgggcgctgtcgctgacggctttcgatctggcgctgttcgcggcgctgatgacggcggtcgtgattgccgccgcgccgctgctcaagctgttcgccggtctggccgcgggcctcgtcatcggccgcctgttcattctcggccacgatgcctgccaccaggcgttcacgccgcacaagcgcctcaaccagatcctcggccgcatcgtgttcctgccgtagctgacgccgtacagcctctgggaggtcggccacaacgtcgtgcaccacggctacaccaatctcaagggctt

SEQ ID NO: 173200 - DNA, 585 bp, Arabidopsis thaliana landsberg
  unsure (1)..(585): unsure at all n locations
aggtcattctacatgttggccgacaaancagcgggaagacatatagtgcccttaagcaccttgaacagagttcttcaggtatgccttgaaggtgactaataaaccttttggaagccagttcttgaactgtttaaaatttgcttctttcacttgaaggtgtatattgtggtccgttaagattgttggcatgggaggtagctaaacggttaaacaaagcaaatgttccatgtgatttgatcacgggacaagagaaagacttagtggaaggggcaacacacaaagctgtgacagttgaaatggctgatgttacatctgtctacgattgtgccatcattgacgaaattcaggctagtcttgctcgactttggcttaagaaatcgacaagaactttttgtttgttattctcatcctttctttccctaatttcagatggtgggatgtaaacaaaggggatttgcatttactcgtgctttacttggaatcgcggctgatgagctacatttatgtggcgatcagactgtcgtacctctagttgaagaaatactgaaagtaactggagatgatgtcgaggtgtcatgtttattc

SEQ ID NO: 173201 - DNA, 620 bp, Arabidopsis thaliana landsberg; identical to SEQ ID NO: 2428
  unsure (1)..(620): unsure at all n locations

SEQ ID NO: 173202 - DNA, 1322 bp, Arabidopsis thaliana landsberg
  unsure (1)..(1322): unsure at all n locations
agagtaaggaggcatacaatctcggtgtttgtgggcgatgagagcggtataataaatagaattgctggagtatttgctagaaggggatacaatattgagtcccttgccgtaggattgaatgaagacaaggctctgtttactatagttgttcttggaacagataaagtcttgcagcaagttgtagaacagcttaacaagctcgtcaatgtcatcaaggtttttatcttgttctctattgaatctagtcttggctataacttgctgctttgtttaagaatttttttgagcttatatatactttaatgaatcatgactattatcttatactcataatggtttgttcaggtggaagatctctccaaggagccccatgtagaacgtgagttaatgctcattaaacttaacgctgatccaagcacccgctcagaggtaaagaataattcatcttgcaaaaatattgggtggatgttcaaagttgttttttcgttatgcttgatgcagttgcattaaaaacatcaaggatatggatgaaaggaagcatttattctttatgattaattgagtcacagtacagagtcttttttatctttctatgattagtcaagtcgcattaaaatctcaaggatatagatgaatatagatgaaaagaggttttcttccttgttattaatggagtcacagcaaatgttttttacttcttacgattgatcagttcacattaaaatctcaaggatatagattagatgagctatgttttaaaaaaacttgttcctttatgaaggtttccatgtactgcagatcatgtggttggtggatatctttagagcacaaatcgtggatacctcagagtaatttctaacgattgaggtcagaccttttcttcagtttatatgtgctcagatcatatggtcaaaatggttccactaagtctcattttttattgtgtaggtaactggagaccctggaaaaatggttgcactaacgacaaacttagagaagtttggaataaaagaaattgcgagaacagggaaggtaatttttcactttcaaccactttttgctccaatccttcttaactgtcaacaacgtctggctctaaatgtcttcaaattacatcttctgtcttgaaaaagcttgtttgaacggttggactcacatgtatcattacttgtagccacttggagcctctntnnttgtttttattttttttttttttagggctattatgtcacacatacagacccgagttcctttggtgaatctcaagacactctaaatggcagagcacatgaaattcccaggttagctttaaatacatgttc

SEQ ID NO: 173203 - DNA, 632 bp, Arabidopsis thaliana landsberg
tagtttctataattgtcttttgtctgttaacaggaaacagaggagcgggaaggagtccactaaactgggatgttagatcaagaattgctattggtgcagctcgtggtctagactaccttcactcacaaggcacttcaacatctcacggcaacatcaaatcctcaaacatcctcttaacgaaatcccacgacgctaaagtctcagactttggcttagcccagctcgtgggatcatcagcaacaaatccaaaccgcgctacgggttaccgtgctccagaagtaaccgatccgaaacgcgtgtcgcagaagggtgacgtgtacagtttcggagtggtgttgcttgagctgatcacgggtaaagctccttcgaactcggtgatgaacgaggaaggagttgatttgccgagatgggttaaatcggtggcgagagatgagtggaggagagaagttttcgactcggagttgcttagtttggcgacggatgaagaagagatgatggcggagatggtgcagctagggcttgagtgtacgtcacagcatccggaccagaggccggagatgtcggaagtggttaggaagatggagaatttgcgaccttattctggttcagaccaagtgaacgaagctgattaa

SEQ ID NO: 173204 - DNA, 495 bp, Arabidopsis thaliana landsberg
  unsure (1)..(495): unsure at all n locations
cctgcacgtgcacatctcgctgctcgacaagagaaccggcaagaacatcttcgccagtgccgacccgctgcagagcgatgcactgcgccacgctnnnnnnnnnnnnnnnnnnnnnnnnnnnnngtcgatggcgttcctctgcccgaacatcaattcgtaccgccgttttggcgcgcagttctatgtccccaatgcgccgagctggggcctggacaaccgcaccgtggccgtacgtgtgccgaccgacagcagcgacaacgtgcgcatcgagcaccgcgtggccggtgccgacgccaacccgtacctgatgctcgcctcgatcctcgccggtatccatcacggtcttaccagcaagatcgaaccgggtgcgccgatcgaaggcaattcctacgagcaattggagcagagcctgccgaacaacctgcgcgacgaaatgcgagcattggacgacagcgaagtgctcaaccaatacatcagcccggactacatagacat

SEQ ID NO: 173205 - DNA, 703 bp, Arabidopsis thaliana landsberg
aggtattttgtagttaaaagtaacaatcgagaaaattttgaattatctgtgcaacaaggtgtgtgggctacacaaaggagcaatgaagctaaacttaatgaagctttcgactctgtggaaaatgtgatcttgatattttctgtcaaccggacccggcatttccaggtagtttattgggttaaaccttagttactgtaagcctattgacagatcaaaacccttattcatatgtattgatggttgcctttctgtagttttcttctccatagtgtatttggtaggcagcgttatgattctaaataactttgtttcacatatgatgctataggggtgtgctaagatgacatcaagaattggtggttacattggtggaggaaactggaaacatgaacatggaactgcacagtatggccggaacttttcagttaaatggttaaaggtgtgtgactaagctttcccttttagttaatagtcctttctctgagatgtttatttagtcattctctatgcgattgagtctgttacatttagtccttctctggcacatgctactgagaagtaaaggggatgctttcataaatcatgcagtaacatgacttctttgattgattgtaattcttactattgtagttgtgcgaactatccttccacaaaactcggaatttgaggaatccttacaacgaaaacttacctgtgaaggtac

SEQ ID NO: 173206 - DNA, 482 bp, Arabidopsis thaliana landsberg; identical to SEQ ID NO: 21991
  unsure (1)..(482): unsure at all n locations

SEQ ID NO: 173207 - DNA, 323 bp, Arabidopsis thaliana landsberg
caacaacagcgtgcaggatattttggacaacgcccagaaccaggggggatgatcgccggtaccgaccaggactacaccctggtaggcagctcgggcaacgacaccatggatggcgacctgggtgccgataccctgaccggtggcgacggcaacgacatctacgtggtcgacaatgccttcgacagtgtggtggaaaccaacacctcggcatcgcagatcgatacggtgcaagcctcggtcagttggaccctgggcgccaatctggagaacctgctgctcaccggtgtgtcggacatcgacggcaccggcaatgaacggcgcaa

SEQ ID NO: 173208 - DNA, 593 bp, Arabidopsis thaliana landsberg
  unsure (1)..(593): unsure at all n locations
ctacagggtcatcgacatctacagcctgtacaccnnnnnnnnnnnnnnnnnnnnnnnnatttcaactactcggtgtcgccgaaaaccgggcgcggcgccagtctgtcgcggccgcgtaagcgccctgaaggcctgnnnnnnnnnnnnnnnnnntgcactgcgcgcgccgcgtgtttcttcgttcgctgctgatctgtgctcctctctctctctctctctctctctctctctctctctctctctcagctggatcttctcgaggtgccgatgggctacgacccgtgcacgcagacgtacgcgactgagtacttcaaccgcgaggacgtgcagaagcgctgacgccaatgtcactggcgtaccttacccctactcgctttgccggtaacttggctgccctgccctgtctttgaagggtggttatggtgacaacagagctgctaatggtcgtcgctgtaataactctctctctctctctatctctccttcagtaattcgataaacgacgcgtggaaagattccgacttgacagtcgttccagtagtgaagaagctggtggaggcgggnnnnnnnnnnnnnnnnnnnnnnnnnnnnnn

SEQ ID NO: 173209 - DNA, 542 bp, Arabidopsis thaliana landsberg
  unsure (1)..(542): unsure at all n locations
agtgatactggtggaagganaggatatcatgccccgtatccgtaaggtacaggagcagatgcgccggttctgcgagcaggtgcatagcggcgcctggaagggatataccggcaagcctatccgctatatcgtaaacatcggtatcggcggcagcgacctgggtccgtatatggtaacggaggcgcttcgcccctactggaaagaagggatagaggctttttttgtgagcaatgtagacggaacgcatattgccgaaacactgaagaaagtggatccggaagaaacactgttcctcgtggcttccaaaacctttaccacgcaggagaccatgacgaatgcacatactgcgcgtgactggtttttgaaggccgcaggcaatgaagcgtttgtagccaaacattttgtggcgctgagcaccaatgaaaaagcagtaaccgcattcggcatagacaaggccaatatgttcgcgttctggcactgggtaggcggccgctattctatctggagcgccatcggcctgtctattgcactgaccatcggct

SEQ ID NO: 173210 - DNA, 1618 bp, Arabidopsis thaliana landsberg; identical to SEQ ID NO: 19449

SEQ ID NO: 173211 - DNA, 658 bp, Arabidopsis thaliana landsberg
taagggggcaggaggctctttacggggggcgtgctagcaaggtgaggagccaatgcattcggttcgctctatgctaacccgggacgggatggttccctgttcacattcctaatccggaaaccaaaatcgcaatgcaacacacccgagccgcggttcttgagaactcagcagatctcggggttgtgtttgatacggatgttgacaggagtggagtggtggataacaaaggaaatcctatcaacggagataagcttattgcgcttatgtcagctatagtgcttaaagaacatccaggtgggttacattaatgatcagcgtttgttaatccatatttatgattgattaacttatgtgactttaagataatgtttttaagtataggaagtacagtagtgactgacgcaagaacgagtatggggctaactaggtttataacggagcgaggagggaggcattgtttgtatagagtagggtatagaaacgtgattgacaagggagtagagctgaacaaagacggcatcgagactcatctcatgatggaaacttcaggacatggtgcggttaaggagaatcacttcttggatgatggttagttcattactactcttcttaattcttatttttgtttcatttttttttaatactgggaaaaatgtct

SEQ ID NO: 173212 - DNA, 720 bp, Arabidopsis thaliana landsberg
atgagttatattgatcttatcggtctttatcaacttcaggtacgagactatattcatgttgttgatctagcagatggccatatatgtgcgcttcaaaagctagacgatactgaaataggtatgcttttcttcttcttttcataagtacctcattgtctcgacaatacatatccgcttatttatacaaacaagctcaactgtctgatttggctgttgtgctaggttgtgaggtatacaacctgggaaccggaaaaggaacaacagtgttggagatggttgatgcatttgagaaagcttctggaatggtaagaagatcacttctctccttctctctctctctctctcgctatacactcaaattcataagagtgtacgcacacatatgtgttgactctttacatcacaatgacttgatagtttgcaataatgtgtacagaaaatcccactggtgaaggttggaaggagaccaggtgatgcagaaaccgtctatgcgtcaacagaaaaagctgaacgcgaactaaactggaagtaagtaaaagacccaacgaatgtttttattaagtatgtatcatggacctgttttggcatagtctctaagaatgaagaaactcaaaatctgtggacagggcaaattttggaatcgaagaaatgtgtagggatcagtggaactgggcaagcaacaatcctttcggttacggttcttcaccaaactcaacataa

SEQ ID NO: 173213 - DNA, 433 bp, Arabidopsis thaliana landsberg
tccattcttatttcctctgttttatcagttcaattttgttggacgacttctcggccctagaggaactcgttaaaacgcgttgaagctaccaccggttgccgagtattcatcagagggaaagggtcaatcaaggatcccgaaaaggtgagagccatgaatgaaccatttgagactgtgtcaaacactttcacagtttaacctactggttggctctgaaatgatgttctggtaattaaaagagcattgaataacatatcgtatgattgtgtttttggatgatacaatgtaggaagataaattaaggggaagacctggctatgaacacttgaatgagcagcttcacatcttaatagaggcagatcttccagctagtattgtggagatacgtctgcgacaagctcaagaaattatagaagagttactaaagcctgtg

SEQ ID NO: 173214 - DNA, 675 bp, Arabidopsis thaliana landsberg
agtcaagtggggaaacaaactattgaaaggagggtcggtaatggaggttcatggagtcacagcttcacaagcagatgtggaagttttcttcaaagtgagtggttttgacttagagaaagcagatgtgattgaaccgggctggaccgatccgcaattgatctgcagtcagaggaatgcttcatcaggtttaggtccattcggtttaatggttctagcttccaagaacatggaagagtatacatcggtcaatatcagaatcttcagagctggtgagaatagtaaggagcacgtagtggtcatgtgcagtgaccaaagcacatcaagtttagagaaagggaatgataaaacaacttatggtgcttttttagatatctctccttatcaaccaatctctctcaggactttggtgagtcgtctcaacttctcataatcacaagaacttgaagactaatttgtgcttttttgttactaatgagtttttgattcttgtgtttgtagattgataaatcaatagtggagagctttggtgggaaagggaaaacatgtattacctcgagagtttatccaaaattggcaataggagaaagaacacatctctttgcttttaacaagggatctcaaaatgttaatgttttaagcctaagtgcttggagcatgaagtcttctctttaaaat

SEQ ID NO: 173215 - DNA, 560 bp, Arabidopsis thaliana landsberg
  unsure (1)..(560): unsure at all n locations
atgcctgaccatccggggaattatacgcctatgtccatcaaaccgcgcgcctatatctttgagaacacctatgaattcgagacgatcccgctggtcaaggccacgggcttccgcgaatacgatgcgcgctggctgttcggcaaggagatcaacctgttgggcattcaggcgctgggtctgggtcttggaacctatattcaggagcgcggggttgcgccgcgcatcgtcaccggccacgatttccgttcttactcgatcaatatcaagaacgccctgatgctgggcctgatgcaggccggctgcgaggtgctggatatcgggctttgcctgnnnnnnnnnnnnnnnnnnnnnnnnnnnnnnnnngaggcgccgtgcgtggccatggtcacggcttcgcacaatgagaacggctggaccggggtgaagatgggctgtcaggccccgctgaccttcgggccggaggagatcgggcggctgaaggagatcgtgctgaacggcgaatgcgtggcgcgtcccggcggcagcgtcactcaggttgagggcgtgcaggaccgctacat

SEQ ID NO: 173216 - DNA, 217 bp, Arabidopsis thaliana landsberg
acaggttctggacagaggagagaagatcgaacttctggttgacaaaaccgaaaacctacagttccaggcagatagcttccagagacaaggaaggcagttaagaaggaagatgtggctacagagtctgcagatgaagctgatggtggctggtgctgttttctcttttattctcatcgtttgggttgttgcttgtggaggtttcaaatgctcatcatga

SEQ ID NO: 173217 - DNA, 2128 bp, Arabidopsis thaliana landsberg
cctcctacaaacatcaagctatcagagacgtaacatcgaggctcttatccttatttaaggaaacttcttcatcagaacattctacttatgggctaggtaatattgttctctctggaaaccaggctcgaatggggattaaagagaatgatgttcttctcgatgtgtttcttgatgagcgcattggaatactcacaagcctgttttcacctacttctggatggaagcatagattagagtcactgattagctttcttgagaacacagaggccaagtacgagcattacgtccacttattgaaagaagttgaaaggatgagtgaagaagctgaaaaaaagaagaaagaatctgaaaggaagaaagaaggagctgataagaagccgaaagcaataaagattcttacatttggagagtttgtaaagaagacttttgatggcttcagtgaagagttggagaaagatatggttgacttgtggactcatcttccaaagtctttcattacgtctgaacaagtgaagagtatggtcaaagctcgtcaagctcttcagcgcgtaagatatttcttgcaagagaatttttctagagatgattttaagaagggaagcttcacatttgattgcttcaacaaatttgtctgtgttgattgccttcggactctacgtttgctatcaaaacgttttgagattccagccttgttgatgaaggaggatataaggacattctgcctacaaaatgcacacataatcttttgcactgcctcgggtgctgcagaaatgaccgcggaacgggcagggtccatagccatgcttgtagttgacgaggcggctcaacttaaagaatgtgaatcagttgctgcattgcaacttcagggtttgcaccatgctgttcttataggagatgagcttcagctaccagcaatggtgcaaagcgaggaatgcgataaggcgaaattcggaagaagcttgtttgagagattggttttgattggtcatagcaaacatttgcttaatgttcagtatcgaatgcatccttccattagtcgtttccctaataaggagttttatggtgggagaatcactgatgctgcaaatgttcaagaaagcatttacgagaagaggtttcttcaaggaaacatgtttggtactttctcatttatcaatgtgggacgtgggaaagaagagtttggtgatggacatagtcccaaaaacatggttgaagttgctgtcatttccaaaatcatatccaatcttttcaaaggtataatcttttattgattgattagtgagtatcttaatctataatctgttttttcattaattattcttctgactaatttgcttattttttgaaacagtttcaagtgaaagaagaataaagatgagcgttggagtggtttcaccatataaaggtcaggtcagagcaatccaagagagaaccacaaataagtacagctccttatcaggtcttttcactttgaatgttcggtcagtagatgggtttcaaggtggtgaagaagacattatcatcatctctaccgttagaagtaatggtaacgggaaagtgggatttcttaacaaccgtcaaagagctaacgtggcactgactcgagcaagacactgtttatgggtgattggtaacgagacaactttggctctaagtggttcgagttgggcaaaactgataagtgagtctaggacacttggatgtttctacgatgctgctgatgagaagaatctaagagatgccatgaatgaggctttgctcgaggatgtatcttcgagttttggttctctttctattaggaatggctatgggaaaagaaatgcttggtagtgttttgtttatcttgttttatgtttttgtatgttttcctatcaaactatctatggtatttttatgatattttatggtatttatggttttcaatttacttaattatgaaattcgattcacttttcatgagattagaaattttctaaactcttcttttttattttatttattaagttgtcaaaaataagttttgagttttaacttgggtcattaagtcctcaaaatggagtcgttttgaaccatttgttcccggaaaaatacatgatgcccgctaacttgtctaacactcccaatacga

SEQ ID NO: 173218 - DNA, 642 bp, Arabidopsis thaliana landsberg
  unsure (1)..(642): unsure at all n locations
acttcagtccctgatcatagcagcatatataatcagtactgtgcaacttcacccaagatttcannnnnnnnnnnnnnnnnnnnnnnnnnnnnnnnnnnntttatttcatggagggtcgccaaggtctgcaaggattctccaatgacgacaacgcgcagaagatcacgctccagcactcgctcgaagctgtaagcattttcatacatttcatatatatataaatgcctttttcttggacggattgtttgtctgatcatctgtttgcttgttcagattgacccgtgccaccgctacgaccacaacctgcacctctactacgacatcttgtgcgcgagctctagctgcaagcccttcttctactggttggatgtcggcaaaggcagagacttgcatcaccagaaatgcccacgaagcaagctcaactcacagctcatcatgtacctcggaccagtacgtgcggcgtgaccctagaaaattgtacgtatgtatccgactgactgactgattgactgctgagcagaacgagagggcggcgtacgaagtcatcgtggaggaaggtcggctgctgtannnnnnnnnnnnnnnnnnnnnnnnnnnnnnnnnnnagtccaagtgggtcttcgtgttgagcaccagcgggat

SEQ ID NO: 173219 - DNA, 1280 bp, Arabidopsis thaliana landsberg
ccattctcttctcttcttcaattcgttttctaccctttaaatttcatctcctcttcttctcaacctctgatcaaattctctgtttcacccgtcgtatccggatccgggtcggttcatgaaccggaccaaaccgaactcaagcacgtcgttttcggaatcgccgcctctgcgaaattctggaaacaccgtaaagactacgtgaagctctggtggaaaccaaacggtgaaatgaacggcgtcgtttggttagaccaacacattaaccaaaacgacaacgtttcgaaaacattacctccgatcagaatctcctccgacacgtctaggtttcagtacagatacccaaagggtctccgatcggcgatcagaatcacgagaatcgtctcggagacggtgaggctgttgaacggaacagagttggagaaaaacgtgaggtggattgtgatgggagacgacgacactgtgtttttcccggagaatcttgtcaaggttttgagaaagtacgatcacaatcagttttattacatcggaagctcgtcggagagtcatatacagaatctcaagttctcttacgggatggcttatggaggaggagggttcgcgattagctatccgttggctaaagcattagagaaaatgcaagatcgttgtattcagagatattcggaattgtacggctccgatgatcggattcatgcttgtatgtcggaactcggtgttcctttgactaaggaagttggcttccatcaggttagtcctctgtttttattttattttccttcaattaaatttaatttccatttgaagatttttcctacattgtcctttttttgggtgaaaacttaagttttatttcagttttcatagagtgtttttattttaatgtttgaagggtcaagatcttagctaggttttgtttaggaaacagaataacttaaaaatgcatttattattattttaggcaaagtctttaatcaaacttccatatttttcattaactcactcatatcttctagtagataccaaatgcaaaagccattacaaatcatttattttattagtgcattctgattttttgtttttttttgttttattaagacttatgtatataacacatcataataaaactgaaaacatttatgtaattttagtaaaatgtatattttgtatggcgataatctcggcactcacatagatcttaggttcacataagacataaggattgtacactcaagtcaaatatgtcgttagtagttttcgtacgtgttactcttacattccct

SEQ ID NO: 173220 - DNA, 448 bp, Arabidopsis thaliana landsberg
gcatgatgtgctgtcgtcgctgcggatgcggggcgaggcatttccgcagctcatgcgcctcgagagcgtttcgcgacaattggtctcccccttttcacagacattatatgctgacgagaatttgctatccagagtgcaagaactctccccagtgctcccccgccaagcaccacttcgacgagtgcgttgagcgagttcaccagcaggagagcgagggcgaggccaaggaggactgcgtcgaggagtgtacgtttatacaccgtttccccttatcgctcccaaagaaaaagaaggggaatgcacgccattttctttggctaccctgatcgagctcaatatgtcgcaatgatcggtccagttttgctaacatgagagaatcttcttagtcttccatcttgctcactgcgcttccgcatgcgccgcccccaagctgtggtccaagctgaaa

SEQ ID NO: 173221 - DNA, 667 bp, Arabidopsis thaliana landsberg
  unsure (1)..(667): unsure at all n locations
agttcaaagttttcttcaatgatcaacccaccaatgacttcaacacactctttagaacncaacctctttctccagaacgcgaatatttctcagtcggagttccaggctctttctatggtcgggtgttaccaagaaacagcatccacatcggacacacttcatacacgactcactggctctcgaaagttcctgaacacgtatgtgacaagaaatctatggcttggaacaaaaattacattcaatgtaataatttgttggaagaagttaccaaggcttacaaggtccagttcatagaagacatggaggtttttcttgttgctagagcggaggaacttgtccccggaggactaatgattgtaataggagaatgtttgcatgatggtgtgtccttgtatgagacatggcagggtaatgtgttggacaccatcggtgattgtcttatggatatggctaaatcggtaagataattatctttttagtatatttaaaaagtatgattgtttttagtaatcaatagttatctttccttttttagggaataacaagcgaggaaaagatcgatttgtttagtttgccagtgtattttcctcaatttagtgaattaaagggagagattgagaaaaatggaagctttacgattgagctgatggagaccacaagtcatcca

SEQ ID NO: 173222 - DNA, 1709 bp, Arabidopsis thaliana landsberg
ggagacacctttagccatctcattaaaactaaagcattgagtggtgatattcgtggagtgcgtattggcaacggtgcaactgcgataacgcatttacaatttgcggatgattcactcttcttctgtcaagctaatgtaaaaaactgccaagctctaaaagatgtttttgacgtttatgaatattactcgggacataaaataaatgttcagaaatcattaatcacttttggctcccgggtttatggctctactcaattacgtctaaaaactcttttgaatataccaaatcaaggaggtggggtaagtatttgggccttcccgaacagtttggtcgaaaaaagaaagaaatgttcagttacatcatcgaacgcgtcaaaaaacgaacagcctcttggagtgcaaagttcctctcgccaaccggaaaggagataatgctaaaatcggttgctttagcaatgcatgtgtacgcgatgtcatgtttcaaacttcctttaggtattatttcagagattgaatctcttctaatgaatttctggtgggagaagaatgctaaaaaaaggggaattccatggattgcgtggaagaggcttcaatattcaaaaagggaaagtggtctaggtttcaaagacttagcgaagtttaacgatgctttacatgcaaaacaagcatggaggattatccaaaacgtgcaatctttgtttgcccgtaatatgaaagcaaggtacttcaaagatgattctattctggatgcaaaaccaagaaaatatcagtcttatggatgggcatccatgcttgcgggacgagatgtgataaagaaaggaagtagatatttgattggagatggaacatcaatacgtatcggccatgataatatagttgcgtcacatccacctcgaccattacacctcattaatttggggtcaaatgatacaatggattctttaatcgccacaaaaggaacataccgttgttagaatgagaacttgatctcccaaacagttagtctgtctgatcatacacacctacacaactattatctctctcgggaacgtactccagacaggctgatatggaattatactactacgggtgattacacggtgaaatcaggctattagcttctatcacatgatccaacagatacccaagtcaaacctattgtgccttgtggtttggttgagtgaaaaaataagatttggaaacttctattaattccaataatcaaatacatgttatagagaaccatttcgaaagctctgcctacttgcacaagattaaccactagaggcatgaatattgctacaacttgtcctcgatgccttgctgaagaggaaacgatacgtcatgctctgttaaatatttctcactccaaaaggatttggcgccttttgaatattccgacattactaggacaccagttcacaaatgatgctgaagaaaatttatcatttcttgttgatactttttcaaaccatactctcacaattcgacagaaactaattcttctatggctcatttggagaatctggaaggccagaaataatttgtctttaacaaatttagagagagtccctcaaaggtggtcttacaaacagaggcagaggttaatgaatgggtgaacaacatgaggaattcgtggaacacttcacgaccgtcgggatcaacatcaacatcacaaacttcttggacaaaaccaattgctccatacg

SEQ ID NO: 173223 - DNA, 1495 bp, Arabidopsis thaliana landsberg
atgaaggagccaacgacggagatagagattgaaacttcagctgtcgcaacgatcctgcctcctcctcttcctccgacggcgtcacctcatcaagcgttagtcgagaggctcaaggattatggacaggaagatgttttctctctctgggatgaactctcaccggaagagcgagatctcctcctcagagatatcgaggtgaatcggagaataacacagttccagagtttcgtttatcgtttcccatcttacaaatatgctttgcattatcaaattcagctaaattagctgaagatcctgcaaataatgtggatcgttagttcgatttcgcatttgattagattatttaagttagatgtgttgattttcttccagaatttggatcttccaaggatagatcggatcatcagatgctcacttcactcacaaggtttatctcttgacttctagatatgcatttagaatctctagacttaatacttacggagattgagttctgtttttcacttcattagggttgccagtggcggcaatagaaccggtgccggagaattgtgtgtcaacggtggaggaaagaactaaggaagacagagaaaaatggtggaaaatgggattaaaagctatctacgaaggcaaattgggtgtggtgcttttatctggtggacaggtacttttaattattgatgcaatttttcttaagctatataattaagttgctgcttagagtgctaaatgattctcttgttgatggttgagattgggagttttggaataatgctgctactacctaacttaaaaagttgaattaattagattataaagactttagtgtagtgttgtgtactttatataattgctatatagtagtttgaaatggaaataaaagtgttgtttagataagtagggttattataagaggcgataataaaatctgttatattggcagacaataattcatgattagttttcagacaaatcactgtcggtggtgtttttgagtaattgcgttttctaggaggaaccttctgattaactataacggtgctgatgttgatcacgtgatctgaaagatgctttataggattccgtaactttttattattatattaggaggatgctctgtttcgtgtgttgtaaggaagcttgaaaaaaaatctggttttaaagatacgtgttgcttgatgtattacttagtttcggagattcataacttgagaagatcttttatacatcccagttaacttttttgcaacaatcctcaagtgatttgataatgaacatggtttggtttgattacttagtttcggagatttgagaagatcttttatatatcccagttaactgttttgcaactatccttgagtgatttgataatgaacatggtttggtaatgaaactaatgtagggaacaaggcttggaagctcagatccaaaaggatgtttcagtgagtaattctcatttttgttatgctctgaataagcttaggttgttgcattg

SEQ ID NO: 173224 - DNA, 1123 bp, Arabidopsis thaliana landsberg
tggttatcaattgctcaggttagaagaggagtcggtgtttcgaatgattttattttgggctttgcaaagctcttcaatgatgagcttacattggataacattaacaggttatgaattagtcaaaactgtatatattggtaacgtgatattgcttctgctttggtttgttttgataatcttatcttccttattgcaggtcgcgattgggaactatgtgcaaatacatgggttttagcccattcggaactgatgcatatttacgttatatgcttcggaaaagattacaggagtaagttcaacattgctcatattgccatttttcttgtctccaatggctggcattgagtcatactacttttctctttatttggtggcatcgttcaagttctgcgggcatcaatttgctccaccagacacgcatttagtttctaaatacatctaaattattttcttccttctcacataatcattgggcaatgccattttcttggacttcgtaggattaaaaaggatgataagttgataaaggctgaaggtgtggagtctctctctgaagctgaacttcgccaagcttgcagagagagaggaatgcttcaattgggttcagttgaagaaatgagagaacaggttattgctttataaatatcattcagcattccatctttggtggagttggtatcaaacaaattgtactctttgtgaataagaagaatgatctcgtgattggtgtatgtgttgttctagaattttaacaagagatataggtgatttctgatctgcatatctctcattacagctaactgactggctggatttatctctcaaccattcggtaccatcatccctcttaattctttctaggtaagctgctcttgcaactcagtcaatgtatatactatatacgaggaattaagaatgacattgccacatttttcttcctgtccgtattgacaggtcattctcaatggctgggaaactcaagccagaagaggctgttcaagctactctctcctctctgccagatgaggttgtggacacgggtggcgttacagctctttcattagaagattctgtatcaaaaagaaagaggaagttagaatacctagaaatgcaagaagattaa

SEQ ID NO: 173225 - DNA, 324 bp, Arabidopsis thaliana landsberg
tctacaaagctaacatttgtgaagtgaaagcaaccaaagaaagacagttgtcacgcaggcatcgtcgccgaccaactacacctaaatgacgagtttttctcgggtgctgaagaagaacaacagaagcaattcattgagaagtatgtgtttcctcgtttcatctgttctgttcttttggttatgagtttccagtttgttctgttcttctcttttggtcttgtgtctctaatggtttctgtcaactctttcttcaggtacaactttgatcctgtgaacgaacaaccactaccaggacggtttgaatggacgaaggtagatgattag

SEQ ID NO: 173226 - DNA, 820 bp, Arabidopsis thaliana landsberg
  unsure (1)..(820): unsure at all n locations
tcaccacctcctcngcctgtagagcctctcctccacgatgttttccttcaccagaaccttaattccagacaacccatcagctctcaaacatctagaaaccgtaaccggactcgaattggcaagtcacgtgaccctaacctcggtaaaccttggtcttaccatggtctttctccacaaggtcagcaagttcttcgttccctcatcgaacccaattttgattccggtcaattagattctgtactctctgagctattcgagccttttaaggataaaccagagtctacctcgtcggagttactagcttttcttaaaggattaggatttcataagaaattcgatttggctctgcgtgcttttgattggtttatgaagcaaaaggattatcaatccatgttggataactctgttgttgctataatcatcagtatgctaggtaaagaaggcagagtatcttccgctgcaaatatgttcaatggtttgcaggaagacgggttttcgcttgatgtctactcttatacttcgttgatatcagcgtttgctaatagcggaaggtatagggaagctgtaaatgtgttcaagaagatggaggaagatggttgtaaaccgactttgataacgtataatgttatcttgaatgtgtttgggaaaatgggtactccttggaataagattacgtctcttgttgagaagatgaagagtgatgggattgctccggatgcgtatacttacaacactcttataacttgttgtaaacgaggctctatgcatcaggaagctgctcaggtttttaagaaataaggctgcgggttagttatatagg

SEQ ID NO: 173227 - DNA, 1070 bp, Arabidopsis thaliana landsberg
agtttgagttaatcaaaacaaaggtggttctttctaaggagtatttggtcaacacttacttggcaggtctgcgtttggagactcaaatccatgtaaggatgtttgatcagcaaactattaggcagtgtttagtgttggaaaggttgtatgagaaagctcaccctccacctaaacaatcacttggtggtacttatcataaacctctggtgaagaaggagactaatttcaacacataacaagtgacaccctttgagaagaaaatgccagcaatgaaattcttatctcaagaagagatgagtcaaagaagagctaaaggtctatgttatcagtgtgatgaaaaatacacactagaccactatctcaaacacaagaaaactcatatttatatgattgaagtagaagcataagtggaggaatctgacatggatacaagcactgaacatgaattggtcgttcaggaggagaacaataggccacaagcttcagtaagtgcagtttccggggttgcagattataccactctgaaagtgtgtggcactcatggaaaacgtctgatctttctgttgctggatacatgatctacacataatttcatgtaccctaaaacagcagagttgttgggagttaagatgagtcatgcagtctgttctacagtctctgtggctgatggtaatcaacttgaagtccgagggaaagtggataagttcaagtgggaattccatggttctaattttcaagctgattttatggttataccattgggaaattgtgatgtggtattgggagtacaatggtcagtgacgttgggtgatataacatggaatctacaaaagctggaaatgagttttgttactggtcataaaaaggttctgcttcatggcattaaacaaggctcagtcagagaggtgaaaacattaaagtttaacaaaaaacaggagagtcgagtgcaaatcttgatgatttatgctcaaacaaggaacaaagcaaacacaatgcaattggagagcaatgagaacacttcagtctctccaatcattaagaagttgcaggaagaatatgcatatattttg

SEQ ID NO: 173228 - DNA, 854 bp, Arabidopsis thaliana landsberg
atgaggatttatcaaccaaccttattaatattcaccaccgtcgtcttactctccatctccgccgtcgctcctggtggctcccggcaacttttgtacacccgagacgaccctataaccatacctccgtacctaatattcgaaaacgtacggctcgaaagagcttacgtggcgttacaagcgtggaaacgtgccatgatctctgacccgtggaatctgacaactaactggtttggatcacgtgtgtgcgactacaacggtgtagtatgctccgaatctctcgacgaccctttggttaaaactgtctccggtgttgatctaaaccagggagatatcgctggtcatctccctgaagagcttggcctcttaaccgatattgctctgtttcacgttaactcaaaccggttctgtggtacactcccggtcgggttttcgcagttgagtctccttttcgaacttgatcttagtaataaccggttcgctggtaaattcccggaagtggtaatcggtttaccgaaattaaagtatcttgatctccggtacaacgagtttgaaggtgaattaccagaatctttgttcgataaagatcttgacgctttattcctgaatagtaaccggtttagaagtaaaatcccggttaacatgggaaattcaccggtatcggttctagttctagcctcaaaccggtttgaaggatgtataccgacgagtttcggtaaaatgggtaagactctaaacgagatcattcttatggataacggtttacaatcttgtatacctaatgacatgggattacttcaaaacgttacggttttggacattagttataactggttggtcggagagttacctaagtc

SEQ ID NO: 173229 - DNA, 1132 bp, Arabidopsis thaliana landsberg
tattaatatcccgaatttgtagctctccaacgcatgtataatcaagtagagcataccgcttagttagcgatcacgccccaagatgcgtgcgtgtgtacattgacaccaagagcccgggttctcgtttatttagtccttgatatacatctttcttaggacagtgcacaactatcgtggtctctggagaagcttgggtgcacagcttgcccgtgatgttccattctcagcaatctgctggtcgaccctcgagccagtaagatctttaacatgtttaagcgttttacgatgcagaaggtttattttaaggcagttttgccaaatacagtaagtgaattgctttgaccttcccttatgatacagataaaaaagaggctccttggagttgcgggcaatgatacaaatcttgttggtgttttcggtgcaaccttttctgctggatttatagctggaagtatcgctgctgctgctacttgtcctcttgacgttgcaagaacaagaagacagatagaggtttgtttgctttcctccagaaacatgtttgtttacttgtgtcaccatctcatgtttctcccttccattaattcagaaggaccctggtagggcattgatgatgacgacacgacagacactaatagaggtttggaggtatgtatatgcatatttgaaagattccatttttcatttgttaaaagctctatgtttgttttgaaacaaaacataacaagaaatacttgcacacacagggatggagggatgagaggactgttcatgggaatgggtccacgagtggcacgtgcaggaccatcggtagggatagtggtttccttctacgaagtggtcaagtatgttctgcatcgccatgcttcatcatgaccctgcaaagtcactaatctcctaaacatggatctgtggatacggctttaggttgtagcttcttttttcaagttaacagaataagttaaacaggctcaatgctccagaaacccgagtttcctctgtttatgagccttactttcgcccagttattaaaggccggctgtttttaatgttaactccggtttatgtcgaaccaatcgtacttcaacataggttgtcttctcaccttagattcttatcttccataagtatccat

SEQ ID NO: 173230 - DNA, 410 bp, Arabidopsis thaliana landsberg; identical to SEQ ID NO: 58873

SEQ ID NO: 173231 - DNA, 2321 bp, Arabidopsis thaliana landsberg
ggcatgagtaagcaaagtagcttgtttcccagtaaagaccaagtgtatgacggacatgcaagagaagcaggttcagttaatgaggaaagtaaatgagttgcaagatgaacttagcaaaatgaagaaccaggttagctacttagacaataacaaaatttaattctatcaagcagctaatattatatatataagtgagaactgacattatatcttttaatgttatagagacaagaacaagaaataggtgaaaactcagctgccagagtaagtaatgtatattagatccatgagtagtccttcttactatgtaattcctcacttagatttctaatcaactgttttgtagagtgtaaacaaaagatcacaccctaagtgtgttctgggagtgatgaagacgttggtgaggggcgtattctatcttctaatcctgatgacttagttaatgactgtcgtctaggccctacagatcttaaagtgttggttgaatctgctactaaagcagatgcattcctctagagaccagcaactaagatgtttactatggaggaagctgttggacagattattgcatggccagcgtcaaagtgtgttcttttggacaaggaactccaaatagaagacattgcgcctttggtaattttttttattgttgcttcgttgtactcagactgtttatgagttgctatttgatgtgttgttctctatatgtttttgacaggttctacgcgcaaactctccgaataaatgtaaactgctggatttgtctaatgatgatgtgacactacaagaaaacaggtgataaacgacttacacatcagtcgcatagtagtcgtaaaaaatgataatccgactaatcagcgactaacgacgttagtcattattacatagtcgctgaatgagatagtcgtgaattagtcgttgattgacgactatattacgacaataacacaatcagtaaacaattgtcgttgtatagtcgtataattttggcgactatttaacgaccatagcacgattaattgtcctgtacgaagcgtgtgaaacacgtggtcgtataatagtcgtatcatattgacgactatttgacgactattggacgacaaattctatcaatgtaaggaaataattctcgtagtcatataacagtcgtataatgttttacgactattatacgtctcgtggacgattatattgcgactaggtatcttagtcggataataatcggtaattagtgtgactattagacgactattttacgtctaatttgctacctaaatacgactactgagcgactacttgttttgtccgaataagaatttggtcatcgattgttgggtttcttgtttgttggttatcgattgttgttttcttgtttcttgttttctccttttttatttgaaatgctaaaaagatgaaaagacttgtatatatagaaaatcaagtacaaatacacatacaattatcttgtttattacacaaacaacttattcaaataaacatatgttcaagtagagtttgggcaaagataatctaaggatcattaggtggaggacttggtagacgttctgtggttgtggtagagtgacttgccatgaagtccaagaactgcggatcggtttggcggagatacttctcgactaaagacaattgctcgagcttgtccttttgctcagctgtgactcgggatgactcagcttctcgggcagcaatctcagcatctctcttctcattatatgcagcctgctcttctattttcctttgagcttcctgcagccgttcttctagggcttgaaaggatgatgaggaaccggagtgatggcggttggcgctgcctagagtgtcttttagacatcctagtccataaggattgcctcttgaatccttttctgtggactgcaagaaatagagaagaagctcattagtgacagaatattaattggactctaagactcataattatactaaaacatcttacctcgagaaagatggctgtataatcatctagtgtgagctccggaggtcgtgaagagccatcagagacagcagaagcagacgcctctagtgctgacagcctatctctcacattctgctgataagcttgagcaatcttctccgacttctgatcaacaaatgagccatccgacttagtgtgtgtttcgatgaacacctcaccaagatggaccggtcttcccaacttctcttcctgcaaacacaaatcaatatcaacagtagtcactagacataagaactcaacatactcacaagaaaacaaactatattggattgaaaacagaaaactctaacttatgagaatctgcaga

SEQ ID NO: 173232 - DNA, 539 bp, Arabidopsis thaliana landsberg
cttttgtaagttcttgccccatttgacctttttgctcttctcaatcccatgtccacaaaaataagtaacagattgttcttatgagttgcagcctatgaactgtcaaagaaagagggaaaagttgggacaccggaaagacccttgtcggatctaggcttactaagctacagaggttattggactcgtgttctattagaaatcttgaaaaaacataagggaaacatttctatcaaggttagattgtgtttcaaactgataaaaagtcttaggctaatcctggtttctgcgatctaagaatccactcatctgtctctgtttcatgtatgatgatgtaggagctgagcgacgtgacagcaatcaaagcggaagatatattaagcacacttcagagcctagaactgatacagtacaggaaaggacagcatgtgatctgtgcggatccaaaggttctggaccgacatctgaaagctgcaggccgaggtggtcttgatgtagatgctagcaaactgatttggacaccttacaaggaccagagttaa

SEQ ID NO: 173233 - DNA, 372 bp, Arabidopsis thaliana landsberg
agagaggaagaaaaagaagaagtgaatatcacgcaagagatattgaaagagaaagcaaaagaagaagacgaagaagagaagaagaagcaggagatgatcatgcatcatggaagagaaagcaaaagaagaagaagacaggttattaagataccaaacgacgatgtgttggaagagattatagtaaggcttccagtgaaaaccctaactagattccaaaccgtgtctaaacactggaggcatacgataaagtctaggtaaatcaggaagaaatacatgttgcatcagaaaacaaaagaacccaaatttctctgtctctatgaagttagaagaaacgggtctaagccaagcattcgttacaagaccatgaggttg

SEQ ID NO: 173234 - DNA, 341 bp, Arabidopsis thaliana landsberg
tttcctagtaaacatattgaactcatgacttataacaagttaactttgatccaataactatgtatgctttgtacaagaatattttaattcttaaataacaattgaactcaccacgctttcgtaatttcataggatttaaggttggaggtaagagttgttgcacagtaaacccgggggaagaactttgtgtcccaaaccagccggtttgtgcaaacaggactgaatatgtcttttgggatgatcttcacagcacggaagccactaatatggtagtggcgaagggctcgttcgacggaatcataagtaaaccgtatagtatcgcccagcttgcgaaggaatag

SEQ ID NO: 173235 - DNA, 416 bp, Arabidopsis thaliana landsberg
cgtgtaacaacaacattttgctatgatcttctcatgttttataggccagagctatagggagaaatggaagtggttatgtgcgaaagaatctaaagatgaagtatgtgtatgattacatgttgcatctactgcaaagctatgggaagttgatgaagatgaatgtagaagtgcctcaaggagccaaggaagtgtgtccggagacaatggcttgtccaatcaatggaggccgaatgagacaatctatggatgactcattggttatgtctccgagcgttaaggctacttgtgagatgcctccaccttttgaagaagatgagctcaaaaagtttcttgagaagaaagaaaatgttgagaaagaagttgagaagtggactaatgagtattggcaggaacagaagaagattcttaaacattga

SEQ ID NO: 173236 - DNA, 540 bp, Arabidopsis thaliana landsberg
  unsure (1)..(540): unsure at all n locations
gtgcccaaagcctgcaaaacatgcgccaaagctacctggcgtggagcgatcccgaacgcatccagcacccgggcacgctgcaaatgggncaggtcatgcattacctgaacacgcatttacccgacgatgccatcatgaccaacggcgcgggcaactacgcgacctggctgcatcgcttctaccgcttccagcgctacggcacgcaactggcgcccacctcgggctcgatggggtacggcctgcccgccgcggtcggcgcgaaacgcatccaccccgacaagaccgtggtgtgcnnnnnnnnnnnnnnnnnnnnnnnnatgcacggccaggaattcgccaccgccgtgcagcaccagttgcccattatcgtgatcctgatcgacaacggcatgtttggcaccatacgcatgcaccaggaacgccactacccggggcggctgtcggccaccacactgcataaccccgacttcgtggcgtatgccgaggcgttcggaaaatacaacgaacgcgtggagcgcaccgaccagttcgccggtgcgt

SEQ ID NO: 173237 - DNA, 954 bp, Arabidopsis thaliana landsberg
cattcataagggaagttgtgcgactacatggttttctaagttaattggtctcggatagggataaggtgtttctcagtaacttctggtctgaatgttcaagatccaaggcactatcttgaagaagagctccgcctatcatccgcatacagacgggcagacggaagttgtaaaccgatgccttgaatcatttctgaggtgttttgcaggtagaagacctacctcttggatgcaatggctaccctgggctaaatactggtataatacatcttaccacacagcctccaaaatgacacatttcaaggcagtgtatgggagagatccacctacattgctgaggtatggagacacgccttcagctaattggttagtagaagagctacttaaggatagagatggactcttaatggaactcagggagaatctggagattgctcagaaccaaatgaagaagtctgcggacaaacaccaaagagatgttgagtttaaggttgatgactggtatatctgaagctttgaccctacagacaaagctcctttgcacaccggagtaatgaaaaactctcacaacgatattacggaccatatcagatcatccgccggattggtagtgttccttacaaactcaagttgcccgagcatagcaccattcatccggtgttccatgtatctcaactgaagcaagctgttcctccttcgtttactccacaagagctgccaaggattctaacaccatcattagagtgggcagctgaaccggagaagttattggatatcagaaagagtgagacaactgagggtgccgaagtgttagttcaatggagtggactgtcagcaatcgatgccacttgggagcggttagtgtccttggtaaagcaatttcctcatttcgatcttgaggacaagatcaatctcctgcgcgggagtattgatgggctgagagtgcctctagctgat

SEQ ID NO: 173238 - DNA, 959 bp, Arabidopsis thaliana landsberg
atggaggctctttccatcaacgcaccaactcaggcttctactttgccctccggattacagtaagtttcttctctctatctcccctgcaattttattgcctaggatttaagaagtgaatgtaaccaatattggtgttatattattagttgatctcttgtctagtttcttccgcatgttttagataagatttcagtgataaaggcacgtccttaagtttgtattctccaattcaccatggaaatttggtttgtgatttccctctttttgcatcacttgtcaggtagaaaccttagaaaaataaagatagatactttatttgtgaatcttccagtttatatttgcacttgttagcttaccggattagatcttttattgattcagaataagtgaggaggtcgaaaaaagatacaatgtagttagaagtgttggtgagcaatgcatacatgatgatgagctgaaggatcttctggctaagaaggctgctccggtttgctacgacggttttgaaccatcagggaggatgcatatcgctcaggtgtgttacacttgtcatatgcttgtttcacatagcttgctttggaattcttttatgttctttcttctttaagtgagaagcttctgctggcgcgtttaactctgctattaccttggcagggactgatgaagatcatgaatgtgaacaagttgacttctgctggttgccgagtgaaaatttggattgcagattggtttgcatatatgaacaataagttgggaggtgatttgaagaaaatcagggtggttggagaatattttaaggagatatttcaggcagccgggatgaatagtgagaatgtagagtttctatggtcatccgatgaaataaatgctaagggagatgaatactggcctcttgtgatggacattgcctgcagaaatagtctcgcccaaataaaacggtatgcccaagtttcattatt

SEQ ID NO: 173239 - DNA, 354 bp, Arabidopsis thaliana landsberg
ctcgtatgttagataaatgcttcaccaagaatctttggctttggctaccacgatattggctctggcttcattttctcattgtttaccaggttgcttgaccgatacgggtttaggaaacttgactctgagcaaagggaatttgctgatggtgactttgtgagaggtaaacctgagcttatccggaacatatataaacgcaccagagctcaaatactaaacactaaagaagggagagagctgcttaagcaagtcatggagatgaggaaacagaggagagaaaagatgaagaaagagattacgaaagcaaaggaactagctgatcggttgcaccatgtacatatttgaaacatacaa

SEQ ID NO: 173240 - DNA, 1429 bp, Arabidopsis thaliana landsberg; identical to SEQ ID NO: 25679

SEQ ID NO: 173241 - DNA, 752 bp, Arabidopsis thaliana landsberg
ttttcactgtttggaattcacgtgctcaagtaagcttcaatactttagttcttatcaaccatgctctcattctatatcccctttaatccatagtggcgatcatataagattgtgaactttgcataatgtaattcaatactttaattcttattcgatcaccaccttaacttatatgacaagagacattatatgatgatcgttgactaatgtagttgattaattacatttttcttaattgacattttggtagcatccatatgtgtatggagtgttggtgttcgaagccatggctacatttatcggacaagtctccgttctatccctcattgcactctttggcgcagccacaaccgctatggtaaaactactttcatcatttttactattgcatttcgtttttgtatagtaactaataaagcatcgatcatatcaagtttaggccacatatattactttagagtttaaacttgtgtttgtagaacaatgtaattaatattttgttttgttttggggagtagataacgacggcgagaaaagcggtaacgctgttactgtcctatttgatattcacaaagcctttaactgaacagcacggtacgggattgttactcatctttatgggcattattctcaagatggttccggatccaaacccaaaccccaaatcttcgggttcgggtcagacacccggaaaattggaacgggttaagtttgagaaggaagacgatgaagagagtcgtccattggtctaa

SEQ ID NO: 173242 - DNA, 414 bp, Arabidopsis thaliana landsberg
atggcacctaagcagccggaaaaaatcgagaatcctccgatggcgtcagcaccttcatccgaaacagagtctggttctactgaaaacgaatatggttcttctggagaagagactaactcttcggatgatgaacatgaagaggctagagaaaatgtcataagcactcccttatcttttggtcaagagctcgtctctttctttaaggttgagaatctgacttatttgggtattgatgaagcaaagtggattgcatactgggatatggtcaaagatggaccaaagaagcgtgagttggacaaaaaattgaagaagatgcttgctatgcaaatggagctttttatgatgaggactggatttacaaaagaggtagctactgtgttatttaaacaagacaacgcatcttcttcgggtaag

SEQ ID NO: 173243 - DNA, 706 bp, Arabidopsis thaliana landsberg
ttgggtatgaatcagattattctcgtatgtggcagatcgatctttgagaaaaccatatggctttttgtagtcgataatagtaaaagttgtcgagttcttgaaggtaacagtcaaaccaattttcatgatttcgttccaatggtgtatgatgattacggtttggataatagactattcgaagtagttttcaagatctcaatatccaaaaaattacccgcagatacaccacatgttattattggtaataatagacaattttcagctttttttgggcatatgaagaatgaaaccactcgactttgtgttgaggtgaaggagaaatttatagttcaatccacaaaggaaggaattgatggtttcgttgagtgcagtttgacaagttctttacgaccaagtaatatattccataaggtagaatgagatatcgatttatccagtgaaaacatggaagaagctgaagttaataatatttatgtggatggtgaagatgatgaaagtagattcgattactgcgacgattctgacggaatcgatttcgaagatgagaaatttagcatgtacggaattccacctgaagaagaagaaaaacctcagttactactccaaaatttaggtatattcatcgaagaagaaaaagaagaagctacttatgctactttagatgtgtcttcattggagctggcggttggacaatgttttaaacagc

SEQ ID NO: 173244 - DNA, 1160 bp, Arabidopsis thaliana landsberg
gattggtgatattccgaggaataaggttcgatgttttgctttggctccggcgagatgtatgtcgcttaatctcgccgttaagtatgctgacgtcatctcctccgtcattttgcaggtaaaaaaatttaaccatgttttaatgatctcaatgttagttaaaagatttttacaaaaattgattttttaacaaagaataatatattagaaatgttaaatcacttgtatttaagttaagggtgttatggtttagttgtttttggggttagagattgatttctgacaactaatttttttggttatgtaaagagttgaatatatttatagttttgatataaaatttggattatatttgtaactgtcttgttggatggtggtggttggttcattgttgaccaagcattgtcataatcctgtttcgtaagttcagaatatgcttttgctttatacaatgaatcgacgaattgaatttttcattttgcttcttgagtttggtcagaatattctgctaaattttgtactagttttggaagttgtttagttgttaagaaaggtatctgtctatagagagaatttttatagagtaaggtattttactaagaattttaacaaaacttagtgtttgtggaataataggatgattttttaccgagaacagcgacaccattagaggatatattcaagtctgtattctggtaagtgtcgaacttcgaaaatgctcttgttggaatgaatttgttataggtatagttcaacattttgtattcgttgttcggacagcttgccgtgcttgttgtttctagtttgtctgagggatacatttataccggaaggtcggaaactaagagatcctagaaggctttatgctcctggtcgaatttatcatatcgttgagcggaaattttgcaggtaataatgaagttagtgtggcatttcttagcaatttttgtttgtttttcctctgattattttttgtatttagatgtggaaggtttcctcccgaagtgagaaccgcgattcccgttgatggtagatttgagcatatagtattatcatcgaatgcaacatcggatcatgcgattctatggatagaaagagaagcagaaaaggcattgcaggtgacatttaatttctgcatttttatgttttagatcaatggttag

SEQ ID NO: 173245 - DNA, 697 bp, Arabidopsis thaliana landsberg
ccccggatgtattccaaacaattggtctttttttttgtaatcgactgcaaaacttggtgacaaacatgtaagtttggggctgttcttgcatcaatacctttaccaatctttgcagctctgtactgtgttctattcgcctatgttggtatgtataacttaaaaactaaactctttcagatccttatagcttctataaatatgattgagattaagcagatgaccttatgaacagcttctgcgggacttggccttcttcagttctgcaacttaaacagctttaggaataaatttatcctcggcttctccatcttcattggactctctgtggcgcaatacttcaccgaatatctattcatctctggtcgtggacctgtccacactcgcacttctgctgtaagtgttcaagagaaacagaaacaatcattttctttttgtcttgtcctctttattgattcgtatttggtgttgccaacgacagttcaacgtgataatgcaagtgatattctcttccgctgcaacggttgggataatggcagcgttcttgttggactgtactcatagctatggacatgcctcggtgaggagagacagcggaagacattggtgggagaaattcagagtctaccacactgatactcgaacagaagaattttacgcattgccttacaacctcaaccgattcttcccttcattctga

SEQ ID NO: 173246 - DNA, 583 bp, Arabidopsis thaliana landsberg
acgttacaaactcccaggtaatcctcctcacacctcaaaaacattatttgatgcatatgcagttttccactagaaagtagtttacagttaggttttggtttagttttatcagttttataggaacttgaattactgaatcaaataaaccaatttgtgattaatttcagtttggttttggataaaacatttcagttttgtttttgttcaaaatgtaggttttgatttcggtttgaccatttcgattttgttcggtttatttattttgaaccttgattttttacagggagttggtgaaacatttggtagagtgacaatcgaagcaatggcttatggacttgcagtggtgggaacagatgcaggaggaaccaaagagatggttcaacacaacatgactggtctacttcactcaatggggcgatccggtaacaaagaattagctcataatctcttgtatctacttaggaatcaagacgagaggctacgattggggagtgaaggacgcaaaatggttgagaaaatgtacatgaagcaacatatgtacaagcgattcgtcgatgttctggtcaaatgcatgagaccttaa

SEQ ID NO: 173247 - DNA, 1062 bp, Arabidopsis thaliana landsberg
tggtttttgcatcttttgatcatagcttttaccgttttgagatcagtggaagctcaaaatcaagcaggttcttaaaacatgacgatgttttgattgctctgttttggtcacaattagatgttttaagtgttttctttgatgattatatatcttgttttgatcatgtacaggatttattagtttggattgtgggttggtgcctaaggaaactacttatacagagaagtcgacgaatataacatacaaatcagacgcggattacatcgacagtggattggtcggaaagatcaatgatgcatacaaaactcagtttcagcaacaggtttgggccgtgagaagcttccctgtaggtcaaagaaactgttacaatgtcaacctcacggcaaacaacaaatatttgatcagaggaacctttgtgtatgggaattatgatggcctgaatcagttcccaagttttgatcttcatatcggtcctaacaaatggtcgtctgttaaaatactaggagtaacaaatacttctatgcatgagataatccatgtcgtaccacaagatagtcttgaagtttgtcttgttaagccaggaccaacgataccattcatatcgtctcttgaatttcgtccattgaacaaggaaacttataacacgcaaagtggagcactgaggttgttcgccagagtatactttccatccagttcactatcttacgtcaggtaatattttcaggcaacatatagtttactacttattattctttgtgtgttttaagttaacaaaaagatcatctcttcaggtatgatgatgacatacacgaccgatactggaattcatacacagatgatgaaatcctctcaataagcacagacctcccggtcgatataagtaacgtctacgaggtgcctgaagccgtgatgaagaatgctgctgtcggtaaagatgctacagcgccattgtccgtatcgtgggagcatgatgacatctctgcgaatttatatttatatatgcatttcgcagaaattcagactcttaaagccaatgagattagagaattcagcatcacctac

SEQ ID NO: 173248 - DNA, 1186 bp, Arabidopsis thaliana landsberg
atggggaagacaacgaatggaacaagagactgggctcagatctacgcaatctacgggatcgagcaaaaacacacactcatcttcctgatactcaacgcgattgctttctctatactctccaccgtctttgtcatctactttaacccgatctgcgtcttctttcaatcgtttctcttctctaacgccgcggcagctagattctcggctggattctttggagctgttacggcgctttccgccgtgtgtttgtttttcgcggcggcgaattttttttactctgctgtgccgcttaggtatgagatggcgcagaggatggttggatctgttggagattggtcgagtgtgaagaccgctcttgacttaggttgtggtcgtgggattttgcttaatgccgttgcgacgcagctcaagaaaactggtagctcgggtcgggtcgttgggttggatcggtccatgactactactctctctactctacgtacagctcacatcgaaggttcgttagttctttttttttacgttgactttttgacttatttcaaagtcgtttctcgttgaccaacatattattttgtagatttccgattatattgcgtgattaacgggttttaaaagtaattattcaagatatatataattattatcagcagatttatctagtggaaatttggcttagaggtaattttattatagttgagcattctaagaaatcaagagaaagtggataaaaatttaatcaaaactgatattgttaagttttttaaaactgtcgatttagtgtttatacatgtcattatttttatatggagaaccgaattttgtaggatttttgtattagattcacgacatgtatcttttgttttctttttttctttttcttgtcagtattattcattgattttttttagttgagatgtgtttaatttgtctataggagtacaagagtacgtgacatgccgtgaaggagacgtaagaaggcttccgtttagtgataactactttgacgtggtggtttctgcagtgtttctccataccattgggaaagaatacggtcagaagacggtggaggcggcggcagagaggatgagagtacttggagaagcggtgagagtgttgaaaccaggaggagttggagtggtttgggacttagtgcacgtgccggagtatgtcggcggtacaggagcta

SEQ ID NO: 173249 - DNA, 484 bp, Arabidopsis thaliana landsberg
actctctagtctcataatgctcattataaataacgacgatccatccgctcaaaacaacaagtcatctttctacttcttcctctctttctgaaacttatcagaaagttgagtgataatcaaagggtgtaatggagaaagtgagagagattgtgagagaagggaggagagtaggtaaagaagatccgagaagagtagtgcatgctttcaaagtgggacttgctcttgctttggtctcttccttctattattatcaacctctctacgacaacttcggtgtcaatgcaatgtgggctgtcatgaccgtcgttgttgtttttgaattctctgtaggtcagtattcgtcatgtgatcagaatcagccactttctaccatttgaatatgtctaatattcagcgataaacattttgtagatttttctgtataaatttggctacaaaaggttgtttaacttttgtttggtgtgtaattaggggccacacttgg

SEQ ID NO: 173250 - DNA, 448 bp, Arabidopsis thaliana landsberg
gccaagccgccgttcccgcagatcgccggcgcctggggccggccgaccgtcgtcaacaacgtcgagtcgctgtgcaacatcgcgccgatcatcgtccacggcgccgactggttcaaaggtctgtcgcagggcaaatcgaaggacggcggcaccaagctgtacggcgtctccggtcgcgccaagcgcaccggcgtctatgagctgccgatcggcaccagtgcgcgcgaaattctcgaagagcacggcggcggcatgaaggacggctaccgcctcaagtgctggctgccgggcggcgcgtcgaccgatttcctgatgcccgagcatctcgatctggcgatggatttcgacacgatcgccaaggccggttcgcgcatgggtaccggtttgctgacggtcgtcgatgacacgcagaacatggtgtcggtcgtccgcaatctaaaagagtttt

SEQ ID NO: 173251 - DNA, 1556 bp, Arabidopsis thaliana landsberg
attcaggtggatatgacaaagaagataaggcagctcgagcttacgatttagcagctctgaaatactggaatgctactgctaccaccaatttccctgtaagtaccttctttctctgtatccattagtagtttatataacttgttcaatcttttcctaatccgttctaatgatatttagattacgaattactcgaaagaagtggaggaaatgaagcacatgaccaagcaagagttcattgcctccctcaggaggtaagtccaaaagcaaaaactctttaaaatcttatcaatggttttatattatgtttctttgatggtaaccagagtttaaaaactgatataacacaggaagagtagcggtttctctagaggagcttcgatataccgaggtgttacaaggcatcatcaacaaggacgttggcaagcaaggattggccgagttgctgggaacaaagatctttaccttggaacctttggtatgtaaaatcttcaaacttggtctagctaatttaacaatcattgtctgtggttaattagttagtcctggtgttgttgttgtagcaacggaagaggaagcagctgaagcgtatgacatagcagcaatcaaattcagaggaataaacgctgtaactaactttgagatgaaccgttacgacgttgaagccatcatgaagagtgcacttcccatcggtggtgcagctaaacgtcttaagctctctttggaagctgctgcttcatcagagcagaaaccaatcctcggtcatcatcaacttcaccatttccagcaacaacaacaacaacaacagcttcagcttcagtcatctcctaatcacagtagcattaacttcgctctctgtcctaattcagcagttcagtctcaacagatcattccttgtggaatcccttttgaagcagctgctctttaccaccaccaccaccaacaacagcaacaccaacagcagcagcagcaacagaacttcttccagcattttccggcgaatgcagcttctgactcgaccgggtctaacaacaactccaacgttcagggaacaatgggacttatggcaccaaatccggctgagttcttcctctggcctaatcagtcttactaaaaccaatcatataagttgattgagtcaagtttttatcgttataagagacacaacttcttgattctggctaacacataagctgactagaagaatcttaaaaatctcacttttgtttttgattaactgttgttgtttaggcaggagtagttgggggttggaaatgtggaagaatgtattaaacctaaactcggtggagaaaaatggtagtttttgggaattaggggggatggtttcttttgtatcttgtatgtataaggctatcagcttatccgcagtgtactctgtttccatttatgaaaaaattatcttcagaaagttctgtgttgctatttgtttgatatctatctaggtgtgagctcattggtaacaaattgacaactctaccgagaggttgagactaacaaagttaagtagaagcaacagagagacacaagttgaagatatt

SEQ ID NO: 173252 - DNA, 1357 bp, Arabidopsis thaliana landsberg
tctttgaaagagactatcaaagttaacaattcaatgctagctttcacgtccattggagccaaagtgaatcattctgttttatctggttacggtccctacacatatagaattcaaaggcaagtatatcatagattatgatcactacttccacccaaaagagaacctcctaaattttcaaagaaggatgttatgctttgggtctattggatcaacaattgcaaatcaactatgaaacatcggcatagctttgaggcatgtgaccgcatactaagggacattatgaataagaacgatcctactgctaaacataaacaatttggaggtaaatctatcttgctaggaggagattttcgacaaatattgccattcattccgaaaggaagcaaacaagatatggttatggcatcacttaacaaatcttatatctggaaaagctgcatcgtgggtatccttatcaaaaacatgagagtccaacaagatgaaaaaagagtttgcagaatggattttacaagtcggaaatagagaagcaaaaatggtcagtaccctcaatagagattatcaagaaaatgacaacatagagattgagaaatcattgttggtgccctaaggaagaaacccaatagaagaaatacagaaagccacgtttctagatctagaaagcaaatttaaagatcgtgcgtacttgcgaaatcgtgttgtccttactccaaggaatgaaatcgtggatgagttaaatataatctacctaactcaaatcacatttcagatgaaagaatatcacagtgctgatagtatatccaacgatgagagagatgtgtttggagtcaatcttctatacaccacagaatatgtaaatgcaattaagtgctcaggattaccaaatcattgtctacttttgaagcagtacgcccctggcattcagttatgaaacataaaccagaagaaaggattgtgtaatggaactagactaatgattacgcgtttgggagaaaaggtacttgaagcaaagatactaacaggtactaatgttggtataaaaatcaccattccaaggatatcattacaattgtagatacagatattccatacaagatgacgagaaggcaatttgcaatcaaagtttgttctactatgacaataaacaagagtcaagggcaaagtttggagaatgtaggttttatctaccaaaacaggtttttagtcacgtccaattatatgttgctttatcaagagtcatctcaaaaaaggactacacatatggagtgaagaggcagacaaagaaagaaacccatcaatcaaaaatgttgtctatagagagatcttcaacaatctccactataaacactcgggtgataca

SEQ ID NO: 173253 - DNA, 1451 bp, Arabidopsis thaliana landsberg
tgatgagcgaatgtcatgtactttgtggggagcatttgctcagagtgtttttagtgcatgtgaatttgctgatggtcaaatggttatctgtgttctgagatttgcaaagattaagtcttacaaaggtacatgtctgttctgaactttcttgacattactcattgattctaacagttattaccataattaaatgttctactttttgtgttttgtaggagttaggagtttttctaactctttttatgcatctcaagtccacatcaacccggatttccctgaagttcaagcttttgtttctcggtctattttctttgtctttaactcactttccgtttatatgttatttaacagtttacatgttgatggtctttctctcactttccgtgaaagtgttccaaagtttcccatggttactgtgaaacaggatgatgactgttcgcagtatgagaggaagtcaatccgtgattttcttcattctatggaggtttgagttcttcattttagatgtactatgaatttgagttatcatatacttacttatataaattttcatttcagattggaaaggttaaggttgtctgcaccatacatgctcttgacttggattggtcatggtattactttagtttccgtaattgcaacaagaaagtgactcacattcatgctggtgttaacacaacttcattggagtcatcaaaaccaaggttttggtgtgatgtctgcaagaatgcagtcactaatgtgcaagccaagtaagtataccttacagtttatgacatgttctaactcaactagcaaatgcacacattaattgacccttatataatttaaggtacatgctttatgtgaaagtcatggatggcagaggtgaaaccaaatgccttatttttgataccatctgtgcagatatgggtggtgaataatgtacatccatgttaggtggctcttttaatgaggcatactcacaatctaaatagttatcgtctaatgtatgtgaatctaatatgctgcaagagtatataaactggctaactaacgatctatggtcttactatttagattgaggatccaaatgatgtccctgacggtttgagaaatttggttgggaagacttttcactttctggtatctgttgagaaagaaaacatatgggatggtaaggattcttttaaaggcacaaggctattgtctaccgatggtctctatggtgatgaagtcctcgaagactcagaccactctgtcaaccctgcatccattgtttctggggaccaggtatgattctacacatgttatccttaacaaattaggtgtaaattatatagtatcaatgaaacttttctaaactctgttttcgtgtttacagtgtcttatgttaacttcgagccaggagacttctgactcagttactccatcatctaagcgtgtttatgctacaaagttgacagactcgg

SEQ ID NO: 173254 - DNA, 542 bp, Arabidopsis thaliana landsberg
  unsure (1)..(542): unsure at all n locations
gggaaattctggaatccaaatccaagttaccgacaacaagcaatctattatcatcttcaaatgnnnnnnnnnnnnnnnnnnnnnnnnnnnnnnnnnnnnnnnnnnnnnnnnnnnnnncaaaataatatttatgttctaatggatcgactagaatcttgcaagaatgttggtgtgatcttcgattctgtgatcgccactgttgaggttgtaaactcacaaaagactcaaatccaagccaatggagctgttccttccattcaactcgacaaatcacaaggtaaagaacttcgtgtcatcagaactaactttaatcaggagcaaccatcttcttgcaaagcgctgatggaaagaatgttgaaattgttacttccagcagcactgaagtcaatgttgttactcctggaaagagcccaaatgatgatccagtaagtaaaacttagttccttgatgactcatcgcagaccgaacaagccatccctcatcaatttgttaccaagttcaacgccaatggaaagttggaaaccagacccagtaagttttat

SEQ ID NO: 173255 - DNA, 471 bp, Arabidopsis thaliana landsberg; identical to SEQ ID NO: 74998

SEQ ID NO: 173256 - DNA, 467 bp, Arabidopsis thaliana landsberg
aatgagctcgttttaaaattaaaaataagaataaattctgacacaacctagttttaataatacttagtggtttataggtagttcatattttgcatatgatttctaacttactaatctgaattcatttgtattcttaggtgtgtcatctatggaagcataacaacttggcgcaatttgtagatctgcgactacaaagctatgacatggatgaggtaatgaagacaatcaaagttgagatcttctatacgagtcgtgcagcttctgataggccaccaatgttagcagtagttagtatgttagagggtcttctaagtgtagaagtcgagatgcaagcgcttatggcggttctcagtgatgaggagcaatctccggatctgttgaggatgatggcggacattgacgaagaattcgaattacaggagattatagagactctcgagaggtatcctgtctcgacaaagggaaaa

SEQ ID NO: 173257 - DNA, 525 bp, Arabidopsis thaliana landsberg
gcgagtatggctatcagaggaagactatcaatgcgcacatggaattgtgattattttcaagtaattgagaggtatataacaaaagtcatactcccattttaagttaattataaatgtttgtttactaacccttatatgttgtttttgtctttatagtatgttcgaagattttctttctattaaatatccaggattgaacaaaaaagaactcttcgtgaaaagaaatgaggcatatcatgtgtgggtgacagattatgtatgtctaaatagtttatctatatatgatttgcaaagggaaacatattaggagaatatgaaaataaagacccgagtttattgcaaacagaaaatgatgatgctgttttaataacaacaatagaagatcttgtactcaacaatttgacaatcaatcgcaaccccataaacctcgatttagatgccggagatgccgatccggaagatgaatttcgatgtaatttatcatcttctgatgatgaagaacaagaaggcgaagaacagtattag

SEQ ID NO: 173258 - DNA, 1549 bp, Arabidopsis thaliana landsberg
tgtcgaaacatccggtctcagcacatgaataagctacacgcagatacaattcaattcttgacatgtgtgcttaaggtaaagcaatcaccaacaaattcaaaacttaaactatcttttactgattcagatcattctttattttcatgtaaaatctctttacctccttattttgctttgataatatgtgctctactgcaggccctctgtaaccttaaggttcttaaagaggatttggtccacaatcggcaaccattttctgacaatcaagttccttgtgtaatacgagatcccttccctgcttttgtctcggagcagatagaaaacgaaagtttatacagtaacctcctaagcggtttacttgcttccttagaagaagttcattccatggtttgtgcggaagataaattctaaactatgcatattttattttccagaaagcttggttgctgtataaatgccattctcatattttttttgtccgttttttttagtcaaatgatgctgcagaggtagtcatagccatccttgagttctggcaatgctggaaaagtccacaaagagaaagcttggtaactcgtctttttacactggaagaatatgaaagaatgaaatgtagcaaatgcagaaagatgccaaattatccagagcaaaggtcttatggcgttgttatagctgcagattcaatcagagacctgaaggtatgtttcatttatttctctccttgtcttttctacagaaactgcaggtacttccccttatatagttgttgtgtgcttatatatatgcagtgtgcttttgggaatataaagtttgtggatatccttaagttgatccgcctgggatataaaatgttatgtgacaataaaaaaggaggttgtggtaagaaaagctatgttgatcacattatacgtagatgcccgcctatctttaccattggtaagctttgacccccttgattgtgatcttttgtactcaatttcatatattatgcttaatcataaagcaatgttggcgttttgttggtttgcaatgtcagtgttggaatgggagaagagtgaaactgagaaagaaatatctgaaacaacaaaggctttggactgggagatagatatcagcaggctgtacgaagaaggcttagaaacaaacactaactaccggcttgggtcaatggtagaaaaagtctcacaaatgattgtcctattgctcttctgtatttctcttttacaatgtgtcgggatatatgggaatgtgatgtaggttggttgcagtgaagtagaagaagaacacatttgcatagcttatgaaaagaaccgatgggtcaatctcaagcgtgagtctttagtaggagaggtaagataaaacagttgattttttgccttccttgagttgaattgtgactttagataggcctgacattgttgatctatgtgttgtgatgccataggatattggtaactggaagagtgtggtcacgttctgtggagaaaagaaggttcgaccagagattcttttttacgaagctaccggctcgatcgatagcctaaactaa

SEQ ID NO: 173259 - DNA, 488 bp, Arabidopsis thaliana landsberg
tacatttaaatgttttattccatagcatatatgtttatacagtttcttgaatacattctttctttcttgctacatatatacacaggtcatccgtggctatcactccatggtgaaagcattacctcaattttccaacttgtctcgcttggaagctttgttagtcgaatcatattgggaacacttaccagtctttcttggttgttgcatcaatctaaattcactcgtcgtggtgagtttaatttcatttgcatatgctcatgtaattacattgggatttctatcccaagaaaatattacatttttttttgttttgtgtatatcaataggaacttgatggcctttccgagatagaggagtttaaagtttcaccactgcttcaagattccctatctgctcgtgggtttgttcagcagaagacaccagtttcagtgacaaagacatcaagtgaaaggaaaatagcagcacattttgtgaagaaaagtggctaa

SEQ ID NO: 173260 - DNA, 2768 bp, Arabidopsis thaliana landsberg; identical to SEQ ID NO: 30711

SEQ ID NO: 173261 - DNA, 312 bp, Arabidopsis thaliana landsberg
gacccggttctcttctacgcacgctcagccatacttgctgctacctgaggatccagcatcgtaccttgtttcatcaccaccagatggcatggatgatcgaattgacaaggaagaacaacagtatgatgcataggatgtggagagccatctcaaagatcaggccttgtgtttgcactcgcggaggaggagtggatgatggagaccgtgaacatcggtccaagactactaaggatcgacacgctgagaggttggtccctactgttggagcttccacctcgcagccaccaccagagcactccctaggccgttgtt

SEQ ID NO: 173262 - DNA, 545 bp, Arabidopsis thaliana landsberg
acgaacggagttcctcaagttaaccattgatccttcgacattttaccaagctgttcctcgtcaagttaacgaggttcctccgcaagttaaccgagttgttcctcgtccagctaacgaggttcctccgcaagttaaccggattgttcctcctcgagtttaccagcggaggaaccgtgcagcaactgctgaaactgaatcaactgcgagttcttctttcaatgtgagtaaatgttaaatcttatctctctctttctcttaaaatgtactagctactttctttataataataaagtgcttttacccctttttgcagcaaaagcctgagatcattgtagttgaataccctgatgattctgtagctgaaactgtaagattatatacaattcttttgccttttgaggtgcttgtaattgattcttgaaacgttttttgaaacattgtgctttttggttgtgttttgttaggtgagaatggttgcaacaaagacagtagtcgatgtagaacacgacacgacataagaagcaggaaccaagaagattcgtctc

SEQ ID NO: 173263 - DNA, 2303 bp, Arabidopsis thaliana landsberg
atgttcttggttgctagtaaccgggaaatattgaaagggatcttaaccggaaagtaccgaaattttttaagtaaccgattcgaagcatttttgcttttttgggccgttataatgggccgataatccacaacgccatatcgcgtgttcgaaaacgcgccgataacagaaaaagccaataaattctctgtgggaaataaattggtgaaatttaacggaaaccccaaattccagaatccccaaatcgagaggttaaagaaacttcgattttgatctttcgaagtgatcggcaagaggtgacggtggacggtgacagaactgtcggaggtagagatcatcaaccaccggtgactactactgcagcggcgacaacaaagatggctatcccgaggctgagtcttcttcctaacaacgagcacaattctgataactacgaagatctggaacttgaatttagctcttccgtattaagatccctagagaggtacttaccgccggaaatactcacggcgaatagagaagagaaggccaaattcatgtcagacatcttgcacaagtacatttcccgcgaagaatgttcccaagtactggctctttcaacttctgatttttctttcgttttttttgttaccctaattctgtttttttattggccctatcaacatatctgtgaaattgacttgcttctcaagttcttgcgatagtgatacttgaaattacgaaattcaccaaactgatacgaatcagagaattgtctttatctttttttcttgtgaacacataagaatctgatgtttaaacccacagtttctcagaatagttcatgtgtatataatgttccaggctaaacggcgcaagacctataggcaagagataatatccaattatcaggtgaggagcctttgctcgtctttgctttcttagactttctttatgcaatgtttccttttcttgcagccacgtttcaaggggttgtataaacttgatcccaaattgtttttgcttccctcgttccgcaaggcgatcagcgaaaacacagaggaaagcttcagacgtatcatttctgaaccgtttcctggtgtttttgtctttaaaatgtttcagcctgacttctctgagaaactgctattagaggtaacaataacccatcatcttgccacttattatctgccgtgctcttacctctttggtttacttttgttcattttctgctgtttgattaaccaggtagagaatttcagaaagtgggctaatgagacaaacttcacgatcaggagaccagacaacacgagtaaatacggtgttgtacttgacgactttggcctggatattatgcttaagcaactcatggatgattttatctttcctatttgcaaaggcaagacatatattttacttaaatgcattcgaaagacttttattggttaaagcttattttaagaaaatacagtaacacgaaacttaactctgttgttttgcagtattctttcctgaagtgtgtggaacaatgtttgactctcactatggattttttattgaaaatggtgaagatagggatgctgacgtaggtgagtcttgtgatattactttcctgaagtgcaaacatgaattgtgatacctagagaaaaaccagagtgaattctttaatagcaaaacattaatctggtttagtataagattaagcagtgatcttttaaatctgcaggctttcatgtggaagattcagacataacattgaatgtttgtttgagtaaacaaggtgagggaggagaaatacttttcgcaggcgcacgatgcaataaacatatggatatagatccaaagccagaggtatttgagtccttttgagtagctttctttgtactgttacattcctatattcagtaaatggcaaaagggttcaagtaataaaggaaccaactatttctcacttacgcaggaatattttgattactgccatataccgggtcaagctatacttcaccgtggctgccacgtccatggtgctagagccacagcatctggtcgtcgggccaatatgattctttggtgccagaagtaagaaactttgaagcttgcctcaagatttcagatcacagttgaatcatattttttttctgcttttccattgcagctctttgtttagagagatgcaaacttatgaaccggaattctcagactggtgcggtcaatgtgtccatgaagagaaagaaaacaaaagccagattcttgctgtcaaaagaaaggtaaaaaaatgacatgattttgcataagtttataagttgttttgtttaagcatcgtaatc

SEQ ID NO: 173264 - DNA, 1679 bp, Arabidopsis thaliana landsberg
attttcttctacgagaactctatgtttagaactcgattaattattgatggataatttgcttatcgtgcatttttgttacaaagattactcaaaggcagtgttaaagacaaactattaatatctaacacaagttaaataaaaatccacaattttgtgccattcgtgcaaatttgttattaatgaaattttaaaaacaaaaatattgactagaacaaaaaaaattaaacattaaacttataatcacacgccgagtaaatctgacaaatattaaagccgttcgccctaaaatcaaaatttctagattgcaaagccctaaattttcaatttctgatatcggttgttcgaatctctcaatcgttgagcgattacgtgggagtcgatatagtaagatctggaatctttgtttttttgcttaggctctaagtatcgatctttcacggtgcaatcatggattctgtttctaaagatatgatcaacgatttgccagacgcatttctatgccacgttttgtcatacctcactacaaaagaagctgcttcaacatctcttctctcgagacgatggcgttatctacttgcttttgttccaaaccttgaatttgatgactctgcctatctgcatcgcgataaaagggtaaagaatcctttacatgagaaaggtttagtgggtttcgtgcttacggttgatgacaaaaggaagaagctttctacaagctttccggatttcgtggataggatccttgatttgcaaggcaattctcctctagacaaattctctctaaagatggtagatgatcatgatcctgttgatccaggttgtgtcgctccttggatacacaaggtattggtacgtggtgtatcggatctccatctagtcatcgatatgaatgaatggacgtcgcttcccgcaaagatcttcttgactgagacactggttaagttgactctaaagattagagatggtcctcccattgatgtgaaacatgttcatcttccaaagcttaagactctccatctcgagtcagttatgtttgatgaggaggatatttggtttagcaagcttctttctggttgtcccgagcttgaagaacttgttctccatcatatatggtcgtgtgtatggacatcttgctctgtttctgttgcgactctcaagagactgaccttttgttgcaacaacatgaagttttgcggtatgcacgaggaaaatccaaataatgtgtcctttgatactccaaatcttgtttacttggaatatgctgaagtcatagctaacaattatccaaaagtgaattttgattcgcttgttgaagccaagatcgatatttggatgacaaatgatcagctagatgaggtgagaattagagacatatatgagaaaaacgttatggtcggcaatgcaacagatcttatagttggaatccgcaatgttcgggtcctctgcttatccgctgacactctcgaggtttgtattccattctcatctttcttctaatctttcttattctaaggatttgagtcaatgatttcatctgagtgatgatgatctagtttataatatgataatggttttggtttcaggtactcacgtattgttgcaagcaaatcccgatattcccacaacctgactcatgtaacaaaccagagtaaaccaaaagttggatggaaatcattactaag

SEQ ID NO: 173265 - DNA, 1768 bp, Arabidopsis thaliana landsberg; identical to SEQ ID NO: 17806

SEQ ID NO: 173266 - DNA, 696 bp, Arabidopsis thaliana landsberg
atgtcggcggccggtgcaagccctttggccgttgcaccaatcacagcccctaccaccaccacgcgtcgccgtgtcggagattctttagaaaccacctccgaacgaccttccatttcctccgattactgcaataccaacacagtcaacatcgccgtatcacctgatatagacgacggagaaacaggtttgcaaggcggcgcgtgttcttcaccttcctcaattggttcctcctctagcggatctcattaccaccacgatcatcactaccatcatcatccaacgattcggtactttctgctccgtaaactacggttaccgtttctcttcgacggtgttggatcaacggctgtcgtaggtcaaggatggtggctctgttcagggagaaacgtgggtcgtcggatcttgggtcttctcatgatcttcgtcgtcgtttctctcttccttagagtctctctcatgagtgggcgcgtcgttgaccacgcgcaccggagagatttgaacgagcttgttgttatgcgggcgttacacgaagattggtcaatggctcaacgtgcaatgacggagaatgtcgtcattgagaagcttcccgtgagttttttcttcattacattttgcaaaattcattttcatgagaaaaaaaaaacaatttttttagctatatagattattctggtcggtgcacaattgaggaacagc

SEQ ID NO: 173267 - DNA, 3882 bp, Arabidopsis thaliana landsberg
atggacgggcaagagcatgccgaggtccctaattcgatggttgaggatgaccaatcagttgttgcggcggaggcgattgcagagttggcgaattcaaccggcgaacctaatcctgaagaaggagaagaacagagtgttgaagacgagcttatagcgaaggcgcagaagcttatggaagatattacttccgttgccaataaccctaatcctaatatccttcacgctcttagtcagcttctcgaatctcaggagtctctgtatgttcctttctagctcaacaatcagtctctcttcttgattttcttttgtagttgtctttagttttgacgcttacttgtattcgcaggttcttagaggagaatgggcatttctccaatgctcgtggtagtcataacagtggcaagctgtgtattctcatccgagtaagtttatttaaaaaaagattgttcttttttctcttgtgtgggttctttcttcttattttgttacttgatttttggcaggaaaacgatgagttttttgaattgatatcgtcgacttttctatctgagaattcttactcaaccgcagtaaaggcagcctctgcaaggttgctaatgaactgttcgcttacgtggatggtaaattttttactactttctttctctttacccttaattggatgtcttgtttgttgactcatgacgcaatttttcttttttttcagtatcctcatgttttcgacgatgctgtaacggaaaactttaaaaattgggttatggaagaggcagtcaagtttcctggtgaagactctgccaagaaggaagcctcagattctgaaatgttaaaaacttattctacaggactgtctagctctctcatctggcgaggtactgattaaacattctcaacttgttgtctcttcttcccatttttgcaacgcccacagctgaaattgtaacattttctttttgtgtgactcatgtaagtcgtgggcaaatagttgaagacgttttgacatcaggactatctgctaagcttatgcattatcttcgagtacgagttcttaaagagccaagcacaagccgtatacacacaactgagactaagcacgtctccttaaaaaccaaagaagaaggtcgaagtagggtgcgtaagattgtggatacagttgaaggtgaccatgttcttgagacagactccggaagagagatgggacaaactgatgtacagcctgatggcgaattcgaaatcgatggcagagatgtatttaatgtttcaggtgttgttgattgtaaaattaaacctggagatgacaatagtgttagagatgacccttcaagacacagactgaaccgatcaaaatcaagggggagaggaagggttcacgaaggtgcacctgatacagaagttctcttggcatctcctagatcaggtcgtctacttgtcagagatagggatctatcaaaaatttcagatggcagaaatgcagaagacgtgaccgtatgtcttgggaaaatgaagtctggtattatggagatagaaagagaggataacgatgagtgctttcaaggttgcataataggaactaaaaacataactgatctagtaaagagagccgttggagctgctgaaaccgaagctagagctgcccatgctcctgatgacgcagctaaagcagctggcgatgctgctgcagagcttgttaaaactgctgctttggaggtatgtttttctttttttgcttagctgttagtgatttcatttccctaatgaaacggtggattagggtgacctgatatttatattgattgtcttttcttttaaattatccaggaattcaagtcttctggcagtgaagaagctgctgtgtctgctgctactcgagcagctattacagtcatagatgccgcagaggtttcaaggttggtcatgctatgacgtcgtggatattatcgttgctgtttatcaattatttatctctgagttgtttagggctttaactctgctatttggttggtggcagaaatcctacttgtgtcacatctgatcagacaacggatgttagtgaagtttcccttccagatatcgaatcattggctcagttacaagaaaaatattgcatccagtgccttgagatactgggagaatatgttgaggttctcgggcctgtactccatgaaaaaggtgttgatgtatgcattgtgctgctggaacgtacatcccagttagatgatcgttcgacagtgtctcctttgttacctgatgtcatgaagttaatttgcgctttggctgcgcaccggaagtttgcagcaatgtttgttgaacggcgtggcatactaaaattacttgctgttccaagggtctctgagactttttatggtctctcatcttgcttatacaccattggctctcttcaggtaataatacagcaaatttgcatgactttaacacaattttggttcaccgtcaatcgttgacttagtacaaatcctgcttcttcttaccttcaattttttttttctcagggtataatggagcgtgtctgtgcacttccattggttgtcatacatcaagttgttaaattagctatcgaacttctcgactgttcccaggatcaagccagaaaaaattcagctttattctttgctgctgcttttgtcttcagagccattttagatgcatttgatgctcaggatagtttgcagaaactccttgcaattcttaaagatgcagcctcagttagaactggtgctaatactgaccgatcagctcctgaagtcatgacgtcctcagagaagcagatggcttttcacacctgttttgctttacgccagtattttagagctcatctccttttgcttgttgattcaatccgtcctagcagaattagccggggtggtgtgccatcttcaatgaagcctaatataagggcagcctataagccccttgacatcagcaatgaagctgttgatgccatcttccttcagttacagaaggataggaggttgggtccgacctttgtgaaagctcagtggcctgctgtcaataattttttggcctcctctggacatgttaccatgttggaactttgtcaggtaatgtagcattttactccacatgtacattgttttgtctaccatcttttaacattatgttcacatgcgcagactccaccagtagatcgttatctgcatgatcttcttcagtatgcttttggggttcttcacatagttacatcaatacctgatggccgcaaagcaattgcacatgccacactcagcaacaatcgtgctggcattgctgtcattttggatgcagcaaatatttccaacagcatagtagaccctgaggtcagtagtccgcttctatccattattcacctgggttttgtctttcttcttctgcttctcattgatacttacctccttcatgttttctttattgaagatcatccagcctgcactaaatgtcctaatcaatctggtgtgcccaccaccatcattaagcaataagccgccccttgcacaaaatcatcaacctgttcctggccaagccactacccgtccctctactgatgttgctgtaggtactcagtccactggtaatgctccgcaaactcctgttgcaccagcatcttcaggtttggttggggatcggagaattttcttaggagcaggaactggttctgctggccttgctgctaagttggagcaggtttatcgtcaagcccgtgaagctgttcgtgggaatgatggtataaaaattcttttaaaacttcttcagcccagaatatatgtaaatcctcctgctaccccagattgtctacgagcgctagcttgcagggtacttcttggtctggctagagatgatacaattgcacaaatactgactaaacttgag

SEQ ID NO: 173268 - DNA, 1076 bp, Arabidopsis thaliana landsberg; identical to SEQ ID NO: 7948

SEQ ID NO: 173269 - DNA, 381 bp, Arabidopsis thaliana landsberg
ctgaactttattctctttgttttgacatgtttcttatacagaatgtgagaccaagcgcggagagcttaccggaggagttgggcgacattgtaacatcatgttggaatgaggatccgaatgctcggcccaacttcacgcatatcattgagttacttcttaactatctctctaaagttggatctccgatatccgctattccacaacggattcttgcttcgaagaacacgctattgccaccggattctcctggaactagctctttgatggctaagcttgatgaatgtggggaaactccaaaggccaaaagtgaagacaaacgaaaaggtttgtttttctgcttcaatcaatgttattaaccttgaaatcacagagtggttttag

SEQ ID NO: 173270 - DNA, 537 bp, Arabidopsis thaliana landsberg
tatctcactgtataggtgatgtgatgactgacatttgtgtccaatcaagggactttctctaccgtgtacaaggccgaggacatactttacaaccactaccacaacggctgggacattttcggtcaggcgcaagatcgagaacaagaacaagaagaatgggataatcctccatccaagcggcgcagggtagacggggcttttggagtaagtaagaaggcgcgctttgtggcgctgaagaagatgtatgtcacaagcagcccaattcgtatccagaacgaattggagcttctccatgatcttcgaggatgcaaatccgtatgtcccttgattacagccttccgttaccaggatcaggttgtagcggttctgccctacttcccgcataccgactttcggattcaatatcgcaccttcatggtagcggacatgcgccactatctgaggtcactcataacgcccttacagtcggtccacgaacatgaaattttacgacgaaaaatcaaaccaacgtatgtatcattgacgtgctcgagctgc

SEQ ID NO: 173271 - DNA, 498 bp, Arabidopsis thaliana landsberg; identical to SEQ ID NO: 8590

SEQ ID NO: 173272 - DNA, 538 bp, Arabidopsis thaliana landsberg
tagttgggacaacgatgattcttacaaatctgatatgagacggaatcagtcagcgaatgatttcagggcatcgggaaatagagaaggtgcacatgtgaagtcaaagtcgtcggaggatatctatacgcgatcgcagcttgaggcttctgctgcggggaaagagagtttcttcgcgaggagaatggcggagaatgagtctaagcctgaaggtcttcctccttcgcaaggtggcaagtatgtaggattcggatcaagctcggctccaccaccgagaaataatcaacaggatgatgttttctccgttgtgtctcaggtgaattttaatgcttttttcagttcctttttaaattgggtgaattacgtttttgtgtgttgattcgttctttaaaattgcttagggttttggaagactgtctctggttgctgcatctgcagctcagtcagctgctagtcttgttcaaacaggaaccaaggagttcacatccaaagtaactaactatctgtactctctgcttgatttgcatagagtttgtgaatg

SEQ ID NO: 173273 - DNA, 961 bp, Arabidopsis thaliana landsberg
gaacttacagaagaggatcacctggcaagtgccttaaccaacgatggagaagaagggtacctacacctagaaacccaagggtacaaagagtaccttgacgcccacataccaatggaaggaccagaagagtttgaggaattgatcgttccctcagaagaagcagtatcaggatgcaccatgagcctaatcgctgaaaaaacaaactctactgagatgctcgaccatggaggggagaataaagttcagatgactgttcagaactcaaagctccaaaggttgaccttaagcctcttccaaaaggtctgaggtacgcatttttcggtccaaatgatatttatcccgtcattattaatgatggactaagtgatgaacaagtgaaccagttgttgaatgaacttagaaagtataggagggcaattgggtattctttagctgatattaaaggaatttcacctagtttatgtactcataggatccatcttgaaaatgaatcatatactagtattgaaccacataggagattcaatccgaatttgaaagatgtagttaaaaaggagattcttaaattacttgatgttgatatcatctacccaatttccgatagtacccaattttcagagaagcatgacttcaatattctcggatttcattgaggagataatggaggttgatatatccttattttcactgatttcttctatgttttaggtttatgattatgagtctttatgttatttctcgagtctttttagtgtcttttcaggtatcttatgcattgggacaacaatgaagataaggagacattttggaggaagagccaaaggaaaggaagctaaggacgaatttggattcagaaatcagcgaggagtgtcgatcgacaccagtttcggcccaacaaagtcctagacgctttcgagtttacaaagagaaaaattgccccaaaagacttccttatttgcat

SEQ ID NO: 173274 - DNA, 675 bp, Arabidopsis thaliana landsberg
tattccttatttgatttcttgcgagcatatcaattatgagaagacagaaacgctcctcatacattacaaaaatcataaactctcctactttatacttttatttatattgtcttattaagtttttattttttggccaggaaaccaccattgaagaatttcacatgccccctccatagcttgctaaaattgttagctacctggctgaagatggagtggatgcattgaaaaatttgattaaagcaggtccggtatttaaggaggctgtgtattcagaggaaaccctacgttgtgtccgacttgacagatctcggtatttcatgtggtggtcaatgccacactcgattaattatcatttcttcaataaatgttttgaagcaaataatccccatgctttgaatgctgtattgtacaaaggaatagcatatgagaatttcgttgaagaatgctacagggcacctttatgggtggagccttatggtgaagacggaggatgtgtacaaatcgatagagcttattgggctcaaccccgagtgcgagcaatgaatgcaaggtgctgccgatgcaaaagtgcagcacacaaaacttgtccaaatatgtgaagttcgattttaatgttgtcgttttttttgaaccattaagaacctttgtttttcatgtattagctcctttcttttt

SEQ ID NO: 173275 - DNA, 2490 bp, Arabidopsis thaliana landsberg
  unsure (1)..(2490): unsure at all n locations
aatctgtcttcttggaatgttttttatagatgaagtttattttgtttgctcaggacagtacaatatagtgattgaaattttacgtcttcgaggtgtgctaaaatcttacatcaattctaataaacatgctctctctctctctctcaccccttggcagagacgatgttactgagcgtgaagataaatggcatgtttatgtgactggtcatagcttgggtggcgcattagctacactcttggctctcgaactttcgtccagccaattagctaagtaagtactttgagaactcccttctcctacatatcaacctgacgacaagcagcttaatgggcatttaacatgatttgtgtgcttgttagacgtggggcaatcactgttaccatgtacaactttggatctccaagagtaggcaacaaacaatttgctgaaatttataatcaggtcatatgcttcttctaacataacaatttttagttgaaaagtgggagtgagatggcacgtcgtcataaaacctcatggtttatatgttttctacgttcgcagaaagtaaaagacagctggagagttgtaaaccatagagacataattcccacagtccctcgcttaatgggctattgtcatgttgctcatcctgtttatctcagtgctggagatgtggtaagcctgccctttgatcacactatctaatctactcagatcattatttcttatttttccttcgaggtgctattctatgcgattgtaaatgattcatgctcctagttgtgttgtcttgcctgttgtcactggaaacatttggtcttctatatagcaactgtcatttgtttgattctgtctggctaagtatctagtataacctgcaaaaacgatatgtgatatataatatttctttgaatgtgactacctttttggccttactctgcagtacgagctctgtaagttatacaatatgattttccaatataaggtgattaaaatgttgcaggaggatattgagttccagaaagatggttatcatgctgaggtgattggcgaagcgacacccgatattcttgttagtcgatttgtaagtgctctaacactctttctctggttacttcacattttccttttgatcatgattctagttttaattttcctgcttgtgtttctcataaattctgcatatgtttgttgttgggtttatgtatttttcatagctaataatttaatagggaaaaaaaaagagatctctaaactgaattatttcctaagagctgctcctaatactgtcctataattataggttcacatttactagcagctattttattgtgatggcttcatatgcgtcaatgaacttaaaacttgttttccttctgcgtagtctttttcatactatctatcttttctgggattcagaagcttatgtatgggtattattcagaagatgtagagaggcaaaaaatatagtgaaaaatattccttgaacaagaaaatgagtgatttcctgacatgagattaaatggatgttttctttcagatgaaaggtgagaaggaactcgttgagaagatacttcaaacggaaattaaaatattcaatgcacttcgtagtggaagtgcccttatgcagcacttggaggatttctattacatcacattgttagaggcaggtcttttgttgntgccacttaagcaattgctgattattgataagttgtcataacacaacgtataactccatgcattttttcctttttcttttcaagaattacactgtgacttaaagttagaaagattcagtccctcacaggatagtgacatttaaacatcgccaacccttttttggatggagcatgtgttggtttgagactgctagtaatttccatatctcattggcatcattttttgttgtcaatcttttcagagtgtgaagttatattacaaaactgttgaagatccgaaaggcgttgaaagtactactatccaatcagtgggagagagctaagtgagagcatgtagtggctcgcttcagctgtataggattcacactgtatactatatacaagagacaagcatccattgtaattattttatagtgatctgtggttcagtcgtgtaaacttaaacgtagacatggtatcaaaaggggacaagatggttggaatttatcacaatgcgtatagatgaaatttgaacattatactctcactgcatgctcagggagaccttgcagggaatgttatttttggctaacagggaccgttacacctcggacctcgcctctcggttggctagtttcagcattatttacatctgtgagcttttcaggagaacagctgcgggagaagtaagttatctcaatccttaagctttcgtttgttttggaacctttgcacgcagatcttatttttacgttctaagtttctacataatcgtagatcaatctggaaacaacaatcttaatccctgatcattcaccgtttttcttttccattagattttcttga

SEQ ID NO: 173276 - DNA, 1049 bp, Arabidopsis thaliana landsberg
cctcaggatcaagctacatatatccctctgatttagttccatttacaaggaaacctcttttcataatcattgacagtgatagcagcacagtttttaaagtaagtacacctgattccatcattcttatgttaaaattcatttgatacctatgtttagtaaattgagaagatatgaatatttctttccttgaactgtgaagaatatttgtggagcggagaaaggagaaccagccgcgttacttctgtctccatcacatactcctccgcttatctctgctgatttctctcgtcaacctagtggtagccttttcaccatttttctcacgtcaccagtccaagcgttttgcttgttaagtgagatttccgcctctgatatggaaacggtaggtagagataaagcttcatcacttgcttgatacttctttctcttcacttcttttgtttgcgtgctgactaccatcatgtgttaggatatttttactaaggccgagaagcttctttcctcgtctatgaacgaatgggcttcgacattggcaacatcagatacccttcaccctgtttggtcacagatactaaaagatcccttcttgagacgactactcctaaggtataagtttttcttccaagttctaagacaccttcgggatcttctaaaagtctaaaactgtagccaacttgatctaatggaacattagacgattggaggttcttatttggacatagattgtgtaggaacgaggaaccataaatattgttggttttatctatcaacgattgtcgaaatctctgaacttttttgtcttatatatctgcggtttggactttgtctcccttatctgcagattcatattctgccgggctgtcttggcactgtacactccagtcttcaataacaaacaaaatcagccagagtgctgtccgtctctcccagaatcgctattaccaactgctcctgctgttcaatccgctgtgtttcagatggccaatgtatttggtgctacaagtaaatttactatacctcaagatatcacaatgctcgaaagcttctaa

SEQ ID NO: 173277 - DNA, 939 bp, Arabidopsis thaliana landsberg; identical to SEQ ID NO: 54885

SEQ ID NO: 173278 - DNA, 489 bp, Arabidopsis thaliana landsberg
gctttctcaaatgcctaggctcatctatgatagttcaaataacaagtacctatggcaagcatacctattatctaatatcaagttctaggtaatcaatctaaaactagcaaaaagaataatcaagatgaagaactctaagaataatcctaaggggttttcgatctactaatccatctaaatccctaatgagactccctaaacccaacaaggtgattactcagacatgataacagaaacacaaatcataatctgaatagttttcagtgaatgaattaagaatagaagtaaaggagttcagaatcctctctaaagggattagattcttctctcaaatgtgtaacaaactctgaaaaacaaaaactaggtctaacaatgaccgtgcagggactactttgtcgatcgacaccagcttctgaaaaacgtccttcaagatcttcattgctgaaaagcttccaaaattccttattgtgctctatagttcccatatgt

SEQ ID NO: 173279 - DNA, 667 bp, Arabidopsis thaliana landsberg
ctttctttaactgtcttccacacttttcagtcagttcagtctcatttttctctctataatgataacaacattttcaatgttgttaattatggagcaattggagatggattttctgacgattcaaaggtttgttttcattttggttatatattctagttacatgtattgataattcaaagtatttatagaaattattaattcatatttcaggctttcaaagatgcatgggaagacacatgcaattacattggatctgaatcaattatggaaattcctgaaggaaacacatttcttctgcaacctattgagtttcatggcccttgtaaatccaagaaaatcattttatcggtatgcataatcatatatatatatataaatattcaatatttattttatttactaacaagattaaggtcttgataatatttacaagtttttataggggattttggtttttattattttgaaaatctattttttttactatacaagatttttgaaaatatatgcaatactaatacatttcatatttttgtttgtagatcagtggaaacttaattgctcccgaatctccatatgaatgtgaaatgcacacagatgattgtcatcagtggatcgaattcgcacatataaatggactttatatcgatggtcatggtactcttga

SEQ ID NO: 173280 - DNA, 1489 bp, Arabidopsis thaliana landsberg
atgacttataatgacttagtccgacttggcacaacacttaacatcgtaaaggttagcaagcctaaacgatattctaagtgggagagtggtcgtcaatacgccgaccaagggttgggattggttcccgaacctcggttggatgttgatgatcaatctcaatgtggcgttttcggggcgcccgtgacttgtctggtcatagagcgactcaaggacgttacaacaaccccctctcttttattttggtcctagcttcactctcttcttaagaatttctctgaactacttttctccttgtggattcgatcctaaaatactactttgatatactatgcacttgtagtagtcgtgtggtctttcaggtaaaagcctgaggcgaaataaaacacacatcaagctttttggcaccgttgccggggagagattgttagtttcaccaagtccgagaactagagtgaactctagtacacttgctttttaattttttgtttttgtttttctttgtttcaggaagcttaaaggatgaattcaagaaattatccgaatagctactacccgaatgtgaatcatgggtcaaaccgtggatcacatttctcaactgaccacaacacgcctgatgcatcccaaatgcatggcgagtcttggcaatcttggctgtctaatggaggagcttttgggccgatcactactctaacgatcaatccgccgccttcattcagaaccgcccacaagctaacccctcggttagcccattcccggaggtcaacgcgtcggaggacttcactcttctcatccttatggagttgcccgacatgaatatctcggatatgaccaaggatacctgcaagaggtgatgagtgtagatgttcatctgaacaactatgcttaccaaactaatgagccctaccggaccgccgaggcgaaagatagactcattggtctcatccgagactttggtgtagctgttcatccgaacaactatgcttaccaaactaatgagccctaccaaactgctgaaccagaagatagactcattggtcttctccaagactttgttgatagccatcaagaagatgtgaagagaatcaacttaaagctaatggagatggaagccaaatttgaggagaagttcgatgacctcactaatcgactcgaacatatggtggggacacttgttgatatcgataacactctcctcaatcatcaagacgatctccacgaccaaaacacgagaatcgtcaatgttggatttgttgttgatacagttgagagtcatctgaattggaagatggaggagctagagaagaagctcaccaaatcaaacgaattgtcggaatggaaaagcaaccaatcttgccaagaagaagatgagtttcctaaggcccaagcccgatatgaggaggaaaacaaaaaaagacctcggattcctagtgcaaaaaggataagataaaaattcctattccgaaaatggaaatcttgacccaatgaaaac

SEQ ID NO: 173281 - DNA, 752 bp, Arabidopsis thaliana landsberg
aacaaaaccctgctgaagtttcccatattaaaaccctagctagaccaaaattgtgagcggacaagttcacacttttcttgacgattccaaaccactttggctccgattcagatcccgatggacgctcccgaacaatctttttcttcgggagaaatccttggccgtcgaagatcaagaactcgccgtcggaactctcgaggactcccacgcagcgaaaccagagaccgacgctgcgattcagcttcccaacaaatccaagcctgataaatccgccgtcgagaaggaccgtgaggattttcgggaagcagtggtcaaaactctcgatcggcttttgttcgtccataaatctttcgatatctaccgtggcgtggctggactttacgatttcggtcctcatggccgtactgttgaacttaatgtacttagcctctggcgtaaggtgaggattcattcattcacatatatctctggcacaattcggtagacaagagctgattttgaattttctttgatatacagtgttttgttgatgaagaggacatgatggaggttgcttgtacagctttgacaccagaggccgttttcaacgcatctgggcatgtaaaaaatttcactgatcttatggtcaaggatgaggtagatggagcatttcaccgtgcggaccacttggtcaaaagttattgtgaaaaccgaaagaaagatcctaccatctctgctgagaatgctgctgaattggataaagttatagctca

SEQ ID NO: 173282 - DNA, 690 bp, Arabidopsis thaliana landsberg
ttttggttccaaaaggttgcctctcttggagaaggagtttccttggaggcgaaattgttaagcaggtgggagcctgtgccttctttagcttctcttttcttgctctctttttcagaaaccaaggtggtagtttttaatcgctcatgttgaatatgtctttgtataggaaagaagcagcattgcgtcaaagagaggttaataccctcaatctattttgctgctcagatgtagtcttcttttaatcgagtcattatgtaaaacatacaatttaagctgtgcagaaaatttgtacctgttacaggctgctctaaatgttgctaaacagaaaaagagtggaaaggatgaggaaattgtttccctacgttcggagcttgaggtaaggttcactgatgtactgttttctatgagatgtaccacttttatttgcattatgaaaccatgtcttatttttctctgctatgttcagaacttgaaagatgaggctacaactgctgcagaacggcttcaagaagcagagtctgaagcgaagtctcttcgcacaatgactcagaggatgattttaacacaggatgaaatggtttgtcaaaaaatcttgggtctcgtaatgtaccaataattgataaggttctgaggttatgactcgatggatgattcaaaaaaatagcaacaagtagttctgaagagatgctg

SEQ ID NO: 173283 - DNA, 2760 bp, Arabidopsis thaliana landsberg
atgccgttaatgcagaagcaagtgttcccatttgtgcaagcctctgatcaggatcttctgatggaaccaaaggtaagagttttctccttcttttcttcactgtcaaagagcaagatcgtctccgctttctagtttcttcttcaaaacaaagaaatctcaatctcaaacacttgttattagtttaatcctgaagcatctatgatctatgtatatgatatgtataagttctcatcaatgcttattaaccctacataaggtgcaacaaaatttcaagcatataataggccaaagttaagctatttcatattcatctaactatttaatcaagtgaaacatctcgtcagattcatcaactcaagaactttatgatcatatcatgaaatccaaaaacaaaaatcgcaccttgactcaattccaatttgtctgtttgatgagtatgcttctcaatccgaaagaaatgtaaaatcttcttctgagataaccctaaacatttcaccggacaagagaaaaatccatttttttattaaacaaagaacacaagaaaattaggaaatttaaaagcgaagaaacaaaaaatccatacttcttacaggtcgttggtcggaacaatcgacacaaagccaagttccaatggggacacgaacaacaatgggtctaaggcatttcatgtgaaagcctctatcgcatttgtcacagagaagaagctcatcgtctccttctccagaaccacatttctcgcaggtgacgttactgtagctgtcttcgtcttcttcttcttcttgttcaaccacagggacagatttcgccattatctcagccattgatttcatcttcctcggtggtggagattcggaggaagggcgtctcgctggagctttcgttcgtcgcctcgatgagcaaggagacgccgcaggggaggatgcgttccatgtggccatgacggaagctcacgacgaagagtcgccggagaacgggatatatgattttgattggttggggctaatgtgcaccgccgcgtgtgcgcacgaaaactgatgtgcgcatcacctggagtgtaatttgggattcttcctttgagactcttctttatcggctcttttgtttttttgacctttgacaaattcaaaattactggtatgtcttaaaaggtttaaacattgtaagtgatactaataaatttacaaccattaaagccttttaattgttactaaatttcttaactaaattttacttatttaatttactagggattgatataaaaattaatacagtattaactatactatacaaacgtaattacaaaaatagatatctttcaattgaaaaaaaatatatgttggtgggctcaatacaaacacagtaaacgtcaatttcgtcaactgagccaccccaacgccaagcccaacagtcggtccgcctcattggaggctcaagttctttatttgacaagctaaaccaaagtgttctggtttgaccaacaatgtaatattacataaatctgaatctataaaatacaaaatttaataaattatgtcttatggtttaacataattttctgtttccgatttaagaatttttcgccatattgattttcataattttatatacatatataatatctttcaattgtaaatttttatcttataattttatatatgaatagttttctctatttttttcaaggtttttaattaataagaaattgcggtgttagcgttaatgaaatagttatggtatagactataaagaataatatacataattggaacaagtgaaatggttgtttgatatattcttgacgatgagagcaaaactttcttatcatattttctgaaccggggtgtatgctaggtaattttgtggctaagtcctttattaaggttgttgcacttcttcacaaggatgaaaacttaagtcttgcatcggtggatgcttcaagatattcatatatgctcgccatgtaagttttgcttatactaatactgtttaagtcatagtattccaaaaaaatcaaagaaataagactattactggtccatcacaatggattcccttcgagaagcccgcatcgatctttctatgccttatgagttttgtccctatgaatatgaggaatatgaaaaacattcttgaccttgcttctactaccgttaaagtatgatgtctctctcttctccatgtatcttgttacattcatgcttgaccaatttgtttgtgtttcattcatgaccagtttgcttgtgtgttgtagatgatgcgtcattgcttcgattattggcgtagtaatgaatttcccttgtttaaaaaccttgttaaactatcgtttgagtctaagacgaaaaaaggttggaaagttctttggactctgataaaaagctctcccaatctagaaactttgatcctcaaggtttgtatgtataatatgatctctttttctctttctcaattataaatttaatctcggagtttcacttactgtgtgttcttttcttttctatccgttgtttcagggttttcagtgtgtaagtacttgtgggtatagcattgatggaaatacgttgaaggtgttggagttatacgggtgtagagggaatcttagagaagtcgaacaagtgaggctgttctgtcggaaagtgaatttcttcaagtaatgaaagtggaaattggtactaaggttgatgttgacaagaaattgcaactcaccaaagacctccttccttatcctaacgttcctccaaatgccaaatccacttcttgtaa

SEQ ID NO: 173284 - DNA, 1268 bp, Arabidopsis thaliana landsberg; identical to SEQ ID NO: 7576

SEQ ID NO: 173285 - DNA, 446 bp, Arabidopsis thaliana landsberg
gaaagaaaatgttatgaaaagttgaataacatggcacttcatttcaattcaaagctatcttctagtttggatactctaaagaaagaactgcccagcagactaatatttatcgacgtttacgatactcttctcgatataattaaaaatcctacaaattacggtaatttacatgaattcatatagtttttatttatttacgtacatcaatgttaatattaacatcctatatatgtttgtggattcatgtaggatttaaagtggcagataaaggatgttgtggtacaggaaaaattgagttgatggaattgtgcaataaatttactccttttacatgttcggatgcatcgactcatgtgttcttcgactcttatcatccgagtgaaaaggcatatcagattatcactcataaattgttagcaaaataccgtaaatacctaaacacctga

SEQ ID NO: 173286 - DNA, 417 bp, Arabidopsis thaliana landsberg
atgagcaccacacccgccatcgaagtgaccgccaccccgggccagcgcctgggtatgccggcggacgtttttttgcgcgactactggcaaaaacgcccactgctgatccgcgccgccttccccggtttcgagctgccgttgcaaccggacgacctcggcggactggcctgcgaggatggcgcgctgtcgcgcctgatcgaacacgatcgcgccaacgatcaatggacggtgcaccacggcccgctcgacgaagacctgttcgcgcgcctgcccgaccgcgactggaccgtgctggtgcaggacgtggacaagtgggacgccgacgtcgcccggctgttgaaagactttcgctttctgcccagctggcgcgtcgacgacgtgatgatcagctacgccgaggatgccggcggtgtcggc

SEQ ID NO: 173287 - DNA, 549 bp, Arabidopsis thaliana landsberg
cgacccccagaacccgcttaagcccgccaacaccaataaggtacaggtcggcaaggtccttgacatgatcttcatgaacctcaaggagtacgacgccactggcaaggcccagcttgaggccgatgactcgatcaccacgaccgaccagcagaacttcaccatcaagatcaagccgggcctgaagttctccgacggtaccccggtcacctccagctccttcgtggacgcctggaactacggtgccctggtcaccaacaagcagctgaactcgtacttcttcgcggacatcgacggctacaaggccgtccacccggacgacgagaaggccacgccgaccgccaagaccatgtccggtctgaaggtcgtcgacgacaccaccttcacggtgaagctggcgcagaagttctccacgtggccggaccgcctgggctacaaggccttcgcgccgctgcccaaggagttcttcgacaaccacgacgcgtacctgaagaagccgatcggcgacggcccgtacatgatcgagtcctacaccaagggcacgagcataag

SEQ ID NO: 173288 - DNA, 1221 bp, Arabidopsis thaliana landsberg
ccaacgtgatgttagtgatgaaatagctgaagaatcatcaaaagtgcagtatcttatttctctacaagtcttacaaaaatgattagtatcttttttataactttacattctattatcttttgaaggatcagtctcctactccacgatcctctacaccaaatttcaatattttatctaaagaaagtctggatgttaaaaaagataaaaagagagttagaagaggaagaaatgaggttagcatttaaaaaaaattgtattatctcaccaagtgtttataatgtttttttcaaatcttaaaaaagtttatcttttttgcaacttcagaacaagagacttaaaccaagtttttatgctgaggataatgttcaaacaagaaaacaggttagtatttacaacgatactggtttaaaaaattgtcaattgtcttgtaatgatgtttataagggattttaaaagtacttttaaacggtgttttttactattttaggtgccgagaaagaggcagaaacaagttgatagtgttgatgttgatgttccaacaaggaaagaggttagtatctaatttattatgatattgctagaaatttctgttaaaagaatgcttgcaagattgaaaattttgtttacaaagtttttaaaacatctatttttttctttttgataggcacagagtaagaagaggaaaattattggaagtgatggtgataacgctgataatgttggcgacagtaatgatgatcatcccgctacacaaagaaagagtaagcggggtacgtttccttcaattcctaaaaaagcacctttcaaagctaagaagaagaagcccccaatattgcatccatatgcgaaagttgatgcaacaagatttgagaaatcagctgagtggaagaagtcaagaaaaaacaagtgagtttttgttagtaagatagtgagtttttttaaaataaaacattcattggtgactgttttgttgttgtaggccactatcaatcgcaggaaatattatagatacaaagtggtttacaagcctagagacgccagggaaagcaataacaacaacggtatgtctaaacatccttgtaaatttggttttcaaagggattttaaaagcttttaaaagggtaaaacatgatttacaatcgtttttaaagcatcagtaagtggcatcgaatgatttataagggattttaaagggggttacatggtttataaacggtttct

SEQ ID NO: 173289 - DNA, 1382 bp, Arabidopsis thaliana landsberg
caaaagatgaagggaggagagacaatgtcagtacggaggagcgggtacaaggcggtggttgacggagttggtggacggcggcgaagagaggacgacatggttgagatccgcaaagctaagagagaagagagcttgcttaagaagcgtcgcgaggctcttcctcattctccttccgccgattctcttgaccagaaggtccgtttggcatatgtacacattttgtattttcgtcgcgaaacctggagattgatgaatctgacagttcaattctggagacatgtgatttctgattcgtagatgcatgctttcagtcttaggaattttgaaatgacctatccaatttcgatccattttggcgtttcttgtggttttccgtgtttgaaatttggtgttcgtaatttgtcttgagattcgtatttcttgacatgttcgttgtgaaatttgacttgatgcttgaattttcgatatatgatcgctagagtttttacttgcctcctgacattttaaattctcagagtgagctactaacctttcatgattgattttggtttatgaagaatttgcatgttctgaaacttggttatacagtgctagaattatcagaaggagctacatagcttggttaagactttccatattatttttgaactgaagatttttcttttgcatgttctggaatatgataatggtgattgaatttctcggaatgggagattacattttctattttggatcattttttctattttgagtagttggtatgttcgattggttacagttgataagctgtatttggtctgacgagagggatctgttgattgaggctactactcagatcagaacgttactttgtggtggtgagagacatcccattaacttatttactaacagatttgataccttggttgctaaggcataatcaagctattgacattgctagatgagccacagcaaactttcaaagtttctgatgttagactgtaatgtagtttgacatgaaactaaagctataacgatgtattcactctctctaatgctattttatgttcttttggtagaaatgtttaacgtacgtgttgaagaagttatacaggccggtttggttccacgctttgtggagttcctaacatgggatgactccccccagcttcaggttagcttcgatacacctgtacattcaatctgcaatctggttttacccctagcttcataaggtcaatgtgtttcggttcgtggaacaaattttatagtttgaagcggcttgggctttaacaaatattgcatctggaacatctgagaatactgaagtggtgattgatcatggagctgttgcaatactagtgagacttctcaactcgccatatgatgtggtccgtgagcag

SEQ ID NO: 173290 - DNA, 504 bp, Arabidopsis thaliana landsberg
aaattttccttcatctctcctgcagatgcttccccaaaaatcccgtacaccactagacaaacaatcgaaggagcaattacagctgcctgtcgaatgccatagctttactccatctgagatcgaatgcatgaaagcgttaaagatttacgaaacaggagaggaaatgaagtcaatgatttcagagtcgtatgtctctgtaggaagctacaaggtcagagcgagcgtctcgtccactctgcagaaaatcctggacaagcatggagacatagcgtccggttccaaacttcagtcactgcgcacaaaatcttactcgcttgagactctagccgcggtggttcttgaactccaatcgacgcccctgaagaaattgaagcaggcacgcgtgttggaaatgctatcggttgttatagacgcagagtctgttaaaatcagagctggttggctcagggagatcctgaacgagattcttgaagcggcccaccactatgatggacacgagacaac

SEQ ID NO: 173291 - DNA, 1096 bp, Arabidopsis thaliana landsberg
gctttgttgttgtatttgcaccagaatgcggcaaaactgggttttttgtaccaagtggtaggtatgacaaaaaccgtggccttgtcctctcttctcttgcttctaatgtttcagctcaaggtggctacttcaatacttcgcttggccaaggcccggatcgagtgtaactctgggatgtgcattaaggtgctgaaccagagctttgctacaactgtattgactttgcctcaactctgttattgtccagctgtcccaaccagacaaaggcctagcctggtccgaaaaacgggttgtgtgtatggtcgaactccaataggtgttttttggatcactgacgatagaaccgcattttcttaccccatttcaggatgatattagatccgaggtagcagagtttgatcaagcgtggcaattgttaacaagtggtatgatagctaatactacttcgccatcatctaaaagcaaatactacgcagctgacgaagccaccttgccggcttccaggattatatatgcattaatgcaatgcactccggacttatctttggaggattgccgtacctgtttaaaacagagtgttagtgactttcagtcatgctgcaatggaaagcaaggtggcactgtgtaccgagccagctgtcttttccggtgggacttgtttccattcgctgaggcttttagtcgtatcacattggcacctccggcagtgcccaatacatcgacaaagaaaggtaagtcttccaatagcaacagtttaattacttacctaaagaaggcttaaaagaaaactataatcttctcctgcagataccataacaatctcaatggcaatcttcaagggaattgttagttccattgttattattatcatcttgctgcttcttgcgtttggatttgttttttatagaaggagaaagtcatatcaaggtcagtttttctgtgtttatccatcattttctttatacattgggtgtgtgtagctatgacgtggaatgaaacagatcgagcttgtgcaatatcctcaattatttatactctacaattttgtgttgaacagaatctagtagtgatatcactattacacgctcactgcaat

SEQ ID NO: 173292 - DNA, 444 bp, Arabidopsis thaliana landsberg
  unsure (1)..(444): unsure at all n locations
gcgcgagcacccgaaggtcaacgtctcctacgacggtgacgacgcccgggagatgctcgtccacgaccgagtgaacatcggcatggcggtcgcgcccgagtccggcctgatcgtaccggtcatccgggacacgaacgccaagacggtcacccagatcagcgccgagtccaggaagctggccgccctgacgggcgagcgcaagctcacccccgaacagaccaacnnnnnnnnnnnnnnnnnnnnnnnnnnnnnnnnnnnnnnnntggaggacttcacggcaatcatcaacccgccgaaggccgcgatcctggccgtcgacggcacggtcaaggagcccgccgtggccggcggcgagatcgtcccgcgctacaagatgcggtacacgaactcctctgaccaccgcgtcataaacggcgccctagccgcccggttcctgcagaccct

SEQ ID NO: 173293 - DNA, 1390 bp, Arabidopsis thaliana landsberg
taatttaatggtataacaatgataaagcttttattgaagtaccaaatcaaaattctattattagttaccattcatgtatgatatgcaccatatgaagatgtatatgtatcattaatatgatctttccaactaattgtgcatcacagttctatatgagattcatgttccctaccctgttgtcttatttaatcttttctattaacctcacatcaggctcttgtcgaaaaggattggcttgcttttggtcacccattttcggatcgtgtaggaatgcctaacatatcaggatctggtaattttgactttcctaggcagtcttcgtctgctggaagtttcccttcatctcctgtgcgtcagtcttcaggatcagcagcctcacaatcttcaagctcttcccatgggcataacaattattcacctatatttatgcaggtgaccgagcaattattcctcttgcaattatagtaatacttttggtttgtttagatctatttcaatgggttggcagaccaacagcttatagtatgtttacatctatgtgtttccagtggattgatagcgtttcacagctaatgcggatgtatccttgtgcttttgagttttctccggtatgtatgaagtcaaacatatttctgaagatttcatgttcaacttcttccagtaataatagtgtagtcatttgccttcatatttggtgttgcagactttcctggtagattttatggattgcttgctttcatgtcgttttgggaacttcttatgcaacaggtaaaactttcttttgaagctccaaactgaagtgattctgaaaataattggtattatgatttatcaatatctgagctggtgtaaatttcagtgaaaaagagagggaacaatgtgggattgctgatgcctgtggatgcctatgggcgtacttgactgatctgcgttcatttagtgcaacttctcatgtccattgtaacccattctatgatcctttgaagtatgacggcccattactacctcctgcagcatctctagctcctaccctttggccccagttccatctccggtgggcttgtcctgaggaagctaaagctgcagatattggagtccaatgtagagccatgacagtgaaatattccgaaatgcaaaaggtaacttaattaactaatctcccttacctgctctctatggctctataatgtatcaaagtttttaacattctaattgatttgaaacaggagaaagaagcagcagaaagaagagtggacgagatatctttcgcaatggagtcattaagtgcagagttgctaagagaaaggcatttgagttgggtagctagagaatcagcaaatcgagctaccaaggaatatgcagctttaacccgagcagtacaatcactcgg

SEQ ID NO: 173294 - DNA, 736 bp, Arabidopsis thaliana landsberg
atgctcgacaatcctcttccattcactcccttgaaatcgctaaaaccttacaagaacgcttggcgtattcaggttaaattgcttcatgtttggaggcaatattctgtaaaggctggtgaatccatcgaaatgattttggttgatgaagctgtacgttttatagtttaaactttatatttggtccagccttatagtgtgttcaatcatcattttcatatattaattattatccatttatttttgtcatatagggtgataagatgtatactcctgtgagaagagagcagatcgagaagtttgaaaggtgcttaaccgagggtgtttggaagatcattacgaccatcactctaaatcctacaagtggtcagtatcgtatttctgacttgaaatacaagattggttttgttttcaaaaccacggtctctccatgtgataccgttttcgatgctttgtttctctcacttgctaagtttgacgtgatcctctctggatccgctaactcaaatatcttgcatggttagcttcaagttttcattttacttttgaacatacatgcattatctcttatatagtcaatatattcatatatttattctctttgtctatacagatgtaatgggtcaggttgtcgatcggtctgaaatcaaagatcttaacgctaacaacaagcccactaaaaaaatcgatttccatttgagagattagcagtacaaacaatctatattcatattccttt

SEQ ID NO: 173295 - DNA, 769 bp, Arabidopsis thaliana landsberg
  unsure (1)..(769): unsure at all n locations
tagttcccatagcatgggctgtagttganattgagaatgatgatanctgggactggtttcttaagatgctctcttcttctttagggttaggagatgggagtaatgtagctgtcatatcagacaagcaattggtgagaatctcttggtttaatacttatatggatgtttgttttgatgttttagttgtttgacattcttatttgtatcatgcattttcagggtttggtgaaagctattcatactgttatcccgcaagctgaacataagtaatgtgctaggcacattatggacaactggaaaaggaatagtcatgacatggagttacatcgactattctagaagattgctaggagttacactgaaggataattcactaaccatatggttgaactaaagaattacaatccaagcgcttatgagtctctgttgaagaccaatccgaggacatggtcacgagcttacgtcaggataggaagttgctgcaatgacaacctcaataatcttagtgaatctttcaacagaactatcagacaagcaagaaggaagcctctacatgatatgttggaagatattaggcggcaatgtatggtgtagaatcaaaagaggtatgtaatagtagagagcctgaagagtcaattcgccaaaagagctcatgctaagataaagaagatgattgctggtgcacaaggttgtgaaagatggatgaccagacataccaagtatcagatcaaatgtggcgatatggacttcacagtcgacatcacagcct

SEQ ID NO: 173296 - DNA, 1188 bp, Arabidopsis thaliana landsberg
ggactaggggggcatttagatgataaggtcgatgttgaatttacagaattgggtgaacactttggaaatagttcagtcaaactgtcgtcctttcttggctctctagtcagggagcatgtacctgtaatacttgatgattggaggcaccttgatgaactgacaagacacgcactttgggaggaaattcaggtatgtatatcaatttatttagtttaccaaaacgttcctttgttactcttagttaactatctaacttatgtaggggaggtttaatttgcaagaagaatggcaaaaacaatctatttttaggcagatgggttgtttgtggaggtcccataaatctaagcttctttcaaaggttaaagcagcaaatacaaagcttagagtacttgagctaagaccaagcaacatcccatctgtcgcagtttcgagcaattgggtcaagagtaggactagcagcacttttaaggttgtattaattgtgatatttgattttctaaagtaaagttgtttggagatattaataatgttgcaatgggtttgatttgtaggtacaaagtgacaaatttaggcaattaaggagggcacaaattccacataccaccagtcgaaaaggaatgattcgcctggctcaagagatggtaagtttatttagtttttggttacgttgtaatccttaaaaacaatagtgagttctgctgctatttaaattaatatttggtctaggaaaaaatgagttcagacccaaggaaggtgacaagaagcaaggtttgggtagcaggacacacattctgatgggagacctgtgaagccagagtttgaagagaccattgtaagaagttgtcctttattctattatcattttcttgatcaatttgtttatcaagatttgtgttttgtttcaggaaaaaataaagtcaattgacagtgaaatggactccacatctaatactaatattagagaagatgctgttagtcaagtattaggaaaggacaaacccgggagggtcagaggggttactttttctaagctagccttcatgcaagttagaaattcacatgtgcagcagcttgaaactaaacaagctgaattgattagcaaacttgaagacttgcagaatgttgttcatgacttagctggcaaaaatgtatgtttctcacctctgttatgatagtgatgtagtcttt

SEQ ID NO: 173297 - DNA, 428 bp, Arabidopsis thaliana landsberg
atgggcatcgatgccgatgccatggcggtcgcgggcgtgcccgcgccgccttcaggcgccaaggtcgcgagcgtggatgtgatcgtccgcctcaagcgccggtagtttcgcatcacgaaagttcttctttagaatagttctaaagtattgactcctgggtccgggattggcaccttgtcggcagacatgggcggtcccaccgtccgtcgaatgttttcaaagcccacagagagaaggaacgatgccatggcagacctcaaaggctccaagaccgagaacaatctgaaagacgccttcgccggcgaatcccaggccaatcgccgctatgtgtacgtggcgcaaaaagcgtaaaaagaaacccataacgacgtggccgtcgtgttccgctcgaccacgacaagcgaaaccggccatgccccaggccatct

SEQ ID NO: 173298 - DNA, 2768 bp, Arabidopsis thaliana landsberg; identical to SEQ ID NO: 3568
  unsure (1)..(2768): unsure at all n locations

SEQ ID NO: 173299 - DNA, 943 bp, Arabidopsis thaliana landsberg
atggtaatgtgggtgataaccgcatccaaccgccactacaaaacccaaagaaacttccgcacacaaaaacagagaagaacaaaaacacaaaatcgagagagagatcgattagcgatgaggaaaatggaagcgaagaaggaagagataaagaaaggtccatggaaagccgaagaagacgaagtactcatcaaccatgtcaagagatacggtcctcgtgattggagctccattcgatccaaaggtcttcttcaacgcaccggcaaatcctgtcgtcttcgttgggtcaataaactccgtcccaatctcaaaaagtatacatttttctccttctctttgttgctctctctctgcaaattcaattttggttttgtttgcttcaaatttagggttttttgtgtttgtttatagtggatgcaagttctcggctgacgaagagaggactgtgattgagttacaatctgagtttggtaacaaatgggcgagaatcgctacgtatctaccgggaagaactgataacgatgtgaagaatttctggagtagcagacaaaagagactcgctaggattcttcataactcctctgatgcatcgagttcgagtttcaatcccaaatcttcttcttctcatcgactcaagggcaaaaacgtcaaaccaatccgtcaatcctctcaggtactaatgatgatttacaaaattcacaagctctgtttttcggttttttgattctcaattttgtggtctcagggttttggtttggttgaggaagaggttacagtttcttcttcatgttcccagatggttccttattcatctgatcaagttggtgataaagtcttcaggttgccggatttgggtgttaagataaagcatcagcctttcgcttttggcactgatcttgtcctagcagagtacgctgactcacagaatgatgcaaatcggcgcttt

SEQ ID NO: 173300 - DNA, 507 bp, Arabidopsis thaliana landsberg; identical to SEQ ID NO: 72572

SEQ ID NO: 173301 - DNA, 520 bp, Arabidopsis thaliana landsberg
atgattatgcacttgataactggaccttaggctttctgtgtttctagttactctacgggaaccctccgggggaaggggagagtcaaaaagatacattcaagaggtaagaaaagactagactttttatcttttgtagaaaattacagaagctcagctcctgatgacgttttgtattcactgtcatgcagaattcttaagattgatctgagttttcctcttacaccgaatgtttcagaagaagccaaaaatcttatcagtcaggtacacacccaaccaagctaaagcatacccacaacgactctctggcttgactagttattaagcattaacatatagttgttttaaatcttttgcagcttcttgttaaggatccctccaaacgactctctattgagaagatcatgcaacatccatggattgtcaagaacgcagatccgaaaggtgtgtgtgcctcaattgatatttgatgtattctctcccaatctcaggagtcagtacaagtagcttatatgtaatttaa

SEQ ID NO: 173302 - DNA, 1616 bp, Arabidopsis thaliana landsberg
atggtggtgcaaaatagttcagcagttaataaggagaatccaacggaaaaggtacaaaaccatcgctttccagtttgtgtttttactttctgcagattccatttaatattcaaccctttccatgtcaaagcagttactttcccttttcgaatcaagtactttccgtgatcgtagatctgataaacaagttgttaatattttctaaaaatcgaccatgcttaactgtttctgaatatttgaccattattactaaccatatttaaagaatagacttactgatataggaaatgtctgaatatttgtctaggtttatatttactctttgtttcttttctctttaacctaatgaactcttcacatactccatgtagacggcagcacaagatgaggtattgctggtaattggcaagtgggtgagagttgataatatggcctggcagtttgaacctaagactgtggaaggatcgtcttacatacgtctccgggccaacatgacgtacaaggagctagttcagaaggttaaagagaagttttctttctgtgcaagagacataactataaaattggcttaccaatatccagagtggatggcaatcgatgaagaaaacgggtctcctcctcaatacatcagtgaagacggtgatgtgacaatgttcatccaaatgagacgtcatattgtagaggtcaatctctgtgttactgtcgtccaacattccatgccagtttctcctgttgatgttgcgtgccatgacttcaattctaacagtgaggacacagattatgactctgaagaagaactagaccaatttgcacttgaaagtgccttggtgggtgcaacgcaagacccaactccgggtggaacatagccagctcaaagaagtggtacaaggagggaacttttccctacaggaggcataactattagagagcctgaagactgcattcgtcttaagagcccagaatgtggacctacggacaaagggaaaggaataatggaaacaagtgctaaggcaacgactgctggtcctagtaggcaaagtgtgacagaagacaacgacaatgaagatgatttgcttatcgtcccattcacaatgctacataatttgccagctttcaccattccagaaaatgttgatgttgaaggcgttgattcatgtctctcctattacaaatgatgtggaagaaactgcaattcaaaggcataacattcttttttgggggcgggcacaagaagcattaaacaccatcctctctgatttcagtgatgatccaatcctattcggtcgagacgccccaccagtatttaatgatggaaaaggtgaaggtatatcctgaaatccgtctataaatatataagtgctttactgattcatctgaatgcattggaatttgatagttcatttaaatattttatgttttctataccattcagtgtataaatattggttctatttcagtagcgtatttcatacatgtgctgaatgatgttcattgtgtttcaggggtaaactctgcattctttgatgttaaatatgaaggagtcaagcggtttgttggcagagtatttaagtccaagtctgattgcaagattaagatagctatacacgtcatcaacc

SEQ ID NO: 173303 - DNA, 979 bp, Arabidopsis thaliana landsberg
cgtttcatctcacgccttggcaaaaaggattgcccatgtaccgcctcttaaagaagaccgagcgcttcacttggacccccgaggccaaagaagccctcaggaacttgaaggcactccttacaaatgcacccatcttggtgcccccgctgcgggagaagccctcttgatctacgtagccgcaaccactcaggtggtcagcgccgcggtcgtagtcgagagacgagaagaagggcatgcagtgctcatccagaggccagtctacttcatcagcgaagtgctatccgagaccaaagttcgctacccgcagatccagaagctgctctacgcagtgatcctaacatggcggaactgcgacactacttcgagtctccccggtgactgtggtgtcatcctttcctctgggagagatcatccagtcccgagaggcctcgggtaggatagcgaaatgggtagtggaactcatggggaaacactttcatttgcccctcggaaggccataaaatcctaagtcttggctgacttcctggctgaatggaccgacacccaattaccaacagctccaatccaggccgaactttggaccatgtacttcgttgggtcgcttatgaaaaccagagcaggcgctggcttgctcttcgtctcacccctcgaaaaacatgtgcgttatgtaatatgcctccattttctggcgtcaaacaatgtggccgaatacgaggccttggtaaatgggttgcgcatcaccatcgaactaggggttcggcgcctcgacgctcgtggcgactcacagctctacgctgagaccatcgccgagtccaaggccctcatcgccgacctggattgcctctccaaggaggcgcctgatgcgaagcgccacgctggcaacttcgaaccagccgaggcagttaaatccgtctctctcgaccccagcaacgacaccggcaagaaagtcaggatcggctccgagctcgaccccaaatag

SEQ ID NO: 173304 - DNA, 798 bp, Arabidopsis thaliana landsberg
gatttcttgagcttaaatccttttttattgtgttgtcatgtgtgcagactgtgtatcgtgatggaattgtcttcaatcggcttgaaaatttgaagctatgtatatgcaatggtgattggtccaagttacttatccagtttctcaaagactcacctaacctgcgagtcctcaatctcctcgttgatgatgtaagtgtcttcgtcgactattttgtagtctaaattcacactatagtgtagtattctaacctttactttttctttttaatcttagtatccgtcaagtttgggggattatgaaccggttcgctggaaaaataataagagctccgtcccgaaatgtttgttggagagtcttgaaacttttgagtttgcaggttacataggaacacctgaagagagggatttcttgagttatatcttcaaacatgctcgttgcttgaaatcttcatcaatcttaagcagaccagaacggtatcatggaatttgagttttatgagatatgcttcacaatagaaacttgaaaatgatctaagagtatggttttttgtatttcttcttcgaatgtgggaacttgttttcgaacaatctatcgtctggcttttatgtggtaaactacaatctgtatgtctctgccttatggccttgtaaactactagttcggaagctcagtcaaatagtctcatgcctgtttaagaagctacgattacacagatccgagcatgaaagtagcgaaggtgaacacagctgtacttctcagcgcaagacatcttatcaacagctcttgattcaaagttaa

SEQ ID NO: 173305 - DNA, 977 bp, Arabidopsis thaliana landsberg
ttttttaggttccggtgagggttgatgggggtttattgtttgaactcttaggacaatcagttggtgatccagtaatcagtgaggatgatgtacccgttgttttccgctcttggcaagcaaaaaacttcttagtttccgtgatgcacataaaaggaaatgtaacgaacaccaatgtccttggtataactgaagtagaggttagttcaaaaagtgtcaaaatattctacttaataagattcttaaagcttaaataacacaaggctataatatgggttctgacctacactaattttcctgatgattctcctgataggagctgctttatgcaggaggttataatgtaccaagaacggttcatgaggttatagcacacttggcttgccgtctttctcgatgggatgataggtgacaacagttttctgatttacttttactctaatgaacgcttgtctagttttgctgaccagaaaagtggacttgagttttataccatgctcttgtctggaaagtatctaattgggggtccttgattggcgatagattattccgtaaatccatatttggtgcagccgatgaaatcgaattgaagtttatgaacaggttcttaaaaatatgtttccgtttgttttgataatacacaatgcatgtttaactaaagatactatcctttcttgttattaggagaaactatgaggatttgaatcttttcagtatcattctcaaccaagagatcagaaaattatcaagacaggtcaccttcccttcattctcaagcctgtgttgatatgttttaaatgagatttgatgtttgtgggtgggatggactatagtcatgggcatgacgtcttcctttttttcatggcaggtcatccgagtgaagtggtcactacacgccagagaggagattatctttgagcttctccagcatttgaggggaaacatatgctcgcatctcttagaacgttgaggaagaacac

SEQ ID NO: 173306 - DNA, 1478 bp, Arabidopsis thaliana landsberg
  unsure (1)..(1478): unsure at all n locations
ctgaacaatacgcgaggagtcacagttgagttggaacctaccttggatcgagaaatcaaagaagcgcagaagaatgatgagaagatcagtgagatccggctactgattctagatggcagaggcaaagattttcgggaagacgcagaaggtgtgatatggttcaaagaccgcttgtgcgttcccaatgtccagtctattcgggagttgatccttaaggaagctcatgagacagcttattcaattcaccccggaagtgagaagatgtatcaggatctgaagaagaaattctggtggtacggattgaagagggaaatcgcagaacatgtggctatgtgtgatagttgtcgaaggatcaaggcagagcaccagaggccagctggattgttgcaaccgttgcaaattcctcagtggaaatgggatgaaatcggtatggatttcatagttggattgcctcgcactcgagctggctacgactccacttgggtagtggtggaccgcttgaccaagtcagcccacttcatactagtcaagaccaactacaacagtgtagtattggcagagttgtatatgtctcggatcgtttgtcttcatggtgtgataaagaagatagtgttagacagaggaacgcagttcacctctcatttctggcagcagttgcatgaagccttgggtacacatctgaatttcagttcagcttatcatccgcagacagatggtcagaccgaaagaaccaatcaaattctcgaagacatgttaagagcctgtgcgttgcaagatcagtccggatgggacaagagattgccttatgcggagttttcctataacaacagttaccaggccagtttgaagatgtcaccgtttcaagcgctgtatggaannnnnnnnnnnnnnnnnnnnnnnnnnnnnnnnnnnnnngaaaagcaagtgtttgggccagatattttgcttgaagccgaagagaacatcaagatggtccgagagaatctgaagatagcgcaatcaaggcagcgacgtatgcagacacaagaagaagagagctgagtttcgaagtcggagactttgtctatctgaaagtgtcaccgatcagaggagtcaaaagattcggagtgaaaggcaagctagcaccccgctacattggtccgtatcagattcttgcaagacgtggagaagtggcctatcagctcagtttgcccgagaatttgtctgctgtgcatgatgtctttcatgtgtctcagttgaagaagtgcttgcgtgtaccagaagagcagttgccagtggaaggtcttgaagtccaggaggacttgacctacgttgagaaaccagtgcaaatccttgaggttgcagacagagtcacccgaaggaagaccatcagaatgtgcaaagtcagatggaatcatcactctgaggaagaagcaacctgggagcgtgaagatgatctgatggctaaataccctgagctctttgctagccaaccctga

SEQ ID NO: 173307 - DNA, 496 bp, Arabidopsis thaliana landsberg
cgataggacggcagcatcgaagtcatcaccgcgccatccgatttcagtagcgtgaaggaagcgctggaaaaggcaggcctcaagccggtgctggccgaagtcacgatgaagccgatgaacgagaccgtgttcacgggcgacgatgccgccaagatgcagaagttgctggacgcactggaagacctggacgatgtccaggatgtctacaccacagcggtgatcgaggagtaatccccaaaattacttcgccttccacctttgtgcgcatcaaagcggcccctggggcctgctgttcaaggacactgagtttccgtcgagcgccaaagcttgcctggcgtgccgttcgccagcctgtcggatgatatgcagcctttgactacgcgtattctcggcatcgaccccggtcttagactgaccgggttcggcgtcatcgaaaagatcggcgagaaactggcgtacgtcgccagcggtaccatcaagaccaccaccggcaagg

SEQ ID NO: 173308 - DNA, 514 bp, Arabidopsis thaliana landsberg
atgtacatcacaaggagtttctcagagtaccggagaatccagcagagctaacacagcctcctcctgagggtccaaattctggaattttggtaatccaagaccaacactcacggacacgggctacatcttgcttcggctcgtggttggttgtggactcttctctaagtggtttgccattgccccaaaatcttaagctagcagtcacattcaatattggaggtgatgacagcactcgtgacccagttgtgttcattcctgttcttgataagcctctatcttcaaactgttattacgctattaaacggcatgggaagcattcagggtatgaagtttaatccgcaaatctgaaattcttgaatctttcttcttatataacctgaaaaagtttacaaaattttggttgcattgcagggaagcgtctggaagtgcaaaagaggacgatatagtctcctgctgcttttgctaaagttttgttcatgaagccaaaccaaaacagttagatccttttgacatg

SEQ ID NO: 173309 - DNA, 917 bp, Arabidopsis thaliana landsberg
ccaaggaatgattttaataacttttatatctagaaaactgatgtgtgttaagcaagcaggttctacaggcactgaatttgcttggaatcttcggtggctacagcaacccattgtactttatggggttggagcaagtgagaatataaccaatcctctgtctgaaagtgaggtatggaaagttcagtatgactcatacacaaaatccaacgtctcatcctcaaggattctccctgttatgacctgctctgaagatggaatccttggtatcatagaacaaggtatttacgcctttctaccacatttgttcttctttcatgtatgagttaccaaattgatgtttcctctatttatttttgtcctggctattttgctcaggggaagaaccaatcgagcttctggctgaaccttgtgccattaacagttttgacatcgacaggcaaaatccacaggtgaaaacatcacctaagtctgtttcaacaaactagttacttacattatgtgttttctcaagctggtacatacaaatgtgcaggatgtgatatgtagcttggagtgggaatcaatagcagttttctcaaggccttagtataatatggaactgtgcacggtatgctatgttttcttctgcgagctacaacgaagaaattgaggaaggtagtgatagatgatgagagacaagtttaaggaagagggtgtggaatgtgtttataagtttcattataacaagatcttaaaatacagtctgcacaaacagagttttgtattcatcttaaagttagtgtgatcttgaagatttgcaatcctggcttgaattgtacttctgaatctctgtcgctgtataagtagtgtgtgtataccgacaccaagttaaacctcaaacccaactatgacacgtggcgaaaaagaagtcggccacg

SEQ ID NO: 173310 - DNA, 487 bp, Arabidopsis thaliana landsberg
gttgatctcagggataccttaaacctggtgggtttttcgtcgtgaaagagaatctcgctaaaaatggttccttttcgctctctctctctctctcttttggattctcactttggtattcttatgatctgatactaaactgctatatatgttttttttttttctgcaggatttgttttggataaagaggatcatagcatcaccagatcggatccatacttcaaacagctctttcgccaatgtgggttacatctctatagaacaaaggttgacttcttttgtgtgtttataatcttgatttcatagaattaagaactgttggttcagaaatttacagtcttttctccaaaaccataatttccaggatcagaaaggtcttccacaagagttatttgctgtaaaaatgtatgcgttaacggttgacacaccacccaaaatccaccgaaccaggtcaaaaactcgaagcaacagaccgcagattatcaaataa

SEQ ID NO: 173311 - DNA, 604 bp, Arabidopsis thaliana landsberg; identical to SEQ ID NO: 14411

SEQ ID NO: 173312 - DNA, 414 bp, Arabidopsis thaliana landsberg
atatcagagctatgaacggcgaagctgtccatgcaaatcctaaaaagacagggatgataatccttggagggggcttgccaaagcaccacatatgtaatgccaatatgatgcgcaatggtgcagattacgctgtatttataaacaccgggcaagaatttgatgggagcgactcgggtgcacgccctgatgaagctgtgtcttggggtaaaattaggggttctgctaaaaccgttaaggtctgctttttaatttcttcacatcctaatttatatctcactcagtggttttgagtacatatttaatattggatcattcttgcaggtatactgtgatgctaccatagccttcccattgttggttgcagaaacatttgccacaaagagagaccaaacctgtgagtctaagacttaagaa

SEQ ID NO: 173313 - DNA, 401 bp, Arabidopsis thaliana landsberg
atgtttgggtttttcaaatctccggggaacaataaacttcccaatgaatcatcaaacaacaaaggaggaacaatcactgcaggaagaaggacttcttcagaaccaatcctgataacaccagatttcgacgatgacgacaaatacaagaacggtttcaacgattctggtggtctgcagagccaaacgacagaagaattagaaaaatatgcagtttataaagctgaagaaacaaccaaaggtgttaataattgtcttaagatcgctgaagatataagatcagatggtgcaagaacgctcgaaatgttgcatcagcaaggtgaacaaatcaacaggactcatgaaaaagctgttgatatggataaagatctcagtcgggtaaaacttcttttaattggtcttac

SEQ ID NO: 173314 - DNA, 469 bp, Arabidopsis thaliana landsberg
catatgctgcatatgggtttgaatggaacatttataaaataactattgatatttttcttcagtatacgattgcgatgatgggatatggtccagaagacaaaaatgctgtattggagttgacctacaactatggggtgaaggaatatgataagggaaatgcttatgcacaggtatattttctttcattgttcacatctgaaccttgctgttctctacaataatacgagtatccttcaattggcctttttcctcttgttacatttatagagtttggttactttgcttacagattgctattagtactgatgatgtctacaagactgcggaagcaattagagtaaatggtggacaaattactcgtgaacctggcccattacctggcatcaccaccaagataactgcatgcacagatccagatggctggaaaacagtatgtgccttttttctcttgttttagtgtgtcgctaac

SEQ ID NO: 173315 - DNA, 970 bp, Arabidopsis thaliana landsberg; identical to SEQ ID NO: 12546

SEQ ID NO: 173316 - DNA, 1551 bp, Arabidopsis thaliana landsberg; identical to SEQ ID NO: 28513

SEQ ID NO: 173317 - DNA, 681 bp, Arabidopsis thaliana landsberg
atgctgaagcaaagaacaatagcttggttattcagggaaaggttgagaaagaatccgaaaataaccaaacaagagatggtggatgagatcaagagagagtataaactcactgtgacaaaagatcaatgttcgaaggcgaagacaatggttatgagagaaagacaagctactcatcaagagcactttgcacggatttgggattatcaagccgaaatctttcgaagcaatcctgggacaacttttgagattgagactatccccgaaccaaccattggaagcttacaaaggtttcttcgtcttttcatctgttttaagtcacaaaaagagtcttggaagcaaacatgtaggcctattataggaataaatggtgcattccttaaatgggacataaagggacatttattggctgctactggaagagatggagataatagaatagtaccaatagcttgggcagttgtagagattgagaatgatgacaactgggattggtttgtaaggatgctatcaagaactttggatcttcaagatggaagaaacgtagcaataatatcagacaaacaaagtgtaagttttactaacttaatttagttagtttcaactttcgattgccttgtttaattatatcttctttctatcatctatttcagggtttagtgaaagcaattcattgggtcattc

SEQ ID NO: 173318 - DNA, 482 bp, Arabidopsis thaliana landsberg
atgagtaatcaagcgagtacccttttcgacaaagtgtgggatgcccacgttgtccgtaaaatcgaggacggtcccgatgtgttcttcatcgaccgccattttatccacgaagtaacaagccctgttgctttcctaggactcgaaaccagaggcattggcgtgatgtatcccgagcgcactttcgcaacggcggatcacaacactcctaccatcaaccagcatcttcccgtggctgacccgctttcagctaaccaattgaaagccctcgaagcgaatgctgcgaaatacggcatttcacactggggattgggccacgctcgcaacggtattgtgcacgtggtaggaccggaaaacggtatcacgctgccgggtatgaccatcgtttgtggtgacccgcacccttctacccacggcgcattcggaaagatcgaattcggtatcggtacttcggaggtggaacactggctgctgtctttgcgatg

SEQ ID NO: 173319 - DNA, 878 bp, Arabidopsis thaliana landsberg; identical to SEQ ID NO: 19070

SEQ ID NO: 173320 - DNA, 1860 bp, Arabidopsis thaliana landsberg; identical to SEQ ID NO: 18639
  unsure (1)..(1860): unsure at all n locations

SEQ ID NO: 173321 - DNA, 2274 bp, Arabidopsis thaliana landsberg
atgtctggagaagatgctaccaacgcttcactagccgaaattctcaagaccatgcagcaaactatggcggaaatggcgcagaagtttttgaatgtagaaaaaaccgtcgaaacactgcaaacaacccaggtatcactcagtcaaaatgttagtactattcaatctcgcattcgttcattgaatgcaggtaattcctctggagttcgaagaactatcttcggttccccaaattcccttccgcgaaatgcagcaagtgatcaaacgaccccggatggtacaaacgcggacatccatccgaaagatggagaaacacatcccgaagacgacaaccagttcgttaatcagcacgagcaagaaaacttcgatcagttcgaaaccatgagagaagtaagtcgggaactcaaagaaatgaggtcgtaattccatcaagctacaagttcggagccggatatcaaccgggttatcgaggaggctaggcgaacactgttcaccccgcgaattgcgagtttgagaatcagagattctcgaaaactcaacttagaaccatataatagtttggaagatccgaaaggctatctcgcagcttttctaatagcctctggtcgagttgatctaaacgaagccgatgaagacgcagtatattgcaaacttttctctgaaaatctgtttgggcaagccctgatgtggttcactcagttggaaccaggatcggtcaataatttcaaagaactatcggcagtatgtttaaaacaatactcaattctaatggataagagcatttcggacaccaatctctggaatctgtctcaagggccgaatgagacacttctggctttcatcaccaaatttaaaaacgtgctatcaaagctcccaaggatctcacaacagtcggctctgtcggctttgcggaagggattatggcatgattcaaggtttaaggaagatctaatacttcacaaacctgatactattcaagacacactatttcgagcgaataattggatggaagtcaaggatgaaaaagaaagttttgcaaaaagaaataagcaagtaaaaccagcggtcacttttccgcccaagaagttcgaaccccgtgaaaataagggaccaaggaagtttgggtcacaaccattcaataacaacgtcggaaagcagtttcaggggaaaggaaggtcaaatacccggtccgagatgaaagctcgtattacgatatacacagagtcacgggacatctgagtaaagactgcagcatccttaagaggcatcttgcagaactacgggccagtggagatctctcaaaattcgacatggagaacttcatcaaacaatatcatgaatcaagggataatccagagaatcaaaactctaaaagaccaaggccggcgagcgaagagggaccaagaacttcaaagggtaaaatcaatgtgtttctcggaggatctaaactctgtcgtgattccatcagtgtaatcaagaaacatagacggaatgttcatttgaaattaagtttaagtgaggaagtagattttcaaagcacttcgatattgttcgatgagaaggaaacgcaacacctcgaaagatctcatgatgatgcgctcgtagttacgttggatgtagccaacttcgaagtgtcaaggatcctcattgatactggcagttcggtagatctaatctttcttagcactttggaaagaatggggataagcagggcagacgtggtaggacctccatcacccttagtggcttttacaagtgaatcagcaatgtctctcggaactatcaagctaccagttttggctggaaagatctcgaagattgtggattttgtcgttttcaataaaccagcggcctataacatcattcttggaactccgtggatttatcaaatgaaagcggtcccttctacttatcaccaatgtctcaaattcccaactccgaacggagtggaaacaattcggggagatcaagaagctttgagaacttgctatttagctagccaccgattgaaaatccaatagcaattaacaaaacccgcaaagaaaggagtgatcccaagatttcctagcgggcagaaagtggatgatgttgtgatcgaagtaattctagaagcggataagccagatcaaaaagtccgaattggagctactttatcgggcgaagtaaaggaagccttgattgagctgttgaaaaggaacaagaaatcattaaacctggtcggtagcagatatgcctggcatagatccaaatataatttgtcacgagttaaatgtagac

SEQ ID NO: 173322 - DNA, 1057 bp, Arabidopsis thaliana landsberg
  unsure (1)..(1057): unsure at all n locations
attttgtgctttagatgtaacaagtgagtttttaaatgcaaaggttgttgtcaagaacattgagataggcattcaaagggttgcgcaagttgttgtacttgatcctcccaagacgacgctggaagatgcatctctcactcaagtacctgtttcggactctcttcatacgatgcttgtctttcccacttatgatttgatgggccagcagttattagatcaagaggttgcttacttgtccccaatgttagcttttaatcttagcttgcacatatcttgcctgaaatccctcgtacatcgagggaacggggtcttagagaagtattttgaagctaagtgtgatgaggagtttatcggaaaatctgcagaagatgggtcgaagattggtttggatttggaacccgtgtcccaagttccaggctatgcatcacatctgagagtttcttttgttaaaatcccagagtgtggtaccatcccatccctgaaagtcaattcgtcatttgaagctgaagagcgacaagggttaatagattctgcattacagaagtattttggaactgatagacagctatcaagaggcgatatatttcgcatttacattgactggaattgtggttcaagcatttgtaatccatgtagtcaaaggttgtgctccgaaagcgacgactatatatattttaaggtaatattggttttcatttttgccagaaaaatgctcattttggccagagcttactgaaaacttagttcatctgctcaggttattgcgatggaaccttctaatgagaggtttcttcgagtgaatcactcccaaaccgcccttgtccttggaggaactgtatcttctggtcttccaccagatttactggtgtatagatcaaaggttcctatgccattgcaggaggagacagtnnnnnnnnnnnnnnnnnnnntttcaccacctctctgcccatcagcactcgcctcaaaactcagggttgctgttttactgcatggtataacaggtacatttgcttcggtttcatcaagaaaatacttcactttcatagatgttcttaag

SEQ ID NO: 173323 - DNA, 1703 bp, Arabidopsis thaliana landsberg
  unsure (1)..(1703): unsure at all n locations
ttctctttggttaagagtctcgtattttcgtgtgagaaaaacatgtctctcgttgatgatggctcgtctgccagaaacggtgaaagtttcaccttatatgttatctagctccgacaatcctggagctatgatctcgtcagtttacttatctagtgacaattacaactcttgtgcaacagatatgatcaatgcactccaagccaagcgtaaaacagggttcatcaatggttcaatacctaaaccacaatttattgatccaaactttgaaaattggaaaacagtcaactccatgattgttggttggattcgagtttcaattgagccgaaagttaaatccacggtgacttttatctctgatgcacatcttctttgggacgaattgcgtcagcgtttctctgtcaccaacaacgtacgggttcaccagattaaagctcaactcgcctcatgccgacaagaaggacaaacagtgattgattactatggcagattgtgtaatctttgggatgaattaaagaactatcaagcaagtgcagtgtgtcctcatggttcggtgttaactgcaattgtcaaagaaagagacgatgaaaagcttcatcaatttgttttgggtcttgactctgcaaggttcagtggactttgcacaaacctaatcaacatggatcctttgccatcgcttggggtcgcttattctcaagtcataagagaagaacagagaattcatgcttctcggactcaagaacaacgtcaagaagtagtgggttttgtcgctcgacatgagcaatcttccgctatgtcatctcctgctcagtcctccattgaatcttccattgtcaagtctcgacctgttctctgctctcactgtggacgaacagggcatgaaaagaaggactgttggtccattgtgggttttcccgattggtggacagaacgtaatgggaatggtcgtggctcgggtcgtggacgtggcggaagaggtgctggacgtggtaaaggacaaatagttgcagctcatgcaaccagctccaatccgtctctcatacagagtttacaccagaccaacttcgagctctttctcagctaattcaagaacaaacatccaacaaaagttcagataaactgtcgggtaagataaagttgggcgatgttattcttgataccggagcttcccatcatatgactggaagactctctctcttgactaacattgtttctataccaccatgctcggtggggtttgcggatggaagtaaaacttctgcagtaaacatgggggttttacctctttcagagaatattttactcaccaacgttctctatgtgccaacgttgacttgcactttgatttctgtctctaaaattgttaaacagacgaagtgtatggcaacgtttactgatgcaatttgtgttttacaggaccgttttggggaaacaaagagagcacacaagaggacttgttggatatgtctaaagatgacaggttctttagcatggatgaattgttcgataatgcggaagaacatgatattgtnnnnnnnnnnnnnnnnnnnnnnnnnnnnnttctttgttctgggcaaggtcactatctcgatactcaacggcaacaacaacaacaacagcaaatagtatcaggatccgggatggtgacgagcaacgacaaccacttccaagaagactggtcggagtattttatgcgagtactttga

SEQ ID NO: 173324 - DNA, 734 bp, Arabidopsis thaliana landsberg
agtttgtcggcttatccatccgcaggtcaggacaggtcagagaaatacaactacgatcaatctacggacaaggataaagctgcagattctgtaacgagttacactagtagaagaggagcagtaccggatcagaataaactcttgtttttgcaagatgacattcaaagatttgaccttcaagatcttcttagagcctctgctgaagttcttgggagcggaagctttggctcttcttataaaactgggataaatagcggacagatgctggtcgtgaagaggtataaacatatgaacaatgttggaagagatgagtttcatgagcatatgagacggttagggagattgaaacatccgaatctgttgcctattgtggcttactattaccgcagagaagagaagctcttgatcgctgagttcatgccaaatcgtagcttggcaagccatcttcacggtatgtaacattcaacttttttggtcgattaaaattgtaactttatcagttttgactaaaaaaatgctctgtttcagcgaatcattctgtggatcaaccgggattggattggccaacaaggctaaggattatacaaggagtggctaagggtttaggttacttgttcaacgagctaacaaccctaacaatccctcacggtcatctcaagtcatcgaacgttgtattaaacgaatcatttgagccactcctaaccgattatgcactaagaccagtgatgagctca

SEQ ID NO: 173325 - DNA, 1175 bp, Arabidopsis thaliana landsberg
gtatgaatcatatcgtgatgttcccagtttctaatatattggttttgtacccaacctctgctgtatgtcttattcttccatttcgtgtgagttttgactaggccagagaaagggaaagggaaagcaggacttggacactctaagagggagtggtatagtggatggagctgcatgaccactcttatacagaagggattagtggtgaaatctagcaacccagcaaagtaaaagctcttatctgaaactctgccttatggtgcccttgacttgtattttttgtgaagaagtagaacttatcttgagacttcattgtttcttatcttaggtacatgctgacagttgaaggtcgggaagttgcaaatgagtgtatcctgcgatctggattacctgattcagttgatatcttatctgttgatgaaatggatcctacaccgcaagcaaagaaaacacctaatcaaaatcccacctgttcgtttaccatgagagaagaacttccatatgtcgatccaagatgtagggcacaatcagccattccaagcgatattcttgaaaaggtactccatcataatgttatttgaacctttaattcttcttatacggtgttgattggtttaaaattatgggggcgaggtgcatctttttctccagtattaattttttgtttaaaattattggttttcttcaacagtttactccgtttggttattcgaaggaacaagtcgttgctgcattcagagaggtttcagatggatctggggacaaagatccatcaactctctggctctctgtaatgtgccatcttcgtcaagcagaggtttataattcctgtccggactcgagaaatagtaaaaaggattcatcaggaccttttaaatcacaaattcgtacggtctttatgatatactgtgcttagtgctgtgtttgtgaaaagttgcatgtttcatcttatgaagtcttagctacaaatacaggtcaagttgatcttgagggatctcgtgctaagaagttccgctcttgcaatgatggatccaccttaaatccatgttcatcaggttcaagtcatgctgtgaaagcctgctcatcttctgtatgtaaccatttccgttcagtagattattagctatatattataatgataagtagttgctaatcagctttcattgttctttattggg

SEQ ID NO: 173326 - DNA, 871 bp, Arabidopsis thaliana landsberg
  unsure (1)..(871): unsure at all n locations
atgtgagagctgttacgatgaggtatgtatgttctccggtttatgttttttattatgtttatgcaactccgagtttttgacatgcagatgctttctgcagttcatgacagtttctggtggacttgaaggtgggtcggatcctcctgccttccagcgagcagagaaagagagaatggaggaaaaagcttctagtgaagaaaacgacaaacaagtaaatgtaagtttagttgatctctgaggaaactttgtttgtaaaaccttactatgcttcaaatccgacttttggcagttggatggacattcggatgaatcaagcaccttgtctgacgtcgatgatagagaggtgggcaaataacttttactttcttgtctttgtattataaattctttaacttcaacaaatatgtttcagtctgatcgtttcactgtttcccagttggattgttattttcggacgccagaagaagtgcgcctggttaagatcttctttgatcacgaaaaccccggatatgatgaggtgtggttcattaggctatagaatattgggttcctttcagagtttggttgtggttaacatacataaaaaggattcttttaccaaattggtttcttttgtagaaggaagcagctaagaaagcagcatcttnnnnnnnnnnnnnnnnnnnnnnnnnnnnnnnnnnnnnnnnnnnnnnnnntgcggcgaaatctagaaaagataaacgacaacaacgcgctgaggaagaaaagaacgctcctccttcgcttcaagcatagaagctggtgatagcatggtcaagagaaaggtaaaaaaaacattgtatatttcgaagaaaaaattcctttgtgtttctggttttgagtccttaacttc

SEQ ID NO: 173327 - DNA, 584 bp, Arabidopsis thaliana landsberg
  unsure (1)..(584): unsure at all n locations
tgcaacaaacattgatatgaaaatgctcccatgttcactattataatcgacaggattttgtgagaccttaacatttgcagataatattatcttatgttnttctcaccatctttttgtgtacttcaactttcaggacaccatggagacgcctccagcagctcattcattgactgggtttgctatgttctccataaagaaggtcatccttatgtctaaactaaattcggcccgcatgttcatttttatattggattggagtttgtgtattcgaaataatttgcaggttatatattcttatgtttttctcaccatcaggtcaccatggagacggctgcagtaattcattcaggagtttttaaagacaacactgatcctatgaaggtataacatgtatcataattttctggtatgttttaatggacagctctgtttggattgtttttaaaattatcttcttattccaggcaattgttgtgtttgtgaagcctgtatttgatacaagttccaaagctgacaaagagccccaatcatctcccacacatagtcccaatattgtgggtacaaggagtgatgagtcgacctgc

SEQ ID NO: 173328 - DNA, 396 bp, Arabidopsis thaliana landsberg
atgtacaccgaaacatcaatcatcagcgataccacactggcaggccccgaaggggaactggtgatcaatgtgggtccgcagcaccccgccacgcatggcgtgctgcacctggtgattacgctgagcggtgaaacgatcaggaagatagaaccacacctggggtatatacaccgctctatagaaaagatgtgcgagagcctcagctaccgccagttcatatatgttaccagccggatggattatctctcatcgcatatcaacaacctcggctgtgcattatgcgtggagaaagcgatgcagatagaggtgccacagcgcgcaaaagtgatacgcacgatcatgagtgaacttacgcgtattgcctcgcacgaactctggctgggcgctatggcgatg

SEQ ID NO: 173329 - DNA, 1434 bp, Arabidopsis thaliana landsberg; identical to SEQ ID NO: 62696

SEQ ID NO: 173330 - DNA, 1767 bp, Arabidopsis thaliana landsberg
  unsure (1)..(1767): unsure at all n locations
gctgacattactttatccatatatatgcagcctatcatgcaggactcaatagtaaaatgaggagtactgttttagatgattggctgtcctccaagaagcaaattattgttgccacagtggctttcgggtatgaataactctgtgaattaccttgcatttggttcctgggttcattatgatcatcttctttacgccttattatgtttgggagctcgttggggcacgtggtaaacttctaacggtttttcttcagaatggtaaacaaagattctttctcatgttgcatctgtttaattgtgtacttcttatgtactgtagcatgatgagactactgactttctagggcatagataagaaggatgtcagaatggtttgccattttaacattccaaaatcaatggaatctttctatcaagagtctggtagagcaggtcgggatcaattaccttcaagaagtgtattatactatggtgtagatgacagaaagaaaatggtaacgttaaacgggttatgacaagttttggcttcacaagtttcattctacgtgtaagttctatagcttactctactaactctttgctaggaatatcttctgcggaattcggagaataagaaatcctcatcctctaagaagcctacatctgactttgaacaggtaaatgctttcttgtttcttctagcctctatgtattctagtttaaacttatttctccatgtatttagattgtgacgtactgcgaaagttctggatgccgaagaaaaaagattcttgagagctttggtgaagaggtgtgatttgtattttactgatgattcatgaatcaactatcaaagtaagctgctgattttctagttgcaaacagtttcctgtgcagcaatgcaaaaaaacgtgtgatgcatgtaagcatcctaatcaagttgctcattgcttggaggagcttatgaccactgcctcccgaagacacaattcttctcgaattttcatcaccaggttttgcttttaaccgaatctaaatgtgctgcgaggtatacagagtctaactgaaccccatgcccattcttttgaaagctcgaacaataagaccaatgagggacagtactctgagttctggaatcgtaatgaagatggaagcaattccaatgaggaaatnnnnnnnnnnnnnnnnnnctcctttattgatatttacttgcatgcatatccaatcttttcgagtaaacttcttgtagctttaatttctaactcacatgttgagtcatctacacccagatgccactgaggctgccaatagcgtaacaggacctaaactatcgaaaaagttgggactagacgagaaattggttttactggagcaagctgaggaaaagtactacgaaaggaataaacaggtttggtaacaaattcacctcatcttctttagaaacaagaagttaacatcatttccagtttaacctatcaaagcctattcgaactaattgcaggtcaaaaagtcagagaagaatgcaatatctgaagccctaagggattcgagcaagcagagactcttggatgcgtttacacgagtacttcatctgcttgcctgtgtggaggagtaatattctctaacttccccataagtctgtctattctagtttatgaagcatatgggtctctctattatcacattgattgacccgaaattaatattttgcaggattgattcaaagaaaggaaacgagtttcttgaaaatgagtgctatggaaaatatagcaaagcagggaaatcgttt

SEQ ID NO: 173331 - DNA, 570 bp, Arabidopsis thaliana landsberg; identical to SEQ ID NO: 5147

SEQ ID NO: 173332 - DNA, 412 bp, Arabidopsis thaliana landsberg
atgactacacgaagaaatggcgtttccaggcatcagcggtttgagagttttcgcggtgaaggaccaaattggatcttaattgctgggggtgctttgttgagtacattgtccattcgttttggctacaaattaaagcagtctattgactccaaacctcctcattccaatgccactggtggattaaaacgtacttatctggttgtttagtgcttacatgtcctagaattcgcttgtattctctatcttattggtaggttgttttgttgtgcagctaatggaacaaccgacagaggaagatttaagggctgctgcttgcattctaatgcatcaccctgtgaaaggaataatgattgttgctttcactgcactcccggtgagagtttgtgagtttgttattcttactactgaactt

SEQ ID NO: 173333 - DNA, 737 bp, Arabidopsis thaliana landsberg
caatctatcatgcctatgccaaatggttattcttatggaaaacaaatccgattctctaatggttccatgggatctgctaaccaaagtctccaagatacgaatagaagcttggtcccaagtgttgcgacaattccaagtgaagccataacatgttcaccggttaccccatttccaacattaaatgggaaacaaaagattaacggtgagtcttcattactctcaccatctccatacattagtaatggtagtactagtacaagaggtgggaagataaatagtgaaatcaccgcggaaaaacaattcgttgacaaaaagcttaggagaaagataaagaaccgagaatccgcagcgagatcacgggcacgaaagcaagtaagaaaatgttatatatatattatctatccatcttgattgattgtgttttatacgtaccaaactgttcatttttgctctctaggctcaaactatggaggttgaagttgaacttgaaaatttaaagaaagactatgaagagctactaaaaaaacatgtagagttgcggaaaagacaaatggaaccagtaatctatttattccaatcttatttcctcaaccgtacatcaattaaaaacttgagaaccttgttctaactttttgtatatctaaataatacgtgaagggaatgattagccttcaagaacgaccggagagaaagctgaggagaacgaaatcggacatcaagtgaatcaatgaaacccg

SEQ ID NO: 173334 - DNA, 262 bp, Arabidopsis thaliana landsberg
gttgttaatgtctaatctcacataatgctgcttctaagaattatattcaaacaaagttacctagagattaacatggatcacatcacgtaagaacgttttagtgtattataaaatattttactcttggctgtttatttcttttttgttttcctattgtttcagggctcaatttcttgaacgaatgcaaccaggtgagctaggtgaagttgttgatgagaacttaagacatcaagaccagacccatttccatcgtttttattaa

SEQ ID NO: 173335 - DNA, 1093 bp, Arabidopsis thaliana landsberg
ttggccaatggacttacttgggtgggactttgagcggtcccgatcctggattcctaccatttggatgggaaagggggacccaggattcattccttggggtggaaccaacaaggcagggggctcgaccgaccattggtaaattacctcaacctatatatataatataggaatctaatggccgaagaagaaaggtggagaattttattttgtttttggttggcctcacagaagtagaaggtctcttctgtactgaattattagaatggtgtcatcccaaagtaatgcctacgaacaagcttcaagaagtttgtttagaaaataataaactgatcattgaagtccaagtaaaagtacttgaagttgttcatgaaggaggggtaccaactgagaaggagatgttcaatattgagggtttcgatgttctctatactcaggtatgttaagtatcccctagtttcttttttagtacttagagctcataatttcctctggattgtttttcgatcatgttaacattgattttgcttaatgttgtcaggtgtctcgggtcagctggcttttcgtggaacatccaaacattgcagtagatgtcagaataaagaaccagttggtgaggacggcatacattaatgttctcctcggtcttatcgagacactagacaggtctccacggagtctttcagagactgaccttagagacgctcacatcgagttgagcgagctaacagaagcaggattcaaggtagattggttaaagaaaaagcttgaggaggtttccttggcgaggaagaatgaaatttctgatggttctcaggtggaagaactcgaggaacatgtcaagaatctcaaacttgagctggacaatgagaagattaaatcttctactgcttctgaaagagttttgttgttggagaaagaggtgttagatctcaaaattgaactggatcggacaaggagaggtcagccaaatctcctatatctaaagttgcgttattgaaggatgctgcagattccttctcacttctcgttaaccagctgcagattccttctcgtttgagttcataatttttttataaagagattctatctcacc

SEQ ID NO: 173336 - DNA, 530 bp, Arabidopsis thaliana landsberg
atgattttcgcgtgggacaacaacattgcggggcggatcatcttcttcttcgctcaaacagtcgtgctgtgcatcattctctacatcctcgaagctagatctcttaaagtgaaagtcactccactctctcccgacgctcaagatgccatccgtcgatatcacgtccctgacgatcccgatgtcgctcgtgaacgagagagaatcgaccgtggaacctccgatctggttatcatgcgcaatgtctacaaagcctacaccagaactccagtggtcaacaacatcactctcggaattcaacctggagaatgctttggctacctcggaccaaacggagcagggtatgtctcgcgtctcaccacctgaactcggctttacacttgaactcactcttccctctcttgcgtcgatttccagaaaatccacttcgattgcgatggccactgcttcagtcggtccctcacttggaaacattctgttggaaggaaacaccacgaccaatgcgaatcaacaggatctctacactcgagctc

SEQ ID NO: 173337 - DNA, 2595 bp, Arabidopsis thaliana landsberg
ggacctgcgaggttgtggcagaaggtactattgtcccttaatgtggcgggaagtgcagccggaaccgagggtgaagagatagctcctctggccaaggagaacgtagcgacgccgtgagaatatgacttttgttttgtgtcaaagtggtttgaagaaagcgttgggaagttaggagtagggaaggttgaggaaaagtaatgtatattggaaatgttagagtctaatataataataaaaaaactttgtgaacacaatcaatcatatataagtttatcatcacaatcaataaaaaatggtagaattttacagaatagtttcaatttattgtcacaataatgtttaacacataaacacaatcaaactaataagaagataaaatttgaatgtaaggaggatatatggagggaaaacggttaagaagaagaagaaaccgtttcttttcttgttcgctacgtcacaaatcttgctcaaatgcaagattctttacctctttcacatttcagtttagatttctcgggtttatcttcaagttttgtgaattgcttaggagagaagtcaaagaagagagaaagccacgtcactaaaacccaaatcttggtctaaaaacgatctcacaagtaaacaatctctggtgatttctagatggacgacgaagccatgatcgctgccattcaagctggtgtttggtcagaagatcctctaacacagcttgcatgcactaccgatatcaggaagcttctatcacagagtaaatcaaatctatggttgacggaaacttacagttattcttttttgctctgctgacgtggaggcgaaaacagaggcgactagggttttttgctttctcatcacgcatgataccgtcatcggcttctctgagccagcctggaggttcgccagtggccgtaacaggggtttcttctccccctgtggttgttacaattccagaagtcggtcagaaagaggtaatggagaggagatctcagtttctggttcgggatcgaatgtagggttagggggaaccttttcaaaactcaatcaggcagcatcgtcatctcacgggaaagggaatcagaacgggaaatcctcttgggtcaatgtggcaaaaaagcatatcttcactcaacaaaagtttgtggtatcggaggttgatggtaaggagagagtagtagtaccaaaggatgtgtttgtaggggcaaaaccattgtgggaagatttcttgataggaaagttcataaacaccaaggctccacatgtggggaaaatttatatgatagtgaataagatttggaggttgggagatcggtcttcccttatcgatgtatttgaagttaatgaaaccacagtgaagtttcgtataaaaaacgagggtatgaggcagcgaatattgaatagaggaatgtggaacattaccgatatccctatgatagtctcaaagtggactccatttacagaggaagctcacccggcaatgaaatcaataccattatgggtcactctcacaaatgttccaacaatgatgtttacggacaagggcttggagtttctagcaagtgcagatggtaaaccgatccgtcttcatcctaaaacagatgcatgcgtcagttttgatgaggctcagattttagtagaggatgatttaacaaaggaactaccaaaggaatgtgccttcaccggagaagagaaaggagagcttgactcggttaatcagtactcttatccttagttaccaccaaggtgtagttgctgttaaaaatggggtcatctacgtgcaacatgtctctccccgaagaacaagtccactcaagatatctcacctccagctatgtcccaagttgatggcgaagcgataatgcgggaccattcctctgccatacaaagtgttttagagcagcctggttttgcacctgcagaaagagacctgcaatttaaagaaattgagctaggggccacaagaagtggtggtgcccaaggaaaagaggaggggaccaacaataaggacgatgagggttggattatacctgcaaatacaggccgcagtccggggaaacaagcagaaggacttaagtttggtgaggtatccatcctatctaactctttctctgctttgggagaagaggaagttttgggagaagaaaaggaatcaaaggaagtagttaatggagattcagagcctgttatgacagagatagacacgggaaaggagttcccaaaggaggctgaagataaggagactagaccacgaggaagtaaagaaattcttatgcgatcatctttacctcgtgcatcaaaatctgctcataaagtgatttctactaactattcaattttcacaagggatatccctaaggatcagaccaagaaaccccctcttaaacgttgttaatgtcggggttctcatggaatgttagaggtttaaataagacatcaaagcatgctgtaatcaaaaagtgggtggaggaaactcaatttcagtttggttgtttcttagagacaagggttaaggagaagaaagcagaaagtttgaggagtaaaaaatttaagaattagtcggttataacaaattgcgagcataatccgagagggggcatatgg

SEQ ID NO: 173338 - DNA, 1224 bp, Arabidopsis thaliana landsberg
gtatatttgattggtttcagactggtggagctccgggtattggattaagatctatgaattctgcaaattctatcactgggatgggttatgaccagcagctcatccagcaatatcagcaccaacagaactcagcccagtatcgcttgcagcagatgtcagctgctagccaacctttcagagatgtaggattaaaatcaatgcaatcgacacagtcaaatcctgatcggtttggcttactcggtttgctcagtgtgataaagatgagcgaccctgacttgacttctttggcacttggtattgatctgacaacactggggttaaatttgaactcaacagaaaatcttcataagacttttggctcgccttggtccaatgaaccctctaaagttgatccagaattcagtgtaccgcagtgttactacgcaaaaaaccctccacctctacatgtaatttactctagtctctcatcagtaccatcattcatttgtccatctgggtttgtgttttcttttcattagctgtttttaacttttaatttttttttggtggatgcagcaagggctctttgcaaaattattggtagaaacattgttttacgtattctataggtatatgtctttggaattgaaagtacttgttgattcactctcttgtcaaaggaaccataacaatttttgtcgtgcagcatgccgaaagatgaggcgcaactctatgcggctaatgaactgtaagtccttttcatcataatatatttttgtttctctagtattgtaaatatgaaaatgcttcttcggagttttttgttcacagttgtcatatattaaacttggaatatagattgaagatgaatttgtcttcacatttgaaaaagaaagggaatatgaaagcaaaacatcaacttttgattccatctttcttctccatgacttgaaaatgggtttctgtcttaatttcctggtttggtatcagattgcaatgcactgaaggataaagctgcataactcttattgttttgcagttacaataggggttggttctaccacaaagaacacaggttgtggttcattagaatcggggaacctctcgtgaaaacaaatgcgtatgaaagaggatcatatcactgttttgatccaaactcatttgagatcgttcaaaaggtgagtacatccaaattctgctcatcgtatctttcttcatttggcctctgaagaataccccaaaatc

SEQ ID NO: 173339 - DNA, 2834 bp, Arabidopsis thaliana landsberg
agctcaagtctgaacttgcttgctgtaaacagagagggctggcgatgaagcttattttgggaaattgacaaaaatctggacaatcttgcctcacaccgtccgttgagagtgtgtcaatgtggaaagtgtacttgtaatcttgctgccgcacaggaaactgaccgtgaagaagacaagactcatgagtttctcaatagtcttgacgatcaataccgtgctgttagatcaactttggtggctcgttctccgattcagccgcttgaggaggtttataatattgttcgtcaggaagaagacttgcgtcctcaagttgcagaagctcctcctttgaccgcctttgttgctcaatctaagccgcggtatcggattgatgataaggaaaagagttttttctgcaatttgtttaaccgctccggtcacacagctgaacgttgttacgcaatcattggatacccagaatggtggggagacagacctaagggacgcacacttccaggcaaaggtcgtggcagcagctcatctaatggtggcagaggacgtggggctccaaccgtggttgcaaatcgggtgtatgttccaaatgtggaaaattcagctcaagagcaggctaatcacgtcatcaccgatgatgatcgcgacggagctcacggcctcaacgaacaacagtggcgcatgataaaatccattctcaatgcgggaaaggagagttcctctgaaaaacaatctggtacgtgttcttattctccttggataatggattcaggtgcttcgcataatttgacgggacgatttgatgctttgtcaaatgtgcgagatatgcctcctgtgttaatagttatggctgatggtagagaacaagtgtcgtataaagaaggttctatcagccttggtagtcatcttgttatgaaatcagtttattatgtcgaagagttgaaatctgatttgttgtctttggggcagttaatggatgaaaacaagtgtgttgttcaaatggctgatcagtttcttgtggttcaggaccgaatttcgaggatggtgattgggttgggtaaacgtgtaggaggcactttccactttcgaggtacagagatcgctgctgcagtttcgacaaaagatttcaaaaccaatgagctgtggcattcgagaatgggtcatccgtcatctaaagtggttgctaaacttccgtttctctctagcgttgtttcttcttctactttgaataaaccatgtgatatttgtcttcgcgcaaagcaaacaagagattgttttcccttgagtatgaataaaagttctcatatttttgagttaattcatgttgatttatggggtccgtatcgcactccgtcgcattcaggcgctagatattttttaacaatcgtggatgtgttgggaaattagtaaaacaaagaagcaatgtgaataaggaagcagcgtgaagagcaagtattgccagctcatatcgatgactcattttaggaccacaaggtacaaggtgtaagatagccgttggttttgcagtaagctgttaaagcaaaagcaaaaggagctttgtctggttatgcaacaagaaggacgagctcagtgaaggtgataacgccaaagaagaggcaacatcgcaagcggctgcacaaggggtactaggtctaatcttgagcttctatataaaggcattgattgagagagttgaaaaaaaaagcagaaaaacatagagagcaaaaacctagagtaaacttgtgtattttgttcttggggaaacacagagagaaagtgagattgaatccgagagaagctttgtaacaagggcttagggggtgagagatcttattgtgaaactctgtgattagtggattccgggagacaggtcccggcccagacgtagcatctttgatgtgaactgggttaacaaagctttcgtgtgctctcttttaagtttggtgttctgttctcatttcacaaaagttcttggttattcggttttcattcgaatccttgtttgtgtgttggtctgaagcttacataagttcttttaagctttgagattcaccacaggtattatttcgcttcccaaacgatagtggaagaaaacaattaatgtgcgaaagttttattcaaagtaaggagtggaaaatgtgagcacacgcaccaaaaagacaaaatagatgacgacaaaattaggaaagcctcgtatagacacgcgaatcatataccttagcgtgttctccttttgatcccctttcttttctttttttggggttgatttgcattagttaaaacaagaaatacaaatattaattcaacaaattaatcaacatcgccacgttacgataacaaaatatcttcttctttttttgttagaaggtttaccataacaatatcttgtcatcatgtaactttagactaactgtgtcaatgaaatgttgtttgttacttgtaagcaaatcagcaattaatggtcaggtcttataaaatatcctgtgagaaaaaatacaaaccaagagagacgtgtcaaaataaaaagcaagtattcatttcatatttatcaatttgtccgtctatagagttagaggatgttattttatcataaacatactttcattcaaattacgacaaattcatttcgttatatgtttttttccgttaaagataaacgctttattctacttttgtaggtattacatgagaaacacaaaatactatagctttacagttttatgtccaatgaactctctcggctgtaaaacaaaatacacaagttgtatccggacaaaacaacggctgagatctactgtttaagtcccatcatcgaaagattcatggttctgatttgttaatcc

SEQ ID NO: 173340 - DNA, 1324 bp, Arabidopsis thaliana landsberg; identical to SEQ ID NO: 33660
  unsure (1)..(1324): unsure at all n locations

SEQ ID NO: 173341 - DNA, 1611 bp, Arabidopsis thaliana landsberg
ggatccagagtcgattcctaatgagtaaaagatagtgcgtttgctatctctagatggtgaatctagtgagcccttgggttaacaatctgtgactcgagcatgcctgcttcaccgaatccgagaagaacaagcacaagatgaaaagttgcagaaaatcgtggaagagttaaaaacattagatagaccaaatgctagtggctaccatctagctgatgatggcaccttattactcaatgggagaattatagtgcctgatcgtaagggatttgggcaagacattttaaagccggcaaatacttttttattgagcattcatccgggaagtacaaaaatgtacaaggatataaggaaatattaacattggcctgggatgaagagatcagtggcgaaatgggtaagccaatgtattcatgccaaagagttaagaaggaacatcaagtgtcggcaggtttattgcgaacctaccaattcctgcatggaaatgggtgtcaatctcgatggattttatcactggattaccaacaagaccaggacgtagcaatgatgctacatgggtagtagtagatcgcttgaccaagatggcttatttggtatcaatgaaaagtacggatcagtcacctatcttggcagaaaagtatatcgatgaaatcttatgactccatggggtacctgctaatatagtatccgctcgagatcctaagttctcatctatattttggcaagacctccaacgttgtttagggagcgatgttcatatgagcgcggcattccatccggagactaacgggcaaactgaaaggaccatccgaaccatagaagatatgattcaactttgtgcactagagtgggctggtgattgggaagacgcatgcctttggttgagttttcttacaatatcatctatcactcgagcatcggtatgtcgccatttgatgcaatgtatgaaaggccatgtcgaactcctctttgttggacgaaagtaggagagaggacgagttctaataatcggttgatcgatgagactacagagaaaattcagttcatccgagactatatgaagaaagctcaagatcgatagaaaaagtatgctgaccgaaagaggtgtgaagtggaattccaagaagacgacatggtttatcttaaggtaactgcgttaaaagggaaaaatcgcttttgaaaagttagacagctcgaggtaagatttattggtccatacaaaattgagaagagaatcggggaagtagcataccgtttatatatgccggaagaaatgcaattacataaagttttccatgtgtcgcaattaaggaagcatgttccggatcctattgttatcatactcgagccgatacaagagtaaagaacgaatctcacctatcccgaagtccctcttggcattggtgaaagacgaatgcgggactaaagaatagaaggattccgcaaattcaagtgttctgggaaggcaaaatcgtaaagttactacctggaaagatgaggaaaagttccgaacaaaatatccacagtttttcgaaccaggaaattacagaggatgaagccggaccatctaatccttaggaggagaatgtagtgacccgcttaaggacatcggcc

SEQ ID NO: 173342 - DNA, 783 bp, Arabidopsis thaliana landsberg
gatgggaaaccattctcgatagattctttcacttcatcagcttcagatagtatttcagagaagaaattagaagaccccactagagcgagttttggtctcttcccatagaggatagtgcagatttggacagtgaaacttcttacaatactaagctgctagatgagaccgaacatgtaatgcaacttacagttgaagaagctcttccatctgtgactccaacgccgactaataattgagattgggatccaacaaaggctcctaaaatcgaattgaaaccacttcctgtagggctaaactacttatcatgttattgtgaatgcttctcttaatcccgcagagctcaccttattgctaagcaagctgcgaaatcatcgcaaagctcttggctattctcttgatgacattgcaggtatatctccagatgtatgcatgcatacgatccaccttgaggatgagtctaagtcttcagttgaacatcagagaaggctgaatccgaatatgaaagaagtggttaagaaagagattatgaaactgttggaagcagggattatctatccgatttcagacagcagttgggttagtccagttcatgtggttcctaagaagggaggtgtcacagtagtcaagaatgagaaagacgagctgattcctactcggacaatcacaggacatcggatgtgcatcgattacagaaagttgaatgctgctaccaggaaagaccatttccccttaccatttattgatcagacgttggagaggttagcaaatcataagtactattgc

SEQ ID NO: 173343 - DNA, 1145 bp, Arabidopsis thaliana landsberg; identical to SEQ ID NO: 56401

SEQ ID NO: 173344 - DNA, 489 bp, Arabidopsis thaliana landsberg
atgagccgggttgcaggcattgatctgggcacgcatagtgtcaagctggtcatttatgacgacgacgcgcgatccgtcgtagccaccgcggcggcgccgctggagctgatcagtggtgatgacggccgttgcgaacagcaggccgaatggtgggtccatgccgtggatgcctgcttcgcgcaggtcgaggcgggcgttcgccagagcattgccgccatcaccgtgtcgggccagcagcatggtttcgtcccggtcgatgcggacggcaaggtgctggcgccggtcaagctgtggtgcgacaccagcacgaatgtcgaatgcgcgcagatcatgcaggcggtcggcggcgtggcgcgttgcatcgagctggtcggcaaccccattctggccggctacaccgcgtccaagctgccgcggacgcgcaagcatcggccgcaagcctacgaaaagatgaagaagatcctgctgccgcacgattacctcaatttt

SEQ ID NO: 173345 - DNA, 1393 bp, Arabidopsis thaliana landsberg
gcagagcaaaaggagatactaaccaacaaagacgtaacgaaaaaattaacgtgggaggacattgagaaaatgagatattcatggaatgttgcatgtgaagtgatgagaattgttcctcctcttgctggcacttttcgtgaggccatcgatcacttctcttttaagggtttttacatccccaaaggatggaaggtacgagtacataatcaaaaccatttgaagatatttacattcatatcatcatgctcatactttaaatacatatgtgctgatcataaacatatttagttatattggagtgccaccgctacgcataagaatccagaatactttccggaaccagagaaatttgagccaagccgatttgaaggaagtggtccgaagccttatacatatgttccctttggaggaggatccaggatatgtccagggaaagagtatgctcgtctagagattcttatatttatgcacaatcttgttaatagatttaagtgggaaaaagtgtttccaaatgaaaataaaatagttgttgatcccttaccaataccagacaaaggtctccctataagaatttttcctcaatcttgagtctagtttgaaacttgatatggatcactagttggtgctacgttagtccaatatcctagtgtattggtctcaagtcttcattgtatttgttgattcatggataataataataaaaaatccgctcactttcttcgcaaactagaatctcttcttatcgatataacatagcttgtcttgataacaccaagactacaaggtcttggagggataaataagtttacatattgggttgtatattttgtgggacaattgtacacattagtgttatcttttagttttcgatgcaattttcttcatacggtgtccgttcgctagatgaatagctcttcaaagtcgcaactggggttcttctattttcttacaaataactttgtcatcaatatatagctttgaagaatctcgactcgattattttagtctgttcgtttcatcaccgcaggcggcagcggcggtagcaaactctaccgctgccattgccgcaggtgcatatgttcgtttcgtcgccgctgccgcaagtgaaatcgaagaagacgattcaaacagagaacttcaaaagctcttaagggtcaagaagagaacttcaaaaactaaacccattacttcaaaatcaccaagcttactttgttatcccatctcttcttcagatcgaaatcgcgttaaagagagaagagtaaggttttagatggtgatgtgtattaggttctcttgtgatttcctaaatgtgttaagggtatttatgtcattttaattttattattaatcacaggttttggataagcggatgctggatttaatcggcgattaa

SEQ ID NO: 173346 - DNA, 614 bp, Arabidopsis thaliana landsberg; identical to SEQ ID NO: 17960

SEQ ID NO: 173347 - DNA, 1372 bp, Arabidopsis thaliana landsberg
tgttgaatctggtcaaagagtacaaatccgtggtttataacaagatggtttctatttccacccaaaaagctctccactttcttaagccgatagattgttttctcgcagagaggctgacattggaaacttagaagcaagaattgataaaggtcctgttccagagatgcccgttggtcctcctctcattagtattcggctggttccggatacagaggattatgagaggcagaagtcgtattggttaggtctagatgatgaatttaaaagaaactttttgaaggttccaatttctgaattcaaaacctatgtggaggccaaaactggagcagtgaaagatctggagatagttctcaaatatgttaagaagaatctgaagtggatagcctggatttgtagaacttgctctaagaagttctctactcgacaagcatgtcacgatcatctggaacaagaacatgctacagggcttataccgtctcagagaatgcatatgcctcagaggataagtgaggattgggctgataaggtatcatcagttagagactggaaaccagtggatgcagtagctgctgttcaaatgatcaaggatcagtctgcacatgtgaaatcgtttgtgtatcaggatgggtggtgcaatgactggcctttagctacggatcaggttatagcgcgcagccagttactcaaagagatccgatcactccttgtaaccttcatccaacataaggttctctcagatagctttcgagagagggtggtgtattccttggttctaaagcttggcatttcaaaacagaagcttaaagactgtcgcctactggaaacacctcagagtatctgttttctggagtgtgatgaactcaacagaatccttgtctttctgcggaagatcaagagtaaaagggatgatggtactaatcttgtttgccaagcagtggatggtttcttgcagagtagtctgtttagaggaaagatatccgttgacttgcagttttcgtttctacttctggataaacaactgctactaggggagcttaagcattatgatgatgaaggaaaactgcagtttcttgtaccgagtgattactatggcaaggttcgttcacgtggtgatgctatcttaacgtggttacatgacaatgtgaatgtttcacaagaagaggatggctttgtgtttccaaaaccccctgacgctaacaactatgggatatggctggctgtactacgagccattcacctcaccgttagtgtcttggtggcaaaaatagctcgtaagaagcagttagtagaggattccaatgctttggacgaagtttggattagtgctcttgctatagctttgaaaaggtctcgttatgatgatcttcactga

SEQ ID NO: 173348 - DNA, 872 bp, Arabidopsis thaliana landsberg
agagagtctctcgcataaagaatatccttaacagaaagaagtttctacttttattggatgatttgtggagcgaagtagatttgaacaagatcggagttccacctccaacccaagaaaatggatccaaaattagttctcacgactcgttctaaggaagtttgcaaagacatggaggttgatgatatgatggaagttgtttgtttatcaccggatgaagcctgggaattgtttcagcaaaaagttggagaaaaccctataaagagccatcatgattttctcccagttgcaagaaaaattgctgaaaaatgctgtggcttgccacttgcgctatgtgtcattggaaaagccatggcatgtaaagagactgtacaagaatggcgtcatgcgattcatgttcttaactcatctagccacgagtttcccggtatggaagaaaagattctttccattttgaagttcagttatgatagtttaaaggatgaaaaagtcaaattatgcttcctatattgttctttggttccggaagattttgaaatagagaaggataagttgatagaatattggatatgcgaaggatttataaatccgaacagatatgaagatggagctgacaaccaaggttatgatataattggcttgttagttcatgcacatttgttgattgaatgtgaacgcacgagcgaagttaaaatgcatgatgtgatacgcgagatggctctttggataaattctgacttcgaaaatcagcaagaaacaatttgtgtgaaatctggtgctcatgtacgtctgataccaaatgacatcagttgggagattgtgagacaggtgtctttaattcgtactgatattaagaggatatctgcagtcccaac

SEQ ID NO: 173349 - DNA, 3777 bp, Arabidopsis thaliana landsberg
  unsure (1)..(3777): unsure at all n locations
atgattcccaagaacttcggcaaaggtgccaaatttgatatggttcaaattacctagaactactctctcaaataagagatcaattgcagtattttaggatcgaattcacggagttcttttgttcaaacattgagttaaatgtcgagattaagctagcagggtgtgagtgaaatagtaagaaaacaaaataagaaaatagcagattgattgtgttgtaaacgatttaataaaagagctaggaacagggtattcacaggaaactattggttagtagatctaattaaagctaagttgttatcgagccattcttaaactcaaactctaattatggaataaccaaagggcgtgccgcgaaactccctatatctatagctaatagtgaccagagaagccgagagactatccacttaagaatgcattcttaacgagttcaattattcatcttagtaaataggccgattcttattacacacctatagaccagactcatcaaataatagatccaactacagatacctatggcgggcatatctattgtctggattcaagatctagttaattactctagatctagcattaggtataattagagatgaagaattctacagataacctagcaaagcgggcaatctactaaaccatatgaatccctaatgagaaaccctatttctaacagccagactactcaaacataataaatgaaacaaataacataattgagatagaaagcataaacacatcaataaagaaaagagttagaaaggatctcttcactgtattgaaaactgaatgaatctctgaagaacggaggatgaatagcttatgtctctaaaaatacggtttgcaaagaacttgataaaagacttgataaaagaaacttaagtctaaaaaaaatatataaaaccctaaaaacgtccagggactaataatacaaatagggaaatcttctggggcaaacttgatcttctgtaaattcgaaagcgtctagggtttttgctgggccgaaactggtgtcgatcgacaccaagagtgtgtcgatcgacactcctcgatgattcctgaacctaaatcgtccttatctccattgttgtcccattgcatagaatacctgaaaagacactaaaaagactcgagaaataacataaagacacaaaatcctatacctaaaacatagataaaatcggtgaaaatcgagttatatcaagttcgaactaatcaaagttcctcgtgcagaaatttcagttgctgatgccttagctgctttggcttctacatccgaagtaactgtcacaaggataatccctgttgaaacgatagctcagcccaattttcgacttgaggaaataaactttgttactactcgggcaatgcgtaagcaactcgaggcgcaagcaaacaatctcgagctgcagcaactcgacgacgaggaaaaaattccagaagctgccccgcctgcggctgacgaagatttagctggtctcaacaatcccgaggttcctgacaatcagatacctcacgacttaggggcagactggagagaaccaattcggaactatatcctcaacggagtacttcccgccgataaatgggaggctcgaaagttgaaggccacttgtgcgcgtttctgcgtagcggatggcattctgtacagaagagttctttcggctccggatgctatttgtatctttgagaaaacagacccggacagttataaaaggaatccacgatagaacttgtgggaatcattcaggaggtcgttctttggcttttaaagtcaaaaagtacggttatttctggccctaattgtagcggattgcgaagcgtatgcacgtcgatacgagcagtgttagaagcatgcaccatacatcctgcagcccgcagaacttctcacctcggtgttcgcgccttatccgttcatgaaatggtctatggatatcgttggaccactccacgtttgaactcgaggagtgaggttcctactcgttctaactgattacttttcgaagtgggttgaagctgccgcctactccaatataactcaagttcaagtccgccagttcatctggaaggaaatcatttgtaggcacggcatgccgtatgaaatagtaaccgacaatgggcctcagttaatctccgaacagtacgaagttttttgtgcagggtggcaaatctgcctcagtcggtcaacaccttgcaacccgcaagggaatggtcaggccgaggcgatgaataaaacgatcatctcgaacctcaaaaaaaaactaaatgagtataagggagcttggttcggagagttacaaaacgtgttatgggcaatccgtacaactcctaggagagctaccggtgagacccccttcgctctctttcatggaatggaagcagttatcccagccgagatcaaagtcccgagttcgagaagagtacaaaatccccagaacgaggctgcgaacaacaaaatgatggttgatatgattgatattatcgacgaacgacgcaaccaagcgttagttcgaatgcaaaactatcataacgccgtgtttgtgatctcccccttctcaatctcctcaaggagttcccggttcgccttcatttcagcagctcggattttcaacgcctcaacttcctctgatttcgcgtagaagctctgatacttagacgtgaagtccttaaactgagcccgaacctttctccgctcttccctcctcgcatctgcaagcagcgcagcttgaccttcttccagcttcctcagtttctcctcgaaggcaaggagctcagctcgggctcgattctcgttgtcaatagccgccaagtaagcattcttgcccgattccagcttggcagcgaagtcagtattggcgatgtcgagggctaaaacgcgagcttcagcttctctcatccggctaagaacactgttagcccgatcaaccatgcgggagttctcctactcgatctgcttgaagctctcaatctccctgtctttgtccgagagctggtgttcattactcatgaaggcgtagttgaacttcaacacggtctgataaagaaacaatagaagggttaaaatttaaactaagtcttaaattttattcttcagaagaatgtttacctcgcccagtttctccacgaaacggaggtagttctcctggttggtcggcttcagctccttcaatggagggatagatgcgcccgcatgggtgaacgacctgatcaggtcggcaaaaggcagtggaggagctgaaacatggccataactgagtaagttgtcagtatctcggagaaagaaggcatttagaggaatagatttctaacctggcaaaggcggtgttccatgaggctgcgagctgcgagcttcagattctcgggatgacagcaccacgagatcttgagagtcccctttttgcctttctctttttgctggctcgggccacatccctctcttcagttcgagcccggacagagcgggctggagatcgagcatccttatcggattgcttcctcttcttatcccatatcgcttcgaggggtctctgctggaggtggccttggaatgagtctcgaatccggggcaggcgcatcgtttttgcttgccaaagtggaaggcttctgtcnntgccgccatcttcttcagctcggggctgcttggccttgttggcagcttgaagtttgctgtcttcaagggttcccgtcatgacgaccttgtcggacttgaggcggtctttctcctgttttgccctctccctttccatctttttcttggcacgatatgagggggctgac

SEQ ID NO: 173350 - DNA, 662 bp, Arabidopsis thaliana landsberg
ttcagctgggaagaagaagagtgagatcaaagattggtttgattgcaggttagcttattactctgttttttacttaataatttggtttggtgtgatagttaatcaataattcatgtcaatcatgatgaattgtttgcagatacgtttccgcatctgaagctatttggaggatatttaaatatccaattcatcataaatcaactcctgtccagaaattatcttttcatgtagaaggaaaacaaccagcttattttgatccaaagtctaacattaaagatgttctagaacgagtagcaaatgaagactctcagtttatggcttggctcactttgaatagaaaaaatgttattggaaagaatggtaagtgtgctagagattgtttatatgctgaaattccggcctatttcacatgggatggagaaaataaggcgtttaaaaagagatccaagggttttttctttaagtcgcattcactatgttccaaggaaaatggaagatgagtatttatttagagttctgctaaacattgtgaaaggcccactgagttatgatgaaatcaaaacctataatggtgttgtctgcaaatgttacaaagaagcatgtttttgcacgtggtattcttgatgatgatcaggtttttattgatggtctggtggaagcaa

SEQ ID NO: 173351 - DNA, 1083 bp, Arabidopsis thaliana landsberg
ttctttctctctttctcctcatacatcagttacattatcactaagtccatcagttacattgtatgtaattctgtctatgatagtatcactgatgatgagttgcattatgttgatttttttttcagagcttgggattggtttctagtgattttggtgctatacacagcgtgggcatctccttttgagttcgggttcctacaaacaccaagagcacctctcagtattcttgataacgtggtgaatggatttttcgctgtcgacattgttctgacattctttgttgccttcttggacaaggcaacttatctcctagtcgatgatcccaagagaatagcttggagatatacttcgacttggctgatttttgatgtggtatctacagttccttatgaactttttggcagcttattgcataacactattcaaggatatggaattttcagtatgttgcgtttatggcgtctgcacagggtcagtaaatgttttgccaggtgagatttgaatgtgtatcattacccattattatatatgtgtacaaatttctggaatgcggttacttgaaaacctctgtatttcttagtttccctgtgttgaaattttcagattggagaaagatcgaaaatacaactacttctggattcgatgcacgaagcttctcctcgttagtaactatctgtacacgatcttacattaagcaactatattttttagttgtcattttaagacattgatggtcgctttgtaggtttctctctttgtggttcattgtggcgcctgcttctgctattctattgctgcacattatccagacccttcaatgacatttatggcacttgcggaggcaaactggaaacagaaatctttgcttatccggtatgttacagcaatgtattggtccataacaaccttctccacaacgggttatggtgatatacatggtaataatgcagaagagagggcattcattctcttcaacatgatctttaatcttggattgctagcttatataattggacaactaacaaacttggtggttcacgtgaccagtaaaacagaaacttccaagttctgccatgtttcttc

SEQ ID NO: 173352 - DNA, 887 bp, Arabidopsis thaliana landsberg
ggggaaggtaccgataatgtatatcttagcttcgtttatatttggtgtgatgatagcaggacgtttacttctgggaccatagtgtagcttcacaaatggcacaacagaaagagtttaatctaaagaatccttctgcttatcactatgacatcttcttgcttggaattattgttagttcttaaatgttcttaaaacttatttcaaagatacttatttcatggcataaataccaattaaatcttgttgttatggtggtgatctatagactttgatatgtggactacttggacttccaccttcaaatggtgttcttcctcaggctccaatgcacacaaagagtcttgcggttctcaatcgtcaagtaagaacaaatacatatatatatatgagaagaagaaggagagttgaaacagagatgatgatatattttttgcagcttatacgcaagaaaatggtgaagaaagcaaaggagtgtatgaaaatgaaagcaagcaaatcagaaatatatgggagaatgcaatcagtgtttatagagatggagacatccccacctcaggttagtaataatgccttctcctatatttatagaaagaaattgtttgaaattaaagaaaaaaaagaaccttaaattttttgcaggataattctgtagcaacagatttaaaagagttgaaagaagttgtgatgagaccagacgaaggaggcgatacaaaaggaaaattcgatcccgatgttcatatagaggctaatttaccggttagagtaaacgagcaaagagtgagcaatcttttgcaatcagttcttgttggtttaacacttcttgcagtgacagacattaaaatgatcccaagttcagtactttggggtgactttgcgtatatagcgat

SEQ ID NO: 173353 - DNA, 456 bp, Arabidopsis thaliana landsberg; identical to SEQ ID NO: 75069
  unsure (1)..(456): unsure at all n locations

SEQ ID NO: 173354 - DNA, 927 bp, Arabidopsis thaliana landsberg
ggaccttgagcctatgtttgctgacgaggaaatgaacaagaaagcagctcatgtggccttatcaaagcagaatgataatatgtatgttgggagaacatttgctacaagagaagatttcaaaacggcattgtcaatttatgcaataaactgcgtattcaaattcaaatttacaaggtaccagaaagactatctagtatcagaatgtgatgacaaaagaatatgtgattggagagtctttgcacataaagtaggtgattcagaagaatatgaggtgagtaaagctaagcttgatcatctctgtaatgtggaaacgcgtagcaggttttcgaaacacgctacatcaaaggttgttgctgctcttttgagggcaaattatgcaaacgcttattgtgggccaagagcaagagacctgccagaatgtattctcactgagcacaatgttagagttttgtactggaaggcgtggaaggtgaaagaattggctgtagtgacagcacaagggacagacgagagttcttacgcactattaccggtgtacctacatgtcttaaaacttgcaaaccctggaactgtgtataagttagaaacggttagagatgataatggtgatgaccgattcaaatatgtgtttgttgctttgggggctagtgtgagaggacttccgtatgttaggcgagttgtagtagttgatggaacacacctatttgggaaatatttgagatgcttacttacagcaagttgccaagacgccaattttcaaatatttcccattgcctttgcaatagtggacagtgagacggatgagtcgtggagatggtttatgcagcagctgagtgaaattgttaacgatgggcaagacttaacatttatgtcagataggaactcttccatattgaagtctatacctgaggtataccctaatcttta

SEQ ID NO: 173355 - DNA, 901 bp, Arabidopsis thaliana landsberg
  unsure (1)..(901): unsure at all n locations
tgactcctagcggacaagacgcaaattatcaacttttcccactggcttttgctgtagtggatagtgaaaatgacgaggcttggacttggtttatgtagaaggtagagagaattattgatgacagtgcaacactaacaataatttctaatagacatccaagcctatacgttgcaaaaagcagagtttttccactagcacaccagggagcatgtatagtccatctccagcgaaatgttacatcaagatataagagcaaaggattagcaaagatggtgttgaatgttggctgtgtgtacaagatgagtgtctttaggaatctatacaaagaaataaaatcaagaaattatgaatgtgacaaatatttggagaagattggaccagcccattggagtagggtgtatttccaaggtgagaggtataatttgatgacgagcaatattgcagaaactctaaacaatgcaatacggctagggagatgtgcacctattttggagttggtgaagtttattagggctatgttaaccagatggttttcagcccgaaggaaaaagtctatcaaacatacaggaatggttccaccttacgttgacaaggtgatgacccagactatcatgaaaatggaagggagcaaaatccaaaatgtcacaaactggacatatgagattgttgggcgttttggagggaatcacatggtttcnnnnnnnnnnnnnnnnnnnnnnnncaaagtttttgataaactaaaaattctatgaatgaccagagaaaagtgaaggttgccagggtaaaaccaaataagatgttcgcgttgcaaaggggttggacacaacagagcacgttgcagcaaccctatataatcttccatgttataatgaaaaacctttaaatggtttaaaatttttta

SEQ ID NO: 173356 - DNA, 1152 bp, Arabidopsis thaliana landsberg
atggttggaatagacccggcctttgtgaccacctcaacggggactaggttctttggaaccgaacctcggtaaaaaatcaccgtgttcatctgctttatttcttggttgatgtgttttcccctctctttcggactcaaatttaattctaacgctaaccccggcttgtagtgtgtgcttaagtttgtaaatttcagattccgcctattcaccccctataggcgactttcaattggtattaaagcctagtgcttcattagagtctaaccgctcgaagtgatgtcggagatcacgccaagaaggagatgagaccgcgaaaagcccactacaagccacgggagcacttcatcggaagagtcccgcaccaaaaggagggagaagaagaagagctcctccaacaaagggaaggagaagaaatcttcttctcaccacaaagagaagaaggaaaaatcttcttcccacaagccgcatcgaagcggggacaagcaaaagaggatgaggaaagtggtctactacgagaccgacacttcatcaacatcaacctccgactccgatgcgccctccgtaacttctaaacgccaagagcgtaagaagtttagtaagatccccctacactattctcgcatttctaaacatgcacctctactttccgtcccattaggcaaaccaccaacttttgatggtgaagattatgctaggtggagtgatttaatgagatttcatctaacctcactccacaaaagtatatgagatgttgttgagtttggtgcacaggtaccgtcagtaggggataaagactatgacgaggatgaggtggcccaaatcgagcacttcaactctcaagccacaaccatactccttgcctctataagcaaggaagaatacaacaaagtgcaagggttgaaaaatgcaaaggagatttgggatgtgctcaaaactgcgcacgagggagatgagctcaccaagatcgccaagcgggaaacgatcgagggggagctcggtcggttccggcttcaaaaaggggaggagccacaacacatgtacaaccggctcaagactttggtgaaccaagtgcgcaacctcgggagcaagaagtgggatgaccacgaagtggtaaatgttattttaagatctctcatttttcttcaatcccac

SEQ ID NO: 173357 - DNA, 506 bp, Arabidopsis thaliana landsberg
ttcctaccgtggttggtttacttcggttcttgaggattttctcggccacgggatttttaattccgatggtgatatgtggtggaaacagaggaagacggcgagctacgaatttagtactaaatctctccgtgactttgttatgagcaacgtcaccgtcgaaatcaacaccaggcttgttccggtgttagtagaagctgcaaccaccggaaagttgatagatctccaagacatattggagcgattcgcgttcgataacatctgtaaattagctttcaatgttgattgcgcttgtctcggccacgacggagcggtcggtgtaaacttcatgcgggccttcgaaaccgctgcgacgattatatcgcagcggtttcggtcggtggcttcgtgtgcatggaggattaaaaagaaacttaacattggatcagagagagttctgagagaatcaatcgcgaccgtccataaattcgcagacgagatcgtgcctaacaggattgatcaaggaagat

SEQ ID NO: 173358 - DNA, 645 bp, Arabidopsis thaliana landsberg
ggtgggttaaacccaatagttctcacaattatgctgttgagaaatgtgttaatttattgaatgtcatgtcattggtgaaatctactaaaggagaattgcagaagcttaggaatgatggatgggattcataaagtttcatcattttgcgagaaacataatgttgaaatgcttgtcatgaaagaaatctttgttgatccaaggaaaccaagaaagaaaaccaatataaccaacatgaatcattacaaggttaattgtttttacattgttctacatttagcttcaagagttcaatgatcgttttaacggaagtaaatactaatctacttaattgtatggcttctttaagtcctttgattcattccatcaatttgacaaggaaaaattggtgaggttggtaaagttttatccggatgacttcaactatggggatactttggttcttgagcagcatcttgatatccacattgacaatatttgcagagatgaacgattaaagaatcttaaaaatattggagatcttttttgtttgatggtgaaaacccaaaaacatatttcacatcctctaatttatagacttttgaagttggtcttaactttaccaattgctacagcaagtggtgaggatatttttctgcaatgaagttg

SEQ ID NO: 173359 - DNA, 390 bp, Arabidopsis thaliana landsberg
gagttcaggaaagcgcaccagtaccaggtcttttgcagcaatacgcctttgcaatacgccctggcgcaatacctttcacagcccgaaacttatttgtcgttgaacaacttttaccagaataaacgcgattattttctcaaaggtattgcggggtcgcgttttggtgcagtgccgtgcaaaggaacatattttcaattgctcgattacagcaaaatttctgaagaaaacgacattgattttgcccgcaggttaaccgctgaaaaaaaactggcggctattcccgtatctgttttttataataccaaaacggaacagaaattactgcgtttttgttttgcgaaaaaggaagacacactggataaagccattgaaattatcaataagatatga

SEQ ID NO: 173360 - DNA, 1785 bp, Arabidopsis thaliana landsberg
gcctatgctggtaatacagttatgctgcttagtatctcttttttatggatcattgttcaatgaacattcatcttcgtgttctggaggaatattgttattgatacatagcatgaggtttctgttatagtcaagctgatgaaaataagctcttcttttacatggtggtgtgtgtgtttagggctcacacggcttcatgacgaagcataagttgaaagacaccattggagcttttataaacgtggaagcctctgggacagggggtattggtaagatatattccctaaaaacaatttttacttatgacaaggtcctttctcggccagtctcttcctctagatgacaatgatgttcttaagttgatcttgattctcttatctttcctaagtattggaacaaaaaagcttatctttaaacatctgtgtagaccattgaagaacttctcttgcaacatcctgtccctagaaaattaatgcatatacatacattatcctgtaaatattaagaggaatatgtgctagtcttatttgtgacagtattaagtgtttgcttgtcaatgagtatttatattttaagtttctgttgtgcttattgctcctacttctgactttttgttaatggttggtagatctggtctgccaatcagggcctggctcgtggccatcttatgtctactctcaagcagcagtgtatccaatggcacagagttctgcacaggtctctctctctctctctctatgacatacatggatactcacacacactgtcttctctacttttgccaagtgatagtggtcattgatcaaaacgtattcagccattttgtttctagttcatctctgtcactgactttaagttctcctatgatattcctcaggatgttttccctgtaattcctggagacacagattacagaatgtttgcagaagattatgccgacattcccgggctagacattatctttcttctgggcggttactactaccatactacctttgatacagtggacagaatagtgtatgcatcgttttggtatatattatggttgaacttttccttactatcgtttattgtttagtatgatcctcttttcacagaatacctttgaaccagacctggaagcatgcaagcacgtggagaaaacttaatcagcgtgcttaaagccttcacgagttcttctaggctaaaggttgctagtgaaagaaagacgcttgacgtggatgccaacagtgacatggttgaaagagctgttttctttgattacttaacatggttcatggtgggtgtttttgagattgttcatcatcttttctcatagctagtttacactcttgacaagctgaaatcgtgatatctatcaggtgttctacccaagaagagtagctttcgtacttcacaacattccagctgctttgttcctttgtgttcctttctttttgtatatgatggaccctaggacacaccctttgttatcattcttctgggctttctttaaaggtaaaattctgcaatctttttattttcttaatcatttttgtactcctgtactcttttcctcattgtacgatgttttagagatttaacgttgtaaatttttacctgatcaggagttatgcaccatttcgccgggatcttacttggtgtaatagtccctgttctctttgcagtcatcagattgttctttgcttatcccatgagctggttggttttgaataacgtgttacgttgttccacgttttatttaatacttaataaaggtgtgtcactcaaataatgatggaaatgtag

SEQ ID NO: 173361 - DNA, 526 bp, Arabidopsis thaliana landsberg; identical to SEQ ID NO: 79880

SEQ ID NO: 173362 - DNA, 377 bp, Arabidopsis thaliana landsberg
gtagtaatccaccttggcaatagacttgttgagattcttgacctgattgttgatctcatagatgacaagaaggtctcaaagttaatcgcccctgttgttgagcaagtcccttatttaatccgtaaatagtgtgaacctctgccctctcaagatggtggcttagctcctttcaagtggcaaagccttaaagatgggtacaagatgtgcgatcaggggactgtggtcctttatccattaagctgatggagatgcattataccgggactgttggtttgctaagtgatgaccatgtcgacagacttagacagcagtacgcaaggaatgtttttcaacactacattgctctcatctatgttaacccgtcaaatgatccatag

SEQ ID NO: 173363 - DNA, 1963 bp, Arabidopsis thaliana landsberg
ctgtgatattgtttagacttaatagtgaagcaatctctcttcttcttccttgagatacttatagttatatttttggtccatggaatgtagaaaagaaaaacaatcatgccttactgtttaaaataatattctttgcagatatgtgatcgatttatcaaccgcaaactcgtgcaaaaagtgtatgacagaatgcttactattggtctacaaggttatgcacaattgtatgtccaaaaattcttgtcttatattgttaacttattgtttccatacctacttttgctagctttagttacgtctttcttgttccctaacacatggtggtacctgcacctgcaggcaccattccatcatttctcgtatagccgattgggaaggcattaagaaggtgagttttgattttctatatatttgccaaatcatgtaaattgacttaaaagattcaccattcatcttgtgtcttgttttagtcacgttcagttcgagagtttgacaactacgccaccaggcttgttgccaaattcgaggtgaagtttgcttcacattctccttaccctttgtttaatgtatcccatctttccttttaagcagtaaaacttccaatctctaatgatgcagacaactgatacatactatagacgttcaagcagttcacaatatgtggaaaatgtcgctgttccgctcctttgcatcagtgctttggatgatccagtttgtactagagaagctattccttgggatgaatgtaggtaagaatccatatgcttcgaccctttaatcattctttccaccagttttcaactctagagctgatggactagattaatttgcacaatacatcggttctcttatgttgtagccttgtagggccactgataagtcctcagaaggagtacatttagctgttaagtaatgccacgtcacctcactaaaattcagaagttagatagagggaacaatagtctgaatagggtatttaacaggatccgagtatttggggaattggttttgatatgggatagtaggagatgctctagaaagtcattcttatctggttttgttgttggttttgttcttgggtgctctagaagttttcacaagattacggttgctaaattgagttggtaattcttctgttaaactgacttggtagtttcactgtcatattgagtttccatgcatggctaaattaagaagtgaacggctttaggcatcgttggcgaaaaatttgatgcgattcttggttgtatctttctgcattgcatagtgatgggtctccctgtattatgaaactgatgttccaatgtctcaacttttgcagggcaaacaaaaacatagttctggctaccacaacacatggtggtcatctagcttactatgaagggttgacagcgtcaagcatgtggtaatcaatctgcgtaaatccgcagtcttagaaactcatctctcatttctattcacaaggactttcttaggagtggaattgaaaaatgtgaaactgtaatgtataggtggacaagggttgtacacgaatattttgaagtgctactctccagcccctttgcagacagaagacacaaggtatgatgaaaatgagttttagtccatttccatgacattatccactcttagtctcttctaagacatgcatcatatatttcatatgcagatcatccccgaaccattgggatcttcgattgatcagggaccattcgtggatgctggagaacacgggatggttgctgctgcaagtgaagtggacacaacaagagctgatgcagaaccagaggataatgctcaaatttatgtaaagacaagtaatcatctacacaaggacaataatcctcaagtttataacaatatactcggtcctttgaagaagagagtggatcagctttcaagatacagccggaaatcgatttggctattggcatacattgctatagtcacgacgtggccacta

SEQ ID NO: 173364 - DNA, 567 bp, Arabidopsis thaliana landsberg; identical to SEQ ID NO: 55621

SEQ ID NO: 173365 - DNA, 557 bp, Arabidopsis thaliana landsberg
ctcaagtggttcctgatatttctatcaatcagcttgacaagtttctctgttctcgatgatgactctccgtgttttctatcattcctctcacgccaaggataaaggttggcaagtaatgccacttctcctcaagagttgtccaaacctacatactttagtcttaaaggtatcaataatgtccttactgcgattattttctcttgatattaatttattcatgtcaaattggtctctggtttcagggtcttgtccacagagtaactagtagatgtggagatgcatgcgcttgcatacctaagaagcagaggaagattgtacagaaagaagaggcattatgttgtctgcggacatgtcaagtgaaggtgctacagatttcagagtatggaggttattttcaagagctgaaacagatgagacatttcttgggcaagttggaatgtcttgaaaccgtgaaagttggtgttcacgcagaaaacaacaacaacagtgagttcttgcgagctaatgtgctgactcttcccagagtttcagcaaagtgcaacgtccacttcatctga

SEQ ID NO: 173366 - DNA, 463 bp, Arabidopsis thaliana landsberg
atgatggtgcaaatcattgagcaccgcgccgaaacttccacggatttcctggtggaggaagaagttgtttcttccacgccacaggtttccaaccgcccaatgccgggcaccgctgctgtgcacgctgcacggcagcataaagctgcacagacatctcagactccgtcgagggcggctccgagagagttgtcagcagccagggagttgttgcatcaccctccaagctccacggcctcaccaggggccatgaagcagtggcgggacgacatcgatcgactgctcggcatggcgcgttctacctcaaccaggtcgaggtcacggtcatcccggcgccaacatgaggcgtcgacgtctgtgcgctcaccctcagtaaggggcgcacagaccaacgacctccgggccgaactcaaccgcatgcgcgcgggagaggacgccgaatctctttggaaagggcatgcgagcg

SEQ ID NO: 173367 - DNA, 1265 bp, Arabidopsis thaliana landsberg
cagcgccgaagtcaaagcggcaacaaaattgcagatcgccgccggcgtaagctgtgagaacgccatacgacggcgattcagaaaggagatgatcagagacggaatcggaaaccagaggtgacactgtctgaagtaggcttcatacatacaaacataccctcgagggggattccatgggcgctcctcctctccgggaatcatgcaagtgagcgggcgatctccatagccacatagggcgaatacttccgcgacagactcggttgttgaaagggtctttttcgcggtgatctcggtgttccagctaacaactgggtcgaggtcaaattcaacataatcctcgtgaagtaatctcgcattaacctcagcctctgtatactgcggctgcgtgttataagcatcctctaggtcgatgagtgggtcgaactgagataagaaatccaccggatcttcaggagcagcgagatgtccaccggaaccttcccgatctggctcatcaagcaacgtcggaatctcgatccgattcgatcgactagactgagcttcgtcacttggattcccggttaaccgagagtttcggcgaacttatcgacgcttcactctcggaggaagaagaggacggagagacaagaacaaccttacccattgccggaaaaatcgataaagaatcgagagtacaaaataatttgcagaggagagagcgagagctacctttgattcttcttgcaagcggcggaaaatgatttcccgagggtttaatctaatataaatagaggcgaatgggcggcaaacctacgaggtcatcattaaacctacgagacgcttcggttcctgagcttcacgcgcgcgtactgacgcagcgattggacacatgtcagatacgttcgaaatacgaatcgattcggaaatctaatgattaattcacgctttccaagatttaaatcgaatattcaatttctaagttcggaaatttcgaattaagcaactcggactctccgaactgggggactaattgttggtgcaggaattagcacctccgacaataccaatttaaaccaaggaataacgtgaataaaatcgagaattcgattgaaccggggaatcccggatagcctgttaatgggccttaagtcatgagctcgccagaagatttaggtcgacaatcgagatcgccataagcggcttctgaggtcgtgtgaagggaaaacttccatttaaaagagggtaatctcatgaagaatggaagtaatggagatttagacttaaga

SEQ ID NO: 173368 - DNA, 1448 bp, Arabidopsis thaliana landsberg
atccctcggaagatcggagatcgtcaacgtcattgtttcaaacccttttctcttcctctgaaaaatctctcggtccttgctgtgaaagtaaccaagtccttaaaattttagggtttatgtgacaattaagactcggttacttttttattcaattaattctggttcggtcaattcggtttatagcggttttgtttactagaaaaactgtcaccgcctttgtttttatttttactttttagtttcactttcgacatttttcttagtggtaaatttcgtttttaccttggatctataaaatcaatcggttcttaggttttagagtaaaccaataattcgcctctcttctcaacgattcgttattctctagtcaagcatctccatcgtctcacatcaatctctccatcgtctcaaatcaatcaaaggtaatttcattcttcttcatctttccttgaacaaattttaggttcgagttttttgttcttcatctatgttttgtgtcccccctgcaattatatctccatcgtctcaaagttttatattttgatgtatcaggttcttctccttgctaacgaagatgacgacgacttctcgttttttcgctcaggtttctttccatagacctttgtttacttatcaaaacctatatttttttgtaacagtttcttaatgatttttctttgcttatgtttcgtttacagagtggaagtgaaagtgaagatgagagtgattttgaaaaagaagaggttgagggtaacaacactcgttaccttgcagacttacctgacggtgagatttgttgtggtatggataaaaaaagtgtggttaagccaaaaaaagataaacgttttaggagatggccaacactatagagaatatgaagcatgccatgaacatcaatgagttgtgttaacttgcaagaaacgtttgagaaactccacaaacagattagtaagtccgtaaagactccgactttgtatatcaagacccttgtgatgttggaagatttcttgaatgaagataatatgaaaacaaaggagaagatgagtactagtaactccaaggctttgaacgcaatgagacagaaactgaagaagaacaatctgcagtaccaagaagatatcaaaagatttagggagtctccagaaatcgaagacgatgatgagtatgaagaggaggtggtggaggattctgctgataatgtttcttgggagatgttgtttagtttagatcatgaagagataacttggaacatggtcaacaagaagttcaaagaaattagggctgctcgttggagcaaaagaagaagttctagccttaaactcaaacctggcgagactcatgcgcagaagcatatggacttgacaaagatcgccaaaaatcctgcacagaaggttgaaatcttgtttagtgttatttcagcagagtttaatgtgaatatggggtccagg

SEQ ID NO: 173369 - DNA, 2391 bp, Arabidopsis thaliana landsberg
atgagcaaatggattctcgatatgccaaggatttggagactttatactcgggttcgaggtgttgctctttctaaacacaggttccagtttttcttcaagtctgaagaggatttacaaggaattctgaaagttggtgtttggacccaagatgattggtgtgtggttatggatcgatgggtagaaaaaccacaggatgattatcttcagttccttcctgtatggattcgtctgcgtaatttaccggcgaactattacacggtaaaatcaataaaggaaattgcgcagtgtgttgggaaagttttagaggtggtatttgatacggtgaaagcacaggttcaagattatgtgcgggtacgtgttcttcttcctgttgctaatcctttatgtaattcgaaagaggttcaacttccaactggtgaattggttttaatttctttcgattatgaacggataaggaagcgttgctttcactgtcaacgcttaacacatgataagaatcgatgttctttcaagtcttcaagctcaattaaagctttatcaaggaatttactggaccaaggtaagagggtagaggtcaatctgcaggatcttggtcaaggaaatttggatactgttatgttgaaagaacaaagggtgctattatcagatttaaaataccctaaaacatctgtgaaggatatgttgaaaccttctatacatccatgtctgcctttgatttcaaatacacaagttgataatttctatgctgagatgccagatttagatattatcacaggtttcaataggggttgtgatgaggctagttcttcgggtagcagtaaaaagaatctctcacgtaagaagactcctgcatcctagtctcttcaggggaaattaagacaggaattgcctttgaaagaaaagatcattcaagaggaggagattggtcgatttgataaagtgtttaaaagaaaggcaggggtagcttctactactgaaccaaaatgtatcaaaagagagaaaaccacggtggttccgggggaactatcgttggatcagtaaggcatcttaagctggaattgccaaggtttgaggaacccttggacaattcgccatctaaaggaaatgaaaaagaatcatttcccatatattttgttcctcatggagattatgaatacttctgattttgtctccaaagtgtttacttggttaggatatgatcatatgtttacaattgaacatgttggtagaaaaggtggcctggctatcttttggaaaaaggacttggacattgagtttccttttgcagacaaaaatcttctggatctcaaaatcatacaaagaaataaatactggtttatttcatgtgtgtatgggcatcttgtgacacagctgcgacctcaacttagggaaagattgagtgatattagtctaaatagaaaggaagcttggggtttaattggtgattttaatgatatcagatcaaatgatgaaaagcttggtggaccacggagggctcttgcttcgtttcaggcttttcaaaacatgctggatacttgtatgatgtttgagttgggaagttcagggaatggttttacgtggggaggtactcgtaatgatcaatggatacaatgtaaacttgatcgttgttttggaaacccttcatggttttctctatttccaaactcccatcaatggtttctggaaagatttggctctgatcatcggtctgttttggtcaattttatcaatgatcaggaactatttcgtggtcagttcaggttttttaaaaggttagctgatgatccttcttgcacttgtgcaattcacaaatcttggaagagtgagatttctcaaggtacttacttttctatatttagtctgaatgaatgtggaagagctataagtatgtggaaaagaagttctgatagtaatgctcaaaagaggattaaacgattgagaattgctttagatgatcttaaaagccagttgaatccatattggcctcatattaatcatcttaaagatcaattgggcaaggcttatgcagatgaggaatctttttggaggcagaaaagtagacagaaatggatgtttgagggagatagaaatacgtttttttttcatgcttcagtgaaagccaacagacaagctaataacttgagtttccttttagatgaaaatggaaagaagcatacccgttttagtgagaaagggaaggtggcatcacaagtttttgacagtctctttacttcgactagaccaagcagtttgctctctcatttggaaggatttcagtcaaaagtttccacagaaatgaatcaagatctaattaaagcagttactgaagaggaaatatagaatgcggttttctctattggaagtgaaaaggctccaggacctgatggatta

SEQ ID NO: 173370 - DNA, 784 bp, Arabidopsis thaliana landsberg
atgacgaaacggattgattcttctcttctctacacggcgctcgtagtgcttcttcttcttggagtagttcatcgctctaatgcaaggccacgcgttaatcgacgtaagtttccgagaaaatttctgtagaatctcatgttaatgcttgaaacatcataatctttggcgacgaagaagtttttgatgaggtttctttgatttccttgtatcgcttttgagtaatagcaagaaaacgatgatcgatgtttagcttatccctaatttgattttgagattcttctctttcattgttgtttcttactgttggaaccttcgttgcagctcccggtttcatgcgattcatatcgaacgcaactgattttgcgtcggaggattactacgattgcatgatcgttggaggaggaacggcgggatgtccactagccgacacactttcgtaatctttccgagttctcctgctagaacgcggtggcgttccctacaacagacctaacgtgatgtcacacgacggttttttgaccactctcactgacgtcaacaatttcgactcgccggctcagactttcatctatgaggacggagctcctaacgctagaggtcgtgttcttggaggaagtagtgcgatcaatgctggattctatagccgagccgataaacagttgtttgataattcggggcttgtttgggatctgagtagtgtgaatcacttttatgagtgggtcgagagagcgattgtgtttagacctcacttgacgacttgaccaactgcatttagggatgcgta

SEQ ID NO: 173371 - DNA, 692 bp, Arabidopsis thaliana landsberg; identical to SEQ ID NO: 43610

SEQ ID NO: 173372 - DNA, 1272 bp, Arabidopsis thaliana landsberg
  unsure (1)..(1272): unsure at all n locations
cttcttgcattcgagcaattccacagttgaggaaacatttattgaggaaattgcagaagcagatccgggatgtcctaggatgtgcaaggtgaggttcaagaagaaccatttgaaaggctttcctcttgataccatttatgcagaattgggtacaactcaggttagttgtcttaagatatactgtttcacaaatgatagttattatattttcttataataatccattcatactgtttatctttacaggtcattgattctatcgtcacacttggaattgaggagcaaaaactcatgaaagcaatcactgaagaagaagacgacgttgacgtggctgatatggtggttgaaagttgggagaagcgtcgtaaagagggccgtctaattaggtttgatgagctctaccagcaggatatccaagccctgcagatcaccgcaggtccaaagattccgggtgcggaggannnnnnnnnnnnnnnnnnnnnnnnnnnnnnnnntttggtttctgtggttcagatgattgaaaacttggataagaagatggtagaccagatgaatgaaattataataatgatttctgatttggatagaagagttgaatcgttggaagcattcaaggatgagcagaaagcaaaggaggaaaatgtacatattgataattgtgtaatactaagtaacactatgataactaaagtataattgcgtaatactgatataacttcgttcaatcgtagaatcaagatgagatgaaccaagaggaggctggtgattcgagagagaaggatcaagaggaggatgttgttcaagagaaagatggtgatcaagaggaggatgttgttcaagagaaagatggtgatcaagaggaggatggtgtctcgaaagagaaggaacaagagaaagagaaggacccgaaagagaaagagaaagagaaggacccaaaagagaaggatggaggtccttcaaaacccgtggaagcaaacgtcacgagaaggatcactcggagaaccaagaattgaacttggttgtctttgtttggttttaggatttgaatttggaatgtttggatttaggatttcaagctttgtgaagatttgaatttggtatgccgttttttggttttaggatttgaatttggaatgtttagatttaggatttcaatttgccttgtggagatttgaatttggtatgccgttttttggatttcaatttggatatgaattggaaattgatattcaaggacttatcgaaaatacaaagaatacaagagaaaactaa

SEQ ID NO: 173373 - DNA, 778 bp, Arabidopsis thaliana landsberg
acgggagaaaagtgaccttcttcatcgactcagtgggcagagctagagcaacaggcttttatctatcagctattctcagccaatgtccctgttccatctagggtacttctctatctcaagaaaccttttttcccttatggttccttgcctcctaattcttgtaagttctcttccttatcttttgttttcaaagatttgagattattgatcaatagttttgattccttttatctccaatacattagccaagaattaactttatactatcttttttagtgtatagtcctttggaacattgaatcttgtatggattggtggtgggtttattaaagattcttgctttgttaggggaatggtgtttttatgagatcttgagagatttttttgttttgtgtgattatgaagttggatggggctcttttcatctgggcttttccggtggtaacatggatcccgagccagggagatgtcgccggacagatggaaagaaatggcggtgctcgagggacgctgttcccgatcaaaagtactgtgaacgacatattaacagaggccgccatcgttcaagaaagcctgtggaaggccaaaatggccacaatactaatgctgccgccgctgcttctgctgctgccgcttctaccgctgctgctgtgtccaaagcggcagcggggacttcagctgttgcgatgcgtggatcagataataacaatagccttgccgctgctgttggaacacaacatcataccaataatcaatctacagattctttggctaacag

SEQ ID NO: 173374 - DNA, 604 bp, Arabidopsis thaliana landsberg
gaaatgtggaatgagcagattagaaggtcttttcgcggtcttgattgcgacaatggcgctttcgttcgcttggatgtttaatgaaactaacccaagtgttgaagaactattcataggtaagtttgtaagattaagcattgtctcttatttgataccatttcttgatttggttttatcttgatgatgattttgaaaggtattattattccgaaactcggatcaaagacgataagagaagctgttggagttgtaggatgtgtaataacgcctcataatgtgttcttgcattcagctttagtgcagtctaggaagacggatccaaaggagataaacagagttcaagaagctcttaattactatacaatcgaatcatcagccgcgctttttgtttcgttcatgatcaatctgtttgttacagcggtttttgcgaaagggttttatggcaccaaacaagctgatagtataggactggttaacgcgggacattacctacatgagaaatatggcggtggggttagaccgaggctttgcatctgagggattgccactgtctattgttgggactgtacttctatgtctagcatgaatcccctgaatgctgaaa

SEQ ID NO: 173375 - DNA, 673 bp, Arabidopsis thaliana landsberg; identical to SEQ ID NO: 23316

SEQ ID NO: 173376 - DNA, 493 bp, Arabidopsis thaliana landsberg
  unsure (1)..(493): unsure at all n locations
tcggggctcgcgatccgattgcatgacaacgacaatgtgctgatcgcgcgcagcgacatcgcgatcggtgcgaagatcgaaggcggactgacttcgaaaagccagattcccgccggccacaagattgccgcgagggcgatcagcaagggcgagcccatactcaaatatgcggtgaccatcggttttgcttcggttgatattcccgccggcacttacgtgcattcgcacaacctggaattccgcgagttcgaccgtgattacgcttatgcccgtgactacaaaccggtggagatgattccggaagccgaacgtgcaacattcatgggcatcgtccgcgccaacggccaggtggccacacgcaattatttgggcgtcctgtcgaccgtgaactgctcggccacagtggcgcacaagatcgctgaatatttcacgccggaacggctggccgattatcccaatatcgacggtgtttgtgcttttgcccanagcaccg

SEQ ID NO: 173377 - DNA, 571 bp, Arabidopsis thaliana landsberg; identical to SEQ ID NO: 21434
  unsure (1)..(571): unsure at all n locations

SEQ ID NO: 173378 - DNA, 730 bp, Arabidopsis thaliana landsberg
agtgaaagattatgtcagcccaaagtgttgaggtaactatgtggggtgacttcttcaaaacagaaggacaaaggcccaaaagtctttgtgattgtggtgtgtttccggttctgcctgttaaggcgggcagaattagtgaatttaatggaaagacagtgagctccattggatcaagtcacctgttcattgacacaaattttgttgaagctgagaaactgaagaactggtttgagagagaaggaaagagtgtcccttgtatctccttatctcgggagttttccggcagtgccaaagcacacgttcgtaaggcaatatctcaaattaaagatgagaacctaggaacctccgaaaaaccagcctggatcacagtcagtgccacaattttaaacttgaagtttaaaaacttctgctacacagcttgtcctatcatgaacggtgatcgtccatccagcataaaggtaacagccaatggagatggaacatgccgggccccaaagtgtgatataagcgctcatgaatgtgcccacaggtatatactccagcctcagatacagggccatccagatcttacttgggtcacagcattccagtaggctggtatagagataatgggcatatctgctaaagatttgtattatgtgaagaatgaacgcccggatcccgaaaaattcgaagatatcatccgaaaggtaaattttaccaagtacaacttcaagctgaaggtaaaagg

SEQ ID NO: 173379 - DNA, 408 bp, Arabidopsis thaliana landsberg
  unsure (1)..(408): unsure at all n locations
cgccgcgcccgggacgtgatctccnacagcgcgttttgcatggtccatcgcgtcggcgctnnnnnnnnnnnnnnnnnnnnnnncctaggggcggatcgcccaactgatcacgcaatcgcacgcgtccagccgggacgacttcgaaatctcgtggccgcaggccgacgccacggtggaggcggcgatcgcggccggggcgtacggggccaagatgatcggcggcggcttcggcgggtcggtgctcgcgctggtcccccaagcgcgcgccgccgcggtccgctcggccgtcacgacggccttcgatgagcgcgagtggcgggcacccgagttccttgaggcgatcccgtccgcggccgcccgccagatcggctgaccgtcgggcgcgagctgagcgtgggcgcgggctga

SEQ ID NO: 173380 - DNA, 787 bp, Arabidopsis thaliana landsberg
caaagcagtttgaaacatttgttggatcagaagtctttgacaccagtgcaacagaggtgggctacaaagctgattgggttaacatacaagatagagtataaaccaggggtggaaaatagagttgttgacgccttgtcaagacaaccacgggtaccagaagtcaatcagttggttctctgtgctccacaaactatagaccgagaagaagtggctatatggactaaggaggatccagagttacttaagctgattaaaaggtgtgaaatggaaggagagaaaaccacgggatacaccactaaagaaggggttctgttcaaggatggtcggctggtcataccaagagggtcaccaatggttcagaagctgataaggcaatttcatgacagtgagataggagggcatgaaggggttttaaaaacttttcagaggatgtctaaggaggtgtattggcaaggaatgaggaaggatgtgatcaagtacatcattcgtgccagatttgtcaggagaataagtattcaacactatctctagcgggtttactatgttccttacccattcctcagcagatatggacacaattgagaaggatttcatagaaggacttcccctctcgaatggttactcggtgatactggtggtgatagaccgtctcagcaagtatggacactttataccattgaagcacccattcagctctaagacagttgctgaagttttcatcaaggagatagaaaggtagcacggatttcccgagaacatcgtgtcagacagggacaaagtcttctta

SEQ ID NO: 173381 - DNA, 657 bp, Arabidopsis thaliana landsberg
actacgtcaaggtgacccaatttctccatatctcttcattatagtcatgaaagtgctctccaatctcctcagccaagctacatatgaaggaaagttcagattgcacccactttgtgactcaccaagagtaactcatttgctatttgctgatgctctgctgattttctccgatgaagcaaagcactctctgactagtataactgaagtcatgaaacacttcaaagaactaagtgggttggatgtaaattaagcaaagttagaactcttctttggtagttattcagacattcaagttgttgttctaagtgatttgcaagggacaaagcttggaatatttcctactcggtatctggggctgcctttaaaccaggccagaatatgctatacaacccttcagccttttattgagaagataaccaacaagctacatatatggacagtgaggtttctatcatttgctgggaacattaagcttatctcttcagtgatatatggcatggtaaacttttggagggcagtttttaatctctcaaagagactttatgcgaaagttgattccttatgtgcaacttttcttggaagaacaaaattaacaatgcagttggagcaataatagctgtgagcaggatgtttgcaagccaaaggaagaagatggac

SEQ ID NO: 173382 - DNA, 1660 bp, Arabidopsis thaliana landsberg
gtgtatagctttgcttgaggatttccatcacgagagtgaattaatctgttgttgaacttgttgtctagggatagcttatgtgaagttttgtcaaccatttgaatagattaaggagaccacattattcgattatcccatccttaggaatcgtttatccatttgactgcctgttatcatttctgctttgttattcacctgtctgttattgccatttctgtttttagtttcatttcatttctgtttttgcatactaggactgttagaaccaaccaactctctgctcggcttgacttagagctttctaattatatctcatatgtttgcattacaccggattggattgacaacctaaaatactacaacgacaggatagtgttttaggattaattgagtaaaaatcctactatcacttggtggtttaaatccaggaggaaaaaaatagctagaactgttggagacatacctattgcggttgaagggaacttatgaagcggttcaaaggtgcgttgggtatgtctgtttcggctgttgggagatgggatttcgaagtagttgcaaaggttggagaacaattccacgtctctttggagcaacagacttgtacttgcttggagtttcagaagatcagaattccctttacccatgcaatggctgtagctcatgataggggtttggaattcagaactttggttggagagatgcataggttaggaatgtgggcaccaacggtacaagaacctatcctccttgtacgcgatccatcggaggtggatgtccgtaagaatataagggttctctgtttaatgcctccgaaaacaaaaaaaaactctaggagacctccaaagctgcggatacattcagttggggaatatgagatcagttattttatatatatatccatattttttgtatataattcaaatgttacaatacttttctgtcctctgtagggaaataataagtcttaatttcctaataagtgtggaagatgtggaggtataggtcacaatcgtgttacgtgcaagaatctccttgggtgacactatggactctttcaaagatttgggaagttttttgtttatctatggaggaggttcttggtaggggacgtttttggtttcagtaatatcggtggccatttatatgagtgtggttatcaatggaggaggtttttgtcagtgatacgttcttggttttggtatcattgttatacattcatatgaaatatgtttgtagactattttcataacaagccccccatatattatgaagggctaagggtggtggctgaatgttgtgacatccccgctggtattgagcttctagcgcagttggtcccagaggatggcgctgcaacaatagcttgtggtatcttctctatgtgtgttggaaacgaggctatgtcggtacattttcttgagcagttcgggatgttccatgttccgttagggacacagaaagtcaggcggtggggagaggagttggtgagggagttacgaccttatcggaggataagccatgcttcctaccggaagacatttctctatccttattgcaaatgtatcccgtcgccggattgtgcgcaatggactatgatgttgcttcaagaggttttgagaacttttgcaatgattgttatctatggtggttgtcaaggaag

SEQ ID NO: 173383 - DNA, 578 bp, Arabidopsis thaliana landsberg
atggacaccaaaattggagccatcgacacgtgtaagccaacaactggtgacatcggaagtccaccaagcaacgccgtcgcaacaatccaagactccgctcccatcaccacaacctccgaatcgactctaggacgtcacttagcccgccgtcttgtccaagccggagtcaccgatgttttctctgttcccggtgatttcaacctaactcttcttgaccacctcatcgccgagccagagctcaacaacatcggatgctgtaacgagcttaacgccggttacgccgccgatggatacgctcgatctcgtggagtcggtgcttgcgtcgtcaccttcaccgttggaggacttagcgttttgaacgcgatcgctggtgcatacagtgagaatctgccagtaatctgtatcgttggaggtcctaactccaacgattttggcactaaccggattcttcatcacaccatcggtttacctgactttagccaagagcttaggtgtttccaaactgttacttgctaccaggtattaacacatttcaatatcaactaggcttgatcatcacatatatatctcctttgctt

SEQ ID NO: 173384 - DNA, 1050 bp, Arabidopsis thaliana landsberg
gtgctctcactcctacatatggatttattcggcccgattgcttacataagcatcggcgggagtaagtactgttttgtaattgtggatgattattctcgcttcacttgggtattctttttgcaggaaaaatctcaaacccaagagactttaaagggattcttgagacgggctcaaaataagttcggattaaggatcaagaaaataagaagcgacagcgggaccgagttcaagaactctcaaatagaaggctttcttgaggaggagggcatcaagcatgagttctcttctccctacacacctcaacaaaatggtgtagtggagaggaagaatagaactctacttgacatggcgatgaccatgcttgatgagtacaagacgccggatcggttttgggccgaggcgattaacaccgcctgctactccatcaaccggttgtatcttcactgaattctcaagaagacatcatatgaactcctcacccgtaaaaagcccaatgtttcatattttagagtctttggtagcaaatgttttattcttgttaaaagaggtagaaaatataaatttgctcctaaggctgtagaaggctttttacttggttatgactcaaaaacaagggcatatagagtattcaacaaatccactggattagttgaagtttcttgtgacattgtgtttgatgaaactaatggctctcaagtagagcaagttgatcttgatgagctagatgatgaagaggctccgtgcgtcgcgctaaggaacatgtccattggggatgtgtgtcctaaggaatccgaagagcctccacaagcacaagatcaaccatcatcttccaataagcatctccaccaacccaagatgaggatcaagctcaagacaatgaagaagaagatcaagaagatgagccacctcaagaggaggacaatgatcaagggagagatgacaatgatcaagacaaggaagatgatcaagaagaataggtccaagaccgcctcacccaagagtccaccaagcgattcaaagagatcaccccatgaactccatacctcgcga

SEQ ID NO: 173385 - DNA, 833 bp, Arabidopsis thaliana landsberg
aatttaatacatttatatcaagttttaatatgtttttttaaattttttttttttttagaagatcaattaaaaaagaacataaggagtaataattattattagttaaatgttggagattttttacgaaacacacaaccgacttacctaggattaacgatgatcggtatcgatcaaagtaatttaaataattaccttaataacatgtaaaagttaagatgtatccaattactaatttttcgtaatattatagatgcaaataaggtaagcagacgattaactaaaaagttatgttcgaatgcgaaaagagacaaaaacattacaatgctagattcatttacatgtatatctcaattggttgaaatagagacataaaaccagtaagcattaaaatatatatatttatacatttgcaatgtactattcctaatgtattattatattgtataatattgtcatgtatcatgtataactttctataattagactatatatcgtacaacattttcctaactcctttgatatatttttgggtaaattgcgcacagtaaccgttgacccacttttaatttcagattttgacattgtgggttgggcattttattttttagccattcagccaaaaactgaccaaaatgcccgtgacgaaactgaaacccggtttgtacgtacggaccgcgtcgttggaatccaagtgaaccgggttcgtacgtacattgttcatcgacgagaaatgcattaaatgatttctgggtttcggcgaatttgacacttgagattggaattaaaaattttaaaattggttgggctcaaaagtttttaatgctaaaaagttt

SEQ ID NO: 173386 - DNA, 620 bp, Arabidopsis thaliana landsberg
gcgtggtgtttgccgccgtgcagaccgaacatgaagcgactgctgcctattcgtcgatcgagaacatgggctggtgttgtcggcatgggcctacgctaatttctcgggatacggcataaaccgatgccgcactggccctgacggccacgctctaccatgtcgccagccacgcctgcttcaagagcctgctcttcctcggcaccggcagcgtgctgcacgcaacctcggagagaaatcttggcaagcttgggggcctgatcaggaccatgccctgggtcggctggctcatgctgctcggcgtactggccagtgcgggcctgccgccgctgggcggtttcgtgtcggagtggctgctgttgcagagcttcctgttcacgcccgggctgccggtgccgctgctgaccatgctcattccggtggtggccgcgctgatcgccctggtggcggcactggctggctatacgatggtcaagtttttcggcgtgatcttcctcggccagccgcgcgaggacaaactcgctcacgcccgtgatgccgaccgctgggagcgcgcaggcatggtctggctcgtgctcggctgcgtggcccttggcctcctgccagtacagttcattcaacta

SEQ ID NO: 173387 - DNA, 578 bp, Arabidopsis thaliana landsberg
atcgaaaacaataatttggtgattgacccaggggatatactgacctttacttcaacagagaaggttattggaaccaaggagaaaatatatgtttcttatcccaatctgcataacgatgtaagtgtgggagagaaaattttaatcgatgatggtaaactggaggtggtcgtcactgaggtggaccaaaaatcaggggatgtgaaggttagagtgacttatggtggcaatttattacccaataaaggtgtaaatctgccagatacagaaatctcattaccggctatgactccaaaagatattgaggatctggattttattatcgccaaacaactcgattgggtagcactgtcttttgtccgcaaggcagaggatatcgttgatttaaaaagaagggtgaaagaacaaaatagcaaaatcaaggtgatggctaaaattgaaatgccttctgctatggatgatttgcgcaatatcgtcaatgaatcagacggggtaatggtcgcccgtggtgaaaagggtgtaaaattgccggtggcaaaggttccgatggcgcaaagagagatcatccgcaaatgtatctt

SEQ ID NO: 173388 - DNA, 2207 bp, Arabidopsis thaliana landsberg
gttatttctctatatatactctaattatagcaatgctacttgttagattatcatatacattaatattagtaataatatagatgacaaataaacattagtaacgctacctagtgggcacgtctttagtctttgtttaatttaaacactaatatcgatggtcccgttcaggttttgtttgccatgttaatttgttgacttcgagtcttcgacttttattttttaaaatattatttttgcggggaaataatccgaaaaacctcatttattttttatttttctttttaatatatgtaatattaaattttctagaacaatatatgtatgaatttttatgtcttttaaattttcgtttatttaaattttagcaaaatcacatatccgagttaacggatcctttaattatagttgaaacttaactcatggtttttaagaatacatacacaatctagttttaaactttacaaatatattagcttagtatcgtggttaaatgtggatgaaatattcatataaaccagagtttgaatcttctttaagtcccttttagagataaggatctcgaatcaatatttccagctgctgattgatttttgcattaacgaagaagatgaagtcccaaaaaaaaacgattaaagatatggagccgagattcgaacctagattaaacaggagccgagattcgtcggagaaagaagtcgccgtaggaaggaaatcgcggaagtaatcgccgaagaaactaagacagaaatatttgacgaattgatgtttttctattttgccccaaatcacttaacctaatattttatgactattggaccgcccatgtccatcacgtccagtccgctaaagcccatgtccgttaacgaccatgaccattaatgcccgcttcataatgggcttgtccatacctatccattaagcattggaaacgagcagtccccccattttgacaactctaggtagatgagatgaggcgaaggataccgaagaagagaatactggtgaaactcaaaagaaatcagatcgaattctaacgactcgaagagaagagatgtttaaatgctttctttttcagcaaaatccaattattcaatatcgaggagaggaatgggtataaatgaacttagcaaaaaggatttgcatagaaagtttatagtttcatcattttgttgattttgctactaaaaccaaaatcaggtttgtggagattatggctcctgttttctcccgcaaggcatggcgctgtgtgtggcatatgattcaggtatgtaatggaaccaaatttctattcttctactgtcttcagcaatttccaatttttaccttgtaaccgcagaacgatttgattcatggatggggtctggactttgccgttcggaaatgtgttcaggtctgctacttacttgctttgtacagaccatatgcacatctagatcactctctcacaaattctacaaacttgttttatatcctcattaatcatacttgctttaacagaacgcacacgagaaaattggagttgtagatgctcaatggattatacatcaaggtgttccatcactagggaatcaagtatgctttcaaatccatttttatctttattgtgtgggtgacaaaactaagattttgcattttgtggactgcctttggaaattatataacagaactccaatgactatatatcataggaaaactagtccccttcaagtctctagagagagtagttgtgttaattatatagtcatactttgatatcatttttaatgcggtgtgacacattcccatttatacagtagaaacatctagttattgacgttcccatgtttcccgtccccgtatccgttttggttctacttagtttactacattatcgtgagatgtaaacgcatagaacaggattgttaaccttcccttttattctttgtgcatctgaaatcttgacagggacaaccagagcaagggaaacaaccatgggaaggggtaaatacgaatcccctagtctttttcgtccttggtattattggttatagaataggatcccgtcgtatatgctactctatctgacgtttattttttattcgcgttttcaggtgagagaaagatgcaggagagagtggacaatgtttcaggacagattggatgatgctgaaaaagcttattttgaagcatctgctcacacgaatgcttcttcacggcctcacgggtaa

SEQ ID NO: 173389 - DNA, 611 bp, Arabidopsis thaliana landsberg
cacggaggcactacactactcgctatacaaacagatgcggctataaaccctggaaatagtggtggtccagcaatcataggaaataaaatggcaggtgtagcttttcaaaaagatccatctgcagataatatagggtaagttacgtttaaaccacaaatcttggataattcatctgcttaaatttgcaatattaaaagcataatggtctaggaagtaggaagaaaacgtggaaaagggttttggcttcgaaataatatatttttgtggtttaacttcacttgcagatacataatcccgactccagtaataaaacattttttaactggttttgaagaaaatggacaatatggtggtttctgcacgttagacatttcctatcaacttatggagaattctcaactccgtaatcactttaagatgggtcctgaaatgacagggattcttataaacgaaataaaccctctgtcggatgcttacaaaagattaagaaaagatgacatcattctcgcaattgatgatgttcctataggaaatgatgctaaaggtaatcctacgtttatatatattgtaaaaccattgttaaagtttctccatgtgtgatggataattga

SEQ ID NO: 173390 - DNA, 1082 bp, Arabidopsis thaliana landsberg
  unsure (1)..(1082): unsure at all n locations
tgattcttttatctgattacactcttactgattaaatccatatattggacttcnctttttgttttatttcaacagaccaatccntcagggctaaaaaaatatactcaatttccatttactagctcattgaatctaattgtaactactattgtctttgttatattgaatagacattgtcgcttatatattgaattgatattggctttcttatattgaatcgatattgtcgtttttaacttttttttttctaccgtaacagacgtaaaaaaaaactaacgacaaaaaagatcatgctatatatacataagtagtgatagcacatcctcaaagtctcaaagagaatttaaagaaacacacagatgcttgagggcggagcaatatggggtttcaccagtacgactatggcgagtcttatgttcctatggccaatgtataaacagtttgtgccataccaactacgagaatacttggaaaacaccattcagaagtatttggcaaagttgttccgcagggactcaaattttgtttacatcagattccctgaatacacaggagaaggtctaagtaaaagccgagcctacgatgagatacgcatctatttatcctcgatatcacctgctagagccaagagattaaaggccaaagaatcggaaaacagcaaatcgttggttctttgtttggacgacaacgaggcagttgtagttgtattccaaggtgtaaacgtggtatggtcttccaccgtggtagataaagaggatagacataattcgaaggagggaaggtacttgactctgactttcgaaaatcatcatagagatataatcacaaacacttatattgatcatgttttgagagaaggaaaagagattgcgttaaagaacagagagaggaagctctacactaacaatgacagtagtagttattcgtcttggtgggaaggactatggagcaacgttccttttaatcaccatgcgtcgttccagactttgggcatggatcttgataaaaaagaagagattaaaaaggatttgattaagtttactaaaggaaaagattattataggaaggttgctaagccggga

SEQ ID NO: 173391 - DNA, 508 bp, Arabidopsis thaliana landsberg
  unsure (1)..(508): unsure at all n locations
gtgaggcatatgttgctgtcttgtgcatcaatcatctatttctgtggtccaggtcaatatctcaatctttgagtgtgtagtctactcaggtgcacccatctgaaatggctccagcgcagataagaggagctttcaacatcggttttcagatggctatctccattgagatctgagtggcgaatgtgctagcctatggagcatcaaagatggctcgtcatggatggagggtttcagtaggtttagcagctgtcccagctgttgttatggcgagtggatcagtttttttgccagattcacccaactcgannnnnnnnnnnnnnnnnnnnnnnnnagcagcaccaatgttgaaaaacagacgtgcagctgtcaatgttgatcatgaggttctagttctcatcgctgctgttctagcagccggagaggtggtctacccatggaagagcatcatggagagtatatataggccagcttccatagtaaggtcggccataccctttgtcctccagat

SEQ ID NO: 173392 - DNA, 728 bp, Arabidopsis thaliana landsberg
  unsure (1)..(728): unsure at all n locations
agattaagtttccaactggtagcatcttctatcagttggtatctttggagctatatacaaatanagcagagtggtggaatctgcttgtgttgatgctcgatagttctcctaaattgcaagtcctcaagctcaacggtgtaagcaatgttcatctttcaccgatttttccaagttggtttgaaattttgtgatggatttaataatagcattgagtgtgtttccccttcgttggtcttagaaattgtctggtgaaaacaatcatttagccagtatgaattgggatcaacccaaagaatgttcctggatgtttgttgtttaatctcgagacattcatgtggaaaggctgcaaaaagctaggagaagatgaaaaagaggtggcgaaatacatcctaaggaacacaaatcgtttgaagagggcgactttcaccagagaaatctatgaagagaacaatcctcaagacatgtttgagaatcttgaaatggtggaggaattggaaagtgtggtcagagcttcaaagtcatgcaagcttgcgttcgaaactagcttgtggtcactatcctaatatataagtacagtagtgtcttttaattatctgtttattaataggagaagtagtgtctccactttctactttccacttaccactttctaacttccttgtttctaggatcaagtttgcttctgttttgtatttaaagacgttcacgtcaagaagagaatgttataa

SEQ ID NO: 173393 - DNA, 576 bp, Arabidopsis thaliana landsberg; identical to SEQ ID NO: 75442
  unsure (1)..(576): unsure at all n locations

SEQ ID NO: 173394 - DNA, 1063 bp, Arabidopsis thaliana landsberg
gaaaacctcaatgaaaataattaaactgactagttattttattaaacagccttgcctgggagctccaacggtgagaatctcaaacgcctaacttgctgttttcgatcttaatttcagttcttataaatagatacttatattaagtaatgaagctataaaaaatgaaattaatgtaatgaaataaatgggcaggcggttacgtttgtggagtgtaataacttgagagtaagtaacattaggttggaaaacgcacagcaaatgcatttgacgtttcaagactgcaaaaacgtgaaggctttgaatcttatggtcacatctccggctgatagtcctaacactgatggcattcacgtttccggaactcagaatatcttaattcaagactctatcgtccgtactggtatattaatcaatgaaccaccttaatataaatgtttttgacattttcatgcaaattagtgaataaattaaatatattttgatacaaaaattaataatggataataaatagtaatgtgttgggtttatttttggtgatgaaggtgatgattgtatatcgatagtgagtgggtcggagaatgtgagagcgacaggcattacatgcgggcctggtcatggaatcaggtctaaccatctctctccctaatttcacctaaactttttgtttttgtcttattttaagcaacatactatgtgcaatcaacattctatatctttgttggattactatcaactaatttttatcaacttcaattggacattttttttaatatccatcattttttaatgagggacggatattataagatgcatgcatgcccaaaaatcattttgtcatttaaaatattaacgaaaaagataaatgcaatgtttttaaatggtgttaggcgttataacacaagcatatgtgttaactcaatattattgatattttgttgatttacatgtaaaacagtattggaagtttgggagaagataactcagaagcatatgtttaaaatgtggtagtcaacaaagcgactcttataggaaccactaatggtgtgagaatcaagacttggca

SEQ ID NO: 173395 - DNA, 539 bp, Arabidopsis thaliana landsberg
  unsure (1)..(539): unsure at all n locations
gagtccctctaacaaaataatcctatgctattcgggtacggtagtgaaattacctggaagatgtagccgaaaaaataatgatccgtttaaactgttgcttttcagcagcagatagaacaactggcctcgcggctggcggcggtaatttggttgccnccgcacagcgtatggttgattttgtggaaagacggctttcggtcgatctgcctaaaaactcgtatctgcccggcaccaaaagtgtagaattgcaaaatgtgttgcctgcccgtattaacgaacgcctgcggaaggccttgccggcattcggtaaaaaaatgaaggggtattatactaatgaggctattttggtaggggtggagtcgcgcacctcatcccccgttaaaataccccgcgacaaggaaacgctgcagcacccgcaggtagctggtttgtacccatgcgctgaaggtgccggttacgcgggtggcattatttctgctgctattgatgggatcaattgagccaacccggccatggggcttttaggatgattcagttta

SEQ ID NO: 173396 - DNA, 790 bp, Arabidopsis thaliana landsberg
cggcaagtctcgatggatccggaggcgaagctcatactactcatcttgagattcaatgctttgaaaagctatataaactcggatccagaagaggtcatgtcagtgattactcaaataatctctctggttaagtcaatggtgacggagacggagacggagctgatgtcactcatctctgaaacaatcgattttttcaaggagatggatttggagtcccagccgaattcgctaaggaagctcatatcactcatttctcgaacgcatttcgtcaactcttcagattgggaggagccggttccggagtctacgctcatgtcactaatcaaggaaacatggagtatgaagccgcagccggagctcatatcactcattcagaaaataatatccctcgtcgacaactcttcggagctgaagctcaaatcattcattactcaactaatctttctggacgataatttgtctgagagactgaattggaattactctcggaggttcttgtcactcagtagatatataatctctctggccacctcagtggattggaatttgcagccgaagcccgagtcggagctcatgtcactcactaatcaatctatctctgtcttcaactctatggatgttgattctcagcccgagcctctacggaacctcatatcactcatatcactcgcttctttcagatcctctcccaccaacttaagatattcgaagccgaacagggtggatatcttgaacctttttaaagacaagacggttgagtttgaaacgggctcacttacgaaaagagttg

SEQ ID NO: 173397 - DNA, 1539 bp, Arabidopsis thaliana landsberg
tgaaccaacatttataaaaaaaaggtgagactaataagatatataccgatattttctatttttatttatctaagatacatataatttcctttaattatccacacaagaagagattcgatcaaactttccctttgaatcaggtcagctcccggtacgctatcttggcttaccattgatgactaaagcaatgacggcacatgattacttaccattgatcgaaaaaataaggaaacgaatcagctcctggacaggtcgattcctttcttacggtggtagactgcagctcatcaagtcagtgctaatgagtatcacgaatttttggtcctcagcgtttagactgccgggaaattgtatgaaggaaatagaacgtctctgctcggcattcttatggagtggtcctgatttaaagactcataatgcaaagattgcttggtcaaaggtttgtctccctttgtgtgaaggcggtttaggtctccggccacttaaggagataaacacagtctgcggacttaagttaatatggcggatacttgcctcacgaacctctctttgggggcaatgggttcagacctatcttattcggcgaaacaatttctgggcgataaaaagcctcttctttccaaggttcttggagctggcgtaagtaacttacactcagggacgttgcacgaagttttcataagaaggaaattcacaatggtagaaacacttctttctggtatgatcattggtcttccatggggactcttgttgatgttttgggtgctcgaggatgcattgatctgggaattacaacaactacgaatatggaaaaggtgttcacgacccgacgtagtaggaaacaccgtggggacttactggtcagaattgaagctgagatagaagctgcaaaaacacgtcatcaacctgatattgaggatattgatctttggaagccaagcacaggatacaagaaaactttctcaacccgtgagacttggaaactcattcgaatggcagaaccagtttgcgaatgggctaaaggtgtatggttccccaagccacaccaaaatttgctttcattacttggttgggtatgcacaatcgtctttcaacaggggaccgaatgcaaaagtggaacggccaagctgactctacttgcgttttctgccaagaccctctggaaacaagagatcacctattcttccactgccactacgccaatcaaatttgggaaattatagcgaaaggcttcatgggcgtgcagtacacatcaaactgggaccaacttgcctcgctcattgcgggaacatcactcgagcccttcctctgtttcttttgcggtatgctcttcaaaccaccatttacacaatctagagagagcgaaacaatcgtcggcatggagaaaattcaagaacagtcaaccaattggagaaaaccatcgacaaaacaatacgaaacagaatcacccttctccgcaactcgggaaatcaaaaatatgagaacctcctctgtttttggttctccactagaagctaatcttagtcttacatagaactt

SEQ ID NO: 173398 - DNA, 1230 bp, Arabidopsis thaliana landsberg
gaaacaactttcagatcgataaaatgataatacataatgggacgataggatacttgttatttggaacgcatcaacatcttgaattcaagcgacatctggtttggtattctagtcgttgttctccttatgacagcatggtagggaaaaccgtgacggtttgaaaaggtaacgtagaagtttgcattcgctgccttggccttcatcgtcagcttcggctcccaggtttgcacaattacatatattagctccaatggctttgcccactccactagcttgatagatgcccggtgggagaacaatgtgatttccgcgtacagaagaaacaattcctggtgtcttccatctctgattttctcaacaagtagaatttcggcttattaagcataaacaagagtaagaacgtagtagtaaattaccaaaggtggagccgcccagtctaccgtctggggatcagaacataagtctttgtagatttcacattccggcctttctcccggagccggtggttgatattttggtgaatcgggtgattcaaggtcatcatgacagctgtcagttggtgattctgaagagggcaaggatggttcatattcctcctccggtgtaacaaagttgtcatctggatagccttcagagtagaaacctcttacacgttcccgctcatatgggtacggtggatcaggaaaaacgacgaatccctcagaagaagaggaaaaacaatttgatgcaaatcatgaaaatcgctggtcatccacaataaaatccgattaccttacgactgctgacggtgcgactataactgccttctcccaggaacattcttggaaaatctcacccaaccctacattcacccgcccaagaacattgtatcgcagaacgatatggttgatttgtgggatgtaaagatcggtaagactctcgagtctcgacaagacttatgtttctgaggaagaactcctcaaaaccatcaaaggtgatcagttaaaccataaaaacagtttctgatatccaatattcatcagtccaaactccaaagtattaaacgagtcacttgcatttgcagagacccagcctccaatggatttttttgtgggtttgatccatacggtccttgcgaagagcgactttacctccttgactatagatccttcttttggagttaagacttctgagctttatcctgaggtcaagtacacaagtactgtcgatgagtttcttaaataatttgtc

SEQ ID NO: 173399 - DNA, 998 bp, Arabidopsis thaliana landsberg
taagtataggtcctcgaaaagacaggggtttacaaactctacgagctgcgatgtatcaaagactgcctccaaatcaaatggtatgtgtagtgtcatttttgcatgttcagtaaacttatatgagaaagatacactctgattattttcggtttgttctttctttaaaattggtatacatagacatacttataaagagctttggtaattacaggaaagcaagaaaaattgcaagcagaggaaacgttttcccgggaagagcgtcgcagcttgctgggaaagaatagtgacgaaaagagagggtctcgaggtgaagtaactactttaaaggctgagggcggattcatagggagacactcagatggtaaaggagatttaaatagtggctcgcatgattcatcgcagaaagattcaaggcgattgacgaaattgaaaataaacaaacatcctcccgagggccaagatagtgaagcccttagcattgcatatgaacgaagttaatctggtcaaggacatacgacattgaggaaaagagcatcaccttcagctgagaagtcagcgttcaatgaagatgaagatgtatcgctgtcacgagaagacagtttgttagacgaaatgcttcacgctagttggattctgaagaagttggggaaagatccgaaaggaaaaaaagttcaaatacacgaggcctcggatgattcatggtatatgagattatattgttttttgctattgaacttctttaattattccaagtctctaacaaatgaggaaccaaaaaaacagggagaaaggagttgtaagtgaagtaggaggagctggaggcacctcgaagttgatggtgacgctagagaatggaaaagtgaagacggtcgagctcgggaagcaaggggttcgatttgttcctcagaaacaaaagagaacgagaacctgaggctatctattcttgagtatccacaaaaagaaaaaacatgagcttcttcttcttctttatcttctat

SEQ ID NO: 173400 - DNA, 896 bp, Arabidopsis thaliana landsberg
atggcagaggctattgtttctgttacagtgcagaagctaggacagttgctcttggaagaaccgttgttcttatttggtataggtgaccaagtgaagcagctgcaagacgaattgaagcgtttgaattgctttttgaaagatgcagatgagaagcagcatgaaagcgagagagtgcgtaactgggttgcaggcattagagaagcttcttatgatgcagaggatatcctcgaggcatttttcctcaaagcagaatcaaggaaacaaaaagggatgaaaagggtgcttaggaggcttgcttgcatcttgaacgaagcggtttcacttcatagtgttggctcagagattagagagatcacctccaggctttctaagatagcagcaagcatgctagattttggtataaaagaatctatgggcagagaaggtttgagtttgtctgatagtctaagagaacagaggcaatcgtttccatatgttgttgagcataatcttgttgggttagagcagagtctagagaagttggtgaatgatttagtttccggaggtgagaaactaagagtcacgtccatctgcggaatgggtggtttggggaaaacaactttagccaaacagattttccatcaccataaagtgaggcgtcatttcgatagatttgcttgggtatatgtttctcaagactgtagacggagacatgtttggcaagagatttttctgaatcgcagctacaaggatgaaaatcagagaatactcagcttgagggatgaacaacttggagaggagttgcatcggttcttgaaaaggaataaatgcctcattgtgcttgatgatatctggggcaaagatgcttgggattgtctgaaacacgtctttccacatgaaacagctaaactagtaat

SEQ ID NO: 173401 - DNA, 852 bp, Arabidopsis thaliana landsberg
atggtcatttcaccagatctgactgatatctctaatcagcactaccaccaaaatcttatacctttaatcccaaattacgattctcaaaatcagaatttggatactaatcaaaaccatttggtttacaactcttcctcatataaaattccatcaaacgacccattaatgagtatcaaatcctactcaaatgttgatatctctgaccaatctatggatagcatagccaacaacggaaaaatccatatgactgacaaccccccaatttttgcataccctaagggtatattcgaaaatttttatgatttgcggggaaatactataagagatgagattgtatacaatgaagagctgtctaataagggatatgagccaactcttgatcagataatgggtgaacctcaatcatttaatgtgccagtgccagaatatatcaaaaacacaaccaacgaaatcatgaatcaaagtgaagatgataagatgaaaaaaacttatcaaaagaagaatataaaggtggtgagcacaagcaaatatttgaagaaaagtgacatcgacaaagtaaactggacagaatctgaggacatgtaagtcttcatatttttttcattctcattaaaacttaaaactattattatatttcatccttggaaattcttatataattattttttattgtaaaccttttatttattttttgaggatgtgaaaatattttgtaatatatatagaaaattgaaagagacaatggcgcttggacccaaaacaaatggacaaaggtcgcaaaaaaaatcgaaggaagaacaggaaaacaatgcagagagaggtggtataaccatgctcgtcctaacacttttc

SEQ ID NO: 173402 - DNA, 1060 bp, Arabidopsis thaliana landsberg
gtcagctaatccaattctccgaccgtcgatttctccggtgctgcgtgctacgtgagtcgatactgttggatcgaattctttatcgatctttgctgcggctaatctggaaacgatccttctttagttcttccatctcctgtaagtattatagttagtacaatgtaattgaattgaatcaatgtgtaagcagcatcaaaccatatttgcagaatacaatggatggacgaacttaaattgaatcagacactgatacatctcgtggttcaactggtactaatatattgtttatatttgtaggaggcgatgaagaagaggatctagacgaacctacactttgactatggagggtaatatacagcagaccatgagtggagttgcaaaaattcaatatacggtatagtgtttaagacatcatttttggagagaataacatatgcggatttaatagataagatctgtagaaagattgctctaggtggtgagaaaaggaatctgaaattgagttacatgatatctaaagcatggagagagtcttatattgtagatgatgaggatgtgttgatatatttaacgttattggataaagagggatttagaccagttttgcatgtagagttatgcagtgatttggaaagtaataatagccaagttccaatagtagagcgaagaagttcatgcggtgtgaattttggggaattggctgccaatgttgtaatggttgcggatgcaaatacaggaattctgagtactaatgaacctattattgaactagaggaacagcgtgagacagttagtgaacctatgatgctagagaatggagtttctgaaactgttattgaaccgctgatgatagagtgtggggttaatgaagattctgataatgattatgttagggaagaatatgttcatcttgcacgtccgatacaagaaagtgtggctgccgttgtcaaagaatgggaagatggtatttggcgttgaaaagatcaagaactttcgtttattgaagcactataggatttgattaatagagctgcaaggagggattgttgatgtaaaacta

SEQ ID NO: 173403 - DNA, 1612 bp, Arabidopsis thaliana landsberg
gagctttgaatgtatgattaaaggctcaaagaagatcaacgagcttgatgagccctccacgtccgaggcacaacccgtggcatttaaggcgacggaggagaagaaggaggagtcaacaccgagtagacaaccaattgacacctccaagctcgacaatgaggagatggctttaatcatcaaaagctttcgccaaatcctcaagcaacggaaggggaaggactacaaatcccgttccaagaaggtttgctacaagtgtggtaagcccggtcactttattgctaaatgtccactatcaagtgacagtgacagggataacgacaagaagggcaagaggagagaaaagaagaggtaccacaagaagaggggaggcgatgcccacgtgtgccgcgagtgggactccgacgagagctccaccgagtcctcctccgacgaggacgccgccaacatcaccgtcaccaaggtactcctcttccccaacgtcggccacaagtgcctcatggcaaaggacgtcaaaaagaagaaggttaaatctaaatcctccactagatatgagtcttctagtgatgaaaatgctagtgatgaggaggataacttgtgtaccctttttgccaaccttaacatggaacaaaaggaaaaattaaatgaattgattagtgctattcatgagaaggatgatcttttggactctcaagaggacttccttattaaagaatacaaaaagcatgttaaggttaagaatgcttatgctctagaagttgaaaaatgtgaaaaattatcttgtgagctaagcacttgtaatgatattattgccaaccttagaaatgaaaatgctaaattaattgctaaggttgactctaatattatgttttgggtccgaccgcacacccggggtggcccctcgaggtgttttaggagtaggacggtgtcgccgactgtagcaaaatggttcgtgccagatgcacgagggacgatggacaatgtttacaggttcgggccgctttgagatgcgtaataccctacgtcctggtgagtatgctttgtgtacgaggttacaaggtagctctccaaagcgtagagagttgaggtggacggtagagtagtaatggggtcgatccttttgaaggggtgccccctaggccttatatattcgaccgtggggcattatatgtggatatgataacaacgtaagccaggataatagtgaactaactgggtctgtctccctataattcagccgactcatcctcgcccagttccgatgcgcggggctcctgtgcggaaaggacgggttactgatatgattactgctcggacgctgttgggccgtctgggcttgctccgacccggccttgcgctgatctgtctcactgttcgttcctcccaggcccacgagggggatgaccttacgaattatggggcctttggatctttcgtgaggtcttttatccttctagtggacccgggggatatctgtccccccacaaatacgaccctttgtcatgccaatcgtcatcaccaagtctcgcctgtggtcgttatatttggaccataccattcacaatattctctaagacctccaaggaattcatcggtcatgttaataaaatcgaaa

SEQ ID NO: 173404 - DNA, 504 bp, Arabidopsis thaliana landsberg
ggcctgtttactacgtcatgacatttaccgacaaactgaacgcttcctgggccgactcggggtcgctgcttatggtgggccttgaccccgacccaagccgctttccggccgatctgcaagggcgcagcgacgccattttcgaattttgccgggccattgtcgatgccactgcgcagtatgcctgcggcatcaaaccccaaattgcgtatttttccgcaaaccgggctgaagaccaactcgaagccctgtgccagtatgttggccggcaccaccccaacctgcccattgtgctagacgccaagcgcggtgacattggttccacagcaaagcagtacgcccgcgaagccttcgagcgctacaaggccgacgccgtaaccgtgaacccgtacatgggtttcgattctgtggaaccctatctgcaatactgcgacaagggggtggttgtactgtgccgcacgtccaacccaggagggttggacctgcagtttgtggaatcggccgacc

SEQ ID NO: 173405 - DNA, 1073 bp, Arabidopsis thaliana landsberg
aaatcaaatcacaagagatggtagacgaaatcaagatggagtacaatatgattgttagtgtttcatcagtgtaggagagcaaagacgttgcttgcagagaaaagaaaagctagtcatgaaactcattttgcaagaatatgggattatcaaggagagatacttaaaacaaataaaggttcaactatagagattgagacaattcccgggcagtacccggaagcaagcaaagattctaccgtctctacgtttgttttgaagctttgaaaaactcgtggaggaaatcatgtagacctattattggattagatactgcgtttatgaaatgggatatcaaaggccaaatgttagctgcggttggtagagatggggataacagaatctttcctattgcttgggcagtagttgaggtagaggataatcctaattggttgtggtttgtgcaacttctcaaaaaagatttgggacttgaagatggagcagacattaccatcatctcagataaacacatggtgcgtcttaatataataatttccatgtttgtttcttattatagttttttatgttgtttgtttttatgtgacagggtttgctaaacgcagttcatatcgagcttctgaaagctgaatatcgaatgtgtgctagatagacgactggtccaggaaagtttcaatctacttccttaaaaccaaagacgaagcattcgatgcctttctattatggaaaaagatggtagaagttcagagtgaaagaaaggtgaagaggttacgcaccgacaacggtctagagttttgcaatcataagtttaatgatttttgcaaacaagagggaatggtgagacacaggacgtgtacctatacaccacagcaaaacggaattgctgagagacttaacagaactatcatgaacaaggtgagaagtatgttgagcgagagtggtctcggtcaaaggttatgggctgaagaagcttcaacatcagtgtatctgatcaacagaacaccttcatcagcgattgacttccaaattccagaagaaagatggacttcaaccacaaaagacttgtcaggactcagaag

SEQ ID NO: 173406 - DNA, 804 bp, Arabidopsis thaliana landsberg
tccgtgcctgtagatacgctgataaattcttcgtttgataggatcactaatccaagtcccacttcctctaagggtccattatgggtcaattcatactccgagcctcgttgaacttccttgggcctcaaaattcaaagcctctctcaggaagctcaaacagatgacaccttcaaccttcttagaagatggaacccccatggttgtagctccggcttctgtcctgttaaaaactgctgagatgtggaaaggacatattgttgctcaattccatagtctttggcctcctccggggaagattttcaatgatttgaatcccatttgaggtcgttatgggagcattacggttcgtctgttctcgaagacggcggcgttgatattcattccttctccaaatactcgccaatgggtggttgataatggtttttgacaggcaggaaagtgttcttgtaccgtttatcaatggtccttagagggtcctctagagcctcaagagttatagacagcccagacatgggccattctaaaaaatgtccctccccagttatactccttagaaggaatcagcgtgattgcgagcggcattggcgagcctcttcatacagaaaaatcaagactcgatcctgtcaatataggaagaacaaaggttaaggtggttactaatttaggaactcctttgccagacttaattgtggtccgtgatgttcagggtaatattgcccgtgttgcagtgacgtatcctcgacctcctcctaagtgtttgaattgtggcgatatggacacttgttgagcagatgttcaaagcct

SEQ ID NO: 173407 - DNA, 1888 bp, Arabidopsis thaliana landsberg
atgcctgagtttgaaaaattaggtacagtcacactcacacacatcatttcaattcagtttgaatgacactaaagtagcttcagtagctgaatctcttagttttgcaactctagctagaacaaaaactattcagtattcacatccgagttgactcaattccttactcagtattcatatccgagtaaagtaaaaaaaaaaagctaaactctaaatctagaaccagtgagaattcggcatgaagctgcagctatgatttcaaaccaagaaactaccaccgaaacagaattcaagagattaacatttaattcgatgattttggtagctcaaaattaagaacaaaatcaccaattaaaaaaaaaaaaagctgaactctttaagcttgagaaagtcaactaggtttaacttcaaaagcaaaaagacagagttaacaagtagcttcttaggactgtgaaggagaaaactcccagaaaaaaaacaaaggaagaaaaaccctagaaaaaaaggttggcttgatgaagaaactgacctggaaaaacgaaatcttgaaggtgcacaagtaaagggcttgattcgaaatcggattgaaacaaagaaacagagagagacacgatccgaaattccaatctccgagacgtaattttgtaaacaaatctaccagttccccatagaccctcgaccaaaatttaacgggaaattacaaactaaaccctatactctttatttttaccattaaccaaccctactatcttataattgcaaaacccaccccgtattttcaacacctgaaattcaattcactctcactctcactctcactctcactctcactctctcactacttcactcattcagcagatcctcttcattctctattcttaactcattaatggctaccagattcaagcaccagttttcaatctcactagccttgacattcttcttcttcttcaccaagaccttctctttcacagagaacgaggaacttggtaaccttctcagattcaaagcctcctttgatgatccaaaaggctctctttcaggttggtttaacacttcttcttcgcaccattgtaactggactggtatcacatgtactagagctcctactctttacgtctcttccattaaccttcaaagtttgaatctttctggtgaaatctctaactccatttgtgacctcccttacctcactcaccttgacctctccttgagcttcttcaatcagcctatcccacttcagttgtctcgttgtgttactttagagactcttaatctcagctctaatctcatctggggcacaatccctgatcagatttctgagtttagttccttgaaagttattgactttagcagtaaccatgtcgaaggtatgattccagaagatttagggttattgtttaatctccaagttctcaacttgggaagtaatttgctcactggtatcgtccctcctgctattgggaagctaagtgagcttgttgttcttgatttgtctgaaaacagctatttggttagtgagattccttcttttcttgggaagctagacaagcttgaacagcttctgttgcataggtcagggttccatggagagattcctacttcgtttgttggtttgacaagtttgagaaccttggatctgagtttgaacaacctgagtggtgagattcctcgatcattaggcccttctctcaagaacttagtgtctcttgatgtctcacagaataagttatctggctctttccctagtggcatttgcagtggtaaaaggcttattaacctttctctccactcgaatttctttgaagggtcattgcctaactccattggtgaatgcctaagtctgaagaggcttcaagtgcagaacaatggattttctggtaggtttcca

SEQ ID NO: 173408 - DNA, 468 bp, Arabidopsis thaliana landsberg
atggagaaaaatgcagagaagaaaagaatagtgttggttccatttccattacaaggacatatcactccaatgatgcaacttggtcaagcacttaacctgaaaggcttctcgattaccgttgctcttggagattccaatcgagtaagttctacgcaacacttccctggttttcaatttgtcacaatacctgaaaccataccactatctcaacacgaggcactcggagttgtcgagtttgtggttacgctcaacaaaacaagcgagacaagtttcaaggactgtatagctcatttgttgctgcaacatggaaatgatattgcttgtatcatttacgacgagctcatgtacttctctgaagctacagctaaggatttaaggattccaagtgtcatattcaccactggtagtgctacaaatcatgtttgttcttgtattttaagcaaggtcaacacccagaaaatggtcttt

SEQ ID NO: 173409 - DNA, 288 bp, Arabidopsis thaliana landsberg
ttattttgcacacttaggcatttaggatcatcttgcatacatattgcatgttttggtgtattttcaggtgtagaaggagcttacaaggattctactcgaccctatactctatccaaccaggatggaagcagtagagcattctactcgaccagttcactcgatctaggcagccacagaggaggcagcaattcactcgacccatttactcaatcaaggcagcctcaaaagaaacttcagatcgatctactcgcccctcctactcgatcctctactcaaaccatttactag

SEQ ID NO: 173410 - DNA, 722 bp, Arabidopsis thaliana landsberg; identical to SEQ ID NO: 14890

SEQ ID NO: 173411 - DNA, 556 bp, Arabidopsis thaliana landsberg; identical to SEQ ID NO: 80166
  unsure (1)..(556): unsure at all n locations

SEQ ID NO: 173412 - DNA, 1436 bp, Arabidopsis thaliana landsberg
gagttgcactcccttaataaaagaaatgtctttggacgtattgtcactgcatttgagagtgtaaaacctgttggatacgagtgggtgttcgtgcgaaaaagaaatgaaaaagatgagatcacacgatataaagcccgacttgttgcacaaggtttctctcaaagaccaggagttgattatgaagaaacatattctcgggtcatggatgcaattacattcaggtacttaatgagcctttcggtatctaataatttagatatgtaccttatggatgtagtgacaacttatttatatggatctcttgataatgatatatatatatatatatatatatatatatgaaaatctcggaaggattaaattcttgaggcattagactcatcaaagtctaaagatatatatgcggtcaaaatacatcaatcactttacggattgaaacaatccggatgcatgtggtataatcgtttaagtgattatctacttaagaaagggtatgtgaataatgaaatctgcccttgcgtcttcattaagaaatacgcttcggaaactgtgatcattgttgtttatgttgatgacctaaatataattggaactccaaaggagattgatgatgcacgaactcatatgaaagaagagttcgaaatgaaagatcttggaaagacaaaattttgtcttgggctccaaattgagcatttccaagatggtatatttgtgcatcaatccaattatacaaaaaggatttttaagcgctttgatatggataaagcaaatcctttaagtactccaatggtcaatagatcgttaaatgttaaaagtgatccatttagaccttgtgaggataacgaagattttcttggtcccgaagtaccttacatgagtgccatcggtggacttatgtatcttgcaaattgtattagaccagatattgcttttgctactaatttgcttggaaggtacaattcatcccctactcgaaggcattggaatgagataaaacacatcttccgttatcttcgaggtactattgatttagattacattatcctagaaaatccgagtttggtctggttagttttgcagatgcagggtatctatcggaccctcataagtttagatcacaaaacagatatgtttttaccattggaggaactgcaatctcgtggcgttctcaaaagcagactatagtcgccacttcatcaaactacgcagaaataattgctctttatgaagcatgtagagaatgtgtttggtttagatccatgactaaccatattcaagaagcaagcggattaggcatcaaaagagagccaacacgaatatatgaagataatgttgcatgtgttgctcaaatcaaagaaggatatatcaagagtgacaaagcgaagcatatacctccacgattcttctcctacactcaagaactcgagaagaattag

SEQ ID NO: 173413 - DNA, 2095 bp, Arabidopsis thaliana landsberg; identical to SEQ ID NO: 31209
  unsure (1)..(2095): unsure at all n locations

SEQ ID NO: 173414 - DNA, 1112 bp, Arabidopsis thaliana landsberg
tgtttcccgctttggagaaaaacggtagcagccattggaatcaggctgtgaagaacttgacagagaatgttctcaaggttttgtccgagacaaatcctgatttattcgaagaatgtttgcacaagttccaagaagatcagcaaaaagcagaagatactaaaaagaagaatggagaaacctggagacagctagaggagattgttgcttcaatggcgaagtaagagttttttctgcactttacgtgattcaacaagaaatcggtttattgttttgttttgtttcctttacgcctgaaaggtatatacatttactttgctttgcttgcttcatttaagtatctggtttcgactttaagactagtttaattcagttaaacagtgtgagattttacctttttcagttcttgatttgtctgtatacttggttcatgtaaacatcttgttatgaaaacacgaattttctattgtctgaagtcacttagtttatcagtgaaagagattgctctaatataaaaattgtttctggaataatgatttcgtcctttagtatacagaggatctgttggcattttcctgcaagtatctttggattttgtctgttaaaaggttctgttacaacaggtttattcttctaaccaagaaaccgaagaaaagctctctgcgatgactcttagtcggtttttcgtcaggaggtttcaccagatgagagttgatgttgtctccagagatatcatcaaaccatcatctccaactccaaaccacttaaagaagtttaaactctctcttttagaacagctcggtccaacgatctttggtcctatggttttcttctattcagctaacaacagcatcaaaccaactgagcaattgcagatgctgaagaagtcgttatccgaaactttaactcatttctaccctctcgctggacggctcaaaggcaacataagtatcgattgtaatgactcaggcgctgatttcctcgaagcacgagtcaattcaccgctttcgagtctcctactagacccttcttctgacagcttgcaacaactgattcctacatctgttgattccatagagacacgaaccagactgcttcttgctcgagcgggtttc

SEQ ID NO: 173415 - DNA, 378 bp, Arabidopsis thaliana landsberg
catcattccagtctgttcatgatggtgggtttcagtagcccatgcggatccagggatgtttcgtcgccactgcgcaccaagccgctgtcttagtcgtcgtctatggagtattcgtcgtccttcaattagagtctgatcaacttagaaggcaaaacgagtgagccttacccaggaggatcgccgaacatgggtccattcgcagggcgagttccaactctaaagattcctgcttggttcagtcataaggctcctcaagccgaaaggtgccagcagctgaaagagtccctttctcgtctccatctcatttctgtctgtgaagaagctcagtgtcctcataccggcgaggttagctgtttcagatcggctgtttatgcgtct

SEQ ID NO: 173416 - DNA, 463 bp, Arabidopsis thaliana landsberg
atggaaccggagaagaatccgaccacagtattgagtgccattacaagaccttcgtgggcgtttcttctccttgttttcaccgtcttagcgattctctctctccaaatctcttccaattcttttctccctctctggatcccgacttctcaatatgacgaccctgttacctgctccgggtttttcaatcacgacccgttccctaaccggatcgttatgtcgattaccgatttcggcggtgttggagacgggaaagacgtcgaacacggccgctttccgccgcgccgtaaggcaccttgaaggttttgcggcggagggtggggcccagctcaatgtcccggagggcacgtggctttctggaagcttcaacctcaccagcaatttcacgctctttctcgaacgcggcgctctcattttgggatccaaggttatatcaaagttttgaattctttaacacattgataaa

SEQ ID NO: 173417 - DNA, 524 bp, Arabidopsis thaliana landsberg; identical to SEQ ID NO: 46432

SEQ ID NO: 173418 - DNA, 440 bp, Arabidopsis thaliana landsberg
tctaaggggtgaatcctccgaagctgaggaactcgtgaaagaaaaggcgtccaaaaagctcacaaacccactagaaatcctctggaagtcattcagcctcgtgttctttgcggtaagaaagaagaacccctttgcgtttgtcaagaacttaaattaaaccatccacattttgataattgagggttctttgtctaatcaggaatggggagatcgatcaatgcttgctactgttgcgcttggtgctgcacaggtatgattcacaccatcccacaacaccacaagctttagctcactacaccctaaacatttctctgtttcaaatctgtgttatagtctccattgggagttgcgagcggagctattgctggacattagtagcaacagtgcttgcaatcatgggcggcgcgttccttgccaactatatctctgaaaactggtat

SEQ ID NO: 173419 - DNA, 1816 bp, Arabidopsis thaliana landsberg
aaaaagtgttgactttcacaagatccagtcaactttaggagccataagcttcacggagtttagaaagagcgaggtttgggtcgcgttcgctacactcttctacgttgaccttcttggtacgaccggagtactctacacaatggctgagatcggaggattcgtggaagatgggaagtttgaaggagagtacgcggcgtacttagtagacgccggctcctccgtggtgggatcggcgttaggtgttacaacgacggcgacttttgtggagtcttcggcggggttgaaagaaggagggaaaacggggctaacggccgttatcgtagggttgtatttcttggcgtcaatgttttttacgccgttagttactaacgtgccgaggtgggcggttggaccgtcgttggtgatggttggtgtgatgatgatgggagttgtaaaagatattagatggggagagactaaagaagccgtgacagcatttgtaacgatcttgcttatgccgttgacttattccattgctaatgggattattgctggtattggtatatatcttgcattaagcatgtacgatgtcgttttgggagttgcaaaatggcttaacggggttagaaaacgggttatgagagagcataatcaagtttcttccgtcgctaccgtcgagatcgtttgattattaacgataaccgatgtcacaaaactggttttagtggtgtgtgagtgtgtaccggaagtggtggaatttttcacatggtcggtcgttggatgaccatgcaaagacccgtcatgaatgctctcggtgttttttttttctctttattttagtttcttgttgttttggtttagtttgcgtaggagagagtagtgaagtaacattggatgcatcagctgccatgaacgtgtgtttgataatttcttggctgcttgtgcatgcattgtttctactttgtagggttatatgtttcaactaaatgcttcttttgtttgtagcatatatgtcaatcaaagacttctgagtccttcagaaattgcaaattggtgttaagaatatttaaattaacatgattcaagtttgtaaatctactttttggtctttcatttccactttgtttctcttcttttgttttaaatcattagttatacaattttatgtcaatattagttccaagaaaatcatatttcgtttaccctattggtacacttgagatgtatactataagaaaatatggtcaaattctaccaaatttttaggattgatttcctatacgattcctacgagtttcgtttttacgaaatattaattcctacaaaaatcccacaaaatatatcctcttattttcaaatctaaaattttatctaatttgttttaccaaatttttatttacttgagaaatatacgttacacatgtttcatacattttaattgatagtcaatttgcatgtattttcaaatctaaatttgtatctaatttgtttgccaaaatatttatctatttactgtcacatatataattgatacatctatttttcctacgaattatttgattggtttttcttcatttaaggtacaaaaaaaatcaaatgatcataatgaaaaccatttcttagatgggaaatggaatggtttaaatatataactatacctttatgaaatttttataaacattcattactacaagtttaaatgcaaggaaaacgtatattctaataaatacgtttaaacagttcagtcctctcatcaaagcacaattaatataataaatttaaagtaaaatcatgtattaagactacttaaaattatgtaacgtcttctttcactaat

SEQ ID NO: 173420 - DNA, 374 bp, Arabidopsis thaliana landsberg
agagcaaatgttgactatttggtcgttagatggtgcagagaaaaaatcgaagagtcgtgagcacatttctggctagtgctctaaggcaacgtcagttaagcacattgcgatcgtggatgccacttaatgcagtatagttcgtccaatgtatccaaagagccatcgagatcaccgcggttacctcgacaacagagagagagctcttaaagtgacacgtgccgtcagccctgacacagatgatccatatggtcaccgcaaaacgtggacacagagtttgggtagtggaccagaacggtgggatgcaaggccttggttctctaactggcatcagccctgaggtccgatccgcaatgcggtcgggagccccggatctg

SEQ ID NO: 173421 - DNA, 846 bp, Arabidopsis thaliana landsberg
tgtggagtatgtggtgatggatggcgctgtgaagatcgtggatgaacagaccggccgtatactggatggccgccgttattccgatggcctgcaccaggcgatagaagcgaaggaaaacgtgaagatcgaagcagccacgcagacgtatgcaacagttacgctgcagaactatttccgtatgtatcataagctcggtggtatgaccggtacggcggaaacggaggcagcggaattctgggatatttataagctcgatgtggtgagcattcctaccaatatacctgttatccgtaaagatgaccaggatcttatcttcaagaccaagcgcgaaaaattcggcgcggtgatcgatgagatcgtgcggctgcgcgaagcaggaaggcctgtgctggtaggtaccacatcggtagagatcagtgaactgctgagcaggatgctgcggcagaaacagatacctcataatgtattgaacgcaaaacagcacgcaagagaagcacagatagtgaccgaggcgggacttgcaggcgctgtaaccattgccaccaatatggcaggccgtggtacggatatcaaactcggacctggcgtaaaagaagcgggtggcctggcgatactgggtactgaaagacatgaatcgcgccgtgtggacaggcagctgagaggacgtgccggccgccagggtgatcccggttcatcgctgttctttgtttcgctggaagatgacctgatgcgtatgttcggcagtgagcgtatagccaaggtgatggactttgcaggatataagaaggagaggtgatccagcacagcatgatcaccaaatccattgaacgggcacaaaagaaagtc

SEQ ID NO: 173422 - DNA, 461 bp, Arabidopsis thaliana landsberg
  unsure (1)..(461): unsure at all n locations
cagccctggcgcacctggtacaggtgatcgaggccaagtcggcacaggtgcatcagcacgtgaagaccgnccgcacccacctgatggacgccatgccagtgcgcatgaaccaggtgctggatggctgggcggcgcagatcaatggcgccaaggcacacatcgaagcgacccctcccgagcctgcaggcgctggcccagggtggcaccgccgtgggcaccggcatcaacgctcacccacagttcgctgccggtttcgccagccagctcagcggcctgacccaggtcgagttcacccccgggcagaacctgttcgccctgatcggctcgcaggacaccgcggtggccctgtccggccagctcaacactgccgccgtggcgctgatgaagatcgccaacgacctgcgatggatgaactctggcccgctggccgggctgggcgaaatcgagctgcaagagcctgc

SEQ ID NO: 173423 - DNA, 678 bp, Arabidopsis thaliana landsberg
gttgataagagtggagcagttaaagaaaatttggttgagttattcatgtcaaagaaatatcttctttatctctgaactctgcaattgataggctgtttgctaaacatgggttaagtttgacagttgagaggacaaggttatgatagagcaagtaacatgaaaactgagttcaatgggcttagatcattggatgctagggaaaatacttctccatattacctccattgttttgctcatcaacttcagttggtcgtcgtcgttgtagttgcaaaaaagcactttgatgttggtggtttttttgacatgatttctaagctgttggatatggtaggagcttcttgaaagttatcaaaaaggagtagtacaaaattattaatggtgacattagcactggaagcaagagctttctcttcaaaggcctaagtatacccgttggaattctcatcataaaactttattgcgtatggttgatttgttttcttatatcattgaagttatagattttatccaagatgaaggagttgatgactcaaaaatacgtcaagcatttggtcttctcaagtactttcatatctatgattgtgtattctatatacaattaacgttagtcatgttgggtctgacaaagaatttatcgatggctttgcaaaggaaggatcaagatatcttgaatgttat

SEQ ID NO: 173424 - DNA, 202 bp, Arabidopsis thaliana landsberg
gttgcaatggtaacaataacttttctttacaaatctttatttttgaaatccttatgttataagggtttttatggttttatacatgcagcaagttatggctttcttctactggttgatcatgaagctgggaaaggatatcaagattattgttaaaccaacgttcaaagatggcatgaccgttggagttcaatggcaactcggt

SEQ ID NO: 173425 - DNA, 690 bp, Arabidopsis thaliana landsberg
cttctatgaacatcatataggcgaaaaaagattccggctagacttgagatgtgcctcgattcgtgaaccatttgaatatcaatgccacaaacatcccttatgcatagcttcggagctagagaaaaaggtacgatgtcaaatatgcaaagggaaaagctattcgaaattaaattgcatggaatgcgattatattatatgttttcgttgcgctaccttcccatacaaggtaaggtacaagcacgacagtcattttcttagaattcgcgatgggaaaaaggcaagtgatgaaccagactggtgtgaggtttgcgaaggcaaaatagaagaagtaaaagaaagagagtctccgtgggacaaaagacgagaaatgcgattttataaatgcaatgactgttgcacgactcttcatgttgaatgtttacttggcagagacatgtacatgaaaccttctagtagtgtaaaagattacatttctaagcagtcactaggaattgaaggtacaaaatggacaaacgttcaagtctttctcaacagttcgctctcccgaccaatatgcactggatgtatgtgccgttgtctattcccaatagttttcaaagggtacaacacaatcttttgttcttgggagtgtattggatatggcgacacagtgtttgagcatccaacaagtaatcctttttcctctatcgt

SEQ ID NO: 173426 - DNA, 707 bp, Arabidopsis thaliana landsberg; identical to SEQ ID NO: 3330

SEQ ID NO: 173427 - DNA, 529 bp, Arabidopsis thaliana landsberg
aggcctaatcttttggtgccgttgcatgaacatcctttatcatgtacagaagaatttatctattcttgcgatttttgtaatagtcgaaatggcattgcctatcagtgcacggagtgcggctatcggctgcacaaagactgtatccagggctttctcagctatccatctccgtgcggtcactctctcaagatctccatgcccaacaaatcacctcaatatgcaaatgaccgatgccatttttgtctgtgcaagcttaagactccgtttgctcgttgcacggtgtgcaacataaacattagtccactttgtatggtaaagcaaccaccactcactatttgtagaccaaagcaccacaagcatagcctcaccctcttggtaagggtagtcatctttacttgtaatgcatgtggcgaggaaggcgaccgcaatccttatgtatgtcttcaatgcaaactgatggtgcacacagactgtattgagaatctaccgcgagtcatatgcatcaatcggcacgatcatcgcatctttc

SEQ ID NO: 173428 - DNA, 900 bp, Arabidopsis thaliana landsberg
gccttaggcatcacattctttttgtgtcacgcaatcattgattctctcatgatctaacttgttcttggggcaggatccacctccattgccatatttggctgagaaagagtctgtaaattacgatatctccttggaggtagcattcgatattggagtttcactttttggctttttgctatcaactataacagcttatggtggactgaactgaaataaacatcatgtttttacctcttataggttcaacttaaaccttctggcagagatgattcttgtgtaataacaaagagcaacttccaaaacttgtgagttcctctataatctcctacccaattcctccatataattaaacagtttggttcaaactcttttaaacttattgtgacagatattggaccataacgcagcagctagcacaccataccgttaacggttgcaatttgaggcctggtgatctccttggcacaggaaccataagcggaccggtaaactcttttcgaaccagttctctcgtctactatatcacgtgatgactacacaataactcgcaaaatctttgtttcttggttctaaacgcaggagccagattcatatgggtgcctacttgagttgacatggaatggacagaaacctctatcactcaatggaacaactcagacgtttctcgaagacggagaccaagtcaccttctcaggtgtatgcaaggtatcagctgattaacacagtttctgctttagtttaatttgctttataccccaacaactccaaatgaatttcgttgcatgacatttcggttaacgcttattaatcaaattacgtctatgattaaaccgttgtagggagatggttacaatgttgggttttggaacatgcacagggaaaattgttccttcacccgct

SEQ ID NO: 173429 - DNA, 654 bp, Arabidopsis thaliana landsberg
cttagattctctttagttgagtttggttctgtaactggtttgccgtgtggtgaatttctggaggagtatgaacctgacttcttccctaaacatgtcaatgggacgaatgattactgggatgttttgatagggaaagataagaatacaacactagccgatgtttcttctaagttccaagctttaaaagggattgaggacccttgaaaacttcccctagcacttcttttgattgttgacggagtccttatttctaataaccagactcatcgtccaactttcaagtatgttaagatgttagaggatattgactcattccttgctttcccatgggggagagaatcatttttgaagactattcaaatcatgaggcctgttagaaataaatgtcaatggctgattcgaagagaaaaaggtcacgtcctggattcaatctagaagatcccatccaacaattcacaaatcagatgcaacagcataatatagctatttatcgctttcctttagccttgcaacttcttgcttataggaacatttctggtctactggacaagattcctggttctgcagatgagagaaccaaattggaaagccattcaattggaattccgagaaacagtcttactatcgtcgatgttcatctccttgaacgtgtct

SEQ ID NO: 173430 - DNA, 676 bp, Arabidopsis thaliana landsberg
ttttttgttataatgtttcttcctcttataactttcatttttggtgagttagattccggaaaggattaaggcatgggataatccatcagcctacaaggaccgtaggcattggattgtgttcgaaaatgtcaataaccttcgagttgaagaaggtgggcgcatcgacggtaatggacatatttggtggccaatatcttgcataatcaaccctcaacttgtaagttgttcactatattgattaatgtctttaattaaaagccttaatgaaaataattacactcccacgtcattatattttcagacccgcttcgcagctgccaccgtcaaactatcaaacgcctaacgagacgccggcgctattaaatacagttcttatagataccgatttataattagtagtgcaggtataaaaaatgcattgtatgtaatgaaatatatgggcagccggtcacgtaagtctagtgtctggtcttcaaagcaaggaaccctaggttgttttacgcacagctaacgcttttggcgttccaatcctcggacccggtcaaggcagtgtctgtcatggtcacatattccaaccatagtccgaccaatcatggcattcgcgttaccgttagtcataatgtttgaagattccacgcaatcgacagatttttgtagactattcaccactaccacg

SEQ ID NO: 173431 - DNA, 535 bp, Arabidopsis thaliana landsberg
atgtcgcttgcttttgtgttgcatggcatcttctggttttcacagtgtgctagattctggagagaagtgcttccgttgcaaaattgcttaactctggtgataactctggggatgtgtgagatggctctttggtattttgattatgctgaattcaatgagactgggatcaggccaaccgtgatcaccatctgggcagtcacgttcggttctatcaagcgtacgagtgctcgtattatcatcttgatggtttcaatgggctacggtgttgtgagacctacgctcgggggattcacatcaaaggttatcatgcttggggtcaccttctttattgcatctgaaattcttgagctgatggaaaatgtgggtgctgtcagtgatctctcagggaaagctcgactgtttttcgttcttcctgctgcaatattggatgcgttcttcatcatatggatattcaaatctctctctgctacttacaagaagcttcagaccagaaggttgttggtcaagattggactatatccagagtaattcacaa

SEQ ID NO: 173432 - DNA, 1083 bp, Arabidopsis thaliana landsberg
gtaattattttgaaatgaactaatagatttaatatgttattaatatatatatatatatatatattggtttaaagttaaacactgatccattaaaataatgtagaagattcaaaattggatttattatgatgaaatagatagttaaattgtatagcaaattggaatgtgtaagattaaaatttggttttaataaaattaccaaattaaatacagaaaagtaagttgactactttttgaaattcaaatatcatcaataagataaagtgtataatcataagatcatacggattgatccctcggctttctaagtaactagtggttatgggacgataattgattcatggacaatacttgtttgctttccagctgaagcttatgatacactcatccaacctatgagtttctctattcatacaatttaagatagatctttacagaaatagaagattcataaagcatttcaatctgcagatttcaaatgatgtttccctgtatgggtttcccattccctatgagaatctctactgctataatatcacatatgggataagttcccaacaagcgagtctacataataatacatattgtgtgtctattaattctcaagtctataatatttaactgctaaaaatatgatccatatggcagtgttgcggacaggtttcctgaagttaacttgggcttcgctggtggtgcatccatggtcataaaacccaagaattatctttctcatattgttcacgattatgtaagttaattcttatgctacctataattactattgccaagaaggatgatatttatctctgtttattttcttatattttcaataagtaaatgcgatatggtgccttggtttcccaagtttgacgagtcgttgtataacaactgtgggtggtaatgtcattttttttttgtattttgattagatgaaagtaaagcaattcatattaataaaaattttgcttgattttgtcttgtagaagtggcctttaggaacaaatgttcttgtatgatcttgatcatcaacgaattgcatacaattgtgagtgtgaatgtgttttgatagaatttttcgttttg

SEQ ID NO: 173433 - DNA, 571 bp, Arabidopsis thaliana landsberg
tcgagcatcaccgagaggctgtaccatttcgacacttaagcagaacggcctgctggcttggtattcccttgactcttgcctgcttgattggcgagtcttgcacgggctggatctccgactggctgattaaccgatatgctcgtcgtcatgatggttaccgcaagcccgaggcgcgtctgcacttggcccctctctgcctgttcttgcctgccggtctcattatccacggcgtgtcggtctcgaatcatgccccctggattgccctggccgtcggcatgactgtggcgtccatcggcgttcaggctggcacaactcttacctattcgtacattgccgattgctataagccgcaagccgcagaggtctcaaccatcatcaatttgtttcgccaaacgtttgcttttactattggattctatgcgctgccgtttggccagagcgctggtttcgacgttgcatggggtgtgtttgccatcattaacttttgtgcatggtgtccgctgcttttgttgatctggaagggacaagagattcgtcaggctcagggcgtgccgaagatgcacaccgagtt

SEQ ID NO: 173434 - DNA, 581 bp, Arabidopsis thaliana landsberg
atggctgctaatgaagaagagccaatatgtcgtttgtctcatccaactcaccctcacaccctctcccgtagagccggaagaatccctccatcgggttgcttcgcatgcaacaaagaagaaccctcaccatgttctaccttccattactcctgcaccacttgtgatgtggagttccacgatatttgtcatgtgtatccgaggaagctcacacacccttatcaccttcaacatcctctcaccctcaccactcaaaacactgaaatagagatcatatctaaaacccccgaatatggttacatattcaaaaattgtaattggtgtggagatgatttgagagatggatctcaattctatcgttgttctatttgtaacttttgtttggatctctcttgctcccaaaattttccagctcttacctttacaaatccaaaaagccaccatcattccctccttttatttccttggccactcttaattccatgtgaagcttgcgggttgattagtttggtggaaccaagttatgcttgtttcccatgcaactatttggtttatgagagttgtatcgacttaccacgtgtcat

SEQ ID NO: 173435 - DNA, 479 bp, Arabidopsis thaliana landsberg
gtagataaacaataacaaatggctgcagaaactttttttcctaagacaaaaccttaaatctctgttctctctcttataataatcacaggtctgagaggttcaggaataaacaagtcagtcataatgggtgtggtggttgtgcgttacttgttgctgccaatattaggagttttcatagtacgaggagcgcattacttgggtttggttacatccgaaccgctttaccagtttgttcttctgcttcagtatgtcgttcccccagcgatgaatcttggttcgttcttcagactcacaaaaatactaccaaaacatgtcatcacactgtctttctcataaactcacttgaccttttggcaggtacaatcactcaactattcggatcaggagaaagtgaatgctctgtgattctattctggagttatgccttggcttcagtttctctcactgtctggccaacattcttcatgtggctcgtagcc

SEQ ID NO: 173436 - DNA, 1355 bp, Arabidopsis thaliana landsberg
atgagaatcctacttagggttcataaagtgtgggacatcgtagaagagtcctccgacaacgaggcaaaggatgacatggccaaggctctattgttccaatccattcctgaagcacttactttgcaaattgggaaaaaggcggacactgctaagaaagtttgggaggccataaaagcaaaacacttaggagcagaaagagttaaagaagcaagattacaaacattgatggccgaatttgatcgattaaagatgaaataaaacgagacagttgaagaatttgccagcaagctatctaagatttcatccaaattagccacactaggagaaaccattgaagaaaccaaacttgttatgaaattcctgaagagtcttcctcgtaaaaagtacattcaaatcgtggcttcacttgaacaaatagttgaccttaataacacaagttttgaagatattacaaggagactcaaggtatatgaggaacggatctccgaggaagaggaagctcaagatgaccaacgaaagttaatgtacacggaatctcaatctgcttgtgaatatagtggagaatataaaaccagaggtcgaggaggacggttttatggcataggaagaggtcgaggacggtacaatggtgggagagatacttgaaaggttgtttgttatatatgtgacaaaacaggtcagtatgcttcagattgtcctgaccgtctgcttaagttgcaagaggcgcaagagaatgacaaaaagagtactatagaagcagatgagctaatgatacatgaggtcgtgtatctaaatgaagagaaggttataccaagcaaatatgaaacaaataccggagaagacaatgttttgtaccttgaaaatgagctagtaaccacatgaccggagatcgacgatacttcacaagtttggataataacattacagagaaagtaaaatttggggatgattcactgattgacatctaaggaaaaggaacaatagaatccattaacagaaacggagagcctagaaagctgatcgatgtttacttcattcccgagttaaagagtaacattattaaggttggtcaagctatagaatcaggttgcgatgtgaggatgaaaggagcaaatctaactatgcatgatcgagacgaaaaactgcttgttacgaccgtaagatcaagaaaccggctctacaaggtgagtatggggattaaagatacaatgtgcctttatttaacaactccaatcgactccaatagatggcatgagaggttaggtcacgtcaatctcgagacaatgaagacaatggtgagaagagaacattttacagggatttcacttgctaatattaagaaaaagatttgccgc

SEQ ID NO: 173437 - DNA, 304 bp, Arabidopsis thaliana landsberg
acgggctccgttacctctgatcgtgatagatcggctctaatattcctaggaactggatgttcaagcccggtacctaacgcaatgtgcttgatccagcgatctgataatccctgctatgtttgttcccagtctctttcaatcccgcctgagaaaaatcctaattacaggtacattctcatcttgtactgatttggttcgactgtggagttttgttttgagattgagatttgggatcacttagttctgtttagctaacctgagtgtagcacattcaattagtctagttttgttgttctactttatt

SEQ ID NO: 173438 - DNA, 1735 bp, Arabidopsis thaliana landsberg; identical to SEQ ID NO: 35778

SEQ ID NO: 173439 - DNA, 1323 bp, Arabidopsis thaliana landsberg; identical to SEQ ID NO: 10625

SEQ ID NO: 173440 - DNA, 555 bp, Arabidopsis thaliana landsberg
tactacttaggtaagttgtttttttattggttggtaataaaatagacatggaccggtttttcggacaagcttattcggaggcaaagttataatctcaatggataatgaattgaatatggagatggcaaagacaaatcgtactcctggtatcacaaagagcatagcacggctatttgtagaagacaacaacttgtttttacagagcacagagtcacataaacatgtccggaacttgactgtccagatgttgggttcacaaagtttgaagttgaggataatggaaaacattgatctcttgactcgcacacacatggaggaaggagctaggaatggctcccttgacgtcaaggaaacaacaagcaaagtaaaatatgtcacgttgtctatttatctcttttatttaaggtatattatcatctcaatagtatttgtatcattaaacgttgcagattctaattgaatgccttgcaaagaaagttatgggcgagatggaaccagaggcggcgaaaaaaaacgcactatgttggagatattttccgagtggctggtttcggt

SEQ ID NO: 173441 - DNA, 82 bp, Arabidopsis thaliana landsberg
  unsure (1)..(82): unsure at all n locations
agatgagatcaaggaggcagaaccaaaggtcttgtgcaaatgtcattcttgtttcactgtcntgtcggaaccaaagcatagt

SEQ ID NO: 173442 - DNA, 374 bp, Arabidopsis thaliana landsberg
  unsure (1)..(374): unsure at all n locations
tcgagtgtatttgnnnnnnnnnnnnnnnnnnnnnnnnnnnnnnnnnnnnnnnnnnnnnnnnnnnnnnnnnnnnnnnnnnntgttatcgttattgctccttgatcgttgttcaaacaatgtggttggaaacacaagattttctctcgtatatttcggccggtgggatcctagtttcttgtatactagtaatgtctattctttggatcggcgctattgacggtgtgggatttaagaacaaaggtgttctggtcaagtggtcaggaattcctaccgcagttagtttgtatcttgtttgctacactgcacatcatgtcttcccaaccatctacaattctatgaagaacaaaaaacatttctagtacgcattaattctt

SEQ ID NO: 173443 - DNA, 575 bp, Arabidopsis thaliana landsberg
atgagtttcctcagaggtataattgattcgtttagctctattctcaacgaagaatctaagaaagatcctagtgtttcatcatcatcagcttcttctgagtccatgaatggtatcgatggagttccggttactaacgaacgaattgcgtataagcttaaaggatacttcgatttagcgaaagaggaaatcgctaaaggggttagagcagaagagtggggtttacatgatgatgctcttcttcattatagagatgctcaaaggatcatgaatgaagctacttctactccttctccttcgtatattagttccaggttttgataagtttgttttgacttatatatgttatgttgaaaaataaagttgtagtgatgatgatttgttgaatgatatggtagtgaaaaggagaaggtgagatcgtaccgagagaagatttcaaattggcaaaatcaagtatctgagagattgcaagctttgggtaagcgtacaggtgataaagttttaaaataatgaccttatttgcatattaatatgaagaagcacaagtgaacttcacactaatggttgtattgtttacc

SEQ ID NO: 173444 - DNA, 255 bp, Arabidopsis thaliana landsberg
  unsure (1)..(255): unsure at all n locations
atgctgactcgcgtatgggaagatccatggattcccactatcctagcgcggcctgcaaagagcattcttaacataagagattctctactctatgtcaatgatttaattgaccaaaacacaaatttgtggaaattggaccgtctccaagcacnnnnnnnnnnnnnnnnnattccactcattttagggattcgcccaagtcgtacctacttgagtgatggctttagctggtctcacactaaatccggtaattatact

SEQ ID NO: 173445 - DNA, 351 bp, Arabidopsis thaliana landsberg
  unsure (1)..(351): unsure at all n locations
gcccttgtcgcgcgtttacgcaaagacctgctcgactggtacttcgcgctcggccgcnnnnnnnnnnnnnnnnnnnnnnnnnnnnnnnnnnnnnnnnnnnnnnnnnnnnnnnnnnnnnnnnnnnnnnncaccgtgccgcatgcgacgccctattacgaaaaattcctgagcctgtggccgacggtgcgcgatctggcggcggcggacgatgcgcgcgtcatggcggcgtgggcggggcttggctattatgcgcgggcgcggcggttgctggaatgcgcgcgcgttcgcgtccgcgatcatggcggcgacttcccccgcaacgaagcggagcttctggccctggcgggcttt

SEQ ID NO: 173446 - DNA, 1535 bp, Arabidopsis thaliana landsberg
  unsure (1)..(1535): unsure at all n locations
aaaaaagacaaagatgtttgacatgcgcgaagaagagtgaggtacgtacagctgcaagaccacgctaaatttaggagggttgacagagttgagtagtccacaagtttagtttcatttttggacacttaaaaggcttaggatacaagtcgtcactgtgtctgtttcattgctatggtaaattaaccaaaataagtaaataaccatccataactttgactgcttcaggctgaaccaaatcagtgtgtatgggcctgttttcgtatcaatctttacattaagagcaagtccattgggagatccttaacagtttttaacataaatccttaagtaattttggaaaaaaataaatctaaaatgtgatttaaacttgggatcgcacctaattttagagttttttcagttgttaaggtgcgcatacgtggcaactaatcattggttgtgtttttttgacaaaacttttttttttcttttgccgtgttttgtttttcaaatcgattttcctctcttctcttctcttgttaactccggagggcgattgaacgatttgtgatcatcatcatcacgcgtcgtctctgatccaagtcgatggttagtaagatgcccaagtcgtgttacgagcttccgttgaaggatttcgttgaggttaacacagaggaagagaatgaatggaaggtgttcgatgaaatgcctcagagaaaagaaaaaaagaccgagtaaagtcgtgaggaagacgaagagtgattaatgggtggatcaaattcgtaacagaggtttacacaaactctggccaatttatttaagaatctatagacgtttttattgttggtaggtttgaggttaatggtcatggaaatggttaatttagttgcgttggttgcacgagattatgacctcaagttttataattttttgagggttataggcgtaaggaattagaactatggcctaagtctctctgtctatatttaacacaatctcttgtgccatctctagaagttttggtgttctaaatgtttgaattatgggatttcttaataaagggatggaaataggggatgcttatctttcctatggaatgtacatctacgagattgaaatgaaagttaaagtttcttaactatggaaaatacagaaacatcattgatatgaacactggattaagtggttttgctgcaggttgatcaaatacccaatgtgggttatgaatgtggttccgtttgttcttaaaccacacacacttggcgttgtgtacgatcgtggtctcattggaacctctatctttcttttcaagcaatcaagaatgtatcaaaaacttgtgtactttgtcttctctatctttcttttcaagcaatcaagacaccaaacacaacgaagaagacatcaaaaagacacctcttgctagctttgaaacaaaaacttctatagnttatcttctatatctttcttttcaagttatcaaaactcaaacaccaaatttaattttcaaaatatagtttcttaaggattcctcaaggatttctaccattggacataat

SEQ ID NO: 173447 - DNA, 818 bp, Arabidopsis thaliana landsberg
aggtcttcctcctggggcaatgggcgggccaatatttggtgtaaccaatgggtttcttaatcaggacccagatttcatgaaaaaccaaagtgtaaggtaaaaaaaaggcttccatcaatattataatttttatgttaaggttaatcgaaagttatgggcaaaaactaataatatttgtgtccctaatcagatatgggagtttctccaagtctcacattgttgcgttgcccagctatagtctcaatggacgcagagttgaacagattcattctaatgaatgaatagaaaggacttgttgccggttacccgcaatcgatgtttgatattctagggacatgcaacatagctgcggttcatggcccgagccaccggataatgtaggctcgttgcttttttaataagcccaaccatgatgaaagaccatctcttgcctaagattgatgatttcatgagaaactatctttgtggttgggatgatcttgagacagttgatatccaagaaaagaccaaacatgtacgttttttaagcttttctctctctttctttctttgttttttagacattgaatctgaatctcgggtctatatcctttattggggatgtaatgtttttaatatgtcagagcaatttattgtttttgttaaaaagaaaattaattactatcattctttttgacaaaagaaatttgttcgtcctcactttaattaattttgttggtcttatagattcatattatagccaatctatactattgttgattttaggtaaaaggtactatttattattctaaattctctgagggagttagtttttattg

SEQ ID NO: 173448 - DNA, 536 bp, Arabidopsis thaliana landsberg; identical to SEQ ID NO: 2445

SEQ ID NO: 173449 - DNA, 913 bp, Arabidopsis thaliana landsberg; identical to SEQ ID NO: 11755

SEQ ID NO: 173450 - DNA, 461 bp, Arabidopsis thaliana landsberg; identical to SEQ ID NO: 21909

SEQ ID NO: 173451 - DNA, 131 bp, Arabidopsis thaliana landsberg
atgcccaaaatcgtctgcgaaaaaggcaaatgtatccaccctcaaccaatggcacctaccagacatttctggcgacccccaagtgcccttgcacctattaggggaaatcaatttgccgtccatcctcctcg

SEQ ID NO: 173452 - DNA, 1144 bp, Arabidopsis thaliana landsberg
cttttctcttctcataccaagggggccttgggggaggttttcggcaagcatcggcgcctgtgcgataaaaggcagcagttgggcctcaaaaggcaaaacgcttgaggccagaattggtcgtgtgtaaaggaaagtgagggccatggaaagtgatcccttccgatgggagtggaggaacttcgactgtgtggccaagatcccaaccatgctcaaggccaagttcctggtcctgtgaatgcttcggtcgaagtgatcctatccaacagcgaagaggatgacaacgaggaagaagacagcaacccctagcagcgcgtgaagaatgacttcgaggcggatgtcaagaacgaggcatccacttcgaaccctgaaccggcgatgaaggagcctgttcctgagccagattcttaagtgtcccccgaactcgaatactttctctctctttttattttgtttggacttattatggccccgacccatttttatttaaggaagctttcctattcttcctgatttcgaaaatattcgtttcggagatacgttttaaatgcagggcagtccggacggcgtgaatgcttccgcgaatcactccgaccttgaatgggatcgcgtttctcaaagctatgagtccttctataaattgtccctccaaatcttctttaactttcatctaaccctcttctttcttgcagtcatggctttcaaccttcgatgctcggaatccatgcaagatttctctagggccggaatgattgttcaggacatcccgaatgtgccagacagaggacgttccccacctcgaggtttcttcagatcccagatccgagctccatatgcactgatcaaggatctttcagacagagaccaagaaatcgcgatgtccttcatcaaggctctccaggctcaacacaaaaagcgttcttcagaaaagaagaaactccgagagaagatcaccaaatgctgtgaagagtcaccgtgatatcaagggagttacacaccctcaaatttcaccccggagattggatcgaactcggaatcacagattttcttgcatcccgaattttcttgcatcctggactgtatgatgcccattcttgacatcaccagtcaaggggtcgaagtgttctgcaagacgaggaggatttcc

SEQ ID NO: 173453 - DNA, 263 bp, Arabidopsis thaliana landsberg; identical to SEQ ID NO: 25175

SEQ ID NO: 173454 - DNA, 284 bp, Arabidopsis thaliana landsberg
atgacaccgatttttcaacaacatgcaaagcgcattcttgcttgcggttacaagagttctttgttccgttcctatgcaaccttatggtcacccgaggctagccaaactctgcttattcggatcaaagcgtctttgcagcaacatgagaaacaattgtacaccagagggctcatcaagaatcttcgagattctgatcgattttctcaaagacgcgaggtttttttttctttctaaatcctgatcttcaatctatgtaccaatttgaggtttcttacatattatgt

SEQ ID NO: 173455 - DNA, 216 bp, Arabidopsis thaliana landsberg
gtgatgctggctcagggtagctctggagcatctgcagcaacagccaccgtgtatatagctcacgaggggaacacaactgctaattggccaccgaactgccagcaatttgacggattctgcgaacgcatctcgggatctctcatcggttctaactgcgcagcgatcttactcatgctcattgccatcaattccgctatctccctctctcgccactaa

SEQ ID NO: 173456 - DNA, 499 bp, Arabidopsis thaliana landsberg
  unsure (1)..(499): unsure at all n locations
gcgccacggcatgatggcctcattcatggccaagcccttcgccggccgcgcgggctccggcatgcacgttcatgccagccttgcngangcggccggcacacaacctctcgccgaccgggatgaaacgcttgccgcgctgctgaaacacgccgtcgccgggcttctcgagacgatgcacgaatccatgctcgtcttcgccccgcatttcaattcctggcggcgtttctcggcccaaagctatgccccgaccacaccgacctggggcaccaacaaccgcagcgtcgccgtgcgcattccggcaggcgcgcccgccagccgccaccttgaacagcgcgccgccggcatcgattccaacccctacctcgtcggcgcgacggtgctcgccggcatgcgcaaaggcatcctcgcaaaggccgatcccggccccgagacgacagcatatgccgcaatcgcaagcgacgacctgccgcccgactggggcagcgccatcgaaacgacg

SEQ ID NO: 173457 - DNA, 326 bp, Arabidopsis thaliana landsberg
cattgtacttacaccagttggctattggccgaccgagaatctttacttgcctcagcatctatgcaggaaaggttaaataggacggtgaaatagtaaacgccaatttatctggccgacacacgactactcagatgggatctggatacctttcgaatagtgccaaaattgcttatatgcgcgatctggaaatcgtggtttacaaccatgatttccagccgattgacgattttataatgggagctacgaacaccgcttactatgatgccaagaagtctagctacacgagtttttcatacaggggacctatgcatgcaggagtggttccc

SEQ ID NO: 173458 - DNA, 1190 bp, Arabidopsis thaliana landsberg; identical to SEQ ID NO: 63433
  unsure (1)..(1190): unsure at all n locations

SEQ ID NO: 173459 - DNA, 1505 bp, Arabidopsis thaliana landsberg
aatcctagaagaaaaaaaatcctaaactcaaatttggaaaagatagattataaattatgttgttttttatgtcttaatatattagtttatttagtatttaatttgtatttatttggtttaataatgctaattgttattttaccatttttaaaaaggtgagggtttaaaaacctacaaaaagttgagggttttttaaatgtatttgggaaaggtgaggttttttttacccatttttcctatttgtaaatgtataattctttttccccgaataaatttaatattaaatcaaaacctacttttcaaaacgaacaataattatgcgaaataaattaggtttttgaaaagggaaaaatgtcgttttatacgtgaactttcaaaagtggccattttatacgtgaacttttaggtcggccattttatacgtgaacttttaggtcggccaaataaaacatgataaagacgttgacccgccatttaacacaaaacataaagttgacctgaccaaaatccccgagacgttaacttgcattaacggatccgataacccctgttagcagacgttaattttttctgttaatgcctaaaacaatgtcgtttcataaactgaaacagaaattcccattttgatttcaaaatccctaatttccaaaaaccaaatccctaattcttactttggcgaaatcgcgatttttatttgatttcatcttgaatttgtatccttggagtcctagattgtatcaatggaaggcaaattagacaatgatgaagctccaccacgaggcgaagatgacaccaaagatgttgttcgagctccaccagcggattatatcagctttaaatctcaaaaggattcttggaagcgaacttgtagacctgtgataggaatagatgggttttctaaaatgggatgtaaaaggtcaccttttagctgtagttggaagagatggagataagaggattgttcctatagcttgggcagttgtcgagatagataacaatgataattgggactggtttttgagacagctctctactagtttgggactgtgaaatgcaacatctagctatcatttcagataaataatcagttaattttatcatcttttgcttcagtttaatgtcttttatgaagggtttacgcttatgtttttgtgttattttacagggtctagtcaaagctatcaataccatacttccagaagttgagcatcgacaatgttcaaggcatataatggacaattggaagagagacaaccatgagatagaactacaatgtctctttgaaaaacaatttgaagctacattgaagaagtgttcatgaataatatggaagagctaaagagatacaatcctcatgcgcatgccactcgcaacttactagtccaatgacatggtcgagagccttctttagaattggacacgttgcaatgacaacctcaataatcagggtgagtcttttataagactattaaacaggctaggagaaagcctttgttggattagct

SEQ ID NO: 173460 - DNA, 242 bp, Arabidopsis thaliana landsberg
atttcttgatggtttttgttacaaacgttgaacatgttggtgatgtagcttaaggtgcaggcttcgaacacaggtggttggtttcacatgcattggcattggggacagaaatgggatactaatttgaagctaaccggagagagtttgtcctataatgtcactacaagtgatagcaaatgtttgggctttcatgatgttgctccacctaattggcagttcaaacttcaaacaaccttacgatg

SEQ ID NO: 173461 - DNA, 1070 bp, Arabidopsis thaliana landsberg
ttccctctgaaaccaaaaactcatctttgaaaacctatgaagggttctgaagctatgcttccttgtcaaaaccgttctgctccttctcttcactcaaacgctctgtctaagagtgtttcctactggggttggagatttgcaaacacaaagttcgagtcttgggctatagaaatggctgctttacatgaacccacttggagagaagctggcatttttgaagcagtcatggcatccatatacagaatccctaaaaacccggatcttattctgggtattgctgagaaatggtgtccttacaccaaaacctttgttttcccttggggtgaaacagctgtcacacttgaagatgttatggtgctttcaggtttctctgttttgggttcacctgtttttgccactctggatagctcaggaaaggaggttaaggcgaaactggataaagagtggaagaagattaagaaagctaaagtcaatttcgtaacacaagtagcatggatggagagattcatggacagtggtgatgagcttgagcatgtggctttccttgtcttgtggcttaactattttgtgtttccatcacgcttgtatcatctctatggagctattctgcccattgctgttcatctttcaagcggtactaggattgctcttgctcctgctgttcttgctcatttgtatggagagctaagtctcttgaaagaccacattaaagcttttaaagaatcaacacttacggcccaaactgatctaactgccttgtttaagctggtccaagtttggacatgggagagattcaaggaactacaaccaaaacccaatccgttgctaaagagtgagccaagattggctctttggcatgacctgaaacaggaaaccagccatgcgagggagattctggacaactcgaaaatcgacagttttgaatggcgtccctactcaataactgtgcaaaactgggaatttcctcagttttaccctgacaaagagatgtgggctcctgttcgttcgagtcttgatgatgtattcatctcctaagatcgatgtatcaaggtgtctagcttttggaatgg

SEQ ID NO: 173462 - DNA, 1559 bp, Arabidopsis thaliana landsberg
tacagagtcttaatgtcatcttcttcttttattcataaagctgaaacttgtaagaaagttattcatgtatggaagcaaaagtattggactaactcagaacgatgtatcagaagactcagagaggcattgaaattacatgatgaatcttcttctccctgttttgctagaataagacaattgaagaatgaacttgttgttgctttctgagaagaagaggtgttttggagacaaaaaagcacagaaaaatggctcaatgatggaaccatacgaatatgtgcctaattcctaagattgaagcgcctaatcaaatgactgatcttcgaccaattagtctttgctctgtgctttataaaatagtgtccaaaatccttgttaacaaattaaagatccatttgccgtccattatatctccaactcaagcagcctttgtttcagaaaggatgatttcagataatattttgattgctcatgagattgttcacagcttgaattctcatccggatatttcagcattttctatgttactcaagacagacatgttaaaggcctatgatatgttggaatggacctttctacaaggaattttataagcaatggtttttttcttcagtatggataatggggtgtgtaacttcagtaactttttcagtattgattaatggtcagccttatggcttcgtaaaacctgaaagaggtatccgacagggagatcctatatctccttttctttttgttctgtccactgaagctttgattcatctttttaatcaagctcacgagaaaggtacaatttttggtattcaacatcatccctctggtccagctatcaatcatctactctttgctgatgatagtttgttcatctgtcgagtgtcaatcgctcaatgtgatgaggttcttctttgccttgataaatatgaacagatgtctggccaacagattaataagaggaacatatgctattagttttggttctaaagtagcagatgacatcaagaactgaattaaaattcagacatgcattgatttagagggtggtagaggaaaatatttagggttacctgaatgtcttagtagatcaaaacaacaacttttagggtttatacaagaaagattatagtcaaagttgtttggatggtatgctaagaatgtttctcaaggaggaaaggagattctattaaagtctgtggctatggctttacctgtatatgccatgtcttgttttaagcttcctaaaagcactactagagccttaacgagtgctatgatggattattggtggaatactactcagtcacaacagaagattcattggattagtcatgacaagttaacaatgccaaagtctgctggtggttttggatttcgggatcttgaattgtttaatcaagcattgttagcaaagcaagcatggaggttattacatgaacctaattgtctgttttcaaggtttttcaagagtcgatattacagaaaaacaactttctttgaaagtaaattaggatcacgtccttcttatggctggagaagtatcttttttgggaagaatctattgctga

SEQ ID NO: 173463 - DNA, 396 bp, Arabidopsis thaliana landsberg
tgttcacgctatggtagcctttgattgcacgagtgaatcagtaatggagcggaaatttaagttgttccaatgttttggttggtctaaagaagatttcgtcgcagcgatcatgagattcccaaactgtgtgacggtttgagatgagaagataatgtacacaatggagtaccttgtaaacaacattggtctgcgagctcgtgacattgttgcaagaccggtggtgttatctatgagcatggagaagagaatcaaaccgaggaaccaggtcatctctttgcttctctccaaaggacttgtgaaggaggtagacatcaactatttcactatactaaagctggcaagctccgagttcatggataagtttgtccttttagatctcgaagtgattgcctcaac

SEQ ID NO: 173464 - DNA, 332 bp, Arabidopsis thaliana landsberg
acattttgctattgttgaaaggctgaacaaaattcgatttttggtaatgaaatgaaacaggtttagggaatacaaagaagcacttgatacattcaacgagaagaacagggagaaagtacagctgatcacaaaactcatggaggttagttccgagttctcaactaagttcttaatatgtagaaactgcgggaacaaaaccgagttttccatcgcttgttatacataaatggtgtttcttttttctttttggggagatggaacagttggttggagaaagcgagaagttgaggatgattaagctggaggagctgagcaagagcatataaaccgtg

SEQ ID NO: 173465 - DNA, 298 bp, Arabidopsis thaliana landsberg
cgaccggaaccaggatcctgcttgcttcactctctgcgatggttgcagagtcagttacgtttccgattgatctcacaaagactagaatgcagctccatggttcgggatccgcttctggtgcgcatcggattggcgctttcggagtcgtatcggagattgcgagaaaggaaggagtgattggtctctacaaaggtctatctccggcgattatcagacacctgttctacacgcctatcagaatcattggatacgagaatttgaaaggactcatcgtcagatctgaaactaacaatagcga

SEQ ID NO: 173466 - DNA, 432 bp, Arabidopsis thaliana landsberg
cccagaaagcaaagagcacctcccaagttacaaaattggctggaccagctttgacccaaatggacaatgtttcctcacagcggtcaaacatatggtccacttggtcttttctttgtatcatcagtaaacaaatagagacagtgcatgagagattgcttgttattctttttgcctgcaggagagagatggattaccaactccattgaggaaatgctcctgttactcgagtttcattatatcaggagagtgttctatcaggtgagctttacatatgccatattaaaaactacgacatatgactcgcactgaatatatattctccaaaataatcccaactggaattagatgggcgtatggtgcgtcatcttccatgaatcctatggttaaaactgtgagggacaaactgaataaagtacacaacttaccgagttt

SEQ ID NO: 173467 - DNA, 319 bp, Arabidopsis thaliana landsberg
cgttatgccagatcaattgccgaattcagttcacgtgttttggggtgggcgcacagctgaagacctgtactggacaccagaatcaaggtatggccaagccccgatccattttcatcctgttctttcacgtgcaggcgccgattggcagggggctcacggttatgtgcaaaacatttttcatgatgcgggtttgcctctggctaactgcatggtctacgcctgcgggtctgaaaacatgattcattcagccactcagctattgatcagccatggcttgcctgcaaggcagtttttttcagatgcgtttgtgtgttcttcc

SEQ ID NO: 173468 - DNA, 1207 bp, Arabidopsis thaliana landsberg
  unsure (1)..(1207): unsure at all n locations
ccggggcggttaagtacagataacattgtagtagttcagaaaagcagttcattccatgagaaagaagaagggagtaatgggttggatgcttcttaaactagacttggagaaagcatatgatagaattcgctgggattttctggaagacacccttgtggcagcagttttttcggctcagtgggtaacctggataatgcagtgtgttgcgggaccgtccatgagtgttttgtggaatggggaacaaacgaaagcttttaagccggctcggggattgcgacaaggagatccgctctcaccctacttatttgtgttgtgtatggagaggttgtgtcacctaattgaagaagaagttgggaagaaagcttggaaaccaatcagtatatctagaggcggtcctaagctttcgcatatatgctttgcggatgacttgatccttttcgcagaagcttctgtgagacagattcgtgtaatacgcagggtgttggagaggttttgcctagcgtccggtcagaaggtaagcttagaaaagtcaaaaatcttcttctcaagaaatgtctccagagatttgagtaagagtatcagtgacgaaagtggtattcagtcaacgatggatttgggtaaatatttgggaatgtcggtgcttcagaagcggattaataaagaaacgtttagctcagttttggagagaatgtcatcgaagcttgctggttagaaggggaggcagttaagcttggctggacgtattactctcactaaaactgtgcttaattcgattccagttcactcgatgagttcaattaaactacccatgtctactctgcatagtgtggacagaatttccagagatttcttgtggggtagcactacagagaagaatgaacatcatttagttaattggaagacagtgtgtttaccgaaaggtgatgggggattgggaataaaaaacgcagacagtatgaataaggctcttcttgccaaattgggctggagggtgcttcatgatcatacaagtttatgggcaaaggtcgtaaggagtaagtattcagtgggtgatatacatgacacctcttggatgatagcgaaagnnnnnnnnnnnnnnnnnagtggaaaattgtttattttgcataaatcgttgcggaaaattctcttacggttcttgggatcgagtttgaaaacgatcctggagtggtaattgtttttttttgtt

SEQ ID NO: 173469 - DNA, 411 bp, Arabidopsis thaliana landsberg
accagcgttcacggccgcaaaagcttggcccacgtgtatacgggactcaccggcagtcaggtgcagaccagccttatcgtgctgctggtgctgatgttttccaaattcttctacctcagcagcctgagcagatatttcaccttctatctgatggatcgtttcggccttggcatccagcatgcccagtactgcctgttcattttcctgtccggggcggcgctgggaaccattaccggaggcccgattggtgatcgcattggccgcaagagaatcatctggggttccattctcggcgccgcgcctttcgccttgttgctgccttacgtcagcccgccgatgccgctggtgctggtgttcctgatcggaatgatcataacttccgcgtttcccgccatcgtggtgtacgcgcaa

SEQ ID NO: 173470 - DNA, 539 bp, Arabidopsis thaliana landsberg
atggaactcttacttccacacccttggaactcaacacctctcaccgtcctcggcttcttagaccgagccgcctctgtctacggcgactgtccgtgcatcctacacaccactaacaccggccacacttggtccgaaacccacaaccgctgtcttcgaatcgcctcggctctcacttcctcctctctcggcataaaccgaggccaagttgtctccgtcgtaggtcccaacgtcccgtccgtctacgagcttcagtttgctgtcccaatgtccggagccatcttaaacaacatcaaccctcgcttggacgcacatgcactctctgtcctcctgcgtcacagtgaatccaagctcgttttcgtcgatcccaattcaatctccgtagtcctcgaagcagtctcgttcatgagacaacacgagaaacctcaccttgtcctcctagacgacgaccaagaggacggttctttgtctccttcggccgcatcagattttcttgacacataccaaggagttatggagagaggagattcaagattcaagtg

SEQ ID NO: 173471 - DNA, 1156 bp, Arabidopsis thaliana landsberg
  unsure (1)..(1156): unsure at all n locations
atggcgatgaagcccagtctccatttttgcccaactactgtcacgaagaagtttgtctactcgtttcaaagctccttctgcttccgtttcttaaggtatagttcatcaatttcacttgggtcttgtaaaggtattacctttagttcgagaaatgatcaaattgcatcgaggaggtttagctttagtagggattgtaataatggtgtgtggctagagaattggaatagaattcagaaacgtaatcaacctaaacctccaaaggtagttgtgaattatcgaaaagaagggagattttctgggtcggagattgtgagtggtgatgataatagaagtagagatggtgatggtagtactatggagaagatagtggagaaattgaagaaatatggatatatggaggaggttcagaataaggagattgaacaagagagaaggattgagaaaggatctgtgaggatatattctatgttgaagaagggaagttaccgaatactagaggtggattcactgaggaatcgttacttggtggagagaatgtcattggaagtaatggagatgttggttttccttgggagaagatgagtgctaaggagaagaaggagttggaagctgagtggaccgcaaagaaggagaatagatactcgttggcggaaatgactcttccggaatcagagctaaggaggttgaggaatttgacgtttagaacagcgagcaagatgaggattcgaggtggaggtgtgactcaggtggcagtggatgctattaaggagaagtggaaaagcccagagattgtgagattgaagattgaaggagcaagcgcgcttaacatgagaaagatgcatgagatattagaggtttgcttcttatgaccccccaataactctatttggtttcataaggcttgtctttcggctgcaaagatcagaaacacacaatttaagtccaatgttcaatatgaaagcgtaggcataaacttttgttagatcttgttaaaatgttcttttcttttcctctatatggcaganaaaaactggtggtttagtgatttggaggtccgggacttccatctctttgtacagaggtgtcagttatgagcttccatcaggaaaatggaacaagcaaagaagagaggagacgccacctgaagctgtaatag

SEQ ID NO: 173472 - DNA, 294 bp, Arabidopsis thaliana landsberg
ctgctcatggccagggtgggagaacccccgtttattcaactattacgcatcatcgactggctgatggcgttgccgccccatctggagcagagcctgcggcagcgtctcgccaccgtcgaaggagaaaaacacatgcaatacgtcaccagttttgaacgtctggcccgggaagaaggggtacagcaaggaatgcagcaaggccggacggaactgctgattcttcagctcgcgcatcgcttcggccctttgccgggtgaggtgagccagcgcctggagcaggccaccagcgaggag

SEQ ID NO: 173473 - DNA, 1728 bp, Arabidopsis thaliana landsberg
gaggaacaagcttttaataatattctaagctctttgatgactaatgcacaacagacagggcatataaaaggagtccgagttagcaatggcggtccatccatctctcacttactattcgctgatgattcactatttttcttaaaagcaggccaaaaaaacatcaccaacctcctcaaaatattcaatgagtatggagaggcttcgggtcaagtcattaactttgataaatcatccataacatttgggagtcgggtctatcaacaaacaagggatcaagcaatgcggaccctacaaataccaaacattggaggtggagggaaatatttgggaataccagagcaatttggccgaagataaaaagaaatgcttcaatacatatcggaatctgttcagaaaaagattaatggatggcagaacaagtttctcactgctgcaggaaaggagaccctcattaaatcagtagcttttgcgatgccggtctactcgatgaatgtatttgcgctcccaatggaactttgctccgacctcaatagtatgatagcgagattttggtggggcactacggcaacaaaaaagaaactatcatgggtttcctgaaaaaaaatgacaagaccaaagagagaagggggtttaggatttcgagacctgcaccaattcaaccaagcactacttgcaagccaggtatggaaactgctataaagaccacaaagtctgctctatagaatgcttaaagctagatactttcgacatgggaatttctttagtgcgtcacgaggcacgagaccgtcttatggatggagttcccttcggtttggatgtgaattgttgaatctcgggacacagaagaacattggagatggttacacaacccaagtgggcaatgagccgtggctaccaaccacttcaccccggccacctctgttattagcaacgacggacccgaaaacaacggtttcggctttactctgtccgactacatctcaatgggatgaacagaaactcaccgcactaatcgatccgattgaccatccaattatccggaaaatatatgtaccccctataccagcacaggactcatatgtgtggagctttacaaaggattgctgctacactgtcaaatcaggatattgggtagcagcaacaaagagcacaagtgagccacctatcactccgccgctatcttcacaccctgatattgccgaccgtttatggaactaaacattgtccccaaattgaagcatttcttgtggaggacacgtcgcgtgctctcggggttgccgataacctaaggcgacggaacatcatcatcaatccataccgtgcacactgttgcacagaagctgaaacagggaatcacatctttttttcctgtccgcatgcggaagcggtatggaggaccacttgcctagacaccaccatactatgtaactcgcaaacacccctagaagacaaattaagatacctctttaggattcacgacgatgggaatgtccatgaattacacaggtacctccctttttggattatgtggagattatggaaaagccgtaatgatctaatattcaacaaaaagcttattccggcacgggagacgctcgaactggcaacaacggacactcaggagtggattgagaatgtcattaaacaagtgaacacaattccggctcctcacacacagagaacaagaagagataaatggctaccacacacctaggggatgggtgaaat

SEQ ID NO: 173474 - DNA, 266 bp, Arabidopsis thaliana landsberg
agcgcgaggttctggtgctgatgtcggaggccggcatcaagacggcgaccgcaaagcgtctggtcaagtgtgcgaccagcatccgcaatgccgacgacgtgtttcatttcgagccgccgtcgacccgcgttctggtcaccgccgccaagctggtcgccgccggcgcatccgagctcgaagccgccgaagtctgcattctcgcgccgctcagcaatgacggcgcgatcaccgaaggtttgcgggaactcgccgcggcaagtctgctg

SEQ ID NO: 173475 - DNA, 914 bp, Arabidopsis thaliana landsberg; identical to SEQ ID NO: 54283

SEQ ID NO: 173476 - DNA, 536 bp, Arabidopsis thaliana landsberg
agattcagggtaagccggagaggttttcgagtgtagctattgtcatcaattcttcgatggcttcaggtacgaatgtaaatccagtggacgctgtaacggttttttttcactagatacgcggtgtggttccatttccgagccttttcatcatgaactacacccgcatcccttatatcgtacctcggcagagcgtaagacttgtggagcatgtggtaaagattcagagtatgtcttaagttgtattgtttgtgagtttgctttaggcatggagtgtgccacttttaccaagaaaaataaaacacagatgcgacgatcattttttatcgttgcatcatggagctgaaaactccagcggtcaattgtggtgtgatatttgtgagggaaaaacagatccgagtgtatggttttatggatgtgatgattgtgggaatacactccatatcaactgtgtacttggagacacgtattacttcaagccaggcaatagatacggaaaagaaaaagtagttgccaatgttggtaccacatagaccccc

SEQ ID NO: 173477 - DNA, 564 bp, Arabidopsis thaliana landsberg
tatgatgatttcaattaagctagaccagtagattataaaataagaagtaaagaaaagcaataaatatcaagatgtaaatcggatgggaaaagagtcaggtttagggtattctcagaaaatagatgatagtagatatagaaatagctaggatgttatcgcactgttctcgaacttaaactatgattttagagtaaccagtggtgttccgaaaaactctttatacttagggttaagataaccggagaagccgagaaatcctatactaaagcatgcattattatcaagtttgattagttcacctagtatctaaaccagagcctttctatgaacctacatgttctttcataaatgcctaggctcatctatgatagttcaaataacaagtacctatggtaggcataggacctattatctaatatcaagttctaattagctactctagaactagcattaagaataatcaagatgaagaatcctacagataaccaagcaagggggcaatctactaaatcatctataaccctaatgagaaaccgtaaacctaacaagaagattactcaaaca

SEQ ID NO: 173478 - DNA, 321 bp, Arabidopsis thaliana landsberg
aacctctgcttgtggattcgattgttcagaagaactacaagactcttcaggccgtactagcgtcgttgcaaaacaatggagatgctgctgctttaaacaactccgccatagatcttggtgcagagcgtgggaatggaagatgatgacgacaacaaaatggatgacgatgatatagagatggatgggggtgaaggagaaagttatagatgtgttgaaggaatgtggtttcgaggagaagagatcttcaaagctatcacaacaagtcaacaagagtttttgtatcgtctttccttgttcaacaagtctggtattcacttcacg

SEQ ID NO: 173479 - DNA, 556 bp, Arabidopsis thaliana landsberg
atagatatgcagagtgaaatcgggagattgatgttccctgaagatgctcgaaaagtagctgaatcaatctctagattccgatgttcgcagtttaattctcatcggagaatttgtacttcgatttgggtttctttgattttttcttttgtagaacttgacgagatggggaggagcattactggaaatttcacagtttcagaaagtctctgaagtcaaaacaaatgaatctaggtgcttttttttttccttctattttttttttttgttagctttgatgataattttcaaattcaatttaagaacataactgtcattgattctgcctggaaatgtgaactcttatggtaggatttcaaaattctcttaaaaaaaatgagttcttatgtttatagtgtcacttttgaccttgcttcaaagtggcacttaagattcagtagtagtagtgctacttttaatgttttgcaattttagtaagatggatgtgtttaaaggtaaaaaatgttggtgatttagctttgcattctttgccactaataaccacgtgagaatgctattc

SEQ ID NO: 173480 - DNA, 1105 bp, Arabidopsis thaliana landsberg
agaatccaaaatccacaaaagctttctaaaatcaaagtggatctacaattaacctccatgacgagtagtagtgaaagcaagattttttggttgtttggagatagtttctaatgatctatattaacattttagaaatacattttaaggaatccaatcgggtgagttggatcttgcctaatttctacaaaaacagaagatacttactataaattaatgatagttcaaaatcaaagtgtaatatttagtttgtctttcaataagttttaatcagttagaataaatttttaaattgactcgaattacgtatattttaaataaaaatattattaaaaaaaaaagaacaaaatgatgtttagttattatgggatgggttattattgtgagataggtttagatgagacatgtttttaagacgggatggatttagatgagacaggttttttttttttttttaacatcttctttgccattgttattatgatcaagagttttccagctgtaaggctgaagaaattacaatcggaatgtaatcataaaatttaaattgttcattctggggtaagtgactcttggcaagaatatccgctgatttgttctgttttcggttgatccatgtgaatctgcattgcctgaaaccgttgcttccaagcttgaacatctcgtatccaattaaaggtatcaaaacgtgattttttcctatttgaggatttccatcccctccctggtatttcattcaaaccagatttttctatgaccgtggctccaacagctttgcattgcgataagaagagcttgaaactcgctttctagagcattagaagtgtggttccctgtcgcttgacctgcacctacaaattggcccgactcatctcgaattacccatgcagccttacttggcatataccgatggttcgatccatcatagtacagcaacaacttaacaaactatcttcaacaactcccgctatggatcttttggcgcttatgaaagagtcgaaatattctaacttttcagaaaaggtgcattccatgggacgataatcttcgattagcaaagagagacgcttctgaatggcaggacattgcggatcacccccaactatca

SEQ ID NO: 173481 - DNA, 2205 bp, Arabidopsis thaliana landsberg
tatacttttcatacaaaatttctaatcttgaggcggtaattagcatttgttgattttttgggcgtaaattaacaaatatagttcatatagataacaaaatgttaaattgacaactgataaatgtttacgatcagtggacaagagtcgattagcctagtccaaatcctcaaataaatcacgtatgactagtacaattacacaattcttgaaaactaaaatatttgacatattttgagctagaaatgaaaagagtaaccaaaatatattttttggcgtagttagtcttttgttactatcccaaaacttgcttcaaaatatctacatctcctctttgttttccgatgtatatactatataccatcatccactattttcaatatattttcattgaagtaataaaattctaatattaatatctttttggttattttagcttatttatcaaacatgaattggaaaaaaaaaactaaaaaaacggtttataactctagttttatcatcgtagcttttatggtatcaagactaatatgatcgtcataatatgtatatgtaaaacagtttatgaatgatgtgatcaatagttgtgcaaggattgtacaattgttcttactcatgcatattagttgtcacttagaatacataattttatatgtatatatatcaaatctttaaatagatagactcaactgcttctcataatattcttacaacacaaaaccattattagagaggatctccgagtaccgctgtccaccgccaccaacacctagtcctcttcattcttgatttggagacattcattgtaggcaccgctttgattggcgtttactccataaccccatggttggggaaactatagccaccttgagttccttgataaggactgtaaccaccagaattcccattagtcgcttgatttccttgatagtaaccaccggagtttttataactgttttgattcacttgataaccaccggagtttacattaccaattccttgataaccgccagaaccaggagaatttctttaccgccggagtcggcaggatttccttgataaccgacggactggcaggattccttgatagccaccgatgtttccatgattggggctatcataaccggctagatctccttgatatccgtcggagtaacccgctttattgggttttattcttcattataattattagcccaccacacaaacatatttaacaatgtcttaagttccaacaatctattttactatcataacataaacttgattaacacttactaggcagcgagcaatacataatatcttttagccatagatatagtaacaaagtgttattaatcagagcaaatatcaaaaacatatgtttgttatctttacaatatcacaacttgaagcaaaaaaatgctaagttacgttaccgtacaaatatacataacaaaatagacattacattcatcatctagattgtaaaaacaaaatatgttaaattacttaacccgcggtgtaccgcgggtcatatcctagtgtttcatcattttttgagcaaatgttaagcatttttctgcttttttaatataagttatgaacatttacaccatgtggagtggcatagtcgtgttctaccatagactgattcaagtgacataattagatttttttttagttttgtatagtttggtaataatgtaggtttttaaatgagattttttcaaacaaagtttattgaaaaacaaatacttaaaaacacaatgtgtgcttttatttaaatattttattagaatataacaaaaataaaaacttaagatgagtgttaaaagcatcttgatcattgtacaagataccaactctcataataaatacatgtaaaagtcatcaattgaacgaacgggattcattttcgtgaattgcaagattaaaggaagcatggagatcttatgcaaatgttgtcttctccaagacatatatgtctagagttatatcttttgatgggtggaatgacatgggagatcacaagacacgaaggttagtcaacataaatcacaatgaacagattaataggagtgtgtattactgacttaattgagttgattttttaggactgtgtattacggagagcatcggtgctacgtatcattagcatcgattcttttcttctttttatcaaatatatatacaactatagttataattgataatgcaacataactt

SEQ ID NO: 173482 - DNA, 398 bp, Arabidopsis thaliana landsberg
atggagaaagagaaaaaaaacataagaggaagagagttcttgcaaaagtcagctccagaattaacgacgagaaagacaactttgtcgttcaatctcccaacaccaagatctcttccatctccaacgagtatcaaagacttgtacacagacagagaacaaaatcaaaatcaaaacctgagggttttttctttcaaggaactgagtgacgccacttgtgagtttagcaggaagctaaagatcggagaaggtggctttggtagtgtctataaagccaccattaacaatcccaccgtaggagattctcattcttctccacttaccgtagccgttaagaaactcaatagacaaagtctacaggtatgcgaaaggtttatgattttttttgtgagtgtattgca

SEQ ID NO: 173483 - DNA, 376 bp, Arabidopsis thaliana landsberg
caatcataagctgcacagccagattctcggcgtcaccgaattcatggtgccgtttttcctcgtcaacattggcatgcagctcaatctcgcgatcttcaatgacacgagcgtggtgttgctcgcgctgctgatcacggcgatcgcagtagccaccaaggtcgtcggctgcggcatcggcgcgttgtcattgggaacgcgtggcgcacttcaagtgggcgtgggcatggtgccgcgcggggaagtgggcatcgtcgtcgcccagattggccttggcatgggcgtgatcagtgacagcctcttcggcgtggtgctgttcatggccgtggccacgacactgatcgcgccaccatttctgaaaccgctgtttgcaaaaaca

SEQ ID NO: 173484 - DNA, 758 bp, Arabidopsis thaliana landsberg; identical to SEQ ID NO: 70616

SEQ ID NO: 173485 - DNA, 542 bp, Arabidopsis thaliana landsberg
tttcctattctcggaataggcatacaaaggattatatgtgtcaatatatagactggtgtacgttaacttgcacgggtagtcatggaaaagccgggtattgccaaggggtctgtagtaactgaggatcctaacccagggtcagacaacatcttcttaccaagcgggtgggcgacttcaagaagtgttttaataagatcgggttcaaatggggtaaatatctgtccgacattgctaatgaagtacacataaaccgtgtacccaatatgaagtggctgaaggatgtcgatgttgtgtatgctccgataaaactggaagagtgaacattgggttgctttggaaatcaaccttaataacggctaatactgtgtatacgctttaatatcgcacacacggaagtcgactgtgaaggcgagaatgactacaggagattgcgggccatacacgatgaagttcttggagttgcttgcgtttggacaccctttttcaaaaataacaaccattcgagaagcagatatggtcttctgctgtcagaaatactcggt

SEQ ID NO: 173486 - DNA, 477 bp, Arabidopsis thaliana landsberg; identical to SEQ ID NO: 67998
  unsure (1)..(477): unsure at all n locations

SEQ ID NO: 173487 - DNA, 371 bp, Arabidopsis thaliana landsberg
tttttgtttttgtcagaatgttattggattttttttgatatgcttcatagacatgatatttctattgccaatgactgactgtggccttttgggataggggaagaaagggttttggataaagctgcctagtgagtaatctagtcttgttgacactgcatttaaggttagatgatgttatggatagaaatattgttaatgattaattcttgagcaggctttggtggacaaatttatgtttggtgtttttgttagaaagggttagcatacggccttgtcgagaatgagtaccccatgccccccattttggcttccagagcctcaaagagatctaaaaatgctatgcttctcatcgtaatgggatagccgctttt

SEQ ID NO: 173488 - DNA, 425 bp, Arabidopsis thaliana landsberg
atgctcgatataaaattcatccgggaggaccttgatcttgtgaaggctggcgcactgaagaagcgcatcaagatcgatcttgatgcactcatcgcatctgatgatgcgcgtcgcgctgccctcacctcccttgaggcgaagaagcctgctcagagcgctgcatcagcagagatctcatcctcgcaggatgaagcgcatcgcgctcagcgcatctccgagatgaaggcactcaaggaagagatccagaaggaggaggaagcgttccgtgagatcatgcagacgtggcaggagctcatgctccaagtgccgaacattcccgatatgtccgtaccggacggcgagagcgatgcgaacaatgtggagcagaagacctggggtgatcggacaaagttcgatttcgaacctaagagccatgtctgagagcc

SEQ ID NO: 173489 - DNA, 384 bp, Arabidopsis thaliana landsberg
aaagtgccttgtactatgcaatgtgtgatagatgatatgttgtatacgattgatcctctttgtacttttggacatccaatagtcgtttataagccaaaggacaagacttggagacctgtgaaaggggaatccttggggagtttgcctagttatttcttttctaagtctgaaatggcgaattttggtggaaagttggtgattttgggcagtcatgggagctgctataatactggtgattgcattgggaaaaaaggtatttggtgcgtaatgatcgagttggaaaaacgtgaatgaggtgagatttgggggaaggttgaatcactcgactgtgtgcttggagacataaactttctgtcggttcggctttgtcaaactctgaccctt

SEQ ID NO: 173490 - DNA, 1645 bp, Arabidopsis thaliana landsberg
aaccaactctctatcggtttaacaatctattttacctggatggtcatacctcacaaactatgatcaccaccggctggtcgtacctgggtagtttcttctgatgttgtggtaatgactctcctcacaaagagttctcagcacatcacttgttctgtccaaattgtgggtacgagggagcaatttatttgttctttcgtctacgcatctaattttccttcagaaagacgcattttatggggggacttgtgtcaacttcgttctgctcttattcccccaacaacttcatggattgtctctggagatttaaatgaagtgttatctttctctgaccactcacgtgtgatggatttttctctcaatgattcggggatgagagacttccagaatgtagtgtcttactgtgatttggctgaccttcattcttcggggccaacttttacctggacaaataatcaagaggagaaccctcttgggaaaaaacttgatagagctctgataaatacaatatggttatccactttcctttactcttatgcggcctttgaagcaggaggcatctccgatcattcccggtgtgtagttcatctctcttctccgcttttttaacttcctggcaagtcaccaacagtttctttccacagtggcgcaagtctggtatgccactccttcgcttttccattttcgagtggccatgtctctaatccataaaaaattaaagagcttaaaagttcaccttagcgagttgaaccggactcagtatggggacctgcctcaaaagacaaaagacgcttacgggaccttctgcactttacaaactgaagctttacatgatccttccccgagcaatgtggcagcagttaaagaggcctcagaccgctggcacactctagcaagcctcaaaccttgaagaaagtttcttcaaacaaaaatcttgtgtaacaaaaagactccaacttctttcctcggttatcactcgcattactagcttctggtgttctgttttccggttactggctcgctgtttcgatgaaattgagaaactccgtagtgcattactatggaatgggaacccaaatataaccactggctccaaggtctcttgggaggagatttgcaggcccaaatcagtgggtggtttaggtttgcggagacttaaagaggtttcaagggtttatgcttttcggttaatatggcgcttattcagttcttcgggttctttttgggttgcttggacaaaacaaaacttaatgcgtcacaactctttttggtcagcacctaatactacgacgggttcttggatttggagaaaattacttaaactaagagatgacatccgtccttttattcgggctgatgtgaaagatggtttcactgtttctttttggcagggttattggctccctatgagtcggctaatagatctcacgggagagacatggcaaataattctcggtataccaatttcagccatagttaaagaagctatagatttgcaaggctggagaatgcggaggtcgagggttagtgcacatggctccgatcatagagctactgcaaacactgccaccgcttaccacttccaacgctccgaacaccaatctatggaggcatgaccatgacgtcttcgagcagaccttcgcaacca

SEQ ID NO: 173491 - DNA, 1184 bp, Arabidopsis thaliana landsberg; identical to SEQ ID NO: 11470

SEQ ID NO: 173492 - DNA, 1965 bp, Arabidopsis thaliana landsberg
aattttaaaagattttttttacaaaacgatgttttttcatacattttatcttttctttccacaaaaagactgcttcaacgacattattctccagaaagtgaaaaaatgtgtttgttctttttcggcgttttaaccttgattatgctatacaataacatgatagtatcaaagaattcattgattttgtgaagtgtttgtttaatcggaaaatcaagtcgagtataaagaagctctttttaaagattcatctggatgatgaaaatcctcacctagaccaaactcttgtttgtagctcgatatgcaatgtgcttcaaggtgatgttgttgcggatattgatatgttcatcactttaacaagggattatttccatcttgcaggtttgtctttgttgatcttcaagtgtaagatactagttaagctgagattacaacgcgattaaactgaaactgcataggagagattatttaaatattaaaaaaattatcctcttatataattcattgtttggtttatctcttatatttaatcgttcgttttgtacgtcagcaagattcttgtaaaggatcaaatatcttcacaaattcacagtatggtacttattggtaagttgattgtgtacaatttataattttttcttatatattattaccgatgatttctagtgagtttatatggaattttatcaaccatttcctaacattttattttcaaagtaaatcatgtattgatggaaatgttttaactccaaaatgaattctttttttctcacgtggataaaagaacatatcaatgttctttatttgtgcattcttctcttctctcattgatataaataacatttatttctccattcttattctagatttgtatttttaagtatttaaagttattttatatcaattataactagagagccaaaatacagagaattgtaacaacaataggttttaaaaaaattagaatatcaataataacaaaatatatgaataaaaatatataaaaaagcttgaaccaacaataatgaagtttggatggaatttaagaatcaataaaccaataaaatattaaaaatctacatataccaataatccattttagattttacttagaatagtagatttatgatctatcatttatccaaaccaaaattagtgatagtgataattacactttaaaaaaatgaaacgaaatactgacaaatgtcattcttatagatttgattcatcatgtaaccaatgtagatagtcttagttatgatggttgttgctaataattattacatcaagactctattaaggttttaccatggaggtagtgccgtccatgagaataagcgaacaagtatttggttgcggttttcagaggatattaatcggtctagtttttatgaaacttagctggttttaagtaatcatgcatctcgattcgaatctcaacgtcaatctttcgtgtttttcaatttattctttaaaaagtcggctaaacaaaatatatgggcttgcagtccaaaaatgttcatcttaaactctgcatggaggctataacatgatgttagtatatccgcattgaagaaaattggtaatttgatttgagtaaaatttagatattaaaagtataaattctttttatggattattatcaataattttcatgagtttttttttttttgtgtggcgttcatcacagtggtagtcatgatgcaggcatggtaatcacatcatggtccccccggtggtggtcatcatagtcaaagtggtagttgtcatgatgttgttccttatgtatccaaggtcccataggtctcatatattcatagtttagtgtcacccaatatattataggtctatggttaaagtagttagtttttcttcttctttttttcttgccaaattcatgtgactgaaaacgaaaaatctacctcgaaggtgaaagtagtaatagcacttttaaggtaatctatgttt

SEQ ID NO: 173493 - DNA, 640 bp, Arabidopsis thaliana landsberg
gcctagatagtataactaaaaatggacttggtgaaggagtcatacttgcaaacaagtatcaccaggctttgaaagcttttatttcaagaagcttccctgtcaatggtattatcgcttgcatgagtcataacacagatggtctctacaggtaagcatcgagacctacaatattgttctcactgttaatcaagaatcattgtaatcccttctgatctcttcttgtaatgatacttagcgcaaaaaagacagctgttctggcatagagatccggcttcacacacgatccacattgcttctgttgcatataacacacttttccttggagagtttatgcagccggactgggacatgtttcatatacgttaaattgattcaacatcaacaaaatttctgaacttgtgaatgaatctatttgtttctcactgcagagtttgcacgcagcagctcgagcagttggaggatgtgccatttatgtcaagtaatcataaggttcactaacattttacaaccaaagtatcatagtaaattgagctgcaagttaataaactctagacattgaaacttgttaaacagcgacaaaccgggacaacatgacttcaaccttttaagaaagctagtacttcaagacggttccatactc

SEQ ID NO: 173494 - DNA, 403 bp, Arabidopsis thaliana landsberg
tatcacccgcctgactttgatatcaaagcgggtaaaaagaatatcagtttacacactactcgaggattcgaagtgggctctcgccaagcggatcaagaacatatctatggataaaagagatattagatactcgaacgtggttgcgtacgatgacaagtgtcttgtgctgagggaatttaaagacattaagcttggcagtgtggttcatgtgtacgacatggaaactaacacttggagagttttaggggccatatgtcagcacgctaccgtccaaaaattgtataagattacaccctctttgttctttgtcgaagaggatgatgagaagcacaaggtcgttgtagcatctaatgaccaacacatctatctaaacgcggttttgggtgtcattgattcaaccaag

SEQ ID NO: 173495 - DNA, 197 bp, Arabidopsis thaliana landsberg
ctgtgtaggatcatccgcgtgtgtggcatgcgattgaaaagcaaagacagcttgatcactttgtatgtgctgaatgcagttctgatgacgatgtcaaaagatcgcagaatgggtttacttcatctccagctgatgatgttaaggtccgtttgtctctctttagtcatctcctatatagatgttctatcacttattta

SEQ ID NO: 173496 - DNA, 630 bp, Arabidopsis thaliana landsberg
gggttaacgtttttaattacgtaattgcatgaactttgttttttacatccccttaaagtaatatctaatatcgaaacaactttaatctttctagacatcccactttttttgcatttagcatgatagtatagtacttactacgccaagatattctttatttgcatccaataattttaattgagtaaaatttattgcataaaaacaaacatttttttaactaagtttactctggttcatactagatcctttaccataaaatatgctaactttttctactataccaaagatttaatggtaatgtgtaggatgagaaataacattttgggatgacaatttttactagatcgttaactgcaactccttagagaatacattctcttgtaactatcaaatgtctgttttcatttctttattgttgcagccttgaccgaacaattgcatgcagaaattgaaaggctaaaagcaataataatttcgaacgaaaaagggagtgtgaaattctaaaggctcaaaatggaaacctgtgaagtattacagtaccgtcgcgagtttgacagatccaacatgcaaggaatggacccaaacatgttcacttggtctcagccaaaccttggtttttatggacagatt

SEQ ID NO: 173497 - DNA, 483 bp, Arabidopsis thaliana landsberg
acggagcgcgagcgtcaacaggagctggagaaccttctcatttgtcctgaaggaccccagtaggctggcgacgggggcgatggtgaagaccaggacggtgaggagaggatctataaccccctcaagctacccctcgcatgggacggaaagcccattcccttctggctgtaccgccttcacggtctaggcgtcgaattcccctgcgagatctgcggaaactttgtctacatgggcagaagggcattcgacaagcacttcaacgaggcgcgacacatctacggcctcaagtgccttggcgtcaccaacacggcgctgttcagagatatcacacgaatcgacgaggcgctcaagctatgggagaagatccagagggagaagaagcgcaacaaggtcgacgagggcagcgtggtgcacatggaggatggagagggtaatgtcatgcctgagaaggtgtactatgatttgcagaagcagggtctcttg

SEQ ID NO: 173498 - DNA, 469 bp, Arabidopsis thaliana landsberg
gtaagtaatgaagctctctgttaagatatatgctctttctttaagataataactcactctttagtctttctgtgaattcaatcatgttcgtctatcgggttgtctcgcataaagtagaagctcaggttcattaagttcggcatagtaggccaccgggtgtatgaccctgcattgagtcttgtacatgttatgccagatattaagagaaccaattctctcaaatatgtttatgtttggcatgcgatacacggatattgagaaggattctaacccagtgtttctggtatgtgagcagtgcgaatcaaaggtggcgtatccagtttcttaaccagcatattatgtacaatgataattgtgtatgcttagaaagtagatctaagaatggatttggcccaggcctcatgcttgcaaagaagtgtcaccaaaatttgaaagtttatatttcaagcaacttccctgacaatggtat

SEQ ID NO: 173499 - DNA, 1335 bp, Arabidopsis thaliana landsberg
agcaccacttcttctttcgtcttaatgtccacctttttcagggttagatttagttctctccataagttttgttagccttgttatctgaccaggatatatcaatcaaccctttcacttctctccataagttttgttgttttgtttctttgctaaaatccatctgctttgttgcatcttgcagattatgacacttttttggccctttatttgctcctgtaataaagggctttcattatttcaagttccgtagtacaacctaatagtagtttggctcctgaacgtcttacttatggaaatgggcatccatacaatgtccaagcagtgcagtctcgagtgagtagaatgcagcagcacaaaactattaaaatgagcattaggagagaacccttttgtgtgcctgataactgagaagtcactggaatgagtataaaacaatgtcttggactaaaattacgtactgtgaaattgatcaaaactagtaatcagaagagaagttattgtttctttggtatggtagtcactggatttggttttcttgcatattgactctgttccatgttttatttccgacgtttaggagatcagaagcatatgaactctatcactccagagggactacgtctacatggagaagttgaccaaaagattcatcggtactttagaaaagtaatgtgctttcagctacttttttggcatgaaacttatcagatgatcccgacaagtctcaagtaagctttcttgaagctgttctagtcactgatgaatcaaaacaataagtaagttatccagagaatctgttattctcaaggtatcgtaaaaagccctgacttctcttgtgtattgtctaaggaaaaggagcttaaaacctgggggaactgcggaccttaacctaggaaaaacaagacaggaaacatgataagctggagaaatcaagaaaagtcatgtcgggaaaaccaagagcaatggagatagatctgatgtcttgcttacatatagccggaggaagatgagagggaaatcaattggtgttcgagttaatggctttctagtttatactcggaagaagttaaaattcagaggacattttgctagacatgacctaagcgaaaccaagaataatggtgatcaactttctattgtcagatctctagaactcgtagacgatacccaagttaccgaagtgacatgttcttttgatggaacaaatgacagctggttggtattccactgatgctggggtgtctgagacagatccagacacgtagtagcagccctttcaggcagtgtaaacaaagtgatatgccaggaactatcgaaaatatgttaatgtgtaat

SEQ ID NO: 173500 - DNA, 884 bp, Arabidopsis thaliana landsberg
  unsure (1)..(884): unsure at all n locations
attttattcctaggagtgttttccaatagtatcataaccatagaaaacaaatgcaacaacacaatttggccagtcatcttttcatggcggtcacaagtttccaccaccggcttcactctcaagaccggagaggaacgtgccataaacgcaccatcttcatggtacggtcttatctcagctaggactctttgctccaatgactcaacaggaaacttctcatgcgccacgggagactgtgaatccggcgagattgagtgtcccggcacctacaaatggtctcctgtaacttacgtcatatttagaatcgatgacggccaaatcaacagctatatcatcagcctcgagttcggttacaaccttccactaacggttgttccgtcaaacccggcatgtatcagctcaggttgtatggttgacttgaacaagacatgtccaaatgatcttaaggaattctccaggagaggtttagtcgcctgcaaaagtgcgtgtcgacaatccgcatccgatgagaattgttgcactaattacttcaagtataagcaaacttgtaagccgacagcgtacgtacagaacttcgaccgtgcttgcccatccgcttatagctaccccttcagcggtaataacagtaccttcacatgcacaaattcaactgattacgtgatcacgttttgtccctcctccattcccaacaccacaaggtaattaaattcccctaagctatatatgatacatatttttgttaggcagatagtcattgttagcaaaatctttcgtaaataatgttgtgcattttctcacgtttgttttttcttttcttaaaccatcatactatatatgtaaaatgacatgttaactacgtacaatttggccacntactataattt

SEQ ID NO: 173501 - DNA, 1180 bp, Arabidopsis thaliana landsberg
  unsure (1)..(1180): unsure at all n locations
agtgtgaaactgattctaggattggtagctaagaagggctggagtacaccacaaatggatgttactaatgcttttttgcatagtgatttagaagaagaaatatacatgagtcttccagaaggttatacatcatcatctggagtcttcccacctaatccagtttgtaaacttcacaagtccatctatggtttgaagcaggcttcacggcagtggtacaagtgtttatcacaggttttnnnnnnnnnnnnnnnnnnncaaacttgttcagacaatacaatgtttgtgagactcacgggtacgtctttcatagctttattagtctatgtagatgatatcttgatggtgggtaatgatgatgaggcagtttagtctattaagagtgttcttgctgcaagcttcaagctaaaacatatgggtcctgcaaagttttttctgggcttggagattgctcggaactctgatgggatttcaatatgtcagaggaagtattgtcttgacttgctgacaaagacgggtttattaggctgcaaaccaaagtcagtgcctatggatccaaaggtgccgatgaacaaagaaataggtactcttctgactgatggaacaccatatagagaactaattggcaggcttctttacttgtgtgtaactaggccggatatcacctatgcggttcattgtttgagccagtttttgtcctgcccaacagatgtccatctcaatgctgctcatcatatagtgaagtatctcaagaataacccagggcaaggtctattttattcggcaaacacagaattgtgtttaaatggttttgctgatgcagactagggtacttgcaaggatagtaaaaggtcagcaagtggcggtggcataatttataggttcttctcttataacttggaagtctagaaagcaggatgtagctagcagcaatagcacaaaggcggcatataggagtatggctgctgctacaaaggagctactatggctgagtcaaatgcttcaagagttgcacattaaagttgacttcaaggccaagctatttgcggataacaaatttgccatgcacattgcgaataatcctgtctttcacgagaggacaaaacatgtggaaatagattgccacaatacaagggatcaagtgaaaaaaggttttctgacagttcatcatgtgactacagaa

SEQ ID NO: 173502 - DNA, 245 bp, Arabidopsis thaliana landsberg
acaaactttcacatgcctgcaggcattcttgcaaaaattgttagctatatagctgaaggtaggattggtgagttaaagaattggattttatctgggagggagggaatggtagatgtattttcaccagacaacctaaaatcggtaaggttggacaaaactagagattttgtatactggtccagccttgttagtgtctacaatcatttttttttcgaaatgtgtaaaggcaaaaaatccttatgcat

SEQ ID NO: 173503 - DNA, 428 bp, Arabidopsis thaliana landsberg
cagcctacagaagagcttcgagggtcattccgcttcaagtcatatattctaatcgctaagatctacaaggtaagtgttctggtaagttttttttatttccggttttcgaattctctttcttgttttaacaatgtcgtggtgaagaagagaacgaggaaacaatataacttaagcctgaagatgaaatttttctcgaggtacttattctcacattacctactcgacttcccgtctgttagcaaaaaaagttataccctaaacatgtgttacaaaatgtattgcagcttagctcttggtcattcatattacctatgtactcgcagcttgttacatctcaagaggtaagttatctctttaatgccaacatactttccctggaatcacaaaaatttgattcaagtgtttcaggtttgtaatctttggttata

SEQ ID NO: 173504 - DNA, 464 bp, Arabidopsis thaliana landsberg
gcatttggatctctgagaaacaatcataaaggcaatggtaaacacccaaactacacgggtctaccatcttacgtacttggtcgcctgatcattatgaaggcggtgcgtggaacactggtggatcatgcacaggtaaagtagagccgcttcctcctgggaatttagttacaaacgggttcacagagataatgcacgagaagcaagcaacagggtttcaccgtcgtgtcgcggatgataagctcgggaatagatcgaagaagctgaagctaatggatatcactgaggctttcgggtatcgccacgacggtcatcctggtccatacaggagtcctgacccgaaaaagatcacaaaacgtggaccagacggtcagcctcctccacaagactgtttgcattggtgcatgccagggccagtggacacatggaacgagatggttctggagattattaggagagattttgaa

SEQ ID NO: 173505 - DNA, 376 bp, Arabidopsis thaliana landsberg
aaaccggatcgagttaaagaagaacaagaggttgaagaagaggcaagattgctagcgagaaggatcgcgaatgcagccgcattacctatggttctcaaagccgccttggagctcggcgtgatcgacaccatcaccacagtaggaggtggcgatttgtggctctcaccttctgaaatagcactaagactcccaaccaaaccatgcaacctggaagctccggctttgctagaccgtatgcttcgatttctcgtcagccattcggtcttaaaatgccgtactgtaatagaagagaacggtcaaaccggaaaagttgagagggtatatgcagctgaaccggtctgcaaatatctcttgaacaaaagtgacgacgtctcgg

SEQ ID NO: 173506 - DNA, 676 bp, Arabidopsis thaliana landsberg
gaagaagatgaatttggcgatatagtccaacttctatatgtgttttattctttcagtttatagccatcattcctcatatgtactttattgatgcaagctatacctgaaatcttcttttcagtttgacgagcaccagatgaccaagataaaaaaaatgagcagaggaattacgggtagagtcagagagttgcattaggcaagtgcttacactttgtctacgttcttgaatcagtaaacgatcttgctcaagtcatgatggatctttctgcacttgtgatagatcaggtaaaccttgttaaaatccatattctctttgtctagcttatgattcttccttcttccttcaggaaaataaaataaaatattacaagcaacccatttcgttgtagctacaatagttgatacgaaatttgctagtgagatgttatgaactggaccaaatttcacttagatcatgtatgttattgtttgttgtagtcaagtttaccatacatgtaaagataacagttctgaatgttgcttatgtgttttggatatgacaccagtaggattggtcattgagctatagtgggaatcatttcactagctcacttatgaatctgataattgcttttcctacttggatctttcccttctgaaatggcaatttaaataggtgtgctttcacttgaaatct

SEQ ID NO: 173507 - DNA, 338 bp, Arabidopsis thaliana landsberg
gtcctaaacactatgcgtgtaaaccgaaatattggagtcaccgtaggcatcaagatcgaagacttggaggcacttgcagccaacaaagacgcagttaaatcctggttaacattgatccttacatagccgacgtgaacataacattcattaccgtcggaaaccaagccatcccgggcgacaaacatggccctcacgtgcttcctgtcattcaatctctcaccgacctcgtcaagtcaagaaatctccagatatcaatcagcaccacggtccctacgacgagcctcgccaggttgaaaccaccatctgcaggagttttaacaccccaagcacgtcaacag

SEQ ID NO: 173508 - DNA, 165 bp, Arabidopsis thaliana landsberg
  unsure (1)..(165): unsure at all n locations
acgaccgagacgcggagaagcacaacgcccacagacgcggaggccagcacaaacccaagacggagacggcaccgcgaggacagcccnagaacaacgcaagaaacgagagcgccgaaaccgaaaagcagcacgaangagcaagacagagcacaccggaaaggaaag

SEQ ID NO: 173509 - DNA, 337 bp, Arabidopsis thaliana landsberg
  unsure (1)..(337): unsure at all n locations
caccgagggacgatgacgagcttaagaaatcggaaggcgcacaaaaggttacagactgtgtaacatgcttgaaggtggacgcacgccattgcatacgcctgatgagcttaaagnnnnnnnnnnnnnnnnnnnnnnnnnnnnnnnnnnnnnnnnnnnnnnnnnnnnnnnnnnnnnnnnnnnnnnnnnnnnnnnnnnnnnnnnnnnnnnnnnnnccaaagaccacttagaaaagatgataactttcgaagagtttaaccgtttggtgaacttggattcatggtatgagctcgaaaccaagtactctaacctcagaaacgctcttggggaaacaaaataa

SEQ ID NO: 173510 - DNA, 852 bp, Arabidopsis thaliana landsberg
ctttagagcgagttatgaatatcaacaaatagcgagttgattttatagaaaagtatacaacccttgagaaccttatagtgatatattaagattagtgtgtcattaaatattgtacttgcattcgttttttgtttgaagtaagattcacatcttgtgtaaagtttgagactttgagaaacagatcttcttctgttttctagatatctcatggttttgatcatactttatcatattttggtggacaaaatgaagaaataaaagaaacatatgaaagtgagagttaccaaccacaagagttttgttggatgctttgtcatttaatttatgcaccaaagaaagtctaaaatctcacaatcaccaatcttagattgtctttggtttggagttataaccctttctttgattggttgaagtcagaaccaatgttaaccggtaaactgataagattacaacttacaagtagctatcagaccaaacttcttctagttttatcttagcataatctttttctcatgcttattcgtcatcatagctttccacattctaaagcctaatccaaacactatttctttcaccatcccaattccgaaaactttttttattaaatcctgttgtgtcactatcgatggaggtaacattttcagttcaccacaactttgtgattagtcatattctctgttggatgtcacactcaagaagcaaatctcatctcttttacgcactgataccgtcctctcttcgtgtttggatccggattttctaagcactaaggattattgtttggtcattttgtcttctgcacctacctcatcatcacttctagcttgtcctataccatcttcttttgcccat

SEQ ID NO: 173511 - DNA, 969 bp, Arabidopsis thaliana landsberg
gtttttcccgcaggatgatctttcgtttaagcttgagtatgtacacccatatctagacggtgtttccaatcctagaaactgtatcttcaaaaaaacaagcatcttcaacagtagtaaacttagctcagtactcactggagaacctggatttgaggaagtagtggcaccaatcttgatggatcgagctggtgtgaaagctactataactgaggtaattactaagtccctcatgattaacattttttcttctcccacaagcatctaaacaatctaggttgtttgtttacgcacatgacttcacacgtcagagtaaattaacatatggagttgtgttggaagagataacaactagagatgaaaacgggaaatctcttcaaaaagtaaggttttattacctaaaggagcaatcaatgttaatggacctccaacaactctcagtggtatgggcatcgatcgtgtagcatttctacaaggtaacataacacaagacaacactaagtttgtgaatggagctattgttggagagaggaagatcatccaggtggatcaatgcttaggtataggaagcaattctccactcttcaaccgccaccaactaaccttaacaaaattcattcctctgaggcaattagaagaaggtcccagtaaaccgcaaccaccaggtctagttctccatggccataacgctagatgtgtaggtgatctaccaagctatgatgctttttctcttggaggtcctaactctgttcgctacactaagggagagctcggtgcagctagaaacattgtcgagctaagtatgattcctaaacttatccaaatcgttttaaaactaattttcatagtgacttttggtgttaaaattgtataggttggtgctgagcttagagtacttgtgaagaacacacaagtgtatgcatttgctgagcatgaaaatgatttgggaagcttaaaatatatgaaagggaa

SEQ ID NO: 173512 - DNA, 295 bp, Arabidopsis thaliana landsberg; identical to SEQ ID NO: 64882

SEQ ID NO: 173513 - DNA, 411 bp, Arabidopsis thaliana landsberg
  unsure (1)..(411): unsure at all n locations
ggttgttttggcaaggtgcaaagccgacaggtgggggaaacagcttgcaagaacggcatcattatttttgacgatgcgaagaacaatccgcacaacctggattttatcccaaaaagggtaattgcctttatgaacgaagggaaacgncacatgagctgcaacttccccgacttgcagccacaccgtattaacaatgcccaccgccttattcacatccacaaaaacgtgccgggcatattagctaaaattaatgaggtatatgcccggcataannnnnnnnnnnnnnnnnnnnnnnnnnnaaccaatctgcagattggttatgtaattaccgacgtggccgcaggttatgatacccnnnnnnnnnnnnnnnnnnnnnnnattgaacatactattaagttcaggttgctgtat

SEQ ID NO: 173514 - DNA, 209 bp, Arabidopsis thaliana landsberg
acggatttacgtttatggtaggaaaattacgattttatgtttttggcggaaaaattacgggtttatgtttttagcggaaaaattacgggtttctggttttggtgggaaaattatgggtttacgtttttggcggaaaaattacgggtttacggttttttgggaaaaaaattaagagtttatgtttttagcgggaaaattaagagtttatg

SEQ ID NO: 173515 - DNA, 485 bp, Arabidopsis thaliana landsberg
ttccacgtttgcaaactgcggatttgtccccacgaatgagaacatgatcatctttcgcaaaaactctggtctcatctggctcctaatccctcaagtactgatgggaaacactttgttcccttgcttcttggttttgctcatatggggactttataagatcacaaagcgtgacgagtatggttacattctcaagaaccacaataagatgggatactctcatctactctcggttcgtctatgtgttcttcttggagtgacggtgctagggtttctgataatacagcttcttttcttctgcgcctttgaatggacctctgagtctctagaaggaatgagttcgtacgagaagttggttggatcgttgtttcaagtggtgaattcgcgacacaccggagaaactatagtagacctctctacactttccccagctatcttggtactctttaatcttatgatgtaagtttctatcaatcctctcctcatag

SEQ ID NO: 173516 - DNA, 285 bp, Arabidopsis thaliana landsberg
gagactgatatcgaagaagcagttcaagtctcgtttgacgagaccactaatttctgtttgggacccgcaagcaaactcgtggtcaagtccttaaccaggaaaatatatgacaagattaattatacaggcgaaagatgcacaatttgtttggaagagtttaacactggaggaatacttgtggctttaccttgtggacatgactttgacgatgagtgtgccgtaaagtggtttgagaccaatcacttttgtccattgtgtcgttacgagttgccacgcgaagaagat

SEQ ID NO: 173517 - DNA, 270 bp, Arabidopsis thaliana landsberg
aatatcctttacattctttttatttttgtgaattataacgacatcattttctctaattatctcccaatttttgtgttaaagtttcttgaaacgttcagtaaaaagaagggattgttgagtagaactccacttggccgtgttggagagccgaataaagtttcatcactagtggtcttcttgtgtctacctgcagcttcttatatcacaggtcaaaccatttgtgttgatggaggtctcacggttaacggtttctcctatcaaccacatgct

SEQ ID NO: 173518 - DNA, 666 bp, Arabidopsis thaliana landsberg
tggagtccggcgggttccgggttgaaggcggtgatcgccggcgcggtggtctcggcggtgttctacgtgatcgtgcagaccaaggtgttcgcatcggcggtgtcggattatttccacgtgggcagcgacaagagcgcagccaccggttttgatttcagcctttcgttcgcgctgttcgccgtaggccatctggttggcctgtgggtgggcgtggcgatgctggtcggcgcgctgatcggctggggctgggcggtgccgcacttcctgctgctgcatccggccagcgggctggcctcggaagtggcgcagggcgcgtggagccactacgtgcgcttcgtcggcgccggcaccatcggcgtggcggccatctggacgctggccaagctggtgaagccggtgatcagcggcctcaccggcgcgatgcgcgcctcgcgtgcgcgcaagagcggccagttgcataccttgccgcgtaccgaacatgacatgccgattggcatggtcggcctgatcaccctgttgtgcctgattccggtgggctggctgctcgggcatttcagcaacgtcagcgggctgggttcgcacacggcgttgctggtcaccggcggcataaaaaacgtggtgatcctcagctttctggtttcggccgtgtgcggctacaagcccggc

SEQ ID NO: 173519 - DNA, 422 bp, Arabidopsis thaliana landsberg
tatgcggcgctcactgagcagaaatccatccatttggaaaccacgtggccttttaacgttgagacgatgcgtacggacacccatcttctccagatgatcacgagcaatctattgggcaatgcagtgaaatatacgaacgaaggcggtacggtacgcttctccgttaccgatacggaagatcagatcagtatcgccattgcggatacgggtatcggtatcccactcgccgatcaggagatgctcttctcaaagctctatcgggcctcgaatgcgcggtccttggtaacggacggtaccgggctcggtctctatatcgtgaaggaagcgatccatatactcggcggtacgatatccttcgtgtcaaagaaggagaggggagtacgttcacggtcgtgctgcctaagaacggtacataacaagaa

SEQ ID NO: 173520 - DNA, 219 bp, Arabidopsis thaliana landsberg
tcttactactaccactacaagaaaacagacaaacaacgactacagaaagcgacaacagatgtagtcgtcgtttttggcgactacgtcacgaccgttttacgacgcatatacgacaacatgaacattagtagtcaattagtcgttattttacgactaaatatgttagtcggcatatactcgtatagtaacgacaatttaacgattatattatagaagaaa

SEQ ID NO: 173521 - DNA, 700 bp, Arabidopsis thaliana landsberg
  unsure (1)..(700): unsure at all n locations
gccgctatgtctcctgctctcgagnnnnnnnnnnnnnnnnnnnnnnnnnnnnnngatgattcgaaatctaaggtcacggtcgttggtagtggcaattggggaagtgttgctgctaagctcattgcttctaatgccctcaagcttccttctttccatggtaattaacgtttctgtcgctcctcgttacaaatttgggatctttctctttatataatatggttaatgatttggtttgtgtcattatcatctcaatgctctgtttttttttgaaacattgtttctgcaaaactcatacttttatctgtgaaaaaattgaaactttgggcaatgttgagaattgttcaagttttgaatggttgaaaaagaaatggttttgatgaatacccaatgattttcagataaagtgaggatgtgggtgtttgagaaggttctaccaaatggtgagaagctcactgatgttatcaacaagaccaatgtaagaagaacaaatggataattttggtcttcattgatttatgagttttagtttccattttactatttattggtttcttgagtaggagaatgtcaagtacctccctgggattaagctaggaagaaatgttgttgcggatcctgtccttgaaaataaaggtgaaaaaaactctcactcatgagctttttctccttttacatgatcttaaatgacggtttttagtat

SEQ ID NO: 173522 - DNA, 1049 bp, Arabidopsis thaliana landsberg
agaggctcatcaactgtattgtacactgctgaaagaggaagacctcagtctagaaatcacaatagaatgggaaaggcagaagcaggagcaagtcaaaatcaaagctgacatgctggttctgtaaaaaggagggacatgtgaagaaggattgttttgctaggaaaaagaaacttgaaaatgaaggtcctggagaagcaggagttattacagaagctcttgagtattttaaggcattgagtgtcagtgacaagctgataaatgacatttggatactagactcagggtgtacttctcacatgagttctagaagagattttgaggaaagtggaaagacaaagattctacttggagatgatcactcagttgagtcaagaggaattggttccattcgtattaacacatttggaggttcaatcaaggttctgaaaaatgtgaaatatgttccggagttgagaagaaatctgatttctacaggaactttggataagcttggctttgggcatgagggtggagatggtaaggtcagatacttcaagaaccaaacaacaactttaaccggggttcttagtaatggcttgtatctgttagaaggagaaactgtgatgcaggaaacctgcattgttgagaaaaccaaggatagtacagatttatggcatagcagacttggtcatttgagtttgaacagcatgaagattctatctggaaaaggtttacttgataagaaagatgtaaaagagttgagcttctgtgagcattgtgtgaaatcaaagtgtgtgagtttcaatgttggtaaacatgatcctgaagaagtgcttggttatgttcacgctgacttgtggggttcatcaaacgtgcctccatcattgtcaggagagcagtattttctgtctatcactagatgccaagtctcgaaaagtgtggttaatgtttctgagaacaaaagatgagacatttcagagattttgtgaatggaacgaagaagttgagaatcaggtaaataaaagagttaagattctaaggacagataatggtcttgaattttgtaataa

SEQ ID NO: 173523 - DNA, 365 bp, Arabidopsis thaliana landsberg
  unsure (1)..(365): unsure at all n locations
gtgcaaggagtatcgacattgcagatcgccccatccggctcatccatgaagctcttccaatggcccgctctattgctctgcgcggcagctgtcgggcaactgttgcatcacctgaccgtaccggcggggttgttcctcggccccatgttggtggccatcctgttcggcgtatcgggtgcaagactgagcctgaatcgacaggtatttcgcttcggccaaggttgcgtcggtctgctggtcgcccattcggtgacctgngcggtgctggtgtctgtggcgcaatcatggccattgatgttgctcgcgacgctgatcaccgtcgtgctcagcgcccttggtcggcctgggcaccgtgcgcttgggcg

SEQ ID NO: 173524 - DNA, 2815 bp, Arabidopsis thaliana landsberg
tatagaatagcacaaatgaacatttaattctgtttgagaaagccatttcaaaactaaaatcgaattatcgattaccataattgatttcatgtacagtttaattgatctataaatcatatgtcagagattgtataacacaaagacataatgaatcgagtacctcagtatcttctgggtttacgaattttgtgataatgcaaattgcaggagttttatatttgtattttgaattggttggatcatagtcgagacagtgtgagtagaagaagacacctatcggtgagatgtgatatgatttcgggaaggattcgattaaattcattcagtttttgataatcgaatgaaaggaaactcagttgtcgattgaatgttttgttatttggatgaagaacaatgcaggaaaacaaaataaagacttctttattatggtgtcattaaataattaactaatcacatgtaagcaattgtttaaccacttatcaatatttacaaagggctttaattacacttaagggcattcttaatggtagtatccataaatattagcaatatacagtactatagttacattataaattatattaaacaacctaaattatattaatctaagtattatttttggcaaaccatttaagtattatataataaatatttagtatagaaattaaattattgtagaaatttaaatacatcatatacttcatataacaatagagcacccatgtaattttaatgataattacagttacaatccaaaaattaaattttaaaccaattgaatcatatgaatttacatgtaataaaataatattgttatttaaaaagaatttacacttatgatcatgtaatcataaaattagtacaaacacacaatgtatataaatagaatattatacatgtttgcggaactttacaaaaccagaccgaaacatacaaatataatcactcatgtcaataaatataaatatatagtagaaaaatgcaaattaactataataatttaactgtcaattatattacaatgaaaccatcatattacgatcaaacgcaaatactcaacccgcggtgtaccgcgggtccgtatctagtaaactaaaaaaacttggaacctagaggatctctattagattttctcagatttcagattctaataataagttatgcatgtattgggccggacacaaatcccaggcctactaataagatccaaagtaaatagctattacggtcagataaccaaggataaaatctgcagaatcacgatttagccatggtaacaaaacccttagaaggacacacatcgagtaccagattttagctgacacatggaattatggaaaagaaagaaagagaacataatcacaagcattcaagtcttggagcaaatgattgtagaaactatactcgaagcagaggtgtttaagtaacacaagcattagcaacctccaacaataaaaagaagaataatgatacaactaacatctactttcacggtttcgactctcacatacacagcatccccaacctccactatcgatgcttgccctgaaaactggccagacacatttctgaaatcatcttctgttagatccatgtcttcctccatgtctatacttatttacccctcctcagctgataaagtcaagagcgaaaaacagaataaatcctggcgactctcgctacttttggtcgttgatccagcgacatgcaaacgaacaacttttggtcgatgtcgctggtttcagtcgccagcgacatgcaaacgtagagggccttaaacgttaaagcaaaacactctaagaaacggaaataaagaaatggaaactcgatataacttcctaaatcagtatacacaaggaatccatatcaacaaaaggattgagatcatgtttctaaccttccaaaccagagccgcttgaagctgccatttttaactaaaacgtgtaaaattattctctcctcaagtttcactaatcatccaccaaagataaaccctgcataaaaaaagcatacaccaatgagcaattccaaaaactctacacaacattcagaatctaattgtactatcaagaaaaaagaaaccatttctcagtgtaaacaaaatcaacagtaaatgtttggtgccatgtagtgaatcttcccacagtttgtatcagcaacaataggcccttcagttgcccgtgtatcagccccaagtatcacaccatcctacacaaaacagataaatgaaatcagcaatcatctaaaatagaatgtaacaaaggtttataccaaatatgataccaactgaaggtacctattgaagctgcagaagagactggagaaatagttaaagagcaaaaaacacctaagaagctcatcatgacccgcaagtccaggacattcttagaagatgactttgctttgatgaatgatttttctatagagaaggcggtcgggctttgcgagttcaagggaagagaaggcatagattcagatttcaacacagatggtttcttgttcgacgattctctatgaaaagaaaaggctttacaggttcgatacgcacgtcatagattcaccaccttctcgcgtcgtcactacagagataccaccttcccgcgatccgacgacaccaccaccaccaccgccggagtggttaatgagagagatggcgaaggaaaacggctataaccctaggctgatcatgtctaggactctgacgaagaacgatgtaagcaaaaggcaggcatgtctcttgattcttgggaaacttgaaggatcagaatttcttggaagacaaggaagctttatggggatcctctagagtcgacgg

SEQ ID NO: 173525 - DNA, 291 bp, Arabidopsis thaliana landsberg
  unsure (1)..(291): unsure at all n locations
tngtttatgagccatggaaatactggcgctacccagttccatcgattagacaagattttgaccgaataccaaatcactgaagctccatctagggtaatttagatggacattcagtatatcgctgcatgagaactatacacgatcactgcagttccttttcgaagaaacagaagacaatccgtcgcctaacggtaacagggtaggctgagagaagagtaagtcaagagacagactttttaaaaagaaacaaatatagaatgtcttgtgtgaaaaaaaacctcaaaatttttt

SEQ ID NO: 173526 - DNA, 272 bp, Arabidopsis thaliana landsberg
aaaactggtcagccacagtcggaccagtgggaaatggtggggttaaccaggaaaggttggggagaaccggattgaaatggtggctagggtaacgtcctggaggtagaagaggaggtatggaccctggcggccatccccaaggaagttgttaaaggaaggcttccattgggaagaaaaaaaccgttaccccctgggggtatcctgccactgggagaaggacctggaaaagggaaaaatataggtaggccttgattttttggccccggaggtaa

SEQ ID NO: 173527 - DNA, 189 bp, Arabidopsis thaliana landsberg
actttctccatcgtctctggttctgaaggtttttctttcagaaatgacgagtacaaacacgagaaacaaaggcaaatgcatagtataaggaccaccaccgactctaagtcgttatgagtcacagaaaagccgcgactggaacacgttttgccagtatctcatgaccaagatgccaccagttcacgtatg

SEQ ID NO: 173528 - DNA, 287 bp, Arabidopsis thaliana landsberg
cgtggctttcagtttggaaagtcaatccaaggaatgttgtccaagggaagtttaccttaaatgatgtggttgcattgcaacaatccgttgatgaaacaactctgagcataattgaagaaattatcgttgagagcttagctgaaacaaaccatcaagatgaacctattgattttgatattgaagatgctgaaaaaggagatgaatttcattgtaattcatcaacatctgaggatgaagatgaagaagaactagatgatgaacaatcagaatattttgaatggacatga

SEQ ID NO: 173529 - DNA, 659 bp, Arabidopsis thaliana landsberg; identical to SEQ ID NO: 34407

SEQ ID NO: 173530 - DNA, 965 bp, Arabidopsis thaliana landsberg
atgctctgaagttctgtcacatcttatgacaaatgcctcggagatcaattgtctaaaaggaatgaagataagtacctcaggaccaacaataaatcatctcctcttcgcagatgatgcccttttcttctgccacgctcatcccaagtcatgttctactattatgcgggtcttgcgagaatatgaacatgtttcaggtcaagcagtcaatttgaataagtcagcaataacttttggttcacgaatcaaacaagatgtgaggactagaatgagacgaatccttaatatccataatgatggtggtggtggcaagtacttaggtctaccagaacagattggcagaaagaagaaagaaatctttgaattcatagtcaaacatgtcaatgatcggacacaaggatggttgaaccgctacctctcccatgttgggaaagaaatactcattaagacagtggcaatggctcgtccagtctatacaatgaactgttttaaactcccaaaaggaatctgcgatgacatcaacactcttcttgctcggtattggtggaaaaatggatcggaacaaaggtcaatgcattggttagcttggaaaagactagcgctgcctaagaaggaaggaggcttgggatttaaagacattgaaagcttcaatgtagcaatgctgggtaaacaagcttggaagatccttcaaaatccagatagcttgctggcacggctcgtgaaggggagatactttgattctactaactttttggatgcaggtttaggtcaaaaaccatcctttatatggcgatcaatattagaagggcgagagcttcttaagaaagggcttcgagtacttattggagatggagagaacaccaatatttggaatgataactggttaccaacacacttaccaagaccaccaagatgcaaagatggagtgactccaaatgtccacactgttaatgagattgtgatgcaaa

SEQ ID NO: 173531 - DNA, 237 bp, Arabidopsis thaliana landsberg; identical to SEQ ID NO: 16681

SEQ ID NO: 173532 - DNA, 220 bp, Arabidopsis thaliana landsberg
gtttctaatgtggtgaacctccaagatgatgcagaagatgatctcttcttgtggaaggttggaggaattgagcttcatgtgtgtttccctcagctgcgacgtggtttcacttaaatcttttagaggatagagtggattggtccaggctatttggttaaaggaagggttcccagacctgcattcattttttgggtgaatatgaggcacatgctgcatacta

SEQ ID NO: 173533 - DNA, 180 bp, Arabidopsis thaliana landsberg
tatcaagcatttgaaatgataagaaactggcgatcatcctctacgtcaccatcactccaaaattattctctttctaggtttaagttttgtaatgatcgcctttatttgttgagatctctaacttctcgcatttccaaaattttaagtccaataactgcattggttaagttggggcgttac

SEQ ID NO: 173534 - DNA, 943 bp, Arabidopsis thaliana landsberg; identical to SEQ ID NO: 25366
  unsure (1)..(943): unsure at all n locations

SEQ ID NO: 173535 - DNA, 694 bp, Arabidopsis thaliana landsberg
gtacaaaaaagcatgatcaacaaggcgagtcgttgcttgattgcgacaaagattatatctgtagcttccctgtaatccctcttttttggtgcaaccataaagaatttcgctatggcaaattcgattgtcgtgcatgtaatgggaatattttcagcacaagctattttacatgtctccagtgtcaaggaaagttccacaaagaatgtgtagagtctccacttgagatcaaacacccttcccacccttttcattctcttcgacttttcagtggttcaagtaatcagaagtgtagttgctgtaaagtatatacaccaaatatgtattatcattgtactacctgcgagttgagtatgaatccagtatgtgcaatgaggccggtacccttagttgtagaccacccaaaaagccacccccaccctctctccttttttcctacacaagcttctacagtttgcaatatttgtgcaatgattaagaagcttgatcccacatacatctgtatccaatgtgttttcgtaatccataaaggttgtatgggtttcccacatatcataaggatatctcgtcacccccaccgtatctcctttacctcttctcttccacctggaaacttttcctccgccagtatgtaagcaacaagttgacaacaaaaatagtgcatactcttgcgagatatgtgatgattattttgttc

SEQ ID NO: 173536 - DNA, 304 bp, Arabidopsis thaliana landsberg
atggagaagaatcaatctgatgatgatgggacggctctgatctttcttggaacaggctgctccggtgcagttcccgatttcagatgcttactccagccgtcagatcctccttgccatgtctgttctcagtccctctctttacttcctcacctaaaccctaactacaggtaaatcttttcatcagtttcttctctttgggttttggtctttgaagctgtggagattgtgaaatgtcaaatcttgttgctttccgtaaatacccttttgaagttgggagttttggttgaaaaaaaaagacatctac

SEQ ID NO: 173537 - DNA, 918 bp, Arabidopsis thaliana landsberg
atattgtttcttttgcgttcttatccgattttccaatacgtaagtttccgattttcatagtttatcgactttgtttatgtattttttaaagatgatctagtttgttctctttgcaattcgttttaactttttcctcctttgtcctggtatctaatagtgttgtgaatattgtaaccattttgcgctaatttttactagttatgagacagtagaccgtgacttataaggttctatgcttgtgttttgcgagatggtttaaattgcaatgagttatgtttctttacctagcttttcctgtcatatgtttgagaagattgtattgtacttgaatgtaggtcacgggaaaatggatagctaagcaaaagaagatttccctgttgttagatgatcttcaaagcatcatgcaacacttttcatcttatcagcatgttctggtggctagaaatgatgttaaatttgcttataaacttgcaagggaatcaatactttctatggtcacccctcatgaagatcctcgccaagcaaaagctgttctgaaagaggagtgtgctatctgtttcaacgacatcgttgctgagggtatgttttctgttgacaaatgccgtcaccgtttttgctttcaatgcgtgaaacagcatgtagaggtgaagctgcttcatggaatggctccaaaatgtcctcacgatggctgcaagtctgagctggttatcgatgcatgtggcaagcttttgactccaaagctgagtaaattgtggcaacaaatactttaagagaatgcaatacctgtcacagagagagtttactgcccttacccgaggtgcttggctttgatgttcacaaccaagaattctgaatatgccagagcttactgtctctataccctaatctggagttaggagatgtgtagaatgtcctggc

SEQ ID NO: 173538 - DNA, 451 bp, Arabidopsis thaliana landsberg
atggcgagccaaattcaagagaaggtggaatcataataagcaatgagtgatagtgaagataatcaagttttccaaggtactagaaaaataagggaaaggacatgaagaaaggctaaagatgttttaccagaaaagtttaacgcgttataagaaaggtggcgagaaggagcattttatggagaaggacttaagaatcttatgagcgagtttcaggagaaccctaagaagaaggagatgcccgaaagattgaattcagggacgaattcttttaaagggggtagaacgtagtgaccctcgctaaggggtaagcggccaaacgggaaaacatcaaggaatgaccgaggaagaactggaagagaaagaaatagttaaggatagaaagctaaagatatgggcaaggtaaaaatgaacttgtccaattctagtttaaaattgggtcatccgggcgaag

SEQ ID NO: 173539 - DNA, 739 bp, Arabidopsis thaliana landsberg; identical to SEQ ID NO: 25395

SEQ ID NO: 173540 - DNA, 360 bp, Arabidopsis thaliana landsberg
ttttgtggtgaggacaagggccacactacaagaatatgtcgaatcaccattcagaagcagaaggagatcgccaaagccgaaactaggcagaatcagccgaagcaggtcttgcacactacttcgtgccactctccctacataccagaatatgtgggtaatcatcctgcagcttctgttgctttggctagctattcactggcctcctggccacaactcccacccccaccaccactacaaccgacatactctcgaagccagcagctagaagggcgccagtacacccagcaacaatgggagctcagggaggaatcggaagctcgcacagtcaacagtaatgtgccagaatcaaagcacatttat

SEQ ID NO: 173541 - DNA, 292 bp, Arabidopsis thaliana landsberg
cttttaatgatcttattattattcggctctaacttttatttttgctcatggcatgtctgcttacttggtgtggatggactgattgaatgcttacacgagaatctttgtaaacaaacacccattgattcgcgttatcactaatagccctgaattttgatatactcctgtgcctgttaaaacttcattctaatttttggtctaaacagcatatacatctcatagattggcattacaaactcatgtagaaagtacatattattgccaattcaaacgcagaccattttcttagacc

SEQ ID NO: 173542 - DNA, 1276 bp, Arabidopsis thaliana landsberg
tcacagtatgcatatatagttttgttgaagtaatctgaagtcttaacattgattctttgtgcatatttaaatagcacacaaccattgttttgtacgttcacatatgacattaacattttgtgtccaaaagttttctaactaaaatcattttttttttctacttttagaattatagatgtggatgataaacaaaactatcaattacttcaaattgaagctgaatgattagattatattattgtagaacacttttaattaatttctgtaaattctttccggaaaacctttaataaatatttattacaaccaagataataacgtatgtcaacgtggatatatatacacattaattataaatcttatcatcataattaatcatacccaaatttagcttgaaaacaattaggtagggattcaacaaccttatacctgcttaccacaaaccctactgattcaccaaatttcctctttctactctttctttcaacacctctattcaatttccatattcattatctcacgtgtaccttttgaactattactatttacaggtcaagaagcatggagaccaaaacatgaagataatcttgcatcaaaggcagtcacagccttaccccgtcgcttacgggttgcctacgtgacagtactacactcgtcagaagcctatgtttgtggggcaatagctttagcgcaaagtataagacaatcaggatcgcataaggacatgattctcctccatgatcataccataaccaacaagtctcttattggtctcagcgctgcgggatggaatctccggctaatcgacaggatccacaagtcctttttcgcaaaaaagactcttataatgagtggaactatagcaaattacgtgtgtggcaagtaactgactacgataaacttgtgttcatagacgcagatttcatcatcctcaagaaacttgatcatctcttctactatccacaactctcagcttcaggcaacgacaaagtgttattcaactccggaatcatggtaatgcagccaaatactggtcttaaattaattttacttttttggtaaaacgttctaaatgataaaaaatgatatggtcatctatatatgttgacgtatttgtcctaaaaatactaaatattttaaacaaaattcatgccacacatcccttgaacagaatttgttgaaaattggtttgtttttggtttgctgatcaaataaactttttttttttctgccttagaaaacaatttttttttttttttacaaaaacaaaatttat

SEQ ID NO: 173543 - DNA, 427 bp, Arabidopsis thaliana landsberg
atgtattcttgctcattttacgaacgtgaggtctatcttgatcttggttgtgcctactgaagaacattatcacaagttggtagagaaatgcttcagtacagtcatgaacatttgcttcgaaggtgtaaaccacgacaagacgctagaggctcttgcctactttgtgagctccctttgtctccctcttatacatgctacggttgtgtttcctgttacttgtttctccacgagcgttgcattgatcttccaacagagagtcaacatcgcgtgcatccgaattaaacaccctcttagaggccttgattacatatgaagtggtggtcgaacattttgtggtgcgtgtagggacaagattgaaagtgtcccgattggttgtctagaatgcggtttttacattcacatgaggtgtgcagattctttattgcgc

SEQ ID NO: 173544 - DNA, 609 bp, Arabidopsis thaliana landsberg
  unsure (1)..(609): unsure at all n locations
cggcgcgcgcttcacngtgngtgatggctcggcaccggacgtggcgctgcgcttacgcgatcggcgcgcgcaatgggcgttcctgattgatccggaacttcggctcggcgagctgtacatggatgggcgcgtgcatgtcgaacgcgcctccctgcacgaactgctcgcgctgctggtcgccaatgcgagccacgcgcaaacgccgcgatggctcgcgcgtctcgacgatattcgcttcgcgcgccgacgccggcaacagcgcaacgatcgcggacgctcgcagcgcaacgtcgcgcatcactacgatcttggcgacacgctctacgagctgtttctggacgatgaccgccagtattcgtgcgcgtatttcgagcaaccgcaacaaagtcttgaagcagnnnnnnnnnnnnnnnnnnnnnnnnnnnccgcaaaactcgacatcaaaccggggcaaacggtgctcgacatcggctgtggctggggcggcttggcgctgtatctggccgagatcgccgatgccggtcgcgtccacggcatcacgctgtcgcgcgaacaactgcgaacggcgacggcacgtgcgcaacaacgcgacattgccggacgcgtgca

SEQ ID NO: 173545 - DNA, 678 bp, Arabidopsis thaliana landsberg
ggagttgcttcaggattgttctatcttcatgaggaatgggaacaagttgtgattcaccgtgacgtgaaagctagcaatgttctgttagatgctgatttcaatggtagactcggtgattttgggttggctcggttgtatgatcacggctcggatcctcagaccactcacgttgttggaacattgggttacttagcacctgaacattcccggactggacgtgccactaccgcgactgatgtctatgcgtttggtgcgtttcttttagaagttgtttccggtagacgacccatcgagttccatagtgcaagcgatgatacgttcttgcttgtggaatgggttttcagtttgtggctcagaggtaacataatggaagcgaaagatccgaagctcggttcttcaggttatgatcttgaagaggttgaaatggtattgaaactcggtctgttgtgttcgcattcagaccctcgggctagaccaagtatgaggcaggtcttacaatatctaagaggagacatggcactgcctgaattaacgcccttggatttgtcggcggggagcgtgatgaatctgggaggccgggacggttttagcggtattgcaatgactgattttttcactgtgtttaaagggtttaccggcggatcttccattgctgactctctactctccggtgggagg

SEQ ID NO: 173546 - DNA, 456 bp, Arabidopsis thaliana landsberg; identical to SEQ ID NO: 21115

SEQ ID NO: 173547 - DNA, 293 bp, Arabidopsis thaliana landsberg
  unsure (1)..(293): unsure at all n locations
cgcttggagctgagaactgatttctgctgactgatgtggctggaatcttgnagaatanagaggatccaagtagtttgataaaggagattgatataaaaggagtgaagaagatgattgaagatgggaaagttgctggtgggatgattcctaaagtgaagtgttgtataaggtctctagctcaaggagttaagactgctagtattattgatggaaggagacaacattctttgcttcatgagattatgtctgatgaaggagctggaactatgattactggataagtttgctgtaat

SEQ ID NO: 173548 - DNA, 457 bp, Arabidopsis thaliana landsberg
agacaccagcgggctacggcacaaacgaggccggacagttcattccgctcgactggtgggcaattatcttcaaccccagcttcccctatcgtctcctgcacacagtgctcgcggcattcctcaccaccgcgttcgcggtcggcgcggtgggcgcctatcatctgttgcgcgacagcagcaatcgccaggccagaacgatgttctcgatggccatgtggatggcagcgctggtgacgccggtgcagatcttcgtgggcgaccagcacgggctcaacaccctcgagcatcagcctgccaagatcgcggcgatggaaggacactacgagacgcatgtcggcgcgccattgatcctcgtcggcatccccgacgacaaggcggagacaacccatttcgcgcttgagattccgaagctcgaaacgaaaatcctcggccactcctgggatcggagatcaaggat

SEQ ID NO: 173549 - DNA, 345 bp, Arabidopsis thaliana landsberg
  unsure (1)..(345): unsure at all n locations
tatttccacaaattggacatgtatangtatgctctnggatcaagaagagcagcaaatcaagccgcagctacaaaatcttgagatttattgatttttctcccacttgttctgagttcaaaatctacaatatcaactctgattcatggaaggttcttgatgtgtctccagactggaagatagattcttatattcgtggcgtgtctctcaagggaaatacatactggtttgctagagagaggcgcggatacggccgtactttcttagtctgttttgatttcacaagagagagatttaggtcgcgtttacctctgccgattcagccgtgtgttttagataccgtgagtc

SEQ ID NO: 173550 - DNA, 586 bp, Arabidopsis thaliana landsberg
ctatggatactaccgatgaacaagcaaagtgccatatagttgtatgtggtatctacccattggtgtccgattgaagagaatgtatcagagccacgagactacaactgcaatgcgttgcatgccgaacaccaatcaaaagaagaagaaatgaatcatccttcaaatgcggtgaagtggagatatttccaagagctacatcccatgtttgccgaagaaccccgtaacgtttatctcggattatgtactgatggatttaatccatttggcatgtcgcgaaatcattcttggtggcatgtgatcctgactccatataatttaccaccgggtatgtgcatgaatacatagtacttgtttcttacaattctgaattctaggccaaatcacccgcgaggtagtctcgatgtcttcctccaacctcttattgaggagttaaaagagttatggtctactggaatcgatgcatatgatgtgtctttgaatcaaaattttaatccaaaattagtgttgcttggacgataagcgactttccgtcgtacaacatgttatcaggatggacaacccacagtaaactatcttgtccaacatg

SEQ ID NO: 173551 - DNA, 519 bp, Arabidopsis thaliana landsberg; identical to SEQ ID NO: 79491
  unsure (1)..(519): unsure at all n locations

SEQ ID NO: 173552 - DNA, 463 bp, Arabidopsis thaliana landsberg
cgagcagggcgtcccgatgcgggcacccgagggcccgtgggaactgtgcctgaccgtcaacgactcctggggccaccaggcgcacgacgaccaccacatgttggtcggccagctcgttcgggacctcgccgagaccgtctgcgccggcggcaacctgctgctgaacgtcggcccgcgcgaggacggcacgatcaccgcggagcagaccgcccggctggagggcctcggggactggacggcccggcaccgcgaggcggtctggggcacggtcgcgggcctgccgcccggccaccactacggccccagcaccctgtccgccgaccgccgaacgctgtatctgacctgcttcgacgcgccccgcgagaccgtgtcggtgcgcggcctgcgcagtgccatgcgccgcgtgtcggtggtcggtaccggtgccgaactggaccaccacgtcaccggcgggatgcacgag

SEQ ID NO: 173553 - DNA, 545 bp, Arabidopsis thaliana landsberg; identical to SEQ ID NO: 8079
  unsure (1)..(545): unsure at all n locations

SEQ ID NO: 173554 - DNA, 819 bp, Arabidopsis thaliana landsberg
atggctaaaaagaacggaacgtcttggttcaccgccgtgaaaaagattctctggtcaccgtcaaaagactccgacaagaagactcaccaccacaaagaaaccgatattaaggtctttatttcaactctctactatgaattactacttaacctcgtctctaaatagacttttaacccgtaagtttcgatcttttatggctaattgcagagaaaagaaaagaaaggatggatttttgaaagaccaaactcgaaaccacaaactctgtcttacaagatactgtccgtacggtggaagcagaggagaaagaaaaaccaccggtgattgtctccgccgtagatgaaggtgtcacagagatcgttaagctaacggcaactccgggctttattagacgtcattgggctgccattattattcagacagctttccgaggttacctcgtaagtaaaaaacaaacaaacaaaaatcttttttttttggtatgtgtaacgtacaaacgtagtttgaggaaacttttagtttccatattttagttgatttgaaactttgttttgaaaatattttgtttcataagaattttgtcagtgtcattttttttaatgagttctaaatttgtctagaatttgtgttatttttagtgaaatttcggattttattgttgttgttgttgttgtcataattttgtgttatttttctttaagcgttcttaatttttcaatttgaactttgtttgtcacaaatttgtcactaatatttttcgtttatatgaaaaaagtcgaggagagcattacgggcattgaaagcaatactcaagcaactagc

SEQ ID NO: 173555 - DNA, 649 bp, Arabidopsis thaliana landsberg
  unsure (1)..(649): unsure at all n locations
tcttcaggcatgccaggtctgattttctcatcttttgaacttccttggtattgagtntatctcccaaataggatacatgttgctgacatgggctttacctttttgttgttgtagctacgtaattgttgtggagcacgacctcagcgtccttgactatctctcggatttcgtttgctgtttgtatgggaaaccaggagcatatggtgtcgtgactctccccttttctgtcagagaaggaatcaacgtgttcttggctggatttatccccacagaaaacttgcgttttagggatgaatccctgaccttcagggtaaagcttttccttttccagtggcctccaagagaagtggttttcatttgtgactgatatcgttttttcttctctttccaaggtttctgagactacacaagagaatgatggggaagtgaagtcctatgcaagatacaaatacccaaatatgactaagcaacttggagatttcaagctggaagtgatggaaggggagttcacagactctcagattatcgtaatgcttggagagaatggtacagggaaaacgaccttcatccggatgatggtaagattcctctcctttgttttctcagctcgttgtggttagatgttgaaggattgaaatttgtatcttaa

SEQ ID NO: 173556 - DNA, 505 bp, Arabidopsis thaliana landsberg
ctcactaattaacaagattgcctccaattgtttcttttcataatctttattttttggtatggatttttaggggtttttaccagatccattcaatttcatcgacgctattcagaatctagatggaccagcttatgataacatgactaatagggagtacttggcgggtcgggcttcctcgtgcgttaagaaactcaacgaccttaaggttagtactcagcaattcaagctttgttttcagaatattctcaactctaataataataagattgatcatttgtcatctttcttgctttcttaggcaaagactgtggaatttgtaagtattgtgagagccactacaactggtggaggagctagttggaaggtgtatataacgtttatggctcgggagtatcccaatgggcctctcatggagtatcaggctaaggccatggatttcgttggagatcgatctcccgttcccattctgtgcagaccagcccctaaacccctaacacaaccatag

SEQ ID NO: 173557 - DNA, 423 bp, Arabidopsis thaliana landsberg
atggcagcaatgatcactgttgactttcaaaatagcttcatcttcatcctcttttgtctcttctctctcatttgttactctctcttcttcaggaaaccaaaagattcacgagctggccgtgatcttcctccgagccctccttcatttcctgtaatcggtcatcttcaccttcttctctctgctcttgttcacaagtcttttcaaaaaatctcctacaagtatggacctctcctccatctccgcgtctttcatgttcccatagtcctagcctcctcggcctcagtggcctacgaaattttcaaggcccaagatgtgaatgtctcctctcgcggtcacgctccagccggggagtctctcttgttggaacttctagcttcttcttcgctccctatggagattactttaaatttatgaagaagctca

SEQ ID NO: 173558 - DNA, 453 bp, Arabidopsis thaliana landsberg
atgggtgtatttcctggatttggtagctggatcaatcaaaacactcaacagcctcctcacaaggtcagtttcattccatcaattatacgacccgagaactcaaaacaaataaacaatcaatagataatgattatgtttgttgttgtaggcagagtccgagagatctgagaatgcgaaatttaagtcaaagtcagagacaaacactcatgaggcgagagatgaaatgaaacagcaattaaaactttggagagatacagagaagaaggaacaatggaatgatgctcctcctaatgtgaaggtaaagaccaaatcagttaaaataaataaaaatcagctaacaaagacaatatttttgattctttgcctttcaaaatggtatatagaattaagaataaagatcttttcttttgtaatgtttgaaggtggaaagaacaatgatgtagaatgggtaga

SEQ ID NO: 173559 - DNA, 290 bp, Arabidopsis thaliana landsberg
gctcaagactttccgtacgcttcagacacattacaagcggaagcacggtgtagagccctttgcttgtcgtaggtgtgggaaggcatttgcggtcaaaggagattggaggactcactagaagaactgtgggaagctatggtattgctcatgtgggtcggattttaagcacaagaggtcacttaaggaccacgttaaggcctttgggaatggtcatgtcccttgttgtgcaattgatcatgaggaagaggaggctgcttctgatgtcgagcagcaagaatgatcgtgtttag

SEQ ID NO: 173560 - DNA, 250 bp, Arabidopsis thaliana landsberg
cgctcctcctcccgctgcgggtgcggcacggcctagggctggcgcgaccggaggggcggcgcggcgggcacggagcggcggccgcggccgacgaaggagaaggcgctcaactgcccgcggtgcaactccaccaacaccaagttctgctattacaacaactacagcctgcagcagccgcgctacttctgcaagacctgccgccgctactggaccgagggcggctcgctccgcaacgtcccggtgggcggcg

SEQ ID NO: 173561 - DNA, 608 bp, Arabidopsis thaliana landsberg
  unsure (1)..(608): unsure at all n locations
attactcatgaagtaatgggtggcttgaagaatgtttatgccattggtgcaggtaagatcaggtgtcttaaatggttatctgaataatagtgattcaaagtaaattactggaactggtgatcagaggtcaaagtttatgagctagtgtttgttttggcgtttttgtattccacaggaatggtggctacactgactaaggaaagtgctaccagcaaatcagtgtactttgcgcattgtacttcagagatgatttttattactcatttattggccaaggagccagagaaactcgctgggcctttgcttgcggatacctatgtaacattactgaaaggtcgtaatgcgtggtacggccagaaacttgcaaaaggagaacttagccttgaaatgggtgacagcatcaaaggcaagggaatgattcaggtactccatatatctcaatgacttcggttttaagtgttaaattagccttaaattatgtatgtttgatattgannnnnnnnnnnnnnnnnnnnnnnnnnnnnnnnnnnnnnnnnnnnnnnnnnnnnnnnnnnnnnnnnnnnnnnctttgttctgtatattctagatttacgttcacaaaatccagt

SEQ ID NO: 173562 - DNA, 2004 bp, Arabidopsis thaliana landsberg
atgcagcacactccagtaacaatagaggaccagttaatatcgaaagctgtaagagaagaatgtcaatgggaaaacctcccaaaacgacttcaatcgatccttgggtctaaggatgaatggcatagaaggttagattttctttatgctttcttcttgtagtagctcggtgcacggtgacatagtttactttgacatagtttactttgacatagttcactgttttgattgtttgtgtagggttacggcgcattgtataaagaaaagactcctatggaatacgtgttttgcttgtaaagtttgcaaagaaggtgaatattatgaagatatgatgcgttacttgcgaaagaatctggcggtgcgtgttgatggattactctttaagaggtctttttgttttgattgcattctagtggagagttactagcaaatcatttttctgaagtttattttttgtttgtcttcgttcctcattatatctcgttttcaatggctttctcactgcacaattttatgtacgatagcgacaatgcataagaaaagggtttggaattgacaatagtggttaacaaggtttattttagattttagataccatagtctgtgatggcaatttatgaatatgtttcctactctgaaagatagctgtgggttcacatagtcgatataaagagagaaacttggtgtcaaggacgaaatatagggcattgttttctgttactgtcagaggatctctaatcttaattgctgttaacaattatccgcagctctttccgtatcaccttgcagagtatgtttgccgtgtgatgaggatatcacctttcagatactactgtgatatgatatttgaagtcatgagaaatggtaaattgtttcgttactctagcgctcattttttatttaccttaaattcgagccagtgatttcgtcatcctcattccttttaatttgacacagagcaaccttatgacagtattccaaacttcagtgcggcagatgctttccggcttacaggaatagggaggaatgagttcattgatatcatgaataaatgcagatctaaggtactctttcttctagactctgtagtctgtactgctttatatgcctggcatgtcgtgcaagttacactctgcaaagtatctgttgctttgacttttgacttgaaaaatctttattctgggtaaaatatgggaattcaatgattacaaaattctagatggagtttctatcataataacttgagcctataagtggatgtatattatgtcttatacttctcatttttgttttgagctttccagaaaataatgtggaagctgaacaaatcgattgcaaaagactttttaccgactctacctgtggatttccctattgacccttggtggggtgtttgccttgtcaacttcaccatagaagagtttaaggtaacctaagctcttctttatcatttattttcttccttttcaaactaagtttacccggaatgaacaatgtcactgtcatcttacttgttccttgtctgataacagatcttatttccttgttctttgcatagaaactttcagaagatgagatggcgacaatagataaaatctgcaaagaggaagctaatgcatatttcctcttcgatccagaagtcataaaaggcctgtaccagaggggattggtatattttgatgtcccagtctatcaggacgaccgctttaaaggtgagtttatgtttgccaatattttcttacccctccgtttcttctatcgttacttacaatgtacttcaagggtggagattgctgaaatttttgctaaggcatataatcgcatgtcagggggttctaagaatagattcataagcagcatataacaatttttttttatcattgtttaccaatactatatcatgctacttttacttacttggaacagagccagtgaagctcctagatagcctgttcttagattcatatgtagtctcatattttatattttgaaaaaaaaaaattcact

SEQ ID NO: 173563 - DNA, 1113 bp, Arabidopsis thaliana landsberg
atgacttcttcgggtaggcgtgtcaaaaagaggaactttgatgagcttgagggagctccaagcaacaaaaaacgtaccagaaaatctaggagtggtcgtaaagaatcgaagaggaaatcttcaaaatctaaatcgtctagacctaggcgagcagctgcacgaaatgctctctcttggttttctaagattacaggtacatctaaagatgcagaagaggaggaagtctctgaattgagtgattcatcagaaagtgaatcgacaacacaagactcaggtactggggatagtgaacttgaagtagctttgttaaatgggcatgggaagcaatcgaaagggaaaactatcctcgtatgtgattctgatgatggggctcaacaatgtgatatcagagaaactcatactgctgaaaggagcagattggttcttagatttcctgttaggaattcagataagcttaccttactggagaacctacctggatcatcttgtgatgttccaagtccaactttagggaacggctgtactgaagactcgaggattcctgggaaccaatttgaagggctagatgtaagtaaagtcaaatggggaatggttaaggctcgtacaacaaagcgaataagaggtgaagcaatatcatcgcatgaacttatgggctctgacccgaagggaaaggaaaataatgttaaggaagactcaaatcaccgtggaaatggtgttacagcacctagttgtttggaattgaaaccagatatagatgacatggcagttgacactgacacggtgatctctaatggtttgccaaatggtgggaagcgatatccagaactggatgggtcaccaagtcgagtggctgatgacaaggcctctaatagttctcaaaatgtaacccaccggcacaatctaatagatagccttccaccaatctcaacgacattgaagatacgctccaagagagtttcaagggctccggatacatctttgaggcaagaaggaaaatccttatcaatagatcaagagactggtggctctgatgcattaaatgatggttttgaagatgctaaatgtgatataaacaatcccctgtctaaaggatggtgtggttgggaaagttat

SEQ ID NO: 173564 - DNA, 512 bp, Arabidopsis thaliana landsberg
ccataacccgtattttctgtgtcaaagaaagaacaatttattgcagccattcagaaatcttatcaaactgacaaacctgtaattcatttggggtcggccattctcgacggcgagatcatcggcgaggcccgcgtgaaccttcccttgcgcatgatgaaccgccacgggctcgtggccggagctactggatcggggaaaacgcgtacattgcaggtatttgcggagcagctttcggcagccggcgtgcccgttttcatgtccgatattaaaggcgacctttcgggaatcgcgcagccgggcaagaccaatgcggacctggaagagcgcgcccaaatactgggcaccgttttcgaaccgaaaggatttcctgttgaactatattcgctcagtggcaacaagggagcacaaatgcgtgcaacggtactggaattcgggccgatattgctctcgaaaatctttcaactgaacgaaacccaagctggtgtactcgctatactggtcaaatatgccga

SEQ ID NO: 173565 - DNA, 487 bp, Arabidopsis thaliana landsberg; identical to SEQ ID NO: 41820

SEQ ID NO: 173566 - DNA, 1528 bp, Arabidopsis thaliana landsberg
ttgggttggtccctgtgatggatcatgaacaatttgtgacattttcctttgtttaggtattggctgcgatgcaaaagttgcatatgaatttcatatgatgcggcaagagaaacctgagaagttttgtagtcaggtactgctgttgtgacgatgatatattgagaaccagaatctgaatagcgctttgtttcattgtttttttttggtgtaaaaattgtgggtgtaaaaattgcggcttaacccgttaagtaactaatttcaatgagaaaaatatggctgatatattatatcttgttttctttgcagtttgtaaataaattacgatatgctaaagaaggtgcgagggatataatggatcgagcatgtgccgatttaccatggcaagtttggcttgaagttgatggaaaagacattgaaattcctaaggtatcttaactgaaatgacattagtccttcattccccatcttgtgtggtgtgttcttacaggatttgtccgtatcactttcctcatactgtgcctttttgttctttgctaatatggaaaccccaaccaatactcactaaacatatattaagtaaaaattgagcatgaaagatagcgcataattgcttgataaaaagtaaaaaccatagctgacaacgacattttagtttcctatctggagaacgttttgattatgtgggacccgagcgagagaggttgacattaccaaaaaggctaaaattattgttgttacctctggaaactgatgtccctaatttgttatcctctcaggattcagagggtctaatagtacttaacattggaagctatatgggtggagtagatctttggcaaaatgattatgaacacgatgataatttgagcattcagtgtatgcacgacaagactctagaggtggtatgtgtccgtggagcgtggcaccttggcaaactacaggtctagtctcatctcgaattgctccttactcatgtttctgatacttttaattccgttttctttagacctgcacataaattttgagcagtaatccttacttaatgtgaggctaaaagatttaattgaattgattcagcagatttataacccgtcactgttccttacaggtcggtctttctcagaaaaggaggttagcacagggaaaggtaataagaatacatgtttctagtcctttcctgttcaaatagatggagaaccgtttatccagcaacctggctgcttggagataactcaccacgggcaggtatatcatttcgctctatcaatcacacggcaaaaccttgagacaaattgtacattacattggaagtagagctgaaagaaactccctgtaccatgtaattgatgatgatctaagggttggtttgtgtatgcaggtgtttatgctaagaagagcatcggatgaaccacgagggcatgccgcagccataatgaatgaagtgttactcgatgcagaatgcaaaggagtcataaatgcatctcaaaagaaagtactactacagcaaatggctctccatctctcgtag

SEQ ID NO: 173567 - DNA, 1344 bp, Arabidopsis thaliana landsberg
gctaatactaaaaagggatttcggtgcaatttgaatagcgcagtagaaacaaaaaatttgtctggagtagtaaattttagggtgaagagtgttttgcaagaaacaatgaagaaaagtaacaaagggagattcaggccggggctgataagccggaaattgccaataaacccgtctttaatgatgctgcaagcaatgagaacggttcaaagaaacctgaaattgagcggaaagctacagaagaaggagaaggattgaggaaagttactgtgaaggaaggagaagaaacgaacaagttctcatcgagttttgtagagaaggtgtatctttgggattctaaggagagagctaataggagaagaactatggggaaagctaaagacgagggaaaagatgcaagaagagtcattgatgtgaagactgaagggagaaacgaagaaaggcgaaagaaagaagaaggtaaatccatggagattgaggaatatagaagcaaccctcaagaagtgacatcagtggtttgtttggatagagaaaaggatgaagaaactgcaagacaagtatttagagagagtggtaaagaggaaaaatcttcacaaaacgatgaagaaacatcaaaagccgagaagcaacaagcagcggaaacattgtttctaattcttgaatcaccaatatttctaaatgcttgggatgaaaatgaaacagaaaatgaagaaaatgaagattgcaatagagagattatgtattatgattggattagtgatatctcgcggccaagaagttattgggaagatctcaagaaacaacgggtgctcgaggttatgaacaatatttccgagaaaggcgatatgtggaacttgatcaagtggtatgttatctgatcaattcttatttttttaagattagctttataacatttcgatattttaaggacgtgattgcttgtgtaggaggaccgtttctagcttcctcgaaggtgattttcgggaaaagattgataaaatcatgatctcatgcgtgcaaaagaggtcagaaataggaagcaatcttgtagaagaagaagaaggtaacgaggagactttggttgagtgttcagaaaggtaccaagggaacgtagaagaaaatgaaacaaagaagttaatccttgaaccagaaactgtaagtgatggttttagccaatttcttttaaccctaaggctcatgagaatacctactctatgagattgtctctgttttgctatgttttttcttaggtcaatagggttacgtgttaatgaagtaacagtttatggttaacacaggaaacacagatgatatgtgatctcaaacaacaaatcaaacagcttcaaa

SEQ ID NO: 173568 - DNA, 416 bp, Arabidopsis thaliana landsberg
  unsure (1)..(416): unsure at all n locations
cagaagactcctggannnnnnnnnnnnnnnnnnnnnnnnnnnnnnnnnnnnnnnnnnnnnnnnngggtctgccataccgggttgtagccttgtcaaccggggatgcatccttcaccagtgccaagacttacgacttggaagtctggatgccagcccaggacacttaccgggaaatctcatcctgctccaactgtactgacttccaggcccgccgggcacaaatccgttaccgtgacgaagacggcaaggttaagctgacccacactttgaacgggtcaggcctggctgtcggccggacggttgccgctattttggaaaactaccaaaacgaagacggcacggttaccgtaccagaagctttgcgtccatacatgcacggcatgaccaagatcacgccagaagttaagtggcactag

SEQ ID NO: 173569 - DNA, 335 bp, Arabidopsis thaliana landsberg
atgtcatattcgcattttagaacaacaatgctcctatagaagatggtgaatcttttattactggtggagcacgtaacaaatggtgggatggtgaaaaaccgtttccagatgatttcttccgcgtttgtactgtgtggatgtataatttcgatggttctaatgaagaggaatttgcattagcgtcacgttttgtgacacaaggaacagtgactgaaaagttgatgataaagacatcgacgtatcctccagtgaagcaattaatgacagaagcaaaagtggccaagctaatggaacttcctaaaggttacgagtatttggacattgaatgcttttga

SEQ ID NO: 173570 - DNA, 1602 bp, Arabidopsis thaliana landsberg
cacattagcaccatcaagaactaaaaccggtacccctgtttctgttgtcgaatattttcatggcagttcacaggctctacaagagtgggtggtaagtaaagtctgtctttttttttttactcaacatatttaaatttttcttttgtctctatatgtgttgtgtacttattgattgataggacatatttggcgtgatcttgcttgagcttttagttggttcacaagatagatcaacagctttgaagaatcaaagctcagattggactgggtctttcttgcccgataattataagattggggaaataatcgacccccgaataggaagcgattatcctgtggatgcggccacaaagattgtcacactcatccaaagatgcaccaatcgggacaagaagaaacgaccattgatgcaagaagttttgaatgctctgaattatattgcagggattaggtcctaatgtgagatgtccttatattggacacagggacatggataaatgctaggtgtttatttgtaataattgaaagagtcagtctagactaaagctgaaagagttaggggttaacaattgaagctatttaaaatcaagaagcatgctttaaacttttatagcagattttctgaagtcgagtgtcgcccaaaaagaaaaactcaaatataatttgtcactgtaaaatatgacaaagagagtacaaaactggagactgagattctgtaaaagtttactcttaaatgttttgctgggatataaaataagctattggcgaccttcagagcacaaacattgcaacaaggatgtgctttgaacccaagacctcaaccatctaatctctttacactttcttagatttctaatgaactcaccaccagtttaatatcagcttttgggcagagttttgctgctgcagaaggccaactctgaaaccagtgcaatgtgatcgcttccccatttctgtaacaaaccagaaatacaaacataaaaaagttttgtaaacaattcagttaaaaaggtaggctatataagaatatcatgggattttacaggagtcgggaagcctggagtccactgcattgcttgctttggtattggagcaagcacacgcactgtttgaagaccttccgaccgcctaacccaaaccagaaatcaaacatgagaatatgtcaaaacgcgcataatttacaataatgaagtaatctaattttaaggtttgtcacaaatggttttgcttctaatgctaataccatatgtagtcaactgtccccatgaaacatctgtgataactggtcactacaggttctccgttttcatcccttgtgtttgcttgaccctaaccacaaatttcaacagcttcctaaggatataatttctcaagaaacagaagataaaagggaaaaactgtagggaggatatattacaatacctccacttctgagtatgtgcttttaagctccagagcatgttcaaccgtagttctctctgggtcaccagttgcagttgctatctccattggagtccaagaggatggactataagtgattttgtcactatttaaagcttcagaactccatttaagtggaacttcactcacaagttccccttt

SEQ ID NO: 173571 - DNA, 607 bp, Arabidopsis thaliana landsberg; identical to SEQ ID NO: 8256
  unsure (1)..(607): unsure at all n locations

SEQ ID NO: 173572 - DNA, 1265 bp, Arabidopsis thaliana landsberg
ctagattaactaactaaactgaaaactgttcttataaacactctgctttattgtcttcatcaacagaactttcttaagcatgatttcctcctagagaatctagcaagtgaaacaccgatatacattgtaacagagggaaacgaacctccatttttcactcggttcttcacctgggactcttctaaatctggagttggacttctctctctcttcacatttgcttttgaaaatcacacctcatggagctaactcgtactaagcgataaagctgcttcttgcagatgcatggagactctttccagagaaagcttgcgatcctgacaaataaaggaaagccgcttctagatgtaaaagcttgtactcatttggttacatttgtctaaaatcaatctcgatctgtcttgatcttgtgtccttttgttgctcagaaacctaaaaggagagtccctgcatacagtagcaggtccaccgttccagacaaatcgcagcctcggtccagaagtatgacttttagtccagacagggcccgcgtgaggggacggtctccagctttcaacgcacttgcagcaaactttgagaaactaaatataagaaaccaatcaactccaccacctatggttagtccaatggtccggaagctttacccgaaatctcatgccccagacctctcgaagatagctcctaaatccgctatagctgcccgtacagcgctttttgaaaaacctactcctacttctcaagaaccacctactagccccagttcttcagaaggtctgtagcaaaaacaaagctccacttttgaaccccaaactatcaatttggtgaataaagttgagatcttgagcttacccttttttgatcattttttatttatgaagctacaaaccaagcagaagcaccaaaatcgacatcagagacaaacgaggaagaagcaatgagcagcatcaatgaagactcaaaagaagaagaagcagaagaagagagcagcctccctactttcccatatgaacgccttaaaaccgactcagaggatcctgtttcagatgtcgacctcactagaagagaggtcagattcttcaaaactctcaacacatattataacattcgtttattaagtttgtgtttcatgagttcagcttggtattttgcaggcatacttgacttcagtagagttcaaggagaagtttgagatgacaaagaatgagttctacaaactgcctaaatggaaacaaaacaagctcaaaatgtctgtcaatctcttctaa

SEQ ID NO: 173573 - DNA, 398 bp, Arabidopsis thaliana landsberg; identical to SEQ ID NO: 23999

SEQ ID NO: 173574 - DNA, 165 bp, Arabidopsis thaliana landsberg
tcacttccctccgatcctttttggcttcccttgaagctcaaggaaggtaaagccctagagtgttgtaaagaaatgattaagcaagtggatgaagatggacatggtagagtcgattacaaggagtttcttcagatgatgaaaactggtgactttagcaatagatga

SEQ ID NO: 173575 - DNA, 536 bp, Arabidopsis thaliana landsberg
caggtaatacgcatgcctatcgggcgcgcctgggaggcgcttttctttatgaaatcgcctgccgttcccttgggctcaaccccacacgcatcaagctgtcggcctttaccatgggggccacgtttgcagggctgggcggggctttctttgccgcccgccaaggtttggtcaaccccgaatcgttcactttcatcgagtccgcccttatcctgtccattgtggtgctggggggcatgggttcgcaggtgggcgttattctggccgccattattcttaccgtcgtgcctgaactggcgcgcgaattcgcgcagtaccgcatgctggttttcggtctggtcatggtggtcatgatgatgtggcgcccgcaaggcctgctgcccgtcaagcgttggcatatggaactggaatcatgaccgataccttactggaaatttccggcctgaccatgcgttttggcggcctgcttgctgtcgatgcagtcgagttcaacgtaaagcgcgacgaggtttttgccattatcgggcccaacggcgcgg

SEQ ID NO: 173576 - DNA, 795 bp, Arabidopsis thaliana landsberg
aattattctctctacctatgtctgagtcaataccacacaatattgtttcttgatgttctgtatatgatgtctcaagcatattgacataaacaagaccattgctaacaggactggagtatttgcatgatggatgtacgcctctatgagttcatagagatgttaaaactacttaccatcttattgaatgagcgatgtggagcgaaactagccgactttggtctctcgagatctttcccaattgatggcgaatgtcatgtctcgacagtcgttgcgggcacacctggttatctagaccctgagtgagtagatctattatttttttcagaattgtatggttgaggccaaataaaaatatgacatatttaattgatttgttactcttttcaggtactacagaacaaactggctaagcgagaagagtgacgtgtacagctttggtgtagtgctattagagatagtcacacaccagcccgttatagagaaaacccgagaaaggcctcacatcaatgaatgggttgcgctcatgctcactaaaggggacatcaagagcatccttgacccaaaactgatggggactatgacacaaacggtgcctggaagattgttgagctggctcttgcatgtgtgaacccgtcttcaaaccggagaccaacaatggcacacgtcgtgactgagctaaacgaatgtgtggccttagaaaatgcaaggcgacaaggtagtgaagagatgcacacaagtggttatgttgactttagtcgctcttctgcttccgaattttcccctggagccagataa

SEQ ID NO: 173577 - DNA, 377 bp, Arabidopsis thaliana landsberg
  unsure (1)..(377): unsure at all n locations
acctgccgatccnnnnnnnnnnnnnnnnnnncctgaacctctccgcgatccgccggcagggcaggctcatcggcaccgacgtgcccgagtaggtcgtcgcgcggatcgccgccctcgacggcgtcccggtctccatgcgggccgagggcatcgccctggccgccgagctgtgccaggacctcctggaggccggtgcgccggggctgcacttatacacgctcaaccgctccaaggcgacgctggagatcatcgagaagctcggcgtccgaccctgtcgcgcgtcaggccgggccgatggcctcggagacgaggggggcggacaggccgacgaagaccagtccgcaccccggcgtcgcgtgcgcgccggcagcactcag

SEQ ID NO: 173578 - DNA, 602 bp, Arabidopsis thaliana landsberg
tgatacagttcgcaccattcttgccatctcatctcaattcaattgggagatctttcaattagatgtcaagagtgcctttttacatggcgagctcaaggaggaagtgtacgtaagacaaccggaaggattcataagggaaggagaggaagaaaaagtttataagctaaggaaggcattgtacgggctgaagcaggcaccacgagcttggtacagccggattgaggcttatttcttgaaagaagagtttgaaaggtgtcctagtgagcatacgctttttacaaagacaagaggaggtaatattttaattgtcagcttatacgttgatgatttaatatttactggaagtgataaagctatgtgtgatgagtttaagaaatcaatgatgctggaatttgaaatgtcggatttgggaaagatgaagcatttccttgggatagaagtgaaacagagtgatggtgggatttttatttgtcaaagaagatacgctcgggaggttttagcaaggtttggaatggatgagagcaatgctgtgaaaaatcaattgttccgggacaaagcttacgaaggatgaaaatggcgagaaagttgatgaaccatgtcaa

SEQ ID NO: 173579 - DNA, 928 bp, Arabidopsis thaliana landsberg
  unsure (1)..(928): unsure at all n locations
atacccaaatccgtcatcttttacatatgaaaaacgtctcttttgtccttttgagtatgcgctgcagcctccccggtggtataaaaatgactctattgctgttgacaagcctgaattacccaatggagtgtctgacctgaagagttatgaaggtcctcaatgttttctcatccctggaaaccatggtgagtttcaggtctcagcttcatttatctttcaaataagttgtttcacatacctgcataccagtggcttctttaatctcctctaacgatataattattgattattattttgtagactggtttgacggactcaatactttcatgaggtatatatgccataagagttggttaggcggctggctaatgccccagaagaaaagctattttgccctgcagctccccaagggttggtgggtgtttggtttggatcttgcacttcatggtgatattgatgtcgaccagttcaaattcttttccgaattggtgaaggacaaggtagtttgtgtaacattttcctttcccatgctttatataggtttataaatgcaatttccgttacctagttagagttctaccactgtttggctaactactgagtacttactatatactgtattactcgggtatagatttgtgatttattttgtttctgaagggtcattaacaagtggattagtctatattttagtggcttcgtcttttcatataactcaattttcattccttttctttgattaaattaannnnnnnnnnnnnnnnnnnnnnnaatgatgctgtgatcattatcacgcatgaaccaaactggcttcttgattggtactggagcggcgatacagggaagaatgtgagacatctgatatgcgacgtattgaaatacaggtgcaaacttagaatggcaggggatttgcatcattatatgcgac

SEQ ID NO: 173580 - DNA, 795 bp, Arabidopsis thaliana landsberg
ggcaagccatcgatttgcccgacaccgatccccgcgtccgccttcgtacattggttttgagccggagcaaatctctgtgtccctctcctccgatcatgatgtccatctgggtctcttggatcacaggttcattttactaccttcctttaatccactttttcatttacagaagtgatttttggctaattacgtaatttgtaatcttcttcagtttaattctatatatatctttctttaacttcttcctcttaaagaactgcattataaatttataattatgtaataaatgctaactctggaagaatcttatccaactctttttagttacttcagccagacgttaggatcttgtgactctgatgaaagctgttaataataacttaatgcatgttgtgtttgaaaggtgagttccaaatcggaaagaaggtgaagccattagatccgacaagtatcaacagtgttgttcaattcggaaccttgaggcactcactgagtcatgaagctaaaggacattcacttgtttatagtcaactttatcctttcgacggtctccttaactacacttctggaatcatacaccatgttcgcattacaggttcatcttttattcttttcttcattttagctatatgtatgcctcgatattcttggttatggattggtttttgaaacgcagggctgaaaccaagtactatctattactatcgatgtggcgatccttcaagacaagatatgagtaagatacaccatttcaggacaatgcctgtttctagtcgctcgagtaatcatggtcga

SEQ ID NO: 173581 - DNA, 769 bp, Arabidopsis thaliana landsberg; identical to SEQ ID NO: 46287

SEQ ID NO: 173582 - DNA, 1971 bp, Arabidopsis thaliana landsberg
attacttcttcttcttcttccaatggaatctacgccgccaccggatgattgttccgttaaggttgctgttcacatcagaccactcatcggcgacgaaaggattcaaggttgtcaagattgtgtcactgtcgttaccggtaaaccacaggtacagttgttttttcttcttcttcttccaggttcgttaaatgttagagctctcttcttttggtctgtctgattaatctgaacttgtagaagaataaacttttttaggtgaaatatatttcaactgattagctcttttttttttaatcggaattgtctctccctgagatctagatctcacgacgtttttagaatcagtgactttttatcagtgtttactttatgcatgtttgaccaagtacttctgtttttagtattattgcatcattaatatcttttcctttattaattagctcactaatcaattgtttttgttgctaattctgatcactgacctccttaccaaaaaaaattctgatcactgacctttttactcaatatgtgaattggaattgtggttttggaatatatataagttttggcccatgctcgttaaattgttagtgagaaatttttattgtaatcataatcaaatatttctttgaaaattggatttttgtaaaataatgctgcaggtacaaattggatcacattcttttacatttgatcatgtatatgggagctctggttctccatctactgaaatgtatgaagaatgtgctgcccctcttgttgatggtatatttcaaggctacaatgctaccgttcttgcttatggacaaacgggttccggtaaagcatatacaatgggtactggctgcggagacagcagccagacaggaatcatccctcaagtgatgaacgctcttttcaccaagatagagactttgaagcagcagattgagtttcagattcatgtttcttttattgaggttctttttaaacacctttctttcttctgacctcgcgttgattcattcgtaacacgactgaccattaatgattttatttggttagattcataaagaagaggttcaagatttgctggatccttgtactgttaataaatcagacactaataacactggacatgttggtaaggtagcacatgtccctgggaagccaccgatacagattcgagaaacatccaacggtgttatcacactagctggatccacagaagtaagtgttagtacgttgaaagagatggctgcttgccttgaccaaggttcggttagcagggctactggtagtactaacatgaacaatcagtccaggtgacttgtgatatttgtgttattattgtttttatgtaacaatctaaaacctcaagtagaacgttgcagtcaataactttaaacacttataaaagttttgtctttcttctttgggtatatgcagtcgttcacatgccattttcactatcaccgtggagcaaatgcgcaaaattaatacggattctcctgaaaacggtgcttacaatgggagcttgaaagaagaatatttgtgtgccaagttgcacttagtagatcttgctggttcagaacgagccaaaagaactggttcagacggtttgagatttaaggaaggttggcgttcttctgttgaatttggttttagactagttttaagcgtttttgatcttggtgctgtaatggaagttgattcttttcatcaggagttcacatcaacaaaggcctccttgcgcttggtaatgttatcagcgcgctcggtgatgagaaaaagcgtaaagatggtgcccatgttccttacagagacagtaaacttacacggcttttgcaggtatatttgttttcaaatcttcttgatattacactgtttggtccattctcataagcttgcatgttaatttcttaggattcccttggtggtaacagcagaactgtgatgataggtaacctgcaagttttctcttttattttt

SEQ ID NO: 173583 - DNA, 484 bp, Arabidopsis thaliana landsberg
atgacgacaatccgtcggttctgctgcgacgacctcctcgcgttcgcctccgtcaacctggaccacctcaccgagacggtgcgacactgatgcgtttcccttctcttttccttgttcgagcgcatcccctctctgatctctcgattcggtcgccgcagttcaacatgtcgttctacatgacgtacctggcgcgctggcccgactacttccacgccgccgtcagccctggcggccgcgtcatgggttacagtatgtctctcgtaaccttgcatctttgtttgggtgtcccggcctgtcataaattcgcggcagttgtgtgctgctagtgcctctgcatctttgcttgggaaattaaaattagctgaacatgtagagtgcaaaccctggatatgctagtttgagtgttcagacatgagtggtgtaaagacactggatcatcttcttctacaatgtttttaaggtggtgtttggttcgccgaagtct

SEQ ID NO: 173584 - DNA, 659 bp, Arabidopsis thaliana landsberg
atgtcgggtcgtgaagatgaagaagaagatcttggaactgccatgcaaaaaattcccatccctgtcaacgtattcgataaagaacccatggatttggatacggttttcggttttgctgatggagtaagagagatcatagaagattccaatttactagtgagtttctttcaactctccaaaacatgttttggttttgaataaaaataaaactcatcagtgttctttttaccatgtagcttgaggattctcgagagtttgatacaaacgattcaaaaccgtctcgaaatttctcaaatctgccaaccgcgacaagaggtcgtcttcatgcaccaaaacgatctagaaacaagcgaggaagacaaaaaagactgtctttcaagagtccatcagatctctttgattttaaatttggcattaccgacaagagttgttcacattgcgggacgagaaagactccgttatggagagtaggaccgagaggagcgggaacgctatgtaacgcgtgcgggatgcgatacaggacaggtcggctacttcccgagtaccgccctgcttcaagtccggatttcaaacctaacgttcactccaactttcatcgaaaggttatggaaatcagaagggagaggaagtcatctcctccgaatagcgcctctgaatag

SEQ ID NO: 173585 - DNA, 144 bp, Arabidopsis thaliana landsberg
ctgcagaacccagctgacaagagggagattctctgcgatgagacactgaagctaatctttgaagggaaagacaaagctgggtttctggagatttcaaaactcttgtccccgcactttgtgaagactgctagaccaaataactag

SEQ ID NO: 173586 - DNA, 670 bp, Arabidopsis thaliana landsberg
gctacttgatggtcttttctgtgaatcaatcatcttttgacttcataactcatgttttttcaaggttgaacatgtgagagcagagaggaacttacttgcggaagtggacagtaactacatagtcaagctctactgttcatttcaagacgatgaccatctttaccttgtgatggagtatttgcctggtggagatatgatgactcttctgatgcgcaaagatactttgacagaagaggaggctaagttctatgtcgctgagacagttcttgctatcgagtccatccacaggcacaattacatccacaggttctgtgagagtaaatcaaacaaaattgattaattgttctcttgcattttgggtgagcttatcttcttctttttgcttttgtagggatatcaagccagacaacttgctgcttgacagatatgggcatctaagactttcagattttggattgtgtaaacctttggactgcagtgccattggagagaacgatttttcaaacaattccaatggatctacggagcaagaggctggatcaactgctccaaaacgcacacagcaggagcaacttgaacattggcagaggaacaggagaacgctagtaaggcttcatattcacctttgagatttttgatagagtttctccctctgtgcgtgtctgatgga

SEQ ID NO: 173587 - DNA, 425 bp, Arabidopsis thaliana landsberg; identical to SEQ ID NO: 71795

SEQ ID NO: 173588 - DNA, 422 bp, Arabidopsis thaliana landsberg
atgaccgccaaggcgctgttgaagaagaattcgcatttgacgcgggacgagatcaagcagggggtggggggcaacctgtgccgctgcggcacgcacatgctcatcgtacgagcgatcgatcgcgccgccagcgcaggagcgacggcttgaacacgcgacgtcgcgacatcatcgaatttaccgaactttccgaccttggcgccagccgtggcgcattcctgaagacttccggcggcctggtgctgggcttaagactgatggggccggccgacgcgctggcagcggtgcgcgacaagctgccgctggataccagcaccgtcgcgatgcaaggcaacagggcgtttgcggcggtcgatccgaccaagctggatgcatggatcgccatacatccagacaacaccggctcgctgttgaccgggaag

SEQ ID NO: 173589 - DNA, 773 bp, Arabidopsis thaliana landsberg; identical to SEQ ID NO: 16966
  unsure (1)..(773): unsure at all n locations

SEQ ID NO: 173590 - DNA, 1258 bp, Arabidopsis thaliana landsberg; identical to SEQ ID NO: 9566

SEQ ID NO: 173591 - DNA, 1254 bp, Arabidopsis thaliana landsberg
gctttgaaaagatcacatctttctgattgcagccaatagctggtgctcttgtaatgtctgaccgtgtacttaactttgtcctttcttgaaagtggtgtgtatgtttcccctttttttcgacagttatgggagatctgtccaacggatgagcgttgaggagaaggatgaagggaaaaagtggttgaatgacaccttctatcccataaggtaagatattcagccttgtagaactcgactctccgctgatgcaaaataactacctaaagcccaggaagttgtgcaacttggacatgatatgttaaaattttggtgtttgggttctcatgactaatcagatgtgagatggattcacttccaagtattgattgggttctggaacgtgcaaaagcagctgttcttcggtatgggattcgaggacttgttatagatccttacaatgagctcgatcatcaacgtactccacgccagtgagtgaagaaaatattttcactgaataccctctttcctttctgaaacatgaaagattaatattcgttttgataggacggagacagagtatgtcagccagatgcttacaaaaatcaaacgcttttcccaacaccactcctgccatgtctggtttgtcgctcatccaaaacagttgcaacattgggatggcggtgcaccaaacctttacgatattagtggcagcgcacattttataaacaaatgtgacaatggtattatagttcacagaaaccgcgacgaaaatgctggacctcttgatctagttcaagtgggtaccaatcccttcatcttcatctgtaatgtattattttaaaaatggccttcttattgtgtaaagttactaacctttttgtatgttttagattggtgtgaggaaagtacgaaacaaggtggcaggacaaattggtgatgcatacttgtgttatgacaggtacataaacttttcaactaccttcttatttctacttatctaacttaacggactaaacaagttttcacaagaacttatgatagtattttgttactttggcatcgaaaactagctgaagttattccgaagtacccaaagcgtagagacctttgcctagaacaccaaacctttatcaaaactctgttcaaagttacaatcgataattctactatgttggttcagtaatgaaatctttattcgacaggacaactggttcctactcggattctccagtgacgcctggaatgccagagaggagatcacccaagcggtactga

SEQ ID NO: 173592 - DNA, 749 bp, Arabidopsis thaliana landsberg; identical to SEQ ID NO: 38855

SEQ ID NO: 173593 - DNA, 2304 bp, Arabidopsis thaliana landsberg
ttaagataagagaatgggatactactggcctactatgatcacggactgcgttaagtatgctcaacaatgcaggcgtttgccagctccatgcaccactcatccaccaacctctggagttattctcttcgatctccgcaccataccctttcatgagatggtcaatggatatcattggaccattgcataggtcgacccgaggtgtacagtatctactggttctaactgattatcgaagtggattgaaggtgaagcgtatgtaaacattaaagattcggcggtaaagactttcatttagaagaacatcatatgcaggcatggcgttccatacgagatagttactgacaacgcaccacaatttatctcacacgagtttgaagcattttgctcggattaggggattaaggttagttattccactccgcagtatccacaaggaaacggtcaggccgaagctgcaaacaagacaattctaagcaatcttaagaaacgtttaagtcatttgaaagggggctggtatgatgaacttcagccagtcttatgggcatatcgcacaactcctaggcgttcgacgagagagaccctgttttcattggtgtacgggatgtaggcagttgtaccagccgagctcaatgtaccaggacttcgtcgaacagaagctcctctgaatgaagaagacaattctgcaatgctcgacgactcgctggataccatcaacgagaggcgagatcaggccttgatccgaattcagaattatcaacatgcagcagctcggtattataactcgaaagtcaaaagcagacctttctttgtgggcgattatgttttgaaacgtgtgttcgataacaagaaagaggaaggagcaggcaaacttggcattaattgggaaggtccttatattgttaccgaggtgatccgaaatggtgtttacagattgaaagatgtagaggacagaccagtccattgtccttggaacgtggtgaacttgaagaaattttatgtttaaaaacgatacgcatttttgtacatgaattacggtgtggcttgatcccgaaatggttacgtggcagctcggaaacgagttaagctatggagaaggggtgttttattcatttgaagagaagttcgactatacgaacaaacaaaggaaaggagttcggctgtgcgaacatacaaaacaggaagcaaagttacatttattcaaaggcgaaaacaataaaaagatgtcgaagtcttaaacacacttcgaactaggaaatccttctcgtcttgcaaaatactttgactccttggttggcaagatcaagaatgggcatcatacagtctgggatgcgagcaaattcggcgattccaagttgagggtgtgtagctcccttgatatcacattgactctctagagcatcaggttgatcttctttctaagtatcttcttttctgatgaacgcttttggtgttgagccgcgagggctttgataaaggccatcgcaatttcttgatctctgcttgaaagatccttgattaatgcacacggagctcggatctgggatctgaagttacgaagtggagagcgtcctctgtccggcacgttcaggatatcttcatcaatcatcttgaccctggaaaagtctggcatggactccgagcatcgaaggttaaaagccataactgcacaaaaggaaaaacgaaagttagatgaagaataaagaaaacatagagaagcaatttatagaaggactcgtaactttcaaggatgcgtttccattcaaggctggagtgatttgcggaagcattcacgtcactccaatcgccctgcattcaaagaatatctccaaaacgaatatttgtgaaatcaaggagaataggaaagtttccttatataaagatgggctggagcccaaaagtaagtccaaacaaaaataaaaaaaaagggaaaaggaaaatatttgagttatcgagggacatttagggaagacgctcgggaacaggctctttcatcgccggttcggggttcgaggtggatgcctcgtttttaacgtcaactttgggttcattcttcacgcacttccaagggttgctgtcttcctcctcgtcttcatcctcttcgccgtcagacgggatcacttggaccggagcatttacgggatcaaggacttgacctcgagcatggaggtacatccagagcatgtgcgagatcttcgccatgcagtcgaagttcctccattcccattggaagggatcactctatatggccctcaccttcctttcaatacgggtaattcgggcctcgagcgtttgcctcttgaggcc

SEQ ID NO: 173594 - DNA, 1740 bp, Arabidopsis thaliana landsberg; identical to SEQ ID NO: 61751

SEQ ID NO: 173595 - DNA, 485 bp, Arabidopsis thaliana landsberg
caatatttaggtcacttctgtacgaggcttgtggtcggatcgtgaaccctgtagatggttcggttggtttgatgtggtcagggaactgggctcagtgccaagcagctgttgacgccgtgctcaacggcttacccataactcacacacctcttccaagtgcatccgcgtcgcaccagatcattcctccccacaggacttacgatatacgccacgtggctaaagatccaacaaccggcggcgacagttcggagaatctggccacacgtgtaaacgctaacaagagcaagacgcaaactggccgattcaaacgtgaatccgtgaaccaactaggtgaatgtagtcatgacatgtggcaactcccaagttctagtgctacgcatggttatggccacttcacgttggagaatgtggagagccgaagggaagctccatttaatcaaagttctccaaatcttgggtttgatgatcaagtcgatatcaacgag

SEQ ID NO: 173596 - DNA, 437 bp, Arabidopsis thaliana landsberg
  unsure (1)..(437): unsure at all n locations
taggccgtgctggtaggttacaagaagcgtatgaatttgtaatgaagtcaccatgcaaggagcatcccccagtatggggttctttacttggggcttgcaggattcatgggaatgtgaaactgctagaactcgcagctacaaaatttttggagttggatccaacaaatggagggaattacgttgtgtttgccaatggatacgcgagttgtggattacgtgaagctgcctcaaaggttaggaggaagatggagaatgcagnnnnnnnnnnnnnnnnnnnnnnnnnncagatagaattacaaggggaagttcatagattcatgaaggatgatacgtctcacagactctctgaaaagatatacaagaaggtccatgagatgacttcattctttatggatattgactactatccagatggcttagactctagctgtcctgtt

SEQ ID NO: 173597 - DNA, 497 bp, Arabidopsis thaliana landsberg; identical to SEQ ID NO: 22808

SEQ ID NO: 173598 - DNA, 1212 bp, Arabidopsis thaliana landsberg
ctctttggtatggatcaagtaattctcgtgtgtggtaaatgggtatatgagaaaacgagatggctttttgtggttgatagtacaaaaggttgtcgtgtacttgaaggtaatagtcaaaccagttatgatgatttcatccaaatggtgtatgaggattacaatgtcgagaagagtgtatttgaagttattttgagttacaagatctcgaaatcaaagcaattaccagcagatactccacctgtactcattggtaataatagacagtttcagtcttatttggggcaaacgaagaatgctacagttcgactttgtgttgaattgaaagagaaagttctatatgaatcagaagaggaaatcattgatgatttaggtagcagcgacttgccgaagacaaaaacagttgatgtatacggtattgtcgaagagaacattgaaaacgttgacgtatacacccctactgataacgttgttgaaggacaaaaatctgaagcagttgaagatggtgaagatgacgagagtagatttgattactgtgatgattccgacggaacagattctgatgatgagaactttagcctctatgggattccaccagaagaagaagataaaacgaaagtaccaagcaagaagaggagtttaagtgtatatgtagaagaagataaaggagatgctacatacgagaccttagaactatcgtcattgggattggccattggtcaatgttttgaaacgaaaggtggaaggttctgaattttacttacagcgaagtcgatacctccgttgttgttgtggccagagaagcttcttttgataaggagtaaatcagaaaggggaaaacccacaaccctaatactgcaacaaatctacagatctgcaacaaaaaatattaatcaccatcacaatcaaacgaaattcaatcgataaaagagacttcttcaaaagcggtggtggcgggtcaatagtttacctacacctccggagaagtgaatccgggccaccgcgactcttccctgctgtttgtgtagccggaacctacggcggctaaaaaagcttgtaccaaagaagagtgagaagaagcagcgaccaccggagaagagatatctcctagtcgagcagcgaccaccggagaaaggagccacgactggagaagagaagtcggcgttacgattagccaccaccgtagatttgttagggtttcgatttgaaatctaa

SEQ ID NO: 173599 - DNA, 538 bp, Arabidopsis thaliana landsberg
cgacggcatgcgcgtggccaaaaatgcgtggcaccgagcaccgcgccgagctgtcacggaaaggttttctcgccaatcactcgggtggcatcaccggtggcatttccacgggccagacgattttccgcccgctacgcgatcaagccgacctcaagcatcaccacagcccggcaagagcatcgacgaagcggggcagggcaccgacatgcgcacgaccggacgtcacgacccttgcgtcggtctgcgcgcgacgccgatcggcgaggcgatgctggcgctggtgttgatggatcactggctgcgccatcgtggccagaatgccgacgtcgccgctgcgccgtcacgaattccgggcgaggttccgtaagtcgtgtccacgtcgtccgcaggcgtggcccgcctgtcgtggcggctgtccagcttctactttttctattacgcgaccgtcggcgcgttcatgccgtactgggcgccgtatctggcggcgcgcggcttcaacgaagcgcagatgggcatcgcgtttgcgctgatgggctgc

SEQ ID NO: 173600 - DNA, 459 bp, Arabidopsis thaliana landsberg
atgttgctccaatgttccatgaccttattaaaggcatgcaacccataagtgtcatcttcccaaagctcccctttccagctcacaattgtcgtgtccgtgctcgcggaaagattgcaaaaatcttttcaaacatcatagcaacaagaaatcgctctggtgacaaatcagagatcgacatgctacaatgtttcatcgactcaaagtacaaagacggtagagagccaactgaatctgaagtcactggtttgctcattgctggtttgtttgcaggacaacatacaagctctatctctgccacatggaccggtgcttatctaattcaaaacaaacactggtggtccgcggctttggacgagcagaagaaactgattggaaaacatggggacaagatcgaaaacgatgttatgtctgagatggattttctgtttcgcagtgcaaaagaagctttaaggcttcacc

SEQ ID NO: 173601 - DNA, 657 bp, Arabidopsis thaliana landsberg
ctcataggtatatgtgcaggatacattcactagatcacgtatatcttattaatattatgtttgtttttaatatattagtaaacattttggatttgaacttggacatttagatataagatctacatagaaggaaacgcatggtcggtgagcgaaaagtatatactttcgtgtgatagtatgactctgttggttaaaccagagtactacgactttttcttccgaagtatggtcccaatgaagcatttttggcctattagacaaaacaacaaatgtggtgacctcaaatttgcagtcgaatggggcaacaacaacaccgaaaaggtaaccaaaaatatctaatatctatattgaaattttcaataattttaaattctagtgactagtttctaattgctgatcagtgataacctgtcatcacccatgattctttttgtgattgtcttaaattcattatatatatataggcacaaatcatagggagacaaggaagtgagtacatgatgaagaacctaaagatgaagtatgtgtatgattacatgttgtatgtgttacaaggctatgggaaattgatgaagttggatgtgacagtgcctgaaaatgccacggaggtttgttcagagacgatggcttgttcgattactgatggtggacggatca

SEQ ID NO: 173602 - DNA, 1864 bp, Arabidopsis thaliana landsberg
  unsure (1)..(1864): unsure at all n locations
agaaaagttctgcagggtatatcgccatgatccacaccgacatcgcagagatcttatgcgtcaaacccaagacaacgaagaagacaaaaagaatggaggaagatgtcaagaagacgacgacgatgaagatagaaggaaaagttgttgtgatgaagaagaatctccttgatttcaaagacgttatggcttctcttcttgatcgtgtcaatgagcttcttggtcgtcgtgtctctctccacctcatcagctctcaccaacccgacccgggtaacccattctttctttaacccgacccgttatcaaatccatcttaaagttcttgattactctgtttttcttaaatcattctttggttaatagtcactatactaagattcattgttgttataaaccatgatgttgtgacaaacacattttatactttatccaaatcaaaatctgagtgttttaaactaaaataatatttttgtgtacatatgtatcagccaatgagaagagaggaagacttggaaaagcagcacatctggaaaaatgggtaacaaaaataaaaacgtcagtaaccgctgaggaaactgcgtttggagtaacgtttgattgggacgagtcaatgggaccaccggctgcatttgtgatcaagaaccaccaccatagtcaattctaccttaagtccctcaccctgcgcggcttccctgatggcgaaggtggtgccactgcgatacatttcatctgcaattcttggatttacccgaatcatcgataccgctccgaccgcgttttcttctctaacaaggtaacgatttgagacaaagtgggtaatagtaatataataatactactaattttatggtttttatattggacttggaatttcatatattattttctaactaatcnnnnnnnnnnnnnnnnnnnnnnnnnnnnaacgttatcataaatattcttaaaccataggtctttcttaatctttgtgtatccatgtatttatttattatctagataggtagagccgtagagggaatgaactaatacatttaagaggatactgattagtttgttacataggaattatctcctaatccgtatgacctaaatctttagaattatttatttgatttaatagatagttttggaatattcgtgtacgtgtgtaaaacatataattgtaccaaagaatgaaaccggagtctatctttacaagtcaccctcttcctttattccaataattttctaatctaatagaatctttttataacttgataacgacaaccattttaagttattgatattatattgttctgtttcatctttctttctctctttttttttttttagttattgttgatacaaccttgatttcctaacacaataaagtagatggggctggctctggctctactattgagtcaaaagttaaaaaagcatatattggttggacatttaattttatatttctttagtagttaacctaaatttaacccatggattaatgtatacacacggtgaagttatagttttactgattttattatttttccttaaggcatatcttccaagtgaaacaccggagctaatcaaagagctaagagaagaagagctaaagaatctaagaggcaatgagaaaggaggagaattcaaagaatgggacagagtttacgactacgcttattacaacgacttgggtgctcctgacaagggtcctgactcagttcgtccggttcttggcggttcacctgagctgccttatcctcgccgtggcaaaaccggccgtaaatccaccaaatcaggtagtcaactcaacatttcaaaattacataccacatagcaaatcttgatagttacttgttctaaacggcaccgtttttta

SEQ ID NO: 173603 - DNA, 412 bp, Arabidopsis thaliana landsberg
catcatccccgcgacccggacggcgctggacaccgtgatcgcgcccctcgtcctgggtgccgacccggcggacatcgacggcatcagctcgatgctggaacgcacactcgttctcttcggccgctccggcccgtcgatctacgcgcagagcgccctgaacctggcgctgtgggacatcgccggcaagcgcgcgggagtacccgtcagccagttgctgggcggccaaccggaggacggccggccccgtgactcggtccgagcctacgccagcctgctctggctcggcgagccggcggtcgtcgccgccgagtgcgagcgagcggcggccgcgggattcgccggcgtcaagctccacgagaccgaagcagcgtccgtgaacgcggcgcgggccgcggtcgggcccggtaccgag

SEQ ID NO: 173604 - DNA, 369 bp, Arabidopsis thaliana landsberg
cttagtccgacacttatcatatgcatccgaaaaaacagctcgggtcttctgttatggaatccgtatttggggcaaactaaatggattcgacccagaaacacattacacatatttgaaagttttgctctttgatacaacaacaaccgtaaccacaagatcttgaggtttctttatgatgacgagagaaacagaactagtcgaggatgagatattgatgtctacgattttagctttgtttcatggaggacggttcttgatgataatacctatagggatgaactctgttatcacagtggagagtctttgaagggaaatacttactttttcgatcgagaggaaacgacagaggcacaagtcggacaaagaatt

SEQ ID NO: 173605 - DNA, 508 bp, Arabidopsis thaliana landsberg
gattcatttctctcttgtctcttttacttgatttaatattctcttattgttgtgttttgattatctgtattgtttgatgttttcagactttatcttcatgggctacttgtagtgttgaggaagttgcttcaaccggaccagggattcgttttttccaactctatgtatgtttcagaagatttacttgtttcttattgattttttggctctgtgttgactatttgctctcttgattcaggtttataaggatagaaatgtggttatacagcttgtgaaacgagctgaagaagctggattcaaagctattgctcttactgtagatactccaaggcttggacgcagagaatctgacatcaaaaacaggtgatatgaaactactccaccatcacataaaccagattgttagatcttttggttttcttgatagttattatcttgcagattcgcgcttcctcgaggtctaacgttgaagaacttcgaagggttggatcttgggaaaatagacaag

SEQ ID NO: 173606 - DNA, 545 bp, Arabidopsis thaliana landsberg
tcttcctccaacccatcaaaacacttcggtgtaatgttatgttgcagagacatgtggtggacttttacatctctgatttccagtctgggctcagagcgttagtcaaaaccggaagcggtgcaaaggtaacacctcttgtagatgattctgttgtcatcgacttcaagcaaggaagcgagcaagtgtctcccgattttgtacgatggttaggcaagaagaatctaacaagcgatgatcgaataatgcggctcaaagaagggtaatgaacaagcacttcattaacaactcctaaagtaataaaaacttaacagaagcttcgatcctgatactcgatgctgggtttcaatttcaggtatataaaagaaggaagtacagtgagtgtgattggagtggtgcagagaaacgataatgtgttgatgatagttccatcatcagagccactagcagctggttggcaatggaggagatgcacattcccaacaagtcttgaaggaatagtattgagatgtgaagactcatccaatgttgatgccataccggtttga

SEQ ID NO: 173607 - DNA, 1394 bp, Arabidopsis thaliana landsberg
attattttcccctggaaggatggagacatcttcatctctgccactgtcacccataagtatagaaccagaacagcccagccatcgagattatgacatcacaactagacgtggggttggaaccacaggcaacccaatagaattgtgcaccaatcactttaatgtttctgtgagacagccggatgtagtattttaccagtacactgtaagattcattagtcacttttctgcattctttcatcagtgtctgtgcgtgtgtgagatgtttgacatatcggtaccttttttgcaggttagtatcaccacagaaaacggtgatgctgttgatgggacaggaataagcagaaagcttatggaccaactattcaagacttactcttctgatcttgatggtaaaaggttggcatatgatggagagaagactttatatactgttggtcctctaccacagaacgaatttgactttctagtcatcgtggaagggtcattttcaaaacggtatgtccctcttatctggattgatatttaatcgtttcaaggtgtcaagatagatcttgttgatcttctaactaacgcagtcttgttaagtttatagtgattgtggtgtctctgatggtggtagttcttccggtacttgcaagcgatcaaaacgttctttcttgccaagaagttacaaggttcagatacattatgctgcagaaataccgttgaagactgttcttggcactcagagaggagcttatacaccagataagagtgctcaggatgcacttagagtgcttgacattgtactgaggcagcaagcagctgaaaggtaaatctttctatctgtttgcttttgtgcagtttatatttttattaaaatagatactctacgttctaatggaccaatttttattatcatattttcactttgttggtgaaatttaattaatgtacaactatttgcattttgtgaccatgctcgatgcttactatagaaaactgttgataatgcaggggatgccttttggtcagacaggcatttttccatagcgatggacaccccatgaaagttggaggaggtgttataggtattcgaggtttacattcgagctttcgtccaactcatggaggactctcgcttaacattggtatttttcagtatacctttctcatctccagctttcataaacttgtcttaattgtggatagttttattaataagcaaaactgttttcgttttgtgatggtttgcagatgtgtcaacaacaatgatcttagaacctggtccagttattgaatccctgaaagccaatcaaagtgttgagacaccacggcaaaatccactggattaagggagttctggcttttaaaatgcaataacttgagaacatgaattggctgcttttgttatg

SEQ ID NO: 173608 - DNA, 1211 bp, Arabidopsis thaliana landsberg
ttggtcttactttgtttatggatgatgctttttaacctttagggtgaaattccgtttggcttgcctcctaacgctactcatatgtaagtgtttaagcaagtgcattcatcttttaagcatacattccagtgcaattcacgagtgttttcgttgtttgccgattacagaaacatggcttacaacaatctgacccaaagtatccctttttccttacctcttatgacatctcttcagtctttgtaagtggcttattccaaatggatatctttgaaatatctcatcacattgctttccttttatactgatttgttaaataatggcttcctctgtcttctagaaatttgagccataattcattatctggacctcttggaaatgtgttttctgggttacagattaaagaaatgtgagtcttctgttcagttctgttagtctttcatcaccatatataggtgcaagatacccattcatattcaaatattgactttgctagggatctgtcattcaataacctgacgggagatctaccgagctcttttgggactctaatgaatctgacttcactgtaagtatctggtttcttatatctgctatctgctttgtgcacgttggtataacctaataacagttttgatgctgtgataacaaaactgcaggtacctccagaacaacagattaacaggatcagtcatatatctcgcggatcttcctttagctgacctgtagtttcactctctttgtgctttgattttccatttcattgaacttcctttatttatgacctaaacatatgtcttcaggaacatcgaagataaccagttcagtggtattatcccaagtcattttcagtccattcctcatctgtggtgagtttattattccccccttctcataaattggctcagacacacctatgactcatgaaaatcattggtgttttcctgagcaggatttggggaaacaagttccatgtagagcccaactataaaccgtggaagttcccattggacgtcagaccactgatacaaaatgatactggctatccaacaacagagtcaagtgccattatgaattttcccagacctgagactcagaaggtcaaaaagaagaagaaaggcataggagcaggaagtacctttttactggttggtgggttagctttgctgggaactttctttgcacttttcgcagttcgcatgaataatcgacgt

SEQ ID NO: 173609 - DNA, 444 bp, Arabidopsis thaliana landsberg
  unsure (1)..(444): unsure at all n locations
atggggaggtcgccttgttgcgacgagaatggtctaaagaaagggccatggactcctgaagaagatcaaaagcttattgattacattcataaacatggtcatggaagctggagagctctccccaagctcgcaggttttttcctttccctagtctcttaactcaatccatgatcattttatataaacttgtatacgtatatatggatattatttgaattgtatagttttgaaacttcttgtttttcttttcagatttgaataggtgtggaaagagttgtagactgaggtggacaaattatttgagaccagacatcaaaagaggcaagttttcagccgaagaagagcaaacaatcctccatctccactccattctcggaatangtaagtgataaacatatattcattttttttttgtataaaactntgaatgactaaaaacttttt

SEQ ID NO: 173610 - DNA, 488 bp, Arabidopsis thaliana landsberg
gattgatgtcattgatgtgagagtgcagtctattgagttatatgtggcagatctgaaggaaagggaacatgggaagcaaacagaggaggcaagtcaacatgggcatgcaacagacgatgacgtgtttttgcttcgcccgatggttttgtgaccaccggcaggatgcaacaacgggatgtagtgatctacagagaacattctctagaggttgtagaaaacagtaagtataataattaatgtcaattgggtataaaaatgtgaatatatgacttaggttttgttttaaaatgtgtgtaggtaataaagagacaaacacgacggagaaagagctgaaaggaaaagcgaagaagaatggcgggggcaagaagaagtaggaggtgccacctgtaatagaaaccggaaagaagcaaacaaggggagcatcccgccttattaaatcaccgtttgtggcggatgataagaagcgtaagagaatgcggaaggcagat

SEQ ID NO: 173611 - DNA, 747 bp, Arabidopsis thaliana landsberg
aaaggagactcgcgatttgagggtcatgagcttttgcggttcactcgagaacagctgcttcagctcagagaggtaattcaaggctgctacctcagggcagtggaggccttctgaacgatagaccaagtgcccttgtgcaaggtaatggttcccaacagcctaaacctgttccttccccgaccagacaaactgtggagaagcaaaaccacaaccacagccacaggaggtggtcctcctacgactactagcttgaacacagtagagctcagtagaaagacctactcgcttttgaaggaatatttcaatgtccgtctattggatgaggcatttcaatgcatagaagaactgaaaaccccgtcttaccatcctgagcttgtcaaggaagctatctccctcggcttggagaagaaccctccttgtgttgaaccagtggcgaagctcttggaacatctggtctctaagaatgttctaactcctaaagacttaaggaatggttgtctgctctatgggtctatgctcgatgacattgggatcgatctgccaaaagcgccaaacaactttggggagatccttgggagtttggttatggccaaagcatcggattctgagttggtgaaagagattctaatgaaaatgggagacgaatggttcaagaaagcagtcttggaagctgtgacgaggagtgttagtgagtctctactcactacggaagcagtagaggttgaggcttgccgtggtttggtatag

SEQ ID NO: 173612 - DNA, 476 bp, Arabidopsis thaliana landsberg
atggaaataatattagtcactttgtgcttaacaacgctccttgcacttcttctccttaaatccatcctcaaaagaaccaccacgaacaatcttaacctaccaccatctccatggcgacttcccgtgatcggaaacctccaccagctcagcctcaatactcaccgttctctccgttccctaagtctccgatatggaccactcatgctccttcatttcggccgcacaccagtccttatagtctcctcagccgacgttgctcatgacatcttgaagacgtacgatgttatttgtgccaaccgcccaaaaacaaaagtgattgataaaattttgagaggtggcagagatgtggcttttgccccttacggagaatattggaaacaaatgaaggtacttcaaaagttcaactagtttttgttttctcctttcttcttttcttttttgacttataatattttcctacaagaacattttattga

SEQ ID NO: 173613 - DNA, 442 bp, Arabidopsis thaliana landsberg
atggcttcaaataaacttatttcgattctagttctcgtagttacacttttactccaaggtgataacaattacgtcgtcgaagcacaactcacgactaacttctactcaacctcttgccccaacctcctctccaccgtccaaaccgccgttaaatctgccgttaacagcgaggctcgaatgggtgcatctatcctccgtctcttcttccacgattgctttgtcaacgtaagtttttttttcttttaccttttttgttttccttgcatctcaagaaacttggcataattgttatttggttatttccttctaatcatagtcataacttgcatatgtagggatgcgacggttcgattctactagacgatacgtcaagcttcacagaaaacaaaacgcggctccaaaccgcaattcagctcgtgggtttaatgtgatcgacaacatc

SEQ ID NO: 173614 - DNA, 682 bp, Arabidopsis thaliana landsberg
atgggtaagaagagcggttcttcttcttcttggctcactgccgtgaaacgagctttccgatctcccaccaagaaagatcatagtaatgacgccgaatatgatgattaaaaaggtttcttattcttagatcttattattcgcttactatattcaaagtatgattattggttttcatttttctctgtttttttaaaaaatgaagagagagacgagacggtggtttataaaaccggcgactcaagaatctccggtgaagtcttccggtatctctccaccagcacctcaggaagattcacttaacgtaaactcaaaaccctctccggagacagcaccgagttacgcaactacgacgccgccatccaacgccggtaaacccccgtccgccgtagtccccatcgccacgtcagcatctaagacactcgcaccgaggcggatttattacgcaagagaaaattacgctgctgttgtcatccagacttctttcaaaggatatttggtgagcaattattaatgacctatatttttactttcatttttttaaccaacttgacttctagaccactttatagtgacaatgatgcgcgtctattgtctataaaattaacattgcttatacaagatctacaatttaaaagatagggatttcaatcaagataatttatttttggggtcttgatataaa

SEQ ID NO: 173615 - DNA, 1258 bp, Arabidopsis thaliana landsberg; identical to SEQ ID NO: 34470
  unsure (1)..(1258): unsure at all n locations

SEQ ID NO: 173616 - DNA, 1908 bp, Arabidopsis thaliana landsberg
ttttgagttccaataatttcttgatgtatgttatcgggtttattgttttggcctattataattcattgcatgatttatgtggctctaaagacttaactaacaacaggttcttaaccggttgacatatgcttcgactttgtcacatctgaggcgtctcaattctccaataggacgtgaaggtaaagcctcgttcttttcctgcacttctattttgtctctgtgtaactgttcgtacagttggtgtattttagtcatggttctctttattatccacatccttgcaatttagattggcttgtacttttgtttatcccacttgaatctaatcaagtctgatatgccaggaaaattggcaaaaccaagacaactgcacaactcacagtggggaatgatgtgccctgctgaaacacctgaaggacaggtaaaattgttatatttataaaataagggtgtttcggattttatagttccattgctcattgtggctttgctgtaccaggcttgtggtctagtgaaaaacttggctctcatggtctacataacagttgggtcagctgcttatcctatattggaatttttggaagaatggggtactgagaattttgaggtctgtagcatttcacattcaatttcttacccaacatctgcctcctcggttcttgtggtttcctgaaggtcttaacttgaatataggaaatatctccatctgttataccccaagccacaaaaatctttgtcaatggaatgtgggttggagttcatagagatcctgacatgttggtgaaaacgttgagacgtttgagacgaagggtaagcatgcagtttctttcacgtttccatatatgctagtgaaaatattgcaactttatgcagaagtgacatattactttttcctcttgcaggttgatgtcaacactgaagttggtgtagttagagatatccgtcttaaagagctccggatatacactgattatggacgttgtagccgtccgttgtttattgtagataatcagaagctcttaataaagaagagagatatctatgctctgcaacaaagggtaaaattctaatttttacctgttatcaaagtatcttttgttataaattccattgtaccaatatttgttttcataacccaggaaagtgcagaagaagatggttggcatcatctggttgctaagggctttatagaatacatagacacagaagaagaggaaacgaccatgatttccatgactatcagtgtgagtaatgaaatgaagatgtgattaaatgagtttgtggtgcactaatttctgcagaaatcttactcttatgtttgttgtaggatctggttcaagctagactccgcccagaagaggcttatactgaaaactacacacattgtgagattcacccatctctgatattgggggtctgtgcttcaatcataccatttcctgaccataatcaggtacctctgtctaaatgacttttctatcagaagcgatttcattatgtaaattcagtttcatgctaactaacccttttactttttgatgtattagtcacctcgtaatacatatcaatctgccatggggaagcaagcaatgggaatttatgtcaccaactaccaatttcgcatggtatgttctaggctcttaatttgtggtctttcttgtcagctcttgttacatcactcaatattttaaagaaattattattgttctgtcaaccaggatacgttagcttatgttctctattatccacaaaagcctttggttactacaagagctatggagcatcttcactttagacaacttccagcaggaattgtaagttatttttgctagaagtttttcagaattcagcattgctcgtgtatcaaatctctcaaatgttttcttttcttcttcttgtgcagaatgc

SEQ ID NO: 173617 - DNA, 428 bp, Arabidopsis thaliana landsberg
  unsure (1)..(428): unsure at all n locations
cgaccagcggcgcagggcgacatcaccgggttttctcggtcctcgtcgaaggcgacgaccacaacgagccgatcgctgacgccgtgcgcggcatcatcgacggccacgtggtgctggagcgcgcgatcgccgaccgcgggcgctatccagccatcaacgtcctgcgctccatctcgcgctcgatgcccaaatgcctgacgcccgaacaggcggcgctggtggcgcagnnnnnnnnnnnnnnnnnnnnnnnngaagatatggccgaactgatccgcctgggtgcctacaagcgcggctccgacccgaaggtcgatctggccatccagatctatccgcagctcgaacagttcctgtcgcaaaagccgcgcgagcacacgacgctcgacgagggctacctgcagctggcgcatatcctctcccggcacacg

SEQ ID NO: 173618 - DNA, 2737 bp, Arabidopsis thaliana landsberg
atgagggaaggacttgggtgtgacctaatggtcggtggtaagcttcttgaaggtgcccgggttcaagtctccttggccggatgtgttttggatttattatttccaaacggccggttcttgacatgtcttcactcttcgggtcatatcttccaaacggcttcatggattgcttcgattcgacttcgacgttaatcttgactcttctaccttttccatgcataccaaaatatctcattgccgtaatgggtgatatggttcaaattacctagaactattctctcaaataagagatcaattgcagtattttaggatcgaattcacggagttcttttgttcaaacagtgagttaaatatcgagattaagctagcaaggtagtagtaaaaataaaagagaacaaagtaaaaagacagcaaattgatttggtttaataaatagctaggaaaagggtattctcaggaaactattggttagtagatctaatgaatgctaggttgtgatcgaaccattcttaaactcaaactctaattatggaataaccgatgggcgtgccgcaaaactccctatatctatagctaataataaccggagaagccaagaaactatcaacctaaatatgcattcttaacgagttcaattattcatcttagtaaataggccgattcttattacacacctataaaccagactcatcaaataatagatccaactacagagacctatggcgggcatatctattttctggattcaagatctagttaattactctagatttagcattaagaccaatcaaagatgaagaattctatagataacctagcaaagggggcaatctactaaaccatatgaatccttaatgagaaaccctattcctaacaagcagattactcagacatactggatgaagcaaacaacatgattgagttaaaaagcataaacacagtaaatagagaatgggaaagaagggatctcttcactgtatatagatctgaatgaaactctgaagaacaagggatgaatagcttatgtctctcacaatagggttttgcaaagaacttgataaaagacttaataaacgaaacttaggtctaaaaacaatatatatagaccctaaaaacgtccagggactaataatgcaaatcggcaagtcttctccagcaaacttgagcatctagaaacttgaaagcatctagggtttttgctgggccgaaactggtgtcaatcgacaccaaaagtgtgtcggtcgacactcctcgctgattcttgagtccaaaatcgtccttagcttccttttccttagatcttgctccaaaatgactccttatctccattgttgtcccagtgcatagaatacctgaaaagacactaaaaagactcgagaaataacagaaagactcaaaatcctatacctaaaacatagataaaatcggtgaaaatcgagttatatcaagttcgaactaatcaaagttcctcgtgcagaaatttcagttgctgatgccttagctgctttggcttctacatccgaagtaactgtcacaaggataatccctgttgaaacgatagctcagcccaattttcgacttgaggaaataaactttgttactactcgggcaatgcgtaagcaactcgaggcgcaagcaaacaatctcgagctgcagcaactcgacgacgaggaaaaaattccagaagctgccccgcctgcggctgacgaagatttagctggtctcaacaatcccgaggttcctgacaatcagatacctcacgactggggggcagattggagagaaccaatccggaactatatcttcaacggagtacttcccaccgataaatgggaggctcggaagttgaaggccacttgtgctcgtttctgcttagcagatgacattctgtatagaagaatcatttcggcttcggatgctatttgtatcttaaaagaacagacccggacagttataaaagaaatccatgatggaacttgtggaaatcactctagaggtcgttctttggcctttaaattaaaaaaatacggctatttctggcccacaatggtagcggattgcgaagcatatgcacatcgatgtgagcagtgtcagaagcatgcaccgtacatcctacagcccgcagaacttttcacttcggtatcagccccttacccgttcatgaaatggtctatggacatcgttggaccactccacgtttccactcgaggagtcagattcctactcgttctaactgactacttctcgaagtgggttgaagctgcagcctactcctatataactcaagtacaagtccgccacttcatttggaaagaaatcatctgtaggcacggtttgccgtacgaaatagttaccgacaatgggcctcagttcatctccgagcagttcaaagctttttgcgcggaatggcaaatctgcctcaatcgatcaacacctcgctatccgcaagggaatggtgaggtcgaggcaatgaataaaacaatcatttcaaacctcaagaaaaagctaagtgaatataagggagcttggttctgggagttgccaaacgtattatgggcaatccgcacaactccaagaagagctaccagtgatactcctttcgctctcgttcacggagtggaagcagttatcccggctgaaatcaaagtcccaagcacgaggaggatccaaaatcccaagaatgaagctgcgatcagcgaaatgatggtcgacgtgactcatactatccatgagcgcc

SEQ ID NO: 173619 - DNA, 327 bp, Arabidopsis thaliana landsberg
atgtatacgagtatatttttcatcttttcccttctttctgtgtcagaagcgcttgtgagaatcccgttgcagatagatcatgccttgtcaacaaacaatgatggagttcagttgaagaacgtaaaggactttctgtactatgggaagatccaaattggcaatccaggccaaactttcactgttgtgtttgataccggaagttcttccatttgggtcccgtcagaaaattggctggccaaaactgaaaaccctcgcaatcgttacatatccagagcctcaagaacctttaaagaaaatgggaagttttcgactgtgttattatagttt

SEQ ID NO: 173620 - DNA, 665 bp, Arabidopsis thaliana landsberg
tggaaagagaatcagacctctagtaatgcttcaaaagacaagaaaaataaagaatcacctgagaagaagcttggcagattcttgacatctgtgaagaagaagaaacctttgattaagccggaggctgcagcggataaacactcagaatcaaccaaattgcaggtatttacaacatttacgcttgcactaatgcatgaatctatagaatttttctgaaagttttcgcctttttggtttttctgttgttcagctagatgatagattagcagatcaggacaaagctcaagagagtgtgtcaggatcatcttcggaagacaagacactgcaaagtggaaatgtagcaaacagagtttcagaggatttactgaaatgtcttgtgactattatcttgaggattagctcgtccaaggacattgtgttggatccatataataactgctcagagtggagaacaagagaacttggtgcatacaagcatttttcgtcggtcgatacatcttcagttgatcttggacgaagaatcaatgcttcatttctgatccatcgtctcaagtaagtttctcatttaaacagatgatttgaaaacttttagaatgatggaatactctaaactcatgttttgtgtaactatatctatctccaggttcctgcttataagctttctg

SEQ ID NO: 173621 - DNA, 825 bp, Arabidopsis thaliana landsberg; identical to SEQ ID NO: 47017
  unsure (1)..(825): unsure at all n locations

SEQ ID NO: 173622 - DNA, 2667 bp, Arabidopsis thaliana landsberg; identical to SEQ ID NO: 6521

SEQ ID NO: 173623 - DNA, 512 bp, Arabidopsis thaliana landsberg
atgtggagatattttccgagtggctggtttcggttacctttcaacttacttgggataggtgtctataatatgatgaaggtaagtattcagtaatcttactatactagcactatatatgaataagctttcatgcaaacgaatggatgtcgtgatggtgatgttttcgtggtaggcgagaaaaaggatgaagacgttgctaaaggaggaagtgttgaagaagagagaagccggagaggagtttggagagttctctaagattatatttggagaaaaagaaggagaaaaggaaacaatgagcatggagaatgtgattgagtacatatataccttctttgtgattgctaatgaaacaacgccacggattcttggggctaccgtgaagttcataagtgaaaatcctaaagtcatgcaagagcttcagagagagcatgcaatgatatttgaaaataagtctgaggaggccggcttaacatgggaagactataaatccatgacgttcaccaatatggtaa

SEQ ID NO: 173624 - DNA, 1378 bp, Arabidopsis thaliana landsberg; identical to SEQ ID NO: 59007

SEQ ID NO: 173625 - DNA, 396 bp, Arabidopsis thaliana landsberg
atggcgtcagggaaccttccgtgggagttggaggaagagatattgtgtcggcttccacttggatctcttgttcggctaagatccgtatgtaaacactggaacgattttttcaacgacaaatggttcatcaagaaaagcttgggttgtgcacgtccccaattcataatcctgcccgaatccaagatttattcgataggaaccatcggtctggacggcgttgatccgaagataaaggtgcgtgagctagcttgtcagtttcattttgaggctgagaagtgggcatttaccgcggcctgcgatggattattgtttcgtgacttttggaatcaaggggttaccatttggaatccatggttaagacaggttgggtggatcgagtataaggagaacagagat

SEQ ID NO: 173626 - DNA, 255 bp, Arabidopsis thaliana landsberg
gttttgaacgaagagggacgagttgtggcgtgcaagagtgcatgtttagcgtttgataacgacagattttgttgccggaatgcatatggaatgccggaaaagtgcaaaagaaacacgtactctatgttgtttaaagaagcttgtcccaactattacagttatgcctacgacacacctcctcctttggtcacttgctccgccaaggaatatcttatcacgttttgtccatcaaactggggccatagttccacgtaa

SEQ ID NO: 173627 - DNA, 2893 bp, Arabidopsis thaliana landsberg
  unsure (1)..(2893): unsure at all n locations
catgtcgactctagaggatccccttttttttactatgatccagcagctcattcaaggacaaaccacatgagcaaaggaaatcgctaagaagctggctgaattaaacaacaaagttgaccgacaaggcgtcaaacttaacagcaagttcgaatcactaagcattaggatgagatatatggaaggcatcctcattacaccatctgttaacaacaaccgagggtagcttccagggaaagcaatccagaaccctaaggagtacgccactgctcacgccatcactatctgccatgatcgagagctgccaactcgacatgcctctacctctatcactagggactgtgaagttcaagaaggggaggattttgttcagaataaaattccagctgaaatagcaatagaggagcccatactcgatcgtagtactcaatcccaagctgaagcagtattttcctccaccctacaagcctgcactaccatttccagggagattcaagaagaagctgataaagaagtatgaagctctcttggaaaaataattgaaggaccttgaaatcacaatgcctctagtagactgtcttgcgctaataccggactcacacaaacatgtgaaggacatgattacagagaggatcaaagaagttcaaggaacggtggcgttaactcacgagtgtagtgcaatcatccaaaagagcgttgttcaagaaaagttgaaagatcctggatctttcactctaccattctctattagaaaattagctttcaggaattgtctatgtgatctaggagccacaatcagtttaatgccactctttgtggcaaggaagttgggattcgtccaatataagcctgcaacatatccttgatcctttgctgataggacattaagaaaaccttatggcctactagaagatctgcttatcaagattaatgaaatagaagttgtaacactccgatttcaggaantatggtggtgcatgcggaaaggtttataagaattaatttggccacctatgtcaccattggcacttatcttttcggttaaaggtcttgagagaactcaacagtaaagcgtgcttgggctggagtaattttagaatgtgtgacccttccggaaagtgattgtcggaaccattcgagagaggacaaagcatgggaaaagatcatgtggtgatttctagggatggtaacaagtctttaaagcctcccggacgtggcccaccgaccgtcggacagaggtgggcccatggacccgagagagaatgtggggtccactagtaaagacggtcgggtcttacaattcctattattatataaaggttaactcttcttttgggaaaagacagattatgtctttgtaacaacaattatttttttataaaaaggaaaggaaattgcatcaaagtttaaactttaatttaaaactgtttgataagagaattcttatttgcagtaaattgccttttggtctcattatctttttccgacttcaattagtggttgcttggtttagtttgatgtttggtctctctagtgggttcaatccctgagctgcatacatgtgttaaaaatgtttttataaaatctactactattaaaagaaacaatttgaggcttctcaagccatccagatcatcattccaaaaatcattgtagaggatgtcacatcagatttttttaaataccctctctaaataccatgtcaccaaattattaaaatataatattttagaaaataaaaaaaaaataatgttttaataaatattaccggaaaaaataagtgttgatttttaacttcaaaaacaaaagcaaattaaatgcttaatagaaaatattaattttttggatttcaattaaaattgtttaaactaacaaaaaataatttaaaagaaatttaatattcttataatttatttttgagataacaaagtccaatttttcaattgacagtttttataaattttaggttatataagtcattagttgacaaataagaaggtaatataatttattatcttaattaaaaatcaaatttaggtaaattacaaataactaattttgaaaatattaagaatctttatacatttttttttaaataaacttcattcataaactaaagtggagctacatgggctcttaaaccggcgtttgccaacgcatctgcgtgaagattagagtttctgggaataacattgaaagacacaaacacaaacttagaagcgagatcaaggacatcatgtagaatcccgtgaagttccttagattggaacttcgctttaattgttttgatgactgccgtcgaatcagaagctaagaagaggttaacgaaaccaagctcaagagcatggtgcaaggctgctagaactacgagagattcagccatcaacggtgaggctacacacgatacatatcgagaagcctgaaatcccaactgtttcgtctggttgctgaaaatccatcttagtcccgccacggtagaatcaatccaagccgcatcagtgttgcagaagatcagatctggcgagaaaacagcccgtggaagggacactcgggaataggagcgttttacaagattttgctgcgccgattgccattctttagctcgcaagatagatagaagagctacttctggagggagcactacattatctgtgaagattttattgttccttgctgtccagatcgaagcgttctcccaagggaggatcggacccttgcctaagccagtcaggggtagacagaggagccgcttgactacatccaatccttgtctgaaagtactgatttggtttctaaatagctgactgtgtaaaggtagaagttgccacacatttgctgcagaagaacacaagaagatcagatgtgacagagaatcattctctccacagaaaggaga

SEQ ID NO: 173628 - DNA, 1023 bp, Arabidopsis thaliana landsberg; identical to SEQ ID NO: 20225

SEQ ID NO: 173629 - DNA, 700 bp, Arabidopsis thaliana landsberg
tgtaattgtactttagaaaagacgactgtgtatatggtaacatacatgaatttaatttgtgatgtttttatcgtcaggtgaattatccggttttaaggattttataccgccattcgccgaagcatcacctgaacaagctcacaccgggatgaactacgcttccggtggaagtggacttcgtgaagaaactagcgaacacttggtaagaagtaagaactagaaaaacaacttataaatagactttgtttggtgataaatgattgggctttaatatctcataaagtatagttagttacttagctctaacctctcactttgatggagaaaatgatgtgaaccgtgtatatatatatatatatatatacttaaattgtttccttggaaactgttttagtttcttttgttaacgtttcaaaaattcatacaataacaggatttattcctataggttatgcatcatagccaatgttatacacgcttagaacgtccgagttttggtgggatgttttagtttcagtagctctaatgttttaaataacaaaaccttaaaatatgtatatagggagatagaatcagtataagaaagcaactacaaaatcacaagacgtccataacgaaagcgaatgtaccagcagaaagattgcaacaatgtctctacatgatcaacatggaagcaacgattacgtcaaccatatacttc

SEQ ID NO: 173630 - DNA, 1518 bp, Arabidopsis thaliana landsberg
atggcgatgacaagctggccatcaacgggaagacaaagaagacatcaattggcttccatgttgctcctggttcttgtagttgtcggaatcaatgttcctgtcttcgctcttctcccttcactgtcatatactcctcagtctctaccttctgctatacctcaggacgagaaggtaagcatgattcatacttcagtgctttctactaattgcttcgttttagttggaaccgaaatcaatgtaaacgttctaaactttcagttttaagagatgcagatgatatctcgcaagttttatatcaaggatgacaatttctggaaagatgggaatcgttttcagatcattggtggtgatttgcattactttcgtgttcttccagaggtacatgtgtctttataacaagaaatccatatgattgctaagtaagaaatcttcaatattttctgctgttaaccatcattatgttatgtctataatatatatgatttgatgaattaatgccagattatggatgcagtactgggaggatcggcttttaagagccaatgctttaggcttgaatactattcaagtatacgttccttggaatctgcatgaaccaaagcctgggaagatggtttttgagggtattggtgatcttgtctcctttctcaagctgtgtgagaaactagattttctggttatgctacgtgctggaccttatatctgtggaggtctgtgttgttgtgattcttattgagttgataccaatgttttttaccacattatgtggaagatttgcttatacaacggaaaaagttctgatacatgttcccatctccatgacagaatgggatttgggaggctttcctgcttggttacttgctgtgaaaccacgtctccaactaaggacatcagatcctgtatatcttaagttggtaagttatcagttaaatgaagtaagtagtagatagatagttggagttgcagttaatcagcttgcagtgtgcattattaatctaagatatatacacattcatagttccatgtttgcctctttaagttgtcgtttagaatcaccatgatgctacaggcctgagttctcaagtatctttgtgaaaattaagaagcaaaatgtaatggtctgtggagaatgggtagaaattatgattacttttgcataattgtgaaaagagaaaggctgttcttatgcaaactagcaagaaaaaggcgccatttgtgtagacttttcttatgcattatgttcaaagtagagtttttcatgacaaaacatattacaggttgaaagatggtgggatgttctgttaccgaaggtatttcctctgctttacagcaacgggggtcctgttataatggttcaggtacgtgatcaaaagccatgttccactatatcttttatcctgatctggtactctagtgtttgcttgatgtctgcagttaataagatgtgtcggcttcaataataagttgatcttctaaaagaactttttaaataagatatctctgtgtataaatttcgta

SEQ ID NO: 173631 - DNA, 692 bp, Arabidopsis thaliana landsberg; identical to SEQ ID NO: 20199

SEQ ID NO: 173632 - DNA, 1897 bp, Arabidopsis thaliana landsberg
acatttttaaccaaatattcttacaaaaagaaaaattattgttcactttgtatgattcttattaaatatgtagtgagtagtctcattccattcgtggtataatgctattcactgcaatttgcttctgttctttaacctttcctttggtcggcttcagtaacttttcttttgtcactatctaaattgttttatatctctcatttaatgctctgttctcagtgattttcagctgttggttcgtttttacttgtgagttttttcaaatcacaaaaactctttaaaataaattaggcgggcgatttcaagttgttcatatactcatgacgacaagaacttcgaatcacaaacgttctagaagggtcactctcttcttcttcattagtttatatttcattttacagtcttgtcttaccttagtttctgttctttccagcgatccggtcccaagaaaatctctcaagaataaaaaatcaagcgaggccctttacaacattcacatggtcaggactcttcaaaggtgtttatatatttttcttaatcttcttgatcatcaaatcaacttaagttcttaattgttctttaggatgaacttttgcagagagagatagaacagctaaaatctcttttaaagtccagaaaattacatcccgggggcaggagagtctaagtgatgaggttttaagaaattttttcacagaagattgtttttaggtttctattaaaaatcaaaacagatctcaaatcttttactgtatactctgcagattgatttattgcttcaagaagatgaagtcttagttcggcgtgaaatgaagacagtccttggacgcacactgttcttggaagattctaaaaatgaagattcttctatccccaaggttatagaaaaaactcaataagattttggttacttttaacacaagtaagcccgctttgaatatcttgtctaaagatgtttttatgaattcttgatttaggaggcgaagaaactggtggaggaaatagcgggtttggagctgcaagtgatgtacttagaaacatatcttcttttgttataccggagattcttcaacaacaaaattacatctaagttagaatcagaagagaaagagagatcagaggatcttcttgagtgtaccaaactcattgattcaccaaaaaaaggagtctgcagcccgcagaaacttgtagaagactctggaatattccgcagtcactcatcgttgtctcattgttcaggctattcctttagaatgtctccccatgcaatggactcgtcatatcatcgatctcttcctttctcaatgcttgaggtaaaagaaattgtgttaaacagttaatgttgttttgtttgagtttctttctttaccaatggtggtttacattttcatgtcttcagcaatctgatatcgatgagttgattgggacatatgtttctgaaaacgttcataagtcaccaaatagtttatctgaagagatggtcaagtgcatctcagaattatgtcgtcaacttgtggatccaggatcactcgacaatgatctagaatcgagcagtcctttccgcgggaaagagcctctgaagatcattagtcgaccttacgacaagttattaatggtgaaatcgattagtagagactcagagaagttaaatgcagttgaacctgctttgaaacatttcaggttttcaatctcaggctcttacaatatcaacttcttttagtttagatatagcaactatgttatttaatcaattgtagacttcttcttgaattcaaaattgtttaggtcgcttgttaataagttagaaggagtgaatccaaggaagttaaatcatgaagaaaagctagctttctggattaatatacacaactctctggttatgcatgtaatgttaatt

SEQ ID NO: 173633 - DNA, 335 bp, Arabidopsis thaliana landsberg
cgttgacgcttgtggatcctctagatgacaagtttatagagttcggaacctgtatctttgctaacagaacaaagacttgtggtaaagccgatgaatgtgatggtggtggttgctggaggatcgtagaaggtcatatagttatcaagtcaaaaggtaaggttcttggttacagaagcatttttcaattttcggaaaatgaggagccaagaaatgtttgtgaaggagaagatccaaagaaagctgcttggttcatataagagtataggcctgacgaaaataataagaaggataaagtgttatgcgttatcaagttcttaatcccactcaaccgaagg

SEQ ID NO: 173634 - DNA, 1911 bp, Arabidopsis thaliana landsberg
atgtctggagaagatgctaccaaggcttcattagccgaaaccctcaagaccatgcaacaaactatggccgatatggcgcagaagttttcgaatgtgaaaaaaaccgtcgaaacactgcaaacaacccatgtatcactcagccaaaatgttagtactattcagtctcgtgtccgttctttgaatgcaggcaagtcctctgaagttcgaagaactatcttcggttccccaaattcccttccgcgaaatgcagcaagtgatcaaacgacctcggatggtacaaacgcggacatccaactggaagatagagaaacgcatcccgaagacaacaaccagttcgttaatcaacacgagcaagaaaacttcaaccagttcgaaaccatgagagaagtaagccgcgaactgaaagatatgagattgaaattccaccaagctacaagctaggaacctgatatcaaccgggtcatcgaagaaactaggcgaacacctttcaccctgcaaattgctagcttgagaaacagagattctcgaaaacttaactttgaaccgtacaacggtttggaagatccgaaaggatatctcgcaacttttctaatcgttgttgggcgagttgatctgaacgaagctgatgaagatgcaggatactgcaagcttttctttgagaacctgtgtggacaagccctgatgtggttcactcagttagaaccaggatcgatcagcaacttcaacgagctatcagcagtaaacaatacttaattcttatggatgaaaacatttcggataccgacctctagaatttatctcaagggccgaacgaaacacttcgggctttcatcaccaagtttaagaacgtactctcgaagctcccaaggatctcacaacagtcggctctatcggctttgcgaaaaaagattatggcatgatttgagattcaaagaagatttgacactacacaaacctgatactattcaagatgcgttattccgagcgaacaattggatggaagtcgaagatgaaaaggaaaagtttgcgaagagaaataagcaagcaaaaccagcagtcacttttccacccaagaagttcgaacctcgggagaaccgaggaccaaggaagtttggttcacaaccattcaacaataacgttcgaaagcagtttcagggaaaaggaaggtcaaatacttgggttcgagatgaaagcttgtattgcgatatacatagagtcaccgggcatttgaccaaagactgcagtgtactcataaggcatattgcagaactatgggcaagctgaggtctttcaaaagtcaacatggaggattttgtttggcaattccatgaatcaagggataattctgaagctcaaaactctaagagaccaaagccggctagctaagaacagccaagaagctcaaaaggtaaaatcaatgtaattcttggaggttccaagctttgccgcgattccatcagcgcaatcaaaaagcatagacggaatgttcctctaatgtcaagtttaagtgaaaaggtagattttcaaggcgcttcaatatcattcgaggaaaaggaaacgcagcacctcaaaagacctcacgatgatgctctagtaattacgctggatgtagctaacttcgaggtttcaagaatcctcgtcgatatcggtagttcggttgatctaatctttctaagcactttggaaaggatggggataagcagggccgatgtagtaggaccgccatcccctttagtagcttttacaattgagtcaacaatgtctctcggaacaattaagctaccagttttggcgggaaagatgtcgaagattgtagattttgtcatctttgataaaccagcagcttataacatcatcctcggaactccgtggatctaccagatgaaagcggtcccatctacgtatcattag

SEQ ID NO: 173635 - DNA, 1435 bp, Arabidopsis thaliana landsberg
  unsure (1)..(1435): unsure at all n locations
tgcatgtaaaagaaaaatcccagcttatcctctttttcttattatttgcattcctgtcaaatctcctttcttgactacattggtttacatgtcttcatccctcaatttttattggcagatggaaaaaacangctcgcttgaaagctgaaactaaggaaagaacactgaaaaagtttctgctatcccagaaagacgtggtttacaccgagcctctagagattcaagcaggaaaccctgtgactgtattgtacaatcctgcaaacacggttttgaatggaaaacctgaagtttggtttagaggctcttttaatcgttggactcaccgcttgggccctttgccacctcagaaaatggaagcaacagatgatgaaagctcacatgtgaagactacgggtacgatttcagttgtacaggtttccattctggagactgttacatgatatgtgactaatgtttctcttcttcttttttccagctaaggtcccattgcatgcttacatgatggactttgtgttctctgagaaagaggatgacggaatatttgataacacaaatggtttggattaccattttccaaaagtaaaaggtatttcaaaggaaccaccattgcacattgttcatattgctgttgaaatggcacccatcgcaaaggtaaccgtaagatgtgaggttggcctttaaaagcattgtataaatatatcctaagtttttgtatatctattacatgcaggttggtggcctaggtgatgttgtcactagtctatctcgcgctgttcaagaattaaaccataatgtggatatagtttttccaaagtatgattgcataaagcacaattttgtaagatcaatatcttctcatatcttccgctttcatttcccttttttgctgcttctctctctttgttcttaaactttgtgaaaataggtgaaggacttgcaatttaacagaagctatcactggggaggaactgaaataaaagtttggcatggaaaagtagaaggcctttcggtttacttcttagatccacaaaatgggttagctttatgcatattgctctttaagctctttccacatttcattcatcatctcttgagggcatgaagaagttgttgtcgttgcttgactgttgcagattgtttcagcgaggatgtgtttacggttgtgcagatgatgcaggaagattcggtttcttctgtcatgcggctcttgaatttcttctccaaggaggtttccatccagtaagtttacaagtcctgctcttgtagaaaaatggagaattctcagtggaaagtcttactagtatgctctaactagcggctctaacccatggtctcaccatctacaggacattcttcactgtcatgactggactagtgctccggtttcatggttattcaaggatcatacacacagtacggtttaattaaaccggta

SEQ ID NO: 173636 - DNA, 593 bp, Arabidopsis thaliana landsberg
tttcggcttggtaaggactacttcaagagaatcaaagataatggattcattgatgttagcaacagaaagggtaattcttttatctttttagttttatgattgttagaaccaggttacatggtgtttggcatttaccggtactgttcgaggtcgttgcaggaaagtttgaatatcgggtaacagaagagagtctaatggaccgtctcacaaccaatgctcatgaagcatgtctctcaattcgtgaaaactgcaggtctatcatcatactctataaggatttttctcttttggtttcattctaatagaggaactaatgcttctcttaaaatttcagggtcttgacagtccatgggtcaaatgataggattgtgcatgtaacagaagcgtccgaatttgctaaacagataaagaatcataagctgtatgttattgaaggagctgatcatgagttcacttctcaccagcatcagcttgcttcaatcgttctctcattctttaaattggatcctaagaaagatgatgagtcaggtgatatcagtacaagtaaccaagactccatgagatcagttgttcctattacatcgcgaatttaa

SEQ ID NO: 173637 - DNA, 906 bp, Arabidopsis thaliana landsberg
  unsure (1)..(906): unsure at all n locations
aataatgtgcgttgatcaagttataattatatttgacagtcataacgacaggagaagcaagaaggagtgaatgaaattaggtgagagaatggtgaagaatttcaacgaaatgttgaccatgtccggaaaaattgactttccgcagcagtcgaaaaatggagtgagagtctcgattcggatgaacattgaggccggtcaaccacccggtatagttgtcagtgcttcgtcttctctcgcaatccctctcactcctttgcaagtcttcgctttccttcaaaacctcgacannnnnnnnnnnnnnnnnnnnnnnnnngcatgatcatcaaaatttatgaacttaaatcacgtaataacaacaaaaacgtctacgtgtaacagtgggacattctttcctatggaaccgtagtcaatgagatcgctcgcattgtcaccgggtctagtgaaaccaactgcgtaaccattctccgggtacatgtatatatctctctcttcaacgatcttttaactattaatcgtttgttggcaaattatataactctaataacctataatcgtcgtacatgtgtatatatacattagccaacgcacgaagagaataatgacaagatggtggttcaagactctagccaggatgatatgttgatgctgcaagactgctacatggacgccttgggaggcatgatcgtgtacgctcctatggacatggctacaatgcatttcgctgtctccggcgaagtagaccctttccatatcccaatccttccatctggtttcgtcatctcaagcgacggcaggcgatccacggtggaggacggtggaaccttactcacggtggcctttcagatccttgtctctggaaaggccaataggtcgagagaggtgaatgagaagtcggtggacacagtg

SEQ ID NO: 173638 - DNA, 558 bp, Arabidopsis thaliana landsberg
ttcaagaccgcattaaagggcacaagggtaccccaacaagaacaaatcaaggggaaagtgtgtgtgcttcaagtgcggtaagtccggtaattttattgcacaatgtccttataatgaaaatgaccaggaccaagacaaaaagggtaagaaagataagaagttttacaagaagaggaagggtgaggcgcatatcggaaaggaatgtgactcggattgctcatcctctgactccaatgacgagggactcgcgacctccgctttcaacaagtctcccctcttccccaacaagcgccacacatgtgtcatggctaaggagaagaaggtacgtacacatgtcaccccaagtacacttctagtgatgaggattccggtgatgatgtagattatagtgatctttttaagggcttggacagatccaaagtagataaaattaatgaattaaatgaagctataattagaaggatagatgcttgaaaagcaagaggatttgctttatgaggaacatgataaatttgttgaagtagaaaaatcccttgccttagtcatgaagaaaaatga

SEQ ID NO: 173639 - DNA, 685 bp, Arabidopsis thaliana landsberg; identical to SEQ ID NO: 13961

SEQ ID NO: 173640 - DNA, 1907 bp, Arabidopsis thaliana landsberg
atgagcttctccgggaacgattatacaaggtatctgtctcagcagcaacagagtccgcacacgagtgtaagtgaagggaacacctcagctgtcaatggtactcgtcgttcctctgcacaactgatgccaaccgatctgacctctaatcatccggatggttctgctcctcaaccgcaaaatcattcgcctcaaccttcagtcaatcattcgaatcctctaactgccaggcttaacgacatgacactggaagagttgcttgaaagtcctgggcgtgcatctttgcctagattagatcctaaccgtcctccgggaactttctggtaagtataagtcacttgttttgcattctaagttaatttacataatgataagtcacttgtctctgtctgatggaatcttgttttgtaggtttgacgatgacacatcagtagcagccactgtccggagcatttttgaaagagatttcaaagagcctcacacgctaattgcgagagattttgttcgtcgcaaaatttgcgagggaattactactgttaaccatttgcgagacgcgttttgcgaggaactgctgttcctcgcaaatctctcgcgattaacgatttgcgagggattaccgacgaaatcttccgtcgcaagtcgcctgttttcttgtagtgatatatgtgttacagtgattgatacaacaaaaaatgatgtatgctctacaccatgtacaataaggtacggaacgtttgaatgctttcatgactgtatcctcgataatttcagagatggaaattgtattaatggaagatgttgttgcaaataatgattgaaatcgaatcagcaatttgaacgactgaatctatttttctagcatgagatttatgtaagctctccaataaaataaactaattttattctatcttaattacttggctttttttttgtcaacagctcttaattacttttttttttggtttataaaactaacttattagagtttgtgcgatgcaatgaacatttactagattaaaacttaatataaaaaatgtattataatatcttaaaagaaaaaacaaaaaatattacaggctcagcccggatagattttgttgggtcaagcccaatacatataacaataattgaaccagcaaatattaaaccaaagttacagaagagaacaaatggaaccggaactgtaaaatgacaataattggaaaacttaaccacggtaatcctctggcccggataatgatagctgtagacagtttacagtttagtagctcagagttttacgcgtcagttctatttcactgtatcgattagtctgcagtgttgggatttggtctatgtttccttttgtggaatgcatcactcgaaaggtttctcgtttcagtggcatctacttgttggaagtgatcaagtcatcatcttattttagaagagatatattatatagttaagtaactggtttatgtatattcgtatcacacatcgaagagatacgaatagaattgttaactgcaaaacatttacatgtgtatgtgtctctacattgagttgtcttctagagacgtgtcccttaatcaaagcgtgtcatgtaaacttataaatacagtttatatatctaataatgtgtggttttcgttttataaaaacagagaaatatagagtaagacaaaacagagtaaaatctgtgttgtccgatccttaacaactttgagagatcaaagttctacatactcttgctacgtttatcgataggtttctgagatccaaccgtatcgtaaacaagtttaagttaagatgcgattcggatctcgttggggatgtggatgtgtttatctacatggttattaagcgaaaagttcagcatctcgatgttacatgccctttagtgcatatagatcgagaaatttacaact

SEQ ID NO: 173641 - DNA, 1046 bp, Arabidopsis thaliana landsberg
ggcatctttcagagaaggttcaacaaaatggcgatggagatgagggagtcgacttctatacccgttacaaggtacgtcattatttattatgggtgtatatgatttcatatatagtaaatgatagtcttttttttatcctataattaaattgaaacgattgctcgtgatgtgatgttataggatgatataaaattaatgaaggagttgaacacgaatggcttcagattttcaatctcatggaccaggatcttgccttgtaagtcaatctcattgtccttacagttaatttaccagaccacacatattatctctaacttaaatctatattgcaatgacgtaatgattctttttacttttataactcatgaaaatttatatataatttgcagatggaactattaaaaaaggtgtaaacgaggagggggtgaagttctacaacgatcttataaatgaacttttagctaatggttaaacatcttataacttaatgtctcttatattattcaatcttaattgttatttccaacttgtgtatattataccagcttttgtttttaatcgtttgtaatactaattgccaggaattcagccttcggttactctctttcactgggaatctccacttgctctagaaatggagtacggaggtttcctaaacgaaaggatagtgtaagtaattttgttgataaaaacttctcaagatttcttcttctagtataattaagaaaactattcaactatctgattttcttaaataatttttttgtcgctaacaaattaatgtagagaggatttccgtgagtttgcaaacttttgcttcaaggaatttggagatagggtgaagaattgggcgacgtttaacgagccatcggtatacagcgttgctggttactctaaaggtaagaaagcaccaggacggtgctctaaatggcaagccccaaaatgtcccacaggagattcatccgaggagccatacatagttgctcacaaccaaattcttgctcatcttgctgctgttgatgaattccgaaactgtaaaaaggttg

SEQ ID NO: 173642 - DNA, 497 bp, Arabidopsis thaliana landsberg
attctggcttatgaggctattccacagcttggactgaaatttagagtccctgtacgctccgctttgagtgactgtcgaaggatgtgcaagcataagtttaaagaatgtagcatgaaaggtgtcccgttggaagttatatataaagagcttgggaatactaaggttagagtttctgtatttacttgattgtgtgtctagtctatcatgagattgattgattgattgctaaatgaatttcttttaacaggattttccaagcattttggtacctgcctatcatgagaaatatctgttgaaagatctcttagacgatgatgttgatgatgactgcggtccaatagatattgttattgacagttggagagagcgactattagtagagaacaacaggatatggtagaaaggaatgtgtgagatggacatttcttaacgatgtattgtaaatgagatttcggatgaggaagtccatgagattgagaatgaggtccccgagactg

SEQ ID NO: 173643 - DNA, 1555 bp, Arabidopsis thaliana landsberg
ggtttacggaacaatttggggtaaaaacggaggagctgggggcgttacttgacattttagctaataaagtgaaagccgtcgccagaatgcgtgatcttctcaccactaagttcccgtcgggaacttttccagtcaaggtaacaaaagtggcaatctcgtaaatatctttaatttctctatttacagtttttcaaaaggacttttcaaaaaactatcatatcttataccaaaattagcaaaataatctatagtttaaaagcaaaaaaaaataactaaatatttttaaaaattaaaccttaattctaaaccctgaatcttaaacccaaaaaatcaaaccttaaactaaaaaaaatgaattctaaacctttaaagttaaaatctagagtcaataatagtgtatttacttcattttgaaagagttaggctaatttaagatagattttgttagcattatttttaattgtcccagattgttattaaaaccagtaaatcactttttccgtttgttactctttttgggttcttcctaagcctaaaacattacgaccgttatacctaatgggtcaaaccaacttacgagtcacgttctcattggctagtctcgtcaatggaacgctgacgtgacaagatcacggacgggtcacggaggaaccaaagctttagcttttttagggacccatgcttttttttttcacttctatagatctctaattttggggaattgtgctttttaaatacccaagtcaaattctttagatgattatgaaatttgttgctttctttatgctaaacaaaatctttcttgtgggatccagctgtctattccggtggtccctacggtcaaagtagtcatcacattcaccaagtttgtcgagcttccgccggcggagacattctacacgccgctctcaagcccaagattcctcctcacaaccaccgcgggtgaagaagaccaatccgacggcgagaaacccgatgctcgaaattcgatttcacggccatcgacgtggctgagactagccaccggaaaaggctcacatcgaagggtagaagaggaggagcaacaaacgccggacccattcgctataccaattgggtataaatggacaagcatgagtagtagtaatagtaagtcaggtaatagtagtaaaatgaagaaatcaaagtctactaagagaactaagtagtatcttctttgaggtattaaagatacgaatcaagtcctcttttagtgtagataatctgatattagtaaaatacagagaagctggttgtagtatttctttactatacatttatatttttttcatatgattaaaatgctgtcgtttttactcttttcgtcggtcatggtctaaaagagttcaataataaaagctttcagatagaagcaccaactaaagtaaaaataaaattgcataaaaagaaaaataactatttggtcatgctttcctttatttatggatcaacattggtggttgtattaacttttctagatacaataatactttttttttatagcaattttttacttttttttgttgctttaatattc

SEQ ID NO: 173644 - DNA, 1515 bp, Arabidopsis thaliana landsberg
  unsure (1)..(1515): unsure at all n locations
tcggtggcttctccgtgcagtattgctgaagagaagcggcggaggcggaggcggagaagagacgacgagaagctacgaatggagggaagtccgtggggttcacgcgggaaaggaacattgttattgaattttgagctgcggcgactttacgaaggcgacggaagatgaatttaaatttgccggtgtctttattaaccggatacgtgccggtttgagtattcccggtcttctaaatccattatctttcacagccatagttaaccaaaaataaaaagtagtttggttagtaattttggtttagtttactttgtatttaaaagttgtagtgatacgtatacgtagttacgtacatgaaaagttgattttgtctactgcaaaccggttttgtaaacaaacaaaaaaaaggtctggactaatttgcccacccgctgctgcaactattcacatctttttaaacagtggtttgttatgtgtggctcaatgcaattatacaaatcaagcacaagattctgctaagttggaaccttttagattctaaatcacaatacattggcacgtgttgtaatagatagttattttaatacttnttgtcgaacaatttgcaaaaatataatttggtcgctatatgatcgctaggttagaggttaccatcactgaacagtgctttggtcgtaaggttaccccatccgcattcgtattattctggataaggttttattttgggctcatttccctttcgtggaaaagaaagaaaaaaaaacaataatgatgattcacttttcctcctcttctctccacagctcgaagttcttggacggattcagatatcatagcctatctgtgattagatctgaagcacgtagtttcaacgtgaccaccacgaggaaggaggtcgttgtggcggctgctcctcttctctctttgccggaaaacagggttatccctctctccaacctcgacctgcttctccctcctgtcgacatcaacgtttgcttcttctacaagaaaccactttatggcattattggtgatgccctcaaaacggctatggcggaggctcttgtctcctactacgttctttccggggaggtctccatcaatcccaccaacggagagaacgagattctctgcagtaacggtggtgtggagtttgtggaagccgctgctgacgtggaactccgagagcttaacttgtatgaaccttatcaaagtattgccaagtttgttcccatgaaaaagcatggagtctttgctattcaggtaatagtgtgtagtgacgaaagctggctccactgatatgtctcaatctgattaatatatatatatattggaataacttttgggattctagttctgtataaaatacaaaattgaagtgtctatctattcgttgcatttcacaccttcaaagattacctatatagccatatacttttacttattcagctctatataaatcaacaacataactctgttttttttttcgctcgttgttattgtcccaattgtctgaat

SEQ ID NO: 173645 - DNA, 1498 bp, Arabidopsis thaliana landsberg
  unsure (1)..(1498): unsure at all n locations
atgttaacaaaggtgcttagtaaggaggttaagccatgccttgcttgtccaatctgcactaatccgtttaaggatgccaccacaatctccgagtgtctccacacctgtaagtgtaacccttcgattgttttttcctttatctttgtgatttagattctgattttttgtttgtgactatctctctgtttattggttatattaattagtgtagactagagattatatcagattgattctgaaacttggaagttgaaaccgatgttttgtttagctttttggtgttgttgtgtgtgtttcaacatgtatctgtgtaaatattaaggtaagcagataaggactgtttttttttgtaagtggatgattcagtgtctgtttatgtctttgtgatttcaaagttgctgtttctttagcttgttatgtttctagtcctggctttaagtattggtatatcttgtgtctttatatgaattgggacttgtggaatttgtggtaacagtttgcaggagctgcattcgtaacaagttcataaatgagagagtgaacgctagtccagtctgcaacgttaaccttggtgttttgacgatacagaaacttcggtatgaacttgtttgattcttagcatttgcatctatctttatgcttttatgtgatttgaggtatctatataagtgcaggtcggattgcacttggcaagatttgaagctgaaaatctaccgagcaatgatggaaagcttaaagaaggcaggacctaaaactgttgcagcgtctgtgaaatcttcgaaaaagaagagaaaatctcgaacttcactgcgggtctcttcatctagagtatcatcctcacctgatactccattggaaccagccaatgtggttgtggaaccacctaatgtggttgtggaggagaaacatagggagaccgttctagctcttcaaagcactagaaaaccgataatcacgttccagaaacgtgggagaaaagcttcactcccgaagaagattgattcgaaaccagaacccgaactgcctcctaaggagcctaaaattaagaatctatttgacctgaacaacgaacctgaagacaatggattggtaagtatgtatatgagtctttgtataactattgttctcctttgttaactatctgtttgcaactaatgtgtttatgcatcttaggacgaagctgaaggannnnnnnnnnnnnnnnnnnnnnnnnnnnnnnnnnnnnnttgtaaacctattttctctctctctgtcactctaaacatcaacgatactcctcctgatatcgttgagcctgagataagttcggatgacgacacagaggaatctgttgaacctattcagaacaagtgtgttgtgaatagagaaacaaaggaagttcctgttcaagtgaatcaaaacagtctccttattagctctgatagggatagagaggacaactctggtcagaaactgaagaccaatggtgctgctacctccagatcaaggaagaagaaag

SEQ ID NO: 173646 - DNA, 353 bp, Arabidopsis thaliana landsberg
atgaggatcatcctgttcgccaataccgactggtatctctacaacttccgccgatcgttggcgcaggcgttaaatgatgccggctatgaattgctccttgtctcacccccgggcgtatatggcaaaaggttgcgctcactcggcctgcgatggcagccgctcccgatggaccggcgtagcctcaatccgctgcgggaggcggcgttgctctggagcatgtggcgactgttccggcgcgagcgcccggatttgatacacagcttcaccattaaatgcgcggtgtatggctcgctgaccgcgcgactggcccgtgtgccatcgcgagtgaacgcagtggccggcatgggctatgt

SEQ ID NO: 173647 - DNA, 484 bp, Arabidopsis thaliana landsberg
gtctatgtgttggcttggtttgcttacatgtcccacctacatgttactctctctatatcacttttttattggttaccaatatttcttgagagctgtacggaattaaaatctctagtcttggtgatgatttacttaaccaatgaatttctttttcgtctttagtgtttttatcttatattgccattcaactctctttattttttttccttaggtattgttgcatagtgataacataaatcaactaagtttttcatctgttcctaagtgtctactatcatcgctccagtttgttgaactcaatgcccaaatcttgagatttgatggcgaaatactgaatctggcgaaatacttcttagagaattcatctatcctccaaaaactcactctacatccgaacaagtatggttcaacttatgcgaatatgctacacaaattccgaagacgctctagaacttgccaattcatcctaactgatttggaatag

SEQ ID NO: 173648 - DNA, 1388 bp, Arabidopsis thaliana landsberg
atgggtgccgcagctggaggagttcaggttccagaggttggtttggcgggcctgttgaggcagttgttggagcggttaccaggtgtggtaccagtggaggctctagttgcgccacgagtggcggaggtgcagcagagggctgcggttgctgaggaggttccatcttatttgaggatgatggagcagttgtataggattggcaccgggtatttttctgatggtactagtcctgaggaggcccacagttttaggccgtagttttaaaaacaaatcctaaccgattttccggttcacgggcgttacacatagcatcttttgggagttgtcatattggaagacacatttgattcgacatatccttgatgagatgcatatcgagaatttttttttttgataacttgattaacactttgttaaatatcacatgcaaaataaaatattcaatcaactcacgaaaagatctcactttatattgtgatcgaaagaaattacaccttacatcgtctggaaaagcccatgttccaatatccaggttgtcccctcaatcaaaaacaacatttcttaaatggttaaaagatgtggtgaagtttccagatgagtacgtgtctaacataggacgatgcatacacattgatcatggaagtcaaatgtatggtttgaaaagtcatgactgtcacgtcattatgcagcgactatttccgtttgcattctgtgaactccttccccatgaagtccatgaagcaatatcaggtaaattataataatttagcttcagtgtacttatatagttattaatctgtataataaacttattttttcatttatttttttacagatgtaggaatatttttccgcgatctttgtttaagaaatttggaagtcagtgatgttgttcgtatgaaaagtaatattgctctgacactttgcaatctagagaagatatttccaccatcttttttgatgttatggagcacttgactattcacttaccaacagaaaccaaactttgtgggcttgtgcagtttcgatggatgtatccattcaaacgattcatgtttcatcttaagaaaaaggcgaataacaaagcaagtgttgaagggtcaattgtggaacaatttattaatgaagaaattacaaatttcagctctcacaactttaatcgtgaagcgactattgtgtcgagtagtgctcagagacgacatgctagttgttttgctcaacaccacatctactcgtacgacgatgtgccgacattatttagacatgtcagaagtggaagtggaaaattatattatgagtggttaaccgatgatgacaaacacatcgctcatacatatattttgctcaactgtgtagaattggcaccattcgaaaggtcatttaaaatt

SEQ ID NO: 173649 - DNA, 657 bp, Arabidopsis thaliana landsberg
tgttcaattccatctctactttgttatcatcgaatacagactaatggagctgaaatgttgtatttgtctgtaatgtgataatgtccagtgatcaagctctggtcaaatgctggtaacggtggagcaccatggtggacgtattggagtgcaggcattactaatacaattggtcctgccatgggaattgaagccttgaagtatatcagttatccagctcaggtaactttatacctcatcagtagtaatactcagattatggtttatgaactgtttcttaggtaaatgatgggttgaattctgatcttgcttattgcaggttttggcaaaatcgtcaaaaatgattccaggtaaggtatctatctattatgatctcgaatagatgatgatgaaactctattctaagaagatctctctgtttatcttattcatgatttcctttttgtgatgtagttatgctaatgggaactttagtttacggaataagatacactttccctgaatacatgtgcacctttcttgtcgctggaggagtatccatctttgctcttcttaaggtatgtaaatctactcatccaaaaactttgatcacagcacattattgatcttttgattttttttatttttttcagacaagctctaagacaattagcaagctag

SEQ ID NO: 173650 - DNA, 492 bp, Arabidopsis thaliana landsberg
  unsure (1)..(492): unsure at all n locations
atgagatatttgagcgacataatagaagggcttgcgttgactgaactgcagggcagcgccgacgtagaaattactgccgtagtttttgattcgcgcaaggtaataccgggctgcatgtttgtagcggttaaaggcacgctggttgatggtcatgactatatcctgcaggcaattgaacagggcgccatagccgtggtttgcgaggaactgccatcgcgcgttaccggcgaggttgattttttaatggtagccgactccgccgtagccctgggtattgttgccgctaatttctatggcaacccgtcggctaaattaaagctggttggcgtaaccggaaccaatggcaaaaccaccatcgcaaccatgttatataaactgtttcgcgatatgggctataaatgcgggctgttatcaactctcgaaaatcagatcaatggtaaagtaacggaagctacacatactacacccgatcctgttgtattangctcgttg

SEQ ID NO: 173651 - DNA, 505 bp, Arabidopsis thaliana landsberg
  unsure (1)..(505): unsure at all n locations
cgcagagaatgccatgcactacggcggcgatcttacccgcacatttccggtaggcaaaaactttacctcncgccaggcagaattatatgaggtggtattaaactccatgaaccatgccatcagtatgctgaaacctggcgtacgttataaagacatccaccttgcagccgggcaaaaattaatggaaggcctgaacgccgtgggtctaaccagaggtgatgctgccgaagcagttcaagccggtgcacagaccatgttttttcaatgcgggctgggacacatgctgggcatggatacgcatgacatgcaagaccttggcgaacaatatgtgggttacaccgatgcgctgaaaaaggaaactcaaattttcgggctgaaatcccttcgcctcggccgggaactggaggcaggctttgtattgaccgttgaaccgggtatatacataatccccgaacggatagatcgctggcaagccgaaaagaaatacgtcgacttcatcacgtag

SEQ ID NO: 173652 - DNA, 1482 bp, Arabidopsis thaliana landsberg
tctattttaattaacggctttgatttccttaggttgggaaattcacacagctcgtttcgtcattcgttggtggattcacggttgcttttatagttggaatgaaactcacattggctcttcttccgtgcgttcctctgatcgtgggcacaggtggagcaatgacctatatcatgtcaaaaaaggctcaacgtgttcaactggcttacacagaagctggaaacgtagtacaacaagccgttgggtcaattagaacagttagttccgcggtcttttagaactacatagattcatgttacatttcaatattttgatgttctttttcttatttaggttgtggctttcactggggagaaacaatcaatgggaaaatatgagaagaagcttgagatagcctacaaatctatggttaaacaagggctatactccggtctaggcattgggataatgatggttgtggtatattgtacttatggttttgcgatttggtacggtgctaggctgataatagagaaaggatatactggaggtcaagtcatgaacgtgattacgtcaatcttgactggaggaatgtgagtaaaacgattacttgtccttgaagaaatcttgtgatactgatagccctaattttttacacatgcaattcacttcgtagggcgttggggcagacattgccttctcttaactcttttgcggccggaacagctgcagcttacaaaatgtttgagactatcaaaagaaaaccaaagatcgatgcttatgacatgagtggtgaggttttagaagaaattaaaggtgacattgagctaagagacgtgtactttcgatatccggctagatctgacgtgcagatatttgctggattttcgttgactgtaccgaatggcatgaccgtggctttggtgggacagagcggtagcggaaaatcaactgtgatcagtttaattgagaggttctacgatccggaatcaggagaagttttaatagatggaattgacttaaagaaatttcaagtgaaatggatcagaagtaagattggtctcgtaagccaagaacctatactttttgcgaccacaattagggagaacattgtttacggcaaaaaagatgcgtccgatcaagaaattagaaccgcacttaagctcgccaacgctagtaacttcatcgacaaacttccgcaggtagtcaaactttagttataaccaagttggtcggtaaaacaagcttagtattcttaattcttgttctttttttgtccagggtttggaaacgatggtaggagagcatgggacgcaattatccggtgggcaaaagcagaggattgcgattgcgagggcgattttgaaaaacccaaaaatattgcttcttgatgaagctacaagcgctttggacgcagaatctgaacgtattgttcaagatgctcttgtaaagcttatgttgagcaggaccactgtagtggtggctcaccgactgtaccaccgttag

SEQ ID NO: 173653 - DNA, 986 bp, Arabidopsis thaliana landsberg
acatcggagaattatcagtcatttatcgtacatttagacacgagggtaagtttacacatgacgttgaattgtgaagatggagagaaatactatgctgcattgtccattatggcttcaaaaattgcctacgaaaacgcagcccgtattaaacatgtcgtcgagaatcactggaatatgaagtatttaggtctcgttgactattggaacggtatgattatataataaaacaaatcttagtaatttaatcttatttacaatttaatcatatttttataaagttttttttgtggttgaaaacagagtaccaagaaaaggaaacaacacaagcctttataatgtctactgacgaaacaacaacaagatccaacggtcaagaaacgacggtggtggttgcatttagaggcacagaactgtttaattccgaagattggtgttcagatttcgacattacatggtttgagctcccaaacattgggaatatccatggtggtttcatgaaagctctagggcttcaaaacaattgtagttggcctaaagaacctctctcaaaccctgatcgaaaatcccctttagcttactactcaataagagactctttgaaaactctgatcgctcaaaacaaaaacaccaagtttgttctgaccggtcatagcttaggaggagccctcgcgatattgttcacggctgtgcttgtgattcaccacgagaccgagttgttggagaggattcaaggggtgtatacttatggacagcctagggttggagattccaagtttggtgaatttatggagaagaaattagaaaaatataatataaagtattatagatttgtttataataacgacattgttccaagattgccgtacgatgataaggatttgatgttcaaacactttggcacttgcatctactacgaccagaactatcaagcaaaggtttacatctatctatctatctatatattcacacttgaaaatataaactga

SEQ ID NO: 173654 - DNA, 2245 bp, Arabidopsis thaliana landsberg; identical to SEQ ID NO: 72826

SEQ ID NO: 173655 - DNA, 467 bp, Arabidopsis thaliana landsberg
gctgccgcgttgttgcgcctgcgtgagggcatcaccgagagcgtggcgcctcgacggccctacaaaaacgacgtttccgtgcggatcagcgcggtgcaggattttctgcacgccatgcaggcgctgctcaccccgcgaggacccgcagttcaaggtggtgtggttcggccacatcggcgacggcaacctgcacatcaacgttctgaccccgccgggcatggacgaatcggccttcatcgcccagtgcagaacacgtgaccaagcacctcgccgccacactgcagcagttcggcggcagcatctcggccgagcacggtattggcctggtctagcgggcttacctggagagcacccgcagcgtggcggaaatcgccttgatgcgcggcgtgcggcaggtgttcgacccgcatggcattctcaatccgggcaagctatatgccccgccgtcgtccgacggcgctcactga

SEQ ID NO: 173656 - DNA, 656 bp, Arabidopsis thaliana landsberg
cgattaagaatgcagtgacaaggctaacacattcaacaaactttcttaatttcatggctcaacatgctttaatcatgcaagatgacgaagacctactaatgcttcctccagacgagcaagcggaaaaagaagaaggaagatatcacttcatgtcactattgttaaacttggccaacacgtttctttatatggtcaatacatatatcattgttccaacagctgatgattactctatgagccttggagcagccgcaacggtttgcggtgttgttatcggtgctatggccgttgctcagctcttctcttccgtttacttcagtgcctggtccaataaatcttacttcaagccgcttatatttagtagcatcgttcttttctttgggaacttgttatatgctttggcttatgactttaattcattagcacttctcttgattggtcggcttttttgtgggtgagtctctttttaaacttgtgttatatatttttgttttcatgagacattgatcatatttatacattttgtagatttggttcagcgagagcagtgaaccggagatatataagcgattgtgtgccgctgaaaatccgaatgcaggcttcagcgggttttgttagtgcaagtgctctaagaatggcttgtggtcctgctcttg

SEQ ID NO: 173657 - DNA, 1359 bp, Arabidopsis thaliana landsberg
  unsure (1)..(1359): unsure at all n locations
ccctatcagtggtatttgtttgttacgttcattgtttttgaaatcttttttcacctctgcacctgccnggggccaatggagcaatatgaggtgtttttgctgcaaaggttatggaaaactcaggtaaataaaacctttacaagtgatgcccagaaagacgtgcttatttgctatatatgtctttgataacaaacccgacgttctcttcgagaatgtattattatgtctgcgaaaagaaaatattctgacccaaagtcagctttcttttttctttcctttattgatgttatgggtctagaaatgaagagctcttacttacgccctagctgcgaaaaacttctgacttacttgttgacttgtgacagattgtaacaggcctgttactggtggagtttctagactccgagaatctaattcacaataatcttcaattcagtcgggtgattcaaatccattcttaccgcccatgtggtgatctcgacatggaagttctagagaaccttcctccagagctcttttcataattagatggaacctacggtgggaagcggtttgagttgattgagaaaaaacgaggcaaaagaagaatcaactgcaactctccacatgtctccttggatggttagttatgtcagctgtatcagaagcatgatgaaaataaatgttttttccccagtgcagtgcacctgagatgattactttttcttcccataggcactgctgctagcattaaagaattaaaatctctctcagttaagatacatggcttgagcacctctggagaaaaggtaaagatcctgctattcattcttggaacgattcatttcacatatgtttggctattctcaacagtagaaccctgaaaatgagtatagacttctaagagttttcgttatatttccaaaattaggaatataaagaaccatatgtgccgcatccttccattgccagaacgtctaatcagcatacaatagaaatgacggatttgttgccttcatcccttagtcaagtcgacgtctctgtgttacaagaattacctgaagagttgagagctgacgtattgggagcatttccttcacacaggagacaacagtcatcatcagatgttcccaaggagacttgtaagaaacaagatgaggaaccaatagatttaaagggcactgagaatgagattggattatcatttagctctctttggtttgggaatcctcctctttggacagagaagttcaaagttagtggcaattgtactatggaaaaactttcagcgatatacttcaaggttgctcagtcaaggcccatgttatccctagtcctgcaacacgctatttcagaaatgagtagtttttctgatgcagc

SEQ ID NO: 173658 - DNA, 879 bp, Arabidopsis thaliana landsberg; identical to SEQ ID NO: 40220

SEQ ID NO: 173659 - DNA, 1445 bp, Arabidopsis thaliana landsberg
acattctcggatacgcacaatgtctcctcgaacacgggcgacgattttctgaatttgggctagttttttgatttcacacgagttattagggggacaaccttacaatctctctctctcgccttcaaaaatgaaattgggcggagagagccatatttatagtccgtccaaggttggcctgactgcattgtccgctgccacatttccggacagctgccgcgcccacaggcgacaggtgtctcgggtgatggcgtggcgacacgtggcgaccggtgtcactccactgccccatcagctttggctccaagactcagtcgacttcggctccaaggttggttacttgagccgctaggcaccgcaagtgaggtgtctactcaagtcggtttcaaggccggcggggcaaactttgttgcggtacgcctaacttctcccatctttccccattcgtgcctattcttgcccattcttgccctttgatggtttggcaccggttgggtatattggctatgcatccgggcaaaattttctcattcggtcttttggatgtgcccgatgcccttatgcgggtgactacaatgccattcacaaagctctctatttcgccaaagccgaagaggaactcaccgttttagccctaagattcaaagaatctaaagcacaaaacacttccttttcaactataaaacccttgaaaaaggaaaatcaaatccaagggcagcatcccctattcgcaataaaacaggcagccgaggacgaaactcttgaacttgacctcaaaaaatactgcaagtaccacaaaaaagaggacattctaccgaggagtgttgcgccgtcaaaaaattaattgcagtcgggggcaaaactaaaaaaggttcaaactccaaggctgaaatccctcctcccgacgagcaggaggaggaacaagctcccaaacgaaagaaacgggtacgaacaccgaaaggaggtgactctcccccacctgcctgggaggaacccatagacctagtctttgcggagctcgatctaggaggcaggacagaaaggtcagtcactacgcctcctcccgcgtcggaaaagaaaaactagatgttcccattacgcctctcaaaattttgcagaaaagtaactgagcacctctccccgaaacacatcgatttcattatgggaggatctcaactctgcaacaattcgatcaactcaatcaaaactcatcaaaggaaagcagattccaacacaaaaggaaaaagcccgatgatgggatcacattttgggaaagtgaagtcactgacctcgataaacctcacgatgacgctctcgttatcagaatcgatgtaggcaactacgaactgtcctgtataatggtcgatacgggaagctcagttgacgtactcttttacgacgccttcaaaagaacggggcacctcgactccaagttgcaaggcaggaaa

SEQ ID NO: 173660 - DNA, 673 bp, Arabidopsis thaliana landsberg
gaagccaatcaaggacagaaggtaagtacaaaatgtactttaacacgtttaaccattacctgaaatactgaaatactggaatcctttaacgcgttttgataagagttccttttttctgcagctatgcaacaagtgttgagattgagttacctgtaccaactgatgcgtataaccccgatgtaagaacatctctcgggtcggccgcatatgctcctgagaaagatgcactggtctggaagatacaatatttctatgggaacaaggtaagttcttatagtttaatgtaacacttgaccatgtaaagtcgaatgcttacattaagttttgaaacaatgtaggagcatacattgaaagcagatttccatcttccaagtatagccgcagaggaagcaacgcctgagcgaaaagctccaatccgtgtcaaattcgagatcccaaaattcatagtttcaggaatacaggttggtattactcacaatgatacattattatcatatagatcacattctttttatattactgcattgaaatctgaaggcaaacaaaacctgatgtgtgttaattatgggtattgcaggttcgatacctgaagatcattgagaagagtgggtaccaggcacatccatgggtgagatatataaccatggctggtgagtacgaactgagactcatg

SEQ ID NO: 173661 - DNA, 736 bp, Arabidopsis thaliana landsberg
aatcaatataattagtttaatcccacgtccctagctattaaatagatttactgtaattgtaattctacaattctaagaattcatttaatagaaacatacaaaaatatccaaacttagtaatcggattaataattattttctcaattacaatcacatatttgtaattgtttgcactattaaaaccgcattttgttatatttagaacatgaatttttaattgaacggagatatatcagactcagaaatgtatgaaataatgttgcttcgagaatgctccgaggttgcttcgtgaggaatatttatcgagattatttttttctttaaagggatgattagtttggttccgaacgaagaaaacccgttagtgtccttgcgctttcaattttaatgagagttatgattttttttatttttttttcatgttaatgttttggggattgcaatttctatgataaatatcatgtaattaacaaaaattaaatatcaattcatgtagcaacggacgaaaaatacaacgaggcggtatatagcagtgcgaaaaggttggttgcagctatagacggtcaaccagatcccgggggtccaaccgtaaaggattaagaattagatattatctttaactataaaaaatcgaattcaaaataatctaggattgatatgttctattctatctagccttctatttttggtcggctctatttagctttcaatatttagtaaactcaacatgtatcta

SEQ ID NO: 173662 - DNA, 692 bp, Arabidopsis thaliana landsberg
aggaatatggggaaatagagtcggaatttgctaaggttggcacggaacgatgtctcttagagttcttaacatatcgtaaccctggtcctattcttctacctaaaggaaaacgctatgatgactctgtttcacttccctcttggctaactgattcagatgtcaaatattatgtgtcaaagtatgagaagaatggcttcactggaccagtaaactactaccgaaatatggaccggtatagactctgctactctcgaatcgcttgtttattttaagccttataaaacttgcttgaattcattcaggacccagatgcatttgcatgtatatctttgagcaatagttgaggtagtgtttattcttaattcattaggcctgccctgttaaatggagtcctttagtctttatgtaagatcagaagggttattgtgattgtaaatgctttttataaagccatcgtcattgagtggcctctttgtaattgtgtgtttatataagttggtgacgctgaactttgatttagattttggatccgtgtaatcgcaattttcagacataaaactcggatcaagatctttatgttagtgtcacatttctttctttgctctttgcagaacatgggagcccatggggtcactatcatacgctaaagagaaagttccggttaagttcataatcggcgaccaagatctgac

SEQ ID NO: 173663 - DNA, 1028 bp, Arabidopsis thaliana landsberg; identical to SEQ ID NO: 16064

SEQ ID NO: 173664 - DNA, 650 bp, Arabidopsis thaliana landsberg
tgatccaggcgaacagcgaactcatccacatgattgtttactatgaaaggctactgctcgacaaggagggagatgttctcgaagtggctgcttctcaaggacaggtcaggaccaccctcttttgctcacatgacgctaggctgaaattggaggatcagttggataacctctccatcgaactcatgaagaccaacggcaagctgcaggagcagtaccaaacgtactacacggtccaagaagaactctcaacttcccgggacaaactttcaaaatccgaatctagtgcctaagagttgtgcaaccagctctccgaattgcagcttaagtacatagggtggccaactatcgggatgctgagttggcgaagtcgacgtcaaaggccaggaaagaggtgaacggtcgcgggatggaaatgatccaaggggcaattgtcttcatctagactgagaaggttagagaggagctggaatctgatgtcaaggagtacgagagtaatctcctccttttggaccaaactcatgaagatgatttttccgaagaacgagagagggacgagttggaagccgtcctggaagagaagcgaaatcgtttagctgcccttccttcctcgtcgttcaacccccagcaattcgaggagttaatcaccgaat

SEQ ID NO: 173665 - DNA, 620 bp, Arabidopsis thaliana landsberg
gcttcgaccaaaccccgggggtattttgatcgcagcgaccattgtcccgacgtgctcaatcagacgctattgggccggggcgcttcgaccgtcagatcgtggtcgatcgcgccgattttcgcgaacgcgagaaaattctcgaagtccacgcgcgcaacaagccgctttccaaagaagtctcgctcgaaacgctggctaagcgcacgcccggattctccggcgcggatctcaagaacttgctcaacgaagcggcgctgctcgcggcgcgcagaaacaagaacatcatcgaaatgaacgattgcgatgaggcgatcgatcgcgtcatggtcggtcccgaacggaagtcgacggtgatgactgcgaaagagaaagagaacaccgcctatcacgaatcgggccatgcgattctcggcggtctgctcgataaggctgatccggtgcacaaggtgacgatcatcccgcgcggcatggcgctgggcatcacctggtcgctcccggaagacgaccgtcaccaaatgacgcgccaagaaattctcgcgcagatcaagatggcgctgggcggccggctgtccaaagagattcagttcggcgacgtcaccaccggcgcgagcaacgacttt

SEQ ID NO: 173666 - DNA, 1506 bp, Arabidopsis thaliana landsberg
  unsure (1)..(1506): unsure at all n locations
tcatcgttttaattaggtatgtttagaagttaaattttgttttatcataagtgtcgttttatatttttgtccagacttaatattttgattaaatatttagtttatccctattactttgatgtatttacaaatgaaaatgatatgatgtaaaaacaaaatttanattgttttctttcttaatatatatagaatatctagggaaaagccagttataatgaaacggaagagtatttaatcggttacttgatttttattgaataagataattaaaattaaatttaagttcatataaaataataataataattaggttatgagtaataattttaaaaattaaataattttagtataaattattcatttcactccaacaaaaatggatcaacttagtatatttttgttcattaaagtatttgaaatttcatatatagagaatgtttatacaaatattttattatagagtgataatggaggtataacagcatggcaaccagcggacgggaaaacttggttagaggtaatatttatttagtaacttatcaatgatattttcaaggatgtgatattttaactacgtccgattgaatgtagtggcttagtccagtggagtttattgaagacgcggttgttgagcatgagtatgctatatatattcttcaacccttttatcttggatagattatatgtttgagcaaaaagatattggtttaaattgtgggatatcatctttgtctctaggtatgtagaatgtactggatctgcaattgtagcgttggctcaattcaataaacaatttccggggtataaaaaggaagaggttgaacggtttataacaaaaggcgtaaagtacattgaggacttgcaaatggtggatggttcatggtacggaaattggggagtgtgcttcatctatggtaccttctttgctgtaagaggtcttgtggctgctgggaagtgttacaataactgtgaggcaattcgtagagcagttcgcttcattctcgacactcaaaacacggagggtggctggggagagagctatctatcttgtccaagaaagaaatatattccgatgataggaaacaagacaaatgtggtgaatacaggacaagcacttatggttctaattatgggaaatcaaatgaagagagatcctttgccggttcatcgtgctgccaaagtgttgatcaattcacaaatggataacggcgatttcccacaacaggtgaatatagtcctatctatgtttcccatgaactctaatatataatgtgaatataactatagattacttatctgtattcaaagccaataatatattattgacaaattaaaataaaaactatatagataaaaaaaaaagttaacgttgcttttataaattttcaggaaataatgggagtgttcaagatgaacgtgatggtccattatgcaacctatagaaacattttcactctttgggcactcacgtactacacaaaggcgctgcgcgtgcccctctgttga

SEQ ID NO: 173667 - DNA, 700 bp, Arabidopsis thaliana landsberg
catcatctcgctcaagatgatcgtttagttgaaaagatcatgaggtttgtacttcttgatatttctttcagtaactacttccgacctttttgcataccatgagaatctcttaccattttgttttataatctaatgtgccaaaaactaggatatatgataagagactatcatcaaagttgggacacatttcattctggtgttttccgtcacctcctggattaacaggttgcaatacttctcttttacttaatgagcaggatctaatctcaacgaatgtttttctctgtgtcaatctttagacagacttccttaacattcttggtgtcttgcagagacagatgacaattgtgccccatttgttacactgatggacatcataacattccccaaggtaccattcatgaatctatttgctgtattccctgaaaagattaagaatacttttatgtgatcgcctacgttgttattacaggttacatgcaagtacagatgtattgttcgggttgtagctgcatatccttggcaagtagaggatttctgttcagatgagaatcgccgtcaccaccaagttttgttgacactggaggattcaacagcgactttagaggctttcttatgcaataaagacgcagtaaatacaccatttggtctatttgcatctaaactgtcaacaaagatcgtctctgatagcctaatctag

SEQ ID NO: 173668 - DNA, 545 bp, Arabidopsis thaliana landsberg
  unsure (1)..(545): unsure at all n locations
ggtggcatgggcgcgcgcgcgaactcggcggtctttccgccacgggtttccccaccaattcgggtggtgggtcggtggaggtgctgaaaagcatttcgccttttattttctggcgccgcgagcttcgccaggccagcggtggagcgggcaagcagcgcggcgnnnnnnnnnnnnnnnnnnnnntgcaatcggtggcggacaaccctttcgaggtcacgctgcagttcgaccgcctcgactaccctccggcgggtctctttggagggcagcatggggcaaagtcgcggctcacgttgaatggtgacaaaccgttgcccggtaagggccgagtgatggtcaagaaaggcgacaagatcactctggaatacgctggcggtggcggctacggcgatccgcaccagcggctgcgcgagcaagtcagggaagatgtggaggacggcatcatctccgcggaggcggcgcgttccatttatgggctaaaagggtaggatgcagatgggacgttaccccccagcccctgacattggcgggactttcaccatatt

SEQ ID NO: 173669 - DNA, 599 bp, Arabidopsis thaliana landsberg
atggccggtggaggattggctcttgatgtctccagcgccggaaacattgatgccaagatcacagccgcagttgtcatgagttgcattgtggctgcctcatgtggtctcatttttggctatgacatcggaatctcaggttacaaattcaagaacataaaagggtcattttattaaacaagtatattagaaaacaagtatattagttaatttatctttgattataatttaacaaagggggtgtgacgactatgaagccgtttcttgagaaattctttccatcggttcttaaaaaagcttcggaagctaagacgaatgtgtactgcgtctacgacagccaacttcttacggccttcacatctagcctttatgttgccggcttagtagctttcttagtggctagccgtctaacagcggcttatggtcgccgaaccaccatgatccttggcggtttcactttcctctctggtgctctgatcaatggcttagctgctaacatcgccatgctcatctgcggtcggattttgctaggatttggtgtcggattcaccagccaggtagctatatatagttccaatttcactagagcccatagcatattt

SEQ ID NO: 173670 - DNA, 1713 bp, Arabidopsis thaliana landsberg
cgttcgagaaagaaaccatttattattagtcaacaaaagccaaaaatcgaaaagcttcccaaaatccgaaagcgttcttcgaagagcacagagttcgttgacttattgaaggagatcggaagctttgagatggagaatggcgttttgccgcataggctcaagtacaacgtatttctcagcttcagaggcttcgacacccgcgaaattttctgtgagcttctctatgtcgctctcaacgcgaagcaaaagctcagggtcttccgtgacaacgagggaatgcaacgacgggatgagatcggtccaagtctcgacttagctatggatgactcagcggcttccgttatatatccactaactacgctaactcttcttggtgcctaaatgaattagctatgctctgcgattttagatcatctctgaaacgtcccgtcatacctatcttctatggagtcaatcccgaggatgtccgcaaacagagcggtgatttcgctaaggattttgaagaacacgccaaaacatttagcgaggtggagataaaacgatggaggcgagctatgaatttagtcggaaatatccctggatttgttttcacgtaggactctatatatttaatacatctctggatttgtgaatcagagtagaattgaaattttggatgtggatgcttgcgttttttgtttgaaattctgtggtggaggtttttggaacttttgcagaaaagctactgttgacgatgtcaaagctggcaaagacagaaagaaagtggatgaaatgatagggctggtggtgaaacgcgttttagctcaagtcaggaattcaccagagaatgttgcagactacactggtgggctggaatcatgtgtggaggatttgatgaagctggtcaactttaaacccacttttagtgttcagatcttgggaatttatggtatgggtggtattggcaagacgacccttgctaaatacttttataacaagatcattgccaacttcgagcatcgagcaatgatctatgacgatagagaacaatcatcaacccacgatggcttagacgatctcaaaagaactttcaaagttgctcgtgagaagaagattattgtggttttagatgatgttgatcacatagaccaggttcatgccctggttggtgaaacaagatggtatggtcaaggaacacttatagtaatcactactagagattctgagattctgagtaagctctcagtgaaccaacagtatgaggtcaagtgcttgactgagccgcaggcattgaagctctttagttatcattcactacgaaaagaagaaccaacaaagaatctgttggcgttatccaagaagattgtccagatatcaggactattgccgcttgcagttgaagtttttggatctcttttgtatgacaagaaggaggaaaaggattggcaaactcaactggataagctgaaaaagactcaaccaggcaatcttcaggatgttctggaactgagtttcaaatctttagacgatgaagaaaagaaagtattcctcgacattgcatgtctctttcttaaaatggagataaaaaaagacgaagttgtcattgtactgaaaggatgtgggttaaacgctgaggctgctctcagtgtccttagacagaaatctcttgttaagatcttggcaaacgatactctttggatgcatgatcagattagagacatgggtaggcagatg

SEQ ID NO: 173671 - DNA, 541 bp, Arabidopsis thaliana landsberg; identical to SEQ ID NO: 81025
  unsure (1)..(541): unsure at all n locations

SEQ ID NO: 173672 - DNA, 1005 bp, Arabidopsis thaliana landsberg
  unsure (1)..(1005): unsure at all n locations
atcgaattcttttggcgatttcgtcggaattgaagctcatttagaggcaatgaattcaatattgtgcttggaatccaagnaagctagaatggttgggatttgagggccttcagggattggtaagagtaccataggaaaagctctatacagtcaactcttttgccaattccactttcacgctttcgtacctcacgtctatagcatgaagtctgaatgggaagaaatatttctgtcaaaaattcttggtaaggatataaagataggagggaagttaggtgtagtggagcaaatgttaaatcagaagaaagttcttatcgttcttgatgatgtggatgatccagagtttcttaagaccttggtgggggaaactaaatggtttggacctggaagcagaattattgtgatcactcaagatatgcaacttcttaaggctcatgatattgaccttttatatgaggtgaagttcccatctctagatcttgctcttaagatgttatgccgatctgcttttgagcaagactacccacctgatgattcttaggcactagcatttgaagtggccgagcttgccggtaatctacctttgggtctaagtgtccttggttcgtctttcgaggaaaagaaaacaaagagtggatggagatgatgcctaggttccaaaatggtgtgaacggagatattgagaaaatattaagagtcagctacgatagattagatcaaaaagatcaagatatgttcctttacatcgcatgtgcatgtttattcaatggttttgaagtcagttacgtcaaagacttgctcgaagataggcttagcgttaggcttacagtgttggctgataagtccctcattggtataacatcaccatatgaaactatagagatgcacaatttgctacagaagttgggtagagaaattgttcacgcagagtccaaaaatcctggaaaacgtcgatttctggtggattctgagcatattttcgatgtatttacccataatactgta

SEQ ID NO: 173673 - DNA, 1697 bp, Arabidopsis thaliana landsberg
gctcgttttcaccaaattgtaggtatctcccgtcgtccgggagtctcctgttaaagaacttcctctttgtcctccgatttctcggtattgttccagtttctctgccaattttcactagagatgcttctcgtttgagtaatttcaatccaaaatctactctctgatctccactggtcttgattttgaagcagagagcattcagaagcaaaggataagacacatgaagaaggcattacttcgaggaaacacaaaggatgtcgatgcaagcagtccaaatgtttaaagttgtaagttcatttcaggatccaagaattacttagtgttaagctgatagagatttgagtataatgttgaatagtgagatttctattatctgctgtagattgatgcattattgcatatttgtttgacgcttggttattaggtactgtgactgttttgcatcaggagtggtatgtacagactgtgattgtgttgattgtcataacaactctgagaaatgtgatgctagagaagcagctatggtgaatgtactaggtcgcaacccaaatgccttcagtgaaaaggctttaggtagcctaactgataatcaggtatgttcttgacacctatcacttttgtaggttaagcttcaaagaggtatatttcacatcctttttcatttgtaagtatctgggatgttctgtgttttgtattgtagtgtaaggctgcacctgatactaaacctggactgctttcgagaggctgcaaatgtaaaagaaccaggtgtttgaagaagtactgtgagtgctttcaggctaatcttctgtgctcagacaactgtaaatgcatcaactgcaagaatgttagtgaagcgttccagcctcctgcattttctgctcacaattccccacaagtataccggaggagaagagaccgagagctaactgaggcaagtgaaatatactacttgcttcataacatatatgcacttttgggtttatctccataaaactcatttttctgtccggaatagcagtggaattcttgtccagctccgttattttcgatacctgacaattccattcaaaatgctctgggttcccctatgtcttgctctcctaaacttccttacaggttcgattttgcatttcctaaaatgatagttcatcttccttcacctcataatcataaatattttaactgaattttcattgtgctactagaaagaaaaggtccctcatgggatacacctctacacttcttccggacttgggagatttatgctcacttctcgttgcagcgtcagaatctgctacaacaactgcaggtatatctgtagtctcttacaaaatctacacttcactggatctactattcctttggcttcatcaacatacttcctttaaaatctcacttagaggaccagaacaggatatttacaaagcctgatgataaggaagccattgagctgtcaagtgagtctgagagtcgtaatgtggaagaagaaatacaatcatgtggaagattgatcgaactgatagatgttcaatacaatggagaaaaggattcccaatgtaagaccaagacaagtgtcaatgaaacagatatatacatggagcagcaaagggcagtgcttgaaactttcaaaaacagtctccaaaagttcatcaaatcgagactggaatcatgacaggtagtgattccatctaatttta

SEQ ID NO: 173674 - DNA, 907 bp, Arabidopsis thaliana landsberg
gacttcggctcaatattatgttgcaatggggcaaagtatatctagaagctttccatggagcctgtgctgttcacatagagaggaatgtcagactgaagtttccaaagaaaggggtatctaacctagtcagtaaggctgcacgagcgttcaatgaaacaaattacggtggtttatacaaagagatagagaggcgtagccctggttgtgctgcatatttggatgccataccaaaacctcactggacacaggcttattgtgatgctaaacggtataatttaatgagtagcaacattgcggagtcactaaattctgcattggcaaaaatcattgaactcccaatagttacaatggttgaggcaattagaacgaaactaatgaagtgattctatgtctgccgagccaaagctggaaagcttgacgatggtataacaccaaatgcacacaaactgatttgcgacaccatgcgtcatctgctggtttggatgtcctacctgtatcagcctggacatttcaagtcaatgaccttgatggaagatcattttatgtggatcttgagaagaaggcttgtagttgcaggcagtttgagaagctacaactaccttgttgccatgctcttgttgcatcagcgaaggcaaacgtccacattccaactctagttggaaaatggtacaaagttaaggtcttcggtaaggcttatgcggagttcattaaaccagttcctgatcagcctgatgatgcactgccaccgcttgtacaggatgcacagttcaaaccacctgaaaaggacaacaaggctgggcgtcgcatgaccaagagaattccatcagctggagaacacatggtaaaagcttcttcgttgttattgtcgaatcattaattttattggttaatcactttatattttgct

SEQ ID NO: 173675 - DNA, 717 bp, Arabidopsis thaliana landsberg
agttgtttgaaaaaatttagtatatttcaggttcaaaaatgcaaggtcatgtgcaagatacatactataaaaggtgattttgggtggttttatgttgcctgcaagaagtgtagcaagaaagttgagatgaacaataaggacaagaccgccattgccgataaaccaacaaagactacatactggtgtccaaaatgcaaccttaacatcacacaagtggttccaaggtataccatttcattcctttttatataattatattattgtatatgtagtctatgtggatcactcattaagatgatttcttttgctcctaggtttaagttgcatgttggagtcattgatcaaacaggagatatcaaatgtatcatgtttgatagtgctgcatcaaagatgattggtcattcagcttttgaccttcttgatggggtttatgatgatgatgtgagtaatgacaatggaaaaatatatctgattggttggtttttcactaatgatctatcgattcttatagactatcattgataacacagctgcaggatcctgaaagaatgcctccttctatcaaaaacttggttgggaaaacctttcagctacttgtgtgtattgagaatgacaatttgtctggaagcaatgatacatacatggttggtaaggtctggaaaggtgttgatatagtgatgattgagaatgctgatgattcacagagagcatatatca

SEQ ID NO: 173676 - DNA, 2406 bp, Arabidopsis thaliana landsberg
catcagaaattttcttcagttcatttcccaacaaaacatatacagtaacctacaggtgaagaaagaaagatagagaaggtgctcacaacaaacctctggtcacggtggtgatgaacagcgaattttccggcggcgggagctcgtttatagaaatgaagtaaacgaagacgtcaaatcgaaccagaaacgggtttctcgtttttttttttttgttgtgaatttttgtgcggttcagtccacgtggcggacaactaaagctttattaattgattttatcctttcttttggttatctttgggttttagggttcaatcatttggcccacttaccaaaaacccatcacaaaaagccctttacctttttcccgccaaaacccattggcctaagcgagatttttctctgcgactgacgacgagcgagttacagtgggttaagcggtgatgggattttacggtggtggaagcatggcatcgggtcgccctgaatcaacaggaattgattctctcggcatcgggaaaatattagctgtatacctcaaggacaacgagaatttggccatcgacgaggataagttgcagctcacggcggagctcatccgcgtattctccgcatcacctggtagagacatagtttctcaggtacatcctcacttggccatcatcaaatttctggtaaaaagtttataaatctgaattttataaagcttggtatagcttgatttcgaaattaaattccggttatgaaattgtaatctatttagctagatttcgtttccactctacttctatgaagaattagggtagatagaaaacgattaatcaacttctctatgcgtcaattagttcttcttagtatctaaaaataggagaaacagtttataagtttattccatggcttgagccaggtgaatgaagacggtggtggttccttctctttgtctcttgatctccaacaattcaagaaaatatctgatatcgagaactttttcataaatctagaggataatcctaaaggagttatcccatgtatgaatgctgctgttcacaaggtatgctattacttttcattggggtttgttttcttggttggcataagatgaagacttatgtcatctctcacaggttctttttgatcaatgggagactaatgagtttgagaatgttatgaagatcaatgttcgtctgcacaattatcctgaatcttctatctccctgaaaaacctgagagcagcttatattggtagactgtctcatctagcgaaataaataataagatgtaaaaccttaagtgagacatagcatgagtgtatgcttttgaaattgcaggaaagcttgtaaccgttcatgggactgttgttaaagttagtactgtgaaaccccttgtcacacagatggcttttgactgtggaaagtgcaaaactggcataacccgggaatttactgatggaaagttttctcctccactaaaatgtgattcccatggatgcaagtccaaaacgtttactccaatccggtcctctgctcagacaattgattttcagaaaatcaggtgttctcctatttgcgtctcatcattttgtgtacttcatccttgttagttatgtatctgaccattgttaaccagctgtccaaatgcattttagggtacaggaattgcaaaagcctgaagaccacgaagaaggacgggtacccagaactgtagaatgtgagctgatggaagaccttgtggacatatgtatccctggtgatgtggtgacagttacagggattataggagtaattaataattacatggacattgggggaggtattgattttataacttttcatggagttctctccatccttgttgtgtccataatttgcaaacattaacatgcccaaacgcctgctatccttacccgtagaatagctggaaatttgtctcttaaagttctcttccatggtttttgggaatctcattgcaggaaagtaaaatagagcactgctaagttgtttgttttactcatattgacattttaccaaagatcaaggagctagaagcctcattactggtattaagccatactcaagcttaacaaacatttaaaatgctcctgtttcagggaaatcgaagaccaagaatcaaggattttactatttgtttatagaggcagtttcagtgaaaaacaccaagcggcagtctgcatttgagaactcagaagactctagtagcagtgcccagactgcagatgttggtgacttatattcattctctcagagagacttggaatttattgtgaagttcaaagaagaatatggttctgatacattccgtcgcatacttcattcagtctgcccgtctatttatggccatgaaattgtcaaaggttatacttctgtccataacaagatttgatgattacaa

SEQ ID NO: 173677 - DNA, 450 bp, Arabidopsis thaliana landsberg
gccaaagccgaacaagtaacgcagtggctaactccaagctggcagcccctacggaaaaccccgaacggctcaagagaggttggggtaaccgcgaggcagatgacgacgaaccagaagctgctcggggcaaaatctttacaatcttgggaggctcggccttttgtcaagacacaacagcctcaatcaagcccgtttcaaatcgtaactcggcacgacagttcaacggaccagatgataaattcactttttgtgagagggatactaacagtttggatcagtcgtactatgatcccttggtcattacactgactattggggattttagcgtcgagcaagttttagtcgatacagggagtacggtggacattatctgtcttacaaccttgcaagaaatgaaggtcgatatggcgcaagtcgtaccgactcctagacctgtgcttaggttttttg

SEQ ID NO: 173678 - DNA, 472 bp, Arabidopsis thaliana landsberg
ctaatggaggaaggtggaaactattctcagacagtaacaacacttctcatgtcacaccccacaagtcttctttcagattcagtttccacatcttcttacatccaatcatcgtttgccacgtggagggttgagaatggcaaagaccatcagcaagtgaaaacggcgccgtcgtcacaatgggtgctcaaacaaatgatcttcagagttcctttcctccatgacaacactaaagataagaggctaccgcgggaagatctgagccacgtagtagcagagcgacgcaggagggagaagctgaacgagaaattcataacgttgagatcaatggttccatttgtgaccaagatggataaagtctcaatccttggagacactattgcgtacgtaaatcatcttcgaaagagggtccatgagcttgagaatactcatcatgaacaacagcataagcggacgcgtacttgtaagagaaaaa

SEQ ID NO: 173679 - DNA, 2990 bp, Arabidopsis thaliana landsberg
acgaaaaactgagtgctttgcatatagatcaagaagttggggaaagcatacttggctatctcgaaatgggcacgcgcaagtcacgtgccaacctttgaggagtacatggagtttggtatgcagacgtcaatggatcattttgcagcctatagctttatcgcgatggaagattgtgatgagaatcaaacgtgcgagtggtacaaatccagacctaaaatgatggaagctctgaatggtgtgtttcgtattaagaacgacataaacacctttgaggtaattgatacatacaaaagcatgacaataagcgatcacatcatcaaccggttttgtcttacacattaacgtaactaagtgtaatggatgagcagcaagagatgagcagaggagaagtggctaaagggctgaattgttacatgaagcaacatggtgtttccaaagaagaggcgattggagagatgaacaagatttatagtaattattacaaaataataatggaggagtacttgacgacaaccgctgtgccacgtccgattctggtgcgatgcctcaacgtttcacgacccatccatcatttttacaaggagagagatgaattcacagatccttatttcggaatgcttaaagaagtcatcacttctttgttcatccatccaattcctctttgatatttgtgaaaacactttaagattaaatacttgtatgtgcacggacgggtcatgtatcaacctttgacgagtacatgaaggttggggtattgacagccgggatggctgattatgcagcttattgctttataggaatggaagatatcaacgagaaggaagcttttgagtggctcaattctaatcccttaatcatcaaacatctgactgcaatgttccgtctagcaaatgacgtaggaacctacgaggtacactgcatatcaaagggatctcttggttcttttctttctatttcccacttcttttagtccttcatgaagaaatgatatttttgtagactgagataaacagaggagaggtggctaatgggctcaactgttacatgaaacaatatggagttaccaaggaggaagcatcccgagagttgcgtaaaatgtacgtataccgcaaaaaagtggttgtggaggagttcatgaactcacatgatcatgtgccgcgtcaagttcttctgcgatgcctcaacattgcacgtatcttcgatgtgttctacacggaaggtgatggatacagtgaacccaagggcaaaatcgaacactttatgacatccttgtacctccaccctatacccctttcataatgacgtggaacacacaccaatctaggtctattcggggatgctttgaaattaaaaaacaaaacaaaagtagtcctttgttctctgtttgttcactgttactctaaggcatgactactgtcactctggtatctgtctaaactcttaagaactttgaacacaaccaaactaatttaactaaacatcgagaagtaaaaagagatggtaccttgagttttctatctgtaatttcatggagcctccaaagtgcttgtccatgaccatgatctcagattactctgcattgttaagtttcagaacatcaatagctctttttatagtagcattataagcactcaataggctaacaaattaactccttctcatcacgaattaaaaagagaatatgattaaaatgttctcttttctcagcagtaaattgtataattctccggcggaaacaaaacacaaagctcgaaactttaccattatattggtttccctccgtcgtctacggcaaaggagaacaaaagcaggagcaatccgatcagatggaaacgatcatttcagtctcttatcatgtcctaacgacggcgtctccggcgaggcacatcggtgagataagtgagaaaaatgggtctgtttggatatggatgtaaggctaataagcccattgggttttagatcaatcttttgtttattacaatttgcacccttttattttctatatttgatgaaaaatattaaggtttttatgtatcagcgacaaaatcaaaatacacataagcacaactacatttacctccatgtttgatgacacataaacaactcaaaattccatctgaaaattcatcaatttcgcaattaaagctctattatgttatttgtgaagaaccaaacatgagaactgatcatcaaaactaacctcaatttgacttctaatcgtcgaatgattttaatcatcaatttgaatcttcgtttgtgctccttgcaagtcttataatgccaataacattggtaacaccatcgtcacccatctcgttattgtagaaatcatttacaacagaagtggtcatagcgttggatgtttctacagagtgaaattgcataacaccattagaaccttcaacaccagcgtcatcaaagaactttctccttacaccagtcggattgttgaggtaactccggttggtttgttccgttaccatagtagaccttttgaagccactggtataaaggagttgtgcattgcctacgattcctttgcctttatccacccaactagagcagtcctttttactcagtgtgttttagttgtcatcaacaatgggatcaagggacaaaaataaattcagatgcatcgttgtacacttcacatccaaaaattgccttacactcatattgctagtaacaatcacatgcagttttgttgtaacgccccgatcgtccgtaccagtgagccccacatcctctctcgggtctatggacccacccctatccgacgatcggtgagtcacgtacggaaagctttaaagacttgttaccgaccctacaaatcaccacatgatctttcaccatgttttgtcttcacttgcatcgttccgacaatcattttccggaaggtcacccatccggaaaattactccagcccaagaacgcttaactttggagttctctcacgacctttgactaaaaagataattgcactttggtga

SEQ ID NO: 173680 - DNA, 201 bp, Arabidopsis thaliana landsberg
atgataaatttaatattttctatgtgtaggttacaaacggatgtggaaacgaaccattaccacttttgttgcatgagctcgttcaagaaccaagatctaagatcacaacaacttcgatgtacttcactcgcggctatactttccatacgtatccatatggaagtcgaagggcaactgcaaaatattgaatccatgtcgaag

SEQ ID NO: 173681 - DNA, 433 bp, Arabidopsis thaliana landsberg
gaaaccttaatcaagagacaaaaccaggagcgtcttatatttagctcttactattcaaccatgtctacttctcggagtaagtattggtgtgatctgtaaccgcatgttcacagattggcatgtgttgtttctctacgatgtgttcctcgcctggtcaacgataacgacttgtaaaaagggagtttcttactggaatttgcagtcggaaagagcgaagattaatagtcctagagacgttgatggcatcaaggtagcgagatcgccgcttgtgagtcaagaaagagaagatgtgatgacagacagggatgattaggtttccaatgaatgtagcttgcagttttagtgatcatttggttatggttcttctatataaataaatcccgcggaaacaaattcggtcaggtatgaaaaaaagattttggtcgggtattta

SEQ ID NO: 173682 - DNA, 890 bp, Arabidopsis thaliana landsberg
  unsure (1)..(890): unsure at all n locations
tgtctgtcaacgaattcagatcaactaatgcgtggggatccattatataaacagatgtgtcccgaggaggttattggcaagtttgtgagctttgaactaatgatcaaagactccaaacacattgtcaacttggagcaaggcgccacctccacacccgaggtgcaacatgttgcattcaaagcaacggaagagaagaaggaatagtctacaccaagtagactcccaatcgacgcctctaagctcgacaatgaggagatggctcttattatcaagagcttccgacaaatcctcaagcaaaggaaggggaaggactacaaaccccgctccaagagggtttgctataggtgtggtaagtttggtcactttattgctaaatgtccatatacaagtgacagtaacatggatgacgacaagaaaggaaataagaagatggagaagaagagatactacaagaagaagggcggcgatgcccacatgtgtcgagaatgggactccgatgagagctccaccgactcctcctctgacgaggacgccgccaacatcgccgtcaccaaaggcntcttcttcnncacnacgggccacaagtgcttcatggcaaaggacggcaagaaaaagaaggtacaagctagaaccaccgccaagtatactacatctagtgatgagggtagttctagtgatgatgaagatgacttgcttagtctttctgccaatcttaacatgcaacaaaaggaaaaattaaatgaattgataggtgccattcatgagaaggatgaatctcttggacaactaagaggaattccttattaaggaaaacaaaaggcatgttaaggtgaaaatgcttatgctcaggaagtagagaaatgtgaaaaattaactagtgagcttagaac

SEQ ID NO: 173683 - DNA, 1193 bp, Arabidopsis thaliana landsberg
catctctgtctcctctttctctgtgtgaaattcgtgttgctgcaacaacttcaagttctcaacacttcaaaaacttgtgctttttgaaatctgacctatatcgattcaaatggatgaaccttgtactttgttgagtcttcgattcattggattgttttgggcactcccagtaacttgaattgaatcacattttggggaatcctatcatttgaattttctactaagtcagtgaagtcttttcatgaacaaagtcttacactttgttaaggattttccatgaattagattaagaagtaatgtttttaaagctttttcttcagtcaaattttgaaattagttaggatgaatgagaagtgggtcaaaagtcggagttttgtgacattgaagcttaagtgtgtttgtactgaatcatttttcttatgttgcttgtcactgtactatcagttttatgtatcgaagaagaggaaacaccagtcaccaaatttaaagtctgggaggaatgagaaaaatgtgaaggtgacaggggaaagatctcctggagacaaaggcactttggacagttacttgaaagcctctctggatgacaagagtactaccaatagtgggttgcaggcaaggcaggaagcgtttacaagaaaattggatttggaggtttctgcttcgtctgttggtcaaaatatacacccttgcctgcctaaacctgtaagttttgcaacttttaaggagtgtttgggccagaacggatctcaagatttgcataaagaaggtgttgcagctgaaactcatgctacagatggtttactctgtgctaaccagaaagataattcagaactacgagactttgccactagtttcttgtccttgtattgtaggtaatgtgctttcattgtgccacatttttattctttccattatcatcgaggagttagttacatgcttacattcttttattatgtctgacttttgttctgaaatttagattttgtaaattgtgcttgtctgttttttgcagtggagtgcagtctgttgttggctcacctccacatcagaaggaaaatgaattgaagcgtcgaagcagttcatcatcacttgcccaagatatacaaatttctcacaagaggcgttgtgagtcccgaaatataccatcactagatgatcttacaaaaccttctcgggagtaagcctgaatcact

SEQ ID NO: 173684 - DNA, 1181 bp, Arabidopsis thaliana landsberg
ggtcggctcaagttcgcatgtccggttcttgagatcaatttaatctcagctcaagacttagcccctgtctcaagaaacatgaaaacgtattccgtcgcttggatcaacaccgatcctatgagaaaactcaccacgcgtgttgatcaatccaacagagctaaccctatatggaacgagaagtttgtgtttcgtgtcaacgacaagattctctacgttgacgcatcagcgattgtgattgagatctacgcagcggcttgggctaaagatgctcttgttggtactgtgaatgttcttctcagcgatctttttgctccttggtctggttttggtgatggtaacgacggtggtggtgggaataacaacatgaggcttgtgactcttcagattcgtcgtccttcagggaggctacaagggtttttacgtctcggtgttgcacttcttgacggtggtcaacggagtatgcctttatctattgaggttttcgatggaagtcgaaaaggagagaggaatagtgttaaaagagaccaagaggcttcaagaatgatgcatcgccgtacgaatagcgatcaaacggatttaaccacgtctacgaatgattacggtgtgaaaacaggggttgttactggcaatggaggaggaggtggtggtggtggcggtattgctgttgctgcggatagtatggttaatggttcgctttgtagctctgatattggaccatcagcgtctgtggttgcggctgcgattgcgcaagggctttacaatagacagaaaacagcggttaaagcggctaacaaagaggacgcaagttcgatacttgaagggaaaacagagggaattgagcatagagttgaacggtggagagcagagaaaaatggcacggttggagcgggtggagcggctggatcaagcgatgattctagcgggaaaggaggagcgggaaggagaagaaggaggaggagaagaaaggagaaacaacaagggaggagaaacggtggaggagagggtaagaaagggttgttttcatgttttggaaacgtgtttggatgtgagatttcgataacatgtggcggtggaagcggcggagaaggagacagcacaaagaagagatataataacaataaagtagtaaatcttagtgctgtagacgaaacgtttagtcattctgcgacttgagataagag

SEQ ID NO: 173685 - DNA, 890 bp, Arabidopsis thaliana landsberg
  unsure (1)..(890): unsure at all n locations
tcacatgggtcagaaaatcattggggcctgggtaggactttgcatacaaaacaaacatagcttgttttaaattatcgtctcaagatcaagtcatatcaattgttctatttgtgatgagaagttgtgtggaaaagctttatcatgtgtgacgtgtgaagatatatgtcaccctctgtgtatccaagttgggaggagaatactagttggtcatccacttcattctgatcacatgctagcaatttcacttgaaagtggatccaagtgcactgcctgccaattgcagattacaacaaagtatggctatcattgttccatttgcaaaatcaatttccatattgattgcatcaaagaagtgatatcacaaaggaagatcaagtctcatagtcactatctctataacttttggaacaatgatttgagggtgactcgagcttgcagtgtctgcactagaccatgcggtgtgtcgttatacggatgtattgactgtatgttcagcgcccacgcagaatgtattgggtttccagctaatgtgaagagccaaaggcatcaacatacactcacacaaatagacatttctagctggagaaagtgttctctctgtaaatcatccacctggggtacattatatgcatgccatcactgctttttcctatttgacaccaaatgtataatgtctgcggtaaagagttaactgattttgttgaaagtgaactatttattcttcttttatgtttttcaacttcatcatttaatttttccggattcatacaggatgaccgtgaggaagcaacagaagaggaagaacttcaagacaactatcaccatgtaccttgagcgtgatatccgtggccattagaaaataaaaagagcctttatgaggttntgcctac

SEQ ID NO: 173686 - DNA, 499 bp, Arabidopsis thaliana landsberg
gctactggaaagtcactggaacagacgggaaaatccgccaaggaggagacggtaaggttgaccattggtacgatgaagactcttgtgtttcacagggggcgtagtccaaacggtctgggaaccgattgggtgatgaatgagtatcacctcgctaaaaatgacgaaggcgttccggtgagatatatgttctctacaagatccttttgagttgatgatctatttgcttcttaaatcatgcatgtggtaccacattttaagcctatttggttttttattacacataatgttcttgacttagaagtggatttgatcaaatctcttatgattccggaataaactctttatatatctgtgacttgtgtttatgggatgcatatagatgcgtatgtattgtgtagagtgttcttcaagcaaacaatacaaagagcaaatatgcaccattcttggaagaagagtgggatgatgataatggtgaaagagttgcgatccatgttccaga

SEQ ID NO: 173687 - DNA, 772 bp, Arabidopsis thaliana landsberg; identical to SEQ ID NO: 66835

SEQ ID NO: 173688 - DNA, 539 bp, Arabidopsis thaliana landsberg
aagggaaatggtgagtttcttatataaaattcgtttaacaaaaatgtatctctatagacatgtgtgtatgaatgttcgtaatatttaatcttttgtagggttctaaagctgtttccgaagggcaactctagagcaaagggcaaatatttatccgtgtttctttatttagctgataatgaaacactaaaaccagatgagaagattttcacgcaagtagttgtgcgacttctaaagccgcttggatccaatcacgtggcaagccgatgtaattagtaaaagacagttgcattattatcttattactttttataatctttcgatatacaaaccgagatattaattactctcattataactgtttcacattttttgttcttgcagtgaactactggcacaagggatcaaactttggttacggttggtgtaaatttctttccttagataaaattcggaagacttacttggacaaagaagacacgttgatgattgaggccgaatttgaagttgtttccgcgaccaaattctctaccattatctaa

SEQ ID NO: 173689 - DNA, 529 bp, Arabidopsis thaliana landsberg
  unsure (1)..(529): unsure at all n locations
gtaagctgcatttatatgactgtctcgggaccaacaagtctctggcatcctggggagtgaaggtagagtgccctttatggataaagaatttatcgatgttgccatgcgtttaaaccctggagataaaatggcccgggatggcaagatgaaaaaatgnnnnnnnnnnnnnnnnnnnnnnnnnnnnnnnnnnnnnnnnattgcatggaggcaaaaagaacaattttccgatggagtgggctatagctggatcgatactttaaaacaagcagcatccgaaaaagtgagtgacgaagatatggccggtgccgctgcccgtttccccatccatccaccgatgtccaaagaagaatattattaccggtctatattcgaagacctgttcccttccgattctgctgctcgttgtgtgccttctgttccctcagttgcatgcagcacccccgaggcattggcatgggatgcctctttccaaaacctgaacgatccttccggtcgtgccgtatcccgggtacncaatgatgaatataaa

SEQ ID NO: 173690 - DNA, 1419 bp, Arabidopsis thaliana landsberg
tgtgtcctacgacttgtgttgtcatcagtgaacgagtctgcgtttgaccttctttattgcattgccttcaagctaatggatcagcaatggctatccatgcgtgcttcatacatggagtttaacgtaagtatattctgtagcctatactaatgtcgcaacaagttatagattcgaagaaacttgggtattaatagatttgactcttggtgttttatcttgggctatacataagttgatcaaatgaattgtggctaaagtggtagttgtgtggaataacagactgtgatgaaatcaacaaggcggcaactggagagagagattatgattgaagacattacaagtctcgaagatttgccatcatacagtcttctcagtcaatagcaaatagcttaccaaaaactactttgtaagtagaaagatctaacacctcagaaaccctatatcaaagctaaaacaacagcagagcaagtaagcaagcaaaaaagaagacaaggtttctctctctctcgctcttcactccatcttcctcgatattagtgttggttccatgaaatttgggttgttatttctatgaaaccagggtcagattttgtttcttatggggtcagattttctaacttgtggtgcttgtaaaacgttgttggttagttggtgttttgggctaataaatcatttggttacatttccactactcagaagacccaaaaaaggactctctcaacatttaatggcgcgatcttgtgtagcacatttcaaatttacaaataaaagactcgtgatgagatttgtctatactacacaaaaattttgaagtacgcttctccaccaaatttgtctatactaatcaatatgattttgcttttctctctcggtccaatattgacaaccttttttgtgaatgatcggttctccttcacaaagctgaagctgataatggtgtcttctccttaaccatgtcagttttataccatcaatatcataaaccgtactagctatgacggtcaaacaatggactggtctattgccacatagttcaatttttaccagtccatataataaccgggtccgccaagatgtgtatttcacactagtcaaatgtaatgttgctgttggaaataaacttgttattcaaaaaatacaagttgagatgactatatatatatatatcttacaatttacaaacgggttaatttaatacaacgtctctttctttatacgatttggttttctaatctctctaagccgtcctttgacgctctaatttggcttagatataagacaacttgtatttccttatgtcccaaaattcgaacggtaaatattgttccaagaggaaggaaccggaatctaagattaatttgtactgtactcaataagcatgtagaacatgataacgataacgctgtgctacgaccatga

SEQ ID NO: 173691 - DNA, 1602 bp, Arabidopsis thaliana landsberg
  unsure (1)..(1602): unsure at all n locations
atgcttttcacatcnnnnnnnnnnnnnnnnnnnnnnnnnnnnnnnnnnnnnggggccaacaaacccaacttccgtcattcaattcggtatatgctgaagaaacatcgaatagatgttcttgctttgtttgagacacatgcgggtggtgagaaagcggtcagaatttgtcaaaatttgggttttgaaaattcttacagagtagaagcgcgagggcagagtggaggtatttggctcttgtggaaatcagaggtgggagatgtttcaattgtggagtcagcggaacaattcatacacgcgaaagtggggaatgggttagcggctatccatctgctggcggtttatgcggctccttcggttagtagaagaagtggactatggagtcgtttgagccggatagtgcagagtgtggatgagccgatcattgtaggaggtgattttaatacaattatcagactcgacgaaagaacgggggggaatggaggactctcgccggattcactagctttcggggaatggataaatgagctctctctcatagatatgggattcaaagggaacaaattcacatggaagcgaggtcgtgtagaaagtacttttgtcgcaaagcgtttggatagggtgctctgctgtcctcaaacacgtttaaagtggcaggaagcttcagttactcaccttcagatcacgctcctctttatattcagctggaaccagaggtgcggagtaatccggtgaggagacccttccggtttgaagcggcttggcttacccatagtggttttaaggatttgcttcaggcttcttggaatacggaagtagagacgcctgtagcattgacagctttaaagagtaaattaaaaaagtggaaccgtgaagtctttggagacgtgaatagaaggaaggagagtttgatgaatgaaattaaggtggttcaggatcttttggaaattaaccaaactgataatctcttaagtaaggaggaggagttgattaaggaatttgatgtggtccttgagcaggaggaagtactatggtttcagaaatcccgagagaagtgggtagaattgggagaccgaaacacaaagtatttccatactatgactgttgttaggaggcggagaaacagaattgaaatgctcaaagcggatgatgggagttgggtttcacaacagcaggaacttgagaagatggctgtcgattactactcacggctttattctatggaggatgtcgatgaggttgttgagaggttacctccagacggttttactagacttacagaggaagagctgtctaatttgagcaagccttttaatcccatggaggttgagacatcaattcgaagcatggggaagtataaggctccagggcctgacggctttcaacctgttttttaccaggattgttgggatatagtaggtgattctgttagtcggtttgtgttggacttcttcgccaacgggaaacttccagaggtacgaatgatgcaatcgtggtgttgatagctaaagttctgaaaccggaaaggataacacagtttcgtcccattagtttatgtaatgttttgtcaaaacaatactaaaactttgggatgcgtttgaagcg

SEQ ID NO: 173692 - DNA, 2028 bp, Arabidopsis thaliana landsberg
ggattatacacttgacaataaaacaagtaagcctaagagtgccaaagggatcttttgttgcagttatcggggaggtatacgaatcgtccccaccgttagagcagcatagttcgattaaattatgattaggtgtttcttaatctctttttgtttgcttaattttcaggttggttcaggtaaaacatctttgttgaattcacttctaggcgaaatgcggtgtgttcatggatctatactattaaatggctctgtggcatatgtaccacaggtttgtaaactggttaaatactttctttttggtttccactatgagaagtcttacatgtaccccactcaccttcaaggtcccatggattttgtctggaactgtacgtgaaaatattttattcgggaagccttttgactccaaaaggtttagtaactttgcttcgtcaactcttaaagttatgatctagtgtaactgatagacaaagctagtggtgactttgttaaactaggtatttcgagacattgagtgcttgtgcactagatgtggatatttcacttatggtcggaggagacatggcgtgtataggtgataaaggagtaaacttatccggaggacagagagctcggtttgctttggccaggtttgctatatatctcctatgctctttcaccttccatagacttgagtgttgtgtttctgatgattttgtgtgtgctttatcaatagggctgtttatcatggttcagacatgtaccttcttgatgatgtactgagtgcagtggattcacaagtaggatgttggatattgcaaagagcacttctgggtcctctgttgaacaaaaagactcgtgttatgtgcactcacaacattcaggtctcaaatctctctacacgttaaatatttatctatctcaatttatttttttctcataccgtcaagctgtttctactatgacaggcgatatcttgtgcagatatgattgttgtgatggacaaaggaaaagtgaattggtcaggaagtgttactgatatgcccaaatccatttctccaacattttctttaaccaatgaatttgatatgtcatcaccaaatcacttgaccaaaagaaaagagactctatctatcaaggaagatggtgtagatgaaattagtgaagctgcggcggatatcgtcaaattagaggaacgaaaagagggtcgagttgaaatgatggtttataggtaaacaaaatttgcttaaccatgttttttttttgttgcctatatgtataagtaagtgattgttatctgtttatgcaggaactatgctgtgttttctggttggttcatcactattgtaatattggtttcagcggttttaatgcaagcgtctcgtaatggaaatgatttgtggctatcatattgggttgacaagacaggaaaaggagtatcgcattactcaacctcgttttatttggtattaaactcgcgcataaaaccacgaaacgtaactcttatgtctctgtgtttttctagtttaataataactactaatcttgcagatggttctctgtatcttttgcatcattaacttaatattaaccttggtgagggcattctcatttgcatttggaggattaaaagcagcagtgcatgttcataatgcattaatcagtaagcttataaatgcacctacacagttctttgatcagacaccaagtggaagaatacttaataggttagacacaaggaaactctttgaatcatgtgtcttgttcttcatcttaacttctttttttggttttactctgttcaggttttcctctgatctataaaccatcgacgactctctcccatttattctcaacattcttctagcaaattttgttggcttgttagggattattgtagtattgtcttatgttcaggtttgtctgaaactcttctctctttttgctaagtattaactcttctgttttgttggaggagttacattaatgtataatatgtaaacaggttctattccagcttctgcttctgccattttggtacatatgcag

SEQ ID NO: 173693 - DNA, 1768 bp, Arabidopsis thaliana landsberg; identical to SEQ ID NO: 27749
  unsure (1)..(1768): unsure at all n locations

SEQ ID NO: 173694 - DNA, 464 bp, Arabidopsis thaliana landsberg
agtaatggcctgcgagtgattctgtttccacttccattacaaggctgcatcaaccctatgattcagctcgccaagatcctccactcaagaggtttttcaatcactgtgatccacacgtgcttcaacgcgccaaaagcttcaagccatccactcttcaccttcatacagatccaagatggcttgtctgaaacagagacaagaactcgcgacgtcaaacttctcataacacttctcaaccaaaattgcgagtctccggttcgtgaatgtttgcgtaaactgttgcaatctgccaaggaagagaaacagaggattagctgtttgatcaatgattctggttggatcttcactcaacacttagccaagagtttgaatctcatgagattggcctttaatacctataaaatctccttctttcgaagccattttgttcttcctcagctccggcgtgaaatgtttcttccatt

SEQ ID NO: 173695 - DNA, 485 bp, Arabidopsis thaliana landsberg
tcatgatgctgaccatgtacgggagcttctcatgtccgaaccgcgagatccgagcagagcatgcggcggcggcgcgcttttcaaacagattccgaccagcgccgaccgacattcccgagcccgaccgcacgtggatggcactggccgcttacaacatggggtcggccacctgatcgacgcacgcgatctgaccgccaagctcggcggcaatccgaaccgctggcttgatgtgcgacacacccttgccgctgctgtcacaaagccactggtaccggcagacccagcacggttatgcgcgcggccaccaggcagtgatctacgtcggcaacatccgcgcgtactacgacatgctggtctggatcacgcgcgacaagaacgccgagccgaaaacgtcactggagtccgccgaagagcagaagaaggatgacgacaaagatgatccggagaagcgcaacccgctgaacatcaattcgcccgtgctctag

SEQ ID NO: 173696 - DNA, 518 bp, Arabidopsis thaliana landsberg; identical to SEQ ID NO: 59624
  unsure (1)..(518): unsure at all n locations

SEQ ID NO: 173697 - DNA, 561 bp, Arabidopsis thaliana landsberg
aatcaaggtttgatcaagtaactaatcaagatttttattttttgaaattatctctcattcaggaggggccagggatgaacaagagcgagaagaagcgtatctgcaggctaatggactgcagaaaactatcagcagaagcctgcgctcacgcggttcaaaacgagcggttaccaatgcgtgtggtagtgcaagtgctcttctttgaacaagtaagagccaacaacaacggttcatcatcaaccggaaacagcacaccagaggttatacctgcttcaagatcaacaaacactactgatcaagaagacacagagtgttgggacacagaagatatcaaagctttgagaggtgaattagcaaatctaagactcgcaaagaatcaacaagagagccataacaaagggaaactgatgaaaggaggaggattaggagtttctagagtgttctcgaagctttggtctggtaaagagagaagtggagatatgataagtagctcagggactttaagtcctggttctgttaatgatgattccaagtcttttttttttcacaagcaagaatcat

SEQ ID NO: 173698 - DNA, 580 bp, Arabidopsis thaliana landsberg
cccctaattatggcctcgacaagaggactactcgttttggagtcataaaatgcatagtcatttattctctctccatcctagtattaggtaaattatagagaatgggatgcattttgatagcactaataaccatgtattcattaatgaactaattcataagaatgcccaagctaccactgtcttgttacgttcgctttgcagggatgaatacaataaagtaagtggcttggacaacgtcaagcaaatttgggacaccctcaagatctcacatgagggaaacgatgctacaatgatcaccaaaatggatttggtggaaggcgagctgggaagatttggcatgatcaggggagaagagccaacagaaacctacaataggctcaagaccctggtcaacaagattagaagctatggaagcacaagatggacggatcacgacgtcgtccgactaatgctcaggtcctttacagttattgaccccaatcttgtaaatcttatccgtgaaaatcccaggtacacaaagatgacgcccgaggagatactcggaaaattcgtgagcaggcgcatgatggtaaaggaggca

SEQ ID NO: 173699 - DNA, 567 bp, Arabidopsis thaliana landsberg
  unsure (1)..(567): unsure at all n locations
caatccgcgactcgatataaaacnttctcttgaaaatcttcgcgaaaactctttacactacctgagctttagccaatgtaatattgattttattccagttgccgtatctactcaaaccgaactaacgtccctcaatgcttctggcaattatattacagaaatccctcgacacattggagaattacaagcccttaccgaaatggatctgcacaacaatccaattaaacatatttcaccgttgttctggaattgctcggcacttaaaaagctggacctttcagggcagcctgtttccaatcccgatactgctgttgcggtcttgtgtaccctttccaacctcgaaaccctggtgatggattattctccctgcaaattgtacccccatcttacctgccacacccatgtattgcgcgaagccgatcttggcccggattttccggcagaaaaaatgcaggtcaaagaattatgcattgaaaatagtaagattacgtcttccgataaattcattaaaaaaatcgccttgaacaaccaattggaagggctgtctttaaaaattcgacctgacca

SEQ ID NO: 173700 - DNA, 876 bp, Arabidopsis thaliana landsberg; identical to SEQ ID NO: 3644

SEQ ID NO: 173701 - DNA, 2450 bp, Arabidopsis thaliana landsberg
ctttaacacgacaccttatcagtggtgctttcattgagagtgctatggctccacaagtgacaaaagtcgcagctctcgattctgtaccggaatcgtcagaactcgaggcagatgtgacgccgcctcctgcagatccagtttcacctccatcgatggagctgcgaatggaaggcgtcgaaaaagaggtcctttacttgaaagaagttgaaacccagattttgaaaaaccagatctacggagtgggtcgtgaaggaaacttgactccatctgctttcatgtcgccttctcccggagctcttttgcaaacgacacagaccccgagtattggaagtcagaacagagagaccttgtttgcatacccaacacctgaaatgcagcttcgtttacatgaaacacgtttccgaccaccaccttttgagccgccgcgtttccaggcttcttcatcggaaccaccaaggtttcaagcttccacttctgagccacctgggtttcaaacactgtcgtttcagcagcaacccagttttccacctcaagggtttccaccaccaaggttttaaccaccatcgctgcgtcccagaacagatccaccacatcgtacggtggagctaccagtctatgaaggtggtaacgccgatgactggttattccggttagaacaatgctttctcgctaatcgaactcctgaggaagagaaactcgagaaggccatctcatgtttaataggagcctctgtgacttggtggcgttgctcctaggagagagaagaaatctatacatgggtagacttccaggacaaattcaaggtgaggtttagggcaagaagaggtagttatgctatagatcagttgctaaacattcgccaaactagcagtgttgaggaatacagagaacgatttgaggaattgatagtggacctatctcatgttacctttaatattttggagtctgcgttccttaatagactaaggaagagtctcaaagaccaagtggtgcgatgtagaccagttaatctcgctgacattgttgaaattgccaaacttattgagtcccaggagagaaacaacgcaacttatccagtcagacaacagccgcgtgtatcgctaccccctgctcaaacattaactgctgtgagaccttatgtgccaagcaaagacacgaatagagcttcaggaagtgggacggctacacaaaaccacaacccctgtcgctgttgtggttctatgacagaggagactaaggaacagtctatgcgtatgcggggatacataggaaacgcaagagtagtaatcttgatagactctagagctacttgcaatttcattagtgaagaatttgtaagagttagaggtttggacatcacaccgacgaggagttttggagttaaagtgggtggtggcaggatcattagaagcagtggcaagtgcatcaatgtgccattagaagttcagggaatcgagttcatcgaggagttctatttgtttgatttgggagagctagatgtggtcttagggttttcatggttagccaaactcggggaaaccagagctaattggggacgtctaagactcagctggcaaattggtcgaatatgggttataatacatggagatccagacttaagcacacatcaagtgtcattgagatcaatgagtaaagtgatcaaatacacaggagtcgttgtttgataacaaggcgtaggaggagcagacttccatcactccagccatacaacagatcctggatcactatgagcaagtcttccaagtaccacaatcactaccaccttcatgcaacagagaacacgcaattacattgaaggaaggtacttctccagtaaacctaggccttaccgttattcttttgagcagaaaaacgagattgagaaattggtcaaggaaatgatgagcactcatgtcataaggcctagtgtcagtcccttttcaagtccggtgctattagttaagaagaaagatgggggatggaggttctgcgtcgattaccggacgcttaacgaggcaactattccagacagttatccaatccctgtgatagaggaactcttggatgagttaaaaggagccacaatgttctccaaattggatttaaggtccgcttatcaccaaatacgaatgaagatgagcgatgtggagaagacagcctttaaaactcatcaaggatattacgagtttttggtcatgcctttcggcctaaccaatgcgccatccactttccagaacgttatgaatgatttattcaggccatatttgaggaagttcgtgctggtatttttcgacgatatcttggtctatagtcccgacaaggaaacacacttaaagcatcttgagacagtcctgcagcttctacacatccatcagttctatgcaaacctaaaaaaatgctcatttggaagcataagaatagcttacctatgccatatcattgtcagctga

SEQ ID NO: 173702 - DNA, 500 bp, Arabidopsis thaliana landsberg
  unsure (1)..(500): unsure at all n locations
acgcacagtgctggggggggggcatcagcggtcagctcggaaatggagcaacgacagatcacgacgttccgtcgccggtcggaggaacggtgcgcttcgcacgtctctcgggaggctactggcattcatgcggagtgacggcggcgtccatcgcgtactgctggggaaacaacaactggggccaactgggcgactccacacgccgcacggatcgcctctcaccggtccgggtcgcgcccgcgccgggctttgccagcgtgtcggccggtgggcggcacagctgcgcgctgactgtcgacggcagcgcatactgctggggctacggcgtgcagggccagctcggcgatggcacagccacaaccaacccagggcccgttccggtctcggggggcctcgtcttcaccgcgctcacagcgggatggtaccacaactgcgcgctgacgaacacgggcaccgcgtattgctggnggcagaacgacagcgggcagctgggtgacggg

SEQ ID NO: 173703 - DNA, 428 bp, Arabidopsis thaliana landsberg
  unsure (1)..(428): unsure at all n locations
atgagggagtgcatctccgtccacatcgggcaggccggcatccaagtcggcaacgcgtgctgggaactttactgcctcgagcacggcatccagcctgatggccaagtgcctggagatannnnnnnnnnnnnnnnnnnnnnnnnnnnnnnnnncttcttcagccagactggtgctgggaagcacgttccccgtgcaatcttcgttgatctagaacccactgtgatcgatgaggtgcgcactggcacgtaccgccagctcttccaccctgagcagctcatcagtggcaaggaggatgcagctaacaatttcccccgtggccattacacaattggcaaggagattgttgatctgtgccttgaccgtatccgcaagcttgctgacaactgcaccggcctcaaggctttctggtcttcaatgccgttggtggt

SEQ ID NO: 173704 - DNA, 495 bp, Arabidopsis thaliana landsberg
taagatacctaagaaatgacttgaaaacgcttttttctgcagatgattcttcctcagctttcagaaagttcagctacaaggaaatgacaaatgcaacaaatgatttcaacacggttatcggtcagggaggttttggtactgtttacaaagccgagttcaacgatggtctgattgcagcggtaaaaaagatgaacaaagtctctgaacaagctgaacaagatttttgtagagagatagggcttttagctaagctgcatcaccgtaacctcgttgctttgaaaggcttttgcatcaacaagaaagaaaggtgaagaaccatacattgctttttcgccttctgcatttatctaaaccataagtgttctcattttatattgtttcaatcattcaggttcttggtctacgactatatgaaaaatggcagcttaaaagatcacttacatggtatgtatatgcttcttctaccataagtgtacgagtcctgagtgttgaata

SEQ ID NO: 173705 - DNA, 396 bp, Arabidopsis thaliana landsberg
atgacgaccatgatgtctcatccgaaatttgagctcggcaacgccaacacctggcccaacccctggccgatgtacgccgcgctgcgcgaccacgacccggtccaccacgtggtcccggcgaacgcgccgaaccaggactactacgtgctgtctcggcacgccgacatctgggcggccgctgccgaccacgagacgttctcctcggcacaaggactgaccgtcaactacggcgagctggagatgatcggcctggccgacaacccgccgatggtgatgacggatccgccggtgcacaccgagttccgcaagctggtggcccgcggcttcatgccgcgccagagtggaggcgatcgagcccaaggtgcgccagttcgtcgtcgagcgcctcgagcggct

SEQ ID NO: 173706 - DNA, 447 bp, Arabidopsis thaliana landsberg
gtggcgacgccggacgcggtgctggtggtgccgcgcgaacgcgcgcaagaggtcaaggcgctcgtcgacaggctcaaggcggcgaagcgcccggaagccaccgaccatcgccgcgtgcatcgaccgtggggctattatgaatcgatcgacaatggcgagcgcttccaggtcaagcgcatcgtcgtggcgccaggcggcgtgctgtcactgcagaagcaccgtcatcgcgccgagcactggatcgtggtgcgcggcaccgccgaggtcacggtcggcgacacggtcaaagcagtgcacgagaacgagtcgatctacatcccgatcggcagcgtgcaccggatggccaatcagggccgcatcccgctcgaattgatcgaggtgcagaccggcagctatctcggcgaggacgacatcgtccgcctggaggatgtctacaagcgcagttga

SEQ ID NO: 173707 - DNA, 485 bp, Arabidopsis thaliana landsberg
cataagcttttgggtttttttagaaatcgcgagagcagtaatttcgggttccgcagcctgttggttcaaaataacttctgactcaagagtctgttttttcccaatgacttcggtctaggacgactgttctttttcatcttgtggctcatagtctgtcgggccaatgcattgggaattgctgggaacatgatcaattctgttttcatggtggcactcagattgagcgtcttggacagttatatcccgcgctagggaatacagtaccttcgcattggtctaacatgattgatttcccaggctacatggaattctcctatacacccgctccaccattacgtaccattttccctatggcaagtgatgacgctttggatcttctagcaaaaatgttcatctacgacccacgtcaaaggatcacaatacaacaagctttagaccacaggtatactcttgaaaaagaaacccacgggacaaaaattctgttt

SEQ ID NO: 173708 - DNA, 407 bp, Arabidopsis thaliana landsberg; identical to SEQ ID NO: 71474

SEQ ID NO: 173709 - DNA, 448 bp, Arabidopsis thaliana landsberg
ggggtcgccgatattttttgcggataccctgctgctgcatccgcagaaagtaactgccgacagtgtataccgtttcagccagccgtttacggaaaccgagatcgagcaggacagggatacgaaatatgatatcatccagttcctcacaaaagataccgtcaagaaagggcttgtactgtatttccacggcaaccaaactaacgtaacgcgttatgcggattatgcagagtggtttacgcgcaatggctatgatgtgtggatgccggactacccgggcttcggcaaatccacgggacagtttaccgagcaggctttgtatgatgaagcgctgcaggtgtataaactcgcccgcaatatttaccagccttcgcagatcatcatctacggaaaatcactgggcacaggcattgcggcgcagctggcttctgtacgtgattgcaaacgcctg

SEQ ID NO: 173710 - DNA, 329 bp, Arabidopsis thaliana landsberg
cgctttgcctgttggttcgattctcttgccatgtgctccatccaccttgtaaggattttcgtttcctttgcttccagatggagatcccttgccgttaggggatcttagagaacttctaggagcttttctctgctaaaattcctccacctttgatcaatttcagagattgggcgccagaagcagaagacgatgtggaggttggatccatagcctctgagctagtcagagcctttggtccataacacacgaaaatgatgagtggaaagtctgattcctaagctcaccccgcgtctcttcggtggctcggctgtcaagaaataaaaatggtt

SEQ ID NO: 173711 - DNA, 396 bp, Arabidopsis thaliana landsberg
  unsure (1)..(396): unsure at all n locations
atgtatgttacgaggtgtttgtcagagtaccagagaaatccagcagagctaagacagcctcctcctgagggtccaaactctggaattttggtaatacaagaccaacactcacagacacgtccatgttgcttcggcttgtgtttggttgtggactcgtatctaagtggtttgcccttgccgcaaaatcttaagctagcagccagattcaatgctggagaagatgacgctacttgtgacccagttgtcttcattcctgttctcaataagcctctatcttcaaactgttactacgctatcaaacgagtggggaagcattcanggtatgactctgaatcttgaagatctgaaatcttgcatctttcatcttatataacctaaaaagtctctaaatttgtt

SEQ ID NO: 173712 - DNA, 785 bp, Arabidopsis thaliana landsberg
  unsure (1)..(785): unsure at all n locations
gatcctcgcttctttagccacgcctgagcagtcggcttcaatcatggacttgatagaggaacggtgggaggagttggtcggagagatgccggttaagatttgttatccggcaatcgagagccatgagtggaggattgttaccggttgcgaccctaagaatactcgttggagttaccataacggtggttcttggccaggtgaatttctgttctatactttcttgaaactatattttgaacaaaaccaattttttaatagtgacaaaataagtattttatatctttttaaataaccttttgggatctaaaggcgtgaatttatcgttaaaaagaaatgtattacctatctaaattacttttaggctttataaagttggaaacaaaatcattaagaaaaaaatcctctttacggaaagtgtttttgttagtcaaaatactctttacttatgcacggctaatcatatggagcatttcacctttgtttggaaaaaagcagtattgttgtggctattaacagctgcctgcataaagacgggacggccacaaatagcaagacgggccatagacctggcggaagcacggctgttgaaggatggttggccggagtactacgacggaaagtctgtaagattcatcgaaaaacaggctaggaaatctcagacatggtcaatcgctggctatttggtcgccaannnnnnnnnnnnnnnnnnnnnnnnnnnnggaatgatctcaatggaagaagagtaacatatgaaccctcctcttagaagatcttcttcttggact

SEQ ID NO: 173713 - DNA, 675 bp, Arabidopsis thaliana landsberg
atggatctctcactctccggtggtgattttaggtttgctttcaacaacgttaatttttctgatcgtcttcttcggatcgagatcacccaaagcagcggtgagggtgaggttatctgttctagtatcgtcgattgggctagagatcgcaaacgcagaagagaagatgtcactaatcataccaatggttatttttttttgtgtactttgatatttttgcctaacattaaaagtatatatctataaagtatgaaatgtttattatttttcagatgctacatgtcacgtggagtctgatttaaacaaaaattcgtgtgagatagttaatgagaacagcaacaacaaaacacaagtattggtaactgcggctgaacaagaaccaaaatcaggtaatttatattttatctttgcatgtgactgtttagttccttttttttatgtgagatgattcaatggtgtttgtaatttgcaggtggtgaagatgagaatgagaggctcactaataataatacttcagttctaagtgttcaagagttacatataagctctgcaattttggcagccaaaagtccatttttctacaaggtatataacttactcattgatttgatacaatattaattaagcaaaccatattatatcaattatttgtactatgcaattgagacaggtgagtgt

SEQ ID NO: 173714 - DNA, 413 bp, Arabidopsis thaliana landsberg
aacccaagttcttttggacggtcaagaatttttctgagctgaacaataatgtttacacatcaggcaatttttcgatgaaagaaagaaaatggtgagtatatatatgatacaagaaaattttgtttctagagattaacatgtgcaagttattacacatgtagggttctaaagttgtatcccaagggggacgtaaaaggagaccgaaaatggttatccctttatctatatctcgatcaaagtgaaacactaaaggaaagtgaaaagattttcgtgcaagctcaattgcgagttttagacccacgtggatccaatcacgtgacacacaaaagtaggtgtactaacaacattttatgtactacattcttatttcctaacgttttgtgtgattggagctgggactctttctagattta

SEQ ID NO: 173715 - DNA, 578 bp, Arabidopsis thaliana landsberg
gacgtgattaatatcaagtgcgtttaagtcagccaggtgcagcctttctttgaatcgtgtaggatcaaagattggtttgtcttcacgtcggttggatttacctgttatccccaaagaaaatgttgctcgccttgtgtttgatcttccgttggtagatgattcaggcagtgcagtgattagccgtgcaatgataggttgcaagagggttacatatatgcttgataagcctacgttacacagtctcgaagcattagatggtgatggtaataatatcgggacaaggcgaggccataatggtgaaagcgagttggtttcatatgatgttgtgaggaagatagaggaaaaggaacaccccggattcacagtttctgagttatcattctggaaacatgccctgaaaggcagtttctttatcaagcacaaattcattgagttcttcttcttttgagcaatcttcttcctcgtggtctccatcttcgtcagtttctcaaggaacacttcaattcactatgaaagacatcaagacgcctcactttgttttctcagtggatggtcagaaagaaaagtatgtagcgagg

SEQ ID NO: 173716 - DNA, 531 bp, Arabidopsis thaliana landsberg
  unsure (1)..(531): unsure at all n locations
gctcatggagctgatgttttgattcatactgatgaaatgggtttgatttacgcacattctaatgtcatcgtaagttctctaatncaatgcttagaanaatcagtaacattgttttttgtattgaatcttaatgaagttttatctgttaaactttaattagggaatggcttcagatgtaatcagaggaatgatgaagcaacataagagaaaatctcatcgtaaatcgatttcaatcctcggtgttcctcacgacgctgttcgagttttcattcgattcttatactcttcttggtaagtagcaaaagttttggattttacaaatctttggctataaacatttagggatacatacttaaacattttgtttcttgctctgtttttgtagctatgagaaacaagatatggaggattttgcaatacatctacttgtgttatcacatgtctacgttgtaccgcatttgaagcgagtatgcgaatcagaattcgaaagtagtttgctcaacaaggagaatgtgattaatgtgttcttta

SEQ ID NO: 173717 - DNA, 183 bp, Arabidopsis thaliana landsberg
atgtcgggagcatccgccaagatggagatcgggaccgacgagaagcccgccacaagccatgggaaggttccatccggggagtccgccaacaaggtgaagggatccccttcacacgacaagtcgcgatggagcggtgacaagaagaagaagatgaagatggtggtctactacgagaccgactct

SEQ ID NO: 173718 - DNA, 889 bp, Arabidopsis thaliana landsberg
ttgatgatacatgtccatgacatttgactgctcaagtcgtcaagaattcagaatgtttcaaatcacatagtatgataccacccatacgtgtgacatcgacactcgcatgaattataataaatatgctagttataagcttcttgcagaggtagtgaagagcagatacagttctacacaagggggtccaagagctgtcggtttaccacagttgctcctaaatgatctcaatgttcggatgtcatattctaccgcttggagagctaaagatgttgcagtggaaaatgtaaggaggatgatataaaaagttacaggtttttggctacctatttgtatcttcttaaattagctaatccaggtacaataactcacctacactctgcacctgaagctgatagtaaacaacactttaagtatgtatttgtatctctcagggcttctataaaaggtctgaagtatatgagaaaggtaactgtcgtagatggaacacagctagtaggacgttacaaaggatgtatcctcattacatgtgctcaaggcgggaacttccaaatattttcaatagctcttggtgttgttgatggtgagactgatgcttcatgagcgtggttctttgataaattagctgacattgttcaagacactgaagatttaatgattgtattagacatacattcttctatatataaaggcctcagtgtgatttatctgaaagctcatcatggagcatgtgcagtacaccttgagcgaaatatctccaactattatggtaagtatggtgtatttggattattctttagcgctcctaaagcttatttacgtaggtgacatgaagcgtttcggtacattaattggaaaccgtgtacttaggaagatttatgtgacaagatag

SEQ ID NO: 173719 - DNA, 490 bp, Arabidopsis thaliana landsberg; identical to SEQ ID NO: 14784

SEQ ID NO: 173720 - DNA, 2253 bp, Arabidopsis thaliana landsberg
attttatcaggtaggggatccaaagcaactcccagctactgtaatctcaactgttgctcaggattctgggtaagtgctttaatccagtcattgcatccacactttatctgtttatgtctctcgtgtatattgtactgacactattggattgctgtctttactttctataatgaaggtacggtacaagcatgttcgagagacttcaaaaggctggctatccagtaaaaatgttgaagacccaataccggatgcatccagaggtatggacatactttcatctagcatccacctaagacagattctcactgaatatcagatttcctaaaggattatcatcagttgatacctatttcacaaaccaagccaaagattgtagttagcttaattcttactccaatgattgcatcttattttaccctgcaaacaatttttaactgaaaatcagataagaagctttccgtcaaagcaattctatgaaggggcactagaagatggatctgacattgaagctcagactactcgtgactggcataaataccggtgctttggtccattttgcttttttgatatacatgaagggaaagagtctcaacatccaggagcaactggttctcgggtaaatctagacgaggtggaatttgttcttctcatctaccacagacttgccaccaaaaatgaatttccaaacgtaacttgccttatcaacaacaggctaacacaaactagagactagagtgttgcaaagaccataaaagtaagtaaattctttcaaaattagagatgatataactaaatacaaattaactaagagtaagagtatatataaatatatctccggaaaaaaaggtctgtgttttgataattaaggaaaaacatggaaaaaaggtcatataaaagaccagttgaggaacatgaagcagatacaatgaggatcttcgtcgtcgttcaacactttccacccaacagccttttcgtacgttactgctcttcccatgctcgacatgcatattcctccatccatacacataaaccccttcacatttattattgctaattagtatttatgatttcatcaataccgttacacaatttcttttctttttttctaacttaagctaactaaatgcatgactcggtttaacgtacctgttgcatgatctgagggaattcggaggataaagtcttcttcccgttgttgttgtcgaagatcttgtcgagagtgatatcttgaagtgccaccaacgtcgtctccagcatgtctaaaccagcttggttcgcaaatgtgaataccggagataaggcctgaaatgataaaaaccagttcactttccttgttatagataatgtaagagcataatcgatgttcttgagtgagtagaagtaagaaaattaccttgagtgagcaacacatgacagcgtcaggatggtgccaaagttacttgagttgatcagttccatgaggtttgagaagatcaacgccaaggtaacatctataagagtgagagatccagcgagcgagagtgtgagcttcgggtgacgcgggtggaggacgcaagccacttagctgatgagaagaaggagagagagcaagtgcgacccgttgaaccgacgcgatcacacttcttacatactgtctagccattgaggctacattctcttgcatatgcatctcaaaagctagctgaaacgctatagtcataacggactttgagtttcctctgcttccacatgaatctccggctgttctgctccctacgtctagagccgacgctaggtctagcgttcggttaggactcaacccctcctatacataattcgatttataaattagtatttgattcaactaaaggtaatgattttgattgttatatgaattgaacgtactgatttggaatctagaggaatgatgcggaaaccggaaggaatgattggtgcatcatcagagaaagatgcgtcgattggtgcaaatataagctctgcgcatgattcaactgcgttctcatccaccccactgcacatctatatcatcaaacaatacaaaattatatatattagaatcataaaattgagtagttgcaacaagactaataacgtctcgctatagagtctatcaatgagcaaaaattatcaaaatagatataatcttgaattggtgtttgcctttagaaatgtgtgtgtgtttttcaaatgagaccacacaatctttgcgattttaaacacatttcaaaacagatgtcaaaaaaatgttctatt

SEQ ID NO: 173721 - DNA, 539 bp, Arabidopsis thaliana landsberg
tacaaaatatttttatgttcattgttgtttggaataggatatgtgttgatcatcttcgaggagtctttatcatttaataaaagcggaatagcacttttgatggccgttagtttgtgggttgtgcgaagcatcgaggtataaaaatgatttgtatacgtttggattttcacctctattgttaatgctctgatcaagtatagcttataacaaaactagatataaagttatatgtgattagtaatgttgtgtaatctcttgtttacagacttctgtagaaattgttactttagagcttcaacacgcaacaagtgaagttagccaaatagtgttctacatgctcggagcaatgaccattgtggaaataattgatgctcatcaaggatttaagctggttacagattgtataacatctaggaaaccgaagatacttttatgggtggtatttttggtccatttcttatttgttttcgcttaccaagcttttgggttgaggatatgagttttcttctttgtcttgctctcgcatatcttcacttaaa

SEQ ID NO: 173722 - DNA, 1658 bp, Arabidopsis thaliana landsberg
atgcttataccaatcagaaagaactgcggcaaagatgaaatgtcatggacaacatacaactataaatggaaaaataacgcgcacacatccgatgcaaaagacgtagttgccgatgcattatcccgaaggtacaccctactctctactcttaatgttaagcttctgggttttgaacaaataaaagaagtttatgaaactgaccatgattttcaagaggtttataaagcttgtgagaagtttgcttctggtcgttattttagacaagacgagtttctcttctatgagaaccgtttgtgtgtacctaactgctctctacgagatctatttgtcagggaagctcatggaggtggactaatgggacactttggcattgctaaaacgttggaagtcatgacagaacatttccattggccacacatgaaatgcgatgttgaaagaatttgtgggagatgtaatacttgtaagcaagccaaatctaaggttcaacccaacggtttgtatactcctttacctattcctgaacacccctggaatgatatttcaatggattttgtgatgggattgcctaggacaggaaaggattctatctttgttgtggttgatagattttctaagatggctcatttcattgcttgtcattaaactgatgatgcattgcatgtagctaatctattctttaaagagatagttcgtttgcatgggatgcctacgcccatagtttcggatagagatactaagtttcttagtcacttttggaaaacattgtggtctaagttaggaactaagttgttattctctactacatgtcatccgcaaactgatggtcaaactgaagtggttaatagaatcttaggtactctcttgcgtgcatctgatgaaaaaaaaccttaaaacttgggaagaatgcttaccacatattgcatctgcatataatcatgccgtgcattctgcttctaagtattctccttttcaaattgtttatgggttcaaccccatctcacctttggatctaatccctttgcctttgagtaaaagagtaagtattgatggtaaaaagaaggttgagctagtgcaacagatccatgagaatgcgaggagaaacatagaagaaaagaccaaactctatgctaagcaagctaataaagggaagcgtgaacaaattttcaaatttggagatatggtgtggattcacttaagaaaggagaggtttccagctcaaaggaagtccaaactcatgccaagaatagacggtccattcaacataatcaaacggatcaacgacaatgcctaccaactcgatctgcaaggtaagtataatgtgagttatagcttcaatgtttctgacttggtaccttttattgcagatgaaccggatttgaggtcaaatccttttcaagagggaggggatgatatgatcatggatagcattaacgatatggagcatgaaccggagcatgaacgtgagcttgtagccgaggaaggagctaagcttgtagctgaggatgagcttgtagctgaggagaagcttgtagcggaggatgttcttgtcacaccggccgtcccaatgactcgttctagagctaagctattcaaccaagccattggcgggatgtttaaccacatttgggaccgaccaaatgacttgagctaagtcgcta

SEQ ID NO: 173723 - DNA, 446 bp, Arabidopsis thaliana landsberg
gcaacgatgctggttagtcagtctgttgttggccgcgccaacgcgaagaaggcccatggtatcgtgggtatgctgcagaacccttatgtcttctcgacctgtctgttcgcttccctgggttgtatcatgtacggttacgatcagggtgtgatgggtcccattcttgtcatggagaacttcaagaaccacttcccttacttcgatggatcgactattcagggttggctcgtgcctgcgttggagctcggtgcctgggctggtgctctgatcaacggtgtcctccctgaccgtatctcccgaaagtacgccatgatggttgccgtcgtcatcttcactcttggtactggcctacagtctggtgcccagacccccgcctacttctttgccggtcgtatcaacgaaggtgtgggtattggtatgttcagtatggtcattcctctcttcca

SEQ ID NO: 173724 - DNA, 1075 bp, Arabidopsis thaliana landsberg
gagtttgcagagatgtttgaagagagaaccagatcaatggcatctgctcaggctagagaacttgagaaagagcgagaaaaatcagcaaatctgcagattttactacagggtatagagtaacacaattagcttggctgattctttttatctatcttatctgttattctctctcattaaccttgctttaatcagaggagcggaaacaaaatgagactttcaaggaggaactccagtctctgaggttagataaggaaaaagtaagtatttaatctttaagaactttatttttttttgttacttaggcatcaccaatttcacactacagtattgtcatctgattaatgagaagatatttattccaaccccatgcccacactcatggagagtaacaaagtaaatcgtgaattggaagcaaaattggctgaaatcagacaattgcagatgaagttgaatggtggggagcagcatgctgttggaatttccagagaaaatctaaaagaggttaacaaagctctggagaaggaaaataatgagcttaaggtcatacaaacttttaattttcttggcaaggaatttttcatttttggttttcctctgagctgcggactctgaaactgatctacatttcgttatgttgtgtagttgaaacaaagtgaattagaggctgctttggaagcaagccagaagtcaacaagtaggaaactcttcccaaagagcacagaggatcttagtagacaccttagtagtttggacgaggttctttaatgcaaacttttaattcagttagccctttaaccaaaagaaacattgtttatatgcgaaattgaagtatggggcaagcatttatttactgtaccttctgctatttctcatgtataaataggagaaggcgggaaccttccctgggaaagaagatatggaaaaatctttgcagaggctggaaaaggagttggaggaagcacgaagagaaaaggataaggcacggcaagaactaaagcggctcaaacaacacctgttagaaaaggttatttatcctactcatattcagttttatttattttatattacctgaata

SEQ ID NO: 173725 - DNA, 1577 bp, Arabidopsis thaliana landsberg
  unsure (1)..(1577): unsure at all n locations
tcttgaaattctgtcaaatatctagcagaagacaaaacgcaaagctaagaaggtanaaccaatagctgactgcaaacttacggtgaagccttgtgaagtcgacatgtttgaagaggtactgcaaatccatcttcatggctgaattcttctattttttgtttcaaactgtttgtgaaggatattaacaccctgcttcttgaatttttgccaaatatctagcaagagacaaaacgcgaagctaagaaggtgaaaccaaaaactgactgcaaactcacagtgaagccacgagatgaagtcaacatgattgaagaggtactcggacctcaccttcatggctggattcttgtattttatgtttcagaatgtttgtgaaggatgtaaacatcctgctgcttgaacttctgcacaatatctagcaggagacatttttctaaagctctgtgtatggggaaattcagtgagaaacttaaatctgttaagagtatttcgaaggcatagtttagtgttattagaaccctagtaagctagtattttcattgttgctccttgttgtttatcagcagagaagctgttcatacagagatagagccgctgagagaagaaatttgcatggtggatatggtgttggaccaggtcaaaaaggaacaacagtggaccataacacggacgagcattcagttcccgacactggttctgaagaggatactgtagcagaagcattggagctatcatttggatctggaagttatgcaaggaggataatgggaaacatgggttggaaggaggtaacttgtggatcttatcacttgtgagttgtgatgttatttggtgtcaccgtaatttatgattactggggaaatgctaatgcagggtgagacgctagggaagaatacaaaaggtttggttgaaccgatacaagcagtgggcaacactgggaatgtagggctaggatttcctcaaaggagaaggaaataatatgaggtacaagatattcagtttaagggactcttagtgttcatatattacttgagaaattgagttactatataaacttggattggcttataacaagagaggttgcaataggtagctaaatttcatctagacttgtaagagttgagaatcatttacttgctgattttgagaaatagaatgagaaatcgaagtaccaagcaatagacaagttggtttcgatttttattggaccaagcaatagaactgtatcaagaaaacaacatatcggatttatggtccattttctcttggtcgacaattttttgaaatggcgcgacgttgaacaaaaattatacgaacaaagaaagctatttccaggtgactgcctttatatttggatgacttgttccaaggggaaacttttttttttttgtctgtcatctgatgatattagaactttcaaaggaaccaagatgattacaacagctacactataatctataaccatcatgccattggacgcatcctagtaaatacataagaaagactcttccctttattttggtctccgttcttcagccacaccttataatatcatccacaagataacaagtggtgtctag

SEQ ID NO: 173726 - DNA, 1105 bp, Arabidopsis thaliana landsberg; identical to SEQ ID NO: 15952

SEQ ID NO: 173727 - DNA, 856 bp, Arabidopsis thaliana landsberg
tgtgtcacatgaagtttctcttgcatccgaagcagagttgcacaatgacgataaagtaagctgagccgattcctgggcatctgctttactttcagagttggacaatttcaagatccagaagcaaatgggcacgagtttggttggaacccctagagcttcatagatgaaagtaatggatgattttgctgaaatggagaagcttgcaatggttgcaagcacaatcgataaccgacatggaagttctcctatttgttcttctgattctatttcagctactggtccggtagagaacgaatttaatgagaattcatcagaagcaactaaaacttctggaacagtttattcattgaatcctgatgcatctcccaaagatgatatcaagtcagattcgttacctcaatctcttcatatagtcttgaaagcggtaatggagcataagcatatcacgcagagaaacactgatgaagtacttgaagatatcagaaaagctctgtcaagtgtaaaccattcaagcttttctacaaaccatcaggagactaagactcttactgtggaggatagactggatatggagtgtaatatcagcaaatcaattcacagaatcattgacgttatcgagggagtcagtcgtaaagatgagaggcatgtgtccaacagagaatcagaaaggctttcaggttacactgctcgcgtcttgcaatggaaaactacagagctaagtagtgtattgcagcgatttcttcaagcttgttacgatctattagacagaaaagcagacatgaagaagtttgctcaagagctaagctttgtgatggaatggatggtgaaccactgtttttctctgcaagatgtttca

SEQ ID NO: 173728 - DNA, 541 bp, Arabidopsis thaliana landsberg
tttttgtgaagcaagggctttcattactttaatcagctgatgaagaaatttgatgtccagcctgatatacagcattatacatgcattgttggacttttgagcaaggctggaatgttcaaggatgctgaggatttcatgagaacagctccaattgaatgggatgttgttgcatggagaactttgctaaatgcttgttatgttcgccggaattacaggttaggaaaaaaagtagcagaatatgccattgagaagtatccaaacgactcaggagtttacgtattgttatccaatatccacgccaagtcaagggagtgggaaggtgtggcaaaagtgcgttctttgatgaataacagaggtgttaagaaggagcctggagtaagctggatagggatacgtaatcaaacccatgtgtttcttgcagaggataatcaacaccccgagattacgctgatttacgcaaaggttaaggaagttatgtcgaagattaaaccattaaagtattcgcctgatgttgctggagctttccatgatgtcgatgaag

SEQ ID NO: 173729 - DNA, 309 bp, Arabidopsis thaliana landsberg
aaaattggtagattcaacaacaactcctggagaaacaagagctctgcttcttctggataatgcgccaacacaccagtctctgctagcacggagagtaatgaaaagactgagcagtgatacaatgtttctgcctccctatacgccagagatggcccctgtagaactaatttttaaggctctgaaggcgaagttgagagcagatgtagcgactgagcgtattaatttttcaaagaaggaaggagcagtaattattttaaacaccctgaagagtctgagtgacagttcctggtgaagagcgtggttagaagt

SEQ ID NO: 173730 - DNA, 1535 bp, Arabidopsis thaliana landsberg; identical to SEQ ID NO: 27284

SEQ ID NO: 173731 - DNA, 594 bp, Arabidopsis thaliana landsberg; identical to SEQ ID NO: 3081

SEQ ID NO: 173732 - DNA, 499 bp, Arabidopsis thaliana landsberg
  unsure (1)..(499): unsure at all n locations
atcaccggaaaagcggttatgctcgatgaaataatcaactatgttcagtcattgcaacagcaagttgaggtaagattatcccagtaatgcgagattcttgaaactctcaagttagtttggtgtgaaagaggttttcattcttgaaaaactgcttttattttcttcagtttttgtctatgaaacttgcgactgtgaatccagagatcaacattgatatagacaggattctcgccaaagatgtaagagctcaaaatcccccataacttcacactgaaataatagtttgcaagttttgaataagagtactaaacttgccatttttctcattttagcttctgcagtcaagagacagaaacactcctacactcgggctgaatccttttgccggttttcaagggaacataccaaacctttctgccaccacanatccacaatacaacccactacctcagggttagcacagcttagaagaaataaacacatattatgtcaatgtttg

SEQ ID NO: 173733 - DNA, 940 bp, Arabidopsis thaliana landsberg
atggaaaaagaagaagtatctctacctcttggatacaatcaccaaagcagcagaaagatggacaaagaagaagtatctccacttcctccgcctcttcctcctcttggatttggacgatatcaaaccagaaaccacaaaaagatggacaaagaagaagtatctccacctcctccgcctcttccgctttttggatatggacgatatcaaaccagaaaccacaaaaagatggacaaagaaaaagttcctccacctccttcacctcatccacctcttcactcccttccatcaagcaaacctgaagtaaaacctcaccctcgtcctacaggaaacccaatatgtcctgtgtctcatccaagtcaacctcacaccctctctcttagatctggcagaaacaccaagtttgattgtttttcatgccgcaaacatatgtctcccttgacttaccataattaccattactactgcaagacgtgcgatatggagtttcaccatggttgtcacacgtttccaaggaagttaacacatccttatcacctccaacaccctcttactttcaccttcaggaacaatgaaaccggattcctatctgatggcaatatagatgtatccttttccactacactttcgtcctactccaacctgcctggatccaacaaatctgatcataacaagtttgaatctacggaatctgatcaatgcacatggtgtggaaaatatatccaaggcaattggttttatcattgtcctatatgcaacttttgtttggatctctcttgctcccaacaaagtgttccacttctcctcgtcgcgaaaccaaagagtcatcaccatccactcgtcttctacacgcgaccactcttgactccatgtgatgcgtgtgggttggtcaatgtgttggagcccagctatgcttgttttcagtgtaattacatggtgcatc

SEQ ID NO: 173734 - DNA, 939 bp, Arabidopsis thaliana landsberg; identical to SEQ ID NO: 13561

SEQ ID NO: 173735 - DNA, 718 bp, Arabidopsis thaliana landsberg
aatggaattcacaagcaagcgaagaagagaaagacaaagttatcttgacttctctttacaatgatctccttggtcgtactcctcaattcgaagagtctccaaaagctttagaaaccaatgtagtagaggaagaagaaaacaaagagaaggagtttcttggagaggaagtttctcgtgatttgggtcatcttaacgttgaagaaccaatggtttgcaactgtgagatcaaatatggagaatcagatggtaaagtagagatgaaacaggagatgagtaatgctaatgagcatgggatttcagagattgagagaaataagagactagagtctttaatcgctagaagaagagcgaggagacgctttagactagctttagatcaaaagaataagcttcaagctgaagaaacaactagccctagacagaacaacaccaacaaccttcacgttacgggttcgaggaactcacttgaaaaacgtcgaaataattcatcagatggtactactgttaaaggattacagattccaggctcagctcccttctgtgatgttacaaggaaggaacccctttgacattccttatgatcctccagaagaaagaccttattttactggagatagctttgatcaagagttttcaatggtttaatcaaaaggtttgttctttgtcgtcatgagagcatctgtcgtttgtctgtgttctcaccagaacatgttcagtg

SEQ ID NO: 173736 - DNA, 343 bp, Arabidopsis thaliana landsberg
  unsure (1)..(343): unsure at all n locations
ttgggacggaaaaccgtccggcgggaccgtgatgcatcgccgggacggactcgacccgagcggtcccgtccgactgcggtttcaggccctaggtgcaagcacggttccaaatgacatggcgggagcgggactggggctccgatcggtaccgaagcgacggccgacttatgccggtcgacggcatcgatcagttgtctgatggtgatggcatatttctgggtgcggtcggaacgcccgacattcccgatcacgtcaccctttggggcttactgatcccaatcaggcgagaannnnnnnnnnnnnnnnnnnnnnnncccatcaggctcttgaagggtctgaaatt

SEQ ID NO: 173737 - DNA, 524 bp, Arabidopsis thaliana landsberg
aaaaaactttcatccataaaagaattgctgccggtactggaaaaaacattgcaaacgggccatccgctgctcattattgcagaagatgtaaatggcgaagccatccagacactggtggtgaacaaactgcgcggggccctcaaaattgcagctgtaaaagcacctgcatttggcgatcgcaggaaggcgatgctcgaagacattgccattttatctggcggtgtggttatctcagaagaaaacggctaccgcatggatgctgccgagctcgggcatttaggtcgtgccgaaaaagtggtgatcgacaaagacaataccaccctgatcatcggtgcaggcaaaaaagaggacatcactgcccgcatcaaacagatcaaagcacagattgaaaccactaccagcgattacgacaaagacaagctcaaagaacgtctgggtaaactctcaggtggcgttacaatattgtatgttggcgctgcgaccgaagtggaaatgaaagagaaaagagaccgcgggaagatgcg

SEQ ID NO: 173738 - DNA, 355 bp, Arabidopsis thaliana landsberg
atggaacaaacaatggttgcagcacggctgcatgcgctcggcactccgatgacgctcgacacgatccccatcccgaagccccggccgacggacgtgctcgtgcgcgtcaaagcatgcggcatcgtgccgaacatggccaacgtcatcaacaattggcccacttggtttccgcaccagccgctgccgaaatttcccgcgatttttggcttggatccggccggcgtggtcgaacaagtcagcgaagccgtcatcaacgcgaaacccggcgatagcgtttatgtgagcccgccgcactattgctgcttgagcgaagcaggccatgcaggccacactcaaatagtagcggtaactacac

SEQ ID NO: 173739 - DNA, 865 bp, Arabidopsis thaliana landsberg
ttggtgtcgctcgacaccaggggtggtgtcgttcgacacctacgcggattttagtctgcaaaactgcttctgcaacttaagttgtctgttttgctccatagaatgctccataatctccaaatgcattccaaacatgtaaagacttgaaaagactgtagaaataacaaaaggactctaaaacctatatctaaatcatagctaaaagcagtaaaaatacggttatatcacaaagtatacatgtgtagttactcaaaaagtagataaagtgttgacgaaaaaccttgcaaaagtcagaggaagcaaagttggaaaagttaacacttggagttatgaaattgtggggctgttcaaggggaagcatcatgtctgtcttgaccgtaaacaatgtacttgcaaggagtacaataatttaaaaattatatgtggacatgctatgttggcagctactagtgttggtcagtcatatgaatccttaatagtagacttttacaagacaacaacttggaaagcaacttacaaggatgtaataaatcctgaactcaacctggaagacgttgttattccaaatggaattgaaagtctgaatatattcctcccgaggacaagaagggcatctatgagatccaaacatctgcgaatcaaatccattggggaatttccggttcgtatttgtgcaattctcattatttaattggaatattagttcatataaatattcagaaattgattacttcttttatgtgatttagcagaaatcaaagagtgtgaaggtgaagattaataggtgtgcccgccccaaaaagactggccacaacaagaaaaaaatgaactaatccaatctgaagacgttttaaatcacatccaa

SEQ ID NO: 173740 - DNA, 1503 bp, Arabidopsis thaliana landsberg
cagaaattattaggtattgtaaagaacgtggtttgaatcctgatgatactatgatagaccatatattatatgtcgtgttttcaagattaaccttgattcacttatgtttgatttgactgaaaaacatcttcttggaaaactgtcgcaggtaagttatctatatatttatttattgcttaatatatatacatatatatcttaaatagttttgaaaagtaatgattatatttttctcatgcagctatatatacagttgaatttcaaaaagaggtctgccacatgctcatatactgttattcatggcatctaggagtaagctaccatcttctgaggatattaacaggataatttgtgctgaaatacaagacaaacaaaagaacctagaagtttatgaggtcatcaaagagtcgatgatacacggcccttgcggtgcagcgtttacaaatttccatgtatggtagatggtaagtgttcaaagatgtatcctaagcctcatgctaacttgatctaaagtaggatatcgagctcatatcaatgtggagtggtataatcaaacaggttccatcaaatacttataggaggcgggagacataagattttgttgaaaagtgtggatttaagtgtgacaacaggtatgttgtaccttacaatgggaagttatcgttgcgatatcgagctcatatcaatgtggaatggtgtaatcaaacaggttctatcaaatacttattcacgtatattaataaaagacctgatcgtgttgttgtggttgttgagcctataaacaagagtcaaacttcaaatacagtttctgagaacattcctaaataagataagcaaagaagaatgaaatcaaggattactttgatcaaacttcaaatcatgttagcaagaaacaatttgttatataatttataataaggatattttatattaaaatttctttgtttttgtaatcatttgcggatatgtatctgtttcagaagcaatatagaggatttttaaattcccaattcaatttagaactacactggtgcataagctttctttccacaaagaaggaaattacccgtgttgtttcgatgaggatgaagatatttaagatgttttggaaaaaaaaaaatgaagattctcagtttactgcttggttgtatttgaatcatgacaattttgcaaagaccctcacttattctgagatacgagtacattatacttgggatgggaagaacaagcaatggaatatatgtataagaggattctctttaggtaggataaattacgtcccacaaaaaatggaagctgaatatcttatgcgtatattacttaacatagtacgagatcctacatgttttgatgatatcaaaacattcaaatggattgtttacgaaacatttaaagaagcatgttaggcacttgaaattttagacgatgatcaaattatattgatggtatcgttgatgcaagccaatggttatttggagatgatctttagaatctgtttgctaa

SEQ ID NO: 173741 - DNA, 1006 bp, Arabidopsis thaliana landsberg
cacacattattcttatggaggaggttactgtggcgattcatggctcagagtcttctccatgttcaaatgatcttgaaggtgattcaacagactctgctcttcgacttctgcttgatttcccgataagtgatgttgatatgagcttcttggaagatatttcagtttttagttttttacactttctgtagcaataattacatataatgtttgatatacctctcaagtaataattttcatgtaacttttttttttttttcttttttttttcatttttttcatgtaacttgatgatcaatgtaacttgatgatcagtacatctggaaagaaaggagaaagccgaaaaagaagctaaatactatgccactttgcggctgtatcttcaagaagaagtgaggatccgatcattttaattaagtttgcttacataatttattacatggatttatttttttaactgaataaacgttttgtttggctttcacttttttctttgtgaaaacagttggttttcgtcgaaagactcaaacaaaaacatattcaagcatcgcaggatagagatttcgccaccgcccaaaagactagacaattttgtttcttcttcattaaagaaataatactttaccccaaacatagataaattatgtatgaatgacgattcgtaggttgatgaaatttcctacaatttatgcctagtttcttatttactatctgcgttgactcgatccctgcccaaatttcttaacttggagaaagctgatacattaatcatagtagaggtaaattgattagtccttcttctccatgttgtttgacttacaacacccaagcaagtgactagtcaaatctctttgtctaattatttttaaaaaattcttttcaggatttcagattattttttattttcagaatttatttagtttacagagaaaatagataaacccaattagatatagaaactatgaaccctaaaaagatcaactcatctattgctaaagtcaccagtttt

SEQ ID NO: 173742 - DNA, 1165 bp, Arabidopsis thaliana landsberg
ataccacataccagacctttcaaagtccttaattatttatgtaatgcttcgaaaatggagttggcgtttttgttatttgaagaaatgaaaaggggtggccttgttgctgatgtctatacgtatactattatggtagatagtttctgtaaagctggtctaattgaacaggctcgtaagtggttcaatgaaatgagagaggttggttgtacacctaacgtcgtcacatataccgctcttatccatgcttatcttaaggctaagaaggtcagctatgcaaatgagctgtttgaaacgatgctgtctgaagggtgtctccctaatattgttacatattctgccttaattgatggccattgcaaagctggacaagtggagaaagcctgccagatttttgaaagaatgtgtggcagcaaagatgtcccagatgtagatatgtacttcaagcagtatgatgacaacagcgagaggccaaatgtagttacatatggagctttactggatggtttctgcaagtcgcatagggtcgaagaagctcgtaagttgttggatgctatgtctatggaaggttgtgagccgaatcagattgtatatgatgctctcattgatggactctgtaaggttgggaaactagacgaagcacaagaagtgaaaactgagatgtctgagcatggattccctgcaaccttatatacttacagttctctaattgatcgttatttcaaagtcaagcgccaagatttagcctcaaaagtattatctaagatgcttgagaattcctgtgcgcccaatgtggttatatacactgagatgattgatggcttatgcaaggttggtaaaactgatgaagcttataagcttatgcaaatgatggaagaaaaagggtgtcagcccaatgttgtgacatatacagcgatgattgatggatttggaatgattggtaaaatagaaacatgccttgagctcttagagcgaatgggttccaaaggtgttgctccaaattatgttacttacagggtcttgatagatcattgttgcaaaaatggtgcactggatgtggcccacaatcttctcgaagaaatgaaacagacacattggcctacacacacagcaggatatcgcaaagtcattgaaggattcaataaagagttcacagagtatctaggga

SEQ ID NO: 173743 - DNA, 360 bp, Arabidopsis thaliana landsberg
atggacatattcaatggattgccagatgatgtgctggtgaagattttatcgtttgttccgacaaaagatgatgtatccacttccattttgtctaagcgttgggagtttctttggatgtggtagcctagactcgatttcggttctccaaagactgatcttctggcttttctcaacacttgtcaatatgataaggaggaggaggttggacttgtggattttattgacaagaagctgccactacacagagctccggtcttagaaagcttgcgactcaatttttatctttatcagtataaaacacatattgaacctgaatatatcaaacggtggattgaaattgcagtttctcgccatgtacgt

SEQ ID NO: 173744 - DNA, 844 bp, Arabidopsis thaliana landsberg
tgacatagcagaagggatgaaattcattaatgatcatggtgttgcatatagagaccttaacacacagagaatactattagataagcagtgcaacgcttgtttgggtgatttgggaatagtcactgcatgcaagagtgtcaacgaggccatggagtatgaaacggatggctatcgatggcttgcacccgaggtctgtatttctttgacgctttccctgcataaatcatagttcattgatttgcctcaagattcatgcttaccattacctcatcatatgtgatccgtaagccaataatacaaaaaaacattgcctggtgattggatgatgtaattatacttgtaggcttcaaggtctagcttttcggttatagatgcaataccagacatctgaaagctacctacatgcttcaccatcactaattctccttgtccaattatgcataagtagattctatttggaaaagcagttgttgactgtagtttgtgaatggctgaaatcagataatcgcgggagacccggagaagacaagagagagttggatgagcaatgcgtatagctttgggatggtgctttgggagatggtgacaggggaggaggcatatgggtcttgctcaccagtgcaggcagcggttgggattgcagcgtgcggactaagaccagatatcccaaaggagtgtcctcaagtcctcaaatatcttatgatcaaatgctggaacacttgcccttccacacgccttaacttctctcaaatccactgcatcttgctccgtgccatttcacggtaacacattctcttctacataggaattggaagagtgcctctttttgaagaaatgtttagca

SEQ ID NO: 173745 - DNA, 1095 bp, Arabidopsis thaliana landsberg
ctgccatatcgtccttatccatcccaaactggcactacgctatgctctgtttcttcatgctacaatcagtgatacgtctttcttcacgttgatcacattcttctctatcccaccaattccgatgtccctcgccgtcaaggatctctccaccgcttcatcctcttcatctaaggcgattccggtcaagatcattcctctccagtatcccgattccacctcttctgatcctcactgtcactccattccctttaatgatttcttctcccgatggacggcgaagatcaagcgcatgacgttcttcgactggattgatgcaatatttccttgcttcctttggattcggacttaccggtggcatcagtactttaagctcgatcttatggctggtatcaccgtcggtatcatgcttgttccccaggtcattttctgtttcttcatttccgattgattgttgattctatcttccctgaatttataccatctagagataagcttaagtgaatcacaggaactctaatgagtatgtttgttcttcttgtttaagtgagtttagtttctaaaaacttctgttttgatggatttgagcaggcaatgtcgtatgcaaggttagctgggcttcaaccaatatacggtctatgtgagctcaatatgaatatacccttttatgaattcatcaatgtgtgtgagagatactaagctattcccacttttgcatgtagttattaatcttgtttggtgcagactcctcatttgtgccggtattcgtgtatgccgtcttcggttcatcccgtcagcttgcagttggacctgtagcattagtttcccttctcgtttctaatgccttgagtggaattgttgatccatctgaagaattatacactgagcttgccattttgttggctcttatggtcggaatatttgagagcattatggggttcttgaggtatttatagtcttctctttgtttgtgcaaggaatcctgtattttttgtagtgttagaacaagttgttcgtttgttttttcaacccaggcttggatggcttattcgtttcataagtcactcagtcatttctggatttacaactgcttcagct

SEQ ID NO: 173746 - DNA, 343 bp, Arabidopsis thaliana landsberg
aggggataaggtagtctggattgatctcgtgcgcgaaagtgcggttataggagaaggttgcttgataggacctgatgtggtgattggtccgggatgtgtgattgattcaggtgtaagattgtttggttgtactgtaatgcgcggtgtgtggatcaaggaacatgcgtgtatctctaatagtatcgtgggatgggattcaaccgttggaaggtgggctcgagtttttaatataacggttcttggcaaagatgttaacgtcgccgatgcagaggtttacaacagtggggttggttatcgaagagcaaggtctgtgaaaccagagcctagacctagattagttagt

SEQ ID NO: 173747 - DNA, 885 bp, Arabidopsis thaliana landsberg
attagcagtggagacttgcaaagctgaagagattacgtgcgaagagaccaagccattcacatgtaaccaaactgatcgtttcaacagaaaacatttcgatgatgatttcatcttcggtgttgcatcttctgcttaccaggcatgcaacagatcacatattctcccaattttgacgtaaaaaacaattcactaacactaaattccaacgttgcatggttgttttgtttcacttcagatagaaggtggaaaaggccgtggccttaacgtttgggatggcttcactcaccgatatccaggtttgtcgtttgcatggttgatatataaaggcttacatatttatacgagagaagtgtcggtacgttatctctctatacattcatagtaatgtctttgtacgctaccagagaaaggaggacccgatttagggaatggagacagcacttgtggatcatatgagcactggcaggttaatacgtgtggaattactgaatttagtcactgaatttttatcaactacgtgtggaatttacatgtgattatttgtattactacagaaagatatagacgttatgaccgaactcggggttgacggctatagattctcgcttgcttggtcaagaatcgctccaagtatgtacacattaatccatgcatgtatatatgaatatatattgtttgtcgtaaaaataaatctacgatctatatgagcaggaggaaaggtgaagaggggaatcaaccaagcaggtgttaagtactataacgatctcatagatggcctcctagcaaagaatataactccttttgttaccctcttccattgggaccttcctcaagttctgcaagatgaatatgaaggtttcttgaaccatgagatcatgatgttag

SEQ ID NO: 173748 - DNA, 481 bp, Arabidopsis thaliana landsberg
  unsure (1)..(481): unsure at all n locations
agtttttaacgtcctgcccacgagtcactcgaatgagacttcaatgagcgaccctntgtgcaagcaccctctagtaagaaaggttactttcactgggagcaccaaaattggctccctcatttccaagcattgtgcagaaggtgtcaaaaaggtgacaatggaactcaggggaaactgccccttcattgtcttcgaagatacggatctggacacgctgtgtcagagctcatgaccctgaaatggcggcaggttggccaggcatgtatcacggcgaaccgagtgtatatgcaggcgggagtgtaggacgagtttgcccgcctactcaaggagcagacggacattctggtccatggccatggcgctgctccaggaactaccattggtgccttggctgttgccaccggcgtcgaaaaagctgagagtctcgtcaaggaaaacatagagaatggcgccattctcctctctggtggcaaaggtagta

SEQ ID NO: 173749 - DNA, 690 bp, Arabidopsis thaliana landsberg
  unsure (1)..(690): unsure at all n locations
acgccatgaacttaaatataagtaggtgtaatatctttcattatatggttcattattaatagttggttatagtagaactccgatgataatatataggcgtatgacttgtcttacagaaaagggtgtgacatactctcagtttttcaaggatgagaatcatatttggcctaaagggtatttggcaatgagaaagttcacatcactcacaggttatttgttaatcagtttttggcttttacttataaatcaggtatttttccatatttggttaattgtgattagttctcaatgtgatgtgggttgttgcttttggttttaagcagatcatagtgcatctgccttgtacaagatggaagtgctcagagatgccgagacaaagactcatccgctgtttatagtgactgcagatagtggagagcaggtgagttaaacatatctattagtatctgttttattgaactttcaggtcaagaatctatctctggctaacatcggtaactaattttttggcagttcaaagnnnnnnnnnnnnnnnnnnnnnnnnnnnnnatatataacaggataaaaaaggtccagaattctgacagtcctaatattttgggtgaagaactaaatggatctggtacagacatgtttggtctctccaacccagaagtcattaaacttgtacaggtaccttgtcattgcatg

SEQ ID NO: 173750 - DNA, 663 bp, Arabidopsis thaliana landsberg
atggaatcgcttctcctaatagcttatgcttttctctatttattccttctctctcacgtattctcaaacaagaaacatccaaataattgctaatcgtgcatataattaagtaattaccattccaacttacacttaaacacacatttttcacggaagaggaggcagagtataaaatcaatgccgatcagtcggaaaattctaacgtgggccgttttggtggcaattatggccgtcctggtcgtcttagtcggtccatacatcattggaccggagagtatagagggctcgaaaaacgtcctaaccacagcgaggacaatcctccttcccgtggatggaccggagagcctggactgggacccaagaggagaaggcccatacgttggcgtcactgacggtcgcatcctcaaatggagcggtgaagatcttggctggattgaattcgcctactcatctccccataggtttgttttatttatggatgaagtcatgcaccaataataagtagactgtttcaacgcaaatatttgtgtttgattatattactggttaaaattttatatttatatcttggttattatatatttatatctttaacaaacaatatacacatttttttggtaaatttaataatgtttgaaaacacttaattgtcaataacattgg

SEQ ID NO: 173751 - DNA, 619 bp, Arabidopsis thaliana landsberg
gaatcgatcactcaggttgagaaagcttcagctatggtgatgtctgaccttaaggcgatagcagagagtatgataagttgcggatatggtaaggagtgcgtaaagatttataagcgggtcagaaaatcgattgtagatgaagggctgagcttgctcgggattgaaatctacaaaggctccagatttcacagaacggactgggtcacgctcgagcatatgatcaagaactggataaaagctgcaaagattggcgttgccacgctctttcgtggagagaaacttctttgtgatcatgtcttttctgcttctaattcaacaagagagtcatgcttctacgagattgcaaacgaagcagccactaaccttttcaagttccctgaatttgttgccaaggagaagaaatcgcatgagaggatcttcccgctaatggatctgcaggctgcaatctctgatctctggcaagacatagagatgatattccactttgatgcagtagctggtgtgaaatctcaggcgctcacatcgctgcaaaaactaaaggtatcaatacacaaaactgtcacggattatgaatcaatcattcagaaagatacgacgaaagctcttacacctgaggagg

SEQ ID NO: 173752 - DNA, 518 bp, Arabidopsis thaliana landsberg
gcattcctgcggccacgcgtacccgaccaggtgctatcgctgacgaccgacgcaacaagtcccggccacgccgacgtcgccacgacgggcgcgccgctgtccagcaccttcaccttgcccaccaatgtcgatcgcgcctacatcgagatccccgcacagccgcagtccggcgacgagttctggtactcttgcggccccgaccagtacgtcgacctcacgggctgcggcggcacggcgttccgcgaggccgaggtggccatcgacggcaagcccgccggcatcgtgccgatctcgggctgggtgttcacgggtggcatcgacccgtacctgtggcggcccattcccggcgtgcagacgctcaacttcgcaccgtacaggatggacgtcacgcccttcgccggcctgctcgacaacggccggccgcataccatcagcgtcagcgctcgtaacccgtgatccgtccttccagaacaacaaacagtatttcgacaccgccgcgacgctgttgctgtaccagg

SEQ ID NO: 173753 - DNA, 1441 bp, Arabidopsis thaliana landsberg
aattctctctggttgttcaatgcttaagaactttccttccatcaagaagggcatgaaacacctccagattttactttttgatggaacaggagcagaagagatgccaaaagtatcatacttcactagatctgaaggccaagctactggaagtatcatcttacagcagcttgggtcattcctgcaaagtagtgttaatagagtctctttcctgcaacgtttatgtttaagtggaaatgattttgtgagcttgcaaactgacatcggacaactctatcacctaaaatggcttgatgtgaaacactgcaagaagctgaaatctgtccctttacttccaccaagacttcaatcatttgatgctcatgcctgtgattctctggaaaagattgcaaatccgctggctcttctactggtgacggaacagatccataccaccttcaatttctccaactgctacaagttggatcaagaagcaaaggatagtatcatctcctatacccggaggaaaagtcagttagtgctagatgctctctctcgatgcaatggggtatgtttatttctttatatcattatccacacttcctagcatcatccatgatatctgatattgttttggctttttattgttttggtagggtattgtgtcagaagctttggttggaacgtgctttcctggctgggaagtaccagcatggtttggttaccgagcttctggatcaatgttaaagccaaaactgcctccacactggtttaataacaggtttactgggatagccctatgcgctgttatccagtttcctgaagacgacggccacaataatcttttggtgcaatgccactttgtgttcacgaatgaagatggtattcgtagttcttttagttgcactattggaggttggagcatatcaagtaacatgcaacagagaattgagtcctctcatgtctttattggctatgtgcgtaggttcgatgtcaacaaacaagaggaaagatgtgcatctagtgaaacctcacttgagtttcaagtgacagatggtatgggagaggtagtagtaggttgcgaggtgctgaagtgtggctttaatttggtatatgcacctgatgaaagggataacataatatgttgggatgcaaaggattttgcaattgcaaatagggtagtgaacgaccgaggtgaagcatcaaagatatttgaaaagtccttaagtgatggtggtatctattgtcaaccaaactctcttctatctcaagcaaaatcatatggaaggttgagaaatgataacaatgtcctatatcagtattccaaaagtctaaatccagagagagccaagaatgttctagttgaagtccctcattttggtaatggtaacatccgaaggaataatgatatcaagtataaccatcaggtcagtgatacagtaacgagagtagtaatacgtggacg

SEQ ID NO: 173754 - DNA, 782 bp, Arabidopsis thaliana landsberg; identical to SEQ ID NO: 16801
  unsure (1)..(782): unsure at all n locations

SEQ ID NO: 173755 - DNA, 297 bp, Arabidopsis thaliana landsberg
ttctattcgagttgataatacagaatgcccagaattatctgcgagaaaggcaaatgtacccatcttcgataaatggcccctactagacattactggcgaccaccaagtgccttgaccatattaggggaaatcaatttgccgtccagcctcgtcatcaacctttggttaatttcacatacaggtaatgttttacaagtaatgttcgatatctgaataaacacccaactttaatgttaactttgagaattataatataaaagcttcctccgttccctgattttcagatgcctgaacgcg

SEQ ID NO: 173756 - DNA, 313 bp, Arabidopsis thaliana landsberg
tccgttcttggggcactggcttcaggtgaaattgttttggcgaagaattatgcataaaaaccgttgtatgttttctactttaatcccgataggaacactctccgaagtgttgaaatccaaggtgttagagaagaggaagaatggtttgacgatcatacagttcattaattactttgtagaccatgtagaggatcttaggtttgatggtatgaagacaacatatgttgcaccatctttaagcccaccagaacagagcacatcatcatcaagtgaggacccttgctcacttggaacaagatcatttcgtagtagg

SEQ ID NO: 173757 - DNA, 529 bp, Arabidopsis thaliana landsberg; identical to SEQ ID NO: 81216

SEQ ID NO: 173758 - DNA, 445 bp, Arabidopsis thaliana landsberg
aacatgcaggtaatcaaatttggcggcagctctgttgcgggcgcggccaatatgaaaaaagtaatatcgatcgtgcaacgatctctcgacaaagagcccgtgatactggtggtttcagccatgggcggcgtaaccgaccagttattaaaaacaggcgaactggcatctgccggggacacctcttacaggcaattgctgaaagacatggaaacacgccaccttgatgctgtgcgtgagttgctgccgatacaacagcaaagcgctacgctaagtcttgttaaacagcatttcaatgagcttgacagtatctgcgatggcgtgttcctgctgggagaattatcctccagaaccaaagacaggatcgtgagttatggtgagaagctgtcatcactcattatttccgctgcctgtcattccatgcagctggaccagcactagctggact

SEQ ID NO: 173759 - DNA, 720 bp, Arabidopsis thaliana landsberg; identical to SEQ ID NO: 16591

SEQ ID NO: 173760 - DNA, 606 bp, Arabidopsis thaliana landsberg; identical to SEQ ID NO: 5696

SEQ ID NO: 173761 - DNA, 1508 bp, Arabidopsis thaliana landsberg
  unsure (1)..(1508): unsure at all n locations
gtatcatcaagcagtttctccaattgtctttgaggttcttgatgggtataactgcaccatctttgcatatgggcaaacaggaactggtaagacatacacaatggaaggaggagcaagaaaaaaggtacgctaactattccaagaacatcatttgaagtttctttactgatggtaactgaatcctcatnnnnnnnnnnnnnnnnnnnnnnnnnnnagaatggtgaaattccgagtgatgcaggtgttatccctagagcagttaaacagatatttgatatactggaagcacaaagtgctgctgaatacagtttgaaagtttcatttcttgagctctacaatgaagaactgacagaccttttagctccggaagaaacaaaattcgctgatgataaatcaaagaaacctctggctcttatggaagatggcaaagatggtgtttttgtccgcggattggaaaaaaagattggtgtgtactgctgatgaaattgacaaagtcttggagaaaggttcagctaagagacgcacagcagagactcttctcaacaaacaaagtagtagatctcattcaatattttcggttacaatccatattaaggaatgtactccagaaggggaagagattgtcaaaagtggaaagctgaatctagttgatcttgctggttcagagaatatttcacggtctggtgctcgagaggtacctaaaacagtcaggaaccatgattttttattgacagaataatagtgtcttaccttgatgatttactaaacaatataagagtcactattttgcagggtagagccagggaagctggtgagatcaacaaaagtttgctcacacttggacgtgtcataaatgctttggttgaacactctggtcacattccatataggtaacagaaagattctgccttcaatatctctctctcgggaagttttgagacaagatctaatgtttctaaccatgtgattatacacatttaaatttcagagaaagcaagttgacaagattattgagagactctttgggaggaaaaacaaaaacatgtgtaattgctacagtttcaccctctgttcattgcctggaagaaacactcagcacacttgattatgcacaccgtgcgaaacacatcaaaaataaaccagaggtctgtcaaacatatgctgctctattatttctgccagtttagttgtattaacacaccttctgcattcaggttaaccagaagatgatgaaatcagctattatgaaagatttgtattctgaaattgaacgtctgaagcaaggtatatatttgttacatattgatgatctcctttgcttattaaatacttatatgtgaatctcttgggttaactgtctgttcttgactgtatcagaggtctatgctgctagggagaaaaatggaatttatattccaaagaaaaggtatactcaagaagaagctgagaaaaaggtacagttcttattaagggataagtgccttagtcaagaaacaatttgtagatgt

SEQ ID NO: 173762 - DNA, 381 bp, Arabidopsis thaliana landsberg
gatccaaacagtgggaactggtggttgacttgcgaaaacaacgtgttgggttattggccgggtacactattcgcctacctcaaacatagcgcaaccgctgtgcagtggggtggagaagtacatagcccaaacgtggggaagaagccacatacaagaacttcaatggggagtgggcaatgggcctcttacctctgggctcaagcttgttaccacagcaacattagaatcaaggactattccttgcagatcaaataccccaaatatctgtccgagtacgctgatgagtacgagtgttattctacaaagctccaccggaaaacatacatgtcagagccctacttttactttggaggacctggccagaattctcgttgtccttaa

SEQ ID NO: 173763 - DNA, 1309 bp, Arabidopsis thaliana landsberg; identical to SEQ ID NO: 25984

SEQ ID NO: 173764 - DNA, 455 bp, Arabidopsis thaliana landsberg; identical to SEQ ID NO: 21098

SEQ ID NO: 173765 - DNA, 883 bp, Arabidopsis thaliana landsberg
ggttccgaatcgcttgggagatcgcttcagcactctactttctccacacaaacgaaccaagaccaatcgttcaccgcgatcttaaaccagccaatatcctcctagaccggaacaatgtgagcaaaatcggagacgtaggcctttccaaaatggttaatcttgatccttctcatgcctcaacggttttcaacgaaaccggtccagttggaacattcttctacatagatcctgaataccaaagaaccggagtggtaactcccgaatctgatatctacgcgtttggaatcatacttcttcagctagtcacagctagatccgcgatgggtttggctcattcgatagagaaagcgttgagagatcaaaccgggaaatttacagagatcttggataaaactgctggagattggccggttaaggaagctaaagagatggttatgatagggcttagatgtgcagagatgagaaagcgtgatcgtcctgatttagggaaagagattttgccggttcttgaacggttaaaggaagttgcgtctatcgcaaggaacatgtttgctgataacctaattgatcatcaccataacgctccgacccatttctactgtccaataacaaaggtaatgaatgatacgaaaatcttacattttatgtcagatttttgatacgttatgtgttttgatttggtttatggggtcattgatgaaattaggatgtgatggagaatccatgtgttgcttcggatggatatacgtatgagaagagagcgattaaggaatggcttcagaagaatcataaatctccaatgacggatttgccctttcctagtgattctcttcttcctaatcattctcttctttctgcaatcaaggagtggagatcacaacta

SEQ ID NO: 173766 - DNA, 730 bp, Arabidopsis thaliana landsberg
  unsure (1)..(730): unsure at all n locations
atcaacgaaaaagacatggatgacatataacccgacattgacatggaagatgttgataacaatggtagtgaggaaaacgaagatgacaacaaaagaaaaagaaacaaaagggaaggtaagaaaaagaaaaagaagagtaaagccgaagatgttgaggatgtgattgatcggtttgagttcgaagtagaagattcagtaggaaatttcgttgatgagttnnnnnnnnnnnnnnnnnnnnnnnnnnnnagttcagatgaagatgaagatccgattgttttgcgagatagaagaattcgaaggaacatagtcgatagattatctataggtcaattattcttcaatggtgttgagtttaaagaggctgtaattgagtatgctttaaacacagggaataatatagtttaaggaagatgggagaagacaaggcttgaattcaagtgtggtatcgtaggtaagtgtaaatggagggtgtattgctcttatgatgagccgagacatatgtgggtggtaaagacgacatatagaaagcacagttgtactctgaatgggagatgcaaaatactcagaagtcttgttattacaagacttttcatggacaagctaagagtaaatcctaaattcatgcgtaaggaaattccaaatcacattaaagatcattgaaagatagtgagttctaggggacaatgccagagcgccaggctgcgagctctgaagtaacttaagaaggagt

SEQ ID NO: 173767 - DNA, 628 bp, Arabidopsis thaliana landsberg
gaaaatgggagatggtgtaaaggttttcaaaaaagctaaaaagagattattacaagatggggacttttcatgggaagccatctgggtgtttgttgtttgagctatctcatatgttgaggaagaacactaatgagttgttgtggctggcttgtgtttctttgactgatcagtttgttcatgagaggttgactgatgaaagataccaagctgcggttatggagcttgaacaacatatcaatagctcagggaatatagataagatcacttctgttactctgaaagatggaactaaggttcgagcacctgactgttcaagaatctcttatgaagaagagcctaggcttatgcttcttagggagtggacgttgtttgactccatgctttgttcttcgtacattgcgactaagttgaagacatggagtgataacggtatcaagaaacttaagcttcttctagcgcgtatgggatttgcacttatcgagtgtcagcaaaagtttccgtacatgagccttgaggtgaagaggaagatgaagcaagagtttgatcggtttttgccagaatatgggcttaatgatttctactaccggagtttcttgcggcttcatggttatagctcaagggtctctgc

SEQ ID NO: 173768 - DNA, 1411 bp, Arabidopsis thaliana landsberg
  unsure (1)..(1411): unsure at all n locations
ctttttcctagagtctgttgaaggatatagattcttgcttactattttagagtactgtactcgaggaacanggatttatctgttaaggtataaaagtgcagcttcatcgaagtttcctgattttattagtcatgttagaactcaatataatgcagtcataaaagctattagaactgataatgcccctgagttagcctttcatgatttagttgcaaaacatgatatgttacatcaattctcatgtccttatacacctcaacagaactctgtagttaaaagaaaacatcaacatctgttaaatgtagcacggtcattactttttcagtctaatattccattagcttattggactgattgcattcatacagctgcttttctgataaatagaataccatatgttttgttagataacatgagtccttatgaaaagttaacacagaaaagccacaatatttgtttcttcgctcatttggttgtttgtgttatacttctacattgcaaaaagataggcataagtttagtctaagagctgataagtgtgttttcttaggatactcttcaggatttaaaggatacaagggtttacacttggatacaaatatagttttagtttctcgcaatgtagtgtttcatgaaaatgttttcccttttaaaactgataagagttacatgcaggataatgatcttttcagtgattctattctaccattaccaatagattcacacttgcatatggaaccaaactctgtaaatactaaagatttaggaatacattcatctcatgatactccatcatcttcatcatcatctcataatgcatcatcatcatcatcacaacctagtgtcacaaattcttttcttgagactgtaactacagggacaaccacggtttcattgcaagatgctagaccaaaacgatcgactaaggttccgggttacttatctgactaccattgtgctcttcttcaatccactacctcaccagaagtcctcacgactaaaccaaaggtcatcacgactccctatcctctttcttcttttctttcttatgcaaacataaaacctgcatatcaaaattttattctatcaatatcggttgagacagagccaaagaattttaaagaagctatagcttctgttcagtggactaaggctatgaatgtggaactaggtgctatggaattgaataagacatggagtgtagtttctttaccaccaaataagaatgtagtggggtgcaaatgggtttttactattaagtataatgcagatggctccatagaacgttataaggctagattagtggcaaaaggcttcacacagcaggagggtgttgattactttgatacattttctcctgtggctaagttagctagtgtgaaactgattctaggattggtagctaagaagg

SEQ ID NO: 173769 - DNA, 1166 bp, Arabidopsis thaliana landsberg
gatcaatcaaatttttttaagaaaacagattataaaactcggagaaggtagaatcaacgtccaagatttctcgaagacagaatcaacgactaagatttctcagaagctgagtgagacccagtccttcatcttcagccgttgatttctgattgtggtgacgtggaataatctggtcacgttggaagattaataagtgaatgattaaggttaagcgggaaattttttatttttagttaagcaatgacaaaacaagttcttccactgatagagaaaattcctcaatcgatcgttggattcttagaatatcattggtcttcttcgttgtcgaagacaacacaagctcatgctcgtatactcaaatccggggctcaaaacgatggctatatttccgctaaactcattgcttcatactcgaactataattgtttcaacgatgctgatctcgtcttgcaatcgattccggatcctactgtttactctttctcttctcttatatacgctttaacaaaggctaagctattctcgcaatcgattggtgtgttttctcggatgttctctcatgggttgattccagatagtcatgttcttccgaatttgttcaaggtgtgtgctgaattatcggcttttaaagtgggtaaacagatacattgtgtgtcgtgtgtttccgggttggatatggatgcgtttgttcaggggtctatgtttcatatgtacatgaggtgtggtaggatgggtgatgcacgcaaagtgttcgatagaatgtctgataaagatgttgtcacttgcagtgctttgctttgtgcctatgcgcgaaagggttgcttagaagaggtggttcgtatcctctctgagatggaaagttcaggtattgagacgaatattgtgtcttggaatggtattcttagtgggtttaatcggagtgggtatcacaaggaagcagtggtgatgttccagaagattcaccatttggggttttgtcctgatcaggttacagtttcaagtgttcttccttcagttggagattcagagatgctgaatatggggaggctgattcatggatatgtgattaaacagggcttgcttaaggataaatgtgtcattagtgcaatgattgatatgttatggcaaatctgggcatgtttatggaaccataagccttttcaatc

SEQ ID NO: 173770 - DNA, 248 bp, Arabidopsis thaliana landsberg
gaaatgacgcccgaccaacgtggcttcgtcacactgctgaagaaagaagtgatgcgcttctggtctgttttgggccagaccgtcatcgcgccggtcattaccgcgctgctgtatctgctggtgttcgcgcaggcgatgaaaggccgcgccccggttcccccgggtgtggagtacggcgattttaaggtgccgggtctggtgatgatgacggtgatccagaatgcatttgccaacaggtcgtcgagcct

SEQ ID NO: 173771 - DNA, 1018 bp, Arabidopsis thaliana landsberg; identical to SEQ ID NO: 25662
  unsure (1)..(1018): unsure at all n locations

SEQ ID NO: 173772 - DNA, 1080 bp, Arabidopsis thaliana landsberg
  unsure (1)..(1080): unsure at all n locations
agtggttttaaacgcgacattctagcttacatcaccaaaatanagaaaactaggnngacaggnnggnatgcgtggtctctgtacttgggaggcaagcaagtgcttctaaaatcagtggccatggctttaccagtttatgccatgtcatgttttagattaacgcagtatcaatgtcaacaaattaccagtgctatgacgagtttttgttggaactcttgtgaagaacacaagaagatgcattgggtatcttgggaaaagatgtgtagaacaagaaaagaaggtggtttaggcttcagagatattggagactttaatcaagcattactagcaaaacaggcgtggcgtctccttacacagcctacctcattactagctcgtgtttacaaggcaaggtattataaccaaaaggggtttttggatgctcttattggatcacgtccatcttatgcatggcgtagtatcatccatggccgtgatttgctggctaaagggcttatgaaaaatattggagatggcctttcgacgaatgtttggctcgagaagtggatttttgataaagtacctcgtcggccttttaataagcagtctctttttgatttagatctcatggtttcaaaccttattaccccccaaggctcttggaaccatggtctactatcggagctgtttctccctctggatgtggttagaataatgtcataccctcctaacgttttgtcacgggacagctacatttgggcttacaatcgggatgggtgttacacggttaaaagcggtaattggctgctatctcagctgaaacacgcacctcctcagctatcccaacgagaacaagaaactaaagagcttaaggctaagatttgggatgttaaaactactccaaagattaagatgttcttatggagagctttatctggtgcattagcagtttcagattgtttacgagctcatggcatgaacattaaccttggttgtgatctgtgtcaacatgatagggagacaattagtcatactcttttccattgctggccagcccgtgaagtgtgggagatgtcagatatgcctcggccaacacaaggg

SEQ ID NO: 173773 - DNA, 397 bp, Arabidopsis thaliana landsberg
ttagacgcagacgaatggattcgtgtcatcgagcaaaagtctggacttctgcgttgttctgaaacccagaagcccttgttcgcagcccagcaactgcgcggtcctgccagcacttggtggggaaattttatgccgttcaaccggccaatcgtcagataacatgggaagaatttaagttggccttccgtgaacattacataccagaaggtgcacttcacatgacacaagaagaatttatgaagctgaagcaaggaggggatactgttaatcagtatctcaataaattcaatcatttgtcacagtatgcaatcgatcaagtgaacaccgatctgaagaagaagaattgtttcatgcgaggactgaatgacaggatggggagtctctagactcgcacgca

SEQ ID NO: 173774 - DNA, 472 bp, Arabidopsis thaliana landsberg
tctgcaaagaacataagcagtgtttccaagtgttgacaacatcactatttatgccttgaaggtaacaacacgtttttgttttggaaacaacgacaacaacaacttaaggaaggagtactgtttttggtaagtgataatcattaccacccaagctaacattcaaaccaaaaaccagtttaagttaacttgggtggtgctgattatcacttgtcggattgtatgataaatatgagtttaggttaatttgggtggtaatgactatcacttgtcggattgtatgattttaaaaaacgctcttcaaaagcctcagtaacaatgactggttctctatccgtccacctcgtacgtgtcgattagaagggtgagctgcagattggtgaagtagttgagaagaaaacgagaaagagaaaatcgaaaagtgacaacaagatcagaaagaaaccctccgtagagactccaacagaagcgaaag

SEQ ID NO: 173775 - DNA, 884 bp, Arabidopsis thaliana landsberg; identical to SEQ ID NO: 15905

SEQ ID NO: 173776 - DNA, 203 bp, Arabidopsis thaliana landsberg
atgatattgggtttcacgtcccatctcatgacctacctcctccgggtccttatggttatggtatgttggaccaatccttggttatgggaggtggtcggttctaccaaaacgggtcgtcgggtcaaaatgaatccagtgttggtggtggctcttcgtcttccattaacgaaaagccggcttttaaccaatatggtcagtataag

SEQ ID NO: 173777 - DNA, 2515 bp, Arabidopsis thaliana landsberg
  unsure (1)..(2515): unsure at all n locations
gttttagagtctatttgttatttttagagtattttctagttcttttacaggtctttacatgtttgggattcatttggagataatagagcattcagaaggaaaacagagaactaatgctgcagaagaaatccgaagactaaaaatcgcgtaggtgtcgaacgacaccatccctggtgtcgagcgacaccaatacctgacggcaattcgaagacgcaacgtattgaagttttgaagatttccaaattcgccccagaactttcccttatttctaaagaaggcccatcacgttttacgtcagcttcatgcacctttgattcattaaccttcagagttgttttcttccatctccgccccttacccgtttatgaggtggtcgatggatatcattggaccattgcataagtcaactcggggtgtgcaatatcttttggttttgacggattacttctcaaagtggattaaagctgaagcttacgttaatattaaggattcggctatgaaaactttcatatgcaagaatatcatatgtcgacatagtgtcccatacgagatagtcaccgacaacgaaccacagttcatttcgcacgaattcgaggccttttgtttggattagggaattaaaagttagttactccactctgcattatccgcaaggaaatggacaagccaaagctgcaaacaagacaattatgagcaatcttaagaaacacttgaatcatttaaaagaaggatggtacgatgagctccaacccgttttgtaggcttaccgcacgactcctaggtggtctactggggatcgagactcaattttcattggtgtacgggatagaggcagttgtaccagccgagctcaatgtaccaggacttcgtcgaatggaagctcctttaaatgaaaacgagaattctgcaatgctcgacgattcgctggataccatcaacgagaggcgagatcaggccttgatccgaattcagaattatcaacatgcagcagcacggtattacaattcaaaagtcaaaagcagacctttctttgtgttcgataacaagaaagaggaaggagcagacaaacttggcattaattggtaaggtccttatattgttaccgaagtggtccgaaatggtgtttacagattgaaagatttagaggacagaccagtctaacgtccttggaatgtggtgaacttgaagaaattttatgttttaaaaaaaaacgcattttttgtacatgaactacggtggggcttgatcccgaaatgggtacgtaggcagctcggaaacgagttcaactattaataaaatttattttattcatgttgaaaaagagttcgattatacgaacgaatgaaaacagggagttcgactatgcgaacatacaaagcaggaagcaaagctaaatttattcaaaaagaaaaacaaagaaaagatgttgaagtcttagacacacttcgaactaggaaatcctcctcgtcttgtaaaacacctcgaccccttgactggcgatgtcaagaatgggcatcatacaatccgggatgcaggcaaattctgcgattccgagttcgatccagtctccggggtgagagttgagggtgtgtaactcccttaatatcacggtgactctccgcagcatttggttgatcttctttcgaagtttcttcttttccgttgatcgtttttttgttgagccgcgagagctttgataaaggacatcgcgatgtcctgatctctgctcgaaaggtccttgattaacgcacacggagctcggatctgggatctgaagttgcgaagtggggagcgtcctctgtctggtacgttcggaatgtcctcctcgataatcccaatcctcgaaaagtttggcatggattccgagcatcggaggttgaaggccataagcgcgaaagaaaagaacggtattgttagtgaggaatgaagaaaaccctagagaggaaatctatagggaggtttcttagctttcaaagatgcgattctatgtaaagccggagtgattcgcggaagattcacgtcgccttgttcgccctacattcaaagagtatctccaaaacaaaaatttgatgaatcaaggaaaattagaaagttctcttaaatagatgggccgaagcccagtagttaggtccatgcgaaaataaaaaagagggtttttagtctcgggaacatttagggaaggggctcaggaacaggctccttcatcgccggttcggggttcaaagtggacgcttcgtttttgtcgtccacgtcgggttcacttcacgcgcttccaggggttactgtcttcctcctaatcttcaccgtcttcattgtcagacgggatcacttgaaccggagcgtttacaggaccggggacttggcctcgagcacggaggtacatccagagcatgtgcgggatcttcgccacgcagtcaaagttcctccactcccactgaaaagggtcgctctccatggcccttatcttcctctcgatgcgagcaattcgggcctcaagcgtttaggcnnnnnnnnn

SEQ ID NO: 173778 - DNA, 211 bp, Arabidopsis thaliana landsberg
atccagtgtttcatgagagatcaaagcacatagataccaggaccactacatcagggaatgtgtggctgatggggtgctggaggtgcagcatgtaagcactgaagatcagctcgccgacatactgacaaaaccacttgcaaggattcgctttgcagagatgcggaggcagctaggggtggttaacatttgacagattaagggggtgaaatgt

SEQ ID NO: 173779 - DNA, 315 bp, Arabidopsis thaliana landsberg
gaccgtcgttgtcctcctacagttctactagccgcgattaactcattgcaaaagatcaaaatcaggcagaagcattttggtttagatccctattgtccggtttgccaagaccagtttgaaatcggatcagatgcaagaaaaatgccgcgtaaacatatctaccattctgaatgtatactcccgtggttagtccagcgtaatacttgccccgtctgccgcaaagaacttccacaagaccgaaataatagccggaaaaatccattgtggcatttgtggccgttcaggtcctctggtttggcctcaaaccataatgga

SEQ ID NO: 173780 - DNA, 310 bp, Arabidopsis thaliana landsberg
aatgtcgttggaaaaattctttcaatcgaaagctcaaaccttagtgaccctacttcaacaaatcaaagcattgtcaaattatggcttaccgtaagtttctgttttgatagtctaagatttatttccctaacatttcaattatcttcattcataattaaacaaattacttcaaacattctacatcaatgtgattgtcttcttatctctttgggctaaaactgcttctcgccttcgaaccatcctagctgatccaatgtctctaacatctattgttttagtcacatctgttaatccaacaattctagatggt

SEQ ID NO: 173781 - DNA, 520 bp, Arabidopsis thaliana landsberg
tgacttgcactctgtagacagaagggctcagccttggttgatctttattgctcatcgagttgttggttgttgaacaaacgatgggtctgcgggggaaggtggcttggaagaacctatgggaagagagagcttgcaaaagctctggcagaagtataaagtagacatcgcgttctacggtcatgttcataactatgaaagaacatgccccatttaccagaaccaatgtatggacaatgagaaaagtcactactcaggagccttcaaaggagctatacacgtggttgttggtggtgcaggaagtcacttgtcttcgttcagctcgctgaaacccaagtggagtatcttcaaagactatgattacgggtttgtgaagttgacggcttttgatcactcctctcttctcttcgaatacaagaaaagcagcaatgaagccgtacatgactccttcactatctttagagaatacagagatgtcttggcttgtgttcgagatagctgcgagccaaccacattagcttca

SEQ ID NO: 173782 - DNA, 1227 bp, Arabidopsis thaliana landsberg; identical to SEQ ID NO: 26769

SEQ ID NO: 173783 - DNA, 382 bp, Arabidopsis thaliana landsberg
gacgtggatagtaaagaacggagcgacgacgggcgatgatgagatgatggtcggagactattgctacgccgggacaacttggatcgggtacggcagtgagaagagcatattgaccaaagtgagatacgctaagcagaagggtctgcttgggttacttttcatagcacgttggaggtggcgccatctcgagactctttcgttggttcgatcgtctccttaccatatatatactttcctttttttccttcgtacatactactaggcccggcccaccgtagaatccttggcttatcatgtactgtgtacagaagaaaacattattgatgtttagatctgttatttatgtttggctgaaacaaattgtttatctacggagttggac

SEQ ID NO: 173784 - DNA, 162 bp, Arabidopsis thaliana landsberg
ataatgttgtacaacaacaagcatcagagaaaccagaaatcgaagactaccaacaggttccttgttagcatcaatgtcttaggaagtgctggtccgattcgtttcgttgtcaaagaagatgaaactgtatccaatgtcataaattatgctctcaaatgttat

SEQ ID NO: 173785 - DNA, 1282 bp, Arabidopsis thaliana landsberg
cacctgctgcaaaaaattgggtcatcttgctgaaagctttaggtgttgtgtgggtctacaaaggagatacatcagatggacgttcataacgcatttttacgcggtgatcttgatcaagaggtttttatgcaatttacgatgggttgttgtacaaatgacaaaaacaaggtatgtcgtttggagaagtctctatatggtctcaagcaggctccgcattgctggtttgataaactcactacagctttaaaagactatgggtttgagcaaaacgtttccaactacttcttattcatgtatcagaaacatgatacacaactacaacttctagtttatgttgatgatcatgttatctccgtcaattcttgtggtgttatcaatcagtttaaagaatatttgagtttttgtttcaagatgaagaatctgggtgttttgcgttatttcttaggcattgaagttgctcgcagttccgaaggcatgtatttatgcgagcgcaagtatgcccttgatatcattgtagagacttgtcttcttggtgttaaacctatctcgtttcctcttgagcaaaattacaagcttttctctgttgacgatgaaccactttctgatctgtctagctatcgtcacttggtgggacgtctgatctatctcggtgtcacacgtcccaaactctcttattttgttaatgttcttgctcaattcatgcataaactgcaacctgcacattggaatgttgcacttcgtgttgttcgttatttaaagaataatcatagccaaggtatattcttacgctccaacactaaattgattctctctgcgtggtgttacttcgattgggataactttccaacgacacatcattctttaactggatggttcattcaacttggagggtctgcgttatcttggaaaacaaagaaacatgatcgggtttcacggttttcagttgaagcggaatatcgagatatggctgatacagttagtgaacttctttggttgcaagaattgttaagagcttttgggattgactgcttttccattacgcttcactctgatagtcttttctccaatccaacttgccgcaattccagtttttcatgagaaaactaaacatattgctcgtgatattcacttcataatggacgagatcattagagggactattgtcaccaaacacgtctcctcacaaacacaacttgcagacatcatgaccaaagcattgggacgacaagcatttcaagattttctcgtcaaactaggcatttgtgatctccacgctccagtt

SEQ ID NO: 173786 - DNA, 1319 bp, Arabidopsis thaliana landsberg
  unsure (1)..(1319): unsure at all n locations
ttcttacgagctctcatgttaaaatgggcttccctcagaaatgggttgacttgatcagtttttgcatctccttagtttcataaaaagtcctcctaaatggggcaccgaggggtttcattaaaccatcaagggaaatctaacaaggagaccctatttctccattcctttttattctgtgtacggaagccctgctcacgaaccttaaaaatgaacaaatacaaggccttcaaatttccagggcaagtccatccacttcccatctattatttgcagatgatagcctcattttttgtaaagcagatccatcccaaggccaagagaaaattaatattctacgccttttgtggtgaggttttgggacaacagttaaatactgccaagtcctcagtaatgtttgtcatgatgtggacaatctaaatcggaattctgtaaaaacaactttgggaatccataaggatggaggcatggggacctctctgggcttacctgaaaaaattcattgatctaaaattcatttacaaaaacggcttaatatttggttagccaaattcttgtcgaaaggtgacaaagaggtctttattaaataaatttgtagcgcaggcccttccgacatatgtgatgtcgtgtttccttttcccaaaggctattaactcaaagttgagtagtgccattgnnnnnnnnnnnnnnnnnnnnnatgaaaatagcaatggtatccactagatagtatgggataagatttgtaccccacactcggagggtggtttgggtttcagaacgattgaagaatttcatctacctatagctaagcaactttggcgtcttattagattctcaaactctcttctaagcagggtattgagaggagatactttcgatatagcgatctcttacatatttgtaattctaatctcccctcttatggatggagaagtatcatggctgctaagcctcttcttgtttcgggactttgaagaaccataggatctggcatgttaacttgcatcacggaagaccctagatcccacgattcctccgcggtccgccaaaagtgttcttaacatgagggatccccatctctatgttaacgatttaattgatcaaaatacaaagatgtggaaactgaaccggctccaagccttgattgaccctattgagtactcatcttagggatccgtccaagtcgtacttacttgagggatgggtttagttggtcacatactaaatctggaaattatactgtaaagtcaggctactaggccgcaagaattttgtctcgtcctgtttgtgacccccaaatttagggaccaagtgtctcaaca

SEQ ID NO: 173787 - DNA, 1671 bp, Arabidopsis thaliana landsberg
aagctttgtcagcaaatcagcttgtgtagcttcaagcttctccacatgtgaatctctagctaacatgaatgctaacttagttgcagtgactcctctgcccatacctctaagtcttccaggcttgtctttacctaatacttgactcacaacatcttctttaagatcggtgaatgatgatgagtccatttcactatcaatagatttgattttttcctgaaacagaatgtaatgacaataagtactagcaaaacaaaaaaagaaagcaagtgaatgattgtcttacaatcgtctctgcaaattcagggttgacaggtctcccatctgagtgtgtatgacctgctatccaaaccttgcttcttgtcaccaatttagggttggaactctttttttctacaaaacagatagtgattagttgatggtaaccaatttacacaagcttaattgattacagagtagacatatactataccatctcatgggctaggcgaatcattcctttgcggctggtggtgtgtggaatatgtgccttcctcaacatcctgtacttgtcacttatttccttcaaaatcaccttccattaaaacaaatcatcttctaaagatttatagttacaaaaatacacaaccttgaaggcagtggtcttcctgttcttcacccaagcattccaagccgtcacagattgtatgttacttggtttcagcgaaaacaaatccgtcttgctcttcactgcacgcactttcgttgtgagcttcgacttagaagacctccacacacaacccatttgcttaaaaacagcatccttttgccaatcttctttcaaattgaacctcccctacacattgaaaacacatagttaaacacaatcatgcaatgattaaactcagcaaatgagtatgatatacctgaatttcttcccagagtgtgtccctagtctcatcaggtaggtgcctccagtcatgaagcagaacaggtacatgctctctcacaagaggaccaagtgatataagtcaaattaatcctaagaccactctctcaaataaagaggttggttacaacacttagggatcgaattcacgaagttctcggatcacgcaatagactaatggctatcgaattaaactaagtaaaatagtaaataaaataaaaagaaacagaaagtaagcaatagcagattgtgagttgtgaaaacaagataataaaagcgtcaggcttagggtattgtcaggaaatagatgatagtagatatagaaatagctaggttgttgtcgaaccgttctcgaactcaaactatgatttagagtaaccagtgatgttccacaaaactctctttacttagagctaagataaccggagaaaccgagaaatcttatactaaagcatgcattgttatcaagcttgattagttcacctagtatctaaaccagaacccttctatgagcctacatgttctttcttaaatgcctaaactcatctatgatagttcaaataacaaatacctatggcgggaatacctattatctaatatcaagttctaggtgatcaatctaaaactagcattaagaataatcaagatgaagaactctaagaataatcttaaggggttttcgatctactaatccatctaaatccctattgagactccctaaacccaacaaggtgattactcagata

SEQ ID NO: 173788 - DNA, 688 bp, Arabidopsis thaliana landsberg
ctggaacaagcagagtcattgtttaatcagatgcctgtgaaggacataatctcatggaccactatgatcaagggttactcgcagaataaaagatatagagaagcaattgcagtgttctacacaatgatggagtagggcatcattcctgatgaggctattatgtctcctgttatttcagcttgtgcccatctcggcgtgctgcaaataggtaaggaggttcatatgtacgcgttacagaacgggtttgttcttgatgtatacattggttctgcactggtagatatgtattccaaatgtggtagcttagaccgggcgattctggtgttcttcaatttgcccaaaaagaatctattttgttggcattcgatcattgaaggactgccggctcatggttttgcacaagaagcactgaaaatgtttgccaagatggacatggagtcggtgaaacctaacgcagtcacttttgtgagtgtttttactgcgtgtactcacgcaggtcttgttgacgaaggtcggaggatatatcgcagcatgattgatgactattccattgtctctaatgttgaacattacgcaggcatggttcatctattcagcaaagctgggttgatctatgaggctcttgaattgattggaaatatggaatttgaaccaaatgcggttatctggggggccttgcttgatgggt

SEQ ID NO: 173789 - DNA, 296 bp, Arabidopsis thaliana landsberg
  unsure (1)..(296): unsure at all n locations
gtgccaattcccgattatcaagcactcatgttgccagtcttgcaacttgcggcagcaagggaaacccgtgtgccagaggtcgcaaacaagattgcaaatcaactggggnnnnnnnnnnnnnnnnnnnnnnnnnnnnnnnccagcggtcggcagcggcttttgcataacagagtgcattgggccaaattttacatgtcaaaggcgggtttgattgataccccgggtcgtggacgttttacaataagcgaagcaagccgcaaactactggctagcaacccaaaatctctgaatgtaga

SEQ ID NO: 173790 - DNA, 1014 bp, Arabidopsis thaliana landsberg
gggaaagtcgatccaactcttttcactaagacttatgatggtgacctatttgtgtgccaaatttatgtcgatgacataatatttggttctactaaccaaaagtcttgtaagaagtttagcagggtgatgacatagaaatttgagatgtcgatgatgggcgagttgaactacttccttgggttccaagtgaagcaactcaaggacggcaccttcatctcccaaatgaagtacacgcaagacttgctcaagcggtttgggatgaaggacgccaagcccgcgaagacaccaatgggcaccgacggacatgtcgacctcaacaaaggaggtaagtccgttgatcaaaaggcataccgttctatgataggatccttgctttatttatgtgctagtagaccggatattatgctaagcgtatgcatgtgtgctagatttcaatccgatccaagggagtgtcaccttgtggtcgttaagcgaattcttagatatttagttgctacgccttgcttcgggatcgggtatggaaaggggtctacctttgacttgattggatactcagactccgattatgctggatgcaagattgataggaagagtacatcagggacgtgccaattcctaggaaggtccctggtgtcttggagttctaagaaacaaacctccattgccctatccaccgttgaggccgagtacgttgccataggacagtgttgcgcgcaactactttggatgaggcaaaccctctgggactttggctacaatctgagcaaagtcccactcctatgtgacaatgagagtgcaatccgcatggcggataatcctgttgaacacagccgcactaagcacatagacatccggcatcactttttgagagaccaccagcaaaagggagatatcgaagtgtatcatattaacaccgagatccagctagccgatatctttaccaagcctttagttgagaaaaggttttgcaggttgcgtagtgagctaaatgtcttagattcacgtaacttggat

SEQ ID NO: 173791 - DNA, 423 bp, Arabidopsis thaliana landsberg
  unsure (1)..(423): unsure at all n locations
atggccgaagaacagcgagagatttctcatgagaacaacgtttccttgggatttctcaaggaagaacaaaaaactgtatacctggtcctgttcggaagnnnnnnnnnnnnnnnnnnnnnnnnnnnnnnnnnnnnnnnnnnngtgatgcctattgtcgacgttcctaaatctccggcgaaggaagacttgacgactcattgctcgttagacgcggaatcctcggaaaaaggcttccccgtagatccctatatggggattttaggaaacaaccctaatattaattccaacgttacttgtgcaggaaacaaagatttaactgaagatactagaaagtttaagaagatgagatctctttcgaaagagaaaatagtggaggagaagggaaccagagtcttgacggaactacctccctacacatggacc

SEQ ID NO: 173792 - DNA, 857 bp, Arabidopsis thaliana landsberg
ataattctttctaaacacttttgtgttctttactctcatcaaatttatcaagagtcgcctttgaaagtagatacactatcatctttgtccacgagaacgtccggatgagtatgatagtgtatgtatttcaaaggtgactctttataatctcagttctatattttttagtttttcatttcttttctaacaaaaccaatgtttctttttggttgtttatttacagcgaaaatttgcaaagagtatgaatagtgtttcccaagttttcgaaacatcactatctccgctttgaaggtaacaatgttttcttcatatacaccgacaattgtttttgtttaagaaacaacaactcaaggaagatttgttttttgttttataggttaaatgtggtggtcaatttttttaattagttggttcgctggctttgaacacggctttccggaggaacgaatcgtttctatttgtggatgtgctgagagttgaggagaattgtaagatgctgactggagaaactgctttgtcaaatcctaatttacttgagagacaaatgatctgactattaaggaagctccggtaacccaagctggtgataataaaactaaaaagttcggatagtgctaaaagaagtcgtaagaaacgatctcttggggatcagtcaagtgagaaaggagaggttgaaccttttgcaatgtcaccaacaggaacaataggaaaaagtaacctctatttttttctttctctattgtgttctatggagtatatagttgatgttattggagagtattagtcaagttacattcgattgtattgtctgattttattaagacattaaaaggggtgatgttattcttgaagtaacg

SEQ ID NO: 173793 - DNA, 621 bp, Arabidopsis thaliana landsberg
cctagattcgaacctgatatgctggccttctccggatgctattactgcggtggtcaaaaggagagactcgaactcggagctatgagaagaaggtggaaaacgttacatgtgagaacatcatgcattgcttaatttgaataccataaatgaatgttaggtgcagtatcaactcttcttaattctattattggggttgttgcaatgtgcaggcggcaaaccctgaaaaggtacggcggcacgggagatgtcccctgacgccagaggagattggtctgatgctcagaggcttaggttttgggaaagaggttcacttgtacgttgcatcaggcgaggtatacggaggggaggatacattggcacctttaagagctctgtttccgaatcttcatacaaaagagacactgacctccaagaaagaactggctccgtttgcaaacttctcatcacgcatggctgctcttgacttcattgtctgtgataagagtgacgcatttgtcacaaacaacaacggcaacatggctcgaatcttagctgggagaaggtatacccctccccccagctgtgtctcttaacatcaaaaataacctctcttttctaatatgcacacgcatgtgtgtttgc

SEQ ID NO: 173794 - DNA, 891 bp, Arabidopsis thaliana landsberg
aacagcttcacaggtccaatcccttcattcatgtgcaggagttcaccgcagctcagcaaactggatttttcttataatgattttagcggccatatctcccaagaattaggcagatgtttgaggctaagtgttctacaagcaggcttgaacaatctctatggtgaaataccaagtgaaatctacaaactttccgagctggagcaactctttctgccagcgaatcagcttaccggaaagatcgataataacatcacccggctcaggaaactaaggtcgcttgagctttactccaaccaccttgaaggagaaataccaatggacataggtaacctctccagcctgcgtagccttcaactccatatcaataacatcaccggtacagtcccgctttctcttgcaaattgtactaaactcgtcaagttgaatttgagggtcaatcggctgggaggaagcttaacagagctcgagttttcccagttgcagagtcttaaggttctagatctcggaaacaatagcttcactggtgctctccctgataagattttttcctgcaaatcgctcaccgcgatcagatttgcaggcaacaagttaacgggacagatatctcctcaagtattggaacttgaatctctgtctttcatgagtttatcagacaataaactgacgaacattacaggggctctcagcattctacagggctgcaggaagttgtccactctaattttggcaaagaatttttacgatgaaacagttccaagcaaagaagactttctttccccagatggattccccaaactccgaatatttggcgtcggtgcatgtagaatgaaaagtgaaataccagcttggctgaccaatctcaagaaggtggaagctatggatctgtcaatg

SEQ ID NO: 173795 - DNA, 563 bp, Arabidopsis thaliana landsberg
  unsure (1)..(563): unsure at all n locations
atagaataactgnattttaatttggttgatanaaccattgtataactaattacctactatgttgacaagaagaaaaaactaatactgtatatatattttatattttctgtagtgtgtttggatggtagcgcgccagcataccatttcgataagggatctggctcaggagtgaacaattggatcgttcatatggaagttagtattgtttttattttctcatttaattagatatgtattatcataaataattatttacaaaatgtaatgatattaactaaatatgtatataattatgtgaatacattagggaggaggatggtgcactgatatagctacatgcgttcaacgtaaaagtacaatgaagggttcttctaagcttatgaacaaagactttggtttctccggtatcttgggtggcaagcaaagcaccaatccaggttctcaattctttttattccttatttttttgttcaacaagttaatgatttcttttctcatgcttttaatgcaatgagactgaatcggatttgggattttcagacttttcaattgaatagaacaag

SEQ ID NO: 173796 - DNA, 734 bp, Arabidopsis thaliana landsberg
ctaatgattgatgtggaatgagataggatgttagcatattgaggattgattatggagtgtttagccaattgttatggcgagagtgatggccatagtcccacagttgagcagactgtgggttcgcagcctgagtttgtggagcccggggcgaggaaaagtcttggtgccgatatagctggtgcagccagagtgggggctggtggagctggtgttggtgcctgtgtccatgccgttggtgctaaggacccaggagtgatgggtgccgcagccggaaaaacccaagttccagtggtttggcgggcctgctgaggcagttgttggagcggttaccaggtatggtaccagtgcaggctccagttgcgccacgagtggcggaggtgcagcagagggctgcggttgctgaggaggttccatcttatttgaggatgatggagcagttgcagagaattggcaccgggtatttttatggtggtactagtcctgaggaggccgacaattggaggtcgcgggttgagcggaactttggtacgagctgatgcccggtggagtatcgggtgtgactgcaaagaggaggcaggcggatatgtcttgtacagatttcggggctgagtttaatgccaagtactttccgcagaaggcgctcgaccgtatggaggcgcgttttacttgagctggcatagggtgagcggtcggtttgggagtataaccgatttttggtgtatgcggctcggggc

SEQ ID NO: 173797 - DNA, 724 bp, Arabidopsis thaliana landsberg
ggcgcacgccgccaaggagccggacccgacgcggacgctccgacaacggctgctgatctcgctcgctcggcgagtgccggttcatcgcgaaggcgatggcaccggccctgcagttcgagtactggcagtggctgtccttgaccctcgccgcaccggtggtcgtctggggagcctggccgtttcaccgggcggcatggaccaacttgcgccacggaacctccacgatggacaccctcatctccctgggcaccctcgcagcgctcgggtggtcgctctacgcactgttctgggggaccgccggcacacccggcatgacccatcccttcgagctcaccgtcgagcggaccgacggtgccggcaacatctacctcgaagccgccgccggcgtcaccaccttcatcctcgccggccgctacttcgagcaacggtccaagcgccgcgcgggcgccgcactgagggcactgctcgagctcggcgccaaggaggtcgccgtactggagcccgacggcgtcaccgagaccaggattcccgtggagaacctcgccgtcggcgacctcttcgtcgtacgcccgggcgagaagatcgccaccgacggcgtgatcgaacgcggcacctcggcggtggacgcctcgatgctcaccggggaatcggtaccggtcgaggtcgggcccggggacgcggtcgtcggtgccaccgtgaacgccggtggtcgcctcgtcgtccg

SEQ ID NO: 173798 - DNA, 477 bp, Arabidopsis thaliana landsberg
atgtgttcttctctagttcctcatggtaaaaggttggtccagtttcagacagggcgtgactttagtgtttcagtgaagcttttgcaaaatgtattctctgttctttccaattcattctcttctgttgctactgctgctgatgtgagctttagagatagtcgaaaaggtaacaactttactgtctcttacctcgttgattcattgggtttagcttcaaagctcgcagaatcgatctcgatgaaagtcagtttcgagaacaagggcaatcctgatacagatctgaatcttcttagaagtcatgagttcacagattctcagatctgcagcatcatttcggattatccaacattgcttgtagcagatgctgaaaattcacttggtcccaagcttctgttgatgcagtctagaggagcttcaagctctgagctcactgagattgattctagagttcctaaaatcttatgaacgaaaggggac

SEQ ID NO: 173799 - DNA, 888 bp, Arabidopsis thaliana landsberg; identical to SEQ ID NO: 9106

SEQ ID NO: 173800 - DNA, 580 bp, Arabidopsis thaliana landsberg
actaccttccgatttacgtggagactacaatttgtaaatgtaacggtattgtcgaaaattttcctactggagaatggttatggacttgaagcttatagcagcaggattacgtcattgtgggaaagtacaagcctttaagcgtggagaatcaattcaagctcatgtaatcaagcaagggatctctcaaaatgtgtttatagcgaataacgtgatctcaatgtatgtggatttcaggttgttgagtgatgcacataaagtgttcgatgaaatgtctgagagaaatattgtaacttggacaacgatggtttctgggtatacgagtgatggaaaacccaataaagctattgagttatacagaagaatgttagactccgaagaagaagcggcgaacgagtttatgtattctgcggttttgaaagcttgtgggttagtgggtgatattcagctggggattttggtttatgaaagaattggtaaagagaatttgagaggtgatgttgttttgatgaatagtgttgttgatatgtatgttaagaatgggagacttatcgaagcttatagcagttttaaggagatttta

SEQ ID NO: 173801 - DNA, 129 bp, Arabidopsis thaliana landsberg
aattgatagaaatacttgcatagaagaggtaaaagaactgcttaaaggacatcgagacttgatatcgggtttcaatgcatttttgccaaagtgtttggagatcgctgattggtacaacatagagggtag

SEQ ID NO: 173802 - DNA, 79 bp, Arabidopsis thaliana landsberg
atgaatccactggtttctgctgcttcggttattgctgctgggttggctgttgggcttgcttctattggacctggagtcg

SEQ ID NO: 173803 - DNA, 1459 bp, Arabidopsis thaliana landsberg
tgatttttttttgcggaaaaaaagttggtacggaaatttttttgaagaaaaacatttgacagaaatatttttttgtgaaatccttcgtgaatttcatgaaatccttcctgaattttgtagaatcattccttaattttgtggaatccttcaaaaaattattttctaaaatttaggatggattctacgaaattcatgaagggttttacaaaaattttatttgtgaaagccttcctgaattatgtgaaatccttcccgaattgggtagttacatttctgaattttttggcgggaaatgttttacgaaattttgatgacggaaaatgttttcggaaattttttggcgggaaaattttgacaaaaaatttggcgtgaaatatttactttgatttatttattttaattaaactcgttatttatatttaatatttaattaaagtttgagtgctgtttgtggtatttttcaaaaaaatgctatttttggaaaaaaaaaaactattttagtgtcatttttgtctatccccttactattttctataaagattcaacatgatgtgttcatatgactcgaatctgtggtggaccgatgaatgatcagatataataaggagaatgctagagaagttcccacaactagcttggaatgctgatggagaattgtcaaccccattgcatcatgcgtgcaatgccaacaacctcgagataaccaaaatgctgctacatattaatgaaagccctgcagagagggtcaacaaagatggtttcacacctttgcatttggcggccatgaaatgctcaattccaattctcaatgaattttcggataaggctccaaggatctttcaacatactaacaccagcaaaaggaaccgtctttcatctagctgcggaacaaaaaaatctaacagcgttctatttcatggcagagagtcccgatagaaacaatcttctccaccagatagatagatatggcaacactgtactacacactgcggtcatgtccagctgctattacgtgagtttttttcttgctctcttaatttccgtatggaagcttaaaaaacatttaggtttattaaataaattgagcggagtggactaaacttaccaaaaacgagagtgcattttggcacttcatatttttttggtaagattcgtttgctccgttccatatgatcttattcttatcactgaaagcatagtaaatgatacatgggactttataaccattttttctactcattcaaagcagatatatatatatatatatatttaatcattcatatttttctaatattaataagcattttcctaattgaatgtaggtataacaatagatttccacgccaaaaacactcgaggactggaagctttgatcttttcaacgtcaacgatgaagattatggtaagatattcggctgccttaggtttgatgcaaaacaaatttgaaatcaactggtcc

SEQ ID NO: 173804 - DNA, 509 bp, Arabidopsis thaliana landsberg
aatattgaaattgttaaggttcataagggctatgataacaagatggtttagttcaagaaggattaagtctatagagcatacaggtttagtgactcgagaagtagataaagttttgacgaaaaaccttgccaaagtgagaggaagcaaaattggaaaggttagcacttggagttatgaaattgttgggatgttgaatggaaagaatcaggtatgtcttgatcgtagacaatgcacctacaaggagtacaataacttaaaaattccatgtgggcatgctatgttggcagctacaagtgttggtcagtcatatggatcattaatagcagatttttacaagacaatagcttggagagcaacttacaagggtgttataaactctgaactcaacttggaagatgttgatgttccaaatgaaattggaagtcaaactatcttcccaccatggacaagaaggtcgtctggaaggccaaaaatgctatgtatcaaatccattggcgaatattcggttc

SEQ ID NO: 173805 - DNA, 2698 bp, Arabidopsis thaliana landsberg
ttaaacatgtcttgaaccctcccccaaaattaaattacacagtcccttgtgtaataaaaatctgaaagagaattcaagacgaaagcacaaaacacacaaataaaaagatgctatggtatatacaatggagaggtggtgctacctcagttttaaggtgaagtagatggagacatagtcatccatactctcttgggtataggcaggggctgaagttgaggcgggagggtgttgctcgttctgtccggtcgagcgtgtggaagctcgtctttgcctgctccttggttctctcaaataggagatcacttcctgaggctcaaaagatgaagctcggggttgatcgatcctttcagctctccttgcagctgagctcgttgaaccgctccttcttactttggcggttggagatggtggccttggcttgctctggaagtccttgagttgagcagccatactcttgagcgacttcttcattgttctcatcttcttcttgaaacccttcattgtcttactgtaaaggtttccaagctcttcaagcacaccaagcttcttgtgaacttcagcaatctcatctccctcttgcttagcaccttcttcataatgagcttgctcttgttcgctgcccccttgctccggttgatcaatatgttgctcaaactcgatttgctcctcataattagcttgagtaaagtactcatgttgctcatagtcggctgggctatattccggttcatcttcccgagctcctccaatgtcgatgttcaaggcggagggaaatggcatgaaattgatgttgcgccttgtcttcaccaaagtccgactctcgcattgtaggggtagaagagaaggtccaagctccgagtgtttgaacttgaagagatagcgatccgctggagttatcttgtcaagaaaatcctttcccttgagatattcgaggctaaagaacttggagaactcgtcaggggttccaaattgcatccccacagctcccagtattggcgttaagagaccaccaacacaaagacttccacgaattcccgagcgatgtatagttgctgataagtgtgcatattatctattttgagcattcatttgtcatcactttagcatcatatcatcactgttttatatcatttgtcatcactttgcatgtttaggataattttgcatgcatgttgcatatttgtgttgttttcaggtgattcggagctattggcgagctaattgaaagaagcggagttgatcactgcaaaacactcgacccctggttgagtagataattccacgacttcaacaaaccacttgaccccctggtcaagtagatgggatcttatctctgtatgcatagcttgggacttaccttagcattctactaaagcttaatcattttttgagagatcccctgttactaaagcctattctgtaagggaccatctttgtctcttgacctgtaccttaagccaaatgagttcattgatgaagcattgcttgattaacgttccagaactaatgaatgttaaagggattggtagatttgaaaacatgtgtaggtcgagtatatagagtgggattgaactataataaggcatggctaacgtttttgagtagagttcgataatatcgcttcctagaactgccaacttggacattgattctatttgatttatctgatgctttggttctgaatccccaccttcaaacttctccttcagcttatgtctacttgtttgcttgagggcaagcaaagactaagtttgggggagttgatataacccgattttcaccgattttatctatgttttagatataggattttgagtctttatgttatttctcgagtctttttagtgtcgtttcaggtattctatgcaatgggacaacaatgtagataagaagacattttggagcaaaagttaaggaaaaagaagctaaagacgattttggtccaggaataagcgaggagtgtcgatcgacacactcttggtgactatgcaatacgacgaacgatcgacaataagacatcaatctatatccactttagttatcatgatccaactccattttcacataatcataaacttgtccaacttcaaagacatgtctgtgtaaaacatgtaaaataaagtttggtatatactctttatatgatagaatgttacttacaagtatctccgagtgtcaaaatcagtaaaagttggattaatgtaaagtttaattgtagttattacctaaacaaaaagaaaaaacaaaatacagtttaattgcattcaaacattgttcacgaatgggaaactctaacaaacttaccattgaactccgagaatctccagaaacgtataacaatgaggactggctcatagttataagtcacataagttattttcttaaaccagtttgtgacgaaaaactgacaagagctaccatttacaaaacaagttataacctttccccttcaaccacaaaattttaaaacattttatacataatgatgttttggtccaaaaaatacaaactgaacataaaataatatagcaaagataatgtaaacttacatgttatcagtgatgtcaaaagacacatatcttgcctcataattagtctctcggtgacggcatacaaatggaaacctttgaataggagatacatttgaaatcacaccaacaacatttgttttaaactagttagtcctaactttatatat

SEQ ID NO: 173806 - DNA, 1585 bp, Arabidopsis thaliana landsberg
  unsure (1)..(1585): unsure at all n locations
tcgctaaaggactcagagctagccgattcaaagctttcagcggggaattcgaagtcaagagcggaagtatgtggggttatctctcgctggtccgcaaactttcnnnnnnnnnnnnnnnnnnnnnnnnnnncaaaattcctcgaaacgataactcagcagcagacgcactagccgcactggccttaagcgccaaccccgatttaaggcgaataatccctgtcgaaagcatagcaagaccgagcatcgagccaccaaattcgacgtacgtgatcgtagaccccgtaacggccatggacatagacgacaacgcaatcaacgcgccgggtatagaagaggatccggaaccatccgattggcgactccccatcaaaatgtacattgccgacggcatagttccaacagatcgataggaagctcgccgactaaaaaccaaagcggcgaactacatgatgctagatggcgaactttacagaccaagtgcgacaaaagctttcctcacttgcgtggatcaaaaagaagccctgacactcatgaaggagacgcatcacggagacggtggtaatcattttggcgggcgagctctctgccttaaaataaaaaaagatggtcattactggcccactatgctggcggattgcgaggtctacgcggcgaagtgcgagccgtgtcagaggcacggcccgatgaagaacgtccctcccgagatactgcgttcggtcacggcgccatatccattcatgcgatgggccatggatatcgtgggaccgatgcctccttccggctccaaaaaaattatgttagtcctaactgattacttcaccaaatgggttaaggcacaggcgtacctcaaggtcaagtcacgcgatgtggtcgcattcatctggaagaacattatttgccggcgcggtcttccttatgagatcgttacagacaatgggaagcagttcgtctcgctcattactagaaacttcctcgccaaatagaacattcgcatgagcaactcgactccaagatccccacaagggaacggtctagccgaagccacaaacaaaacgatcatcgccgggattaagaaaagactaggccttaaaaaggggaactgggcaaacgagctggatagcgtactctggtcatacaaaactacgccacggcgacctacatcgttatcccctttctccctggcttacagcatcgaggcaatggctccaaacgaagccggagttccgactttacgaagatgcatgatgtcaaacgaccactaactgaacgatcagcttttaggcgaccacaatgatttcgccgaagaacttcgcgatcaagccgccgtccggatcaagaattaccagaatgcagcggcgagatactataatcgaaacgtccgagaacgtcgcttcaacgtaggcgatccaggagtctatctgctgatgacaccgacgagaagaacgccggaaaactcggagctcgatgggacggaccttatttgatctcgaagatacttcatccaggagtctatctgctgatgaccatgaagctgaaagaggtggaaaattcgtggaatgcagtccacctcaaaaggtactattat

SEQ ID NO: 173807 - DNA, 326 bp, Arabidopsis thaliana landsberg
atggatgttatgattcactcttcaagctttctcctcccttgcgacgaaacttgtgggacgagatacgctctcgttgttcttaaccagaatttaccacgattcactcctcttctctgggaacatggtaattatctctctattcttcagaatatataaatgaatctgtttttttttattacgcatattctgtgtagaacagcaaaacttcgtctctgtgctgatggaggcgctaatcgcatctacgacgaattacctctcttcttccctcacgaagacccttttgtcattcgaaacaggtctcagatttatgtctctatttctctcat

SEQ ID NO: 173808 - DNA, 321 bp, Arabidopsis thaliana landsberg
cttaatataataactaatcaagaaaataaaaaatacatgatcgttttttggcaaatgcagcaatgtgatggaagagtatcagaaggcaatggatgatttaagtcatagactaataagcatgttgatgggctcgttagggctaacacatgaagatttgggatggcttggaccagacataactggttcaggaactgactcgatccaatcctttctgcagttgaactcgtaaccggtttgcactgaccctcatctagctatgggtttagcccctcacacagagtcctccctacttaccattctctaccaaggcaatattccagg

SEQ ID NO: 173809 - DNA, 341 bp, Arabidopsis thaliana landsberg
aaaaattgcgactacttgctactgacgtattccctcacaacttgcgaggaaagagcgaggcttctgttgcagctaatttgctaccgagtacgtccctcgcaaattgcgtgtgcttcgcgagacaggtcgtccgccgcaactagcgagaaatttgcgagacccataatttgccgtgaatttgctacggattacttccctcgcaaattgcgtgtgttttgcgaggtaatttgttcctcgcaaaatttgcgagggacttgctacgaatttgattttgcgacgcgcgttttgcgaggaactaaaattcgtcgcaattccctcgttaactgctctttgcgagggac

SEQ ID NO: 173810 - DNA, 239 bp, Arabidopsis thaliana landsberg
atgccttgtttgttcatcttcatagctttgcttctaagttcttgtattggaacgttgaaagcccttgatcagacttgtggcaacaaagtcgtgaacacaatcgtcgtcgatcaagccggttcaggtaagttccgtactgttcaagctgccattgattcggttggtgaattgaattctctatggatcaaaatcaaagtaaaacgaggtgtttacgtgtaagtaaataccaactctctact

SEQ ID NO: 173811 - DNA, 518 bp, Arabidopsis thaliana landsberg; identical to SEQ ID NO: 32823
  unsure (1)..(518): unsure at all n locations

SEQ ID NO: 173812 - DNA, 1995 bp, Arabidopsis thaliana landsberg
gaccaaattctggctaaagattgggagggtgcttggagagagccaataaagcattacatcgtgacaggtgagctcccaaaaaataagtggcaagctagaaaagtgagaaacgttagcgcgaaattttgtgtatcaaaggttgctttgtataggcgaggtgtcagcgatcctgatcaattgtcatttttggacccgaagtcgagatcgccttgagcgaaagtatacgaaggtttgtgtggcagtcattctttaggaagggtcatggctttccagattaaaagaatgggatattattggcccactatgatcacggattgtgttaagtatgcccaccggtgtatacgttgccaattccatgcgcctcttatccatcagccttcagagttattctcttccatctctgccccatacccgtttatgaggtggtcgatggatatcgttggaccattgcacagttcagccctttgcgtacattatcttttggttttaatagattacttttcgaagtggattgaagccgaagcatacatgagcatcaaggactcggcggtaaaaacttttatttggaacaacatcatatgttgacacggcatcccgtacgagatagttacggacaacagaccacagttcattttgcacgaactcgaagctttctactcagattggagaatcaaagttagttattccaccccacggtacccacaaggaaatggccaagccgaaggtgcaaacaagacaatccttagcaatctaaaaaagcgcttaaatcatttgaaggggggggatggtacgacgagctccaacccattttgtgggcttatcgtacaactcctaggcgttctaggggaaactccgttttctttggtaaacgggatggaagcagtggtttcggccgaacttaacgtgcccggacttcgccgaacagaggctccactaaacgaaaaggaaaactcagcgatgctcgatgattcgttagatactatcaatgaaaggcgagatcaggccttaatccggattcaaaattatcagcaagcggcagctcggtattacaataccaaagtcaaaagcaggcctttctttgtaggggatttcatgctaaagcatgtttttgataataagaaggaagaaggagcaggtaaactcggtattaattgggaaggtccttatattgttatcgaagtggatcggaatggtgtttacagattaaaggattaaaagacaggctagtccaacgtccttcgaatgtggtgaactttaagaaattttatgtttaaagtaacacgcgttttttatgtacataaactacggtgtggtttgatcccgaaatgggtacgtaggcagctaggatatagtttagctactaatacaatttgttttattcattaaaaaagaaaggagttcgactgtgcgaacatacaaaaataggaaacacaactacatttattcacagtagtaagtaaagaagacgaagtctcaacatgcgcgcacttcgaattaggaaactcttctcgtcttacagaacacttggactccttgaccagcgaggtcaaaaattggcaacatacagtcctgtatgcgagcaaactcggagactctgagctcgatccaatccccgggatgagagttgagggtgtgaagctccctatatcacggtgacccttcgtagcatttgattgatcttattctggagtttcttcttttctaacgaatgcttctggtgctgaaccgcaagagctttgatgaatgacatcgcgatttcttcatctctgtccggaagccccttgatcagcgcacatggagctcggatttgggacctgaagaagccacgaggtggagaaggcccccttcccggcacgtttgggatatccttgtccatcattccgactcttaaaaaatctggcataaactacgaacattaaaggttgaactccatagctgcagaaaaggaaagataggttatgtggaaaataaagaggacttagaggtacaatttat

SEQ ID NO: 173813 - DNA, 1284 bp, Arabidopsis thaliana landsberg
gttctgatcaaggttcttaagatatttgctaagttggccttgattgaaccgagattgggtaagaaggttgctgagccgatttgtgaacatatgaggaggactgtggcaaagtctctggtttttgagtgtgttagaaccgtggtgagtagcttgagcgataacgaagcggctgtgaaacttgctgttgcaaagatccgggagtttctggtggaagatgatccaaatcttaagtatctcggtcttaacgccttgtcgattgttgctcctaagcatttgtgggcagttttggagaacaaagaggtagtcgtcaaggctatgagcgatgaggatccaaatgttaaactcgaggcattgcatctcttaatggcaatggtgaatgaagataatgtgtcggaaatctccaggattcttatgaattatgcactcaagtcagaccctttgttctgcaatgagattattttttctgtcttatcggcatgctccaggaatgcatatgagatcatagttgactttgattggtatttgtctcttcttggtgaaatggctagaatcccacattgtcaaagaggggaagagattgagcatcagttgatcgatatcggtatgagggtcagagatgctagaccacagctagtccgtgtttcttgggcactgctcattgatcctgcattgctcggtaacttgttcttacaccctatactatctgcagctgcgtgggtttcaggtgaatacgttgagttctctaagaatccgtatgaaactgtggaggcgcttctgcaaccacgaactgatctcttacccccctccataaaagctatctatatacattcagctttcaaagttcttgtcttctgtctggggtcttacttctcgtcccaggaacccacttcgtcatccttggctcaggaatcaagttctggctctttgttggtgaatgttttcactcatgaatctatattgagtctggtgaatgtgattgagcttggtttggggcctttatctggaacccatgatgtggaagtgcaggagagagctaagaatgttttaggatacatcagtgtgataaagcaagaaatagctgagcaattaaacctccaaggcaacgaaacagaagcttctagagttacagcattcatggaagatgtgttctcagaagagtttggtcctatttctgcaactgcacaagaaaaggtttgtgtaccggatgggttagagctgaaagagaatctcggggatctggaggagatctgtggggaacatcttaaacccgtggaatcggattcg

SEQ ID NO: 173814 - DNA, 327 bp, Arabidopsis thaliana landsberg
  unsure (1)..(327): unsure at all n locations
aaagtgaatctgtcgtttcnnnnnnnnnnnnnnnnnnnnnnnnnnnnnnnnnnnnnnnnnnnnnnnnnnnnnnnnnnnnnnnnnnnnnnnnnnnnnnnnnnnnnnnnnnnnnnnnnnnaaggattgccggcgctcggcctcgacatgctggtcgctcagggtctgatcgaatacatcaccttccccgatgcgctgaagggcaaatatcagagtttcactcaagccgacctcacccgattgaggtccgatggtggttacctctccgatctcatggacgtcgcaaccggtgttgcgcgttattgcgcatggttgctcaagactatatcc

SEQ ID NO: 173815 - DNA, 211 bp, Arabidopsis thaliana landsberg
ccgacactacaagaaaacaggtaaacgacgactacaatcagcgacaacaaacgtagtcgtaacattatacgactatttggcgacggatttacgactcgcatgcgacaacacgaaaaattatagttacatagtcgttgttttacgactatcttttgcagtcggcaaagagtcggcaagtaacgactatttgacgattatattattgaaggga

SEQ ID NO: 173816 - DNA, 463 bp, Arabidopsis thaliana landsberg
cggcacgcacgagttcttgacctggctgaccgccaggtcccggcccttgcaataatcagtcggcatgacggtcaccgaggacatctgggacgccgtcctcaaagtgcccgcgacttcatggacgccggcttacgacggagacgggcaggtcagggacggcgcgtgggtcgcggacgtcaccgggctgcccgacctgtcctcctggccggccgggatggcgtcatcgtccggaaagagcggccgcaccccggggcgcagatgcggttacagacgtaacggccaccgcttcccgtcttcgccaccacgccaggcgggcagctctgctgacctggagctgcgccaccgccccgggcccggtgcgaggacggatccgtgcgccaaggacccgccctgggccctccgtgaaggggtttgcaaaaccaaagtggaagagatgtcggaggcctcgacctaggcctttccc

SEQ ID NO: 173817 - DNA, 657 bp, Arabidopsis thaliana landsberg
cgaaatggttatatcttctgatactctacaggtatatacatgcttgattcaataacattaagcttatacactttctttatggctttatcacattttctcagtgaacccatgtttttgtgtgtttttttggctgcataggttattcatgattactgcaaaatggaacaactacctcaattctctaacttgtctcgcttgcatgcttacttcgaagatacttggtgggaaatgttgccaaccttccttgagagcttcccaaatctacactcactcgtcatggtgagttttcatttgcttcttctaccctcatgtaaatcacattaagatttttgataacaaaaactcaaacttccctcggttatatattatcaggaatttgattgctttccagacacagagcagattgatctttcatatgtgccacaatgtttcctatcatctcttgagtttgttcatttgaagactccatacgttgttaacatgcaaaaggaagggagaccgctcacaggaacatcaagtaagaggaaattagcaaagtactttctagagaatggtgcagctctcaagaaactgacagtaagtgcgagtttctgtaacatcatcgacgaaatcaaagcgattccaagaagctctacgagttgtcaagttgtcatggat

SEQ ID NO: 173818 - DNA, 945 bp, Arabidopsis thaliana landsberg
  unsure (1)..(945): unsure at all n locations
ttcttgcgtcgatttgcgaggcgcgcatacttgcggcccccagaaatggagaaccctcgtacctccacactgaattttctcaaaccaggattagctgggtgctggtgagagaagatcacgaaggacagaaacccatctattaccttagtaaaacgttgatagacgctgaaactcgttatccagcaatggaaaaactagcactggccgtagccatgtcagctcgaaaactgagaccatattttcaatcacatcccatcgtagtgatgacgtctcaaccaatcagaaccattctgcacagtccaactcaatcaggttgacttgcaaaattggctatataactaagtgagtacgatatagaatatcgcaccagatccagcttgaaagcacaggtcctagccgactttgtaatcgagctcccgttagcggacctggatggaacccaactccaataagaagtggctactccacgtgacggttcctgcaaccgatgaggatccagagtaggaatacaactccctcccccaccggggaagtcatcgaacaatcgatccgactcggattcaacgtatcaaacaacgagtttgagtacgaagccctcattgctggcattaagctaccttaaggaatggggatccgcgatatacacgcccatagcgactcccaactcgtcaccagccagttccacggggaatatgaagctaaagacgagcgcatggaagcgtacctcgaactagtcaaaaccttgacccaacagttcgaatcattcgaactgaccaggatccctagaggagaaaacacctctacagacgccttggcagctctcgcctccacgttagatcctttcgtcaagnnnnnnnnnnnnnnnnnnnnnnnagaacacccgagcatcgacctaacggtcaggaaagatgggatggaaacaaaggcaacttgcaactttacgcg

SEQ ID NO: 173819 - DNA, 1329 bp, Arabidopsis thaliana landsberg
attgaatgtatttgtctatagctatagcagaatctattgactgttactatcaattcccttcttgcaggttgtgtttgcccgtggctgttttgatgacaccaaggttgatacaagaacttcttattgtagaaacatccattgatccctgtagtcatgtgtttctaaatggatatgcatttttggttatatgtttcagggtgctgtgctaatacaaaacttggcagcagaagaacctttggcgcttggtttagacacttactataagcagcattatctctcattggctgctgctgctgctacaatcaaatggtgtctaatcccgaactttttgtctcattacattattagttttgtgtttttgaaatactgagttttggtgtgttgtgtcatgactcatgtgcaggatagaggcggaaaagggtgtgatagtcaccaaccactcactgactgtatgtgtttggttatttacaaatctgaattacatggttgtagaagttttatatgcattagtttcaatatttcttgcaaaatgagtcattgtttctttctatttttgggtatttatctgtttcttctttggttcaacctcttctttgctgctgaagggtactaatagtattttttgtggattgtgatgcctatgtctaggtaacttttaatggatcgtttgatcacatgaatatcgatgcaactaggtacgattaccttgatactattcatgtttgtctattaaattatatagaatgttagcatcaaaactgtttatcattctgattcattgtttccttgatttgatgacggtagtgttgagaatctggaactcattgatccattccacaacgcacttttgggcactagcaacaaaaagaggagtttgttccagatgttcaagacaacaaaaacagctggcgggtatctggaagcgcatatgtttgagttgaaattactaattagtctttgtctcttgtgaaaaatattttcttttggcatttttgcaatctaatgataatcttcatagtactgttctttagtcattggcatatttcatttattcttcaactcactagtcattttatttcatgcatgctatgttggtcaggactaggcttcttcgcgcaaacttgttacagcctctgaaagatattgaaactattaacactcgcctggactgcctggttagtaaatctaagatcatattgttttaaggaacttcttaacgcatatcagtttccgtttagtgttaaatatgttgatttgcagagcttgaaatatatgggctccagaaattttacatgtatgatgatgcattaatcataaagtgtcctcttc

SEQ ID NO: 173820 - DNA, 714 bp, Arabidopsis thaliana landsberg; identical to SEQ ID NO: 7680

SEQ ID NO: 173821 - DNA, 1141 bp, Arabidopsis thaliana landsberg
aaatcgcgaagttcttcaccagagcgtactccggaagactctcatcatccgcctcctcatccttcgcctccaccgacttctgtttcatcgattcgataatccagacagtatacactcactatatcatctctctaatggggataatcatggtctttcgataatttctgaagttcttgatggtacaaattatgatgattggcagatcgcgatgaaaacctccttagatgcgaaaaacaaacttgcgtttattgatggatctgttgttagaccgagtgaaacggatgctatattcaggatatggtctagatgtaattctatggtgaaatcctggcttctaaactcagtttctaaacagatttataaaagcatacttcgtttcaatgatgcatctgagatatggaaagagttagctactcgatttcatatcacaaacctaccacgttcatatcaactgtctcagcaaatttggtcattgcagcagggtaatatgactcttgatgcttattttaccaaattgaagacattgtggaatgaactggatggtgagaattgtgttaatgtttgcagaaactgtacttgttgcaagactatggcaactcaatcagaacatactcgtgtgatcaaattccttgctggtttgaatgattcttactctgtgattcgcagtcagataataatgaagaaaaatgtccctaaacttgcagagatttataatctgttggatcaagatttcagtcagaggactattacacctgttcagaatgcagtggcttttaatgtatctgctccagaaccagcacaggcttctataaatgcaacttataatcattcaaaatctcagccaaagatcatttgttctcattgtggatatacatgacacactgtagacaagtgttataaagtccatggttatcctattggtttcaaacacaagaacaagtctactcaacaagataaaccagttgctaccaaacatgtggttgctcagcttgctatgatgcctactccatcaaatgatttacttgcaggcatggcaaaaacacttatcaaagatcagattcagggagttcttgcttacttctcggctcagcttaatactaatgatgcttatcctaatgttgcctcttcttctggtgctaca

SEQ ID NO: 173822 - DNA, 363 bp, Arabidopsis thaliana landsberg
atggctcggctagctgatctgcaaaggcagatagatgaagcttctgaagaagttcgtcatctagctcaagatgagcagaaccgaaggcctcagcacaaagagcttcatcaagagggcttcttcaacgaggatgactggtatgaggatttacatcatggaaattttgcttttgatgatgcttctcctctgtcagcagaactgcaggctacaccttggcccccgtcttacaagccaccccagcttcccatgtacgacggacactcagacccgaagcagtttttgatgagctacgaagcaaccatatctttgtttggtggcaatactgcagtcatggcgaagtctttcgtcatggctgtcaagaat

SEQ ID NO: 173823 - DNA, 2471 bp, Arabidopsis thaliana landsberg
ctggacttctacaacctctcccaattcctgaaaccatttggactgatatctccatggatttaatagatggtcttcctccatctgcaggcaaaacagtgatctttgttgtggttgatcgtcttacaaaagcagctcatttcatggctttttagctcatccttacacagcgatgtctgttgctcaagtgttcatggacaatgtctttaagcttcatggttgtcctaaatccattgtcagtgatagagacacagttttcctcagtacattttggaaagagctttttgctttacaaggagtggagcttaagttttcaagtgcttaccaccctcagagcgatggccaaaccgaagttgttaactggtgtttggagacatatttacgttgtatgtgcagtgataaacctcacctctggagtgaatggttgtccttggcagaattctggtataacactacctttcacacttctattcagatgagcccatttgaggctgtttacggtcaagctccaccaatacaccttccctacttacttggtgaatccaaagaggcagtggtggcgcgtagcttacaagagcgagaaaatatgttgttggtgctgaagtttcatctcttaagagcacaacatcgtatgaaacaatttgctgactctcaccgtactgaacgcagtttcaacattggagatatggtttttgttaaactccagccttatcgacaaggctccgtggtgatgaggtataatcagaagttagctcccaaatattatggcccttataagattgtggataaatgtggcgaggtcgcttacaagctgttgctgccacaagattccatgattcactcggtctttcacgtctctcagctcaagaaaaaaatagttataactctattaatattattcctacaaaatttctacaacaatcctacgactttgttttcgtaggaaatatgaaggagtatgtcctaccaattttctataaaaaaaaatttggtaaaagtttcgtagaaaatttgaaagaaagtttcctaccaaattcctaccaagtattttcccatcaaattccttccgatttcctacaaatattcctacgactctacattttattggattttcgtagaaaatttcctaccattttcctaccgtatgttttgtaggaaatttcgtaggaaaatcgtaagtacttggtaagaaagattttctaccaaacttttcgtaggaaaattggtaggatatcaccatgttttcttgtagtattatgagatacaagttggtatatagtattgggttgccttcagagatgatagatgttttcattgataattgcatgatattctggaaagaagatgaccaattgctggaatgtcgattttgtgggaagccaagatataagccaagttcacgacgaaccaagatcccgtaccaacgtatgtgataccttccaataaccgatagacttcagcgactatatcaatcagaaaggacatctgcatcaatgagatggcatgctgagcattcacgtttagatggaaaggtcacatatccatcagatgcgaaggcttgacaacattttaacacggtacattttgactttgcaagggagagtaggaatgtttatcttggtctatacactgacaggtttagtccatttggtatgtccggtcgggagtattctttgtggccggtaatcgtgacaccatacaatctacctccatttatgtgtatgcagcgagaatttttatccttgagtattttagtctctagtcctaagcatcctaaacgttctcttgatgttatcttacaacctttgatctatgagttacatcagctttggtataccggagttcgtacattttattactcacaacaacaaaactttacaatgcatgcaatgcttatgtggaccataagtgattttcctgcatatggaatgctatcaggttggactacacatggcaggttatcttgtccttattgcattcatcggacatatgcatttcaactgaaacatggtcgtaagacaagctggtttgattgccatcgtcgttttcttctgatgagtcatccgtacaggaaggacaaaaagttttttaagaagaacaaagtggtatgtgaacctccacctgtatatggctgcaaatggatacatagatttgctaagttggaagagttgaatcgtgtgttcaactttattcctccagaaattcaccatttgctttaaaaaaagattcaacccaatttttttgggaccaccataaagctgaaaatttacactttttagctgaaaattgttcagcctcaaaataggagagaaacgaattgaacgtgagaaaaatttgtaatatttttttttatcatatttaaattaattaatttgtttagagaatctaagaaattcaaatactaaactaattcagttcgatccttaaatattttggaatcttgtttttgccgaaataaatcaacaactataata

SEQ ID NO: 173824 - DNA, 866 bp, Arabidopsis thaliana landsberg
  unsure (1)..(866): unsure at all n locations
tcttcgtcatgcccgcnagagtttagtggagaaaaattattgagattcttctacatcatgtggtacggccgatgaacccaactcaccaatctataatccgagactttctctactctgtctctgcaccggcaccggctcagtacccgtcagtatccaactggtggaagacagtgaggctatacagagaccagacaggttccaacatcaccgacactcttgtcttatccggagagttccacgactcaacgtactctcatggatctcatctcactcgcttctctgttcagtctgtgatcagaactgccttgacttccaagttaccactaaacgctgtaaacggcttgtacttagtcttgacctcggatgatgtagagatgcaagagttctgcagagcgatttgcgggtttcattacttcactttcccaagcgttgtgggtgcaaccgtaccgtatgcttgggtgggcaacagtgagagacagtgtccagaaatgtgtgcgtacccatttgcacagcctaagccatttccggggagcgggtttgtagccagagagaagatgaaaccgccaaatggagaggtaggaatcgatgggatgatcagtgtgatagctcatgagctggcaaaagtgtcgagtaacccgatgttaaacggatggtatggaggagaggacgcgacagcaccgacagagatagcggatttatgtttgggagtgtatgggtcaggaggaggaggaggctatatgggaagtgtgtataaggataggtggaggaatgtgtataatgtgaagggcgttaaaggaagaaagtatctaattcaatgggtttgggatcttaataggaacagatgctttggaccaaacgctatgaat

SEQ ID NO: 173825 - DNA, 105 bp, Arabidopsis thaliana landsberg; identical to SEQ ID NO: 41808

SEQ ID NO: 173826 - DNA, 1120 bp, Arabidopsis thaliana landsberg
gattttaacctaccaatctctcctctctttgccatgtttgcttgttatgtcgactatgccattggcaagttttgtaactgtcttctctcagctgcttataggtgcacaccatgtgcttgtatacatgcctgacagagctgcttgcttctgaattcgtactgtctattggtagcttttgggttttcccggtatgagaatttgatcctttctttgattttgtttaggatcaagaatatgaacttctgacagattatgcggatgatgatggcgcttattcatctggttccgtcttctccagagaagctcttctgtttctccagcttcttccggccttcaattcatctggagattggtagaagtcacgtagctacggaacccggttccgagaaactcggcagtctgtgtttgaacatctcatgttcagctcacaagattgttcggagtccatctttagacagacatgtagtgaagcagatcagagttcgccttgtgcagaagttgaatactttacttttctctaaaccgaagcattacattccaattcaaatcctctacaaatgccgatcttacctctgcatcgaaaaccctcgggccattctctcaatgatccgtcggtatcctacaatctttgaactttttaccacacctacgccacatttgcctatgaatgccactaagccgttatctcaactatgtgttcgtttgacatctgctgcatcatcccttgcaatgcaagaattgaatctgaagtccgagatctctgataaattgtctactaagctccagaagctactaatgttgtcatctcaccgcaggttgcttttgtctaaactggtccacattgccccggattttggcttccctcctaatttcaggtctcggctctgcaatgactatccggacaagttcaagactgtggatacttcctatggaagagcacttgagcttgtctcgtgggatcccgaattggcgaaccaaatgccatctcctgaagttgataggggtttgattgttgatcgtcctttgaagttcaagcgcttgaatcttcggagagatttaaatttgaaaagacggcaccaaggtttcttgataaaattagagaatcacctacagtgtgtcc

SEQ ID NO: 173827 - DNA, 1151 bp, Arabidopsis thaliana landsberg; identical to SEQ ID NO: 16881

SEQ ID NO: 173828 - DNA, 712 bp, Arabidopsis thaliana landsberg
atgaacttcgggagatttgataatatgaggtcatggaacaagagcagtgattgctgttcttgggagtctgtcacgtgtgatgctaaatatgccaggtgatttcactttatcttcttggcgctaatcttaacaacactttaaaaccaaatagtggtcttttcaaactccaatatctccaaaacctaacccttagtggttgcaatcactctggagagattccttttacattaggaaccctttctcatctcacctatctcgacctttcgttcaataaattagttggtcaagttccatctacaattggaaacttgaccaaactaaggtacctgagcctttccataaaccacttaagtggcaaatcttctgtttcatttgccaatttaacgaaattgatccaactcgacatcacagaaaatgactttgaacccgagcttatacccgacatgagccgattccacaacttagaggaattttggggtgggaactttttcgggccttttcctacatccttgttcacgattccttcgttacgatgggttaatttgggggacagtaacaacaacttcacgggacatatagattttgggaattcgtctttaccttctaggcttttttatcttagtcttgctgataacaatttcgatggcccaatccctgaatccatatctaaatttctcaatctcaaaatattagatcttcgtaacaactcatt

SEQ ID NO: 173829 - DNA, 556 bp, Arabidopsis thaliana landsberg; identical to SEQ ID NO: 77284

SEQ ID NO: 173830 - DNA, 535 bp, Arabidopsis thaliana landsberg; identical to SEQ ID NO: 2772
  unsure (1)..(535): unsure at all n locations

SEQ ID NO: 173831 - DNA, 1135 bp, Arabidopsis thaliana landsberg
tctaacctcaccgcaacctctctcgatactcaaggtaataaaaaatcttagagatatatcattactgtttgatctatttgtatatctatataaaatagagtacattttcttgcaatattttaaaatttgcatcgaaaaaaaaacaaacaacaacgaatgttgtaggggagctagagcagaagtttaagaatgggaaggcgaatgtagaagagctggaaagactcgggtgcagcgtggtctatggagttaacgtgcactccatgatcacaaaacctagcgttggtggttctgcgatatatgacagagtcatcttcaattttcctacgcatggttcgactatggtcgtgagcacgaaatcaaaaccatcatgtatgattttaaattatatacacaacttgtctccccctatgcacataatttaaaacaatactttttcggcttgtttcatccacgtacgctatgtgattttaggagacatcaagagcttgtacgagggtttatgaagagtgcaagagtgttggtgaaagatgaagacaagggaggagagattcatgtgattcataagacagaatatccatttagcgagtggaagctcaagactttgggtgagaaagaaggtttagatttgatccgtgaggtcgagttttgcttaagtcattatcctggttatttcaacaagagaggaagtggaggttatagtgactctagcttccctgttgggaaatcttctactttcatgtttacgaaacagttcttttattaacttgtatttacttatcacttttgcccagataaaacttatcactatgatgataataattatagtgtttgatttagtcatttgtattaatttttctttaccaagagatttcagctacagtttttcttctttgaattcagacctcataacataatagttaggtaagattgaaaattcaatttacaacttacaacatacatcatgaaatcctaattatgaatgaaactcgactatatattcgtatttttaaggatttgtgaatacaatgtgtttgtttagtgatgataattacaaaaataccaacacaaaaaatattttacagacaccacaaatatcagtcacaaacaaaaccttcatgatttatcatttatcaat

SEQ ID NO: 173832 - DNA, 413 bp, Arabidopsis thaliana landsberg
  unsure (1)..(413): unsure at all n locations
agcaatgaggataggatcagtcagttacctgaagctttgcttctgcagatattatctttacttccaacaaaagaagtggtnnnnnnnnnnnnnnnnnnnnnnngatggaggtttctttggaagatggtgccgagtcttgagttttttttactatttcacaaatgatcttgagaggttttcatataatgtcagcaagtgtttgttttcacatcaagctccgtttctacagagtttgcatctcaatatgaactttgggtgtgaccctcgtataatggattttgagatattgattggaattgcgtttggacgccaactgcgtaagttggtactcgaagtttactctggggattggttcacatttcctacaagtttgtataactccgaaactctagagaccttggaactctaccatt

SEQ ID NO: 173833 - DNA, 264 bp, Arabidopsis thaliana landsberg
gtgatgtctgtcctcacgaggatgaatggtgtcacagatgatgttttggatatcggttttgaagtgcaagtccacggcgtaagggaagacgatctatacacagttaccctgaaaagaattgacgacatgaagtattatttcgggactggttggagtactatgaagcattcattacatctcgtagaaggcgatgttctgaagctctattgggatcagtttgaaaacaaattcattgttctcaattttcagcataagactatggga

SEQ ID NO: 173834 - DNA, 538 bp, Arabidopsis thaliana landsberg
tctcgggataattgatgatacgtatccaagtcctggacttactgttaatgtatatagtaggactcttgaacaacttcctcaaatcaagaaccacgacgacatgattctgtttactcgcattaaggcacaaagagtcttcattttccttgtgtgttttgtggaggaggtaataaagtttggatttttattgtgtagatgcaaacttttgatagtggaaaaagagtaaacgctgcttgtagtagatgggtttcttcctctgccttgttcgaaggtgaggatttggtttgttaccaatgtagttccaataagctttcatttcctgttttggtacttagctatgcagagtatatcttacagaacaaaaccttgctccgtagataggaaaacgctttgatttggtgtgtagggtaatatgctctatactctctattaacatgagaaagcacttcattgttacttaccctcccccctttggctcaaactgtataccttatatgttaagttgactgatccaaccttgtttccagctgtttcttgt

SEQ ID NO: 173835 - DNA, 249 bp, Arabidopsis thaliana landsberg
gagctgagggcaaaggctactcacacatcatataagtttttgctgcacgagacaagggagatgaaagtgtggaatattaaactgtacggactggtgcaatgtaaacgggatttatggtttacggcttgttagacgtgtttggataagattataggggagctttctaaatgttgtgatggtaaagaaggagggagagttttgagtgggagttgtaactttagatatgagatttacccttttcttgacact

SEQ ID NO: 173836 - DNA, 933 bp, Arabidopsis thaliana landsberg; identical to SEQ ID NO: 11107

SEQ ID NO: 173837 - DNA, 799 bp, Arabidopsis thaliana landsberg
acaagctatcctctctccacaaagtcacgatggatcgtggacgagaaaggtcaaagggtgaagctagcatgcgtgaactggccggctcatctccagcccacggtggctgaagggctaagcaaacaaccattagactctatctccaagaagattgtgtcaatgggatttaactgcgttaggcttacttggcctcttgatttggtgactaatgacacattggctcttaaagttaccgttaaacagtctttcgaaagcttgaagttgtttgaagatgttcttgggattcaaactcacaatcccaaattacttcatcttccccttttcaatgcattccaggtaaatttaatgatagagcatcggtttgttcgatctgaattgtgccaaactaaaccgggttatgttcattagatggactaatatctaaacgtgatctaattcgaaacaacaacaaattaaccaaaattgatcgcaaaagaacctagtctagctaagggacaatataaaccaaaatcaaaccaattcccatttgctaaatttaacaaacaaataagtgacatatcatcaattcattgtcaaatggttttgatgtgaaactgatatatggttactgttattatatgttgtcaggaagtggtgtcgaacttaggagaaaacggagtaatggtgatactagataaccacttgacaacgccaggctggtgctgcggcgataatgacctcgatgctttctttggctaccctcactttgatcccctcgtctgggccaagggcttgaggaagatggctactcttttccgca

SEQ ID NO: 173838 - DNA, 803 bp, Arabidopsis thaliana landsberg; identical to SEQ ID NO: 12302

SEQ ID NO: 173839 - DNA, 891 bp, Arabidopsis thaliana landsberg
ctcgagaagatgacccgactagtgtcgcagattctttagctttgtcgacccgataaagttaaaatagggagagtcaatagcacaatagcgataagtttcaaagcttctttcatggcggctctgagctagttagcttgtttcgatgttgttgtgaagataagtctttagggttttattatggtatcgatttcaagagatatttatacaagcatatacttaacttaatactttattgtaattgtatacaatctgctcttgagctgatacattttacatactcactaatattttattatatgatcttacgaattgactatgtgaaatcatgtgctcttctttttgactactctctcgtcgccaattattcgttcttgggcaatgagctcatgtgatacggtcacgtgacatatgaattttttctgctgatgtaaatactaaatccatatctatacctatttaccacggccggtccaattctgaaaaacaaaattgtgcttttttttaaatatttttttgttaatgtagtcctctaaagtcagttttagaatccaaagttttttttgtttgtttgtgctttggaccggaatacatacttctatacaatatatgtaatattttggtaagagagactaacatatatggtcgaagcgtttttacaaattccccaatgggtgatgggagcctgatgactctgatctacgttttgttggcctgattaatggaacaggtgaaatcgtattgtcctcgaactttcttttcaaccctttttacgttttctattataatcccgagaggaacactattcgtagagttgaaatacgaggatttgaagcatctcagcattctgtagttcatgtctttatagattatgttgagaatgtgacacctatg

SEQ ID NO: 173840 - DNA, 659 bp, Arabidopsis thaliana landsberg
ttatatgcaggtgtatcccatgtcctcgcatgcagcttgtgtggttcatttgaaaagaaacattatcgcattctttaaaaacgaaactataggaagtctagtatcaaccacggcgagagcgtaccgcttatctgatttcaacaaaatatttacggagatacgagcaatgaacggcccatgtgctgactatctaaccggaattggttttgagcattggacacgatctcattttgtaggggagggataacgtcatgacaagcaacatcgcagagtcttgaacaacgtgttgaccatgtcaagagactatccggtgatctcgatcctagaatcttggagaacaactttggtaacatggtttgcccttcgatgggaagcagctcagatggaagataacatattccctccaaagataaatgacatggttatagagaactttgaaaaaggggcaggttatggagtcttgaaaataggcggcggtctatatgaggttagagatatggtgaattgcgggtacgccgtaaatctgtgggaaagaacgtgcacatcccgccagttccagctacttaccataccatgttctcatgcaatcgctgcggcaatcagagaaggggtcaaagttaactcaatggcccggtacaccacaccgtcctcaactcgtt

SEQ ID NO: 173841 - DNA, 415 bp, Arabidopsis thaliana landsberg; identical to SEQ ID NO: 56269
  unsure (1)..(415): unsure at all n locations

SEQ ID NO: 173842 - DNA, 694 bp, Arabidopsis thaliana landsberg
cagtgtctgccatagagtagacagtcattgttgtgctctgctaccatgactagtaacttacaggctttgcttgatcattcgtcaaacagagcttatatctatgaagcgtataagggttacagactgtcgacactcttacgcagcagttcatctttagaatcgaacatgccagaaaactgtatcttgtgcacatcctgtggctaatggaagtcaagggcattcgatcagccatgatttttgtggtccacttgcaggtgtcctattgatagctttattcatttatcatcaggtgatccatttgcagttgataattagccgttgtttcgtgttttagaacatgtcaaaggttaagttttatgcgtatcgagcttccagtgtataatacaggtatgcattctctgaattgtcagtatatgggactatctgcaataagtacattccagtctcgttcagtacataatatatgcatgcgccagatgttgccatccgtggattggacattcccactgttgtcctagtcatcaaataggacattcccaggcacgctctgcagtccttattctttgagttcagtgggcttttcatgttcacctcataggcatattcaacgtgtggcgcacaccatagatcctaggtctaatgtgcatggtgttgaacgtacagctagagctgatagaggaggactgtctgtagg

SEQ ID NO: 173843 - DNA, 486 bp, Arabidopsis thaliana landsberg
atgttggtttaagtttttttctttttcgatcctgatgataacaacggttattggtgttagcaaagaatgagatgaacagtcatgtcaaaactttttgttggagcttaagacggtttcctcaccactctcggagatgagacgtcgtgagttattgatcatcgttttgaagaattccgtgcggaggattgacatggctttaatgggggggagggagaaaacaaaccacctgggggggaggggaatgagatgcttggtgtgaaagaagacaccaatctatttgaagagatgatggagttggcaaaagataggatgatccgctttaggaggagaaaaccctaatcttggatcttacgaaaacgtccacacttagcttagtggcgttcttactagctactttacatgtatcaacgaaattggtgaaggtgcctataaacgatgggtcgagccataccttgaggacctcatttctagggcacgaggagcttt

SEQ ID NO: 173844 - DNA, 219 bp, Arabidopsis thaliana landsberg
atgaaaatcctgattgctgatgatcacacgatcgtaagagaaggcatcaagctgttgctgatggaagcattgcctggtgcagacgtggtagatgtggtagactccgccagcctgttaaaacttgtatacaaggaaaaatgggatgtggtgataaaggatataaaatccgcccggcgattccgggctggaggctgtaaaaaagatcaaggagcacagccc

SEQ ID NO: 173845 - DNA, 1659 bp, Arabidopsis thaliana landsberg; identical to SEQ ID NO: 11011

SEQ ID NO: 173846 - DNA, 547 bp, Arabidopsis thaliana landsberg; identical to SEQ ID NO: 4168

SEQ ID NO: 173847 - DNA, 1457 bp, Arabidopsis thaliana landsberg
  unsure (1)..(1457): unsure at all n locations
cacatcgccttaatcgaaatccatctttagtactaaagggataaagattttatgaaatttagtttggcaaacaaccttcatacgttatgcggcgtacatttggatgtttgtgctatgctcatatcccatcacgtgataaacttaaatttgcatctcacagtcgcaaatgcgtgtttcttggttatccttatggtaaaaaagtttggcgggtatatgatcttgaaactgacaagatttttatgacgcaacgttcgatttcaagaggatttctctccctttgcttgccatccatcaagcctattatcttttgtttgcaattgaatctcaatttcatttagatgatgatgattgntcttcgtttgcgattattgctctggtttccattgatttatcatctttggaagttacacctacttactatagatattgtttcttggtctatcagatcgattgatctcataccagaaacgatcgatccttctactccctcaacgatacctgtaagcacaagatcgatcaattccacaacatgaatgattgatatatatctctacctcgacaacattacttgcaagttttggaccggtcgatcagttctctaaaccgatcgatccatcaaaaacaccgatccctcaatatgttggccaggtcaaatccgcctcttcgggtcttcctgaactattggacaaaggtctgagaaggaaaatgttgttaatattacttaaagattatattatccctccaagacattcttcttctcacggtctatctcttacttttcctaactcaacttcctcaactttggtttatggtaaggtcctatatctcctttcaaattatttaatagattgtggatttgtagtagaccacatagcatttttggtggatgttcttgatagcaaggaacccaaactttttaaggatgcaattctttattaaaaatgatgtgaagctatgtaaaaagaaattgatgcttttgaagcaaatcatacttgagatattatagagttatcacatgggacaaagtgatcagtagcaaatgggtttataaactcaaattcaaatcggacagttcacttaagcttcacaaggctcgtctagtggttatggaaaatcatcaaaaggagggtattgattttaaagaaacttttgctccactcgcaaagttgacaacaatttattctcttttagtgttgctgctgataaatattggaggtccctcagatggatgttcacaattcttttctacatggtaatcttgaaaaagaggtctacatgaagatgtcatcatgttttaaatgtttggatctatctaaaacatttgtcggttacataattctctatatagcctctaacaagctacccgctgttggttcgccaagttatcaactgcactctgtcacatttgtttcactcagagttatgaaactttctcattgttcactctcacgaatggg

SEQ ID NO: 173848 - DNA, 671 bp, Arabidopsis thaliana landsberg; identical to SEQ ID NO: 492

SEQ ID NO: 173849 - DNA, 197 bp, Arabidopsis thaliana landsberg
  unsure (1)..(197): unsure at all n locations
gagtcaaaaaatgtagcggcggacgaggaagaattgcnnnnnnnnnnnnnnnnnnnnnnnnnnnnnnnncttctacctttcttaatctgccaccggtttcttggatcatccgtgggatcaccatcaaaatcaccaaaatgttgctagaagatcttagaaaatatgttatcatgatccacaaaagtgatgttaccact

SEQ ID NO: 173850 - DNA, 1170 bp, Arabidopsis thaliana landsberg
aaattctggtggagtaccaagaacaacaataggggtctttattgttttgcttgggataaggtgtgtataccagtacagggtgggggtttaggcttccgtgacttcaaagaattcaacatagcgctattagcaaagcagatcgggcgaattcttcgataccccaactctctcttgagtcgtgtcctaaaaggtagatatttcagatattctaatatcatggagtcaaagccagcaaattccccttcctttgtatggtgaagcattttggcggcgaaatcccttctcgaagagggacttaagaagaacataaaatccggttttaacacaaaagtctggacagacaactggatccctactatcctggcccgtccggcgaaagatattggtgctcatcgtgatcctcaatgatatgtcaatcacctaattgattttgacacaaaagagtggaaagtggagctcatccaagcaattatcgatcctagcgatatacctcttattctgagcctcaaaccgagcagacgcttccaagtcgatgacttttgttggatttacacaaagtcgggtcactatactgtgaaatctgggtatcttcgagcgacgcaatggaatgatgaggagaatgaggtcactgaaccgagcacaaagatccttaaaaaacaagtgtggaaagtaaaaacagctagaaaaattaaacatttcctctggcaagctctctcaggatgcctagcgacctctagcagactcgtagaccgacattgtggatcagatcgtacgtgtatgagatgcggcggagtttctgaatctataaatcaccttctctttgagtgccctccggcaatgcaagtttgggccttgtccaatattcccaccaatccgggattcttcccgagtcagtcgatcttgaaaaattgtgatttcctcctctggagagcaaaaggtttgggagcaacaaagaagattttgtaagcctttccatggatcctttggtatgtttggaaagctaggaatgataagatctttaataataaagacattttacctcctgataccttacaactcgcaatctcggaagccactaattggagacttgcgcaaattattgaacaatcagcggaaaacgaggaagagagtccgactatgctccaagccatcccgaacaacaacggacag

SEQ ID NO: 173851 - DNA, 293 bp, Arabidopsis thaliana landsberg
  unsure (1)..(293): unsure at all n locations
caaacaaacaaggatttctgtctccttatagatcatcacgaaaccgcgttgtgagatatcatatgtctcaattatattctggtcatcctcctaggaataaacatgaattgttcaaccaatgtcacgcatctttacgttctgttatcgagagaacttttggagtttggaagaaaaaatggagaagtatttctgatttttccaagatataatgttcacattcaaaaaannnnnnnnnnnnnnnnnnnnggattacataattttatcagaatttcaaatttttcagattcagattt

SEQ ID NO: 173852 - DNA, 444 bp, Arabidopsis thaliana landsberg; identical to SEQ ID NO: 13199

SEQ ID NO: 173853 - DNA, 600 bp, Arabidopsis thaliana landsberg; identical to SEQ ID NO: 73391

SEQ ID NO: 173854 - DNA, 277 bp, Arabidopsis thaliana landsberg
atgaaaacatccatgaacggttggggcagcgggcttgccggtgtcgtcatcttcagcggctccctgccggcgacgcgcgtggcggtcacggatttctcgccgctgtttctcacctccgcccgggcggtgatcgccgcgctgctgggtgcggcgctgcttcttgcgctgcggcaggagaagccgtcgcgcggcgatctcctctcgctcgtcatcgttgcgctcggcgtcgtcgtcggctttccgcttctgacggccttcgccctgcaatatgtcacgg

SEQ ID NO: 173855 - DNA, 746 bp, Arabidopsis thaliana landsberg
ctttttgagaacgaaaccaaaagagacttagtactgactgagttctatttattgatttgtggcaaagagtaggtatttatcacagaatatctctttaaaggacaaggtattagaatggacatagctctactttgaaagtgacatcggtgtagcgtctcacatgtttgtgtcttccacattttatgtttctgacctcttgcttggtgatttgactttggtaaatgcagcattattagatagtaatgctctacggaaggagaaattagtattaacctgttaccgaaggaaacaaaatggttgatactttggtatttgccctaaacggccatggttcttctttatatgttgttccaggtgaaatctagaatgatgggagactctacttaccgaaacacagtcgattgcttcatcaaaacgatgaagaccgaggttagtattcttttctagttcacatttaaccaatctctctcttttgatgcaatcatgaatgttctgtttttggtctatttaaaggggattatggcattctacaaaggatttctcccgaattttacacggctaggaacctggaatgccattatgttcctcacattagaacaagtaaattagattcttctctcattctcatttacttttcgatgatgattaattttggattgctcttctttttttaacatttttctctctgtttcatcttcactctgtgacaggtgaaaaaagtgtttctaagagaagtcttgtacgat

SEQ ID NO: 173856 - DNA, 480 bp, Arabidopsis thaliana landsberg; identical to SEQ ID NO: 57467

SEQ ID NO: 173857 - DNA, 690 bp, Arabidopsis thaliana landsberg; identical to SEQ ID NO: 67013

SEQ ID NO: 173858 - DNA, 884 bp, Arabidopsis thaliana landsberg
  unsure (1)..(884): unsure at all n locations
gctcatatctggcttttcntcgatgtgtcagctaatgactcaccaatctttttcctgagaacatcggctggatctttgctcatttacggtatctgaatatatccaagaatgattttcaggggaacctgccatcttctcttggtaacatgaatggtatccaatatatggacctatctcgcaacagtttccatgggaagctaccaagaagttttgtgaatggttgttattccatggcgatcttgaagctgtcacataacaaactaagtggagagatttttccagaatcaaccaactttactaatatattggggttgtttatggataacaatctctttacaggaaagattggacaaggtttgcggagcttgataaacttggaactgcttgacatgtcaaacaacaatctcacgggtgttattccaagttggattggcgaacttccatccttaactgcacttctgatttcagacaacttcttgaaaggtgacatacctatgtcgttgttcaacaaatcaagtctccagctgctagacctatcagcaaacagtttatccgggggcatacctccacaccatgattcaagaaacggggttgtcttactcctacaagacaataagttatcaggtactattccagacacattgcttgcaaatgtcgagatacttgatctgagaaacaacagattctctggaaagatttcggagttcatcaacacccaaaacattagcattcttcttttacgggggaataactttacaggccagattcctcaccagttgtgtggtctaaaaaacatccaacttcttgatctttccaacaacagattcgacggaaaatctcacatgtaacagcaatacgtcatttggttttggtgaagaatgtac

SEQ ID NO: 173859 - DNA, 104 bp, Arabidopsis thaliana landsberg; identical to SEQ ID NO: 61730
  unsure (1)..(104): unsure at all n locations

SEQ ID NO: 173860 - DNA, 73 bp, Arabidopsis thaliana landsberg
  unsure (1)..(73): unsure at all n locations
atgagaaagaaaataaagttgttggaagaagaaaactgtgacatgaganagaggatgcttctcctagaagaaa

SEQ ID NO: 173861 - DNA, 435 bp, Arabidopsis thaliana landsberg; identical to SEQ ID NO: 45105
  unsure (1)..(435): unsure at all n locations

SEQ ID NO: 173862 - DNA, 958 bp, Arabidopsis thaliana landsberg; identical to SEQ ID NO: 6511
  unsure (1)..(958): unsure at all n locations

SEQ ID NO: 173863 - DNA, 496 bp, Arabidopsis thaliana landsberg
  unsure (1)..(496): unsure at all n locations
aactcatgagatcctcntcgctattgtccaagatctttctcaaagcatgagatagatccaaagagtattgacatccttgtgtctaactgcagcctattctgtccttctccatccataacttctatgatcattaacaagtttggcatgaggagtgacataaagagcttcagtttgagcggtatgggctgcagcgccgggattctttcggttaatctcgtaaaagatcttatgaagattcatggtgattctttggccctagtgttgagtatggaagctgttagtccaaatggttacagagggaagtgtaagtcgatgctcattgccaacactatcttcagaatgggtggggctgcgattcttctttccaataggaagcaagattcgcataaggcgaaatacgaactccagcatatcatcagaactcatgttggttcacccactgaatcgagcgagagtgtaaggcagctagctgaagaaaaaggcaaagggggagcag

SEQ ID NO: 173864 - DNA, 221 bp, Arabidopsis thaliana landsberg
cggcgccgacgtgctgggcgcctgcgagaagtccgcggccgaaacgggtttgacgtccacggatcgggtgtacttgaccggcgggtgggacaccccggctgacctgggcgacaacatgctggcgatctttgccgaaagcgcatggatggtgcaggaagccaaccccgatccgggcgcgcaggaaacgccgccgggaaagcgagaaggttacccggacgctg

SEQ ID NO: 173865 - DNA, 96 bp, Arabidopsis thaliana landsberg
agtcaagttcatagacatgagggagctcattggagttcaagaagaaccaaaggaggatttcaagcttaagagggagaatgttggataagcttgaaa

SEQ ID NO: 173866 - DNA, 697 bp, Arabidopsis thaliana landsberg
aagtcgcctgcgcccggtgcggctcccgcgcttactgcggcggctcttgccccgaccctgaccctggcggcccatcccgcggcggctcttgctacttcaacgggtgctgccaatgccccgacgctgacgcttacggctagccttcgggctggcgtggctactgcaccagctactgcaaacggaccgaccgtcagcacggcagcactcacgaacgcttcggctggcgtggccactgcgacagctgcggcgctggcgcctacgctgaccaacacgtccaacgcctctccgggtgctgctgctgctacggtcactgcgatttcgcctaccgttactgcgttggcgtttgtcaatgcttcggcgggggtcgctgcggcaactgctgtcgccaatgaccctgcggttacgcgtgcggtaaatcccacgcctggcgccgcctctgcgactgctgcggccatcggtcctgccgtcacatcaagtgcttcggtaactcccggagttgctgctgcaaccgtggttacacgggacgcaaatgtcacaacggcagtcgctatagcgtacttcggctccggttccggcaacacaaacggcgccggtgactctgtcatcagcgtctcaactcctgccagcgttccggccggtgctgtgatggttctgtgtgccggtggtttctgcctaagcacgacgccgaccgttgcgg

SEQ ID NO: 173867 - DNA, 337 bp, Arabidopsis thaliana landsberg
ttatcaccaccaatagaatcaccactaaattcatttagtgattttcttcattattataataataatatatcgatgaagattttatgtaaactccatggatgggtgttcgtgagtattctacacgagttttgaggcggttttttaagtaatgagtttgagcttgagcttgagtatacttgcgttactcattttttgaacctcaaatcaaacttggcgtttaaaaggttgccaaagactcttgtgtttgtagcgtatagggatgagtttggattcatggagccgcgcttgagaaaaagttaggttggtaggaggtttaagaaaggagaaaacccgtttt

SEQ ID NO: 173868 - DNA, 231 bp, Arabidopsis thaliana landsberg
gagcgaaagggacatacggagcggccaattaagttctgccggttggccgggaaagcgccggcgggtgtcattgcggaactggtggaggacggcgagcttgtcgatggtcttccggagattggggggaataacgacatgatgcggcgcgatagttgcttgaagtttgggaaacagtgggggattaaggtctgtacgatcgaagatctgattgaatatctcgacaagacgcag

SEQ ID NO: 173869 - DNA, 431 bp, Arabidopsis thaliana landsberg
tgccgataactaaagcagccaaggagcttaacattggtgtaaccctcttgaagaaaagatgtcgtgagttaggtattcctcgttggcctcaccgtaagctcacgagcctaaacgctctaattgctaatctcaaggtacgttcgtcaacagacatttacaatcaaattgcctatacattttggggttacaacacttatatatgtgatggtcttctttgaaaggacttgttagggaacacgaaggggataacgcccaagagtaagctgaggaacgctttggagcttttggagatggagaagaagatgattgaggaagttccgatttggaatttggggataagactaagaggttaagacaggcttgcttcaaggctaaatacaaacggagaaggctcttctcatcttcttcatgagatcaagagctcgtctcta

SEQ ID NO: 173870 - DNA, 516 bp, Arabidopsis thaliana landsberg
atgtcatcatctcctcctctctggctctccacggtgactttcgttcatctaatcggcgagttcgtcttcaacaaaacgacaatctcgtcaagaagcttcctgatcagcttcatcacaatgttatggtgagtatttatcctttcagttcttctatttataattcaattctgctcctgttttaatgtatatgatgtttctgtgtacacatgtttcattcggtaaaatggcttttttcccacgtcgattgattcacaccaacgagtgtttggtaaatcccatgatgattatgtgttctctcttttatatttcaattgtaggatatatgtaattgttttgtgtcatgggattgatttgtgttaatgcgtttaggaacattcatgggattgatttgtgtcatgtcgagagattgagtttgcctaaattagctcatgattttttgctgcatgtactctttacattacatagttctctaacttctgtctgtgatgaaacgaatgaatcccataattcttctgt

SEQ ID NO: 173871 - DNA, 396 bp, Arabidopsis thaliana landsberg
ccaatgagtgtagaactccaatttaaggcaggcactttcagtttacttttggtcttgggaaagtcatgtaacgatcctctgggatcgaaccttgatgcaccgcggacaagattatgcattcgaattgtactctagaataacacgtgaattcaaaacacatgagataatcttgtggatttcagtgttgaatttgtaaaaggtaaattttgatgattgtgaaaactgtgttgcaggttggaaggagaacatgtggcgttgggaaaggtgatacaaggaatggacaatgtattcgccattgaaggtggagctggaacttacagtggcaaacccaggaagaaagttgtgattgctgattctggagagatccctaaagacaaatgggatgaagagagatga

SEQ ID NO: 173872 - DNA, 553 bp, Arabidopsis thaliana landsberg
cgcccataacggcttcatccgcgccatgatggaagccaaggtgccgttcgatcacctgggcggcacctcgatgggcgcgatcatcgcggcgggcctggcccaggaatggggcctggaggaattgtccgaacgcatgcgcgcggtctttgtggattccaatcccctgaccgactggaccattcccctgatctcggtgatgaagggcaagaaggtcagcgccaagctgcgcgagaatttcggcgatatccgcatcgaggagatgcagaagcctttcttctgtgtctcgtccgatctcaccgccgggcgtatccatgaacaccgcgcgggcctggcctggcgcgcgctccgcgccagcgtggcgctgccgggcatcctgccgcccgtggtccatcacggccatcttctggtcgatggcggagtgatgatcaacctgccggtggatgtgatgcgcgcatccgccagcggcgccggcccgatcatcgcctgaaacgtgaccggcgaactggacctgcaggcgcgcgacgaacgctatggcgaacggccctggggcggc

SEQ ID NO: 173873 - DNA, 518 bp, Arabidopsis thaliana landsberg
  unsure (1)..(518): unsure at all n locations
cagatggttcagatcgtcaagcacctcaacttgccttccgtggacttctcgatggagaaggtgcagcatcttctgtagcacgaggctccaactgccctgcgccnnnnnnnnnnnnnnnnnnnnnnncacagcagcatatgcccgtgcagacatccaggattgcgtcaagggctgctcctggtggggcgttgtctgcagccagggagttgctacgtaaccctccaagttccacggcctcaccggaggccatgaggtagtggcgtaaagatgttgactgtctcctcggcatggcccatcctggctcggccaggtccaggcctcgatcattccggcgtcaacgcgaggcgtcggcatctgtgcgctcaccatcagtgaggggtgcatggactgannnnnnnnnnnnnnnnnnnnnnnnnnnnnnnnnnnnnnnnnnnnnnnnnnnnnnnnnnnagagggatgacgacctacgggcagagctcaactgtaggtgtgtgggcgaggacgcttgagtctctctg

SEQ ID NO: 173874 - DNA, 5825 bp, Arabidopsis thaliana landsberg
tttccgaatgcaagaaatcgatgtagacttacatatgcttgaactcatttttgatattcttcagctcttctcgcgtagagttctttttctggcaagcatgaatatttcacagaaagacaatcctcgaacatacaatatttacaaacaaagaaaaataaatcaaagtgatcttagtgaaaatttacaaacgaatagtgattaaaaatacctctcaaatggtttaaatagtcacaatttcttaaaacatatgcatgtgcgctttggtagtctttctctgaaagccattctacatgcatttcaccacttggacggccgacgtgcataaatatgttaggtactccagggacatgatatataggaacttcaccttcatcgaatcttgttaacctgattcatgtaattgaatgaagatcgaagtatagaaaatagttaaataaataaatgtatttaccttgatttggtttgtatatgatcggtaaagtagtgctctgaaaagtaagcaatctcgtcattgatatatgactcaaaaattgagcctacagtatatcttttgttctttgcttttcaactttttgaaaaacctctcaaatgggtacatccacctatattggatagggccacccaattcagcttcgtatgggagatagataggtaagtgttccataacatcaaaaaatgatggtggaaaaatcttttccaagttacaaatgattaaaactatgttctgtttgagaatttgaatgcgacttgtctgtaaagttctcgaacataggtcccggaaaaatgctccaattcctgaaatatatgtgcaagttaaataattagataaaaaaatgatggcaaataaaatagtaagtattgtacctgataaggcaaggtggatattccggtcaaggagttcagcaaagataaatgaaagtagtcgctccataaaaacatgacaatcatgactcttcatgcctgaaaactttccattctccagatctacacaactagccaaatcgctagaataaccatatggaaatctaacatcatgtttcacacattgaaataaactttgtttgacttcatctatcaatgaatacgctgaaaatggagctttacctttactatcaatatgtaagcctggccgagaacaaaatttctcaatatccaatcttgacatgataacaagatgctttccttgtgccaattatgttccttcccatagccacgcatcttcttttcatgaccgtttccaccaacatccttgttttggtggatttacactagccaaccgctcgtaataaacttgctcccttgtcaaagactcgggtggatactcgctagacgcatctcttcctttcaaaaagtcttttctgttcctacgggatggatgaccatgaagaaaaaatctacggtgacaatcaaaccagcatgtcttccgtccattgggtagataaaaagactttgtactttccatgcaaactggacaagacaatttatcatgagtagtccatcctgataacatgctatacgccggaaagtcgctaatcgtccacagtagtacaacttttagattaaaattctaacttaatgaaaaactgtaagcatcaactccagtagacaacaactcttttaactcctcaataagaggttggaggaacacatcaagactagctcgaggatgatttggtccagaattcagaatggtaagaaataagtactctgtattcatgcacataccagggggtaaattatatggattcaggatcacaggccacaacgaatgattacgagacatgccaaatggattgaacccatcagtacacaacccgagataaacgttacggggttcttcggcaaaccagggatgtaactcttggaaatatctccactccactgcatctaaaggattattcatttctccctcctttgattggtgctcaacatgccatcgcattaccgcagctgtcttatggctctgatacattctcttcaaccggtctccaataggtagataccacatacgactatatggtactttggttcttcgacggtcgtccttaggcttccatctttgtgcgccacaaaatcgacattgatcttctttttcgtcttctttccaaaatagcatacaattgttctgacaaacatcaatcgtatgatatggaagtcctaaattacgcatcaacttctcggtctggtaatgtgaagttgtagcctggtttccttctggtaaaaaatctgtaaacatttcgcaaacggagtccaccaacttttcactcatattatactccgccttgatttgcaagagtcgagatgctaaggataactacgactgcccttcacgacaaccatcgaacaatggattatttgtaccttctaacaagtcgtagaacttatttgaatggttatggaccggttcttccacattctgataactatcatcatgatgatagttatcatcataccccacgttaaaattaaatgcatcgttcaccatatccacatatggatcttctacaacattactcacttcttcatgattcgaactaaaatacgtcatatccgtgtaagtactcgttcctatatccatattcacttcttctccatgcttataccaaacataataatcaggcataaatccttgactaaacaaatgactattaactcttctagatgatgtgtttttcattcttgcatacactacaaggacaatgaaatttcgggtttcctagcgttcaccactccctctagtttcctctaaggtttcctgcaaaacaaatagaatcatgagtaatctagaattactcaatgagtttgggattcccaagaaacgttagtctaaccccacccataaccccacatgcaacatgcaataagataaatatgcgaacaaacaatcagagatacgaagagaacgtagcatgcaatagacaaaacactcaagaacttacaagttttctcaaagttttaattagggcccgattgttacgcccccgaatcaatcataattcatcaagtaaacatagttatgtcctcattcacttaacctagccatacactagttcatttcattccttaacgttatcaagttgtcaaaatgcccatatcattttaagtttcaagttcaatcttaaccaaaatctgattagttaaacctaagtgagtaagcatgcatatgatctaaagactagctctagaaaacatgtaaacaaacacacaattcaaccacaactcacagattcggtatttgagaagatttctgagtcacgagcaagatcctttgtcatagtcagccggtcgaacactcacggacgagttatcttgctcacggtcgatgattttccctcttacggacgagatccctcgaccacggtcaagtttctctcgattcgggtaaagttttcttggtttaagactattttctatcagtcgacagcctttcggttctctctcgcctcaaaaatgaaaatgggcgaaaaatgaagactatttatagtccgcctaagttggcccatgcagcaccgactaccgccccatgtctggacagctgccgcacacacgggcgacatatgtcacgggggacggcatggtgacaagtgacgacgggtgtcactccaacgccccatcagctttggctccaagactcagccgacctcggcttcaagactagtaactttagccgcacggcaccaagagtgaggtgtccacatggcggtcaaagggcacctctcaggtcaaacggcgctatttcgggcggtcaacttggttccacgggatggccagattttgctcgcggctaaagttaatgcatactcgaccaccccgccggtagtatctaagcccgaggtggacaaaaacattgttacataagcaatgatggaaaaacttgtactagtagtggttactacagcacaaaatttgcgtccatatttccaatctcatctgattaaagtattgaccaaccagccacttcgagcgatacttcacagtcccaaccagtctgggtgattagcgaagtgggccgtagagctcagtgaatatgatatagaactcaaaagtcgggtaagcatgaaggcacaagtattagctgatttcttgaccgggttaccgatgctcgacgcgccaaaacaatgggagaatcaaacttggaagttacatgtggatggatccttgtcaaagcaaggatctggaataggattaaattggaatcgcccacatcggagatcctcgaacagtcattccacctactcttcactgcctctaataatgaagcggagaatgaggccttgattaccggactttgactggcacaaggaatcggagctgaggaagtaatcgcttattatgactcacaactagtagttaaccagttcaatggatactatgaaatcaaagattcaaggatggaagcatatcttaaagttgtcaaggctttatctaagaatttcaagaaattcgagtaaattcgagttggtgtgaatacctagaggagagcatacaaccgcagatgtacttgcagcattggcatcaacctcggaccctgaattgaaaagaatcttcccggtagaatgcatcgtggaacgaagcatcaaataagggaaaaccctttttgttacaaggtctgcggcggcgcttgcccggggtgaatctgaagtgtaattgctacctatcaagaaacgaaaatcaaggaattcaaacgcgtctgaatccaaaaatgattcaggagaaattcaaagcaaattagtacccaaaaaaaggctagcgacttatttgcagagcctattatctcggttgaagaagtaattccagaggaggggttaaaagcggatcatcctttcgaagaagaagttcttaagccccatgaacatctcgaacctgaaccgcatatatttcacgcagtagaccaaaatttggctagtaagttcttaagccccatgagaatcctttgcgcgaaattttgtctagctaagaactcgttatataggcgaggtttcagtgacctttaccttctttgcattttcggatccgaagtcgaaatcatcatgagcgaagttcacgaggggctatgtggaagtcattcgtcgggaagagctgtggatttcaagataaaaagattaggatattattggctaccatgattacagattgtgtgaagtttgcccaaaggtgtaagcgctgtcaacttcaggcacctttaatccatcaaccttcggaattgttttcttccatctccgccctgttcccgtttatgaggtggtcgatggatatcattggaacattgcatagatcataacgaggtgtgcagtaccttttcgttctgacggattacttctcaaagtagattgaagctgaagcatatgttaatatcaaggatttggcggtgaaaactttcatttggaagaatattatatgtcgtcatggcgtcccatacgagatagttattgacaatggaccacaattcatttcgcacaagtttgaagctttttgctcggattgggggatcaaagttagtttattccactctataatatccacaagggaacgcttaagctgaagccgcgaacaagacaattctaagcaatcttaagaaacgtctaagtcattaaaaaggaggttggtatgatgaacttcaaccggttttatgggcatatggcacttttattaggtgatagtgcgcagaaccaccgttctctttggtatacattagcatggcagttgttccagccgagctcaatgtgccaggttttcgtcgaatatcagagtcattatacgcaggagcagattgtgccatgctattcgattagctagagaccatcgacgagaggcaagaacagacg

SEQ ID NO: 173875 - DNA, 589 bp, Arabidopsis thaliana landsberg; identical to SEQ ID NO: 22806

SEQ ID NO: 173876 - DNA, 536 bp, Arabidopsis thaliana landsberg; identical to SEQ ID NO: 22814

SEQ ID NO: 173877 - DNA, 388 bp, Arabidopsis thaliana landsberg
gctggcgttcaagctggcgaccggcgaacaggagctggacgacagggccgtggaacgcagccaggcgatgaaaggcctgatgcgctgggtcaagctgcacccctacaacatcgcgcagaaggtgcaggtggtcgtcgagcactttcgcgaaaacgtggcgccgctgctcgatggttatgccaaggcgatggtggtggtcggcagccgccaggaggcggtgcgctggaagctggcgatcgaccgctatatccagtcgcagaagtaccggctcggcacgctggtggcgttctccggcgaagtcacggacgcggactccgggcctgacccgttcaccgaacactctgcgacgctcaatccgaatctgaagggccgcgacatccgccaggca

SEQ ID NO: 173878 - DNA, 517 bp, Arabidopsis thaliana landsberg
  unsure (1)..(517): unsure at all n locations
tcagcgtttgacgcagcaaaatcgagtgggctcgatactgaaggatgtactcgatagttctgtatgtacaatgagtccgagtgctttgaatgagannnnnnnnnnnnnnnnnnnnnnnnnnnnnnnnnnnnnnnnnnnnnnnnnnnnnnnnnnnnnnncactctctgtagagcactccatagacactggtgttgagatagataaggttcatggtacaagctggcagctacaaaatgcaagtcacgatctaattgttgagaatggatgtacagcgatagtgtcgatcgacaccaccacctttgtcaatcgacaccccacacaggctgagccggagttctttgttagagctagtttttggaatgagttcactgctgatactccaggcactacagtcacgtctcccactctacctccactttttgatccacctcagaaacgccaaccccactcatctccccctcctaaacaaaatgaaaacatcaataagactttaaaatctccaaaaacagtttcacgg

SEQ ID NO: 173879 - DNA, 413 bp, Arabidopsis thaliana landsberg; identical to SEQ ID NO: 78479

SEQ ID NO: 173880 - DNA, 1051 bp, Arabidopsis thaliana landsberg
gacggtctacattgtcatctaatctcagtttcacagttgactagagcaaagagttgtgtttttcagataactgacaaagtgtgtattattcaggaccgcatcactctaacgctgattggagctggtaagcagcaaaatggattgtatttctttcgaggaacggaaacagtggcatcaatgacacgcatggactcgtcttctcagttgtggcattgtcgtctcggccatccttcctccaaagttttaaagttgttatcgttttcagattctactggtcatgcttttgattcaaagacttgtgagatttgtattaaagctaaacaaacaagggatccttttcctttgagcaaaaataaaacaagttctccttttgaaatggtgcattgtgatctttggggtccatataggactacatcaatctgcggttctaactattttctcacacttgttgacgactatacacgggctgtctggttatatctcctaccttcgaaacaaacagctccgatgcatcttaaaaacttcatatctctggttgagagacagttttctactaagataaagacaattcgcagtgacaacggcacggagtttgtttgtctctcttcattttttgctgaccacggtattattcatgagacttcttgtgtggggacgccacaacaaaatggtagagtagaacgcaagcatagacacattctcaatgtcgcacgtgctcttcgttttcaagctagattacctattgaattttggagttattgcgcactcactgcggcttacctcatcaatagaactccaactccattacttcaaggcaagacaccatttgagcttctatataatcgtcctcctccggttaatcatattcgggttttcggttgtatttgctatgttcataatcaaaagcatggaggtgacaaatttgagagtagacgtaacaaatccatttttcttggatatccatttgcgaagaaaggctggagagtatacaattttgaaacgggtgtgatttctgtctctcgtgatgttgttttcccgggaatacagaatt

SEQ ID NO: 173881 - DNA, 615 bp, Arabidopsis thaliana landsberg
atggggagatcaccgtgttgcgatgagagcggattaaagaaagggccatggacgccagaagaagatcagaaactgataaatcacataagaaaacacggccatggaagctggagagctctacccaagcaagccggtttaaaccggtgtgggaagagttgcagattgagatggactaattacttgagaccagatatcaaaagaggaaacttcacagctgaggaagaacaaactatcattaaccttcattctcttcttgggaacaagtaatcaatcttaattgatttcttcttaatttcccttacttactttgattaattataaattatatatatgtgagattatcatcaagagcaaaaatcagaaaacacatcaatattttctattaattaatcaatattattgtgctatagaattttttactgctttttattattagtgattttaatagaacttttttgctaacactttagaatttcattttgataaaaaaattcaagaagaagaaaatttaactacaggatggtaatgtttgattagataggttctaggcaaaaaagaaacatttccttttattaaatacagattaaaatttaaaatttctaataatctaggttc

SEQ ID NO: 173882 - DNA, 764 bp, Arabidopsis thaliana landsberg
aaaggttatgaatcagaacctgtcacagcgacagcactagtagatatgtatgtagaatgtggtgagatagataatggtgtagtgttgtttgatggtatgttagaaagagatgttgtctcttggacagggataattgttggattcggacaaaacggacgagtcgaagaagcgtttcggtatttccacaagatgatcaatattggaattgaaccaaatgaggtaacttttttggggcttctttctgcttgccgacattctggactacttgaagaagcaagatcaaccctcgaaacgatgaaatctgaatatggtcttgaaccgtatctagagcattattattgtgtagttgatcttcttggtcaagccgggctgttccaagaggctaacgaattgataaataaaatgccgttggagcccgacaaaacaatatggacgtctctgctcactgcttgcggaactcacaagaatgccggactggttactgtaattgctgagaaattactcaaggggtttccggatgatccatcggtttatacatctctttcgaatgcttatgctacgttaggcatgtgggatcagttaagtaaagtgagagaagctgctaagaagctaggggcaaaagaatctggaatgagttggataatttagctatttatgccacaagcttttgaactatcgctagcgcaacaattaggtttgtgaggactaggaagttatcacttgccaggtctagaaaattgatggtatgaattctaagcgtgttt

SEQ ID NO: 173883 - DNA, 1269 bp, Arabidopsis thaliana landsberg; identical to SEQ ID NO: 8607

SEQ ID NO: 173884 - DNA, 207 bp, Arabidopsis thaliana landsberg; identical to SEQ ID NO: 44263

SEQ ID NO: 173885 - DNA, 388 bp, Arabidopsis thaliana landsberg
  unsure (1)..(388): unsure at all n locations
ctgttcggcgtgaaattgttcgtcgagggcgatatggtctggtcatagcaattcagtccgcgtccgcacgaatcacggcatggtgtccatgaccagtcagcgttttagccagttcgacctgcacgcgcgtgccattctgggtttgccggtcaacgtcgccctgacggcgcccggcgccagcaccgtgatatacggtggcgtggaaaacagnnnnnnnnnnnnnnnnnnnnnnnnngccgcgcttgcggtgccgaagtctgacctgcgtctgttcggcaagcccgatcaattcgttcgccacagcatgggtgtggcgctggcccgtggcaaggaaatcaaggaggctcgcagtcgtgcgaaccagacggcgagcctggtcaagccgaaa

SEQ ID NO: 173886 - DNA, 381 bp, Arabidopsis thaliana landsberg
atgcggccgggctaaccgctgatgttcggcacgaagggaattactttggtttttggcctgccgggcaatccggggggggggttggttaccgcgaccgtgttcgtgctgccaacgctaaaccgctggcagcagacgacaaatccgggtggcacgcagcttcgcctgcccctcgccgcgccgcttcccgccaacggctcgcgccggcatttcctgcgcgccacgctcgaaacggcagacggcatcacggccgttcggccgaacctagaaaccgacagcggccacacctcgtcgctcggccgcgcgcaagcccttgtggttcagcaggaaaattccgcgccgctcgcagtcggcagcctcgtcgacgtgatcctgctgcctggg

SEQ ID NO: 173887 - DNA, 540 bp, Arabidopsis thaliana landsberg; identical to SEQ ID NO: 22793

SEQ ID NO: 173888 - DNA, 758 bp, Arabidopsis thaliana landsberg
  unsure (1)..(758): unsure at all n locations
atgatcattgataatgttcttatagcacatgagctgattcattccttacagactcggaatcttaaacaaccatatatggctttcaaattagatattagtaaggcctttgataaagttgaatggtcttttcttgaagcaattatgaagannnnnnnnnnnnnnnnnngatggtgtgcgtggattatggaatgtatcaccactgtcacttactcagtccttgtcaatggttctccaattggcaacatcctcccacagagaggtattagacaaggtgatcccatctctccgtacttgtatttattatattctgaaagactctcagccttaatccgtcataatattcatcaaggtaaactgcatggatttaaggcaagcagaaacggccctcctatatctcacttgctattcgctgatgattccctcctgttctgtaaggctacagtggaagaatgttctgccctcctgcaagttcttaaccaataccatgcagcatcaggtcagcaagttaatttccaaaagtatgcctatactgtgggcaagggcctgatctgtcaacaaaaacatgatcttactaatattatgggagccactaatattagcggtatctggacgataccttggtttacctgaatttgttggcaggagtaaatataatgcttttttttaccttcaccacaagagttatacagaagctccaaagttggtattctaattttctctctgctgcagggacagaaagactaatgaaagctgatgcc

SEQ ID NO: 173889 - DNA, 439 bp, Arabidopsis thaliana landsberg; identical to SEQ ID NO: 59065
  unsure (1)..(439): unsure at all n locations

SEQ ID NO: 173890 - DNA, 653 bp, Arabidopsis thaliana landsberg
atgtgtcttttcggttgcatccttcaggtacaatatgttcttaatatccttttttttatatgtggtccaaaacaatactaaacaaaaccgtaaaagctacaaacaacgatttcaaaataaagataaaattattatatataagcaaatagaatcataatattttgttctttatcaaatctaaaagaattgaccataacacaaacatatagattgaaggatattaatctgaattttatgtaaatacgtgcaacttttgataaatctatatattttcgataaaagagtgtcgaacatatgatgatagaaacatatagaattttgagaaatatatacaaattctttttgaacaggcagaatatacaaatgtgaagaaatttgtgatggccttcttctttgctgttacaacaccatcaggaatcgctcttggtatagccttgtcgagcgtttacaaagacaacagtccaacagcattaatcacggtaggactgctcaatgcttgttctgcaggattgctcatttatatggcacttgtagatcttctagccgcagagtttatgggatctatgctccaaggaagcgtcaagcttcagcttaactgcttcggggcagctttgcttgggtgtggcggaatgtcagtcctggccaagtgggca

SEQ ID NO: 173891 - DNA, 382 bp, Arabidopsis thaliana landsberg; identical to SEQ ID NO: 75319

SEQ ID NO: 173892 - DNA, 319 bp, Arabidopsis thaliana landsberg
atggagtcttgagtatgttcgctttcactgataccttctttgagcccaactatgaggtagtccaggcttatccattcgatggggtgtgtgtcgatgtcagtcgctcatagatcgtcgtcagtgcctgcggtttagtagtcgctgtgatcaccaaggatcgtgagccccctccagcctcggtctcccacgtcgccgtgtatggtagcacaggcagactccgatggtggagtcgggtatttccctacagctttagaggtttctccttgtatcgcgttaactataaatttgtttgtccggcgtgcatgagaaaagaaaaaaa

SEQ ID NO: 173893 - DNA, 517 bp, Arabidopsis thaliana landsberg
  unsure (1)..(517): unsure at all n locations
nnnnnnnnnnnnnnnnatgcgtgggttcatatgtccaaactattgcaggaatcttagcattgttaattgcatacattctgcttaggcccgttaaatctcctaatggatctaaacaaagaaaggctaaccaagtacccgaacctcgtggtgctttacctttcataggtcatctccatcttctcaatgctagaaaaccgtatttcaggaccttttcggccattgctgacaaatatggtccaattttcattctcaaattgggttgccaccccaccttagtcgtgaatagcagggaaattgccaaggagtgcctcacaactaatgacaaagtttttgcctcaaggcctatcacatcagcagggaaaatcttaggttacaacaatgcagtttttggcttttccccttatgggaagtatttggcgcgaaattagaaaaatggccatccttgagatcctttcaggctatagcttgaaaagctaagcttgggagagacactgaaaattgtcttttgcaaagacct

SEQ ID NO: 173894 - DNA, 274 bp, Arabidopsis thaliana landsberg
  unsure (1)..(274): unsure at all n locations
atgacgtttacgcgaatgatcaaaatctttatttcttcttttgttttttcagagacgagccttcttaagtggccaaggattctgaagatagttcatcagctgcgaacgattcctctgggttcgagaaatcttgggttctttaatctcaaatccnnnnnnnnnnnnnnnnnnnnnnnnnnnnnnnnnnnnnnnnnnnnnnnnnnnnnnnnnnnnnnnnnnnnnnnnnngatcaatttcttgatcttttaccccctaatttgtcacttttttttta

SEQ ID NO: 173895 - DNA, 422 bp, Arabidopsis thaliana landsberg; identical to SEQ ID NO: 75321

SEQ ID NO: 173896 - DNA, 365 bp, Arabidopsis thaliana landsberg
atgtcttgctccaattctcacaatgttggtgtcctcaaaaccttccctttccgatccctccaatctctccttccgctctgtcctgaacctttttcagcttccttcacaaaacccaacttcatgcactccttcacgctcctcaaccacccaaattcagtgtggtctgagagaactcagaacccgcattgattccgtgaagaacactcaaataatcaccgacgctatgaagcttgtggctgcagccaatgtgagaagagctcaagaagctgttgtcaacggaagacccttcttagagacccttgttgaagtcctttacaacatcaacgagcagctcctaactgaggacgtagacattcctcttacaa

SEQ ID NO: 173897 - DNA, 187 bp, Arabidopsis thaliana landsberg; identical to SEQ ID NO: 70317

SEQ ID NO: 173898 - DNA, 566 bp, Arabidopsis thaliana landsberg
ttgtgcatctcttgtaatggaagcattaacttacattagtacggtattgaatatgcgtactaaaaggatggatatgtggaaaatgccgcttaccatttgggcattctttttacaagcaatagtaggtgttctttctttcccggttctggtagcagctgttgtattattaatttttgaccgtagttttggtacaagtttctacttgtctgatattgttattcaaggccaggttcttcctaaccaaggtggtagccctattctgtgggaacacttattttggttcttaggtcaccctgaggtatatatcgtaattatgcctgcaatgggaattgcttctgaagtaatggctaccaattcacgtaagccaatctttggatatcatgcgatggtttattcgctgataggtattaccgtgctttcatttattgtttgggggcatcatatgtttgtaactggtatgaatccattccttggaggagtattcatgattactacgttaattattgcgaatcattcagcggtaaaaacatttaactggctggctactattggcggggtaacatacg

SEQ ID NO: 173899 - DNA, 586 bp, Arabidopsis thaliana landsberg; identical to SEQ ID NO: 79821

SEQ ID NO: 173900 - DNA, 1014 bp, Arabidopsis thaliana landsberg
gggtgtatttagtctagtatctaggatgatgtaaattaaagctgataataccttaagtgaaaattgcatggatttatggacataattaattaagtaatatttgcctccaaataatatatcggctgagttactataaaatacaaaagttggtttctagtcttgggtgtccatcagaaatgattgatgtatgcattgactattgcatgattttctgggcagatgatgtaaatctgcaggaatgtcggttttgcgggaagccgagatatcagactactggcggaagcacgcgagtgccatataaacggatgtggtacttgtcaataactgatagattgaaacgcttatatcaatcagaaagaactgcggcgaaaatgagatggcatgctcaacatacaactgcagaaggagaaataacgcacccatcaatgcaaaggcgtggaaacactttcaaacggtatatcctgactttgctaacgagtgtaggaatgtgtatcttggcttatgcacagatggatttagtccattcggtttgtctgggcgacaatattctctttggcctgttatcttgaccccatacaatcttcctccagatatgtgtatgcaaagcgaatttttgttcttaagtattttagtgcctgggccaaagcatccgaaacgagcgcttgatgtcttcttgcaaccgctaattcatgaactcaagaagttgtggtatgaaggtgttcatacgtttgattactcgagcaaacaaaatttcaatatgcgggcagtgctaatgtggacgattagtgacttcccggcatatggaatgttatcggggtggacaacgcatggaagattatcttgtccctactgtatggatcgtacagatgcgtttcaactaaagaaaggcagaaaaccatgttggtttgattgtcaccgttggtttcttctcctgcatcatccatatcggcgtaacaaaaaacgttttaggaagaataaaatagttcgtcttcctccgccatcttatgtttcgga

SEQ ID NO: 173901 - DNA, 596 bp, Arabidopsis thaliana landsberg
acatcaagaaatcatacaggtagattcactctcagaacaacagagttcattgcaaaagaacaaaaaaaactaaagtactgtaaattcgtcccaggtggacaaggtatatatgatgttcgtgaggatggtgttagttatactgtcaacattagattgagaatatgtctctgttggagatggaatatgagtggaatcccatgtcattatgctctacgtgtgatcacagagaaaaagctcattcgtgaacattacatatcagattggtacttgaattctaagaagcatagtattacagtgactcaatccacaacgtcaatgggatggtattttggaataaatcatgttctcttgtgctgccacctgctactctagtcgagctgattgtatacacgacaggtagagaatgagaaccaaagaggaaaaaaggcaagaatgagtcaccttcaaagaagaagaaactcagtaaagagaaaagaattatgcattgtcgtcaatgtgggcattctaatcacaatgaatcaaagtgccgtaatattagagtagagaagtatatgacaccaaggaaaaagaagacttcaaacacaaacgcaggagaa

SEQ ID NO: 173902 - DNA, 963 bp, Arabidopsis thaliana landsberg
  unsure (1)..(963): unsure at all n locations
gacttcgctagaaacgtgagtagtatatatgaccatggaaagattataattgattttaagcgaaaccaattttacaatgccaaggggaactcattttaaactaaatgatgcattatattctcctaagtctcatagaaacttgaaaagtttcaaagatatccaaagtaatggatatcatatatagactatgaataaagatggcattgagtatatttgcataaaacccgagatgcaatatatataagaagaattgccaatgttatccttcggattatattgcagaaaaatatatatactcgcatcaaatgttacagtaaactggagtgagtttactagtacatttaaggcatgacatgaaagatttgatatcctagtttagttatgatacaaaaaattgtgcaaaattctaatgatcatctatttaaaaaccaaaaaatattcaaatttggtgagtttccatgtaacgtatgttcttaaggaaaaatcataacaagacgatcgccaataaaattaggaatgacagccctcaattcttgtctagaattcatggtgatatatgtgggtcgatccacccaccgtgcgggccgtttcgatattttatggtattaattgacgcatctcctaaatggtcacatgtatgtcttttgactacgctatccacggctttcgcaagattcttttctcaaatagtcaggttaaagacccaatttcctgattatgccatacagcaagtctggcttgataatgctggaggatttacttctcaagcctttaatgactattgtgtatcgatgggaatcgnnnnnnnnnnnnnnnnnnnnnnnnnnnnnnnnnnnnnnnncatggccgaatctttaattatgcggttgcaactcattgcaagtccgtgaatattgagaacaaaactcccaatttctctatggggtcatgctatattgcatgttgcggctttggttcagttta

SEQ ID NO: 173903 - DNA, 250 bp, Arabidopsis thaliana landsberg
aatttgattaatgtttaattatttcgtatatgttttggaaggtggtcgtcgatagccggtaatcttcctggaagaacggacaatgaaataaaaaactattggaacacacatttgagaaagaaacttctccaaatggggattgatccggtgacccataggccaagaaccgaccatctaaacgttttagcagctctcccgcagcttatagccgccgcaaatttcaacagcctcttgaatctcaaccaaaatg

SEQ ID NO: 173904 - DNA, 324 bp, Arabidopsis thaliana landsberg
ggcgtcgttgccggcctcgcccagcgcgtcgcggttatgtatgccggccgcatcgtcgagaccggcgccatcgacgaagtgctcgataggccggcgcacccctatacgatcggcctgatgcgcgcgatcccggccaatgtcggacgcggcgaaaagctcaaccccatacccggcatggcgccgtcgccgcttgcccgccccgccgggtgcccgttccgcaatcgctgctttgccgcaaccgacatctgcgccagcgagccgccgctgaccgaaatgcgcgacggccatgcctggcggtgctttcatccgcaactggtcgaggtg

SEQ ID NO: 173905 - DNA, 682 bp, Arabidopsis thaliana landsberg
aaagtctggcaaatggcaaaaaaaatggtatttttaaaaaaatcctgcaagttttttttttaatatcaaattctatgtgttaaaccttatttttgtaggaaaaaacaattgagaaagacgatgcaaagtcatattgccaaaatccatatgaaaaaataccggagctctattatctattgaagagcacaaagaaattttatctcaattaaaaactaaagataaagaagctcatgacgagatgctggaggcaaaaaggattgcatctagaagtaagtttaaatcccttgaagtttttatatcaatggtcttacagttgttatgttatacttttctgtttcatgttgctatgaaggattaacttaaagaaatatgtttgtagagatgaaaacatgtgaaactgttagaactgacctaatcatattggatgacaatggtcttgttctctagaaactgatgtggtttagagaaaaagcaaagtttttgctttaaagtgtgaaatttactaacttattgtttacgtttttaatgagaatatgttaagtattttaagcttggtctttatgaatgcacagatttaggaacattggatgatttaagtacttatgaaaatggttagcctttaaggctgaacaaaagcaagagatagagaaaattatctctttcaagaggtgagtcaatttta

SEQ ID NO: 173906 - DNA, 599 bp, Arabidopsis thaliana landsberg
tcgagtcatgcaattatttccgctctcaaggttgtgagtatttttgctttggcattattttttgcatatcaacagcgtcggctaagtctgatacagggcccttgaagattggtgtgcctttgcctcttaccggtccgctggcaggaggtgggcgcatgatactggacggcataaaatccgccgctgagcaaacgaatcaggcgggtggtgttttgggcaggaaaatcaagctgctcatcgcagacaccaagggggatccgaatacctccgctcagattaccgcgcgtatggtgagtcaggatggggtatatgcctttgttggcgggtatggcagcacgccggatttcgccatgctgcaaagtgtcaagcggttgagtcctttatttattcatgtaggctcttcctcggtaaagatagaaaaagcgtttggtagcaaaccttggtactaccacgtttatattgtcgattatcaccgtcaaaaggcggtggcatcgttcttaaccagcatgaacccgaagcccaagacagttgacatcgcatatgaagacggtttgtatggatcggatgcggtcaaattcagcaaccaatatctggcggta

SEQ ID NO: 173907 - DNA, 251 bp, Arabidopsis thaliana landsberg
catagcataaacaagggtgcactattcgttctgctccatcgatccatgttcgaacacccgttctactctcgtcagatggtgctcaattccatctctcaaccggtatgttgattgttgtgataacatgtcctcatataccgtaaggtttaaaatctcctaggtagtaagaaattcaagctcaagaaggaaccacaagtcttagttcagttgctatctgcgaagcgatgattgaaaggttaaagactcccacc

SEQ ID NO: 173908 - DNA, 646 bp, Arabidopsis thaliana landsberg
tcttcctcaagacaaaaaaacattccgtttctcttcccaagatccgattcctctgttctacccgacccgtctcgtttcttcagccacgatctcctctcatctcctctccctacaaactctttcttccaaaacttcactctcaacaatggcgaccaagctgagtactttcatccttacatcatcaaaccctcgacttcatctctctccatctcctacccatctctctcccacaactctgctttcatctacgaagctttcaacgccgacataaccataaccgggtcagatggacccgacccgcattctcgtaaatctcatctcatctcttccttcagcgatctcggcgtcactctcgatttcccctcctctaatctcagattcttcctcgttagaggaagccctttcatcaccttctccgttaactcctccatcacaatctcaacgatccacgctgttttatcactttccggtaacacctcttcaacaaagtacaccgtcaaactcaacaacaaccaaacatggctaatctacgcctcttctccgatcaatctaaccaaagacggcgtttcttcaatcaattgcggtgatgggttttcgggtattatccggatcgtcgtgttaccaaatccaaatccgtatttcgaaa

SEQ ID NO: 173909 - DNA, 716 bp, Arabidopsis thaliana landsberg
aaaatttcagctaagtttgatcggtgcattgagattcatttgctgcagtcaaaaacagcaaatgactgagagacacctttaaaaattgaagaactacaaaaagccatttcttaccctacggttctcgacaattctggacaaagaagaaaaagagatctttaggattcttcacttccctttatctctcactcttcgatctgcttctccattagcgttagctctcgatcttcttctccattagcgctagctcggttcttggtatacatatctctctctctatttttgattcttacttgtaatatatttctgggtttaatactagagaattgtttaaccgcaagcactctgatttgcgttcgataattgagcgaacatttggagtctagaaggctaagtggaggatattggatcgtaaacaccaaaaatatgagttgaaaaagtgggtgaaacttgtgacaacaactatggctctccataattttatcagaaattcatgtcaagaggatgcagattttgcacattgcgaagcattggaagaatatgaacatcatggtgatgaagtagtagaaaacgatgaagtagtaaaagatgatgaagtcgaggacaatgtttcaaacactgatcatgtaccgtacgtaccgactggtgctagagcgatggaagatgtacgtgattctatcactgaagagataactagaggatatcgacttccatat

SEQ ID NO: 173910 - DNA, 374 bp, Arabidopsis thaliana landsberg
  unsure (1)..(374): unsure at all n locations
atgggttggtggaggaagaagaagaagcctaaatcagagatagcttccgaaagaggagcgaagctgttaaaagatctgatcgaatgctgcnnnnnnnnnnnnnnnnnnatcaaattcttttctactgatgagatccgcaaagccaccaataatttcagcgactctaatcttgtttccgaattatctcatgattctgacgacgaatggtattcaggggcaagaacgagaaccatgacatgatacttgtcaggaaagctttttcccagaccggctactacaaagccacctgtttccgcgacatagcagtttcatcaatgatgagtggtcacaaaaaacttcctgaaattgattggatattgtcgtgagtttaaaaa

SEQ ID NO: 173911 - DNA, 858 bp, Arabidopsis thaliana landsberg; identical to SEQ ID NO: 34760

SEQ ID NO: 173912 - DNA, 81 bp, Arabidopsis thaliana landsberg
atgtccggttccctcgggggatggatccataagaattcacctatcccaataacaaaaaaaccagatttgaatgatcctgta

SEQ ID NO: 173913 - DNA, 492 bp, Arabidopsis thaliana landsberg
  unsure (1)..(492): unsure at all n locations
gctcttcnnnnnnnnnnnnnnnnnnnnnnnnnnnnnnnnnnnnnnnnnntaagctcggttctcctttgaggcataaaatcattgaaatgggacttcaagggactataactaagaaagatagtgaggaacacctttcatcccatgaagaagaagatgagagacccttgatcggtaaagttagagaagaagtgcagactctgaaacagaggaaagagatcacgactaagnnnnnnnnnnnnnnnnnnnnnnnnnnnncaccaatttggtttgtaacagaggtgaattttctttgatatgctcgttgtattgttttgatggtggtgcctgaaagtgtcctcttttaaaccttggtattgatatttgtttgctgtttttgatgatacagtatctgtccaatgctgctcttgctcgtacaagtgtggcaagtactaaagtattgtcttcaacctcgggactgtttactctgttcattggtgtatgttgggccaagaa

SEQ ID NO: 173914 - DNA, 796 bp, Arabidopsis thaliana landsberg
aacatccgaagctctgtggctcttggtgctgcaagaggatttgagtttcttcatgaagctgccgctccaagagtcttaggccgagatgtgaaatccacaaatattctccttgatgagaattggcatgcaaaagttagtatacacaaacattttcagtgttcaatgaggctaaatttgaagttttaatgcacataacatttttacagataacagatcttgggatggctaagtgtttgagtagcgatggtttacaaagcggttcaagctctccaaccacaggactacaaggaacatttggctactttgcacctgaatacgcaattgcaggatgtgcttcacagatgtcagatgtttacagcttcggtgttgttctactcgaactactcacgggaaaatcgcccattcacactaccgcaggtaacgctacaacccgaagtgactagactgtttcagctgatatattttcggtttaatgatcattctgtgatggacattgcaggggacgagatcatccacttggttagatgggtacattcagtagtgagagaggaatgggccgcagaagtattcgacatcgagcttctgaggtatacaaacatagaggaagagatggttgagatgtgtgcagattgcaatgtcctgtgttgtgaaagcagcagatcagaggccaaagatgtctgatttggttaggctcatcgagaacgttggaaactgacgaaccagcattgaaccggaacccgaactcaaacccaaatccgaaaatggagcctcagagacttcaacaccgagtgaaatt

SEQ ID NO: 173915 - DNA, 2579 bp, Arabidopsis thaliana landsberg
aaataaaatattttatgatatgcttatattcagtcgtctccatgcttcactcttgagtgctattgtgcttaataatgtgcctgtttgttccagcttttttctgaccagcttttctgagaatctagctatagaaagaatctggttgtgtgaagaagctgagtattatggggattatgtgcggattaagatgaagtggtccaaatggttcaggatctagaaagcaacgaatttctattatcatgacgactcgaccgattttatgttcatgttgatttttgtcggcgtttcgagaccggggggtcccttgggccaacgagtgagtgtcgccgcgtgccccagcccagatgggtcgagcgcgagggcgagcgcgaaggggggagagcgaggcgcgcggagaccggcgtgagagaggtggaatcccgcggccttcgtgttcgtcccgcgcccaggtcgggtgcgcttgcagtagggggttacaagcgtccacgcgggagagggagcgagcggccccaagcgagcgcctgtctcgtcctcgtccccgcgcggccaaccttctctaagagggccctggtccttccttttataggcgtaaggagaggatctaggtgtacaatggggggtgtagcagagtgctaacgtgtctagcggagaagagctagtgccctaagtacatgctgtcgtggcagccggaggggttttggcaccctattcatgtgatgtcgtggccgtcggaggagcgctggagccttgcggaaggacagctgtcggggatgtcgagtccttgctgacgtctcattgcttccgtaagggggctgagagccaccgtcatcatggagcacgcggggcgccatcattatttgtttaccggggcgagccagatgggacaccggtcttgttccccgtagcctgagctagctaggggtaggataatgatggccccctgtgacgtggtcggtctgagccctgggtcgggcgaggcggaggctcctccgaggtcgaggtcgagtctgtcttccgaggtcgaggtcgagtccgagcctcgggtcgggcgaggcggagaccgtcgtctgaggccaaggctgagtccgagccctgggggtcgggcgaggcggagttcgtcgtcttctgggcttagcccgagtccgagccctgggtcgggcggagcggagttcgccgtcttccggggttagcccgagtccgagccctgggtcgggcggagcggagttcgccgtcttccgggcttagcccgagttcgagccctgggtcgggcggagcggagcttcctatggtcgtgcggccgggcctgactgcctgtcagcctcactctgtcaagtggcaccgcagtcggagcggcgcaggcggcgctgaaacttcgtcaggccggccagtggagcggcgaagtgacggcggtcacttcggctctgttggctgaagggcgcgcgtcaggataaaggtgtcaggccacctttgcattaaatgctcctgcgatttggtcggtcggtgcggcgatttggtcagggttgcttcttggcgaggagggctcgggcgagccggaaatatgttcgccattggagggggcctcgggcgagacggaaatcctccggggtcggctgcccttgtccgaggctaggctcgggcgaggcgtgatcgagtcgctcgaatggactgatctctgacttaatcgcacccatcaggcctttgcagctttatgctgatgggggttaccagctgagaattaggagtcttgagggtacccctaattatggtccccgacacctagatacacactaatgactcccgaggaagttatcgggaattttgtgagttttgaatgtatgatcaagggctcaaagaagatcaacgagcttgatgatccctccacatccgaagcacaaccggtggcatttaaggcgacagaggagaaggaggagtctacaccaagtagacaaccaatcgacgcctcaaagctcaacaacgaggagatggctttaatcatcaaaagctgttcgccaaatcctcaagcaacggaaggggaaggattacaaatcccgttccaagaaggtttgctacaagtgtggtaagcccggtcactttatcgctaaatgtccattatcaagtgacagtgacaggataacgacaagaagggcaagaggagagaaaagaaaaggtactacaagaagaagggcggtgatgctcatgtttgtcgggagtgggactccgacgaaagctcaagcgattcctctgacgacgaggacgccgccaacatcgccgtcaccaagggactcctcttccccaacgtcggccacaagtgcctcatggcaaaggacggcaaaaagaagaaggttaaatctaactcctccactaaatatgagtcttctagtgatgataatgctagtggtgaggaagataatttgcgaactctttttgccaaccttaacatggaacaaaaggagaaattaaatgaactaattagtgccatccatgagaaggatgatctcttggactcccaagaggacttcctaatcaaggaaaataaaaaacatgttaaggttaaaagatcgtacgctttacaagttgaa

SEQ ID NO: 173916 - DNA, 1549 bp, Arabidopsis thaliana landsberg
acattttgaccgacaaaactgggaccctgacagatattttgattttatttagaagatgctgtattgggggcgtattggatgggaatgagaatggagatgctttaaaaggtttcagactttgtttttttttgtgtattatgtactcagctttatgctttcccaatttgtgtcgatcatcttaatttatacattgtttgaagcatgtgcattagtgactacttatcttgatttattctttccgatcagatgcacaacttcttaatgccatcaccagtggctctacagatgttatccgatttcttacagtgatggccatctgcaacacagttatacctgtgcagaggtaaatttgaacttcttgaaatcttcacaatatctgtttttggaaaatttaacttctgcatatttattctgtttgtctaggaattttcatttttttttttttttttttttttgaaaacccatgggaattttcattaagttatgatttttttgggtttccatctgacagcaaagctggagatattgtttacaaggcgcaatctcaggatgaggacgctcttgtaatcgctgcttcaaagttgcatatggtctttgtcggcaaaaatgccaatctcctaggtaatagcatctaattttcatttttgctctccatggaatatgtacctaaaaagtagttatcatttgtttttttaattcctatttattaaatgcagaaatcagatttaatggttcagtaattcgctatgaggtactggagattcttgaattcacttccgatcgaaaaagaatgtcagtggtagtgaaagattgtcagaatgggaaaattatacttctgtcaaaaggtgcagatgaagcaatccttccctatgcacgtgctggtaagttgatgtatctcttattaatatgagacgagtaagtagtattcaactgaatgtgctcagagctgatggccgtttattctccaatatgcttttaggtcaacaaacccgaactattggtgacgccgtagaacactattcccagctggggctccgaacactgtgtttggcttggcgtgaacttgaagagaatgagtatctagagtggtcagtgaagtttaaagaggctagtagtcttctggttgatagggaggtaattggaacaattctctctttctgttgttcactataagcgattatgaagtatgattagtttgaatctacagcttgactgggtaagtcgatgcacttgcttgatgtttttctcatgttacagtggagaattgctgaggtctgtcaaaggttagaacatgatctttatattctaggggtcactgcaatagaagaccgcttgcaggtaaaaatttaaatgtccaggactagtgaggttcacagtgtaatataatgtaccaccgtaaataggagaggaatgtcttacatagatttttgccttatttatttaggatggtgtaccagagacgatcaagacacttagaaaagcaaccatgccctttggatgctgtctggcgataagcagaataaagctatacagattgctctttcatgta

SEQ ID NO: 173917 - DNA, 367 bp, Arabidopsis thaliana landsberg; identical to SEQ ID NO: 14626

SEQ ID NO: 173918 - DNA, 495 bp, Arabidopsis thaliana landsberg; identical to SEQ ID NO: 74178

SEQ ID NO: 173919 - DNA, 515 bp, Arabidopsis thaliana landsberg; identical to SEQ ID NO: 42901
  unsure (1)..(515): unsure at all n locations

SEQ ID NO: 173920 - DNA, 670 bp, Arabidopsis thaliana landsberg
atggcggcggtcgctacctccttctgtttctctccccatcgatcgccgtcacgttttggaaaccctaattcatccattcgaagaacaatcgtctgtaaatcatctcctcgcgatgaatctccagccgtctccacttcttctcagcgaccggaaaagcagcagaatcctctgacttcacagaataaaccggatcatgatcacaaaccggatcctgggttcgtaccttagcctaataatgcttcttctgtattcaactttgaatggtttctaatgtatttgatttttttgggtttaggattggtaaaattggaatggagataatgtcaattgcattacctgctgcattagctttagctgctgatcctataacatctcttgtcgacactgccttcgttggccatattggtaaatacttactttttgcttggtttcaacaatttcacatttttcgaaagttcacatttttaacattcatatgtgtaatgtgacaggttctgcggaattagctgcagtaggagtgtcagtttctgtattcaatttggtgtcgaagctcttcaatgttcctttactaaatgtcacaacatcgtttgttgcggaggagcaagcaattgctgctaaggatgataatgattctatagaaacaagtattttactttccttaaagcttata

SEQ ID NO: 173921 - DNA, 308 bp, Arabidopsis thaliana landsberg
tcttttttttttgtagcaacactactactgggaaactcgttttcatgacacaatctactctgtttggaggaaggagacaatgacatcaactggtgatcgcatcagcaagaaaaagacgaagaaaaaaaaacccaagtacattggacaaaccgattgggactttctgatggagtattgggatacaacacctgctcaaaagaaaagcaagtcagctgctaatagccgcatgtctgatcctcttaataaagggattcacaagcattgtgctggccctgtgccatttgtacggattgagtatgatatggtaa

SEQ ID NO: 173922 - DNA, 506 bp, Arabidopsis thaliana landsberg; identical to SEQ ID NO: 14398

SEQ ID NO: 173923 - DNA, 734 bp, Arabidopsis thaliana landsberg
tgcaaacttcatctcacagacaaaaagtggagatgggaaactctgattgtgatcctactcctcgtaagaaagtgctcgaggtattgagtcttttcaacaaagtttacaaccagttggatcgagataaaaaagcaaaacgtggtggagattttttggatgcaacaagcagaatcgacctcaaaacactaactgtgttggagaagatgggaaaacaagtgaacacagagaagagaatcggatcggttcctggaatcaacatcggagatgtgtttcagtacaaaaccgaacttcgggtcgtcgggcttcactccaagccgatgtgcggtatcgactacattaaactcggagatgatagaatcacgacaagcatcgtggcatcagaagggtatggatacaatgatacatacagctctggtgtgatggtttatacgggtgaaggaggtaacgtgatcaacaagcaaaagaaaactgaatatcagaaattggtaaaagggaatttggcgttggctactagtatgaggcagaagagtcaagtgagagtgattcgtggagaagagagattggatcgtaaagggaaacgatatgtctacaatggtttgtatatggtcgaagagtattgggttgagagagatgttagaggtaagagtgtgtataagttcaagctttgtagaatcctggtcagcttccgttgacctgatattagtatgcgattagactgatgatgatcgtataat

SEQ ID NO: 173924 - DNA, 456 bp, Arabidopsis thaliana landsberg
ctaatgtttccgggtaacggtaaagcttcgagaggtcgtggaggcaaattggcttccggagtcagatccttcgttgtcataaaccaccaggatcttcacactcatcgaacccttccgtgacacagtccgtgacctattcacaacatagtcgtccttcacagtatccgtcggcgagaaagtctcctccttctcagtctcagccaccatcaccaccgccgcctcctcagcctctaccgcaacatattccgaatccccagtttgaacaacccaaacaagtccttgaagaggaagaggaaaatgaagacgaagatagaaacatgattcctaatccccaataacaaaacccttatccagttgtggactatgacaaattgttggatcgtatgctagcccttccaggccgacaaattctacctcttctctctcaaaacccaatccttggcattgaaactctat

SEQ ID NO: 173925 - DNA, 1765 bp, Arabidopsis thaliana landsberg
cgatttggagtatgggcagactggaacaatccttatctaactcttgatccggaatatgaagcagctcaggtaatggtctcacgtcccacattatttactggatgaaataaccgtgtaggagatgattattagagttcttcaaagcctgataaagtcaacatatatttttatcatatattgtagattgaagtatttggccagatggccttgaaagggtacatttatagaggtaggaaaccagttcactggagcccttcatctcggactgctcttgcagaagctgaactagaggtaaatttgaatcaataatctaagaataataataatattacggccagttcaatgcaaaacttaagtctgctaaagtcataccagtcttcctattctctttcttacttccgttgacattttaccatgatgcgatctgttgtccattagtcgaagactaattctttatgtatcaccaatgaaccctgatttaatgtagttttctattgctgttctcaacgcatgccgctttcatgaaataatattttgacaattccacactttaccttgttatctgatatcagtcccacatgtatctgccattatgtgtagtatccggagggtcatatttccaaaagcatatatgctatttttaaattggttggtggagcgaaaacaagccttttagatgagtttatccctaatatatacttggcagtatggacaactacaccttggactatgccagccaatgctggtaaggggttatattagtatatgtgtttctctcagctgtcaaattgcatcctactttactttgtatccgttctttctcatatctcttctccacttagaagcaataatacttaccttttttgaatgctatataagcacatttagtgactcttcttcttttctttcttgtcaaactttcagctgtcgcggtgaatgcaaagcttcagtactctgttgtggaagtgcagtcattctcagaagatgaatcaacagtgacaagcaataaaaagaaaattcccgggaaggttctaaagaatcaacaaaagcttttcgtgattgtagcgaccgaccttgtgccagcattagaagcgaaatggggtgtgaagcttagcataagtaaaacattccttggttcagatcttgaaaactgcaggttacattttaagttagagaataaaagaaattccagttttgcatgtaatgctataaattgaaccccttagtttatggtgtgtcatcatggttgtaggtacacacatcccattgacaacagagactgtccagtcgttatagggggtgattacataactacagaatctggaacagggttggtccacactgaaaatggtcatggtcaggaggattatgcaactggcctgaagtacgggctgcctcttgtctctccggtggatgatgaaggaaagttcactgaagaagctggacagtttagagggctctctgtccttggagaagggaataccgctgttgtcagttacctggatgaaaatatgtctctggtcatggaagaatcttatggtgagtttgattcaaatgctttctgaggaaccatttgaggaaacatttgctatagagtctcatgatttaatttccttcttgtcatgcagctcataaatacccatatgattggcgaactaagaaaccgacgatatttagagcgactgagcagtggtttgcatcggttgaagggtttcgcacagccacaatggatgcaatcaacaatgtaaaatgggtaccacatcag

SEQ ID NO: 173926 - DNA, 1236 bp, Arabidopsis thaliana landsberg; identical to SEQ ID NO: 28758

SEQ ID NO: 173927 - DNA, 841 bp, Arabidopsis thaliana landsberg
  unsure (1)..(841): unsure at all n locations
taagaatataatgaaaagtgtaatatatatcgtctttttaatagatgtctcaaaggaaacacatgtatcataatttttactcctttcctatcattttaacttaaggttttagctatcctatttttntgtttcatttgtttaaactaattttcttcacagtaaatgacttattattttaactttacttaatataaaacaaatgaagtatatacaaaaacaatcaaagccatatttaatgtaaaaaggagtatttcacatttcattgaaaagtttttttttccttctaaaagttaagtttcttttaatattataaacttgttaagagtaaattgtgattaatattagttcatatgtctcgttttttcaggtgtcaaattggttcataaatgctagggttcgcctatggaaaccaatggtggaagagatgtatcaacaagaagcaaaagaaagagaagaagcagaagaagaaaatgaaaatcaacaacaacaaagaagacagcaacaaacaaacaacatcgacacgaaacccaacaacaatgaaaacaacttcactgtcataaccgcacaaactccaacgacgatgacatcgacacatcacgaaaacgactcttcattcctctcttccgtcgccgccgcttctcacggcggttcagacgcgttcaccgtcgccacgtgtcagcaagacgtcagtgacttccacgtcgacggagatggtgtgaacgtcataagattcgggaccaaacagactggtgacgtgtctcttacgcttggtctacgccactctggcaatattcctgataagaacacttctttctccgttagagactttggagatttttag

SEQ ID NO: 173928 - DNA, 479 bp, Arabidopsis thaliana landsberg; identical to SEQ ID NO: 23918
  unsure (1)..(479): unsure at all n locations

SEQ ID NO: 173929 - DNA, 511 bp, Arabidopsis thaliana landsberg
aaaaacaattggggttctgttcgaaatcgctggtactagatctgctcatgagctctttaatgccaagcaagcataccaagcccgttacaagacctccctcgaggaagacgtcgcataccacacatctggagacattcgaaaggtattatataattaattatgtgaaagtttcatgagcttaattccatctgagatatccaataaaatcaaatgtatctagttcatctattttgtatactagatgaaatctcatatgtttattgatgtaattaagattcctagctaacaaactcagttcgtataactatgtcaagaatgcatataaatttgtgacatatgtttttgtttatgcagctcttggtacctcttgtgagcacttttaggtacgatggagatgaagtgaacatgacgttagttaggtccgaggctaagatacttcacgagaagatcaaggaaaaggcttatatgctgatgatgatctcataagaatcttggcaaccaggagcaaagc

SEQ ID NO: 173930 - DNA, 701 bp, Arabidopsis thaliana landsberg; identical to SEQ ID NO: 14996
  unsure (1)..(701): unsure at all n locations

SEQ ID NO: 173931 - DNA, 369 bp, Arabidopsis thaliana landsberg
attgtgtttgcgtttgcgagcatcgggttcatagcgttttatatcattaattactacattcggcgatgcagaaaccgtgccgcagcagccggggacattgaggaagctcgaatgagtccgaggaggccaccgcgaggacttgacgctgaagccatcaagtcgtttccttcattcgtttacacggaagctagaggaattgagccaggaataggcgagctagaatgtgttgtgtgtttgaatgaattcaaagacgatgaaacgctgcgtttggtaccaccttgtgtacatgtgtttcatgctgactgtgtagacatctggctttctcatagctccacatgtcctatctgtcgtgctaaagtagttccttaa

SEQ ID NO: 173932 - DNA, 337 bp, Arabidopsis thaliana landsberg
catactacaagaatgtgccacttcaccattcagaagcaaaaagagtacgcagaagctgaagctcgtagaatcagccaaagcaggcttacacactgcttcgtgtcactctccttacataccacagtaagtgaacaatcatcctgcagcttctgtcgcttcggctagccattcacaggcttcctagccacaactcccgcctccgccaccactacaaccgacctattccagaagccagcagcaagaagggcgccatcactctcaacagcaacgggaattcagggaggaatccgaagctcgcacagtcaacagtaatgtgccagaatcaaagcacatctat

SEQ ID NO: 173933 - DNA, 1324 bp, Arabidopsis thaliana landsberg
atggggattacgcattacaataaggatcaagtattcatcagtttccggggaaaagacgagcggaacggattattaactcttcttaagcagaaattgattgatggcaatgtgaatgtgttcactgacgataagttgactggacaaccgctccagaatcttttcggacacatccgaaagtcaaggatcgctattgtgatcttttccaagaactacgccgagtcaggttggtgtttggacgaacttgtggagatcaagaaatgctttgagacggaggcacttaaagcagtcatacccatctttcatagggtgaaggtttcaagcgttaagaaacagagcggaaagtttggggaaaagtttctggctttgcaaaactatctgcttgctgaagaagtcgataagaggaagattaagcgtattaattccaggatcaagagatggaagaaagctctgaagatcgtcactgaaatagctggattgactcatgacaagaataggtacgatttggccatttgggacatgatcaaagtgtttagtttttttgttttttttttccttctaaaattttccattgaccaatgtgtttagtttattacatctttagtttaaactatctgtttgcagtcctgagttggctttcgtggagaaagtcgttgaaaagattattagacatttagccagtattgcagcagaggaaggacgcaatagtacgctagaaattagtgaggtgtgttcttaattagttcttaacatgaatagtttttacctaaaagcagacaagggggttgaatctcttgatcgcaggcaccctcagtaatacaaccaaaccagataatttataatgtcataaacatccggctccatcgttcaaagagcttggaaaattttaaactgagctataatcctgaagaagacaacaaggtgtctgtcttagtgtctctctgagattttttttttttttttggctccgtaaacttcatcagtatctgataagtacgcttatggtgtgactcacagagttatgatttgaagccttcgtctcctactcttacacgcagtgcctcaaatcttgaccatagagatcaatatggcccatttccatgtaagtacatagacctctgcatacgtcgtctgaatattgactgacaacaacttgattttaaatccacagttgaagcgctcatggttaaaaagcagaatgagaatcaacggagcattgccaatattgtcttgaaaaaaacaaagacgtggcacaacttgcatttcgtctctgcgttactgtttggagctttgtttgtgtcttacatggttaggagcaaaaaatgat

SEQ ID NO: 173934 - DNA, 573 bp, Arabidopsis thaliana landsberg; identical to SEQ ID NO: 29932

SEQ ID NO: 173935 - DNA, 528 bp, Arabidopsis thaliana landsberg
acgcatatagatggatcccctgtgaaatcagaggcagagaagcaaagagtcatacaatgtcttgaagcagctatcaaaagaagagtatctgaggtaaatgatccagtaatatatagtgtctggtatatactctttctgtaactgtcactgagagatcattgtttgatgttttagggattgaagttggaactgtgcacgacggatagagtaggcttattgtcaaacgtgactcgcatattccgtgaaaacagcctaacggtcacaagagctgaagtgaaaaccaaaggaggcaaagctctaaacacattctatgtcagtgatgcatctggttactcaatcgatgctaagaccatagattccataagacaaaccataggccaaactattctcaaagtcaagaacaaccctcaagaacaacaacaaagacagaaatcgccttctcacgaatcaccgacaagatttctctttgggggtctcttcaagtcgaaatcttttgtcaactttggcttggtccggtcctactcttga

SEQ ID NO: 173936 - DNA, 330 bp, Arabidopsis thaliana landsberg; identical to SEQ ID NO: 58458

SEQ ID NO: 173937 - DNA, 402 bp, Arabidopsis thaliana landsberg; identical to SEQ ID NO: 76669

SEQ ID NO: 173938 - DNA, 1346 bp, Arabidopsis thaliana landsberg
atggacgtgagggagaacgttgaggaggatgaagggctggaacctgaacaaatgaaacaagaggttcagcaacagaatgcctttgagactgaagtggagaccatgcattcaatgggtggaatttcatccgagaaatctatgatgatgaagggtagaattgggggtagagaagtggtgatactcattgactccggagccacctcaaacttcttatctcacaagctagcaccggagttgggtttaactagcaccaatactcagagttttgcagtaagggtggctaatggtcatatattccatggcaaggaaaagtgttcaggtgtgatgttggaagtacaaggagtggagatgatggaggatttcttactgtttgagctgggtggaactgatgttgttttggggtttccgtggctagctaaactcggggatacaaggactaactgggggctgcttaccttgagttggaagatcagaaactcgtgggtcaccattatgggagatcctagtctgtgccaagtacctatatcactgaatgcgatgagtagagtggtcaagaagaaacaagaagtgtatctattggagctaactactctctttgaggcagcagaaccgcaagagaagaaggaggagtcagctgagattcagggcattctctcacaattccaggaagtcttctcaactccaacaggacttccgcctgctcgaaacagggacatgccatcacccttcagcaagcacaccaccagtcaattgcaggccttacaggtactcttatttgcagaaaaatgagatagagaagatggttcaggaaatgttggatgctcggataataaggccgagtattagtcccttctctagtcctgttttgttggtaagaaagaaagatgggggttggagattcggcgtggactacagaacgctgaataatgtaactattccagaccggtatccaattccattggtggatgagctgttggacgaattgaagggagcaactgtgttctccaagctggacttaagatcaggctatcaccaaatccgtgtaagggctacagatgtggagaagacggcttttaaaacacatcaagggcattacgagttcctggttatgccttttggccttaccaacgtgccatccacctttcagtctgtcatgaacgatgccttcagaccctacttgaggcggtttgtccttgttttcttcaacgatattctgatatatagtaaagacatggaaacccacctcgagcatctcaagaaagtcctggatataatgaagaagcatcagttttatgccaatgtaaagaaatgttcttttggcaacagtgagatatcttatctggggc

SEQ ID NO: 173939 - DNA, 511 bp, Arabidopsis thaliana landsberg
  unsure (1)..(511): unsure at all n locations
ttctttttaatcntgatatagatttcagggaaagaacacgcacttgtcttaagcaatcatcgaagtgacattgattggcttattggatgggtcatggctcaggtgtttttgtctttcactgaaacatgatttttcaaatttgcagaaatataaacactgtctctgattaatcatataacagcgtgtaggttgtcttgcaagctcattagccatcatgaagaaagaagccaagtatcttccagtgagttcttttgatcttatgttgaattttcctgtttttagtttactctctttaatgatttactgaaacattacaagtctttcacagatcataggttggtcgatgtggttttcggattacattttcttggaaagaagttgggctaaagatgagaataccctcaaggttaattttgccttgttttctttcttgagcttaaatttgattctgtttcatgtgcttgaaacattttttttgtcttgcttcttacacaggcaggttcgtatagcg

SEQ ID NO: 173940 - DNA, 749 bp, Arabidopsis thaliana landsberg
gaagcaaagggaattgcagctctgttcagcaattttgattgcagaaccgctgtcttatctacgaggatgatgatgactgtagacagagtatgctacctttggttggacatttccaacagaacgccattcacattgagtacaaggcggaattttctgtctcatctaatgaggaatgtatcatgaagcagctaagaaagtttaaggcctcggggataaggatttttgttgcgcacatttctgaacgaattgcaaatcgtctctttccatgtgctcggaggttaggaatgatggaggaaggatatgcttggatcctcacagcgagaagcatgaataattttcaagacacaaattatttagcaaaagaggaaatggaaggtgtgattggtttcaagtcttatattccgttgactgaggagcttcacaactttactttgagatggaagagatctttgcgactcgaagaagtagttacaaggatgagcgtttgtagcatatgggctcacgatatagcttggagtcttgcaagagcagcagaagttgcaaagttaccaggtttgtcagtatatgacctgcttgaggctattccagagagtgctaagcataaaggtttgagtggtgacatcaaattcatcgataagaagtttatctcagacaagtttgagattgtgaatatgatagggagaggtgagagaagtgtaggactttggaattctggtagtttcatcagcaatagaagaagacgtttgtct

SEQ ID NO: 173941 - DNA, 1173 bp, Arabidopsis thaliana landsberg
caggttgcctttttacatgcacccgtgaaaactcgcgtcgaaaacccatcaacagggaacgagacacgtgcaacgcctaccttcccaaggctaccgctcccacctttgttatcgctaggctactcgcccccgaggtacacgtgcacgagaaaccaaacaaccgcgtccagctccctcgtccccgagaactcaacacaacaacagacctctatcgctaatccacaatccattcgccggataccaggaagcgacctccttaacggtccaaccgatcccccaacaccgatcgatctgcgtaacgtcgtggatatggaaacatttcgcaattacgaagctcaaacaaatacgaacatggctcaaatgcattcacgaatgcgtctagcagtgagcgatgctcccgacatagatcgagtgatcgaagaaatcaggggcaccttgttcacggataggatcgcccattatcgcatctaagacgtcgggagactccgtttcccggagtacgacggaacgagcgacccaatggctcatctcagatccttctgttttgctataacacgagcattcctgacggacgaagaaaacgaaccaagtcattgtcatttcttcgcagaaaacctcgtagatcacgccctcgaatggtttgctagtctcaaaggaaactctattgataccttcgaccagctcgccgtcgcctttttaaaacaatactcggtactcatcgtaaatattacatctgaagccgacctctggggtctcacccaatgtcacaacgaatccttgcaatcttacatcaaaaaattcaaagcaatcaaatcaaagattgtgaacctaaacgaggaggtagccatagccgcccttcgcaacagcttgtggttttcctcaaggtttcgcgaggaactcacctttaggcaacctgtctctttagacgatgcttgtaacgcccacgaatcgccctatggtcggacaagccacgggtgacccagttacgctacagtgaagatgatcgaccataacttagtaaaggttccaaatgaatccgatttcttaaccaaattataatcgaccctcttcccactaggaacaccacttaggcttgccaaccatcatgatattctagtgttgagcgactcagactaggtcttatatcattaaacactcggctgcttttacaaa

SEQ ID NO: 173942 - DNA, 2026 bp, Arabidopsis thaliana landsberg; identical to SEQ ID NO: 30421

SEQ ID NO: 173943 - DNA, 6665 bp, Arabidopsis thaliana landsberg; identical to SEQ ID NO: 72525

SEQ ID NO: 173944 - DNA, 883 bp, Arabidopsis thaliana landsberg; identical to SEQ ID NO: 12812
  unsure (1)..(883): unsure at all n locations

SEQ ID NO: 173945 - DNA, 1694 bp, Arabidopsis thaliana landsberg
gtccggactagaggttgctaaactgataaataatggttctctttatatatataattaggaagatgacagtgccctcctccgttttctgcaatgcaaatttgggaaaggacgagagaatggtcccgaatttttctatgatcccaaatatgcattgcgcctatgtctcaaggaaaggagaacccgtgcctgtgtccatatatacagcatgatgtctatgcatgaagaggcagtagcccttgctcttcaggtaagaaatccatttaataacaaaagaaaagtatttttcacttccttctcctacgtgcgatctttaacttaaaacgttttttgaaacaaaattgttactgaaagccatattttatgatgccagtgtgcagagagtttggttgatcatttgaaaacggtttctgttttacagattgatccggaacttgctatggctgaggctgataaggtcgaagatgatgaagacttgagaaagaagctgtggctgatggttgcaaagcatgtcgtcaagcaggaaaagggagctaaaagggaaaacatacgaaaagctattgcctttctcaaggaaactgatggccttctaaagattgaagatattttgcctttctttccggactttgccttaattgatgacttcaaggttagtcaacgtttcctcttttccagacacacacgctctggcttgggccaaacaagttgcttctgttctcttgtaattttcttcaatacgcttttgcaggaagcgatttgctcatctctcgaggattacaacaagcaaatagaacaactgaaagaggagatgaatgatgccacacgtggtgcagataatattagaaatgatattagtgcgctaactcaaagatatgccgttattgaccgcgacgaggaatgtggggtatgatcatcctaagattgagtagcctttatctagcgtctacctatttatagatatgaatcaatgttttccgaagcaccaaaatcactagcacacctgatccttttcaatgttgttaccaggtttgtaaacgtaaaatcttgatgatgagcggtgatttcagaatggcccagggatattcttcagcgggaccattggctcctttttatgtctttccttgtgggcactctttccatgcacagtgcctgatcacacacgtcacaagctgtgctcacgaagagcaagtaagtcttgaagcataagttcttgttatgagttccctctatctccttctgcatatagatactgcaaattttagcaatatttgttcgttattgtgattccattttttgattggttttcccaaaatctgtctaggccgagcatatactcgatctgcagaagcaactgacattgcttggaagcgaaacccggagggatataaatggtaaccgatctgatgaacccataacaagcacaacaactgcagacaaggtagggacattttcttttccttttttaatcttttctttaacatttttctgtgacctgacatattttctttacggtgaggcagcttcgatcagagctagatgatgctattgccagcgaatgcccgttctgtggagaattaatgatcaatgagatcactctgccttttattaaacctgaggattcacagtattctacttcatgggacctccgatcagagaccaacttagcaaaccagaggaccatttctttgcctgtttga

SEQ ID NO: 173946 - DNA, 603 bp, Arabidopsis thaliana landsberg; identical to SEQ ID NO: 34519

SEQ ID NO: 173947 - DNA, 518 bp, Arabidopsis thaliana landsberg
gtagatggtcagagtttaagcaacagttcagatgatgagaaagcttcggtcacaagtgttaaaggcaaaactagagccaccaaagggacagccactgatcctcaaagcctttatgctcgggttagaaaacatactttatattacttcggtctcaaaaccaaatgacaatgagtaaagtcgttcttaagtgtgttatcaattgttgcagaaacgaagagagaagattaacgaaaggctcaagacactacaaaaccttgtgccaaacgggacaaaagtcgatataagcacgatgcttgaagaagcggtccattacgtgaagttcttgcagcttcagattaaggtatgtagattgttaaaaggattttttgtttttagtcagaatcttatcataactcatgttcaagttaactaaccaaaatgcatattttataaatgtagttgttgagctcggatgatctatggatgtacgcaccattggcttacaacggcctggacatggggttccatcacaacctttt

SEQ ID NO: 173948 - DNA, 737 bp, Arabidopsis thaliana landsberg
attccgtgcccgctccgctgttggcccgcatgaagatcatccgtctgagcggttatatcactgaagaaaaggtcgaaattgcacgcaaccatctgtggccacgagccctgcaacgtgccggtgtgaaagccagccagctgaagatcagcaacagcgccctgcaccagatcgcggaaggctatgcccgtgaggcaggcgtgcgcaatctcgaaaaacagctgaacaagatcattcgcaaagccgtggtgaagttgctttccgggcagcagaaaatcagcgtgaccggcaagaacctctcggacttcctcggcgcgccctacttccagaaggaaaagaccgaacggggtgtcggtgtggtaaccggcctggcgtggaccgccatgggcggggccaccctgtccatcgaagccagccaggtgcacacacaacgtcgtggcttcaagcaaaccggccagctcggcgatgtgatgaaggaatccgcggaaatcgcctacagctatgtggccagccacctacgcgagtacggtggagacgccaactggttcaacgaatccttcgtgcacctgcatgtgccggaaggcgcgacccccaaagatggccccagtgccggcgttaccatggccacggcgctgatttcactggccaccggcaaatgcttgccgcgcaagctggcaatgaccggagagctgaccctgaccggccaggtactggccgtgggtggtatccgcgaaaagatc

SEQ ID NO: 173949 - DNA, 869 bp, Arabidopsis thaliana landsberg
ggtttaatactgatcatgaactcatgaatacatgaaaggttctaatggcctgttttatttgaaaaggaggtaaacccatcgtcaattggggtactcggctaagaatagcggtggaggcagcactaggtttgtaccaagttacactgtagaacttgaatccattcgattggttttacaagaatcattttgcataggtttggagtacttacacattggatgcacaccaccaatggttcatagagatgtcaaaactacaaacatattgttggacgagcattataaggccaaacttgctgattttggactctcaaggtctttccccgttggaggggaaactcatgtttcgactgtgattgctggtactcctggataccttgatccagagtaagtattacatttttactctacgcacttgtgctgaaacttttctttcaatgcttgagatgttcttgccttccagatattaccaaacaagccggttgggtgagaaaagcgacgtgtacagtttcgggattggtttattggaaatgatctcacaccaagcagtgattgatcgaaaccgcagaaagtctcacataacacaatgggtagggtctgagcttaacggaggagatattgctaagatcatggatctaaagcttaacggtgattatgattctcgttctgcgtggagagctcttgagctagcaatgtcgtgcgcggatcctacctcagcaagacgaccaaccatgtctcatgttgttattgaactaaaagagtgtctcgtgtctgaaaactcgaggagaaatatgagtcgaggcatggatacactaagttcccctgaagtgagcatgatctttgatgctgagatgattcccagagcaagatag

SEQ ID NO: 173950 - DNA, 1194 bp, Arabidopsis thaliana landsberg
  unsure (1)..(1194): unsure at all n locations
gaaaggaacggcctctcttttccagaatagcttggcctagggacccagaaattgtatttccttctagaagaagaagaaggaaatttatgccagatactggttttgtggtcttatgcaaataatattattgtttataataacagatagannnnnnnnnnnnnnnnnnnnnnnnnnnnactgtgaaggatgccgctgctaacgtcccaaaaaatctagaagcaagaagaagattggagtttttcacaaattcgttatttatggatatgccccaagcaaggcctgttgctgaaatggttccattcaggtatgtggtttcacttgactgacatgtaacttattttttccctcctaatttataaatatccattttaaattcttgtgaacagtgtcttcaccccatactatagtgagacagtgctctatagctcctcagaactgcgaagtgagaatgaggatggaatatctattcttttctatcttcaaaagatatttcatggtatatatcttctacttctaggcgtgtgaggtcgttccttagtcaatatagtcattagctgagagctgatatccatctatttttggctttagatgaatgggagaacttcttggagaggattggcaggtctgaatcaacaggggatgcagatcttcaagcaagttcaactgatgctttggagcttcggttttgggtatcttatcgaggccagcctttagcgaggactggttagaaacgatctgtattgcttatcacttctgaaataatttcttacaaatacatttacattcaataggtttggattttaatgtagaaatatggtgaatttcacactcgagtgcctaatttaatttgttcttgttgttgttaagtgcgaggtatgatgtattaccgaagggctttgatgctccagagtttcttagaaagacgaggcttgggaggtacttggtttcctaatttttttgtgactattcccttcaaaggaaaggcatatctgtaagagcagttttttttgttttgttttgttacagtggatgatgcatctctgaccaacatgccacgaggatttgaatcgtcaattgaagctcgagctcaagcggaccttaagtttacgtatgttgtgtcgtgccaaatttatgggcaacagaaacagcaaaagaaaccagaggctactgatatcggacttttattgcaaaggt

SEQ ID NO: 173951 - DNA, 1645 bp, Arabidopsis thaliana landsberg
  unsure (1)..(1645): unsure at all n locations
gcattacaacattcgaatgattggtctgcttgttaatcacacctcacccactttttatctcttagggctctgggggttctccccgccaatatggatccgattcttaaggaaattactagagtgtttggcctaccatctcttaatgatgtaagtcttgcttctctttgaagcatgctctttgcttcacttcttctttaatccataacaaaattttatgttctcaattgttttcattctcagtttccttccttgctgtaaatgtaggcctacgttggcattcacgagcccaagactttagatgaggctgatttagctcgcaaaaggctaatatttgacgaattcttttacctacaggtaactagcttcttcaataattgtcttctcataaacagaactctaagtattaatttgttagtgaagaagcgattaatccgttgtctttggttttcatacagttggcacgcttgtaccaaatgcttcaaagccttggcacaaaaatagagaaagatgtattgctggaaaagtttagaaagccagcacttaattccgtttatattgaagaatggtccactctcacgaagagttttctgaaagctctaccatattcccttactcctagccaggtaagcgctgtctcagaaataatatgggatctaaagcgtccggttccaatgaatcggcttttgcaggtaagtttgtcagctgagctggctggtatttcttttttttctcggttatagtttagttctttctttgttggcttttagccaatcttaccagacaatcagaatcagattttttttattgggtgaaactttcagaatcagatttaactgttgccaaatttgtttattaaccaaaaagttccttaatagatcggtttatcatgtagggtgatgttggatgtggcaaaacagtggttgctttcttagcgtgtatggaggtcataggatctggttaccaggttggttaataaaaatctctctacgacttttataaattgcaccatgtgaagttaatttctcaataaatcctctaataactcattcttttcatgtagttgaatttgttttttgagttactcttttctcacctgtaggcagctttcatggcccccacagaattacttgccatccagcattatgaacagtgtcgtgatctgttggagaatatggaaggggtaacatccaagccaaccattgggttgctcacaggttcaaccccggcaaagcagtcacgtatgattcgccaggcaagtcatgcagctaatatgtcgttttaaatgatacaagaggcttgtattccttatagctgataattgataacaggatcttcaaagtggagctatatcgtttataattggaactcacagtctgatagctgaaaagatagagtactcnnnnnnnnnnnnnnnnnnnnnnnnnnnnnnnnnnnggtttggtgtaatccagagaggaaagtttaacagcaaggtcaggttcctagtatattttgattctatcagataattgctttaatcactctagttgaactatttcgaaaaaataaacagtaatgatccatggtgatcatttgattggtgaccttaaaaaaactaatctctttagttttctttcttgtttatcgacgtaagcgtataatgagt

SEQ ID NO: 173952 - DNA, 1943 bp, Arabidopsis thaliana landsberg
  unsure (1)..(1943): unsure at all n locations
atgagtgattggtgtaaaaataacgagcaggttgcacgtgtgctagaaggaaacatatcaccatcagatctaaaccaaggaatcacaccgggacacagcaatgtgtatggctcatctggaggaagcacagattatgactcgagccaagacaatgaaggcatgaacaagtttaggaaagcgggacttgagactcaagatttatatagtaacccaattagtgaatatgatttgtacccgtcctggtcgagcactgacggtcagaccacacgggaaaaggcgacggataataatagaagacttggtcaaggttatggctaaagatgcaagaaattacatgtttttttttttttgaattcttctttttaactgtaaagatttgaggaaatgttttaactctattgaactacgatctatatatgatacacttatatgattttgtatatatattttttttcattctttggtatctttccatagaagatgtgatgctaataataatactcacattgaggttgaattcttgaaggaaaaaacaaagattgaggtttggtttgtgccgttttcttttcaatcatcaattaaacaaaactctgttattggtcactattgggcctttttgtattgggccgaacgacatatctccagattagtggacccttaaactgacacagtgtacttttggtagttggaactagacaaagtgacttatgtttggtttctccgacaagcgtggaattaggaatcacagtgatgatcaagagtttatctctggcttctgctcgcatcttcttctctagaacctctccatcttttcttattcccttctcaaagctctctgtatctcatcgtcggaaattctcagtaatggccagtggaagcgacgagttcgtgaaaggaaatgtttatccaaatggcgttgctctcattactcttgatcgacctaaagctctcaacgccatgaatctaggtccgtttttataaagaattaagctttttcacaacccaagttcaattattgaagaatttttttttacagaaatggatttgaagtacaaaagcttgcttgatgaatgggaatatgatcctggagtcaaatgtgttgtcgtcgaaggaagcacatctcgggccttttgtgcaggtaaaataaacttttcttgagtgtgcttatatagtggattctggtttctaagattgtaggataaatttgttgaaagtatgttgcatctgatcttatcttatcttatagaaaacatttggtcttagttaatgccatgggaaggttttagagtgaccatttataaatggtgcaggaatggatattaaaggcgttgttgcagagatcctaattgacaaaaatacgtctcttatgcaaaaggtttttatatgaattttgtgttattggctgtatcaaggcttatctctttctttaaacatacaaaatgtcattttgcaactctttggtatttttgtgctctgtgttttgttttatgtggggttttttgggtttccctttcttgcatcaaaggagttttctttatcaaattcacactggatagaaattttgtaaccatggttttagttnnnnnnnnnnnnnnnnnnnnnnnnnnnnnncatccaaaaatcaattgtcagatatgatagaggtctggttgtgcaattgtttcccccataagtcaggatatgatgattactgaaacagaaatagagaaatactacttctactgaatgtacttgaagtagaaggaaacttctagcttgatgatgctaggtggtctattctttatttctgttgatcacaataatctgtagtggaacactcttttgtctaggattctagagatatactccatgctagctctttatttgcttggatactgccctttttgaagtagacaccttcagtgtttaacatttctatttaccatcaattggcttagtgcatc

SEQ ID NO: 173953 - DNA, 2472 bp, Arabidopsis thaliana landsberg
gaagaaatctgaactagataagaagaagcgtggaatctccgttgacaagcagaaaatccttaaggtgggttactcctacttgtcctctctatgtcaatgtcttttaagagtttcttcgttgattggggtgtttataggaacaatcgattttacttggttctgcaggcgtttggtgttaaatcggttgttcatgcgaagaaagcaaaacatcacgctgcggagaaggagcaaaagcggcttcatcttccgaaaattgatcgtaattatggcgaagctcctcctttcgtcgtcgtggttcaaggccccccaggagtactgtctttgagactgatgttgcattttcactctcggttttgcttattttctcacaagttttgattgttcctgtaggttggaaagtctctcgtgattaaatctcttgtgaaggaatttacaaaacagaatgtacccgaggttcgaggacctattaccattgtacaaggttctgtgctgtatttgtttattgcttcttcttcttttctttttttgtgtatgcatctatcttgaattttagggttggaatttactcctgctctcattttggctggtcatggatttaggtaaacagagaaggtttcaatttgtggagtgcccgaatgatatcaatgcgatggtggattgtgcaaaggttgctgatctagccctacttgttgtagacgggagttatggttttgagatggtgagacactatttttctgtagctttctcctctttccataatgatctagattgtgaagaatctttcttatgtatacaagatcactgttgggccttttttgtgatctacatttttttgtgataaacaactaaggtttgacacgtgaactgtcttttaatctgtttcaccctcaggaaacctttgaattcctcaatattatgcaagtgcatggatttcctagagttatgggtgttctcactcaccttgataagttcaatgatgttaagaagctgagaaaaacaaaacatcatctcaagcatcggttttggactgaaatatatcatggagctaaattgttttatttatctggtctcattcatgggaagtaagtatctgaattggtgcatcaccaacatgaatgacatgtgcaaggagcgtctgaggttcacctttgatttatcttttattggtaggtatacgccgcgtgaagttcacaacctcgcccgctttgtaattgttatcaagcctcagccattgacatggcgaacagcacatccttatgtgttggttgatcgccttgaagatgttacccctccggagaaagttcagatggataagaaatgcgatagaaatatcactgtgtttggttacctacgtggttgtaacttcaaaaaaaggatgaaggtatgtcatcactgtccttagatactggttcatctgaacctttttctatggcctgaatccttaacctatttgtttgcttagcagtatgtggcgcaaaatactcaatattttgggaaaagaccaatttttaaattgagcctagagatgagctgatttgatgtcaatttgatgttatatatacattcttccttactggtattcgtccatagattcttagcgattcacatatatttagaactacctaaagtaacccgttgtattcacacgtagctagttctctcatcgagtgaagttctaagaggaggagcataaatttgtataccttctgtgttgtactgaaattttctttgcttctttatctagtggaatgattttgtgtgcaaaatggtatcttagctgttacagtttacctttctttcatgtttaacatgcatctgatataatttcttatgattatcaggttcatattgctggagttggtgacttcattgtagctggggtgactgctttaactgatccttgtcctttaccttcagctggcaagaaaaaagggctgagggacagggataagcttttctatgctcctatgtccgggattggagatcttgtgtatgacaaagatgctgtttacatcaacataaatagtcaccaagttcagtactctaaaactgacgatggaaagggagaacctactaataaaggttattttatggtgttttattgtcatatgcttggtctgtatgtaactgcagtagtctcttttgagtgtcttgctcatttcatgtttaaagaatttctacatattttaaatttggtttacatcattctccatgatagaaacccaatagtttttgctcactttttgtagctctagcatctctgattgtgacattttttcttttggcaggaaagggcagagatgttggtgaagatttggtaaagtcgttgcagaacacaaagtattctgttgatgagaaactagataagacattcattaacttttttggcaaaaagactagtgccagttcagaaacaaaacttaaggctgaagatgcgtatcactctttgccggaaggttctgacagtgagtc

SEQ ID NO: 173954 - DNA, 1108 bp, Arabidopsis thaliana landsberg
ggggtccatctcaagagccaacagtagaggaattcagatactctttgacaaaagtggatgatcatactcgtgtcacctggatttatttgctaagattgaagagtgatgttttgactgtgtttccagaatttctgcacatggtagagactcagtttgataagcgagttcgttgtgttagatcagataatgctccggagttgaagtttactgagctttatcgacggctgggcatcattccttaccactcctgtcctgaaacaccagagcagaactccgtggttgagaggaaacaccagcatatactgaatgttgcacgagctctcctttttcagtccaacctaccgttgtctctgtggggggattgcattcttacagctgtgttcttgatcaatcgcacgtcatcaccattgttggaaaataagactccttttgagaagctcactaatacaacaccagagtacactgatttgagaacttttggctgcttgtgttatgcgagaacttcaaaaagcaacgaactaaatttgaagatagggctaaagcttgtgtcttcttgggttatccagcaggttacaaaggatataaactgatggacattgaaagtaatgttgtgttcatttccagaaatgttaaattctttgaagacatatttccttttcagaattgccaagctagtgacgaagttgatgtcacagggttctttccccagataagtactcgtgttgctgatccaggagaatcttcagggactagaactgagggggaatattcgtctacaatgagacagggggaatctaactctgaatcagtgatacctaatacagaaatacatcacggcgacgagtttcgagacctcctggttatttgcaaaactatcaatgctattcagtgaaagaatctgtgaaagagtctacagaacatccaatatcacaggtcttatctactgataatctctcttcttcttattgtgcatacattaatgctctcaccaaatatcctactccaactagttatactcaagctagtaaagtcaaggaattttgtgatgctatgaaggatgagataggggctttagagcgaactaatacttggattgtttgtgctcttc

SEQ ID NO: 173955 - DNA, 519 bp, Arabidopsis thaliana landsberg
  unsure (1)..(519): unsure at all n locations
atgtatatgttgacccacctcccaaacgaacccgcaggttgatgaatttaaaggagatgatgtaatttgcctgtcaaagaatgctactactctgttcactttgcacgcctctcaagttcatatcgatctgccaactatcacagagaaggataaggaggtcagagttgcttctaatctacaaatctcaatgattcactttgctccatgtataatacatatttttagtcagtgtttcaccagattgtttcggtttggttatcctctacgttataagcaagcacatggggcgttcaaaataaaatcgattttctctnnnnnnnnnnnnnnnnnnnnnnnnngccaggtctgtatttttatgctgcccttcagatattgttatttctttgtgtatgcaatattaattctgacctttgataagcttctacaataaccaatttttgtttcataacacagacccatgaaatccatctaaaagattggtgacctctctctgacatcaacgaaatccatctctgaaat

SEQ ID NO: 173956 - DNA, 724 bp, Arabidopsis thaliana landsberg
atggaggatgccaaagactatgcacggagagtcacaaagctccggtaagttgtgagctttgcggcgagaacgccaccgtgtattgtgaggcagacgcagctttcctttgtaggaaatgcgatcgatgggtccattctgctaattttctagctcggagacatctccggcgcgtgatctgcacgacctgtcggaagctaactcgtcgatgtcttgtcggtgataattttaatgttgttttaccggagataaagatgatagcaaggattgaagaacatagtagtgatcacaaaattccctttgtgtttctctgattttatgttttgtttttcgcgtaattaagattaaatattggtagggttttttctctggaaatgttctaagaatgtatattttcattctaaagcttaaaagtaatatatgaacacctagaaaacatattgatttaatagtaaaataatgcggtcccaatagtaagctataagaaatcaagaacaaatcttcctatggcaaacataatctgcctttattctttggctttatttttcttaactaggaaaacaatacaacgttacaaattacaatcaagtgaaatggaaaggtggagagtggtccaaaacacaaagaagatatatttttctatgattaacatgtaattgagattaaggagctataagtaggaaagagtcaacgactcttgttttgtttttgggttctgattttgctg

SEQ ID NO: 173957 - DNA, 446 bp, Arabidopsis thaliana landsberg; identical to SEQ ID NO: 73153

SEQ ID NO: 173958 - DNA, 926 bp, Arabidopsis thaliana landsberg
tagtagccaggtttattttccttctcaaaaccagttgataatgagtgaagttacacattctgttttactaatgtgggattcataacaagcagatacataaagactttgagttagagaagctgaagattgaactccgtcacattaaaggaatgtatgcagttgctcaaagcgaagtcatcgatgcttctaaaaaggtttatttttgttacaataatttagaaagttgctttatttagatattgggaatgatttgtatcctctgttttctttttattagatgcaagatctgaaccagcggcgatcagaggaagctacaaggctcaagaacttaacgataagagaagaagaagcggatgaagtggtggaaatggagagggagagacaagaggatgcggaaaacgaagctgagctcgtgagagaatgcattgagagagaaaccgaagagagacttgaggcggaagcaagagcggaagaggttagaaaagagaagcagaggttagaggatgcacttgaaggtggaccgcttcaacgccaacaatacatgaaatttgagtgggaagagatcgtcgaggcgacgtcatctttcttggatgaacttaagatcggagtcggtggttacggaagcgtatataggtgtaacttgcatcacacgacagtagctgtcaaggttcttcattcagacaaaagtagtttaaccaaacagtttcaccaagaggtaaataaacattcttcacttcttaaacctccaagcaaaattactgttctcctaaaacgatggcgttctctttgatacttgttcagcttgagattcttagcaagattcgtcatccacacttgcttctcctcctaggcgcgtgtcctgaacgcggaagcttagtttacgagtatatgcacaacggaagccttgaggaaagactcatgaaacg

SEQ ID NO: 173959 - DNA, 1469 bp, Arabidopsis thaliana landsberg
  unsure (1)..(1469): unsure at all n locations
gtggtgtggcttccgtatgaaaatatgaatggaggagatatgtcagaccgnnnnnnnnnnnnnnnnnngctgggtagatcgaaaacaatgctgatatcttttgacaaggcggagagacatctgcctgatcgctgtcgcaaacaatttgacttgtttcaagacatcccagcagatgtgcaaaggtgggtaagaaagtctcggggagttgatggaggggttgacctgtcgaataaaatggaatcagagttaagcgaatgggaaatgaggtgggaaaacattgtacctgacgatgtccaaggtgttgacgaagcagactacatgaggtggtatctgggaattacccgaaaaattgtaggaaggcccatctctctctcaagcgagtttcaaagaacggtaatagctaagaacaaattttttgaccctcaggtcattgtgacagtatgtatgtaggtatgaccttattactttatcctccttgttattgcagatttcaaatgtgagggatatattggagttagctgagaattttcaaatacatgatttggaccttgaaagaggcaacatgatttcacggattataggccttgcgcaagattgcttgagagatcaagttggggtaacggctacaccagaaagccagcagcagattgaacttgggaaaagaatgcgcggtaaagaaagggtgagaaggaaggggatgggaaagagaagaaaaggtattgatccaatggaagattatggaggtagtgaagatgaatcccagtttggacctttggttgaggttggtcagatgcatttaccgcttagtcatacaaactcggtttacgatggaacacatatgtatgatgctgtcaccaaagttgatgatatggagctttgcgacaccatccctcaattgcctgagactcaagacatacacaagattgaagggtcattgctagacgacacagacaagtttgttgaggagagtaagttacaagaagagtttgatggcgaggagccaactgagagctatgatgtgaagaaagaagataaagaatcaaaggttgaagatgatgatgcagcaaagggctttagtgatgtgagcggtgaagaaaacgcgaacagagaggaagaagatgaaacagagatgggagaaagtgttgcagagtcgtcttctcttgatagaagaggagagaacactgtggtggcttgaaagtagttggttttcttctcatctgtttaaccaatgagaatttctttctcttctttctctcgagttcatggaactgtcagattcaatgagagttatactatacatcaaggcaaatcaggattgatgaagaaaagctggaggagaagttgagtttagtttttctgttgggtttttttttttttggggaactcgtagtctttaaagtactgccttttttcaagattatgtaaaattatttggagaagggtttacagaagaaagggatttcttttgc

SEQ ID NO: 173960 - DNA, 1341 bp, Arabidopsis thaliana landsberg
ccatatgcgaaacatactgtagatgagcatcttgacatgctggtatgagaatgttatacgagtgatggtgaattgcttttacttttgtcttgttaataacctcatatgcaaacacaaacagatggtttgccatcaccttgacaagaacatcccagaagatgtagcttttgctgaatcaagaataagagctgaaacaatagcagcagaggatatattgcatgatatgggagcaatcagcattatctcctccgactcacaagcaatgggtcgcattggagaggttcatagtatttgaattcttgaatcctatatcctttctgtagagatgcttactttgtggcgtgttctcttttgacaggtaataagcagaacttggcagaccgctgacaagatgaaggctcagaggggagccattgatcctaacatggctgatgatgataactcaaggatcaagagatacattgcaaagtacactataaatccagctatagccaatgggtttgcggacttaattggctcggttgaggtatgctaatcttctccacacatgtctcatatcttactcatacagctttcttttcctctgtaactacttaacgtcagtgcttttgtttacttaattggaaactgcactgtgatgcaggtgaagaagctggctgatcttgttatatggcagccggctttcttcggagcaaaacctgaaatgataatcaaaggaggcaatatagcctgggctaatatgggcgatgcaaatgcgagcatacccactcctgagccggtaatcattactgactactagattctagactcgttttcttgacaacacgtctctaaagacggtcctttcttttattttatgatggtaggtgatatcaagacctatgtttggagcatttggaaaggccggaagtgaaaactctgttgcatttgtcagcaaggcatataatcttttgtcactctgtatcatccattcttttctcctattgatttgtggattcagttaatattaactatagtttctgtattcttacataaatcaggctgccttgagaaagggggtaaaagaactatatggactcaagaagagggttgtagcggtatccaacgtgaggcagctcacaaaactcgacatgaagctgaatgatgcgcttccagagatcaccgtggatccagagacatacgttgtcacagcaaatggcgaggtccttacatgtgcgccagccgattcagtccctctctcccgtaactatttcctcttttaaggttgttgaaatttcagttgctctagtgcattttatcggcggcattgctaactacaatgagacacctatagcactatag

SEQ ID NO: 173961 - DNA, 1395 bp, Arabidopsis thaliana landsberg; identical to SEQ ID NO: 55955

SEQ ID NO: 173962 - DNA, 983 bp, Arabidopsis thaliana landsberg
  unsure (1)..(983): unsure at all n locations
tagtaaattccatatgcaagtggatcaagntcatgataaaggaagttgtgggacatctgggactgaagttcaagcgtctaaaagacagaagcttgatggaggtcttcttcgtaaggtagagtattttgcagacttttcaatagggtgactgtcatggtacactgagttgagcagtgtatacttctttttaactatgtactaggtatatatatctgataatctgaatttaggtgctgaaagtagtggcaataaaagacatttgttctctgtttcaggttgctgatacaaagcaggaaatgagttttgtccacaagatccccaagaaggtttgctttctattgcttgaatactcttgtcttgtttatagagttttacaatgaaatgtaaatcatttaattattcctaaatggttttgcaggatacaactcttgataaaaacgctcaacatgccaggacaaagattactatcccacaggagcctgattttgctacatcacagagggctcacaggatacggttagcagctaaatgtttgctgaaagtgaatagttacaggaaaggtcacatctcaccggctgttttgctaatgattatttcaggcacaagaatgatgcgaagttagaacaagagcaaccagctgtatatagattcaaagcacgtccatttaaccgaaaggtttgtaactttgcatctgctacttagaaatgtgtgatagaaatgatattcattagcatagccacaagctcagtctcgtgtttgtgatctgtagatcttcgaggctccatcattgcccatccggaaaaacagcactcctaaactacctgaattccaagtaagcctcacgaatggattcttctcagctgctatagtgattccatcatatcctggtttaaggctttagattaaattatttccatctcttatcaggaatttcatttgaagacaacaggaggggctatgcaacattcatcagcagtaacaac

SEQ ID NO: 173963 - DNA, 291 bp, Arabidopsis thaliana landsberg
atggagaaaagagaaagtagtggtgggtctggatcaggagatgcagaggtgagaaaagggccatggacgatggaagaagatttgattctcatcaattatatcgccaatcatggtgaaggtgtttggaactctctcgccaaatctgcaggtcaaactcttatatatatatatatcaaaaagttataattgatctccaatatttgttatgcttatatgtgtgtatgtgttgatgaactagggtttgttcttcacatgcgaagatattatattttaatcactatatgtttccag

SEQ ID NO: 173964 - DNA, 1267 bp, Arabidopsis thaliana landsberg; identical to SEQ ID NO: 20027

SEQ ID NO: 173965 - DNA, 581 bp, Arabidopsis thaliana landsberg
atgaagtttggaaagaggattaaagaacagatacaagagtcgttgccggagtggcgagacaagtttcttcgttacaaggaactcaagaatctgatctcttctctggcgccggtggaatctattttcgtcggtttgttgaacgcagagatcgacaagtttaatgctttcttcgtcgaacaagaagaagatttcatcatccaccacaaggtataatttatgggtaaagaaaaaacagagcgattgttcttgttgagtttgctaagtcaactgatctagctataaagtgctttaaccatcactgatctatctttaaaaaatgtaggagaaattaatccttttttttattggttgataagtattataactataaaaaaatgtgtaatcgatctgaggaaactttcaacagagtggtattttaggtttctggtattgaagattttttaagaaagtgacacatataaaaatcctccatttaattagtccctagaaatctgtctgtctaatatagaaatttggattattaaataatttgtgcactttaaaaagtattttttgtggaagttttctcacataatataaac

SEQ ID NO: 173966 - DNA, 1205 bp, Arabidopsis thaliana landsberg
acactttgtatagagagaaagacaatattgcttctgtttactttgagaatctgttcatgtcttcttattttgctatctctcagtcggctttggatggttttaaaactggagtttcagaggagatgaatcaagaattaactcaagttgttactgaattggaaattcattctgctgttttttcgattaatgcagagagtgctcctggtccagatggtttcactgtcttattcttccagaaaaattggaatgttgtcaaggatcagattatatagagattctgggtttctttgagacgggggttctgcctcaagaatggaatcatactcacctctgtttcattccaaaatttactaaccctcagagaatgttcgatagattaaagaagcatctcccatctatcgtttcaccttctcaatctgcgttttttgctgagagattggtctctgacaatattctcattgcacatgaaattgtgcataacctcatttcatatgagagaatttccaaggagtacatggctttcaagacagatatgtctaaagcatatgatagagtggaatggagtttcttgaaagatattttgggtgctctaggatttgataagcaatggatttcatggattatgacctgtgtatcttcagtctcatactcagttttgatcaatggacaaccgtttggtcgtattgtgcctggcaggggcataagatagggtgatcctttgtcaccatctttatttgttttatgcactgtacctctagttcacatcttgaataaggctaaaagtgaaggcaagattacgggttttaagtttcaaccggatggggtgtctgtgaatcacttgctttttgctgatgatactttactggtttgtaaagcaactccagaagattgtgaagaattattagcttgcttatcaaagtatggggagttgtcaggccaagtgataaatgtggataaatcagctttgacatttggagccagaattgatgaccaaaccaaggcatgggttaaaatgaggtttgggattcatatagaaggtggtctgggtaagtatttgggtttacctgaatgcttaagtggatctaagaaggaattatttggttttcctaaagacaaattacagtcaagattaacaggttagtatgcaaagaatttatcacaaggtggcaaagaggttctcttaaagtccaattgtatggattgcc

SEQ ID NO: 173967 - DNA, 671 bp, Arabidopsis thaliana landsberg; identical to SEQ ID NO: 23840

SEQ ID NO: 173968 - DNA, 439 bp, Arabidopsis thaliana landsberg; identical to SEQ ID NO: 69663
  unsure (1)..(439): unsure at all n locations

SEQ ID NO: 173969 - DNA, 984 bp, Arabidopsis thaliana landsberg
agacttggattttgattgaatatatcatctcctttattgcaaattgcaggtgcggtttgtcattatgggaaacctattttgttctgagtactccatccacagacgctttgatttgaaaggatcttctcttggccgtacaaccgataaacctgaatcggaaatcaattcaaatacaattttgaaagatcttgatctgaatttcatttttagactacagaaagcttggtaccaagaattcatcaggttggagattcatcaatcattctctttccattgacatttttcattgttatttattatgctgattgtgtttttgttcaggcaagtcgacaaagactgcgagtttctagaacaggagagaataatggattacagtcttctggttgggattcatttcagagaggcatcagtcgctggagagctgattccttctggagctcgcacacctattggttcgctttcctaacaaaaccaaatatcatatctctcctttgaaacccgtgaagcaaatgtatatgtttctttctcgcaactgcaggtgaatgtgaagacgaatcagcccctcgtctctctagagcagacgtggatcagcttctctctgatcctacaaggtaaacacaaaacaaattaaactcaatcctagaaagcaactttctcgatttcggtttcaagaataaatctgttggctgttgcaggtgggctagtatcagacttggaggcaacatgccggctcgagcagagaggacaatgaggagaagcgactgtgagttccagctagttggcgaaccgacaggagagtactatgaggttgtcatgatctttggaatcatagacattcttcaagactatgatatcagcaagaaactagaacacgcttacaagagcatccagtacgatcctacttcaatctcagccgtcgatccgaggctgtactcgagacgtttccgtgatttcatcttcaaggtcttcactgaggataattga

SEQ ID NO: 173970 - DNA, 707 bp, Arabidopsis thaliana landsberg; identical to SEQ ID NO: 34628

SEQ ID NO: 173971 - DNA, 3060 bp, Arabidopsis thaliana landsberg
gtcacacacaacacttgattgaagtgaaaaaaacctttgtttgatagaacaagtgaaaaagaaacagacaacaaaaaaactaaagcaaaagtacagtgtgtgagagatagtgactgcgagagagagagagagatttatttttgcacactcgaagagggaaataaagaaacaaaatgatgccttgatggagaaaactaattgattgcttttttttcttctctatctttttgtttacattacaaagaacatgatcggtttctcttattaccaccttcagtgttttgtaatctctattgcttcttcttcttctccatgtcgatgaagaaatgtttgagatttacacactctgtttctcactgtaactcgggtatgttttgtttttttctcttatgtctctatctgtgtctcttattagatctctttttttctctaaatctttaaaaaataaaaattgattctttgcttaatgctatctgattcttttggtttgttgttcttctttgactgctattttgggttctttctgattttctagggttgttttgatacactctttactactaattgggttttttgtttgctctatcaaccttatatgagatctacattgtgtatgaatcaaaagatcattacttttgcatgtgtagtttgtgttttggaagcttaatttgaatccttttgaagcttttatgacattctattcattagatctactaatcactgattaaaactctaatctgttactatcattacaagaagttgtttagtaaattttcagagatttcattttagcatgtttcatctactaatcattgaaagtgtctttatttaggaggactaaactgttttcttgtattgtgtaatgttttacagatgttttgaagtggtgattggagtggaaatggaatttggtaaaggaattgatatggaacaaagccccaatagtgttcttcctcctcctcgtccattcactgaatcagaaaagaggactagtacaagactaaagccgcctcgtagagatgagatattgagagtcaaagaaggtttcaccgagataagtttcaggcgttaccgtagcacatcatgtaagaactttccttctaaaccacttgcaatgggagatacaacggagctaaggcgcggttctgtttatcaaagctctaatgagttgtttaaagaacttagagaaccacaaggacgtaaagattcaaaggcgaaacttgagttgtctcgtagtagtgatgcttctttctcctttagagttgttgattcttcgaggaagggaagtactgagaaaagaccgcataagacggttttagatggtcagaagtcattagttgaaccttgcacctctagcaacttcattgacatttgtttgaagtcaggtattaaagatagagctgtagtgttggattcagatgataatgaccataagattagattgcctaagccatattctgcaaaggtagactcagtagaaaccagttacaataaggacagctcaagagttaggaaaatgtttgatccatttgttaaatcaaaatctttgagaagtcctcttggttatataggagaatcaggtgatcagttcaaattggggaggaacagtgagcgttgcagatctatgttgagtgactactcaaacattcataaaagatcgaatctttgtcctcctccagttgtcaataaggattatacctcggtgctgaaatcttccccggttcatctacattgccgtctcaagatggaaagcaagaatggattaccggtttttcagtttgtttcagattctcctgaggaagtttacgctgcaaagacgtggaaatctgacaatggttctagttgggtatatacattttcatctgctggaagcagaaagaggagcagtgctagcgtgcggggtttgaccgatgttagtaaagaatctttgctggtggctcagatgcaagttacctgtaagatgtgttcagaagtaagaaaaaagggacaagatccagaaactttgatggtgaatgagtttgttttgtatgatattgcacaagcaagaagaagtgtctccacaaaggaagatcaatcactaccacttgatacggttaataatgcctccaagaactctgttaaatcagactcagagataagaaataactcaatgtccggggatgctttggatacaatgaagcagagatctcagcctaaaagaacatctcaaagctatgatcttgaggcttcaaatggaacaaacccgtggtcagctgcaaatttgcatcctgaccttgagatcgcagctataattattcaagacactattgagaagagagaaagcttaaaatatagaagaggtgacaaaagactgatggagaaaactaatattcttggtctttctccaatagaagaggagaaaaaggagttgtttggcagcagaagtttagaaaaactgaaggttgtaatcccgaggggaaaccacgggttaccaactaccgaaaactcttgtccttcgcctttgattcagcgatggaggtcaggaggcggttgtgactgtggtggttgggacatggcttgtccacttatggttcttggtaatcctcgtatctcatgttctcatgatcagcctcttgtagaaaatcagcatcctttgcaactatttgtccaggtaaaattattgaagactttaaaggaactcttcttctgtttatcattttaacacatatcttcttcatattgtagggtgctaaagaacatataccagcattgtacatgtcatttgttgaggaaggacagtacgatgttcatttccacgcgcagttatcaacattgcaagcattctccatctgtgttgccatattacataacacggaagtctcagatagttacagaaatggcgagaatgtacaacagttttcgcattgcaactcgttgaaaatgctgattgatgatgatgttcagttcttagttgaagcagtaacagaggaagaagaagtccctaagcctctgaaagaagctgtgaccgctcttcaatcctacatgccgaatcctcctttctcgccaatctcccgagtgtag

SEQ ID NO: 173972 - DNA, 1068 bp, Arabidopsis thaliana landsberg
aacccaattaaatctagcatattaaaaagtctggttttctacttttcttagtacaatatggttttttaggagaaaatataaagtgtatatcaatttcgaaatcataaattgaataatttttgaggatttaaaatcatctcaagttctcagccaagatggggtacataaaggatttcttcctacgaaataaaggcaaataagacaaaggaaaggaaatgctaataattaacacagatggaaggaaatgctacctaggaaaaggacacaatatcaactaaataaaggtaaataaaattaaaaatgaataaggataaactcacaaattgcaattacttatatatatgtataatccttaatacaatctagcgcctctatatataagaagacaaagaaaagaaaccctaaaccttgattcactatttttctttctctttgatagctatggaagcggaaatatcctttggcggcgaaatagacctcaaaccgaaatcacaagatgctggatcattcaaaatctgcgtaagtgcccgaagatcggacacatcaattagtcttccaccatatttcgttctctcgtacaatgactacgaaggtgtcatatcctcctaccctaatgacgtgaaaaaactgaatgaatggttgtactcagcagggctctccgaacaatatgttgacattgctaactctcaactcactgaacgaatctgtaagtcgatttctatggtagactcttcagtttgtgctacgttagtttacatgtactgtaaagtcattgttccacctcctcctcggattgactcgtttgatgagaccaccaataatatcgagttaattagaccggcaaataagtttgtggttgaccgtttggcaaggaaagtatgtaataataagaagaaatccaactctgacgccagtgtgtgcacaattcgtttggaggagtttgaaaagggagaaatagtggtgaccttaccatgtggccacgagtttgacgatggatgtattgggaagtggtttttgaaagaccatgtttgtccattgtgccgattcgagttgccgcgttaagaaatg

SEQ ID NO: 173973 - DNA, 1003 bp, Arabidopsis thaliana landsberg; identical to SEQ ID NO: 11352

SEQ ID NO: 173974 - DNA, 1752 bp, Arabidopsis thaliana landsberg
atggctgcctcttttgctttcctgagagatgtccgtccatacaagacctcatggcgtgtccaagtaaaggtgcttcactcttggcgtcaatacactagcatgactggtgaaacactcgagttagtgttggcagactcacaagtaagttaatgcactatgttattgacatgtgctaaatatatgttttctgtttatactagggtgtcaagattcatgcatcagtgaagagggacttggttagcaagtatgtgaacaacttgcctttgaatgagtggaggtttataaaaacctttgctctaaaccatgcatcaggtcaatttcgacctactggtcatctatacaagatgtcttttgtcactaggacacaggtcatccggtgtgatcctgttagtgattctagctacctttcattagctactttcgctaatatccagtgtggtaactcaaatccggctattttagttggtaagcctatgaccagttgttaaaattttgaaaatctgtaaatttcttcttttctatattgtttcattgactgactgtgtattttactagatgttatggttaagtggttaatattggtgagcttgaaactctcgaggctaacaacaaacctaccacaaagcttgacttcgaattgggggacgacacgtaagtctatgtacctatgttttaaatcctcaagaatgtaatttagaaagcaatctctctgatatattgttttgtttagtgatgagcgaatgtcctgtactttatgggaagcatttgctcagagtgtttttagtgcatgtgaatctgctgatggttaaatggttatttgtgttctgcgatttgccaagattaagtcttacaaaggtacatgtctactcttaactttcttgattctactcattgattataacatttattaccataattaaatgttctactttataatgtatgtaggagttaggagtttttctaactctttttatgcatctcaagtccacatcaacccggatttccctgaagttcaagcttttgtttctcggtctattttctttgtctttaactcactttccgtttatatgttatttaacagtttacatgttgatggtctttctctcactttccgtgaaagtgttccaaagtttcacatggttactgtgaaacaggatgatgactgtaagcaatatgagaggaagtcaatccgtgattttcttcattctatggaggtttgagttcttaatttacatgtactataaatcataataccctttattgatttatataaatttataatttcatattggaaaggttagggttgtctgcaccatctatgctcttgacacagattggtcatggtattactttagttgtcgtaattgcaacaagaaagtgactcacattcatgctggtgttaacacaacttcattgaagtcatcaaaaccaagttttggtgtgatgtctgcaagaatggagtcactaatgtgcaagccaagtaagtatacctcacagtttatgtccattactaactcaactagaatgcacacattaattgacccgcaaatttacataggtacatgcttaatgtgagaaatagtctatactatagaaaatttgaggttatttgcttctaaaggcgtccacataggatttaatccaacggattgcgcttggacatgtcattaattagcatttttggcctctatgttaaataacattttttaatttaatcatatttctatattgaattgtttatgggaaggtaac

SEQ ID NO: 173975 - DNA, 2684 bp, Arabidopsis thaliana landsberg
ggatgcagattttggttcattggagctctccccagtcgatggccggactctaactgattttatgcacacaagaggtcttcggatgcgttctttagaatatgttgtaagttggctttcttaacctcgtgtttcttagaaactattcaagatgaattttgatcatccatatcttttttatggtgacaataggtgaagctttcagataaattgtcacatgtacaatcgctgtgtgttcatgagatgatagtaagagcccttaagcatatcctccaggcggtgatttctgctgttgctactgacactgacaaaatagctataaaagtagctgctgctttgaacatgatgcttgggattcctgaaaatgttgcagcaacaccacataacccttggaatgtacatcctctgatcttccgatggttggagaaattcttgaagaaacggtatgattatgatcttaatgccttcagttacaaggatctacggaagtttgccattctccgaggcttatgccataaggtaatttatgaatgctctaacccgaaaatttgattgagttataaagttgttgctaattactatattgactaatgaaattgtgatttaaattttatttgtcaggttggtattgagttgattcccaagggacttttgacatggattctcctgcaccttttccggaaaacagatgtggttagtcttgtcccagtgcataaggtaacggacaagacaatagatattaggaaaaatgttctatctgaatcaggattctttctaatatgttagtcagccatagttattcagactttctattttaaatctatgcagcaagcagcatgttcatctgctgatggaaggcaacttctggagtcatctaaaacagctttagacaaaggaaagcttgaagatgcagttacatatggaacgaaggtccatgtctactcctcagctatttcttcatattacttgttttttatacagcgtcatgattttgttttgttgttttgtctctttctttttttcctccattaggctcttgctaaactcgtagcagtttgcggtccctatcacagaatgacagccggagcttacagtttacttgctgtggttctatatcacactggtgactttaaccaggtctgtatatattatatggttagattgtgatatctttcctttatatgacaattgtgaaactaaaagattttgttaaaacaggctacaatatatcagcaaaaggctttagacatcaatgagagggaacttggacttgatcatccagatacaatgaagagttatggtgatcttgctgtcttctattataggcttcagcatacagagctggctctcaagtaagtttagcactcttgattttaaaagaattgcgaggttagatggtttaaatgtttgatgtctctttccatcatctaaacctggatatgattgtttttgttaggtatgttaagcgtgcgttgtatctcttacatctcacatgcggtccatctcatccaaatactgctgctacatacatcaatgtagccatgatggaggaaggtctaggaaatgtgcatgttgccttgaggtatcttcacaaagctctcaagtgtaatcaaaggttgcttggtccggaccatatccaggttcttttcccgatgctcgttttttgttttgggaacataaatatgtaagaaacttgatttgattttgctaattatgtcaaatttcagactgctgcaagctaccatgccatagcaattgcgctctccttgatggaggcataccatttaagtgttcagcatgagcaaacaaccttaagaatccttcgagcaaagctggggccagatgatttacgtactcaggtatatattatcatgatatcctatcagccaaattagtcatctttctgacaactgtatgcattctttaagtttgacaatttattatatggttcaggatgctgctgcttggctagaatactttgagtccaaggcttttgaacaacaagaagctgcgcgaaatggtactcctaagccagacgcgtctatagccagcaaaggccacctaaggtcaaacaactttctgatatctccttatttgttgtttataagttttttattttgtttgaatgtgtcaattaagtgtactccttggccagatccttaagttgataatgttttgcagtgtttccgatctactcgactatatcaacccaagtcataacgcaaaaggcaaagagagcgtggcagcaaagaggaagaactatattctgaaggtatgatttttatttctttgatatttctccactttaatggttagaagtgcttaaatggttggacctatgttgtgtagctaaaggaaaaatccaagcaaagcaatgtttctgaacacttggtggaaattccgagagaaaagcaaaaggagatgtctgaagaggatacggaagaaactggatcagaagaaggtaaatcaagcgaagagaatcacgagacaattcttgcaccagttgaagaaccaccttctcctccagtaattgaggacgctactatggataacagtaatccaattacatctagcgacgtttcaaccgagccacaacaccctgatggtagtgaagatggatggcaaccggtgcaaagaccgagatctgctggatcatatggtcgcaggatgaagcaacggcgagcatc

SEQ ID NO: 173976 - DNA, 1626 bp, Arabidopsis thaliana landsberg
tgggagaaatcttccaaccaaagaggaatcccatggatagcgtggaaacggctccaatattcaaaaaaggaaggcgggcttggatttagggaccttgctaaatttaatgatgccttattagcaaaacaggcatggagacttatacaacatccagattccttgttcgcacgagtcatgaaggctaggtattatagagaggattcaatacttgaagcaaaagcacgcaaacaacagtcctatgggtgagcatctattctatcaggggtagcacttttaaaaaaggggacaaagtacacaattggtgatggcaaatctattcgtttagggattgataatgttgttgattcttaccctccgagaccgctacacacttccgaaagatataaaggtgcatatcttgataccctattccgtttcaacggcacatatacttcctgggatgactcaaaaatacttcaatatgtcgatccaagcgaccatgactttattcgacgttgctacctttccaccacacaaaaaccggatacactcacatggggatacaacttcacaggcgattacatggtaagatcaggttattggctcctcactcatgatcctttgactactacacctccagtagacagaccccatggatcgattgaacttaagaacaaaatctggaaactaccaatcatgcctaaattaaaacattttatctggcgtgctctcgctaaagcccttgctacaaaagaaagattttctaaaagaggaatgcgaatcaatccaacttgtcctcgctgtcatagaactaatgagtcaattaatcatgctcttttcacatgtcctttcgcaatcatggcttggcgattagcagacaatacacttttccaacgtctccaagtgtctgacaatttcgaaaccaacatctccaacagcttggatttcatccagggaacaaatgttacagatcttcagaaactccttccattttggctactctggcgaatatggaaagcagggaacaatgtagttttcaacaacttcagagaaagtccgacgaataccgcattaagagcacaagctgaaacaagagattggctgaatgcaacatacaatcatagatgagtgaatcctcaaactcgatcaaccgtggttcacaatacgaagtggaaagctctgtccgatacacacataaaatgtaattatgatgcaggtttcaatgtccaaaatttagactccactgctggatggatcatccgaaaccacgatggtattgcacaacattggggatcactgcaactggacaacacaagtactccgttagaggcagaaacaaaggcgcttctggctgccttaaaacaaacatggattagaggttatcgacgggtgatcatggagggtgattgtgaaactctaaccaatttagtcacaggatctttatctcacagctatctggcgaatcttcttgatgatattcggacttgggcgaggaagttttcaagtattcagtttagctttgttcgaaggggaggaaacaaattagcacatgagttggcaaaatttggttgcatttcaacatgtttttattctgattctggtaccctacctatttggctacatcaacactattgtaatgactttggt

SEQ ID NO: 173977 - DNA, 3318 bp, Arabidopsis thaliana landsberg
atgtggtataactattcccgagcaccacccggaactagaaccagcggactagcttgtagtcgaggaactacttgtagccgaggaccagcttgtagccgaggagcagcatgtagtggaggaagctttggccgaaccaagaagacaaatgactcgctcgaaaaccaaacttctcaaccaagctatttcggactacccaaacacttggacaagaaccatgatggttgtgatatctttccaagacgattggtaatgggctaagtgttgctttggatgctctttttccctgctaaggttttgtcccattgggttttccttagtaggtttttaacgaggcctaagtaacacttccaaaaccccctattatcaatcaggcccaagcccaccaagaggaccacgaatttggaaggccatgggtctatttttgttcaaattttcatttatgatttctccttttccgagttgtcttggagcttgttccaagactaacttttcctcttttcttcttctctatttaaactcttgtatttcctcattgtaaactcatctatctttttaatctcaaactcttttaagctagatcaaaggtaaatcaaaggccatccgcatcctttgtgtgaccattcgctccacatcctttggtttgagtgatctcatgatctcttagatgcaaagtctatctcctactcaacctcaagagtgtcgatcttagggaattcatattaagtggtatcagagcacattctgaagttgagtactctatcctttcatcacttcatcatttcggttcattctattcatcatttcatcacctcatttcattttgtccgttcatcttcccatccgtctgttcatcttcgctatcatcttgttttaattttcataaataattggcttgcgataaaattgcaaaatcaattggatctgaatctaacacgagtctagtattttagaaaattgtttatggaatttttgagcatgatttgataattaaatctgtgcgatcttctttatctgttcttagaaaaacgtttagtattctccttgaactagtgactggtttagtgttgtttgttggcagaaaatggtgacaaccgaatcaagctcagagaagagtgttaataaccaagccatcatcgatgctatcacgttacaaatggagaaaataattgatgtcgagcttaagccaatcaacaatcaacttaaagcgaaagggaaagcacccgttgaacaagttgtcatctcggaaggagagcaatctcgaaaggagatgaatagtcgaaaccatgacccaaggaaggacctagtagacccaaacgctcaagaatactacaaccatggtcactcacctcaccggagtaactggagaccaagatgtgtgagagaagaaagagatcttatggttgagaatcttggtggctataagatgaaggtttaccttttcatgggaagaatgatccggatgcctatttggattgggaaaagaaaatggaacttgtgttcaattgtcaaaaaactacgccgacgttaaccgcgtgaaggttgccgcaatcgaattctacgactatgctcttagttggtgggatcaaatcgtcactacaaggcagcataatggagagtatcctattgagacatgggaagggttgaagcttctcattaggcgtaggtttgtgccaagccactataatcgtgaatttcattccaagcttcgaaagctcatccaaggtactcgatcgatgaaagactattaccaagagatggagactttgatgttgcacgccaatataatggaggattgtgaagtgactatgtcaaggttcttgggaggattgaatcgagaaatttagaaccgcgtcgagatgcaacattacgaagagttggaggagatgctacattatatggttcaaattacctagaactactctctcaaataagagatcaattgcagtattttaggatcgaattcacggagttcttttgttcaaacaatgagttaaatgtcgagattaagctagcagggtatgagtgaaataataagtaaacaaagtaaaaagacagcaggttgatttggttgtgaacgattaaatatagagctaggaacaaggtattctaaggaaactattggtttatagatctaatgaaagctaggttgttatcgaaccattcttaaactcaaactctaattatggaataaccggtggtgttccgcgaaactccctatatctatagctaagaataaccggagaagccgagaaattatcaacctaaatatgcattcttaacgagttcgattgttcatcttagtagataggccgattcttataacacacctataaactagactcatcaaataatagatccaactacagatacctacggcgggcatatctattgtctggattcaagatctagttaattactttagatctagcattacgcacaattaaagataaagaattctacagataacctagcaaagggggcaatctactaaaccttatgattactaatgagaaaccctattcctaacaagcagactactcagacatattgattgaagcaaacaacatatttgagtatgaaagcataaacacaacatatatagatgggaaaagaagggatctcttcactgtattaagaactgtatgaatctctaaaaacaatcgatgaatagcttatgtctcttagtaacagggtttgcagaaaacttgatgataaaaactagataatgaaaacttaggtctaaacaatgtatataaaccctaaaatgtctagggactaataatgcaaatagggaagtcttctggggcaaatttcctcttctataaactcgaaagcgtctaggacttttgctgggccgaaactggtgtcgatcaacaccaagagtgtgtcgaatgacactcctcgttgattcttggatccaaaatcgtccttagcttccttttccttagctcttgctccaaaatgtctccttatctccattgttgttccactgcatagagtacctgaaaagacactaaaaggactcgagaaataacataaagattcaaaatccgatacctaaaacatagataaaattagtgaaaatcgggttatatcactacataaagctatcctagtggagcaacaagagaaagggttcttctcaggcgaattatgattcaaactcaccaagctatccaagacaagtcaagccagccttcattcaaaagagcgagtctaaaacaattccaactatccaagagcgagacaagaaaaaacccgaaagcgccaccactactaggacccgtgattttcgatgcttctagtgacatgtactcg

SEQ ID NO: 173978 - DNA, 686 bp, Arabidopsis thaliana landsberg
atgcgtagagagatctcgtttttgctacagcccaggtgtcttcttcttctcgttgccctaacgattttcctcgtcttcgcgctcttcaacaccggaaatgtaagcttttttctccgacccgttttcatcttatttgtcacattttcatgtggatctcaaattcttgtgtttcttcagaagatctgattctcttgaacccttttgtggagttactttctgagtagtgtttttttggatttggttattagtagtagtttcactttgattcaaatcaacattttatctccaagtacattaaagtgtttaagtgagtatcacacacattataagctccatggcaaatgcttgtcagattcttcttatgatggttttgaactttgggttattgtaccagaataacattgttgaacttgggttagctttctattttccgggtctgacatattattgttaggtttctctttgttgaatttatggttgcttggttagtgagaaggtttaatagaggagcagcagaatgtgatatgccttgtgtatgtttgcgcctgatttacttcctctcttgatgcttaggatgaggagaagcaagtaattgaagatcatgaaatcaccaacagggtttttctcgatgttgatattgatggccacgcttagggaaatggacttgacatattggctttttaatg

SEQ ID NO: 173979 - DNA, 1487 bp, Arabidopsis thaliana landsberg
ggtgcacccagtagaagagaaataggtcatgggacactagcagagcgagcattggagaccattctacctagtgatgatgactttccttacacaatacgtgttgaaagtacagtaattgaaagcaatggttcttcaaggtcagcttttttatctggttttatgatctgcacgcctagtttgtttgaatgacaaatttggtaattgcttcttacgttgatctcaaaatgtgacagtatggcatctgtttgtggcggttgcttggctttgcaagatgctggagttccagtcaaatgttctgttgctgggatagcaatgggaatggtttgggatactgaagaatttggaggtgatggatctccccttatcctttctgacatcactggagctgaagatgcatctggtgatatggactttaaggtcagaaaatatgaggattcccttgaaggaccttgcattgacttgaatgctgaagttttgatatgtttgtcaataggttgctgggaatgaagatggcgttaccgcctttcagatggacatcaaggtcatcatccgtttcttaatttacactaccgaaatggttttaaatggcaattgaattaatatgttggtaacatcttttcttacttcttctctttaatcatgaactaggtaggaggaattactttagagataatggaaaaggctctaatacaggcaaaagctgggcgtcgccatattcttggtaaggaatgttattcatgaattattagtctcaagatagtagacttggggagatttagttccttggaaaatgtatgccacaaaagatgtaatttactatatttttttttttcctttttgtgcagctgaaatggcaaagtgctcaccgcctcccacgctaagcctctcaaaatatgctccattgatacttattatgaaggtttggcttcaactagtttttccaggattgcccagtctaatgcctttctgccttgaactaaagattgttggcgtttcatgtgctgcaggttcatccaagcaaagtatactctcttattggttctggtggtaagaaagtaaagagcatcattgaagaatctggagttgaggccattgacatgcaagatgatggaactgtgagatatacatgcaaaaaaatgtgattttatatttattgggtattctttatcctaacttcttaatatttatctttgtcaaggtcaaaattatggcaatcgatgtagcgagtctagaaagggcgaaagcgattattagtggattgacaatggttccctctgttggtgatatctacaggtatgtatccttcatataccttctctgaccaaaaagcgtaaatagatttggattcttacctttctttttgtatcaggaattgtgaaatcaagtcaatggctccttatggtgcatttgtagagatagcgcctgggcgggaaggtctttgccatatcagtgagctgagtgctgaatggcttgcaaaaccagaggat

SEQ ID NO: 173980 - DNA, 1473 bp, Arabidopsis thaliana landsberg
gttatgtgctgattgtgatcttggaaactataaatggagaaaaggaagagagaatcatctgagagaagctttggtgaatcagagtctgtgtcttcactatctgagaaggattctgaaattcaagtaagatcaagaattttgtttttgttattttagtcttgtgtcctttgcatctaaaagatcattgtaatgtctgtttttatttttgctcaagcctgagagtacaatggagtctcgtgatgacgagatacaatcaccaacggtttctttggaagtagaaacagaaaaggaagagttgaaagatagcatgaagactttagccgagaaactttcagctgctcttgctaatgtgagtgctaaagatgatctagtgaagcaacatgtcaaagtcgctgaagaagctgtcgctggtatcaatctttttttctacatttttgatttatgattctgcgactttttagtgaagatatatctactcttgttgtgaagggtgggagaaagctgaaaatgaagtggttgagttaaaggagaagcttgaggctgctgatgataagaatagagtgttggaagatagagtaagccatcttgatggagctttaaaggagtgtgtgagacagttaaggcaagcaagagatgaacaagaacagagaattcaagatgctgtgatcgagagaactcaggagttgcagtcttctagaaccagccttgagaaccagatttttgaaactgcaaccaagtctgaggagcttagccaaatggcggaatctgtggcgaaagaaaacgtgatgcttagacacgagcttcttgcgcgatgcgaagagccagagatcagaactattgagagggatttgagtacccaagcagctgaaaccgccagcaagcagcagttagatagcataaagaaagtggcgaaacttgaggctgagtgcaggaagtttcggatgttggctaagtcatcagcttcgtttaacgatcatcgatctacagatagtcattctgatggaggggaacgaatggatgtgagttgctctgattcatgggcatcatccacattgattgagaagagaagccttcagggaacttcctcttccattgaacttgatctcatgggtgattttcttgagatggaacgtcttgtagcattgcctgtgacgccagatgggaacggtaagagtggacctgaatcagttacagaagaggttgttgttccctcagagaactcgttagcttctgaaataaaagtactgacttctcgcattaaggaacttgaagagaagttggaaaagttagaagccgagaaacatgagctcgagaatgaagttaaatgtaacagagaagaggctgttgttcatatagagaactcagaagtactgacttctcgaactaaggaactcccagacaagttggaaaagttagaagcagagaaaaagaaactcaaaagtgaagttaaatgtaacagagaaaaggctggtg

SEQ ID NO: 173981 - DNA, 657 bp, Arabidopsis thaliana landsberg
cctaataatgcagttcacgatactccagcgaacccaccttaactgtgccgagtgggcagcggcagaaaaagtgccaacagttgaagagtatttggaggttgggggcgtagcggtcacaatgtatgcaactatagcattgggacttctcgggttaggaccgaaggctagggaacacggatatgagtggctaaaatccagaccaaaactcgtccaatctttatgtactaaaggtcgtcttatgaatgatatagccggttttgaggtacaaatgtgcaaatcatttcttcacatttcgtgtatgtctactttcttgttccatcttaccaacttattacacatatgttgattaggatgacatgagtagaggatatgtcgtgaatgctgtcaattgttatatgaagcaatacggagttactgaaaaggaagcttttaaggagattcgtaaaatggttgtaaatacacataagacattaaatgaggagttcttgacaaccacttgcgtgccacattatgttcttaaggaaaccatggattttgcacgcatgatcatcgtcaccctacaatgggatatgaaggatttacccgtcctgatgaaggaataatcaaggagtatatgacttcgttattcgtcgatcagatcgatctttgaagtctttg

SEQ ID NO: 173982 - DNA, 1178 bp, Arabidopsis thaliana landsberg
tgcatgatattaacgacgcagaacctacacagactacaacccccataggtcgcttatccccaccgactaggcctggattgcgtagttctctggtatacgtttaacagttttgtaaatattctgtattttatgagagttcttcctaattcaagtattgttttcataacaaacagaaacggaagagaggcaacaatggcccaacagcagccaccatcctgacgccagcagtagacaacagttcaggtgaaaagtctgtttctgctgataaacatgtatcccctgaagctgtcaatatcaacaaagttggaggggtggtgactgataccactgaggatgagtcagctagagatgggattcatgacattggctcttccactctgccggctaaagaattagacgatatgtttgtggaaaagtctgtttctggtgataaaattgtatcccatcaagataatatcttggttgatgcccccggtgatgggataggtggagagggccttgatgatatccaaactagccctgataaacctattccagctgcagcgagtcatactcagtgtttgcttcctcctcccacagacgtcaatgagttctttgaatctgagcccagcctcccagatccatatgtggtgcttgttgacatggatggtgttgcatacaatgtaggtcagccagagtttgggaacaccatcccatccatagtgagttcaaaccttctcatatagtttctatgtttttttttttccgtgtattggctctaacgtctgttgtttgccttgcagatagagtctgatttgactgcccaatgtaagtcaacccccgggccaatggttgatgacggtgcttcagacaaagatggagaaggacttgctgacccacctgctacagccgataatgttagatcatataattcattattttttactctcgttaccactaacaaactaattacatgcaactgtttcttattttaggccaatttaagccaaatgccgatgatatctgaaccgtccctgccagccccaacaaatgatattgtggaccctaatggcaaggttgcataaatgcgtttagctagtgttaaatatggatttcatagtcctgtgttaggtcgagtttgggtgcaagaatgaaataagatattgttaaatatggatttcgtagttttgtgggaggtc

SEQ ID NO: 173983 - DNA, 381 bp, Arabidopsis thaliana landsberg
ctaaaacaatatgctgttattggtgatgttagcccaaatgagtggacttcaagatcaaaaacttcaacaataactcaaggaggtaaaagctgctacggacaaacgacaccgtttagtggaacaacgtatccaacaagttcatacgtgaaccagaagaaagtgatagacgacgtggttaaagagatgaagtctcatgtctcattgatggatataactatgctctctgctcttcgtgtcgacggtcatccttcgatatatagtggagatctcaacccttctttgaaaagaaatcctgaccgttcatctgattgtagccattggtgtcttccgggtcttcccgacacttggaaccaattgttttatgctgctttgttgtactga

SEQ ID NO: 173984 - DNA, 709 bp, Arabidopsis thaliana landsberg
acttgtctctttagcttaaaaaagcatttcaagaatttcagtttcgtgactataagttagctagctagcacttgtgttttgagtaaatccgtcaagagtatgttccacttagctagtttttgcggtttttcatctctctgtttacgcttgtgcagtgtcctaattgtggaaatgagtttcagatattcaagtaaggatataacaagaatcaaatccctctcagttgtttttgttgtttcgccaaatcgagcttgattgaatatcaaaatgtctgcaggtcagcgatggatgatgaagttcagctttgccctttctgtactcaaccattctcaggtaataagatgattcttccattttttccaatttatctaagtatatctcttttcaaagcatttagcattgtgttttcttatcgtggaaaatgcagtcgtggatgataagtttgttaaggaaccagtgaaattctccaaccaaactactgcttttggacaagacttaaatgggttttcttctaaacctaagaaaggttacttacccaaatttttgttttacttctgcgcaaatcaagtaaccatatctcttgtatatcaaatggtgagattaagtgtttgaatgtgcaggaaagggttcctcaacagcagtcgtagacatagaagcagaagtaacagctgcagactggcaatgcgaaatagcgcatatatttcagtag

SEQ ID NO: 173985 - DNA, 1121 bp, Arabidopsis thaliana landsberg; identical to SEQ ID NO: 18074

SEQ ID NO: 173986 - DNA, 1691 bp, Arabidopsis thaliana landsberg
tgtagtattgatcgttaattggttagacgttttcatatacaacattttggtaagcctaatcatcgaattatgctttgttggtttggtcacttgttttccaaattcagcgtcacactagtggagcaagagctatggcagaaagaagagaaaggtttaattggcattttacctgttcgtgatgatgccgagggttcttcaattgggacgatgattaatccaggtactggcaatcatgattatgatactagatgaatttgattcgataggagtacatgttttgatttgatttattttgcctaggtgctggaagtgattctggagaaagaagcttacaatttctagttggtacaacagatgctcagaagtctgatgctaaagatcagcaggatcttcaatggcacaccaggttcggtttctttttgcacttgctagactcttatataatatgaatgctttgattacttagtttataaggtgcctcaaaataatgtgtgatctgatttctattttggtttgattcgcagtatattctgagctatgttttttttttcttctaatattcaggggagtagcagctcgtgctctgcatctttcaagaggggtggaaaaaccaagtggaagagttacgtatgtggttgtccttgaaggtctgagcaggtttaatgttcaggagcttggaaagagaggaccatattcggttgctcggattacatcgctcgagatgacaaaggcaggtaagatatatttttttcatttgtaggttttagtgactactgtttattgctgtcaatttgctctctagtttagaaattcctgtcttgtaaattatatggtaaggacctatatgttctgagactttgatctcaatatatgtttagctctgtgtatgcttaatagatagataagtttatgcctgtgaaaattattgggggttagagattctctaagatactagtttcgacttagagctgatttggtaatgataatctctctggcttatttcaggttgggtcatgaccttttatttctctattacattacgcgacatggtagttcattaatgtctttagctggttcctttctggccatctgcagagttggagcaagtaaaacaagatccagattttgtagcactgtcacgccagtttaaaaccacagctatggagcttgtctctgtgcttgagcaggtaactagtgaaagtaaacggctttctgttttggttcctcctttttcaagtttcgtttttgcttcagcattagagtttctaagataacaaattgacaacgctgaagctattagtgtctgttttcatgaaattgattcttctttgggattttttctttccatgggagcaattgtataatctatatctggtggaatctggatcattcttgattgaattagtaaaaccatgcattgattcttgtttcagaaacaaaaaactggtggaaggacaaaagtgcttttggagacagttcctatccataaactagcagacatatttgttgctagctttgagatgagttttgaagagcaactatctatgctggattcagttgaccttaaagtaagactttcaaaggctactgaactagttgatcggcatctgcaggttggctcttgatattcatattttggtatctgtccttaatttacccctaggcattataaagacatgttgtggtctcta

SEQ ID NO: 173987 - DNA, 964 bp, Arabidopsis thaliana landsberg
agagaacgaagagcactagctttaacattaacgaatacaaaaacagcagtgaacaggcttcatcgaatcgttgatgtattggtcagcattgtgattttaatcatctggcttctcattctgggaatcgctacaaccaagttcttgcttgtcataagctctcagcttcttcttgtagtctttgtgtttggaaattcatgtaaaaccatctttgaagcggtcatcttcgtcttcgttatgcatccatttgatgtcggtgacaggtgtgaaatagacggtgtccaggtttgtcccttgaaactctgtttctgtttttttacccttcgttatgcatcaaaacttaaagaaagagctaatcctctgtttttttatgtatagatgattgtggaagagatgaacattttgactactgtctttcttcgatttgataatcagaagattgtatatccaaacagtcttctcggaacaaaacctatcgctaactattaccgcagtcctgatatgcaagatgccattgaattctttgtccatatagcaactccacctgaaaagacaactgccttaagacagaggatactcaggttagtagctaaaaccctaaaccctcaatcctaaacattttaaaaacatcacttaatatgattttttttatgtgtttatgcagctatgtagataacaagaaggatcattggcatccatcgccgatgattgtgtttagagatatgtgtggattaaacagtgtgaagatcgcaatgtggccaacacataagatgaatcatcaaaatatgggagagagatatgtaggagaggtcaattacttgaagagattggtagattatgcagagagttggatatcgaatatcggttatatcctcttaacatcaacgtaaaaagtcttcctgctgctactcccatcacttctgatcgcattcctcctagctggaatcaacaacgcagtgtttgaaga

SEQ ID NO: 173988 - DNA, 450 bp, Arabidopsis thaliana landsberg
gcgctgcgtttgcgctccagcaccgccgcgaaacgcatcgtcaagatcaagcgcttgcgcgacaccttcctgacgcaccagaaagccttccgcgaagccggcttcaaggatttcaagaagccgcccgcagaagtcgatctcaccgaagtgctgccggtggtggccgaagccaacgacgccatgcgtaacatccgcaagtggatgaagccgaccggcgtgtggccgacgcgcatgatgatgggcaccaaggcctacatccagtacgaagccaagggccgctcgctgatcatttcgccctggaactatccggtcaacctgagccttggcccgctggtgtcggcgatcgccgccggcagcgccgccatcctcgagaaaacggaaatgacgccgcactcctcggcgctgagaccaagcagatcaaggcattctatcagcgaagatgaagtggcg

SEQ ID NO: 173989 - DNA, 1015 bp, Arabidopsis thaliana landsberg
cttcaggatgttccttgtcctgcaaaccagaaaagtctctcacagaagcaagcttggaatgagtacaataagcctattgatgatttgacattatacattccttcccggcgtgcactaccttgtgttactccaatgttctgcgagtggtggaagaagtcgttaactggattcaagttttcttctaaagagattgtggttgttgaatcagctgaaacattcaaagaaagaaccctcataggtgatgataatagtttcactacttctggctctatgacgaacagaacaagcgaggatggaatgaagaaatatgaggattcgataaacaagagacccaagtacatgaagcgagctcgtgagaacgatgagattactatgggttgttgtcatacacaggttcctttagacaatgatgaagtagatggtagactcaccattgctcaaatgatgggacctagtaagaagaaatatagtgatgttaagaatggtggacgagatacctctgaaccgcttggtaaaaaatgtagagttgaggtggataacaatgattcgggcccttgtcaaaagcttgcttcgacaagttatgatggaaatgaaactgtaccgccatcagaaatagagaaaaagaatgaagccactgatgaaactggaagcaaagcaggtaagaatgttgtgtcccccccagagacaaggaaaacctgtgatggtgagcttgatgcaagtaaaagtaatgctgatatgatcaatgatggcagcaagcaaccaaagtgtttgctccacgaagatggtatcatagcaggagaaaaggcaagttcagatgagaaattgtgcggtagtgaagctgcaaaggaagatgatattgttgatgatgacattatgattaacaacaatgaaccagtctctcatcaacagcatgcttctggaggcactaaaggagatgaaacaagcagcgcatatgacagtgtggttctgagcccatctgaaaagtcaatatttcacatcgctgtagcggaagcaa

SEQ ID NO: 173990 - DNA, 2099 bp, Arabidopsis thaliana landsberg
ataaatcacaaactaaaatgacaagtggaagcaataaagtgaaaatttaataatattgaaaaaggcctactttcatttttatttagggatggaagagaagaacgcattgtcattttattttgtgatatatcatgtatattcaacgtgttgatgcgtactagatcttgatctacgaaatctatcatttgctattttacatattttcattcatggatagaagaaaatttcgtataacttcttctactttcaccttctgatttttttttcattttactttcactttattgtttaccttcttggaaaggtttagttgtatttgaaaagtggtcttggcccaaaatcgtacgaagaaatatgagtttataatgaaaactcagacttatgcaaagtttattcatcaggaccctaatttacaattttgtcgattaaatccaaattccaatggacagctggtctttagaaaacacgacatgtttatttgctctatgggtcggataaatttttttttattaaattaaccaaaacttgtccggtttgaaccgattgtttttttttcttttcggttcggtatatcgttaaaagtcaacaaattaatataatttacaacatgaattatctatttgtattccctatctatatcttgaacatattgatttctagatcaaaaggaaataaaattttgggttggttccatttgactaagtttatatgggttcgtccaagaaaatgtggaatacatcggttagtaggaagtggtggtttggttcatttccgttttgattcggttatttgttaaaacaggtgcaaatggatggaggtagaatgcttctacaagacatgtttccggtgaagctcacggtggctgtacgctcactcactcctcctatgcctccttagacggcgttctctataaccaactcttcctcgaaaaaggaaactatcccaaagtcttgattatctcttgctgtatgatcggggaaagaaaaatgattttcatttacaatgggttgtttccatatcagacatgattttctttcagttgaatataattttgtttagttttaccttaataaaaactacaagaaataaccaaacatcccacgaattggtttaataatttcaaacaaagaaatcaaaaacataccgaaagactctcgagacgattataccccacagaacaccaattagatgagataacctcccaaaagatgactaagccttgcggctaatgttctatgaggtgtatcattgtctcgaaactcttttcgaagggttttgatttctttgcttgaaattgttaaactaataagtgcgtggaatgtatacgtgaaggaatattaacatacttgtgagaaattatcagcatatatgtcaatataaatattatatgctatgagtctatgacaacgaatatatatatatatatacatggttaattaatatagaagataaatcagaaaatatgataattttctactttttagggtgtttagtatgcattcccacgtgttgaatatgcatgatcaattacaaaataacacgacaagtggaacaattatgtgaatttgaatatagtcatggaagattgtcatttattattgctaatttcttttgaaacatacaataaagcaaaacacctaagttcttttgctaatatttcactttttttctttcttttttcaatataatcaatatttcacttttttttatttattaatggaagattgtcatttattttgcgatttatcatgtaagttcaacatgtgtgaatgcatactaaatcccataaatatatgttttgctatgtttatacattttaattcatggatataagaaaaatgcaatcatatttattatttctgatttgattaaaacatgtgtcaatgtactttccataatatctagtggaaattggccaacaacaaaaataaatcttacttacaaaatagattcccacagatgttattttatttaaacaaaatctatgttttaatacatttttatataaaaatgtattaaaacatatgaaaatcattttccatattttccatatttctagttagtggaatatgaaaataaccatgataaaaatgtattaa

SEQ ID NO: 173991 - DNA, 492 bp, Arabidopsis thaliana landsberg
aaattattgccgttgtaggaatggagataagtatgcaggagagtattttggagacttgattcatggatttggtgtttaccatgtcggtgatggtcactattacgaaggagctggcatgaaggtcgtaaacaaggctatggcacgtatagatttagaaccggtgatatcaaatccggtgaatgggatgatggtaatctcgttaaccatcttcctttagactctgacccggttcgtagggcggttcaggtattttacatacataatgaaactttcaattagagaaattaaacattgtttggatttatgattacttaatggtttaattacttgcagagtgcacgagaaagagcaaagaatggagtgaatcagagacggatcgatgagcaggtgatacgagctgtggctgcagctaataaagctgcgacggctgctagagttgcagctgtgaaagcagttcaaaatcaaatggatggtaaaatttgtgacaattaa

SEQ ID NO: 173992 - DNA, 465 bp, Arabidopsis thaliana landsberg; identical to SEQ ID NO: 72820

SEQ ID NO: 173993 - DNA, 1338 bp, Arabidopsis thaliana landsberg
atgacctatactcaaccacgttttgttgtagacacttggtgcagttttgaagagataagtctctactgcattgcacaaaaccgtaaatgcgtgagatagacgtctcaagctttcgtatcccggctgcatagtacaaatatgaagcttggtctatcatacgaatcatcaaagcctcccatgtaatttccaaatccgtcaagttagcttgaaaatctctggtatagttatcactcctcagaatctccataccaagggaactataaaacgagcggtttgagtaacgtacaagacaaactgttctatcaattctccagactatagcttctgtctgattagtaaaattctgcaacaatctagcatttgaaggatgatacaatcagaacaagagtgtgcatcagtacctgggacacacatccctagaccatatgctctgtttggatgttccccgatccatgtcgtgtaaaagccgtcgatagctgtgacattagaggaagagaagaaagcaggactcggcggtttaagtcgtaagtactattgggtgtgaagaaaccagatctttcaaggcatacctgtgcagagacatgactaaagcttatgaccacaaaccagaagattactaaaaacttgaccattttatttactctttccttttttgttttgatgtctgaaattaaaacctcaaatcttggaagatgtaatatttatacaggcgtttcaatttcaacctcttgtgctgtacaaaatttgactaatcgtcattgaattttctaacgtagacttttgatgatgagtcaatgtctagtttaggtgacttatgtcttatacgagcctgattcacattttttaccactttgtaccatatgaattggtatttttcctccaatgtggtaacaaatcttgttgaagcttcatcaaagcaaaacagcaaatgcatgattcttgaaagggtattaaattgaaacttttaaaatgtttaagcatattatgaaaagttaaaatattagtggggtggatttgtagttttttaaaacttggagaacagatacatcttactgtcattactgaggcaacatcgagtacattcaccggaaaatggatgccggagctgaaattgatgtggttcggccggtggaggcagattcggcggcggaaattagtccggaacaagaccacgaaggaagatcggagccttcgtcgttgaaccaaggggagattttaaaaacacttgctacggtggagaaggattcgcaggcaatcgcggagagcttttcgtctctctttgtttccctccgatcaactctttctgaggttagaagacgcttctgtgaatcgattttt

SEQ ID NO: 173994 - DNA, 1833 bp, Arabidopsis thaliana landsberg
atggacgttaactcgccggagacgacggagaaattgatcagctcctttattgaggtcacatcttgttcgagagaagtagctatatcttttcttgaaactcatcaatggaatctcaatgctgctgtttccacctttactaagaacgaagtctccgccgacgccgccaagccaaatgttccaaaccctaacgacgaacttctccggcgtaatccaagttcgtttccaaatcgacgaatcaaaatccctacttcatctttttctacgtttgatggatcttccggttactctccgtcgcggttacagttacgaccaccgtggccgtcgttaaaacgtgcagcagctaatccattttctaggcagaataaacgccgtcaaggcgctgggaatgtccgtatcgatgatttctccggcggaactggaagcgattccgatgaagcggtggagcactacggcggagaagagaataggttagtccaaattgtgctgttcaaggatcttgtgtattacaggattgtgatggtttttgcaagtccttaaggtctcagttctgcaatattttgaatgtttgtgctagctttagtgattatttgtgcaagatcctcagagatgttgttgcgatttttgacagagctatagaaagacctgagcaatcatcaagatcaatgtctgaagaaactgtttcatctgagcttgaagaagagcctcaaaaagtgtttacgcacactgtaacaagctggagcaacggtttcactgtcgatgatagctcgttaaagacgttggatgacccggaaaatgcaacctttcttgaggttattaattcaataccttcttgccattttcaagttgtgttacatacaacatagtatagttacaacttacaagggtattggtctttctctgtattactttagataacattatgttccatgacaatgccagatcatatcaagtatggagtccccacgtgaactcggtcaagtccgtgttcaagtcaaaatcattagccgtgaagaagaaaactacactgtatatttgtctccttctctcttctctgattcaaataagccggtaaagtgaaagcccttattcttatatcttaacaacaggaatcacaagccggatcagactctgcctcaactaagccaccaccagctttagcaatgaggttatatgacaatgtgcttttctgaaggagatgaatcgttaatttctcaaaactctgaagaaatgtgctgttcaagaatccatgatactgcaaggatcttgtgtataggataaagatgttgatggtttttgcaagtcttgtagaagaaggtttttgaatgtatgttgtagctttaatgggatgcttgtgcgaaagctaaagatgtagatacgcttttcgacagagctaaggagtcagctatagaaagatctgagcaatcatcaaaggtattgtctggagaaactgattcagctgagcttcaagaacaacagcaagaagaccagccatatgaagtagtcacgtacactttaactatttggaggaacggtttcactgtcgattatgatccgtttaagagtttggatgatccagaaaatgcagcttttctcgaggttactaatatcaatatcttcttgtcattttcaattatgggtctttctctgtacttgtttcacttggataacataatgttccaagtatatgccagaggataacaagtttggagtccccacgactactcgatccacttcgtgttcaagtcaaactcatcaagtgtgaagaaaatttcagtgtatactgatctccttccctctctctctaatctttttctcttctctgattaaaatgag

SEQ ID NO: 173995 - DNA, 475 bp, Arabidopsis thaliana landsberg
atggcaaaacctctgaatccaagcagaggcttaagtcccgatcatctggatccaagcggtggctttgttcagcctccatcaaatccaagtgtgagtcaaactttgaataatagtcgcggaggtgggagcagagggggaaggagtggtgtccgagtgtcttctcactcctctaatccatcagagacacagtatgagacccaatctcatagaagtcttccatcccactacccgacgaggtcacaacctcttcctgctcctcaaccatcgtctccttttattcaacaaccgcctcttgctcctcaaaatgacgaaagaaacagatgacgacgacaacgacataccaatccaagaagatgatgaagaaaaaaatccagaccaagactaccaagagctgttagatggtttgcttaatctttcaggccgacaactggtacatgttttgtccaaggttcctatcccaggcgttgaaactctc

SEQ ID NO: 173996 - DNA, 883 bp, Arabidopsis thaliana landsberg
aagacattgctgaatgtctacaaggagcgttgaacaagagagggctagatattcgcgttgcagctcttgtaagtcctttactactgcaaaagaatcatattcttggggaactgctgtttcattgcaattcctttgatgattttcctagccgtcacaaaattctgatgccttaacagtttaagtatcggagaaatggctctctatctcttagaaacctcatgatatcatgtgtggtgctgatattagtttcaattgtttgagcaggtgaatgatactgttggggctttatcctttggacattttcatgacccagacacaattgctgctgttgtctttggaacaggtagtaatgcatgttaccttgaacgaactgatgccataatcaagtgtcaaaatccacgcacgacttctggaagcatggtaataactattaagaatcgttacatagttcatccttagaaaccagccatcaaagtttagattccacaggattcaatttaaaagacttgattttttcttctttatgatactttgttattttgtgttaggtggtcaatatggagtggggaaacttttggtcatctcgtctgccaagaacttcatatgaccttgagttggatgcagagagtatgaattcaaatgacatggtaatattttgcgaagtttcctttctcttgtttcgttttatcatgttttcaagttattttttatcaggtaatcaatttggtgggtattgttttatagggctttgagaagatgataggagggatgtatctgggcgacattgtccgcagagtaattcttcgaatgtcacaagagtccgacatctttggacctatctcatccattttatccacgcctttcgttctgaggtacatttccg

SEQ ID NO: 173997 - DNA, 711 bp, Arabidopsis thaliana landsberg
cggttttcaaatcatttactggctttgcaaaagacatgaaagttctgtataaagaaaaggtctttgttgttaatgtcttaggtaatgttttcctcttaccactttttctattcttctgcttacactatgtatcttttttaattgatgatacttgcacttgcctttaaacaggttatgtatcatacaatttcgttataggagcatactcatattggggaccaaaggctggttataacatttataaaatggtaaaacagtcattcatcaaaaattcaaaactctttctcttgggggttccatgaaagattcaagaaactgtgtttgttgacagaaaaacgcagatatgatctttggggcagtaactatcatttgtgggatcgttggaacattatcaggaggctttatacttgatcgtgttactgctacaattccaaatgcttttaaggtaaaaaagagcttttcttctagtatttcggattactcaggtttttatctttaatcttggattcagctcttatccggagcaacatttctcggggcggtattttgcttcactgcatttaccctgaagagtttatacggtttcatcgctctctttgctttaggagagcttcttgtgtttgctacacaggtaaagagtaaaaaatggtttaaacattgaggagtcttgtattgttgttgtaatgtaaattgcttattcaagaacagctt

SEQ ID NO: 173998 - DNA, 611 bp, Arabidopsis thaliana landsberg
cacctgccgtcctctcagcagctacatgagctcacaggctgaaatcagtgagagatgagacgctatccttatcgactggattatcgaggtacagtacaggcttactctaatgccagagacactttacttgaccgtctacatcatcgaccagtacttatctatggagagtgtaccaagaaaggagctacagctcgtcggcataagtgccatgctgatagcaagcaagtacgaagagatatgggctccactggtaggctggctgattttgtgtctaaaacatgctatagtccattcttcgattagctttcacaacaagcagcgatattttacaggttaaggacttgatgtgcctctgtgacaacgcatttaccagagaccaggttctgaccaaggaaaaggccatcctggacaggctccattgaacctaacggttccaacaatgtacatgttcattgttaggtacctgaaagccgcaatgtgtgacacagaggtatagttgtccaagtaatgttgttttagcaccacaccacacatttagatattgaaattttcttcggtgcttttggtgcagcttgagaacatggcattcttctactccgagctggcattgg

SEQ ID NO: 173999 - DNA, 615 bp, Arabidopsis thaliana landsberg; identical to SEQ ID NO: 20164

SEQ ID NO: 174000 - DNA, 166 bp, Arabidopsis thaliana landsberg
ttgaaacaaaacttgtaattctcaggcatctttggactttgtttcgttcttactgaatctagcgtcacttgaagggacatgggacgaatcactggaacgggttgctcagtgctacaaggaagctggacttaacgacatcgccaagtttgttctgtacagagattga

SEQ ID NO: 174001 - DNA, 577 bp, Arabidopsis thaliana landsberg
gttccactacgctttatctcgtcatcgcgctggctccattggtgtgggccatcctggccgggtttttcggcacggggttcctgggcagccagctggggcgcaagtccacgcaccgcgtcaccatcctgtgcgtgttcatttcattcctggggtcgctcgcggtcctgtcccaagtgctgggcgggcactcgttcgacggcgcggtctacacctggaccctgatcggcggcaccaagctcaacatcggcttcctcatcgacccgctgtcggcgctgatgatgacggtggtcacgttcgtgtcgctcatggtgcacatctacaccatcggctacatggccgacgacccgggctacaaccgcttcttcgcgtacatctcgctgttcacgttctcgatgctgatgctggtcatgtccaacaacatgctccagctgttcttcggctgggaggcggtgggcctggtgtcgtacctgctgatcggcttctggttcaccaagcccaaggccatcaacgccaacctgaaggcgttcctgatcaaccgcgtgggcgacttcggcttcatcctgggcatcggcctctg

SEQ ID NO: 174002 - DNA, 798 bp, Arabidopsis thaliana landsberg
atggagtgcaacacgaatatactaaaagatgtgtcgacgaggatgagtgcttttgaaaatgttcggatgattgtggtggagggagaggtggtatgataagagaagtcttttgctcataaaagtagagtgctaacagttcacaatgactttacaatctatgtggctccttgaaacaataaactatggattcgcataactaatggaccatcttcatattcaggaatgactaaaatatcttaactaatgcttaaacattcatgtttcaccagaatgtcaatacatgaaacatgagtgtcaataatggctttgtattgtaatgggtcgctggtttagttgaagttccagtagcacataccgaaactacattcctttttcatggagtaattctgttttaggatatttttagggtttttggatcttgtataagacaaaaaaaaaacacaaacacaataagctacttaactagaaaataacatcatcatatcatttgactaaataaacaaaacacttcttcgtggttttgttgatgagagacatgaggatgtgagacactactctttatccaccaattgttcctttgatgaatggatcaagatccttatctcctgcgatcaccaactatcaatgcattggagtaatcctcttcattttcttatcattgcttgtgtttctaagaaactcaataacctatgaaattaggcactttaggattgaaggcgtgtagtcaacaacaatagcaccaagtagaccatgatgtacatattctagtcattgggttgcatgttaatacaacccact

SEQ ID NO: 174003 - DNA, 1794 bp, Arabidopsis thaliana landsberg
atgatgaaaagttcagtgaaggaaattttggagtctcttcgcctgcttgattcaagcgagaggtcttcgtcgcttccctctccgtctactttcagggctccaatgccgttgattcgtcaatctcttccggcgaagtttcgtaatgcaatttcgctggaaagcaaaaccatagagaaagaagacaaggattggagcactgagcagatcacacaatctgcagagaaggagaaaactggaaatgaagttgtgaagattagtactgctcagatgagtcgagcgaagaactcgcatgatcccgaatggatcaatagcgctgagtatttcgtcagggaggtaaatgattgcttctttgtgttatcttttatgttgtatttctatattcatcattgaggagaaactgaaaggtttgaacttttagtgattcattattgttttaaactaaagtatgcggtttctagtttctccaatgacaagaagaatacagtttttacattgcatctattttatgccagaaactttgtgtttggtgtcgagttgctgctaatgggcagtggcacttggggaagatacattctacttcttctagtgatgatgtgtgtgttatgctgtccgctaacgacgatgtaagaagttctttgagattgttgaaatttcttaggatatggaaaaggccttatgctgtagttttgtgttatctaaggctgtgaaagttgcaatggaggagattttccctgctaacccagagattttagaaggagttgaagaccttactcagcttagttatttgaatgagccatctcttctctacaacctccgggtcagatactcacaagacttgatttatgtaagttaaaaacattctggtttgttcgtttatatttcagtgtagcagaggtatataacataattttaatgttttctgttttagagtaaagcagggccagttttgattgcagtaaatccttttaagaatgtccagatctatggagaagagtttctatcagcttatcagaagaatgctttggatgctcctcatgtttatgcagtggcagatgcagcttatgatgatatgatgagaggtgagtgaaagcatacactttctccctttttggtgttgagatagttattgtatgcatttacatttttgaatttttctttacgcagaggagaagaaccaatctattatcataaggtacgatgctttctattctgaatgctttttgtgcactgataatttgactatgcatatgtgaaggtgacttctgatattcatatcatcaatcaaatgaataaaatattatttcttagtggagaaagtggagctgggaaaactgagacagcaaaatatgcaatgcagtacttggaagctcttggtggaggtagctttggggtggaaaatgaaatcctaaagacaaattgtatacttgaagcttttgggaatgctaaaacatcaagaaatgataactctagccgattcgtgagtaatttgtacatcctttttttcttcaaatttttgcatgattgaaagttttcctttcatttgaatactaaaatcgtttgtataaatttgaaagtttggtgtcagccgtaaattgagaagtggtttggattcaatagtaaatctgaattggtgcagggtaaactgatggagattccttttagtgcaaagggaaagatatgcggagctaaacttgaaacttgtaagacttgaacatttgtatgattgtttgtcatattttcttgactatggagctcacgtcttttattattttctcaccatgtgtgtgtgactac

SEQ ID NO: 174004 - DNA, 536 bp, Arabidopsis thaliana landsberg
aatcattgatagagaaagaacatggtacgaatcctaagatcagtaggtactggattcaacgttacgatctcttctcaaaatacgaccaaggtatcgaaatgcactgaagacccatggtactctgtgactcccgaagaaatcgaaatcaaacaagccgagagatgtcgtgggaaagtagtaattgattgcttctcaggtgttggtggtaacactattcaatttgctaaagtgtaatattaactttatctttctctctataacaagtatgtgattaatggttgtaaaatatgtttttttaatctttatacctttgttttagatgttcttctgttatagctatcgatattgatccaatgaagattgcattagcaatgaacaatgcaaaggtttatggagttgctaatcgtatagattttgtcactggtgatttcatgcaattagctccatctctcaaggtaaatcttcttctctctatagattttttctcctcaaaatagagatctacaaagggtatctaaacaaatttgtatcctaat

SEQ ID NO: 174005 - DNA, 659 bp, Arabidopsis thaliana landsberg; identical to SEQ ID NO: 39685

SEQ ID NO: 174006 - DNA, 612 bp, Arabidopsis thaliana landsberg
atgtaccaagttttagaacagcctttaagcgaacaagaactcaaaggaagatcagatatacctcaaacacttcaagatttcatgtctgaagtcaaaagaagcaaatcagacgcaagagaatttgctcaaaagctaaaagaaatggtgacattgatggaacaaagaacaagaacggctaagattcaagagtatttatatcgacatgtcgcatcaagcagcataccgaaacaacttcactgtttagctcttaaactagccaacgaacattcgataaacgcagcggcgcgtctccagcttccagaagcggagctagtcccaatgttggtagacaacaactactttcactttgtcttggcttcagacaatattcttgcagcttcggttgtggctaagtctttggttaaaaacgctttaagacctcataagatcgttcttcacatcataacggataggaaaacttatttcccaatgcaagcttggttctcattgcatcctctgtctccagcaataattgaggtcaaggctttgcatcatttcgattggttatcgaaaggtaaagtacccgttttggaagctatggagaaagatcagagagtgaggtctcaattcaga

SEQ ID NO: 174007 - DNA, 118 bp, Arabidopsis thaliana landsberg
acctaagacttacatcaatcacccggacgctggaggcagtcactatctggcttctaagattaatgaagccaaagatatgatgcttcgaaaatccaacaacaccggctctgccttttga

SEQ ID NO: 174008 - DNA, 1385 bp, Arabidopsis thaliana landsberg
cattaagtataactctgatggatctatcgaaaggttcaaagctcgtcttgtagctcttgggaatagacaagaggaagggacagattacactgaaacgtttgcaccagttgtgaagatgacaacgattcgtactctgttgaaagttgcttccgctcgtaattgggaattatttcaaatggacgttcataacgcctttttacatggagatctagaggaagaaatttatatgacggttccaccgggtgttgaaaatgtggattcttcaaaagtttgcaaacttaaaaagtcgctttacggacttaaacaagctccgagatgctggttttcaaaactctccaatgcactcatagagtttggatttacgaataattacacggattactcgttattcacatatttcaaggggggctcgtgtttgtatgttttggtttacgtggatgatttcattgtgggtggtaatgattccaagctaactgcagagtttaaggcatatatgagcgaatgctttcacatgaaagatttaggtcctctaaaaatctatcttgggatcgaagtctccagaggaaagcaagggatttatatctcgcaacgcaaatatactttggatattatatttgaatgcgggctgctaggagctaaacctgttatactcccattaaacagaatcatactctcgcaaagaagatggtgaattctattctgacccaactaaataccgcaggttagttggtcggttggtttatcttgctattactcgaccggaccattgctatgtagttcatcttctaaagcaatttctcggacaaccacgtacacgtcattgggaagcggctgttcgtctggtacgatatctaaaggggacttgtggtcaaggcttattgctaagcaaggatgatgatcttcatttgaatgcctattgtgattcggattttcaaaagtgtccaaaaacacgtcgttcactgtctggttatgttgttttacttggaaaatctcctatatgttggaagacaaagaagcaagaacgtatgtcactttcttccgctgaagccgaatacagagctatggcttatacttatcagaaactcatatggctcaaggaattgcttcttatctttcagattccccatccagaaccaataattcttcattgtgacaataaggctgcactacacatcgcaaccaatccggtgttccatgagcgtacgaaacacattgaaagagattgtcattttgttcgcgatgggataaaagatgacattgtgtctactcgacatgttcgtacgaaagagcaattggtcgattttcttaccaaaacccttggtcgaaaacagttgcagtatctacttggcaagatgggtgttcgagatctccactgtccatcttga

SEQ ID NO: 174009 - DNA, 365 bp, Arabidopsis thaliana landsberg
agcctgggaaaactcggtacgctcatttccggcaaagcaacaatcttttgacagattcaggttggcattgcagtttctgtttcagacacatcaatgacttcgtgttcaagatgaaagcttatagccatactgaccgggttagattcttacattatctgaacccgagacgaatccaagacattatctgcaaaggaactgatcttttcgatatgcttcctgaagaacacacattcagggagattatcggcaaacttggtccgattccacggtcttattcagctgttcatctccctggatacttgattcagaatgctgatagctacaagtacttattacctgggaactgcaaacgagaatctggctga

SEQ ID NO: 174010 - DNA, 845 bp, Arabidopsis thaliana landsberg
  unsure (1)..(845): unsure at all n locations
gctaagattgcttctgttgaaagnaagctcaatggcttctcaatgtatcctcagccaattactaacacaaccttacggtatatatatatatatctatgtttacttcattctggatttctgtattgaattaggaccaataacaatggccttagaaatatttgtgttaatttgtttggtattggtgttcattggtatgttaaaaggatgggaaggagtggtggaggatttgtaatgcatgtctcagaagatgagatggagagtgacgaaggtgaagagagtgatgatgaggaagaagaagaagatcatagtcaaatctgtacagcgggaaaacgttttgcctgtgatgagctttacttaaggtgataatcaccaactcttccttgttagtttgtttcaaaattaagaaaggcgtattgagtgttgtttgatgtttttattgattattttttgttcatacagtgatgaatctgatgatgagtttgatcatgagcctgagtatatgatcaataagttgggtctggctgagagtgccctatatgaggttatcaacgaccaccaaaccgaaatcaaggtgggcagatttgttttgttttgttaatgaacaggtacatattgtggaatgttttatttcgcttggtgcacttgattaattgagcatttggttctcttaattacaggacgacattaggaatcaagtatcagttgttgaaacagaaataatgaatgagattgaaacgtctctctctgccatagcccgggttgaaaagtacagtgagactcggaaagaagttgaacggaaacttgatcttcaatatcagcgaaaagtgtaagctattgttccatag

SEQ ID NO: 174011 - DNA, 265 bp, Arabidopsis thaliana landsberg
atggcgagtgagagttcgcaatcttcctcgccgtcgtcatctcaacctccgtcatctgtaccttctccgtcgccgggtaacaacgtcggcgatacgtttataggaagtttcatcagtctaatttctaagtacgagatccgttacgaaggcattctctaccatctcaacgttcaggactcgacgctaggtctaaaaaacggtacggattcgaaacctatgcgaaatcgaaattcctattttagttttccgaacattgcagcgatta

SEQ ID NO: 174012 - DNA, 736 bp, Arabidopsis thaliana landsberg; identical to SEQ ID NO: 20626

SEQ ID NO: 174013 - DNA, 1000 bp, Arabidopsis thaliana landsberg
  unsure (1)..(1000): unsure at all n locations
gctcgcagagattagtctaaagataggcactaccagaaacccgtgtagtgctagctccatattgaggaatatgaacatggatcagcttggtgacatgataaaagaagagggtgaagatacatgcaaggagaaggtgaccaaagtgactgataaagaagaaatgcttgcgtctcttgaaagtgcagtgaatcaatctagagaagagggaaaggttattgaaaaggctaaagccacgacagcggaactcgaagaagaagggattagtgaaagtgtagcagttcttatggtaagtagttatttatgaatgtgcatgttggcataatttacggtgtatcgaactgacaataatgagatattctgtaggagttgttgaggccgttgcaagacgtattaccatggttccaagaagtgatttattgggaaaggccgtctcgtacactgtttgttttagccattactattttaaccgtctacaagtgagtttaaaagtaacatagcggagatgagttagtcatggatacatatattaatcaagaaactaaacttatgttacagggagtgggttggtaaggctatagctgcttgcttaatatgggtggtggctaaaatggctcaagctagaaataagatggtccatacaaaaagtgaggatgcggtaacagtgagcacggaatctgaccaaacagtgactgagagcattgtgtctgctcaatatggcttaatnnnnnnnnnnnnnnnnnnnnnnnntgttaacgtcaccatcttgaaattgcggtctatatatacctccaaggctagcaaggtaactaatgtttatatcgcgatattaatcgtttttgttatttcgaaagtgtgttctcttttaaagtgtagcgtctcttactcgtggttgtagcatgcaagcatggtgatggcgtcgatgctagtgttggcgagcttcttcgcagtggtgccgttcaagttgttcataatatttggtatagtatattgctttgtaatg

SEQ ID NO: 174014 - DNA, 2368 bp, Arabidopsis thaliana landsberg
atgggaacacgttttttccgaaatgagatgccggaatttgtaccggaaggttccgccggagaagaagaaagtttcaccgcaggtaaagattcgttgaagaaactgctatcacttccgtacaaaatattttccgagaagcttcagagttatgctttaagcctcaaagataaagtaactcactttataatttgaatatatatgattttgaattatgctgaagttatgtagttgtaacaatccaatttatgacttttctttagtttagtgaggttttgttttgtcttattttgtggtgactctttttaggtagtgtgggagacatggggacgatctggaaaacgtgttggagattataacttgtatactggagttcttgggacagcttatctctggttcaaatcttatcaggttactagaaatgaagacgatcttaagctatgcttagagattgttgaagcttgtgatgtagcttcaagagattctgagtaagtgaattttcttcaatgatccaattttcatgaattcattagaaggtaaaaattgtggtttctatcaggcgagagacatttatatgtggctacgcccgtgcatgtgctcgaggcgctgggtcatcgcagtgaacaggtcatggcctgtcgcatcctcgtataccgcccgcacctcctccgtatccacttccaccgccgtgattaccggtgcttccaccaccaccacctccggcgcaaggtttcgcgagatgtggagaagagaaattggtgtggagggaacaaactgatccatttcgcggaaacgagactctagtcgttggatcgcgggagaggttgatcactctcggtaatcgcacactgctttgatcagatttcgccgataactgaagcttcgccgccatagccgccatctttatcgacacgtatggcagtgaagggacgaaagatgtgtgatcttctctgaaaatcgaaaacggtttccctttacaatctttaggacggaagacagtgttcggtttttggtgaaatcgaaacctgatctttgctttaaaaccctagtttttacaaacaatcaaaatcaatcggcccatttcccacgtgcgaaacttaagctgtttttgagctcccacgtgcccataacactcaactacttcaccaagacaccaacaaagcatgttgagctgacccaccaccattgttgatttttttatatagtaggattcggacaaaagcattgaactttcaaatgtctttttttagttgaaagacacaactgtgatcgccaaattggaagctttctacatatatgtataataccacaagttcaacacatgaataattccaaagaatgtatctttcaatggtttgcaaatttgcaatgcaccaaccatctaagaccgctaatttttttatgaaggtttttctcttatgaccgctattttgacattctttttgtatgtgacattttcctctctctctctttagaaatgagaaactgttaggcctctcttggtgcttattgcttaactagtgttcatgcctattgatgaaacttgggatgttctgattacttcttcttccactgcttttaaatttattctttgttcatatgttcgactcttagctatactctagtcataaatggatcactcgtcagaagtaagcttacatgtcctataagtaaatcattcaatcttcatttctgaatcagaacttgtgattggatttattttattggttatgttgatacagaaaacaacaaatttgaccctaccaatgacataggagtactaggatggacacacaccagaacaaatgtcttttgcttttgtaagaacgtgtaaaaaggtttcaactcaagaagtgatgcctcttgtgccttctacctatgaacaacagaaacaacataggaacaaaaaaagaaactctctaagagattcaatcctctttctccttctctgatatctctgacatctctatcttcttctcctcctccaccgactgtgatccagtcatcctcgccaatgtaacaaacgacattcctcccaaaacattgttcacaaccctcaaagcaatcacacttgttttaaacaccaatggcggcaatgacttttccagcaagaattcagccccattcaacgtttggtacctcacattggcgctcactcccatatgcgttgcccaagttaaagaattcagcagcgtaggtggtggtttgttcggcgtttcgaagctcggatcaatctttttcctcagcatgatcaacccgttagagatagcggttccaacaagacctgcagctaatcccacggtagcaaaaaccattcctttgtacacaagagtcccaaaacggttcataagggtgaagttaccctgttcaa

SEQ ID NO: 174015 - DNA, 1005 bp, Arabidopsis thaliana landsberg
actttcccaaggacaggaggaggagaatgatcagtgtgctgacagctatgttcagaatgaaggtgactacaacaagggatacaacaattactgacccaacccaaatctgtcataccgaagcaccaatatcgccaaccctgaggatcaagtctaccctcagcagcagcagaacaaccccaaaccgtttgttccttacaaccaaagccaagggtttggtccaacgcagcagtttcaaggaggatatcaacaacatcagccaccacctggtttcacaccacatcaacaacaagcacatgcgcatcagaattcagacataataaaaatgctctagcagctcattcaaggacaagccacaggagcaatggaaatcgctaagaagcttgctgaattaaacaacaaagtcgacctacaaggcgttgaacttaacagcaagtttgaatcactgagcactaggatgaaatatgtggaaggcatcctcgcttcaccatctgttaataacaacccaggccagcttccagggaaagcaatccagaaccctaaggagtacgccactgctcacgccatcactatctgccatgatcgacagctgccaactcgacatgcctctacctctatcactagggacagtgaagttcaagaaggggaggatttagttcagaatgaaattctagctgaaatagcaatagaggaccccatactcgatcgcagtactcgatcgcaagctcaagcagtactttcttctgttaaaaagcttgtctctgctaaaaccaaggataaagtctttgttcctccaccatacaagcctccactaccatttccagggagattcaagaagcaactaataaagaagtatgaagctctcttggaaaaacaattgaagaaccttgaaatcacaatgcctctagtagactctcttgcgctaatatcggactcacacaaacgtgggaaggacatgattacagagaggatcaaagaagttcaaggaactgtggcgttaactcacaa

SEQ ID NO: 174016 - DNA, 1614 bp, Arabidopsis thaliana landsberg; identical to SEQ ID NO: 25507
  unsure (1)..(1614): unsure at all n locations

SEQ ID NO: 174017 - DNA, 341 bp, Arabidopsis thaliana landsberg
atggcaactttaactgagctataccttctagtcatatcaggtatgatagtcatacggagcaagtcatgtgattctcgagatgctgaaatcaatcgactcttgaaggaactcgaccaaccacttcttagatccatccaggtgaatttgatcggtggaattacacgcaagaatactctgaactacacttgtttttaatatgcgatcgctcgtacctgtttacctgcgcacgctttgtaattctttactatagagcacatgcagaagttctagttagcgcgcatatgcgtaatcatccgattcatgtgcatcctttattcaacagacgcaccagtcagggtcag

SEQ ID NO: 174018 - DNA, 1645 bp, Arabidopsis thaliana landsberg; identical to SEQ ID NO: 19508

SEQ ID NO: 174019 - DNA, 1092 bp, Arabidopsis thaliana landsberg
tccgttctctcaattgactcttacaaagacaggagaaatagtgcaaagtctggatatcaagcagcatctatggaggtatctactgctaatactcctactcaaactactcataatgcttttaactagaataaagagatatggaataacaaatgctcaccaaaaataaagttcttcctctagaaattgatgaagaatgctctcccagttggtgaaaatctcaaaaccagagggatcaatcagacggctgcttgctcccattgtaatgaaagtgaaaccggtctgcatctcttcttccactgcacttttgctaagcaagatgggatcaggcacctttcaaatatcctttccaagcatctcaagtttccagcttgcaattgggaattgaatcttctagaaagctaacgaatttgccacccacgggtctcggagacggtacactcttaccttggatcctttggtcgctttggtcttgtagaaacaaaaagatctttgatcagaaacaagcttcaagcgtcgatgtgatctctcaagcaatcgttatggccaaggaatggaattcggctcaattgaaagatccaaataagcaggaaggctctcggaatcccccaattcacacaattggggctgatacgatacaagtcttctcggatgcggcatggaaaaaggagacaagcgaggctggatttggttggttgtttatcgatcccctctccaaatcagagaaacgttacagatccacagcgtcaaacgtgagctcgcccttaatggcagaggcgatggctcttcttctggctatacatcaggcactggatcttggatacaaaaatctttcttttgcttcagattcgcaacagctgatcaaagcactcactcgagagccccaatcgaaggagctttacaggattcttcacgacatccttgatctatctttgaatttttctacagttaatttcttttttgtgaggagagaaaacagtcgcgtggccgatgaattggctaaggcagctctatcttccttttcctgtatttcagtcatttaatgaaattacccttttgccaaaaaaaaaaaaaactacttatttctcaaattac

SEQ ID NO: 174020 - DNA, 571 bp, Arabidopsis thaliana landsberg; identical to SEQ ID NO: 6695

SEQ ID NO: 174021 - DNA, 448 bp, Arabidopsis thaliana landsberg
atgagtccgcatgttttagatcttcctaagggttgtgaaatctctaacgatctcacagatttcgtaagattcattcttattatatccaaatctcttttatctgaatgatccaaattcagattacaatttttctcttctttctttgctatgttttcaggttcactatagagtcgaggagtgtatacaaggctacatgagcaaagaagaaactgcgagttttatattcgatacatttggagtctgactaaagtttaccagacttcgtaaattcttcatctacgcagcttcatttttactcgatcatcaacgggtttgagacagaacgtttagacattgaatctttaatgtcataggtcggtatctgcttgacaaagcaaatccagatttcttcagatgttgcaaatcacattgcgagaatactcagaatgcaccaagtgcgctataacag

SEQ ID NO: 174022 - DNA, 4191 bp, Arabidopsis thaliana landsberg
atgaatttgctagctatgcttttgggatgcctcagtgatatctttgtttcttgttctggggaggatggtttgctacaggtaaacagatgtcttcgtttctcattttttggtttggtgatactttctactcacaattgtaacattttaatggtgatgagttttatttccgctttcattgtgctcctagtgaaatatatttgactgttttcttttgtaggctacaaagttggaacggttgtgtgagacaagtgaacgtgtcattggagacttgaaatttgttatgagccatgctatagtttctaagtatgcaacacatgaacaccgggagttatcaagatcatggttgacactcttgacctttgctcaaggaatgaatcctttaaaaagagagactggaatccctattgacgaagaaaatgattacatgcatctgttctttgttttgggtcattctatagctgttattcactctctattggttaatggtacatattctgctgccagtgatgaagaaatagaaaatgatagaaacgccaaggaagaatttgacaagtgtgatggagatggagaaaggtatgcaaaagttggaagattgtctcatgaagattctgtatgtactgcgatggtaagcagcagctccttcgatagctcaatggcctctgaagtccacaaaattgatcctttccatgccctgcttccttcttctgccatatatttgatacgcgaatgtttgaaagttttggagacatgcttaggaaatgatgaaggtatatcaaagtttctttgcaagttgtcctcttctagcggcagaaacatccctgaaagtaagatgtcgtggccaaggagagatttgttaaatgttgaaactggaggaagtgtatctagtaatcttgccagttctagtagagatccgagtactggcttatcacctctatgcggcgatattcaaacaaatcttagcttggataatgtttgtggaccgtatggggtggttcagacagatgttacagctgactccaaaagagtatcttgcaactctgctgatttgacaaagaatgcatcaggattacatatacttggtctgtgtgattggccggacattcactatgatgtgagttctcaggccatatcagttcatcttcctttgcaccggttactttctctgctcatacaaaaagcattaagggtatggtatggagaatctgcatcatacaatggagtcagtattagtcatgagatcccacatgcagacttcttcagctctgtgataggagatttccatccttgtggattttctgcactcgttatggaacatgttctacagattagggtgttttgtgcccaggttatcgctggaatgtggaagaagaatggggattctgcattagtatcttgtgagtggtatcggtcagttcgttggtatgtgagaatactattgtttttataaactgctataattcatcatttactcgcatgtttaactagatgcagctttgaaaactggtagattggttgtgaagagattactcgtttctcattctagtaatttctatttacaggtcagaacagggacttgagcttgatctatttcttctccagtgttgtgctgcgttagctcccgcagattcttatgttgataagcttctcagtcgatttgggctctcaagctatctttcacttaatccggatataacaaatgagtatgtacctattgtcctcttactggtaattgatctcattatatggttttatagttctactacattcgatatgactgtctcttcatttcattgttcaatctgcattagagtagaacaggtattttatattattctgtgaattttctgaatcgtgaatttatttattactagatggtcagtcctattttactataatcagtctgtcttacctccttctgacatgattcttatcataaatttattttcagctatgaaccagttttggtccaggaaatgcttggtcttctgatacagattctgcaagaaagacgattttgtggtctttctactgctgaaagtttgagaagagagatcatcttcaagttagccactggagatttcactcatagtcaattggtcaaatctttaccccgtgacctgtccaagtcggacgagctccaggaggtcttagatgacgtttcagtctattgcaatccatccggcatgaaccaggtcttgattcttacccatatgctgggatcacctttaagttgacacataatgtaaaaaatcacttgacattagttcgttggcagggaaagtattcactacagtcatcttgttggaaggaattggatctctaccaccctcgttggcagtcgagagacttgcaatctgcagaagaaagattttcgcgttattgtggagtgtctgcgttgaccactcagcttccgaggtggagaatgatctatccacctctaaaggggcttgctagaataggcacttgcaaagccacatttcaaataatttcatctgctttatactacgcactacagagtggtacatcagttaaatcacgtgctcctgatggtgttctcataactgcactgcagttactctcgttatcattggatatttgcactcagcagaggcaatctaatagtcaggattgttgcttagaaaattcaattccaattctcgaattagctggtctggaaataattggtatagctcaggggactgaaaaagaaagtttattgtctcttcttgtttcgttaatgaagactcgtatgggagatggcctccatcaatttccagagccaggcagttgcaatatttcgtcctggattggaaatctgctgaagaagttcagtgcaattgattctgtttgtatgaacctattgcaaagtcttgcccccgaggtggttggtcaatctggcttcgataaagtcatgtcaggttctacttctgatgagaagcgcaaggctaaagctaaagagaggcaggctgctattatggtaagatccttttatttcaaatctagtgcaaaagtttgacatggaaccggtagccattgatgtctgatcatgcacttgaacatatgatggctgctgttcgctccctgacttgtctgggtcctgcatgctccctattaatgtgtctccttatcaacaaggagcatgcagaacgtagacatagttgcctctgtggtaatagaagatttttgtataagactgtctaaattgtttttatgctcattattcaagttgttatctgtagttagaattaataagttccaggatatggtagttatgcttatatataacttgcatgcaggcaaaaatgaaagctgaacagtcaaagttcttgtctaccttgagttccagcatggatgatgatcatccgagatctgaatttgaaacaagtgattctgtgatggaacatgattcagaaatagctgtccgtgaagtttgctccctctgccatgacccagattcgaaagaccccgtttctttcttgatttttctccaggttggtagcatggctgatgctataatatgtgactgttaaggttaaataaacatatactccgaggaaattttgttctgcatcattcttaatgatgtcatttttcctgcagaaatctaaactattgagttttgtggatagaggccctccatcttgggatcaatgtccacaatccgaaaagaagatatctgtggatggagctcctgatcttttgagaatgaatgcttcttcagatagtttaagaataagttctcctctcatgctgcaattgtcagatgatactatctctgagtctgctaatatgattgaatctataaaagcccggcttatagggaatggtcagacagagaagaggtctagcgatgggaggggaaaagatgaatctaacatggaatcattggagatagccatgtatcaaactgttcgcaacaaaattgaaaacatgataaatcaaagccttacacgtgtagatcatcaacaccatgaagctgaaaattgttcggagaaaaattctgttggtggtccatctactttgcaaggtagatttcctgatattcgatcaagacaaacttccaggcgtcctgatgctggttcagatgggtttcaccctatcgactgtgatggggtttatctttcatcatgtggacatgctgtacatcaaagctgccttgaacgatatttaaaatccttaaaggaaaggtga

SEQ ID NO: 174023 - DNA, 4590 bp, Arabidopsis thaliana landsberg; identical to SEQ ID NO: 38257

SEQ ID NO: 174024 - DNA, 1374 bp, Arabidopsis thaliana landsberg
cttcacctcttgcaatgagattaccatagctaaagcaactgaaggagagtatgtagctgcaggttggcctccatggctggcttctgtagctggagaagctatcaggggatgggttcctcggcgtgcggattcttttgagaagttggacaaagtaatcttcttttctttgtatatatacattcattttgaaaatactgttaaatagactcttttgattgcatgacatatagtggcatgtttccgtatttagaaacatatcctaagctccaaagatatgggttgcagtaaatgatgcttttatgttattgaaagtggattttgtttttcagttgatggtttttaaaactatataacatgacctgaaaaggttttgaacttatagctgtgaagaatgatccctgatgcagcggttttaattgttttatgcagattggtcagggcacttatagtaatgtatatagggctcgcgacctggatcagaagaaaattgtggctttgaagaaagttaggtttgataacttggagccagaaagtgtgcgttttatggctagagaaatccagatattacgccggcttgatcatcctaatatcataaagctagaaggcttagttacgtcaagaatgtcttgcagcttatatcttgttttcgagtacatggaacacgatttagctgggctagcctcgcatcccgcgataaaattttctgaatcacaggtaacttttttttgtttctattcaacatcttcatgacctaggcaccactttcagtacaattttctgaggctgggctttcttttcatacaggttaagtgctacctgcagcaactattacatggactagaccattgtcacagtcgtggtgtactccatcgggatataaaaggctcaaacctgctaatagataatagtggagttttaaagattgctgactttggattagctagtttctttgatcctcgtcaaactcagcctttgaccagtcgtgtggtaactctttggtaccgtccacctgagcttttgctcggagcaactcgctatggagcagcagttgatttgtggagtgcaggttgcattcttgctgaactatatgcaggcaagcctattatgcctggtagaaccgaggtagatttacagtttttgttttctcttttagtgtttgctctgatttatgttagactagtttggtttcgtaaggtgactctggtaatgcttatggtgttacaggtggaacagttgcacaagattttcaagctatgtggctcgcctaccgaggactattgggtaaaatcaaggttgcctcatgcaacaattttcaagcctactcaaccatataaacgcttagtgggtgaaacattcaaggagtgtcctcagcca

SEQ ID NO: 174025 - DNA, 1613 bp, Arabidopsis thaliana landsberg
  unsure (1)..(1613): unsure at all n locations
atcatttgcagagaaagaaaacactttgggtgatatatgtatcatcatgattcaccattgttagaaataaaccatggatgatttggagagatttcaatgagatccttgatggaagtgagcactcaaattttgacagtacacaaatcaattatgcggggatgagagatttccaggaaattatacgacattgttccataactaatcttggatatcatggtcccttatttacgtggtgtaacaagagggaggagggtcttatttggaaaaaaattagaccgtgttttggttaatgaagtatggtgtgatgtttttccacatttttatagtgtatttgagtcgggtggctgctcagaccatgctcggggttggataaaccttgaacctatagcacgagggggccgaaagccctttaaatttgtcaatgtactaatgaagattgccgaatttcagtctgtagtagaagaccagtggacaaccacacatccccttttcccttctacttcagcactacatcgatttccgaagaagttaaagactctgaaaccaagcttgcgatctctaggtaagnnnnnnnnnnnnnnnnnnnnaaagaggactcgtgaggcttatgataatctatgtgccaaacaagctaacacattagcgcatccaacgctacaaacgatccaagaagaatctatagctcacacaaattggtagtatctcgctgatttggaggaaggctatataaagcagaaatctacgcttcattggatgaatgtaggtgatcagaacaacccattcttccacaaagctgcacacattcagaaaatgcaaaattctattcggcaactaagaggactaaatggcaaaattttgcagacgagtgaatgaatcgaagaagaggatgagagattctttaaggcgtttctcaatactcaactgagtgattttgtaggtatgacactagaagctttgagaaatctcatgccattttgctgcctagaaacagaccaagcaatgcttacacagacagtatcaggggaagaaataccaaacgttttgtttgcaatgccaaacaacaaagatccagtacctaacggttacacaagaaaatttttcaagctacttgatctatcgttggcaatgattttgtagctgtagttcaatcattcttcaccactggttttctcccgaaagaattgaagacgacaatcttaccattaataccgaagaaagaagtagctgctgagatgaaagactatcgtctgatctcgtgttgcaatgtgatttataaggtcatttcaaaaatccttgcaaatagactaaagtgtttatatccgagatttattttgcaaatccaataagcttttgttaaggaaatgttgttgacagaaaatgtaccgttggcaacagaaatcgtcaaagattatcataaagtatcggtatgtctccgttgtgctatgaagataaacatatataaggatgttgattcagtgcaatgggatttcttgctgaacactcttgcggcactaaatattttgagtaaatttattcattcgatcaaaatataaatcaccacaaccactttctctgtacaagtgaatggtgagttagataggtttaaaacagtt

SEQ ID NO: 174026 - DNA, 307 bp, Arabidopsis thaliana landsberg
ggatcctcaagatgtgatgtttctaagttacgcaacctgcatcttcgcttacgggacttgtggtgacactgataaatgcgatggtggttactggaagatcgggctccgttctaagctaatcaagtccaatttcggcaatgtcattggtttcaagaaggtatttacgttctatgaagcggtgagacaaatatatgtttgtgatggagaagaagtgaagaaggtaacttggactatacaagagtataggcttagcaaaaacgtgaagcagaataaagtgttgtgcgttatcaagtttacttatgatcaa

SEQ ID NO: 174027 - DNA, 2797 bp, Arabidopsis thaliana landsberg
agaccagcattgtcccacacaaattacagaacaagatatcactttcacgagatttctccattagagaaccttaaacaacaacaaaaacgccaaagaagcaacataattgtttcatttgcttacacaagacaacattaatgggaacaaaactccaaacatcaaaggattctacaggagaacagctaggaaccatatttaagcacgaactctaaaatttatgtgatagtaagaaaatttctgaaacagagacactagtttccaagagccaacataaacacaaacacaagttaatagaatgaccagcacagtagagatagttaacaacaacccacattacatagaatcagaaaacacaaaaagaagaaaaatatagcaaaatatctcaaacagaacctgtggcgagaccttacttaaacactgaatttatgagcagagagaagaaatttacaagtagtgagaaaaagagacattaaagggtatagggtccaacggtttgtgcttaaagtctccggcggccgcgacgattaagagcggaggcggagacagaggacgaagaaagaaatatttattgggcttaaatcaaaagcccaatataatgggcttcaaatgtgtaccgaaagtatttatttaaattattttcgtaccaaccaaaattggtgatgatatttttgattttacattttcagttgaaaattgaaaattgaaacgctcctttttccgccatagagagaaagagacaatggaggagaaacagaaaagtctcagtcctccgccgtgtccttccactgtaacagtgcgacggaatcctccgaggagagctagagcaacgccgtatacaaccacaactaagccacctctctcctctttagcctccgcgaaaccccacgacgttcctacttttccgatcgacgagattctctctatccaaatcccacaatccgaaccaaaacaagcgattgcagagagtttgaagattttcctgagaatcaaacctttgaaaaccttcaccaaggttacgaccactacgaagagcagacctagaaatgtgtggccacagaatccttcgaagaagaacaccgcgaaagagaataggaatccggagattacgaagaaggttaagaagaaggacgaagaagcttgtattactctcaacgattcttattcagttacgttaactccgcctcaatcgttgcaagagctgaaacgaagtaagactgaggtatacgaagggttttctcatgttttcccggcggattgttctcaggttcgatgaaatttcgcatcgattttacttcctttttggttgaatttgagatgagatcagagttgatgagtttgattttgctgtttgtagaatgatgtgtatgataaaatggatcaacctttgatgggggacctcatgaaaggggacagtggagtgttgttggcattgtgacctagcggctcagggaagactcatacggtctttggaagtttgaaggatcctggaattgtgtcaattacactccgtcaaattttcaaaaagaacgatgagagttcttctggatctttgaggtactgttatagtgttatgtagtatcatgatacaccatggatgtatcaataggaggaaatccaaactgtatgaaacaatgaatttgtttggactacacacagctttatatcttgttctatatataacatctcgttacttctattcaggtcatttaacttgtcgatatttgaaatatgttctgaacgagggaaaggggagaaagcatatgatttgctaggtggtgaaagctctgaattgtctgttcagcaatcaaccatcaggggtttgaaagaggtttgagatttttttttgtgtgtggtgtttcttgggtgaccacaacactcagtttgtgattgtaactcttcgttatttttctcaatcatttgtgttaagtaggttccaatccagaatctggaagaagcagagtctttaattggacaggcaatgctgaaacgtgcaacggctacaacaaactccaacagccaatcaaggtacttggcagcaaaagcttttaatctttctcagcacaccaacttgattttaacttttgctaacacacccttgtgccctttgtttatttgataactcaactgaattagaagccctttcacatggaagttagagcctttttcaataatgtttaactagatgtcttcatgttctatactaattttggaattactaacagtcgctcacaatgcatcatcaacatacgagcatcatgcaatggcttttccaacgaaacgaaattgcagtctagtgatgctatgctgacaatagtggacctggcgggagcagaaagagagaaaagaacaggaaatcaggttttaatctatcttgttgtcactttgtatatggactctttgatatgcaaaaccacaaatatatgtcatgtctgaaagtatttgtcttataaatacagattcagtgtaatagttaggagaattgattcctagcttaattacagattataggtgactcatgactgtaaaatattgtccagtacttgttcttagcatcaaaataggatttgatataactgtgaagatgtcttcatctgtaaacttaaacttggtccctgtttgcccgttcaaattgttttgcagggagaaaggttggttgagagtaatttcatcaataatacatccatggttttcggtcaatgtttacgggtaaggccattgattttggacaccctggaactgacccttattttatcctctttttgatgcctcccattccactaacaatgaacactcggta

SEQ ID NO: 174028 - DNA, 1217 bp, Arabidopsis thaliana landsberg; identical to SEQ ID NO: 5455

SEQ ID NO: 174029 - DNA, 882 bp, Arabidopsis thaliana landsberg; identical to SEQ ID NO: 11055

SEQ ID NO: 174030 - DNA, 1832 bp, Arabidopsis thaliana landsberg
  unsure (1)..(1832): unsure at all n locations
accttttgcactagacattggatctttttgctcaactctgtcgtgaaagaagatatccttttctgaggctggatggatcaacaacaatcagcaagaggcagaagcttgttaaccggttgaacgacccaacaaaggtacatgacttatctatttatgccgttgtttcgaacctgagtagacacctggtttgacttttggttttggtaggatgagtttgcatttctcttaagcagcaaggcgggtggctgtggattaaatttaattggtgctaatcgacttgttttgttcgatcctgattggaatcctgccaatgataaacaagtaattaccatcctaatttccccttagatatgtttcaactttatattgataaaagatgatcgattgtgctgtacatgcattatttcgctgtcaaaacaggctgctgctagagtttggagggatgggcaaaagaaaagagtatatgtctacaggtttcttagtactggaactattgaagaaaaggtactgcataactagccgaacttgttactcaagtttccttgggggagtttgcttacctcagattcatatttgttttcttgtggtacattggtaggtttaccagcgccagatgtcaaaagaagggcttcaaaaagttattcagcatgaacagacggataacagcacgagacaggttcttgctggaatgttatatgcttcatctattagtcattttgtgtctaattattgaatatcaaccacaacatctttgattttccaggggaacttactttctacagaggatctacgagatttattttccttccatggggatgttaggtatgtgtttcttctgaaatcagggaatgttttatgcccactcagaacatcgtttctctatccacatttggggacagattttgtacctcaagatgatacacattcaaatggtttatctcaaagcctgttttctggtaatgtggctaggtctgaaatccatgaaaagatgagctgcagcaggtgccaaaatgatgcctctggtactgagaatatcgaagaagggaatgagaacaatgtagatgacaatgcttgccagattgaccaagaagacataggcggatttgcaaaagatgcaggatgctttaacttgttaaaaaactctgagagacaggtcccttcttgtgcttgttactgagtcctgcattaaatataagtctgttttgagctatttcttcatcaattccattgttagttacaaactctgctcatgtctttttacatccgattcatctacaaagtttttttcccatgaatattcttaggtgggcactccattggaagaagatctaggaagctggggtcatcactttnacctcaaatccgttccagatgctatactgcaagcttcagcaggtgacgaggtgagttgtctccaagttttttcaatcttataatcataaactctacatcttatgtcagatttttcgaaaagccaataactttatgataactattttcatggtttattaaaaacattgcaggtgacgtttgttttcacaaaccaggtagatgggaagctcgttcccatcgaatcaaatgtcagtccaaaaacggtggagtccgaagagcacaatcggaaccaacctgtaaataagcgtgcctttaacaaaccacaacaaagacctcgggaaccgctgcagccgttatctctcaacgagaccacaaaaagagtgaagttgtctacttataagcgtttacatggtaatagtaacattgatgatgctcagattaaaatgtctttgcaaagaccaaatctagtttctgtaaatcacgatgatgattttgtatga

SEQ ID NO: 174031 - DNA, 497 bp, Arabidopsis thaliana landsberg; identical to SEQ ID NO: 75071

SEQ ID NO: 174032 - DNA, 844 bp, Arabidopsis thaliana landsberg
gctgcccttgcgaattttcctttgaatgtgtaatttctgtctagtaaaatgcaaagctatggaaatagtttatttatgtctctaaatttcaaaaaatagaaagaaagaagaaggcaatctgctatacaaaactcaaaagtacgagcgagcagcaaagaaatataataaggtgattcaccagaaaagctataattgaaatttacacaacataccatcggaaacccggacatgtatactttggaacatgataatatatgcttacaggctgcacactgtttcgaaaatggcacttatgacggtggagacgaaaagcccgtcatggctgtgagagtatatagctatttgaatggtgcatcctgtattctaaaactaaagaatattctggaaactatcattctatgttcggaggtatagttgaataaacaaaaaataagtatactcatctctaatgacacttggaggcttactttattgtgtgttcgttatgcaatttttcactcttgagtacttataacttccagcggatgttctgtgtgccatattgtaaaatgagatgcacgttacttaatgtgacatgtacatgatcttggaaatattgctattagatatattgaatgacttctcatgtttatttgtctccagtgtgtagatattgagtttcaacatgcgaaagctctatatatgctagcacaatcctatattgaagagggagatacgatttcatctgagatggatcttaatagggatctggaggctggaccttagaatcggctatcgatgaaattgtgtctggggtaagacgcatccttattactactgcgcatgacctgccaggacactttat

SEQ ID NO: 174033 - DNA, 3214 bp, Arabidopsis thaliana landsberg
tcggcccacgcgtccatggcacggtcaaagggcggtcaatgcccggcagggaaaacttcgcatgcggcacgcgcatgttgcccaatcttgcccattcttgcccatatttgctcatttttgctcatctttgcccattcttgcccaatcttgcccattctttcccaaatagttatttgttttgccctttgattgtttatcaccttttgggcatatatggtcaatcaaccatgtattcggggcaactttctcccgtttttggctttgccattgatgaccctatttcgaactagactaggcatgttcattttttcttggcccatctctttggcttttgtcccttaactattcttttctcttctggttcttcctcggtcgttcctcgatgtttcccgcttggccgcttacccctttgtgagggtccctacaacggttgtgtctgaatctccaaagaagcagaaagtctctcatagtgaggtgttcaatctggtggaggagatgcacaaaagaagaagaagaagaagaagaagaagaagaagaaagtagctggtgaatctgatgaggacgaggacgaggaggatgttggggaagacgtgtcgtccgtggatatggtgtctaaattaatctctcccttaaactcaaggtttgacaccgttgatacaagcatcaaagaaatgtcctcccgtctggaggtgattggagatcaagtagaagcgaggattgatgcaaagtttatagcaggtttgtatctattgagaatgaggtcaaacagatgaaagagcatcttaaggccattggggtaggccttagtggccaaactggcaaagcggacttagaattattctctagagtgaaaactagagaaatgtttttaacagctaaggagcaagaaatgattcgaccccaaaataaacaaacaccaaaaggtccacggaaacctccaaaaaactactctgttactagtcctctacccgtaagctaactgctgagttatcaatacgctatttacttgcgattgagttataatcatgttatggctgagttatcgttatgttatgaagttaggactgagttataattatgttttccggctgggttgtctttaccttctttacttttggctaagttataactttttatttagttacagttgagttatcgttatgttatacggctgagttgtctttatcttacttacttttgactgagttaacattatcttatttagttacgactgagttatcgttatatatatgactaagttatctgatatatccttatttttaccagttttaactatgttttcggtataggtttaagaatctatttgttatttctagagtcttttctagtccttttcaggtctttacacttttgtgattcatttgaagataatggagcattctggaggataacatagaacttatgctgcagatgaaattcggagactaaaaatggcataggtgtcgaactacaccaccccccgtgtcgagtgacaccaataccagacggcgattcagagacgcaacttattgaagttttgaagattttcaaattatgtccagaactttcccttatttttaaagaatgcccatcacgtttttaggtcatatatatagatttaaaggtcatttttagacctaagcttggagaggctaatctccttttctctgttgttcttgggagaaaaactttgtggaaactccggttagagaagatctttctaaacgctattctcttgttattttcttttaagattttttattaaatcatgttgtttgcttcaatctccatgcttgagtagttctcttgctaggttgagggtttatctttagggatttagatgatatataagatcgccaagctgctatgattatctttagagttcttcgccttgattaatcttaatgatagttctagagtacctaactagaattttatcctaagtaataggtaacctctgaaatggcgcttattgctaaaactatcatagataggcctaagtatttagatgtggatagctctggtttcgatacttaggtgagcagatcaaacctgatattaatgcatgtttagcaattagggatccgcgactagcattgggatctttagtcattaggcataattaattattgtgactagtgttggttaactttacattactgatttgagttctagaacggttcgataacaatcctaatcatagctagatctactagtcatctatctcttgagaatatccttaaacatgatgcttttctccatctgaattacaacatgattttaaatgcttttctagtctttaatttacaatctttttctgtttaaattaattcgaaactgttagtctattgtgtgatcttgagagatctgtcgaattctaccctaagtgctgcaattgacctctttatttgagagagtggtcttaggattaatttgacttacatcattatggtttgggtcgaccaatgctggagttgtaccatttcgacgtgcattgctagatacctggtcgttctgttttgatgttattattctgtctgatgatattattttgttcttatgatttatttatgtattttgtcagcataagttatgatgtactttactttatttaaaattaattgaattgaaactatgtttgttagtaccaacacgtgaacatcactctgtgtgagatcagaccatgttggtatttgtttgttgggtttgtagtctcactgggcgagttttcgctaacataagttatgattccgtgcggagggctttgacgaggagcgttatgtagctgaggttttgaacttgttatttttagagcgagacttgatagattttctaaaattaatttattttgattttgagatttggagtttatacaagatttgaactttatatattttggaaattttgagtaattttattatagtaatgcttcaaaaaaaattttgaattttcaaggcgttacagattccgaaccaccattgtagtcgatatcatctggtttgtcactacaatttgttaaaaaaaacatcgtcatctctctgttatttttcagaaagcaacacaaatctagacaaattctactccaataacaaataatttaagagaaacttacgacatcttttctgggttagcgaatgattcataacccaacgaagctttagattcccgactcttatgcaattcaatcaccaccggagacgacgacacactagca

SEQ ID NO: 174034 - DNA, 456 bp, Arabidopsis thaliana landsberg
  unsure (1)..(456): unsure at all n locations
cctgcaatacgtcttcttcactcggcgcggcctcgacaaggcgagcttcgaaggagcaaagtgcgtctgctcccctcctccgcgggacgaaatcgcccaggcagcgatctgcatgggtgtagacagcggcacgtttgccatcctcagctcggatcattgtccattccggtatgatgnnnnnnnnnnnnnnnnnnnnnnnnnnatcacggccgagcaccccgtggggcagttcaagttcatccccaacggcctgccgggcgtggaaacgcggatgccccttgccatgtcggcgggaaagcttgagctcacaaagctcgtccaggttttctcaatcaatgcggcgaatctgtacggtctatacccccgaaagggcgcgctgacccctgccctttcagacgcggattttccaatttagaataaaggccaactggtcctgccggtgacgaaccatacgct

SEQ ID NO: 174035 - DNA, 923 bp, Arabidopsis thaliana landsberg; identical to SEQ ID NO: 18532

SEQ ID NO: 174036 - DNA, 1157 bp, Arabidopsis thaliana landsberg
atgctgtttgaaaaacggcatgataggtcgaaaaaagtgaggcgtgacgaacatgttaaggaaagctcaagaaagaaagaagacgccacttctggttctacggaagaaaaatcaatgaaagaggatcatgcgggagcagctcagttactgggtcacgatattgttgagaaggtttctgactatcatgcgtctgaaaaagggcatgatagatcgacgaaagtgaggcgtgaagaacgtgttaaggacagctcaagaaagaaagaagatgccacttctggttctagggaagaaagagtagataattcaacgaaagaggaccctgttggagcagctcagttactaggtaacgattttgttgagaaggtttctgactatcatacgtctgaaagagggcatgaaagatccaggaaagtgaggcgtgaagaacgtgttaaggccagttcaagaaagaaggaagaggctatttctagttctagagaagaaaacctagataaacaaaaaaatgacgagtctacttcaaatagaaaaaggaaagcagaaggagagtgttctacagctgaaacagaatcaattgaagaacatagtaaggatagacgaggaaagaaaaaagaaactaattctaattgtagggaggaaagacgagataagaagatgaagaaggaagaccttgcttcaaacagaaaaattgaaggagaaatccctacaactgaaacaaaaacaatgacagatagagatgggctttgtagtaagaagcgtcttagaagtctagttgtggcagacgtacctcgagatgaaagtagtataaaacctgacaatggagacaagagaaagaatcaaaatggaaatcataagaagaatagggagataaatatgtcaaagaggcatgatccaggaaaagtgcacagtgttgaagtttcagagcgatgggagagaagggaacaaccaaaatcacgtcaacgcgacttgagagagaaaagaaggagatcaagaagtcgagatcatgggcaggacagacagaaaaggtcatcccccttaccaagggctgaaaaggctacatcgcgtcataagagaaaccatgaggagcgatcggaaaattttgtcaaagataggtcgggaaaacatcattgtaatgataatgaagacaaagtgacaagcac

SEQ ID NO: 174037 - DNA, 311 bp, Arabidopsis thaliana landsberg
cactagtacaaaatatacaattttgagtataaagttttaaccaaaatgtggttggcaggtacaagagtgcgtggcacagggtgttggcgagggaggaaggaaacagaaggtctatagcttccttctacaatccgtcgtacaaggcggcgatagggccagccgcggtggcggaagaggaaggaagtgagaagaagtatccaaagtttgtgtttggagattacatggatgtttatgcaaaccagaagttcatgcctaaagagcctcgttttctagctgtaaagtctctctaaatgtactattttatttatttt

SEQ ID NO: 174038 - DNA, 1978 bp, Arabidopsis thaliana landsberg
atgcagagagagaacaacattggtagtaataacgccgacatatggcagcagcagcatgatacgcaagaagtcgtgtcgtttgaacattttccggcggaaagttcaccggagatctcccatgacgtcgagagcacagcatctactccagcaactactgttggagacagaaaacacgctatggctgtagctatagccactgcagctgctgccgaagccgcggttgcagccgcacaagctgccgctaaagtcgttcgacttgccggctacaaccgccagacggaggaagatagcgccgccgtgctaatccaatcgcactataggggttatttggtaattttctatccctaaattttactatcaaatcatttccaactctcatttgtcaataacatgcaccctcgaatataaccattttacaatcaaattttaccacttctcttacccacaaatatcgaaatgcattttgcctagaatccgttatgactataattcatttcagtattatcgctaaaccggggtcagtggaatttcgtgttttagtatacacaatttattgactaaatttgtttttgttttttttttcattgtaaacttgcagtaatgccaaaccagaaatcttaagaaacattctaggttattcaaattatgaccggttttgtgttttttttttctttctaggcgagacgagcactttgtgccttaaaaggactagttaggctacaagcattggtccgtggcaaccacgtacgaaaacaggcacagatgactatgaaatgtatgcaagcattggttcgtgtccaaggccgagtcagagcaagaagactccaagtggctcatgaccggtttaagaaacagtttgaggaagaagagaagcggtccgggatggaaaaaccgaacaagggtattgatatcaatacatactaaatcacccaatatgtatgtacatctataattagtggtgaacctaatatttgtatggttaagtagggtttgcgaatctcaaaacggaacgagataagccgaagaaattacatgaagtgaatcgaaccagtctgtaccaaactcaaggaaaggtaatgatgaaaaatcttaggtaccattttgctcacgtttcaatgtttttcttttaagtaattacactattggcatatctttttaggaaaaagagaggagtgaaggaatgatgaaaagagagagggctctagcttatgcgtacacttaccaggttggtcgccactctgtttctgttagagaaaaattccctcttaattgtcataaaatatgctatgcattataggtccttaaacatctcataatagttttggttttcatattgaagcgccaaatgcaacactcaaatagtgaagaagggattgggctttcttctaatgggcctgatagaaaccaatgggcttggaattggcttgaccattggatgtcttcccagccatacactggccgtcaaactggtccgggtcccggtcccggacagtacaatcctcctccgtatccgccttttccgacagctgcggcaaccaccacatctgatgatgtatcggagaagacggtggaaatggacgtgaccactccgactagcctcaagggcaatataatcgggcttattgatcgagagtatatagacttaggatcatatagacaaggccataagcaacggaaaagcccaacccatataccaagctatatggctccaaccgcatctgctaaggctaaagttcgagatcaaggcccaaccgtcaaactacaaggaacttcgtttatgccgtattggaactcctcgaccaaaaacgggtcggttaatggatcaggttgtgattcgtcaagttcaggtggagcaataacaactggttatcccggtcctaggagtccgaacccaaaatcggatatccgacgtaaaccggttagtcctagtcaaagtcctaccgggtttggaaagagaggctggaggcatgatcattag

SEQ ID NO: 174039 - DNA, 389 bp, Arabidopsis thaliana landsberg
ctgcgcgccgatcaattgcaccacgccgaaggcaagagacgagatcgactggctggcaccgatcgtgaaccaacgccgaggccggcttcggtggcgtgctgaacgcgttcgagctgatgaaggcaatgatcgaggctggtgccgccggcgtgcacttcgaggaccagctggcctcggtgaagaagtacggccacatggacggcaaggtgctggtgccgacccgtaaagcagtcgacaagttgaataccgcgcgcctggccgccgacgtggccggcgtgccgaccctgatcgtggcgcgcacagaccccggcgccgccggcctgctcacctcggaatacgtcgtcaacgacaagccgttcataaccggtgagcgcgccgggggaggcttc

SEQ ID NO: 174040 - DNA, 1971 bp, Arabidopsis thaliana landsberg
aaatcttgaaaaaaatgtgcgatcttcctttaggtcgattaaagcatctcatgaaaatttataaacatgtgtttcttaaataaaattaaagtatgaatatagataaatcatttttgtaatcatgagtttcttaaatttataaaaacttagcttaattatctcttaattagcttaattttcctcaaatattttatttttaatcaaagtcaattatataggtctgaaccgactagaaagtagaaactgaataatttacctgaaccgaagtctaatagaaatcggtagaaatcacatatttggtttggtttagctcatattttacgagccttgaaataattgggccttaatattttaagggcccaacccaaaagctgaatcgtcgctcgtcttagtcaacaaccccgacaaagaaacgatgagcgtttcgccgacatatttaacgggacggcatgtaagtgaagacccgaaaaaaaaaaggctaaaaagaaaaaaagaagggaagagagaaaatcagaaaaatggagtagataaagattttgggacatctcttccacatttacccttcacttaaagccaatcctctctcgagagacttcttcttcttcttcttcttcttcttctcaactccattatctaattctagggtttttctctccttcttcttcgcacttctctttctctctcccgccgcttgtttcttctttccctcgaaacactggtgttactgtgagattctcgtttgaatttaggggatttcttaacgaattcactgagaagcactaattgcgaagaaggtgttgttagaggtgggtttagtgtatgcttattcgttctttaggtttagatatcattctacttgagtagatgcttgatggttttggcttctctggtttcattagttttgtgtcaattttgagaatgctatgtctaattcaattttgagaatgctatgactaattcaatttgagaaagtgcatgtagttcaattttaaactatctttctctctggggaaaaaagattctgaggcttagttatgttcataaattgctttgagtaaacatttttcatgcagttgttatagttcagttacatgtgtatattgaccttgtttactgtggtcaggtattttgctgcatctacgcttgtcctgataatggaggactctggaggttctgcttctactttagctggctttacgggtaggagaaggagaagcgctctgcctcgtcgaccccgcgatattaaagggagcttgcatagtttcaagtttctgccaccctcaacgcagacaaacactgctcttagcaatgaagctaacccaagttttaggaataccaatagtttatgtgggtctgtgagtgagaacaaactgaaagtgaagcttaagcttggtgctggtgttacccgtacgttgcaaaccaactctgaggcgggtacttataccaaagctttggtaaaggtcttatctgttaaaagctttgagtttgtccttcattatacttattgttagctttctttctttgctgatatacgagagtaatgcaggataatggacaaaaaccatttcaaagtaaggtaaaaggcaatggtcatgttcagaaaacactgtttctaggagatatacatcaatctagaggatatccgtctaagactgagaatggtgcgtccatgtccgagaagagcaaacgaggtcttaagaaacgtgtattggatccagagccagacagtgatgatggagatgaggaaatcagatacctcgtaaagttaaagtctaaaagggtcagggtctctcatgaaggtaaagagagtgaaggaggcagaaggatacacagcagtggtcatgacatggaagacggaaaacatctctcatcagacaaacttgctgtgtccggaaggaaaaagccggtgatgggaatggttgatccgctcccggcaggagaaacaagcggacaaattcaaactacaaaaac

SEQ ID NO: 174041 - DNA, 710 bp, Arabidopsis thaliana landsberg
atggtcctcaatcagtgtgcaaacgtgacgatgatagaagaaaatttgagcaagttgatggaagaaatcgaatctgtggaagctgatgagagcgaagataccagtgacgacgaagaagccaaaacagacgtgcatgaggctaattttgatatgttaatggcgcctgaatgggatgtgcatagcttcgaaggtttggagtattatacatcttcaaattcggaactttccttcgatgaacagtcttattccgacatggaaaaagctaataaatactatcatatctataaactatatatcgttaagagcaaggtatgtaatccaaactctgttttgcgtttgtttgattcccaagacttgaccaatatagaagactcgaaggtatgttcttctatgcgttggttttgaaaattatcaaacaaaaagattaggtctgtccagtaaagaacataaactatcttatctcgtattcatccgagtttttgtcatatacaatacccttttttctgtcaaataataatcttgtttttaaaatgtttaacttaatgtaacaagtatgtctttacgtatgtcccaaaattttccatttttaatattatttaaatatatgaataattgtctcaaatagacctttaaatatcccaaaaaaatagaaccaattagctagaattcgaaaaacaaaatttaaattttcaatcttctcgtgtcgaagt

SEQ ID NO: 174042 - DNA, 2087 bp, Arabidopsis thaliana landsberg
acaacaggagaggaagggattttccgataatacattgtaaaaaccaaacaaatcttgtctcgagactaaacgaagctctcgaagcgcaccacaaggacttcccgcacaacaaactatgaagaggggcttcttcaaaacctatggcaataacaagatagtggaatttggccttctccataaatgatgcttctttttcaagggtctcccggatgaaccgtaagataatggaaaaccacttagacctttcaacaccaaaacgatcaataaattaagcaaaacatcgcatactacacgatgagagaaaacccaaacataatcaaaatgttcaaccccaaactaacaaaaattaacttagtcgggaagagaagataatcccaaacaaggaagaagaaatcccaaacgagggagccaattaaacctaaacctctgatgttactgatataatcctgtttttactgattttatctaggtcttagggttaggattttgagtctttatgttatttctcgagtctttttagtgtcttttcaggtatcctatgcattgggacaacaatggagatgaggagacattttggagcaaaaactaagaaaaaggaagctaaggaagattttcagttccagattaagaggagtgtcgatcgacacactactagtctcgatcgacacactactagtctcgattgacactagtttcggcccagcaaagtcccagatgctttcaagtttacagaagaggaaatttgccccagaagacttctctatttacattattaatccttagatgttttatagggtttatatacattgtttaaacctaagttttgtttatcaagtttttatcaagctttttgcaaaccctgtttaagagagacataacctattcatcgattgttgtcagagattgattcagttcctaatacaatgaagagatcccttctttcccttaatctgtttgttgtgtttatgctttcatactcaataatgttgtttgctttaatcaatatgtctgagtaatctgcttgttaggaatagggtttctcattagggattcatatgatttagtagattgcccccttgctaggttatctataggattcttcatctttaattatgcttaatgctagatctagagtaattaactagatcttgaatccagacaatagatatgcccgccataggtatctgtagttggatctattatttgatgagtctggtttataggtgtgtaataagaatcggcctatctactaagatgaacaattgaactcgttaagaatgcatatttaggttaatagtttctcggcttcttcggttattattagctatggatatagggagtttcgcggcacgcccaccggttattccataattagagttttagtttaagaatgattcgataacaacctagctttcttagatctactaaccaatagtttcctgagaataccctgttcgtagctcttttcctaatcgtttacaacccaatcattctgctattttcttactttgttttcttactaattcactcataccctgctagcttaatctcaacatttaactcactgtttgaacaaaagaactccgtaaattcaatcctaaaatactgcaattgatctcttatttgagagagtatttctaggtaatttgaaccatatcactcatacagatggcaaagggaacccttttggccttggatcgcttatggagacactgaacaaaagaagaaggaaagagagttatgcgagctcttctacgtcaactgttgcgcagcttcaagagcagctgcatctcaagatatttgaactagaggagcaaaatgcaaaacgtaatgaggagaaccaccaatctcaatctcggatagccagcttggagaagctcgtcctcttcatgaaagaaaaagatcctgagttggctgcttatttgtcaactgattctactgaacctgaaccagaaacacatccaaccaccacaactccatccacacttccaaccaccacaaccaccgtaccagccatcatagttgcaggcaccacacccttagtctccacttcacctcctatttcgaacacttcttctaaccattaa

SEQ ID NO: 174043 - DNA, 442 bp, Arabidopsis thaliana landsberg
  unsure (1)..(442): unsure at all n locations
gagttgggattgatggtactgctgaagcnattaaggaagctatcagatcggcgtttagattgagaacaagacgagctttttggctagaagatgaagaacaggttattcgctctcttgaccgagacatgcctttagggaactatatactccgcattgatgaaggtaaatccactctttcttctatgctattcatcgaatactctctggttagaggtttctcaatatccatttgaattcagggatagccgttagagtgtgccactatgatgaatctgatccgctaccagtccatcaagaggagaagatattctacaccgaagaagattaccgagatttcttggctcgacgaggatggacatgtctgagagagtttgacgcgtttcaaaacatagacaatatggacgagcttcaatccggtcgcttatacagaggaatgagatga

SEQ ID NO: 174044 - DNA, 759 bp, Arabidopsis thaliana landsberg
  unsure (1)..(759): unsure at all n locations
gatttcacgatagtgtcgaccgactccatcagggtgtcgatggacaccctctgcagaaccagctggctaaattaggcgaccttaacaaaagtgatcttttctacaccaaccaatcagcattcaagctaccaccatttgaacgagaagactttgctatacaccctngcctattgtgatcttgtgtcaagaggaaagtttagaggagctctcgatgaatcaccattagatcatttggaagtcttcgaaacantagtgtcgatcgacaccccatcccatgtcgatcgacacccagctcgttcagacaatgtgcaaattccggctgaaaccaagtcagcaaatcggcgtatttctttccccaagagtcctaaaaagtcaagacaagccttagatgatgtcagatgcaaggctatgattgataagctgattgttgagatgcctctagttgaagctattcatctctctcccacaataagaaggtatgtcaagataatggtcactaagaatttgacgaaaaaatgcagtgttatgatgattttagaacagggcagcgatatcattcaggaacgatttccaagaaagctacatgatcctggaatctttgtactaagtgtcaccattaaccataattccttcccaagagccttatgtgatctcggttctagtgtgaatctgatgcctcattcagttgctatgcgtcttaagtactccaatcttgagcctacctttatcacccttgtgttggcagatcgttctacatga

SEQ ID NO: 174045 - DNA, 295 bp, Arabidopsis thaliana landsberg
atggggaatagaagagcaccatgctgtgacaaaagccaagtgaagagagggccatggagtgatgaagaaagtgaaagactcagatcttttatccttaaaaatggtcatcaaaattggcgatctcttcccaaactcgctggtcagtcctctaatcacactgcatgcttctctctttttctcattttcatgttttttttcttgcataatctgtttcaagtttcattttgtctatctctctattgtccatctatcattctaattctgaatactttactgatcgattcttatccgtcaa

SEQ ID NO: 174046 - DNA, 574 bp, Arabidopsis thaliana landsberg
gggggaaactctcttcattttccatctgtaaattccggattcatgtttgatgcctttttgcgggcatcactcacagctgaatatggagacttccagaaattcttctttgatctcacccgtttccatgctagattagactttccgcatggtttgaggtttcttaccggtgccactagcgtcgcacaagatcttttaaattctcggcagcctagtttagaagcatttcagaaaatctgccctgaagtattagtttctctacagcaacaggtaaaataaacgatattctacgatgagcaaacagtctaccagacacagaaattctcaaattcatagtttcagctacttgattcataacaatcttctacgggttttgcagattgttggaccgtttagtttcaaagtggagtctggaattgagatcgatctgaggaacggagctaaccctgtgactgtagataagacagtatttgctattgaatatgctcttcaagtgcttctttctgccaaggctgttgtttcgtactccccaaaacagaatgagttcatggttgagcttcgtttctttgagacatag

SEQ ID NO: 174047 - DNA, 518 bp, Arabidopsis thaliana landsberg
catgcattaaaattgatgttgacatgcatttactttctgatgcaggaatcacttgaaagattgctcctacatgaatgaatgtctcgctgacaatgaaaaacgatccagaaactgataaggcatttggatgggtgctgaaaatgttagcacaaaaaacaagaatcttaaatcatgaattggctctccaccttttgaatcccatcattgttaactgactactttattcttctcttttctgtttgataaggtacggttacgcaattgcatctgctatacatggggtgcgtcacatacttcggaaggatttcatgcttcaggtaagaatcgaccttgtgctgataccttagtgataacatattctatgtcgaagatacttttgttttgtcaaagttacaaaagttgtttctctgctccatattcctaagttctctcacaatatctttcagcctccgtgggatttgtctaccaaggggaagtttatcattcattacacttatggatgcgactacaacatgaag

SEQ ID NO: 174048 - DNA, 601 bp, Arabidopsis thaliana landsberg
agcgcgcggcggcgatctgctgatcgtgccgttggccacaggcgccacaccatgagcaggaaacccgagctgtcgttctggcagatatggaacatgtgcttcggttttctcggcatccagttcggctttgcgctgcagaacgccaatgtcagccgcatcttccagacgctgggcgcagacgtcaccgacatacccgcgctgtggatcgccgcgccgctcaccggcttgctggtgcagccgatcgtgggttactggtccgaccgcacctggaaccggctgggccggcgccggccgtatttcctggctggcgcggtactggccacgctggccctgctggcaatgcccaactcgcccgccctgtggatggccgcgggtctgctatgggtgctggacgcctccatcaacatctcgatggagccgttccgtgcattcgtcggcgaccagttgccaccgcgccagcgtccgctgggctatgcaatgcagagcttcttcatcggccttggcgccatcgtggcctcggccctgccgtggctgctggcgcatgccggcgtggacaatgtgggcgccgccgacgtgatccccgatacggggaaatacgctt

SEQ ID NO: 174049 - DNA, 616 bp, Arabidopsis thaliana landsberg
taaagtgaccagcgctgaattcaatctgctgagcttgttggttaaacaggcggggcaagtggtcagcaaagaaacgctcagcgaagaaggtttgggtaaaaaactggagcgattcgaccgcagtgtcgacgtgcacctgagcaacatccgaaacaagctgggcatcggtggcgacaccccctcactgctggtgcttcacaccattcgtggcaagggctatcaactcagcttggtgtaggtatggggaagctgttctggaagtttttcttcggattttggctttgcctgattttggcagcaggcgcaaccggtgcagtgttgtatctgcttcgcgaaaaaccacacagcacagacctggctgaagggccgcgcgcgcagttcctgcttgaaaccgcgcaggaaattattgaaggcaaaggccccaaagccctagaacgggtgctggtcaaagggcgaagccgcaccggccaaaccatgcctatttttgcagtgtcgcaggacggcaaagaactgcttgggcggggcattccagacaacatcaacgacagaatcaaaaacctggccaatgaaaagccaaacgaggaaggcatcattcaagtcaccgcgctggatggca

SEQ ID NO: 174050 - DNA, 553 bp, Arabidopsis thaliana landsberg
tgcggagaggagaaaagaatggcgaagatgataaacaagacgcttgtacttacatatatctacttactaatctacattattctttcttctggagttatactatacaacaaggtgattgcagattctactttatttgtttatctagatcttcatatagtttgtggattttttgcatgttgtagcttgtataaactaggatttgagtttagatacgaatgttgtgtatatgaaatgaaaccatcgaggaagatctttgtgctgtagagtagtactatttcatagactttgttactgattatagaggctgagtttaattagtatctatcgttttttggatttctcttgcagtgggttctatctccgaaatacttcaattttccacttcctataacattgacaatgatccatatgggattttctggattcgtggctttccttcttattcgggtattcaaggtacagcgattacacttccatttagtgaatgttacatttgtccacttgtttggagtatgctacatgctcgtcttatgctgagtactccttataatag

SEQ ID NO: 174051 - DNA, 2239 bp, Arabidopsis thaliana landsberg; identical to SEQ ID NO: 29407

SEQ ID NO: 174052 - DNA, 567 bp, Arabidopsis thaliana landsberg
atgtcaccgaagctgatccaggcccgcaccggacggcgaattcttgacacccggacggccccgatggaatcgtgatctggccgactggctagtcggccctgaatcacagtcggctcagaggagcgttcgtggccgttagcccggagccggtcagcccagcgcccgtgccggccagcccggcagccgtgccggccagccccgtgccggttagcgtcacgttcccggcgggggcggaggcgttccggcagcgggtccgcggcttcatcgccgagtcggtgatcccgctggagcaggaggcgttcgtctccggcgtcgatgacaggctgcgggtccggctgcaggacgcggcgcgggccgcgggcgtgctggctccgcaggcgccgtcggagttcggcgggggcggggccgacttcccggccaccgccctgctgctggaggcggccgggtacagcccgctgggcccgctggccaccaactgcgccgcacccgacgaagggaacatgcacctgctggcgatggccggctcggccgggcagcagcagcggtatcttcgcccgcttgtggcgg

SEQ ID NO: 174053 - DNA, 489 bp, Arabidopsis thaliana landsberg
atgggaggggtgacgtcatctgtggcggcgaagtttgccttcttaccgccgagtccaccgtcttacaaggtggtgaccgacgagctcaccggactgttgcttctcagccctttcccccaccgcgaaaacgtagaaatcgtaaagcttcggaccaggagaggcacagagatcgtgggcatgtacgtgaggcatccgatggctacctccacgctcctctactcccatggcaacgccgccgatctgggacagatgtatgagctcttcattgagcttagcatccatctcaaggttaatcttatggggtctgtttttctttctctccctttgtaattcgattgattttattattatgatgctgatttaaaaatgttatctttgtatgcttcttttgattgatttggtataggatttgccctgttttgattctcacgtttctagctctgtttctagtatttgctctgtttatgtttggagtgtttattcaccacc

SEQ ID NO: 174054 - DNA, 1288 bp, Arabidopsis thaliana landsberg; identical to SEQ ID NO: 8125
  unsure (1)..(1288): unsure at all n locations

SEQ ID NO: 174055 - DNA, 540 bp, Arabidopsis thaliana landsberg; identical to SEQ ID NO: 47169
  unsure (1)..(540): unsure at all n locations

SEQ ID NO: 174056 - DNA, 2243 bp, Arabidopsis thaliana landsberg
  unsure (1)..(2243): unsure at all n locations
aagaagcactattgttccttacactcttcatcttcatatctctggtaagtttacatctttacgatacaccattaaaccgaaaaccggcatttttacattctttctcttatacattttcaggtttgtaggccaaatcttttgaagaagtcgataaaaagattcaatgtcgcatggtgggcttactcgtttcctatcacatttcnnnnnnnnnnnnnnnnnnagtacgcgcaagaggtgaaagaccatgtcgcttcggacttgatgtttatcttctcatacatgtcagttttgatattcatcagtgtgatgttactgacagcagcaaatagcaaacgattacttagacatgatcatgtcctctggtcttgtactggtccaaacgacacatcatcatcgggtatggcgaaacttgttaaccaaatctgattacccataagataatgtatgtcaaagtagttacaaaactagctggataaaaatttcagttggaagatcaaccaactacagactactatgtaatacaatttgtagaaatttctactctaattactatctgacctgatatcaaacccggttcaaatactataaaaccggaaatgctgaattgaaccgagttattaccgatttaaacacagtaaaatcaaaattcacctgactgtgagaatcaactgatcaattccattccactgactgattcttccaaatctcaggagtcaggcctcagaggctaatttggtttacaatagacacattttactatctgaattgaaccaaatgatttccggttcaaacatggtaaaccgaagaatgtccattacatcatcatctgaaccaaatttacctgactctaattttcaaagctagaggcttttttagtttttgatcgctgcaattttcgccggcgacgacgatgatccgaacacgaagtgtcttgttaattttcaggaaggtgttgtatcaatcgtcttgtcttaactgtttattatgtgcaaactctttctctacttcagtttcgtcaagcttgggttttcgagcgacgaacaaagagttaaaccagatgataagatctggttacatcgccgaagctagagatatttttgagaaactggaggcgagaaacaccgtgacgtggaatacgatgataagcgggtatgtgaaaaggcgggaaatgaatcaagcacggaaactgttcgacgtaatgcctaagagagatgttgtgacttggannnnnnnnnnnnnnnnnnnnnnttcatgtggtgggattaggtttcttgaggaagcaaggaagctgtttgatgaaatgccttcaagggattctttttcatggaacactatgattagtggttatgctaagaatcggaggaaaggtgaagcgttgttgttatttgagaaaatgcctgagagaaatgcagtgtcatggagtgctatgatcactgggttttgtcagaacggtgaagtggatcgcgcggttgtgttgtttcggaaaatgcctgtgaaggattcgtctcctctatgtgcacttgtggctggtcttattaaaaacgagagactttcagaagctgcgtgggttttgggtcagtatgggagtttagtttcaggaagggaagatttggtgtatgcttataacactttgattgttggatatggacagagaggacaagtagaagcagctcgatgtctgtttgatcagattcctgatctctgtggtgatgatcatggtggagagtttagagagaggttctgtaaaaatgttgtgtcatggaattctatgatcaaagcttacttgaaagtgggtgatgtggtctctgctaggttgctatttgatcagatgaaagaccgcgatacaatttcctggaacacaatgattgatggatacgtacatgtttccaggatggaagatgcttttgctctgttttcggaaatgccgaaccgtgatgcacattcgtggaacatgatggtctcgggttatgctagtgttggcaatgtagagcttgctcgccactactttgaaaaaacacctgagaaacatacagtctcgtggaactcgataatagcagcttatgagaaaaacaaggactacaaagaagctgttgatttgtttatccggatgaacattgaaggagagaagcctgacccacatactttaacttctcttctcagtgcatctaccgggcttgtaaatctgcgtttaggaaagcagatagaaccaaatcgttgtcaagactgtgatccccgatgttcca

SEQ ID NO: 174057 - DNA, 1619 bp, Arabidopsis thaliana landsberg
  unsure (1)..(1619): unsure at all n locations
gcttatatgctatggagtggactctatttctatagtcctagcggattgatgtgtgactgttgtgttttcttgcagcctagtatttcaaacgtggaagatgaaggaattgttgatgacatcaaaacgtagaggaagctatttgtgaggtggtatgttctctcacgtgctcttatctctttgtcaaaacaatatagcgttggcaaattatgattttttgtcgcttcaatctatcttggccatttttcatgtcgtagcagtaaaggacaaagtacaactgtgttctctagatagctaactttgtgatgttgtctatcttaaaatttaaggtttccaagaagaaagatatgttgaatcggctattaaagcctgccctagagatgaaagaacgtcaggagaagtaagatttgtctttcttccgcttttacttgcatgcctttaatgatctagactgtgatctgacggttttgtgctgacattttttccttacacagggagtttgagcggctcggttatgaaaaactcatcgaaatggcatatgaaaagagcaaggtaaattctctcataaaggggttcacttttcagatttattccactgttgaccctttttcctcttcgttttctgatatagtccagtttcatgttttgattatcatatatggattttattttacaggcaagtcggcggcatcactctgcaagtggaaagagttcggcgactaagatatcaaagcaggccgcgtttgcttttgtgaaaaggacacttgaaagatgtcgtcaattcgaagaaacaggcaaaagttgctttagtgagtccacatttaagaatatcatcattgccgggttgacacaatttgaagataatcccacagacaaggaagatattctatcagcttcaagtatgatatcgtttttcctttacagaacattgaactatgttttcaaatccagaaactctctgttaattttaatctttctttttttcagcactcatgggatcacaaccaagctcatcattggcattgccaatgacacagagcacggagaatcatgccaattcttctgaaaatgctttacgggaaggcagagatgaaatgatgtggtcaaatagaatgaagaagagagaattgctgcttgatgatgtgggtgggaaaccactatcaagcagtacgaaaggaaagagaagtgagagggacagagatggaaaaggacaggcttcttcgtcaagaggcggaagcactaacaagatcggtcggcctgcgcttgtaaatgccaagggtgaacggaaatcaaaaacaaaaccgaggcaaaaaacaactccgatgttttcttcttcttctacttgtgtcaatatcgtggagcaaaccagaacatcattgtcgaaaacaactaacagcaacaacagcgagtatagtaacttggagacactggatgagtcagagcctcttgacctatctcacctgcagataccagacggtttaggtggtccagatgatttcgatacacaagcaggagatctaagctcatggttgaacatcgatgatgatgcattaccagatactgatgatctcnnnnnnnnnnnnnnnnnnnnnnnngatctttcagacttaaacatgatggta

SEQ ID NO: 174058 - DNA, 628 bp, Arabidopsis thaliana landsberg; identical to SEQ ID NO: 79803

SEQ ID NO: 174059 - DNA, 576 bp, Arabidopsis thaliana landsberg; identical to SEQ ID NO: 74693
  unsure (1)..(576): unsure at all n locations

SEQ ID NO: 174060 - DNA, 757 bp, Arabidopsis thaliana landsberg
  unsure (1)..(757): unsure at all n locations
nnnnnnnnnnnnnnnnncaagaaggagatggagaccggcgaaaagcccactacaagccacgggaaggcttcatcggaagagtcccgcaacaaaaagaaagggaaggagaagaaggtctcctcccacaagtcgcacaggagtggcgacaagaaaaagaaaatgaggaaggtggtctactacgagaccgacacttcatcaccttccacatccggctctgacgcaccgtccataacttctaagcgccatgagccgaagaagtttagtaagatccccctacgctaccctcacacttcaaaatgtaatcctttactctccgttcccttaggcaaaccaccggtttttgacggtgaagattataatatgtggagtgacaaaatgagacaccatctaacctcactccacacaagcatatggaatgttgtggagtttggtgtacaggtaccatccgtaggggatgaagactacgactcggacgaggtggcccaaatccaccactttaactcccaagcaaccactatactcctcgcctctctaagtcgagaggagtataacaaggtgcaaggtttaaaaagtgcgaaggaaatttgggacgtactcaagaccgcgcacaaaggagacgaggtgacgaagatcaccaagcgggaaacgatcgagggggagctcggtcgcttcatgcttcaccaaggggaggatccacaagctatgtacaaccgcttgaagaccttggtgaaccaagtgcgcaacctcgggagcgaaa

SEQ ID NO: 174061 - DNA, 1165 bp, Arabidopsis thaliana landsberg; identical to SEQ ID NO: 10084

SEQ ID NO: 174062 - DNA, 763 bp, Arabidopsis thaliana landsberg; identical to SEQ ID NO: 18647

SEQ ID NO: 174063 - DNA, 561 bp, Arabidopsis thaliana landsberg; identical to SEQ ID NO: 63171

SEQ ID NO: 174064 - DNA, 1179 bp, Arabidopsis thaliana landsberg
atgggaaagaaagagcagaaggatcatcattcagtagtagagagcgacgacaaagtcgacgctgttcttcatctccttcgtaaacattctcctctaactcttaaacaggttgggtggcatattcattattatatatccgttacttgaacatgttttattttttaatagaaaattttgattcattatattgttattgggttaatgaatgttgcaggagaagttctgtaacagagcttgtgtcggtagattcttgagaataaaaggagacaatgtgaagaaagcagctaaacagttaaggtcttgcctttcatggagatcttctcttggcattggtactttctctctcttgatcattacacattctcaatcactatatactgtatatctttatacaagtttgaaatgtatatgtatgtatatatggataaacgtttatatatttacagtctttattttccaagatatgtatacaaatattttggtatgttgatatactatactaaaatacacgtatatatatttgaacacgcgtacgttacatctttagaggtccgaattgctttacttaaaaaacggtctaaatttttaagataatgaaaacgagaggttgaaaacataaagcttaaagtaaagcatgtagtgtgtgtatagatgatagatttggttagctagtggttttcgtatttgtacttctttagaaaaacagacgtttcgttgcttttttctcgggttttgatatgtcccatgtttgaacatcgagcgttaaagtgaatatccactcattatgacacccacttatttttaacctcttctatttaatttttcaagattctgttttccctttttatgtttaaaattcttatattatcttttattaatatttataataattacagagagtttgatcgccgatgagttcacggcggagcttgctgaaggtcttgcctacgtcgctggtcttgacgacgagtgtagacccgttttggtaacttaatctcacttttgataattttgttttttgatttatttcataatcaaaacctatcgtttaatacccttttctatattcctcttaggttttccgttttaagcatgattatcagaagctgcatacccaaaaacagtaagtttatatattagtgattttaaactgtattgatattcttaaaaacgttcctg

SEQ ID NO: 174065 - DNA, 1412 bp, Arabidopsis thaliana landsberg
  unsure (1)..(1412): unsure at all n locations
aattgttgcaaatcaggactcggaacttgaacttcttgaatataaaactgcttttcttcatggtgtgttaggggaaaaaatatacatgactcactcaaatggtttccaagctcctaaaaagggagatcacctcnnnnnnnnnnnnnnnnnnnnnnnnnnnnnnnnnnnnnctccaggaagtggtacaagaggttcgacaactatatgatggagctgggctacaacaggagtctgtatgattgctgtgtttacattagcgagctgaaagatgaatcctacgtctatctggtgctctatgtagatgacatgcttatagctgccaaacagatgtgtgatatttagagattgaaagatctgctgagtgctgagtttgagatgaaggatctgggagcagcaaagaagattctcgggatggagattctcagagacagaaatcagaataagcttttcttgtcacagaaaggctacattcagaaggtgttgaacaagtttggtatgttatcagcaaaacctgttgacactccatttgctgctaatatccatctcaccatgtttgctcctcagtctgaagaggacaaagagtatatgtctcgggttccctacgctaatgttgtgggaagcttgatgtatgctatggtctgtacaagaccagatcttgcacatgcagtcagtgttgtcagcaggttcatgggacaaccaggaaaagaacattggctggctgtgaagaggattttcaggtacctgaaaggtacgtctgatgtttgcctcatatatggaggtgaggctcctagcttgattgcaggttattctgattttgattatgcaggagatgtagacagcagaagatcaatgactggttatgtgtttgccctgggtaattctgtgattagcgggaaagcaactatgcagccaactgcgacgctgtcaaccacagaagcagagtatatggctttgacagaagctactaaagagggtatttggctgaaaggattggtcagtgatatgggtttgcatcaagatcaggctacagtgtattgtgacagtttgagtgcgatctgtttaaccaaagatcaggtccatcatgagaggaccaagcatattgatgtgagatatcattttctgagaaatgagaagaggattcaagtgaagaaggtaggcactactgataaccctgcaaatatgttcactaagccggttccttagagcaagtttaaacattgtttagacttgctgaatgtctcaagctgttaatcgccctgaagggcaaacaggcccctaacggggcagcaagtccctggagggacatctggcctctgaataggcataaggctccttatgaagcatttggccctagtggagcgttctggtttctgatgaagcattttggtcttggtaggcgttctggcttctga

SEQ ID NO: 174066 - DNA, 563 bp, Arabidopsis thaliana landsberg
ccatcccgaggcggtcgtgctctccgacagcggcgcgctgcgactggcgcgtaaccgacttactgcgtcgctggatgcttaccgcaagggtgactcgacgaatgccttgcgcctggccgtatctgcgtatcttgacggcttcgagccggtcgaaccgcagctggccgcccacgattccgcgctgctgcgacaggtcgagggcgagatgacggccctgcgctcaggtatcggtgccggtgccagcgccgatcaagtcggccggcagatcgagaaactgcagggcctgctccggcaggccgaggaccgccttggtacgcaaacgagtaccgcctcatcattcgccggcgcgttcaccattctgttgcgcgagggtcttgaggcgctgctgatcatcgtggcgatgatcgcattcttgcgcaaggccgaacgcagtgaggtagttccatatgtccacgccggaacgctgactgcgctggcaggaggcgtggggacttggggcattcaaactaacatcgtggctatcagtggcgccagccgcgagctgaccgagggcgctgcttcgc

SEQ ID NO: 174067 - DNA, 637 bp, Arabidopsis thaliana landsberg; identical to SEQ ID NO: 1590

SEQ ID NO: 174068 - DNA, 1237 bp, Arabidopsis thaliana landsberg; identical to SEQ ID NO: 34804
  unsure (1)..(1237): unsure at all n locations

SEQ ID NO: 174069 - DNA, 2475 bp, Arabidopsis thaliana landsberg
gacaatgttcattatatcctgcaaagtatattttttgctatatattttatctgcctgatcatgtgctgattctgggaggttgatggtttccgttttgatcttatggctcatataatgaaagctacaattgtaagcagctttgttactctgcatattttatttgtatgattggtagttttctttactcttttcttcagaagttagtatgttatttcattaggtttctgtgtaaaattacaaaagttttgagatgagttgtaatatctatattccttaggtaaacgcaaaatctgcaattggtagcttgagaaaggaaacagatggagttgatggttcaagaatttatttgtaagtcttggctatttttcggacttgcatgcaagttttacgacattcgttgtgtccttttccctcgtgaaataattttggccatataatttgttgtgctatcccttcatcatcagatatggcgaaggatggaactttggtgaagttgctgaaaatggacgtggaataaatgcgtcacagttcaatttaggcgggacaggaattggaaggtttgaaagtcattactttaataaattgtacctttttagttaatccgttggacatcttgtcactttcttcaacgattgtacaacattccctgatcaattttgttttacctgaattgtttaaatctctattcagttttaacgaccgtatacgagatgcaactcttggtggatctccatttggtcatcctcttcaacaaggattcattacaggtttattgttacaggtattttgcctttttttttgtgcagttaccaatcaagatattgaatcaccaaatttttttagctctaaccgaggttaaatgaagaatatggtcttaactccacatcatcacatttatattcatggctttaccaacaacttatatttgtggttttgtttggaatagacactacaatacggctttattgttttgagagatgagtaatcatcatgtatccttatttgccactagtaaattattattcaagtagagagatacgcttataaatatgtaaaattcttttcttcacttctttaccttccctattatggacagcctaacgctcatgaccatggttcagaagctacacaggaactgatgctttccactgcgaaaaatcacatcctggtaatgatctccgttagatatcatatgatatatggtaatcatatttctgaaatcaaggcttaaggattgcccgaacccaatcttgttctcatattcgcttcatagctgttcccaatgctttctcctttcttactacattatgttatcttactagttgaaatgtgacagctgtatggatatcttgtaacactaagttctagaaagtctttttctgatattatcattttacttccatcatggattagactggtatggcagcaaatttgaaggattatatgctgaccaaccacgaaggaaaggaggtatgtaattagtcgcactttactattgaatctttctcaaagaatttttgcctcaccttttatgttgtatggctctcattttgtaggtgaagggatcagaggttttaatgcatgatgctacacctgttgcatatgcttcactgccaacagaaactgtatgcaacttcctttctatcactttcatcatttaagtgaaacaagcaccaataaatctgcgatgctcataccagcatttccctgtggtttcagattaattacgtatctgctcatgacaatgaaactctctttgacattatcagtttgaaggtaataaaacaaatatgatgtctgaactttttccaaattttcaattcttcagctcaatgttttcttctgcttgattagtatttaattctgaagcacttcactctgcatgttgtatctgcgagccaacagacgtgtatccactctctatttatttgcatcatacatttctacttgaggatctgtatagacttatttatgctttgttcttgcagacaccgatggaaatatctgttgatgaaaggtgtcgaatcaatcatttggcgtcaagtatgattgccctctctcaggttctctactgtattccaacttaacttagttatatgtagactaagggactgcaaactacggctagtgggcactattctcgaatctattacaccaagtagatttctgttcaaatcttaatatgttttattctgcatgtaaagggtattccattcttccatgctggggatgagattctacgctcgaaatcacttgatcgagattcttacaactccggtgactggttcaataggtttgcgttttcgttcttgtaatgaaacatttcctctgataatatatttcccctactgatcgacatgaacggcaacaagtttaggctggacttcagctacagttccaacaattggggtgttggaattcctccaaaagggaaaaacgaacacaactggccactgtaagtgcggacgtaatcgc

SEQ ID NO: 174070 - DNA, 970 bp, Arabidopsis thaliana landsberg
acccaaacattgttacacttctcggtttctgcattgagaatggagagcatcttcttgtctatgagtatgttggccatttgtcgttgtacaatgctatgcatgatgaggtatacaagccactttcttggtgcttgcgtctccgcattgctattggagttgcccgagctctggagtaagtattctatcttctcaaactagtggtagtagctattccctacccttgcagttatttattttgactcttccctatctggtgaatcaaaaactttcagctatttgcactcgtcgttttgccctcctatagcccatagcgatctgaaagcaacaaacatcttactagacgaagaacttacacctcgtattgctgactgtgggcttgctagtttaaggccacttacaagcaacagtgttaaacttcgggtaagtaagacagcatctgatgtgtcacctaattctttgactcagagagacctaatgagttgtgatttagagcaggcttcagaaatagcgatacaaaacactggctacatagcaccagaacatggacaaccaggaagcagtggcacaaagagtgacacttatgcactgggagtgctactcttagaactgttaacaggaaggaaagcatttgacaggtacacaatcgtttcacataataatataatcattgatgcctaagctaagctaatcatgacccttttctgatggatgttttgcagatcacgaccccgatgagaacagctactggtgaaatgggcatcaaccagacttcatgacaggcgaagcttataacagatgattgatggaggcatagccggcacattctcctcaagagtcgcctcacaatactcagacattatctccctatgcactcaggtattgacattagagtttcttgactcaagatcattacataaactaaccattctttcataagcaagcacagaaggagttcaaaccaccggtttca

SEQ ID NO: 174071 - DNA, 295 bp, Arabidopsis thaliana landsberg
ccccactaaggctgctgagttcgcccggtcggaggctatacttttcttgccctcacaggaccgcttcaaagccgggctggccacattgaaacccgctcgtgtggctcgcggcgctcccgaggtgatgtccacgccagacggcgcccgaattgcacagcttacgcaaagcaagacgaaattagagatcacgatcgacaagaaagcgacgcccgagttcgccgccttcgtactcgaacaactgcccgcgctttatcaggcgcatcgctcgaagactgaactaaaacagggagagtaa

SEQ ID NO: 174072 - DNA, 642 bp, Arabidopsis thaliana landsberg
atttgagaacaagtccccaacattggcgcccacctccggtgaactcacttccacttcgagcttttttgaacaccttcggaagctatggcgccgaagaaagcttcagcgacctggggcttcaacactgcaaccgttggacatcaaccaggagaccgtctctctccgggaggcccgaaaccagaagagaaaggctgtcagcccgacgattcaggaggatgaactagaccaagagatcagggacatggagatgctacatcaacaggtgcagaggaagaaggagaagatggccaggctagttgagctgcagaggcagatagacgaagcttccgaagaagtccgtcatcttacgcacgatgagcagaaccgaaggcctcaacaaaaagaccttcatcaggagggcttcttcaatgaagatgactggtatgataattttcatcatggaaattttgttgtcgaccgatggttcatctgtggtccggtgaagctgcaggctacacgttggccttcgtcctataagccaccccagcttcccatgttcgatggccattcggacccgaagcagttcttgatgagttacgaagcaacagtgtcttcgtatggtggcaatgctgcagtaatggcaaagtctttcgttatggccgt

SEQ ID NO: 174073 - DNA, 1633 bp, Arabidopsis thaliana landsberg
acctgtgacaggaaatcagacttcaaacgtcttgtttggtctaggagattcgtcctacttttccatgaactatcaatgactggtgctccaatttcaatgatggagttggctttcgagcttttgagctgtggtgcaacagtatatgcttgagttcttagcaggagaggtggattgatgcaagagctcagtaggagaaggatcaaagttgttgaagacaaaggagaactcagcttcaagactgccatgaaagcagatttgatcatcgcaggatcagcagtgtgtacctcatggataggtaagaattcattatgcagattttagactactaatttacaatcagaggaaagcatatcttaattactttttttttttccttttctcgcagatcaatacatgaatcatcatccagctggtggaagtcaaatagcttggtggataatggagaatcgacgagaatactttgatcgagcgaaaccagttcttgaccgagtgaaaatgctgattttcttatctgaatcacagagcagacaatggttaacatggtgcgaggaggagcatataaagcttagatcacaaccagtgattgttccactatctgttaatgatgagttagcttttgtagcggggatttcttcttcactcaacacaccaacactttcaccagagaaaatgagggtgaagagacaaatattacgcgaatcagtgagaacagagttaggaataacagattcagatatgcttgtgatgtctcttagcagcataaacccaacaaagggacaacttcttctccttgaatctattgccttggctctttctgagagaggacaagaatctcaaaggaatcacaaggggatcattaggaaagaaaaggttagtctctccagcaaacatcgtttaagaggttcatcacgacagatgaaaagtgtttctctcacacttgacaatggcttaagaagagaaaagcaagaacttaaagttcttttaggatccgtgggttcaaagagcaacaaagttggatacgttaaagagatgttaagcttcttgtcaaacagcggaaacttatctaagtcggtaatgtggactcccgcaacaacccgtgttgcctcattatactctgcagcagatgtctacgtaacaaactctcaggtaacctttccccttgatccttttatggctccactcaaaacaaactatcaatgctatttgaagcgttcttcaacttttgtttacccagcttcaactgtgaaacagggagttggtgaaacattcgggagagtgactatcgaagcaatggcttatggtcttccggtgagaaacaaacgatagacttattggttattcgggagagacaaaaaaaatgcaatgatctaattctaatcattgtttttaatgggagcaggttcttggaacagatgctggaggaacaaaagagatagtggagcacaatgttacagggctacttcaccctgtggggagggcaggtaacaaagtgttggctcagaatctcttgtttcttcttagaaacccatctacaaggctacaactaggtagccaaggacgtgaaatcgttgagaagatgtacatgaagcagcacatgtacaagagatttgtggatgttctagtcaaatgtatg

SEQ ID NO: 174074 - DNA, 501 bp, Arabidopsis thaliana landsberg
atggtttgtggtaagatcaacattcctatcctttgcctctgtattgtttgtctcgcagctacccccgtgtctcatctaacttttacattgttgttttgactgtttcaagttctcccttctggtaaaaagcctcttgactggaacacccggatgaaaatagcagctggtgcagcaagaggtttagagtatctgcatgacagaatgacgccccctgtgatttaccgagatcttaaatgttggaatattttgcttggtgaagactatcaaccgaaactatctgactttgggttggctaaagtaggaccaagcggggataaaacccatgtctcgacaagggttatgggaacgtacggatactgtgctcctgactacgctatgacgggtcagctcacatttaaatccgatatatacagttttggagtagtccttctcgagcttatcaccggaaggaaagcgattgccaatcaccaaacgcgtaaagatcagaatttggttggatgg

SEQ ID NO: 174075 - DNA, 381 bp, Arabidopsis thaliana landsberg
  unsure (1)..(381): unsure at all n locations
gctatgaaaaataaccgtatctgtcagatcgtggggatcgaaaaacctgttattcagggaccgttatcctggctcacggatgcccgtttagttgccgcagtcagcaatgctggcgggctcggcgtgctgggacccaatgccggtttaaccgcggacaccgcagtttccacgccggaagagaccgccgaaaaaatgcgcgaggagattcgtanaaccaaacggctgaccgagaaaccctttggcgtgaacctgatccccacggccgttaatgacgtctggacaggcccgatccttcaggtggtgaaagaagaaggcgtcagagttgtagtgtatacgggctatggggaaggcagcattattcctgcgcggttcagcgcgttc

SEQ ID NO: 174076 - DNA, 527 bp, Arabidopsis thaliana landsberg
ttttgttagtggtggcttggctggaattacagctgctacagctacatatcccctcgatcttgtcaggactcgtcttgctgcacaggtaattgttttgtttttttgttttcttcttgaatatgatgattgaaagctttattattcacttgatctaacagtttctttgtcttttcctggcttaccattgcattatatttgatgcttcccagaggaatgcaatttactaccagggtattgagcatactttccgtaccatatgcagagaagagggaattttgggtctatataaaggacttggtgctacattattggtatgcttagtttgctttcccatgttctcttgtgcaaactatgttgattgttaacttcttcgtacattgtaatgcagggtgttggaccaagtcttgctatcaatttcgccgcgtacgagtctatgaaattgttttggcattctcataggtaagggataatctataattggaaattttctgttacttttgcactcgcctattgagtatatatttctg

SEQ ID NO: 174077 - DNA, 412 bp, Arabidopsis thaliana landsberg
atggattcgaaaaatggaattaacaacagccaaaaggcaagaaggactccaaaagaccgccatttgaaaattggtggccgtgatcgtcgcattcggatcccgccgagtgttgctccccaactatttagattgacaaaagaactcggctttaaaaccgatggtgaaactgtcggttggctcctccagaatgccgagcctgccattttcgcagccacgggacatggtatcaccaccacctccaatgaagatatccagccaaataggaattttcctagttacacctttaatggtgataatattattaataacgttttcccttgtacggccgtaaatactggtcatcgtcagattgtgtttccggtttctacaatgacagatcatgcaccttcaattaattacagtactattagtg

SEQ ID NO: 174078 - DNA, 680 bp, Arabidopsis thaliana landsberg
atgtcagaagaaataaacggaaaagttaaaaagatgatagctcgacgattcgcaatagtacgttcctttcgttcaaggatgaatccaaagatgactatacaaaaactttgcacatcgtctaaaacagcagatctttctctccgaaagattgatccgaaaccgaagaaaacgcaaaaattcagcaaaccacaagtcattgcaagtccctctcagcgagaagcaatgaagaagcgaaacgacgaggatttggtccttacgggtaaagtaatcgcttcagaagcaagctaacttcatcttctctccggcatcaatcaactccgccaacacaatgatggggtctcatcaaagaccttcttcctcctgaatggctgaatccgtaaacagtgaaacaattgaggtttatggaaacgcattgtatttcaaaggagcttgggctgaaccattcgataagtggtatacagaaaagaaagagtttcacctactcgatggtgcgtcagtgtttgtgacatttgtgagaagcaaatgggaccaataagttgggggttacaatggttccaaggtcctcaggcttccataccgacaaagcgatgatgatatcaatcgtgaatactcaaaatgtatttctatctgcccgacaagaaatatggattggatatgagatagaatttggatataagtaa

SEQ ID NO: 174079 - DNA, 770 bp, Arabidopsis thaliana landsberg
caatcaacccgttctccaaaactcaaccagggtttcttctccttctcctccaaaactaatccaaatccaaacaaacaacaacaaatcctcatcgactacatctccaaatccctccaatccaacgatacctgggaaactctctccaccaaattctcctccatagatctatcagattccttaatcgaaacaatccttctccgattcaaaaaccccgaaaccgccaaacaagctttatccttcttccattggtcatcccacactcgaaatctccgtcacggaatcaaatcttacgcattgacgattcatatccttgtcaaagctcgattactaatcgacgctcgagctttaattgaatcgtctctgttaaattctcctcccgattcggatttagtcgattcgttgttagatacttatgagatctcatcttctactcctttagtgtttgatttgttagttcaatgttacgctaagattaggtatttggaattagggtttgatgtgttcaagagattgtgtgattgtggatttactcttagtgtgattactttaaacacgttgattcattactcttcgaaatcgaagattgatgatcttgtgtggaggatttacgaatgtgcgattgataaaaggatttatccgaacgagattacgattcggataatgattcaagtgttgtgtaaagaagggagattgaaagaagttgttgatttgttagataggatttgtggtaagagatgtttaccttcagtgattgtgaatacgagtttagt

SEQ ID NO: 174080 - DNA, 2659 bp, Arabidopsis thaliana landsberg
  unsure (1)..(2659): unsure at all n locations
aatacttgagccattagtggaacttgctcttaattgtccttcgtcaggtgataaacgaggtggaagcctaggtggctttctcaaaagtacccctagtctaagttccccaacaaaagagacctttcctttctgattaagaccagaatcatttggactcttactcatcagcattagacatgctactccaaagaacagtattaatataaggaacttccccgtgctacaggtagggtgttgttttttgtactaagagtaaccaagctttgagaaaaaacctataacacaagacattgcaaaagaatgatgtcaaaaaagaagagcaaactaaatcaactttcatacacgtacgaccaaaaacttcaagtcatccattactagattcatagcaccttctacatgtccaattcttactccttctaagcaaacatttctattgctcagattataacttcattttaggagtctcacagtaagaagcctaaaactttaatctgaagctagagactatataagatggaaattctatatcttaacctgaaagcatacaacttctatctaaaaactgaagctttagcggcagtttatcaatctagctttctataactcagcattacctcacaaaaacgtaatttcgtgaatccaaggtcaatttggacacaaagcaattcatctaaaaccaaagaagatgaaccagatacaagaaccagtgacatcaaatccataataaaggagaaaacttgggcataacccatatcagagatcaagatataacctttaaaggagatcgatgtctgaacttggcattgtcgtaatgaatatctttaactgaatatggaggnagatttcgacatgctcagatccccccgttctaattgaagatcggctttggggttcgtgttctgtctgccgccgatctaataatgaccggagaataagatgagatttcttcgggaccagagagattttttttttcagaagaataaaaaaagtgtttcgcagagacaacgcagagaagtcttcttctctgaaatattacggcagcttctttacaagcattgaccaaccaaactcaagcttccgatttctttctttttcctcttgttttttttttcttcgtcaaacattattaattcgtttcttctaattacgaattaccacaaaattttgttttcatccatttcctaagtaaattttaaatctttcgctttcacgacatattttttgttttttttttctataaagtaatgacatttcaataaacaaatagagaattttgaatggatgtagtggaaaagtggattaaactgctaaccgattacactaaactatttttggagcggataataaaccgtcgcgtaccaaatttttttacgttaaaaagtttataattaatccaccgcggaattgttctattttttttttcagtccgtactactgattatagtttatgaatggttaacgaaaagcggtccgtcctaatcgccgcaaccatttgaatcttttattagtactaaaagtttgtgattatgactaaaaatggtctagtttgaaaaattgttaatacttttaggcttatctagggtgaattagttaattttaaaaaccttaagcttgactcataataataacaaaatactggggctgaattagaaaccgtctttatacaagaactttcaattattattcacgcgtcctccttgtactcgtccaatgtaagagaatgaaaagactgacatatccattgagttctctgaggaatatcgtcgaacactttcactgcaacaccttccacaaaccaatctcttctctttcaatctccccaactctcaaatccgaatcacgagaaccttcttcgacccaagacccgtattcactactcaaacaagatccagtcgatatatgtctctcactctgggtcaaatcattctcttctcctccttctgctactttctcgaacctcactggctttctctccaaattcgatttatgggtcttagcttatcaacgaacttgtgctcatgtcaccggaactttcccaccgcgcaatgctattcatgccaatgccctccgttcgcttctctccctccaaaacgccgttacacgttccggtggcaaatttcggtggaacgataagatgaatcagtacgtgaggagcccaaaggataaaatctcaatgaatggtggagagggtatgtcgaaagggaaggtaaggaggatcattgagtctgaagaaccgatttttcaggatcgggtggttcatgaggttctgttgatgattcttgaacctttctttgaagctaggttttcgagtaagtctcatgggtttagaccaggtaggaatccacatactgtgattagaactatcagaagtaatttcgctgggtacttgtggtttatgaaaggtgatgttagtgaaatgttggatcatgttgatgttgatgtagtgatgaattgtcttcaaaaggttgtcaaggataggaaagttcttggcttgattgaatcttctttgaaattttctgataagagagtgttaaaaagggttgttgagaaacatggcaatgacaatggattggggacgaaaaggaggattgaacgtgaaaagagaaacaagacgaagaagaagattttgagtgatgatgagccgaaaccggagccttat

SEQ ID NO: 174081 - DNA, 411 bp, Arabidopsis thaliana landsberg
ataaaaaatcttggagaatacaaaatcgcgtttcttacttgctttgtaatcgcgctcagcatttgcgtcgagctttacggttttgacgtcgtgagggttctccgttccaccgcagattcaccggaaaatcgaaccgtcgaattggttcccaagaaaatctctttccatgagtccctttacgtgtcaatctccgaagataaagtcaatgaatggcctctgcaagactatttctatcgagatacttgccctaacgcgaaggtaaccgttggtaaagcaatccgagaaatctacaaggccaaactaagtatcgcgccgtctctcatccggctcctctttcacgattgtttcatcgatgtcagatttttcttactttctcttgatgcattgagttttctttggaaattggcttag

SEQ ID NO: 174082 - DNA, 405 bp, Arabidopsis thaliana landsberg
atgggcaagcttgcggtacgaggtctcaagaatgcattggagaatccacattcggtaactgccagcgctaggacatcaacactggcccacaaacttctactgcctgccgcgatcaactttaccgagcggggatacttatcgatgccatacaaagcccatagtcgctatatggacggtaagacggtagtaatcaccgggccaaccggcggcattgggtttgctgcagcgtgcgaactatctcgtctcggagcccggcttgtccttgtcgggcgtgacaagcaacgtcttgaacaagccgcaaaagatatcgaagcttttgcaggcgctgattacggcattcggctgattgaagcagacctcatggagtccgagcagttgcgtcgcgctgccgatctgatactgagt

SEQ ID NO: 174083 - DNA, 503 bp, Arabidopsis thaliana landsberg
atgacttgtgcgagctccgatgataatgagagtgaaaaggacaaggactcggagtccttcgtggaggtagatccgacaggtagatacggtcggtacggcgaacttcttggctcaggcgccgtaaaaaaagtctacagagcctttgaccaagaagaaggcatcgaggtggcttggaaccaagtcaaactgagatgtttttcggatgatccagccatgaccgagaggctttactcggaggtcaggttgcttaagaaccttaagaacagtaacatcatcaccctgtataaagtgtggagagacgagagaaacaacaccttgaacttcatcaccgagatctgtacctccggaaacctgagagagtaccggaagaagcacagacacgtctctatgagggctttgaagaagtggtccaaacagattctcaagggcttggattatctccacactcacgacccttgcatcatccacagagacctcaactgtagcaatatcttcgtcaatct

SEQ ID NO: 174084 - DNA, 698 bp, Arabidopsis thaliana landsberg
tacctcgcatttccgatgcttccatcatcacggccttctgccattgagtatgtgatgagaaaatgttggagaagttggccacgcatgacgtggagactgtccccacactcttcgctctggccgacaaatgcgccagagccgccgagggccgtgcatggcactcggccccacaaaccggggctacccagtcgggtggctcgggtgccgtcccccgggacggtaagaataaaaagaagaaggaccgcgactaccagaagccacggtccacctctctagtcgttgcagccgtgaccgggggccggggcgaccgcaacaaacgcccacggtcgcagaggggtaacagcggctcatgccctatgcaccccaacggtcgccacatcaccgtggagtgtcgcgagatcattgacctcgcgaaacgtgtcagcgagcggcgcgagtagtcttccagggacggctccccacctcgtcgccgacctggcaaagaaaaggtcgacgacggcgaggtggccgcggctgaacgggacctcgggtatcagtcacccgagcgggacctgaaggatgtctttgccgaagactcatactccggtgcagacaacaagatggacccccagagggaccccgtactccccggtctatggggccgaagcctaccttcccccggaaaaccttctggactccccaagggtcgaggcttctga

SEQ ID NO: 174085 - DNA, 612 bp, Arabidopsis thaliana landsberg
attgatgcgttggtgaagtctaattcacttgatttggcttacctcaagtttcagcagatgcgtagtgatggctgtaaaccggatcggtttacctataatatacttatacatggtgtttgcaagaagggtgtggttgatgaagctattcgattggttaaacagatggaacaggaagggaatagacccaatgtgttcacatacacgattttgatcgacgggtttttgatagcagggagggttgatgaggcgttgaagcaattggagatgatgcgggtgagaaagttgaatcctaatgaagctacaatcagaactttcgtacacgggattttccgttgcttgccgccgtgtaaagcgtttgaggttttggttgggtttatggagaaagactcaaacttgcaaagagttggttacgatgctgtgttgtattgtctttcaaacaactcaatggctaaagagactggtcaattcttgaggaagataggtgagagaggttatattccggatagctcaacattcaatgctgcgatgagttgtctcctaaaagggcatgatcttgttgagacttgtaggatatttgacggttttgtcagccgtggagttaagcccggattc

SEQ ID NO: 174086 - DNA, 1395 bp, Arabidopsis thaliana landsberg
gtaaaaatgggatttttataactatccaaagtttgaatgcaagaatgggcaggtcttgaaacgttataaagcgtcgttctaagtgggcaaaaggggttacactcagaaaaaaggatttgattatgtgaaaacgttctcaccagtggcaaggatggcaactgtcaagttcttactctctgttgcagctcctagaaaatggtttttagaccaactggatatatccaatgcttttctcaatggagatcttcatgaaaagattttcatggccttgcctcctggttatgttgataaggatgggaagccatttccaccgaattcagtttgcaagcttcaaaagtctctgtacgggttgaaacaagcttcacgacagtggtttttgaagctctctcactgcttgatgtctatgggttttagaaatggaacaggagatgattctttattcctcaggagaacagatgatgcttacatggctatattggtttatgttgacgatataattattgcaagcagctgttctacagccactgcgtcttttacagccgctttgaaagaatcctttaaactgagagatttaggacctctcaaatacttcctaggtcttgaggttgcaaggacttctgctggcatttctatttgtcaacgcaagtatgtgttagatcttttggatgagacaggtcttctaggatgtaaaccatcttctatacccatggatccaagtcagaaactgaatctagaaactggagatcttttgacagatgtggagatgtatagacggctcgttgggaagcttatgtatctgacttttactcggccagacatcacctttgcagtttataagctgtgtcagttcacctctgcgccgagacaaccacacctcacaattgtctacaaagtgttacactacttgaaaggcaccattggtcagggtatgttctattctgccaattctgatcttaagttgaagggtttttcagatgcagactgggggacttgtactgattcaagaatctcggttactggcttctgtatgttccttggtccatctttggtttcatggaagtccaataagcaggaaacagtctccatgtcatctggagaatccgagtacaaagctatgtcaactgcagtcaaggaaatgttgtggcttcgaaagttcatgaatgatttgtggattgatgcttcagaagcttctgtactttactgtgacaacacggctgctatacatatagctaacaattcagtctttcatgaaaaaactaagtatttggaccttgcttgtcatcttgtcagggaaagggttctaaatgggcagatcaacactcttcatgtgcagactgaacatcatttggctgatgcgttaactaaacctatatatcctactcaatttttgagact

SEQ ID NO: 174087 - DNA, 1699 bp, Arabidopsis thaliana landsberg; identical to SEQ ID NO: 18924
  unsure (1)..(1699): unsure at all n locations

SEQ ID NO: 174088 - DNA, 965 bp, Arabidopsis thaliana landsberg
  unsure (1)..(965): unsure at all n locations
ctctaaggtaattcttagatcattgagctctgtaaccttcgggaggatgcaagcaagagagctcatgacatcattgacatgtttgctgacagaggacttcgttctcttgctgttggcagacaggtataatatttagtgccagtcccaaaactttgggattcatttgtgtttctttctcttttatcaatgctctttttcctattttttgaatttcagactgtctctgagaaagacaagaacagccctggagaaccatggcagtttcttggtctgttacctctctttgaccctccaagacatgacagtgcagagacaatcaggcgtgcccttgaccttggtgttaatgtcaagatgatcactggtgaccaacttgccattggtaaggaaactggtcgtaggcttgggatgggcacaaacatgtatccatcttctgctctacttggacaagataaggatgaatctatagctagccttcctgttgatgaactcatagagaaggcagatggtttcgccggcgtcttccctggtaaaaacaatcaaatcttctaccttcacaagtggttcaactccataaatttaactctgtttcatctgtctgattagaacacaagtatgagattgtgaagaggcttcaagagatgaagcatatttgtggcatgactggtgatggagtgaacgatgccccagctctcaagagagctgacattggaatnnnnnnnnnnnnnnnnnnnnnngcagcaagaagtgcatctgacattgtactaaccgagccagggcttagtgtcatagttagtgctgtcctaacgagcagagccatcttccagagaatgaagaactacacaatctatgcagtttcaatcacaatccgtatagtgatgggatttaagcatcccgcactcatatggaagtttgacttctcaccagagggagtcttgatagttactatcatgaatgatggtctttct

SEQ ID NO: 174089 - DNA, 464 bp, Arabidopsis thaliana landsberg
gttccgccggcggcgtctatctggtgccggcgttcaccgggctgggtgcgccctggtggaacccgaatgcgcgtggcgcgctgcttggcctgacccgggataccggtatcgccgaggtggtcaccgccggcctggaagcggtgtgctaccagtcccgtgatctgctggaggccatggccgccgattgcgggcaacgtcccacggcgctgcgcgtggacggcggcatggtggtcaacaactggcttggccagacgctggcggatgtgctgggggtgcgggtcgaccgcccggcggttactgaaaccaccgcgctgggggccgcctacctggccgcgctgggggcagggctgtacgattcactggaagcgattgccgaacaccggccctgcgaacgcgaattctacccgcgcaaagaaaagcaggaacgccaacgccgctaccagggctggcgtgatgccgtggcg

SEQ ID NO: 174090 - DNA, 299 bp, Arabidopsis thaliana landsberg
ttattttgcacacttaggcatttaggatcatcttgtatacatattgcatgttttggtatgttttcaggtgtagaaggagcttacaaggatttctactcgaccctctactctatcaaactaggagggaagtagcagagcattctactcgaccaattcactcgatccaggcagccacagaggaggcaacagaccctactcgacccccctactggatcctctactcgacccgtttgctcgatcaagggcgacctactctacatgacttgtttatcattcaaggcgtcttcggatcctcctga

SEQ ID NO: 174091 - DNA, 1271 bp, Arabidopsis thaliana landsberg
ccccacacgagtgcaacacggagatgacgagttctgcaaggggaagctaaaggccttatggcagctactgctgcatctattattaactctgcaacacaagcccaactccaagctgaatctggggcggctctgcttcagtcttcaagacaatctctatcaccttacttaccaatactagatccaaatgcggctgctgcactagtaaagaagaaaagaggaagacctccacttatcagaccttcgaccaagccaggaaataaaacaccgataaggcttgcagggacaaaatcatcaaaaaggcaacttattaccattcaaaattcaccaagaagaagaattctccagagctcatcaaatcttggtgaagaagagttaaataacggtgtcaacaaaacttttgggcataaaaagaaaatactccaaggccgactaaatggggcatcgacaagcagagctcctcctaaacaaaagatcataccagcaatagtgaaagagagggtggattttcacaaaccaccccctcctcttccttaaaagttgcaagttggaactgttgtgggctggggaatcccatgacagtccaaagactgcgtgtgatacaaaaaagtatctcacctgatgttttattcctcatgaagacgaaaaatccggatgatattgtcactaagaagcttcagtggatggactacactaaccacagattcatctctcctcacagtcctggtggtggaggactcgctctctactggaaacaacatgtagaattggaaattttaaactcttgtcaaaactatcttgatacatctattaaatctgaaggaaaaatggtttttgctacttttctttatggagaacgagacagaactaaaagaaaacttatctgggcacaactgacagctataggaacagcaagagaggttccatggtttctcactggtgacttcaatgatatcattgactccactgaaaagactggtggcccaaccagacctgaaggctccttaattgacatgcgctccttcatgttagagtgtgatctttatgatctccaacattcggataaccccctgtcatggcgaggcaaaagacatgagaacctaatccattgtcgattagatagagctgtctctaatggggcatggacagaagcttacccatcagggagatgtgagtacctcaactttgaaggctcagactacagacctctcatcacttcttttgtcctgaaaagtaaaaagaaaagggtatctttagatatgccagaagactga

SEQ ID NO: 174092 - DNA, 742 bp, Arabidopsis thaliana landsberg
atgaagctaaacgtagcaaagagatcgtataactttctccggagcttggtgtgtcgcccaagaagcaaacaaatcggatatattttcaattatccaaacttatttctaaattatctgtcttccgaactatagatatataaataaaaacagtttatacttgagcgtcacgatagcaaattgttatctgaagaatttgctatatatacgaattcaagaggaagaatcctaaaagcataacaaaaaaaaaagcagagaaagaatacaagaaaaatggcgacatggtttcacatcttctgcgtctctttcacagtcaacttccttctatatctcttcttccgcagaactaacaacaatcttcctctacctccgaaccctaatttcttccccatgcttggtcccttccagtggctccgccaaggcttcgatgatttctactcctatctccgctccatccaccaccgtctcggcccaatcatctctctccgcatcttttccgtccctgccatcttcgtctctgatcgttccttggctcacaaggctcttgttttaaacggcgccgtattctctgatcgtccaccggcgcttcctaccggaaagatcatcactagtaaccaacacaccatcagctcaggatcatacggagctacgtggcgacttctccgtcgtaatctcacctccgagattcttcatccatcccgtgtcaaatcttattccaacgctcgtcgctctgttcttgacaacc

SEQ ID NO: 174093 - DNA, 977 bp, Arabidopsis thaliana landsberg; identical to SEQ ID NO: 24601

SEQ ID NO: 174094 - DNA, 315 bp, Arabidopsis thaliana landsberg
tgctgtcattaccgatctaaagcagtttctgagagcaagcgtcacaatcgccatggaagctgggagaatggatcagccttgcatggcttgtatcaatagccagcctttcgtggctgatactgagccagtgaagaaagccagtggggacatgcctgcggcgccgacaggaagcgggtacttcgagtgcaacatctgccttgattttgcagcagaatcagtggttactctcatgtggtcatctctactgctggccttgcatctactattggctgcgccatagggtggagtcaccgccagcgacaacggcagttcggc

SEQ ID NO: 174095 - DNA, 444 bp, Arabidopsis thaliana landsberg; identical to SEQ ID NO: 78428

SEQ ID NO: 174096 - DNA, 573 bp, Arabidopsis thaliana landsberg
aaaaaaaatttctccccccctaggagaagaaaaggagaaaaaaattttttttttttttttttatataaaaatataaaaaggggtggtatggtgttttagtttaaaaaaaaaggggcttgggggacttaaagtatttccattgacggcccgggggggcatttttaaaataaaaaaagctgggaaccatgttcgggtttttccgtggccagggggcaaaacccaggattatatgagaggaactcaaagccttgtgtaacacgatcagagacactaccatcttcaactctggtagatcaaagaacaacttcatcctcaataccgccattcgctattttcaaagagccattgccaatgtaccctacgctagaaagaaatccgcccctgtggcgaaccaagacatggagacgttagacctggcgttgatgagtttcctccgttacaccaaggacggaaaaaatatgaaacgagatgccaatgacacaccccggtcaatgtctctcctcaatcacctatgcagctacagaggatgggcaatggccaatgacaggaagaaagaggagtggtgacgccgat

SEQ ID NO: 174097 - DNA, 1163 bp, Arabidopsis thaliana landsberg
ttctttcccaggggggattcatttctccttgtaaaccccggcattaaagagcagggtgactcccatgtaacatttcccctcttgtatctatctctctgccaagcaagaaacaataattaatgggcctcaacgatcaaaacactgaaccgcttttcgcagaaaaagatggagactgatgactactctaggctgctaagtgtcgctgagaggacaactggtctctacttctcatatgaaattaacttgactctcacgtaaataatttctcttcttcttaatttgtgccaactctggaaatgctagattgtaaaaagagattaaaaaaaaaagttgagattttgctaatcatgtatgttgttgtttcagtgcacagcgcttgcatgatttgggtgatgagtctaagttgcttcctttgtggagacaggtatccatccatacgccctttttgttgcttgtttgtgtgcaaactaacctttaatttacatctttattggcaggctgagcctagatttctatggaacaattatatgttagaagttcttatcgataataaggttagtgaactcttgttcaagttcactcctctgttttctgtacttgcaaatatatatcaccctgtggttgttttaattttgtagcttgatcagttcttgcttcctgtaattcaagggaatatcctttttctatcagttcactattcaaatctttttcctggatcatgacttcagacaattttccttaaccctgcatcacgttttcatagttttcaaacagccattggaagagatatcgttgacattactctgattgctaggaggtgctctagaagaaatggtatgcctttttttttaacacatgatgacactttattttcaagtagctagctccgttttatagtctacaaaagtgggcaaaaaatctttagctttagttttgaattcagatgatatgcctaattgtgattgtgtatctggactacatttgcaaggtacgcgcatgtggcgacgaggagctgaccctgatggttatgttgctaattttgtggagtctgagcaaattgtgcgcatgaatggatacacatcatcatttgttcaggtgatattgttacatgttttcattcacatattttcttcttctattctttagggtaaggtgattttact

SEQ ID NO: 174098 - DNA, 567 bp, Arabidopsis thaliana landsberg; identical to SEQ ID NO: 69713
  unsure (1)..(567): unsure at all n locations

SEQ ID NO: 174099 - DNA, 378 bp, Arabidopsis thaliana landsberg
atgtcttcccctgtttcccccgcttccaacctgcgcgcctggctgagcgtgtgccgctggccttggcgccttcattttcaacaccagcgagtttgtgccggtcgcatgctcggcgacatcggtgccagctttggcatgccggccgagcaccgtgggcctgatgttgaccatctatgcctggatcgtggccctggctcgctgccctgcatgctgctgacgcggcacatggagcggcgcaacgtgctgatgggggtgttcgctgtgttcatcgccagccatgtagtgtcggggctggcgaacagctttgccatgctggttctcagccgcgcgggcgtggccttctcgcacgcggtgttctggtcgatcacggcggccctg

SEQ ID NO: 174100 - DNA, 303 bp, Arabidopsis thaliana landsberg
cacatggataagaaagtttcatttactagctctgtggcacattcaactccaccataccttagtacttccatctcatggggacttccaaccaaatccaatggtgtgactgaatcactgagtttgaaggtggtagatgcaagaccagaacgtcttataaacacaaagaatatcagtttccaggaccaggattcatcttcaactctgtcctctgctcaatcttctaacgatgttacaagtagtggagatgataacccctcaagacaaatctcatttttagcacattcaggtccgttttaaacaact

SEQ ID NO: 174101 - DNA, 2065 bp, Arabidopsis thaliana landsberg
gtttatcgaaggcggttcttggtcaaagcccatacatctaatggagggaaatactaactggaagcctaatgaacaaggcggagaccgcgctgctgcgaataattgtattgattggagatcacaacttgagcctgaattacggcaaaaggttctttcaaaaatgtaagccattctttcatgtttctttttttggactcattgttcttatttgattattgacattcatgaaagagagataggaggttttcttggtcatgctttcgatgtgatccttgtagcttccacatgataaagattgcaacagttaaagcataagagttgtgcataaatgtttattatagttgacaaaacctaacttcaaccttttgtactttaagttttgcatattcttttaacctcattagctgcatttatgctcttcctcactagaagaatcttgttttactctcgcttctattggtaatatttggcacatatgtacatttgtttcagtatttgttcgctaaacgtagcgccttgttgtatggtttcatgtgtatataagcgaaagggacttgtaaaaagcgactcaaggacttgttttgtagctctaggtgaaaagggacttgtaaaaaagtgtagctctggtttactgttgccatcgcctttgatagctctgatttattacgcgtcatgtatttcagaaacaatgaaacatatcttccattactaataattttttaactagcgagtcttgtgggataaaatagaagagattaaaagttttgaggaacctgtcagacagaacattaacttcctctagagtatcagttgtatccaaattcttcatagtattattttgtttagccgattattgttcaaactgtcactgatatttttgttctcatctatgtgtagagttgaaaagttcaaggaaaagtttcctacagatgaagaatacaagattaacgacattgcttccaaatttgaagagaagttttatgacatagcaaccgataaggtgctaaaatacaaattctttctccatctattaacttcagaatctgaatttgatatcttactcattgtctccttgctatgtctcagaatgattaccttcggaaactcagtgaaaagctgcattatatactgagaacttacactcgagttccaggtaataagtttttggtttcaaaattacactattttagcttaataacaaacaaattacttactaactttttttttcgatgtctttatctaaactaaacatcagcttctcaagtagttatgaatcaagcgcaatctcttcccacctcgttgccatatacgcagactacaacaaaccaccaatggatacagcaaaatacacacagaaatctcaacattcctgtgtcatcttctttgccaagtcaggtacatggtaggcaacagcttcttcctccgcagcaacagcctcaacagcctcaaatgaatcaaatccgccatgggaatctacgaccttcgcacatgcagcaacaagctcagccaccgcagccgcagcatcatccgcaaagtctgttgaaacaacctattcaacagtcctttccacaatcaagttcaagccaacaaaactctcaatcactgccaagaaatcagtttccgacacaacgggtcagttctagtcatcaaaaacagatggttctgccgtcccaaagacaagaacaagagcaagtcattaatcaactgatgaatgttccaacatcacgacctaacaacagagaccaacaaggagcttttcgggtatcatcgtctcagcagaacaatactgttggcttacatgcaatggctcaacagaagaataacctccaaagtatgactagaggtcaacaagtaggacaatctcaaccaatgatgtcacaacaataccgacatcaataccccatgcagcagcatcctcagaacagaaacttacagaaacatttggattttgtacaaaacaataccaatcaatttcaagcagcatgttcgttgtgcccaacacaaaacataacagatcatcagaaccagccccatcaattacagagagcaaaatcctctaggatgt

SEQ ID NO: 174102 - DNA, 1623 bp, Arabidopsis thaliana landsberg
  unsure (1)..(1623): unsure at all n locations
ggacgtgtaagtaatgattaatggagtagaggtgcctactgattttgttgtgcttgagatggatgaaaaatctaaggatcctctgatcttaggaagacctttcttggcttcagttggagcagtaatagatgttaagtagggaaaaattaatcttaatctgggagaggatgtcaaaatgaagtttgacatcagggacgctatgaagaagccaacaatagaaggacaaaccttcttagttgaggaaatggatcagctaggtaatgaactgctagaggagattgttgacagagatcaccttcaaactactttaaccaaaagtagtgaaactggatttctctccagtgagaccttgagctatgagatgtcattagactcacacaacgaagtaccaggatcagagatatttaaaggtgacattgcgtcagaaacagaggatgttacattgaacgaggaaggctcaactgatactcgactagaatgctcaaccaaacagctagagtcaagcgtgagggcatcaaatgattggttagaactcaaggagaggtcaaaatggcacgacaaagctataatagagctaacacacaatgtgaaagagttgaaggatcaagtcaaagagctccatgggaaagccaaccaagctccactcgacatcaaggacgtcccaaatgatgaagttattcctatggttagaaaagaaggatgtgaattcacatcaaaacagtccagaaaagacgactatcaagatgatgaaaaaggagcttaccaagaaagggccattgagtactcacttacagacttgtcacgagagcatgctgaatttgatgttgtatctactaaggaaggagaggagacgtcaattctactctattaccctccttgagcctaatgagtgtgaggagtcaagctagagacttaaaacaagctcacttgggaggaagtcccatgcctatccttgtatatagtttttatttttgttacttttgatttgttttggttttgtttttgattctcaggaaatgaataacagctggagcaacaacagggatgcaactgagtgttcaaataaaaaatttcaaatttttgatgaatcactctatcgcaagacgagagtaaaagctcgagtgtgcgatctagtggttttgggacaacatcattctcaacgacaatgtcatactactcgatcgcaacatggcaatggtgtgatcaagtggtctcctagtggaattgcccaaaccactcaatcgcaaggagaagtgaaaacgcccgacatgacttcaatgacaacccgcctgaagacatgtcatccagccaccatgacattgctctgccaaggcaattncacctattaacagagggcccacaccgttcctcaagttcccgcaaggcacttgtctcatgagccaatggaacacaggaggaagaatgctagaaatgtacattcatcaagcaaagggtcggataatgtcgggccagagaacacatgagcgtcgtgctccacaacctgttggggttgcgatcgagcaaaatgacgaagagatggcggagccacatcaggaaccggtcatgcttgcgaggtacactcaagcagatatggatgactacatctccaggacattctactga

SEQ ID NO: 174103 - DNA, 607 bp, Arabidopsis thaliana landsberg
  unsure (1)..(607): unsure at all n locations
atttgtaacaacaacaccgcagcacgctctcatagtcgtctctcatccacaaaagatctgaataatcgattgcaatctaataacagactgattttctccaaccctgtctactcagtaacgacgccagtagccacagtcctggtnnnnnnnnnnnnnnnnnntgctgcattacacctggccctgaaatctaaatacgacgacgagatacacaggaaagtggagatgttcctcgagacctacaggacgctgaaaccgagaaggtacacattctctgaagtcaggaagatgacaagacggttcagcagcagacttgggcaaggcgggtttgggagcgtgtacaaaggcgagctgccgaacggaggagtgcctgtgcctgtggcagtcaaaatgctggaggactcaacgggggaagaggagttcatcagcgaagtcgcaaccattggaaccatccaccacgccaacgtcgtccggcttctagggttctgctccgagaggtcaaggcgtgctctggtatacgagttcatgcctaacgcgtcgctggagaagtatatacgctgctcctcccaagaacagtcattaaaaacaacgaccagtaagatgctggaga

SEQ ID NO: 174104 - DNA, 991 bp, Arabidopsis thaliana landsberg
tgccataaaccgtctctatcttcatcgcctcctcaagaaaatgtcttatgagcttctaaccgataacaaacccaatgtttcgtactttcgtgtatttgggagcaaatgctacatcttggtaaagaaaggtagacattcaaaatttgcccccaaagctatagaagggtttttactaggttatgattcaaatacaaaggcatatagggtattcaacaaatcatcgggtttagttgaagtcgctagtgacgttgtatttgatgagactaatggctctccaagatagcaagttgatcttgatgatgttgatgaggatgaagttccaatggccagaatgagaactatggcaatatgtgatgtgcgaccgcaggaacaacaagatcaagatcaaccatcttcctcaacactagtggaccccaactcaatatgaggaacaagtgcctcaagatgaagtcatgaatcaagggggagcacatgaagaaaaggattaagaggaagaagcaccacaggcacctccaactcaagtctgggccaccattcaaagagatcatccagtggaccaaatcttaggtgacatcagcaagggagtaactactcgttctcatattgctattttttgtgagcactactcctttgtttcttctattgagactttcaaggtagaataagccttgcaggatctgaattaggtgatggccatgcaggaagagctcaacaacttcaagagaaatgaagtatagagcctagtgccacgtccaaagaaaaatgttgtgggaaccaagtgggtgttccgcaacaagaaagacgagtatgggggtggtgataagaaataaagctagacttgtggcaaaaagttatgcccaagtcgcagatttggattttgatgagacttctgctcctgtagctaggctagaatctattcgcattttattagcctatgttgctcaccattcgtctaagctctttcaaatggacgtgaagcagcaccttcttc

SEQ ID NO: 174105 - DNA, 396 bp, Arabidopsis thaliana landsberg
aattgataagccaaaacatacgtttatatgtcacaaccacgtagacttattaggctctgatgtgtcgtgaaaattcatgtgtgagtgtgtgaaaaataaaaaagagcgaggtaggtttactagcatcctgtttcgtcgttgcagtttgcgatgttctatccaaatgtattcttgataccagtgcagggtagggacgactccatcctattccccgctcattacgttttggtcattgcgtccttgagtttcaccacatcgaaaggtagagtatctcccccatatggcgttgtgtctggtaccacatttgtgctggagagccaaggtaatcctatcgtcggtttctatcggacaaatggtggtgctttccatgccattggggtttctttctccccgata

SEQ ID NO: 174106 - DNA, 2251 bp, Arabidopsis thaliana landsberg
aaatgaagatttacatgacgcaaatcgtgccaactccacgacctgtgctcgggttctcaaatgaaaccactatgactctcgggaccatcaaattgctagtccgagcaaaaggggtaacaaaaatcgtcgatttttctgttaccgaccagccgaccgtgtacaacgcgattatcggcaccccatggttaaatcaattccgagctgtcgcctcgacatatcatctctgcctgaaatttcccacaagcgacggcgtgaaaaccatctggggaaatcagaaaaatgcccgcatttgcttcatggcagcacacaagcttaggaaccccgtcaatgagtcgacggccgacgcgaatcataagaaggccaagcttggccgagctgaagaaaagtcaatttccgagcagttatagcagctaaggatcgaggaagctcgggaatctacaacgccaactcccgatccggtcatcttaatctttcttgacaaagcaaagcccgagcgatgcgtaaaaatcggcggagatctgggagaagaactaacagctaaactcaccgccttcctcaaagaaaacgttagtacattcgcctggtccccagaagatctgcctggagtaagtgttgacgtcgtatcacatgagctcaacatcgatccaactttcaaacccatcaagcagaaaaggagaaaattgggtcgggagcgagcagaagccgtgaaagccgaggtagagaaattaatgaggatcggatccatcaccgaggcgaaatatcccgattggattgcaaacccggtcgtagtaaaaaagaaaaacggcaaatggagagtctgcgtagatttcacagaccttaacaaagcttgcccaaaagacagcttcccattaccacacatcgatcgcctcgtggaatcaacttctggaaacaagctactgtcattcatggacgctttcgccggttacaaccagatcatcatgaaccccgaagatcaagaaaaaaccgctttttacatagaacaaggcattttttgttaccgagtgatgcctttcggactcaagaacgccagggcaacctatcaacgcttcgtcaacaaaatcttcgcattatagatcgggaagacaatggaagtctacatcgacgacatgttggtgaaatccatggcagagaaagatcacataacccatttccgcgaatgtttcaagcagcttaacctctacaacgtcaagctcaatcgtgcaaagtgtcgcttcggagtaagatccggcgagttcctcgggtacctggtcacgcaccgcggcatcgaggcaaatccgaagcaaattgaggcattgttgggaatggcgttaccttagaacaagcgagaagtgcagcgcctaaccggaagagttgcggcccttaaccgtttcatctctcgctcaaccgacaaatgcttggccttttacgatgtgctttggggaaacaagaagttcgaatggacgacccgatgcgaagaagcttttcatgaactgaagaagtatctggcaacaccacccatcctcgcaaaacccgtaatcggagaaccgctgtacttgtatgtttccgtatcggatactgcggtcagcggagtgctagtccgagaagacagaggtgagcagaaaccgattttttacgtctcgcagactttcaccggtgcggaatctcgctatctgcaaatagaaaaacttgctttagcaatcataatgtcggctcggaagctgcgaccctactgtcaatcccattccatcatagtaatgggatgcatgccactccgcgccatcttacacagtccaagccagtcgggtcgtctggctaagtgggcaattgatctcagcgaatatgatatcgagtatcggaacaaaatgtgtgcaaaatcccaggtcttgctacctacaaaggaggctcatgttcaaaatcaggagaagtatttcgactcgttcgagttgacatggattccccaagggcaaaatacatcggacgacccttagctgctttgttttgaacatccgacccgaacttgaggagaatcatcctagtggagtttatcgaaaatccaagcatcgagctcgacaaagaggaacatgccttcctcgtacaagttgccgcagattgcgaagatgcctcggatgtcagctcggacctgggctgcgattgagaatggattgaacccatcacaagctacatatccgaaggaaaagtgccctcggataagtgggaagcttgaaaattaaagctcaggctgcacgtttcg

SEQ ID NO: 174107 - DNA, 849 bp, Arabidopsis thaliana landsberg
aggatgggactaaagaacatctcccacctcctcgtccaaatagtcaagccaatcacccatatccacaaaaagctcctaaatgtggcatccttaaaccttttatctttctacttccgcttttgttactttatctcattttctcatggttatgtttttgatgcagttactctttcttcttcaaacgcattatttcaacatgactacttatacaacactaattcacatccggtgattagcaccacccgtaagcatggattagtgcattgcgatgttagtataccaagttctgttatcaaaggtaaaatatgtgcttaagtttgctgtgtggactaatgtaataatctgaagatattgcttgtttgagttgttaataatgtggggtaatgaatttgtgattgtagaggaatttggtgtctcagagaactgttgcagcactagtagtagtagagataagcagaggactagaatcgttacagagacaaatgaccaagaaagttgtggaaagccacatagaggtaacaattttgcttgagattcctgactttgtgatattcatatactgattatgagtttgtttgtttgatgttggtttttcaattcagtggcgccaaatttcgctgaagtttacaattttataggaagtgtgtttgatcctaaaacaacaggtcatgtcaagagattaaaggaaatggatccaataaatcttgagacggtatgaaaaccaataactctgcacatgaacatgtcttgatttgaaaactaacgtttacacggttttttgttcaacaggttctcttactgatgaaaaatttatctgtaaacctgacgagtcccgagtttgatgaacaa

SEQ ID NO: 174108 - DNA, 1346 bp, Arabidopsis thaliana landsberg
aagctggggaccagcaaagccctttgacaaactcaagcagtggtctttgtagtaatccatctttaccagaagatgaatctaataatgtcaataaaagctgcagcaaaggaaatggtgacaaggacaacactgaacactgtagtgcaggagaagtagaatctgagcttgaagaagagaggcttgtaaagaggaaagcaaacaagatagatggaagagacttgcttgtaacaccctgcaagagagatatttataaaggaaagcaaggagggaataaaagattcaaatcaagaacagtatccttgaacgagaaacctgagatcaataatgccgcaaatggagtaggagataaagacttgggtcatattgttaagacgattagatgtttagaggaagaaggacatatagacaagagttttagggaaaggttcttgacatggtatagcttaagagctactcaccgagaagtaagagttgtgaagatctttgttgagacgtttatggaggatctgtcttctttgggacaacagcttgtggatacattctcagaaagtatactgagtaagagatcatcgacaaatggtgtagtacctgctgggatctgcctcaagctttggcattaaaagcttttgaaatcggtctatttattaactcgcttgatattgtaaaccataacgataattttggaatgaaattatgtaagtacgcatttccaatttctttctgatgcttagtgaaaaactcaaaaatgaataagcctgatttcaaatgaaccatagtctgacagttagagccgggagattacacacaaacattaacatttttaaatctcgaaaaagaaataactcacgagttgtttccaaccaaattcagagagtacaagtttgttctctataagacatcagaacagagtctggggaagaattggagtaactagtaactactatctgggaaatgcagctctagccctcatctttttgactagtgttcaagacagcgttagagggacctgcaagatatattcaaaggttggtgagcagaaatcgatcaatgcgaaaacaaaaactggatgcagagacacgaaagattctagttaataatcagaaaaaccgaaactgcttaatctcatcagagtaaatgatccaagggcaagtaaattctaaattcagctgttgagagttgagacctattggtaaataccagcacataggtggaatgatcggttttacgcagtaactcgcacaacttgatcttgtaagatgcagattcaaatgtgccaaggcaagaaaactaaaaaacacaagactggttccatttcctctggattaactaaaatagttcttcatgca

SEQ ID NO: 174109 - DNA, 1724 bp, Arabidopsis thaliana landsberg; identical to SEQ ID NO: 28236
  unsure (1)..(1724): unsure at all n locations

SEQ ID NO: 174110 - DNA, 489 bp, Arabidopsis thaliana landsberg
  unsure (1)..(489): unsure at all n locations
gcgcttgacctatttacgttcgagcagataatgtccagcnnnnnnnnnnnnnnnnnnnnnnnnnnnnnnngaagcacgtggttaaaagttttgaactcttacaaaagttctcaaaagataaactgatctacggcatcaataccggtttcggtcctatggcccagtatcgtatcaacgatgccgaccggaagcaattgcagtataatcttattcgcagccacagctccggtatggggcaattattatcacccctgcacaccagggccatgttgctggcgcgcatgcatacgcttatgctgggctactcgggcattcatcccgatacggtgcaatttgatgcccgccttgctcaataacgaggcctacccctgtgtatatgcgcatggcggtgtaggtgccagtgttaacctggcccagttgccccatcttgctttaggcttgataaatgaaggaaacttttggtaccagggcagcgtaatgcctgctccg

SEQ ID NO: 174111 - DNA, 797 bp, Arabidopsis thaliana landsberg; identical to SEQ ID NO: 23525

SEQ ID NO: 174112 - DNA, 1329 bp, Arabidopsis thaliana landsberg
  unsure (1)..(1329): unsure at all n locations
aggtcaaggaggtaccttttgttcagcaaggagccccttttgaaaattcagataaaagattttgctgcaatggttcatgatagaatgnccgagtgcgtgtacactcaaaagctggtttcattcgagacgaatgtggttccagaagaagtgaagtatgtgcctgtgatggagaagggtcggaaggcgctggaagaaatcaaccaggagatgggtttagcctttgatgagcaagatttgcagtattatactagacttttcagagaggacattaagcgtgatcctaccaatgtggagctatttgatatcgctcaatccaacagcgagcacagtcgacactggttctttgctgggaacatggttattgatggaaagccaatggataagtctcttatgcagattgtaaagagcacttgggaggtaacaataaaggacttaagtcaaaatttctctcctttcctatagtttgaaatgtgtgttcgtataattcactcttatcttctgtgttgaattttgcaggcaaatcgaaataattctgtcattgggtttaaggataactctagtgctattagaggctttctggtgaaccagctacggcctctacttcctggttctgtgtgcttacttgatgtcagtgcacgtgatctcgacatattgttcactgctgaaacccataatttcccttgtgctgtggctccttatcctggtgctgagacaggtgctggaggtcgaatcagagatacacatgcaacaggaagaggttcttttgtggttgcatccacttctggttactgtgttggtaaccttaacatggagggatcttatgctccatgggaagactcgtctttccaatacccatcgaacctagcatcacctctacagatactcatcgacgctagtaatggtgcatctgactatggtaacaaatttggagagcccatgattcagggatatactaggacttttggaatgagactgccaagtggggatagacgagaatggttgaagccgattatgttcagtgcagggattggacagattgatcatactcatataactaaaggggagccagaggttgggatgcttgttgttaagattggtggacctgcttaccgcattggcatgggaggaggagcagcttcgagtatggttagtggccagaatgatgcagagcttgatttcaatgctgtgcaacgtggagatgctgaaatgtctcagaagttgtaccgtgttgttcgtgcttgtattgagatgggtgagaagaatcctattatcagcattcatgatcaaggtgctggtggaaactgcaatgttgtcaaggaaatatttatc

SEQ ID NO: 174113 - DNA, 1605 bp, Arabidopsis thaliana landsberg; identical to SEQ ID NO: 1164

SEQ ID NO: 174114 - DNA, 1840 bp, Arabidopsis thaliana landsberg
atgttcaagccctttggtttcgcaggtaaagttgttactctttcactcgaaaaaatgatattttttttcgttttacctgattgtgtttgctttgatatgagcagcagaaactggttctcgtctcctgacgacgcaatggttgcaactaggaaactcactttgcttgaaggaacgtataagcatcgctatgcaagtgactttcctcgctttctttcttattcatttggcacttaaatggtttggtgtagtaagaaacagaggatctaatgatgtagaagaagacttgaagaagcagagcataactgtgaagcagagcttctcttacaacatatctcttctctgctctgtttctatcttagggactcattgctttatcttgcttttgctgtttcgagacagcgtggtctcacggtgtgattcctctgtttctgtcttctccgctgaggtttcgcagtctttctcgtggttgtttgtttctgttgttgtggtgaagatcagagaaaggaggcttgtcaagtttccttggatgttaaggtcatggtggctctgtagtttcatcttatccttttcctttgatgctcatttcattaccgcgaaacacgagcctctcgggtttcaagattatgccgacttgactggtcttcttgcatccttgttcctgttggctgtttcaatcagaggcaaaaccggttttcatcttcttgaatccagcggtaacacagagccattactacttggtgaccaaacagagcagaacaagaaagattcttattcttcttcttccccatatggaaacgctactctcttccaacgcatcactttctcatggatcaaccctttgttctcccttggatacaagagacctctagaaaaagatgatgtaccagatatcgatgtgaaagactccgctcgattttgctctcatgcctttgaccagaaactgaaaaccaccaaagaaaaagaaggacctggaaatgctttcttctataactcggttcttcgctatgtgtggaggaaagccgcaatcaacgcggtattcgcagttgtaaacgcgagcacagcttacatcggaccatatctcatcaatgactttgtagagtttctaagtgagaaacaatcccagagcttaaaccatggttaccttcttgcactcgggtttctaactgcgaaaatcgtcgagacagttactcaaagacaatggatctttggagctcgtcagctaggactacgtcttcgagcagctttgatatcacatatctaccagaaaggtttagttttatcaagtcaatctcggcaaagccacacgagcggagagatcatcaactacatgagtgtagatgttcagagaatcactgacttcatttggtatgtaaacaacatatggatgttaccaatacagattttctcggcgatttatatcttgcaaaaacatctgggacttggagctttagctgcattggtcacaactttaatggtgatggcttgcaactaccccctgacaaggcttcagagaaactaccaatcagatatcatgaatgccaaagatgatagaatgaaagcaacttcagagattcttaaaaacatgaagattctgaagcttcaagcatgggataaccagtttctcaacaaggttaaaacattaagaaagaaagagtatgattgtttatggaagtctttgaggttacaagctttcacaacttttatcctttggggagctccttcattgatctctgtggtgacttttgttacttgtatgttaatgggagtgaagctaacagctggagcagtcttatctgctcttgcaacgtttcaaatgttacaaagtccgattttcgtttac

SEQ ID NO: 174115 - DNA, 1054 bp, Arabidopsis thaliana landsberg
  unsure (1)..(1054): unsure at all n locations
actgttaccaggtgcagcaagccttaaaacaggaaaggagaaacggtcatgtttggttctcacttgtagcgtcaagtaatcagtgagattcctgttctgtatctgagactctgagtacttctgatattcaatattttctgtgtcttttcatttctatctcttagtgacacggctttactggtttcagggaaggagaagcatcattgcctcagattccagcaaactacttgagaataaggtaagttgttctttttgctttgctctgtttcttgtcactaagtttttatatgtcaactgtgaagtctgtgatcaaatattacttattattgcattgatggctttgaattcgatttcgcagttgttttacccgagtttccatgtcatgtttgttttctgtggtatacgtttcttgataaagccttcttcttttttggcccatcacacctaatccttgactgggaggtgtctattttcttgtttgggagaattatattgtgccagagttgatcccctgtctcattatatggtagggatggaaatattccagtttcttttatccaaaagtacctcatgaggaagcttgatctcaagagtgaacatgagctaagcaatcttatcttatgcagcggctacttttctgttttatatgaagtatccactcggtctaatatcgaatcacataagaccgtatgttctatacattggttcaagtcttgtgcgtatcattgtgactgtaaggtccccataaatgtttaaactaaagttaactctcccttttatttccgacttgtgtaccgggtgatatcttatgatctgggactttttcgacccaccggtgttgaaccttaactactctatgttttttttttgtaaacaggnnnnnnnnnnnnnnnnnnnnnnnnnnnnnnnnnnnacgttgcagcttcacagcttagtagacctatggttggaaacaacttctaagcatcaaagagtcgctgcgtcaataggttcatctgcaaaggaatttgtaatggtgctagtttattctcggaagctccctggatgcaacaac

SEQ ID NO: 174116 - DNA, 1237 bp, Arabidopsis thaliana landsberg
aagtgcgcgggtcgcctgcttccgcctccggacactctacttgagtccagaaaatatgccgagacggcatctcattttctctgggtaagtatttttcgagccgtttctgaaaatagttattttacgagccgtttttgagtatgattgcatatgtaaatttgaggttgtgggttcaatgaaccggattgtccagtctttcgactcggctatgcggagtaatctggatgcattcaacaagctggcggcggctgaggccagagcagagaaagccgagcgggagagatgcggcagtctcttaggccaccgaggcgaaactggcgagcgaggaggctaagagcgaagcctatgtgaacaaggagaatgctctcaaattagctgagagcaatctgaggatagactctgaggtcatccgctgtaaacgaatgcttgccgaggcaagggggctcagagacagcgaggtggctcgggctgcgcagaaagcaaggcgagaagcttcagaggtcttcctcgccaagtttaaggtggtcgaggagaaaatggctcttctcgaggacgccaacgatcagttcatgtatttgtctcaagctcgagccaatgcgcagctgatcaaggtgcttgaggagggtgggtctttagaagccgagaagtgaaaggccccgatccggactgcctaagtccggacgagttctctcgacccaagccactaagtgacttagccctaaccgtttatgaggttctttcctagtctaatccgttccatatgatttcgtgattcaatatatgagacgaatagagtaaacaaacaatcagatactttattgattaagcaaaggattcgatacaacctatgagtttgcatataagctattacaagtcatataatcgatccctagactatccgaactatcaccacccatcatcccggccttgagtctctcgcgcctaagccaagtccttcccacgatcaccattcgttcctgaaagtcatagagccataagtaatctcatttacttagtcatatgcaagtccatgcaatgctctatatgccatacactactcggatccgtggagaggattcagagaggggaagatcgcgcatcagtccggccgattctcggcaggtcagttaagacccgccggtcctccgccgagccgcgtccccgcctcagccgatccctacccggaccgagtcttgtgtaggatgcacatgacccggatactacccagccctctagt

SEQ ID NO: 174117 - DNA, 357 bp, Arabidopsis thaliana landsberg
atgacgggcaccgccagcttgatcgcacgtgagtctccagccaggaaacgcctgctcgatgcacgcgccacatttgtggtcgccgatatcatgtccgaccgtgcagcgcgcagcacgacgttcggattgtcgaatgaattggcgaccggctactggaccgcagtcaagacaggcaccagcaaggatatgcgcgacaactggtgcgtcggattttccgaccgatatacagttggcgtgtggatcggcaatttcgatggcgaaccgatgtgggatgtttccggcgtgaccggcgctgcgccgatctggcgcgatgtgatggatttcctgcataaaggatcaccgagccgcgcgcccaag

SEQ ID NO: 174118 - DNA, 459 bp, Arabidopsis thaliana landsberg; identical to SEQ ID NO: 72056
  unsure (1)..(459): unsure at all n locations

SEQ ID NO: 174119 - DNA, 723 bp, Arabidopsis thaliana landsberg
ttgtgtagcttacaatgttgtggagttgcataaaggcaaatgggacgagcttggtgattgtatcttaacgctagtgaatagcaaagaacctgtcaaggcctttcacgtctttatcgatttgccaccagtctacaagagtttcatagacaagtttaagcacaaaatcttagatgaagctagtaatgtctttcttgatccttatagagttgaagattggagcttggctttacaagtttttgttaaaatgtggattcagcttgtggatacaaagatgatgttggtgttaataaaggcgttaatggagattcggattacatctgttgtgaattcagtgaagaagctagtggagaaggaaagagaagagtttttggtaagagggcttgaagatttcgagagattcttctcgcgagagatgaatctgtataagtatagtaaggatcaatgccaatttgtgttggatttaatggtcaagatcgaaggagtcgggacacatttgaccaaggagaatgtggggaagatcaaaatgctggttacagaaccggagaaaccacaggatgatgatcttaagtatagtagagaagagtttggccgtggctggtatgatcatttgcagagtttatcttcactggaggtggggaagatctttgctttttattaagctgacccaggtccagagagatggcaatcagacgactcaaagtcttctgatatgataccatttca

SEQ ID NO: 174120 - DNA, 456 bp, Arabidopsis thaliana landsberg
ttttctgttcaacaaatacgtgaggctgacaggtatactatagagcatgaacctgtgacttgtattgatttaatggaacgtgccgctaatgcctgtgttagatggattgcggataggtttgataataaaaagacattcaggattttttgtggcctaggcaacaatggtggtgacgggttaacggttgcaaggctattagctggccttaattacagggttgaggtgttcatcatcaggcattctgtgaaagcgtctgacgattttcaaattaatttgaaacgactgaggggtattgacaacattacaatcactgagctcaatgaattttctggccctaatactttagaagcaggggaggaagagagccaggtaattattgatgctatactcggtgcgggacttaacagacctgttcagggtttgattgcccatatagtcaattatatcaatcacata

SEQ ID NO: 174121 - DNA, 703 bp, Arabidopsis thaliana landsberg
  unsure (1)..(703): unsure at all n locations
taagtttttttttttttagaaattaatatcgcaataaaaaaaaaagattaaactcaacttctgcagtttgtctntgagttaatattttttttacagttttcagcatttgcttcattatccactttgggagctgcaattggagctttgtttagcggtaaaatggcgatcatccttggcagaagaaaagtactttaattacattttcactctttcatattcttaagtatggtttgataatcaaattttaccttttctgactaaaatttttcgtatatatgtttttgtatattttcgtatctgtttgctactaatgacaatattgcttttcacgaattaaagacaatgtgggtgtccgatctcctctgtatcattggttggttctccatcgctttcgctaaggtatgtgaaatattccttaccacaaatttgggaccgcaaacttattatttgtactgttagtacttagaagattaacaaactgtttatcatgaaacccaagaattagttaatcatttatattatgtttggaacacaaaaggatgtgatgtggttgaacttcggaagaatctcctcagggataggactcggcttaattagctatgtggtaattaacctaatatatttaatacagcctctcattaccttgtttttatttacttaaatcatcaatatataaagttattttaaaataatttaatgctat

SEQ ID NO: 174122 - DNA, 2646 bp, Arabidopsis thaliana landsberg
atcggagaagggttaacagctcgagttccgtctccgagagagtaacctccttggttcttgctgcaaaccatcgaaagaaaaataacattagtatcgatactaacagttcagcaaaagcagtcaagaattcgacagaaacaacaaaaaaaatcaagagactcaggtctccatctgacccaagttggtagaccaggtcctcgtcatccttgtgggatcaaaactaccgactgaatgacgatctactctgaagaagaagtacttggatcgcccattggtttctcgacaggctttcaaaccgccaaggaccagagatccgggacgtgcactgatgtagtacgtcccttggtcactcctagcattggtcttgacctggcagagctgaagcaggtcttggcagctgaattctctatttattttcgagcctgggtgaataacgccagcacacggcggacgaagttcggacacatctgggaaaggcgaggccaagacagtagagcatcttgaggatacacgccggaattggaaaaaataggccgcatttctcgaagaaattggcataagcgcagcaccacccgaccggcacgttctcaggatgcagcggcggccttgggagtatcatatgtacctccaccgaaacctggcatctcctccggaggtcgaccaggtcgtcattcgtcatctacgtgcctctcccttgcttggcagcctttttcttcttcggtttgtcggctctgattgacggcagacgaattggacccattccgcctagggttatgccgcgtctttgtactcgcggcggtgacgccgccgacctcgtctcggacgaacttgaatcgtcgccgtaactgtggttgcttttgttctgagaatcttcgaagtcgctcatctttgggtttcgacggagaaggacgagagaggtgaagaaaaaaagcaaagaaggcagatcgagaaagagggaataacagagaaacgaaggagatagcaaaaaaaacaaaaacgtgatttttctacttctacaaaacaaagcgcagtaaataataaaggaggagagaagttaccttaagagttgtgtgagttgatgtgacgtcaagtttcccggaggactacaagaaggacatagcgatccacctgttggagggcgatgcgcataactggtggcttgcggttgataaacgcaagggtgagcgtgtcgagaccttcaaggactttgaggacgagttcaacaggatgtactttccgtccgaggcatgggaccgacttgagagtaacttcctggatcttgtccagggtcgtcgtaccgtccgtgagtacgaggaggagttcaacaaactcaggcgctacgtggggagagaactcgaggacgaagcggtgcaagtccgtcgattcctcagaggccttcgggttgagttgaggactctttgctcgatctgtaccttcaacccagtctcggaactggttgaaagggcggcattgatcgaggcgaatctcgatgaggaggaaaggatccgctcaaagggtggtaatccgaataatgaaaagaagatgaagttcgaccaactcgacgataagaagaaatcgtagggaagtcgggacaaatgctctcagtgcggaaagaggcacttgggcgaatgctggaaagcaaagggggcatgtgagaggtgtggcagtatgagtcacgacacccagcattgctcggggacaggacaaaggcagacgagagggacgcgtgatgaccaaaggttttgctaccgctgtggtaagacggggcattacataagggagtgcccgcaactacgggcggaagggctagttggtgagaaagtcaaccgcggtggtggtgagccatccgaacagaccaagagagccgccgtggcgccccgtgtgtatgaactgacgaaggaaactagcgaggccagtaacttcaatgcgatctccaggaccttacaaattggtggtattgagaccacgatcctattcgactctagggctatgcatagtttcgtgagtccgcggatgatcggaaaaggaaagttccaggaggacccaagaatggacccgaccgtagtgaatgcggtgggcggacaggatatgatcccgtagggacaagtctgtgggataccggtgagtggcatagaaatgttggttgacctgatcatcataccgcttgagaaacgtgaactaatcttgggtatggattggttgggcaagtataaggcaatgttggactgtcaccgaggaaaggtgcagttcgaacgagaaggagggaagttggagttccaaggaatccgacccgcctcgggaaagctagtagtgtctacagtccgagccgagagaatgcaccataacggatgcgaggcctatttggccatgatacctaccatggatggaggaactagttcggaattggaggacataccggtggtaaaagacttcgcggacgtgttccaatccttgtccggggtacccctagaccggtcagatccgttcacgatagaactcgagccggtaaccgcacctctgtccaaggctccatatcggatggctgcgcaagaaatggtcgagctaaagaaacaattggatgacctgttggagaaaaggttcatacaaccgagcagttcgccgtggggagcaccggtgttattgtca

SEQ ID NO: 174123 - DNA, 545 bp, Arabidopsis thaliana landsberg; identical to SEQ ID NO: 62784

SEQ ID NO: 174124 - DNA, 435 bp, Arabidopsis thaliana landsberg
atggcttttagtttcgacctagccgtcatcctccagcgggagagaagaagaacgaagaggagacgaaatttccggagctcctccgacaacagccacctcaaaactgtactactatcattgtcttctcgtcctgactcggacattacaatgtcttccagtgtaattgatcaagatttgaccatgccgggtatgaaaggctaccagatctctcacgtttttcgcggcttgatgtgcttggtaaaaaaaccaagtgcccaaatatacaataccacgactagacaacttgttgtcttacctgacataaaagaatccaccatcttagctgaagaacacaagagtaagaagatcatgtaccatatcggacacgatcccgtttatgatcaatataaagtggtttgcatagtttctagagctagtgacgaagttgaagagtac

SEQ ID NO: 174125 - DNA, 432 bp, Arabidopsis thaliana landsberg
ctcggtatggcacattctacctcaaccagatcgaggacacggtcatcccgacgccagcacgaggcgtcagcatttgtgcgctcgccctcagtaaggggcgcatagaccaatgacctccaggcagaactcaaccgcaggcgtgcgggagaggatgcccgggtctccttggaaaggcgcgcaagcgtcgccaaaacatcgatggccacaacctcgatcaagacttcgttgcgttacaccgcagacaccaatgggcacccggtcccaaacgggcgtccccttggccggcgtgggctgcgctgctctcgcggatcatctccgcgcggcatcatggccacccaagttccggtcgcacctgccggaaaagtacgacggaacatcgaacccgtcggagttcctgcaggtgtaagtcaccgccatcacggtagcagggtc

SEQ ID NO: 174126 - DNA, 577 bp, Arabidopsis thaliana landsberg
aaactcttgcttggaatataaaaaaaaagaagagatcaagacgattttgatcaagtttagtaatagcaaagattactacaagaagatcgggaaagcgtggaaacgagggtatctcttgtttggtccaccagtaaccggaaaatcatcaaaagtcgctgcgatggcgaatctcttggagtatgatgtttatgatcttgaattgacaacagtcaaggataacacagagctagaaggtttttgattgagacttcagggaaatcgataattgttattgaagatatcgattgttctcttgacctaactggtcagagaaagcagaagaaggacgaggaggaagacgaagatgagactagcccgattgagaagcagatgaagaaagatcaaggtgagaataaaggaagtaaagtgacattatcagggttactgaatttcattgatgggttatggtcagcttgtggtggtgagaggatcattgtgttcactactaatttcatagataagttagatccggctttgattcgaaaaggaagaatggataagcatatagagatgtcctactgcggttttaagcgtttaa

SEQ ID NO: 174127 - DNA, 641 bp, Arabidopsis thaliana landsberg
attatataaaaaatcttttctacggggaagtcaaagatgtcatccggaaggaagtaagaaagcatgggaagtcttgtggactagtaatccgacgatccatacaaaatcatctgtctcaataagtatttatagttgcatgtctttcccaaccaagctcaatataacttatcgaataatcaaaattttaaagactaaaattatcaactcttttataaaacaaagatggtgaactactcatcaatcaaattcagatgcatcttgtttgtggctctgttcagtattttcacaattgtttcgatttcgagtgctgctacaacaagtcatggagaagttggtacgtaagctttaaacttctctctatttatatatcttccaaattaggtttaattatgaaaatctttaatttgctcaatggtgatgtagaggacgaacacgagtttaactacaagaagaacgatgagaaggggccagagagatggggagaacttaaaccggaatgggaaatgtgtggaaaaggagagatgcaatctcccatagatcttatgaacgagagagttaacattgtttctcatcttggaaggcttaatagagactataatccttcaaatgccactcttaagaacagaggccatgacatcatg

SEQ ID NO: 174128 - DNA, 378 bp, Arabidopsis thaliana landsberg
acaccctaacaacttgttaatatctattcggagggaatgcagattgaagaaaccttcggagactgaagaagtcctgcctacggactaggcttgcgccatagccgaacgagcagctcagagcgttttgatatcatgctgctaatcgccctgatgcttcagctaacatgttggcttgcgggcgttcatgctcagaaacaaggttgggacaagcacttccaggctaacacagtcagagatcgaaacgtactctcaacagttcgcttaggcatggaagttttgcggcattctggctacacaataacaagggaagacttactcgtggctgcaaccctactagctcaaaatttattcacacatggttacgctttggggaaatta

SEQ ID NO: 174129 - DNA, 530 bp, Arabidopsis thaliana landsberg; identical to SEQ ID NO: 72762

SEQ ID NO: 174130 - DNA, 458 bp, Arabidopsis thaliana landsberg
ttttattgcctgagtttcttgtttggatcaaaggtccatttaacctaactcgtaagcaaaatcaaaatctctaatcttgagtttttcttgttcttgtttatggttttttgacatagttataactgtttttgcaggaagtccaaagagattgagatcaccatggatggcatttcctgtattgatcaaaacattgtccaagtttctacctccttctcaaatacttgtcattcagaaacattacaaagatcaacacgtaagtgttttttttttttttgtttcctcttccattatcttttgaggtgatttcatttcacattctaattgttgctttcctttggatttaacagaataggagaattacacggagcgaactaatccaacgagtcagaagcataaccggagacaagttactagttcacatcatcaaagcttgtggacataaagtacaacactaaatc

SEQ ID NO: 174131 - DNA, 527 bp, Arabidopsis thaliana landsberg; identical to SEQ ID NO: 4197

SEQ ID NO: 174132 - DNA, 233 bp, Arabidopsis thaliana landsberg
tttaatttgaaagcaggcaacaaaccgctatttacatacaaacaaaaaacagagaaaggaccagcggaatggggcaaattagaccctcaatggaaagtttgtagcaccggaaaaattcaatctccgattgatctcactgacgcaagagtcagtcttattcatgatcaagccttgaataaacataacaaaccagcttcggctgtaattcaaagtagaggacaggacgttaggta

SEQ ID NO: 174133 - DNA, 554 bp, Arabidopsis thaliana landsberg
atctagtaacatcaagggacgcgatcagttttacattagaggttgtcaagatttctttgtagctaatggcgtaaagaatgttgtgatcccttcacattggagttattcgagaggaccatctccaattctcaagatctgttccaagttaacataaaatcagttacagtctttgttcttggcttttgctattgtgaaatcgttgttttaaaacgaattgtgttcaggtgaaacaagcagcatcatctgatggccataagactgcggataggaaaccccgaatgacggatcaagcaccactggctgaagaacaaactgataatcgggtcgaaaagagagctcaagttactgaggaaggagggccatctcgcagcactagggctgatccgggaaacttgcagcaaaagcaaccttgctcaatatctgatcacgttaaaaaggtgaaacagagtattgtggatactttaaccgatgtaaggcggtttcagtcggagctcaaggtaaaagaacagaatctagaagcttcattgcaagaaattgatgcgttaggtatgatc

SEQ ID NO: 174134 - DNA, 876 bp, Arabidopsis thaliana landsberg; identical to SEQ ID NO: 11354

SEQ ID NO: 174135 - DNA, 335 bp, Arabidopsis thaliana landsberg
ccaaccagagaacaagaacaagttgacgaagaaatgatgagcatgcaaatgcaagcgttgaggatcacaaactcattggcttgatccatggatgtcaaagctggcttggagcttggcgtgctgcatacgattgttgcccttgaggagggcgtatggatctcgccttccgagatagcttttggactccctaccaagcctaccaacccagaggcaccgatgttgatagaccgtatgtaacggttactcgtcagccactcgatcttgaaatgtcagttagttgaaaccggagaaaacaatcgaaccgaaagtacccaaagggtatatgcagcggaacc

SEQ ID NO: 174136 - DNA, 555 bp, Arabidopsis thaliana landsberg; identical to SEQ ID NO: 45475

SEQ ID NO: 174137 - DNA, 243 bp, Arabidopsis thaliana landsberg
ccggaaccggcggtcgcgtacggacttcggggcaagtcgttcctggtgaccggcggcagcagaggactgggctacgcgaccgcccggatcctcgccgccgagggcgcgtcggttgcgatctgcggccgtgacgccgacacgctgacgcaggcctcctccgagctgcggaaggagttcggcaccctgatcgtcacggtcgccgtggacgttttttgcttatgactgaacatgggagtactttac

SEQ ID NO: 174138 - DNA, 611 bp, Arabidopsis thaliana landsberg
atggcggagaaggaagaaaaagagccggcgaagttaaaatcatccaccggaggttcacggccaacgatttcactacctcctcgaccgtttggtgaaatgttttttagcggtggcgttggatttagtcctggacctatgactctcgtctcaaatttattctctgatcctgatgagttcaagtctttctctcagcttttagctggagctatggcttctccggcagcagctgctgttgccgccgctgctgtggttgctactgctcatcatcagacacctgtgagctctgtcggtggaaacggtggaagcggtggtgatgttgacccgaggtttaagcagagtagaccaacgggattgatgataacgcaaccaccggggatgtttactgtaccgccggggttaagtccggctactcttttggattctccgagcttctttggtcttttttcacctcttcaggtgtgaaattcgttaactactaaaaaactcaaagctttgttttttttttgctcattgttagttcgaaactctgtttttggtaaatgaaagttttgtttggatattttgttgctgtttctggtttttgttttctttcggtttatgtctttatggat

SEQ ID NO: 174139 - DNA, 227 bp, Arabidopsis thaliana landsberg
aactccgatgatatattcaaaatactgaaagaaaaaaaatctgccattaattaatattatacccaacaaatctatcctgggggtatgaagaaatgaagtctttcacagacaagcaaaaactgagggaattcatcaccactagattggctttataagaaatctttaagggaggcctacatctggaagtgaaaggacaattactaccatgacaaaaatataaaactata

SEQ ID NO: 174140 - DNA, 552 bp, Arabidopsis thaliana landsberg
gagaatcagggaccaaggaagtttggttcacaaccattcaaagaataatgtcgggaaacagtttcagggaaaaggaaagtcaaatacttgggttcgagatgaatccttgtattatgatatacatagagtgaccgggcatctgaccaaagactgtagtcttcttaaaagaaatctcgtagaactatgggcacacagaggtctttcaaagttcaacatagaagatttcgttaagcaataccatgagtcaagggataattccgaagcttaaaactctaagagaccaagactgactagcgaagaagaaccaagaagtttaaaaggcaaaatcaacgtgattcttggaggttccaaactttgccgtgactctaaagtcaagtttaagtgaagagttagattttcaaggcgcttcaatatcattcgaggaaaaagaaacgcagcacctcgaaagacctcacgatgatgctctagtaatcacgatgcacgcagctaacctcgaggtttcaagaatccttgtaaaaaccggtagattggtagatctaatatttctaagca

SEQ ID NO: 174141 - DNA, 409 bp, Arabidopsis thaliana landsberg
atgggtccgtttccgtcctcgtatgggaataagtatatattggttgcagtagactatgtgtaaaaatgggtggaagcaatagccagccgtacgaatgatgctagagtcgtcctaaagttattcaagagcatcatcttcccaagatttggagttcctagaatagtcattagtgatggaggcacgcactttttcaacaaagttttcaagagtctactgaggaataattgggttaaacataaggtagtgactccttaccatcgacagacaagtggctaggtggaaatctctaacagggagatacaatcgattatagagaaaactgtcgggatcaccaaaaaagattggtttgtaaacctcgacgatgtgttatgggcgtacagaacaacgttcaagaaccccattggtcaac

SEQ ID NO: 174142 - DNA, 461 bp, Arabidopsis thaliana landsberg; identical to SEQ ID NO: 1524
  unsure (1)..(461): unsure at all n locations

SEQ ID NO: 174143 - DNA, 466 bp, Arabidopsis thaliana landsberg; identical to SEQ ID NO: 75047

SEQ ID NO: 174144 - DNA, 415 bp, Arabidopsis thaliana landsberg
gaagaaagacttaaaaggttgaggaagagaatgaagaattactatgatgcatcacggcccgatcatcaggatgcattaagagcactgtggtcagctacgtatcctgatgaaaagcttcaagatttgatctcagaccagtggaaaaatatgggatggcaaggaaaagatccatccactgatttcaggttaaactctctcttgcttgagtaaccgtacatgtcaaatagtgcttactttggttttcttgcgactattgttatcagaggagctggattcatttcactggagaatcttctattctttgcaaagactttctcggtaaacttaactctcataactttctactttgaaagattcataacctctttgatgttttttcgggtggcattggtgtagacttcgtttcagcgtctgg

SEQ ID NO: 174145 - DNA, 1978 bp, Arabidopsis thaliana landsberg
  unsure (1)..(1978): unsure at all n locations
ggaccgggaagcacactggacatcgttttccttacaactctgcgagaaatgaaaatcgatatgacgcaaatcgtgccaactccacgacctgtgctcgggttctcaggtgaaaccactatgactctcggaaccatcaaactaccagtccgagccaaaggagtaacaaaaatcgtcgatttttctattaccgaccaaccaaccgtgtacaacgcgattatcggcaccccatggctaaatcagttccgagctgtcgcctcgacgtatcacctatgcctaaaatttcccacaaacgacggcgtgaaaaccatctagggaaaccagaaaaatgctcgcatctgcttcatggcagcgcacaagcttaggaaccccgtcactgaatcgacggccgacgcgaatcataagaaggccaaacttggccgagccaaagaaaagtcgatctccgagcagttatagcaattaaagatcgaagaagctcgggaatctaagataccaactcccgatccggtcatctcaatttgccttgacgatgcaaagcccgagcgatgcgtagaaatcggcggagatctaggagaagaactaacagctgaactcaccggtttcctcaaagagaacgtcaatacttttgcctggtctccagaggatttgcccggagtaagtgttaacatcgtatcacacgagctcaacatcgatccaacttttaaacccatcaagcagaagaggagaaaattgggtcgggaacgagcagaagccgtaaaggccgaggtagaaaaattattgaagatcggatccatcaccgaggcgaagtaccccgactggatcgcaaacccagtcgtggtaaaaaagaaaaacggcaaatggagagtctgcgtagatttcacggacttaaacaaagcttgtccaaaggacagtttcccattaccacacatcgatcgcctcgtagaatcaacttctggaaacaagctactgtcgttcatggatgcttttgctggttacaaccagattatgatgaaccccgaagatcaagaaaaaaccgctttttacacagagcaaggaattttttgctatcgagtgatgcccttcggacccaagaacgccggggcgacctatcaacgcttcgttaacaaaattttcgccttacagatcgggaagacgatggaagtctacatcgacgacatgttggtaaaatccatggaagagaaagaccacatagcccacctgcgcgaatgtttcaaacaactaaacttatacaacgtcaaactcaaccccnnnnnnnnnnnnnnnnnnnnnnnnnccggcgagttcctcgggtacctggtcacccaccgcggcatcgaggcgaatccaaagcaaatcgaggcattgttgggaatggcatcgcatcaaaacaagcgagaggtgcagcgtttaaccggaagagttgcggccctcaaccgtttcatctcttgatcaacagaaaaaaacttagccttttacgatgtgctacggggaaacaaaaagttcgagtggacgatccgatgcgaagaggctttccaggaactcaagaaatacctggcgaccccaccaatcctcgcaaaacctgtaatcggggaacaactctacttatatgttgctgtatcggacaatgcagtcagcagagtgttagttcgagaagacagaggcgaacagaaaccgattttttacgtctcgcagtaattcaccggtgcagaatctgctacccgcaaatggaaaaactcgctttagcagtcgtaatgtcggctcggaaactgcgaccctattttcaatcccattccatcgtataatgggatccatgccgctccgcactgtcctacacagtccaagccaatcgggacgcctggctaaatcggcaatcgagctcagcgagtatgacatccattctcggaacaaacatgtgcaaaatcccaagtcatagcagattttatcgtcgaattacccacaaagcaggcccgggaggttccgc

SEQ ID NO: 174146 - DNA, 633 bp, Arabidopsis thaliana landsberg
ttctccaaaatgtgtttttttccccaagtgtttcagaagtgatacacatgtacttcttccattctgagttgcagactgagtgtcatatccacgaaggatatccatgaaggtatatatttttgaaactcaacaaaagtttttttgaatttggagaaaataatgcattatttatcgagaactttgtcctaacaggtaatccaaaatttgctttactcgtcccttcaattaagtctgtgggacctgatatgttaactccaacttttgttgatttcaaatcagagaaatattttttatgttttagaatagtgtgcgttgttctactatctggtatgcaaatatctccaaggtttgccttggatattgttccatttgtaatgtgatccatttcctcaatatgttctgtgaggttcactttctttccttttcccttggcggattctttgtatagagcacacagatgtgctggagttcggcatacctaagaccaatgtcccttagtgctgtggatgtcggatctcgtcagtttaccccgacccgagatccatcatcatcaatcagtgggctcgaaacggtgggcctgaaaccacccgtgacgaagtgggcatcgagggcccattcgaggcccagtacgcg

SEQ ID NO: 174147 - DNA, 381 bp, Arabidopsis thaliana landsberg
  unsure (1)..(381): unsure at all n locations
atatggggctggttcattgcagctagaagcctcatcagctcacattggtccttcagttcctcgagaagatccgggtgactctctcaaaagctgcgtgccgctgaagctcttattgcaaaccaagcggagaagattagttgctttcatgtgtacttcgactaccnnnnnnnnnnnnnnnnnnnnnnnnnnnnnnnnnnnnnnnnnnnnncttctaggacagaacctctcggctccaaccagccacctgagatgccaaatgccacacgaactacagctgctgggatcgcaccacctgttgctgttgaagctgaaacagttagagctgaggaggcagttgagactgaggcaaacaacattggatcctctccatctcttgctttc

SEQ ID NO: 174148 - DNA, 276 bp, Arabidopsis thaliana landsberg
ttcccaaccaatcaatgttgaagatgatggaataatgagtcgcctccttgtgtgaaggcaacaaaagcgaaaggaaaataattatccactgttaaaggagaagcaggccagtcagtggaataatttcaaagtttatggaagtttaagaagaaggattgagatagcaaagagaagcacatcaagcatcagatgcttgaaagtctactttcaagaaccgatcctctattagacattaacttggccctaaagaataagctaatcacagatttttggtcc

SEQ ID NO: 174149 - DNA, 887 bp, Arabidopsis thaliana landsberg
  unsure (1)..(887): unsure at all n locations
tattaagccaagcagggnaataagacagggtgatccactctctccatacctcttcattatgtgctctgaagttttatctcatcttttcaccaatgcaacgttagtcaacaagcgtagaggaatgaagataagtaatacgggtccagctattaaccatcttctttttgctggtgattctttattcttctgtcatgcacatcccaaatcatgcgccacaatcatggagatcttagggatgtatgaaactgtctctagtcaagcagtgaatctacacaaagcagccattacgtttggttcaaaagtgaagcaacaagtgaaaactcaacttcgacgaatcctaaacatccataatgacggtggtgggggtaaatatttgggtttaccagaacagattggaggaaaaaaggagatctttacctatattgttgatcgggtacaacaaaaaacaaaagggtggtcaactcgatttctatcagaagccggaaaagaaatcttaataaagacagtggctttgtcattaccagtttacacaatgaactgtttcaaacttccaaaggggatatgtgatgatatcaacagattacttgcgtcttactggtggagtaaaagctcggataagagatcaatgcactggatggcttggaagcggctgaccataccaaagaatgaaggcgggttaggatttagggacattgaatgctttaataaagccatgttagcaaaacaagtgtggcgaatacttcaagcaccatcatccctgctcactcgcctcttacgtggaaggtactttgaaacaacaaatattctgaatgcaagaaccggaggaagccctctttcatttggagatccggtctagaaggacaaaacctcccgcagcaagggcttcg

SEQ ID NO: 174150 - DNA, 588 bp, Arabidopsis thaliana landsberg; identical to SEQ ID NO: 60832

SEQ ID NO: 174151 - DNA, 504 bp, Arabidopsis thaliana landsberg
tccgaggttctccgaactgacattaccacaacaagaatctctatagcagcctaaatcgtattccctaaatccaaaggaaggctcaagcttaacagcactaaccctagggagaatccgtcagtgaaattcaactacttggaaaacaaggcagacctcgacgcatgcctagagatggttctgcatcttcaacatgtagcgaggtctgagactgtcacgttcttcttggggacacaagctcatgataagcttgtggcgggtgacgaagagcttaaaagcttctgcataaagaatgttagaacttattatcattaccatggtggttgcgctgttggatctgttgtggacgaggagtataaagtgaatggtgttaagcgtttaagagttgttgatggttcaacgtttgaagaatcaccaggaacaaaccctatggctactgttttaatgctgggaagatatcaaggaatcaagatactcaaagaacattaggaaaggttgtttagccct

SEQ ID NO: 174152 - DNA, 460 bp, Arabidopsis thaliana landsberg
gggatcttttttcccctttcacggggtgatacctaccaaccagatcgtgggtatggaagatgtcctgatcaaataggcctcaaaaactgtctggacggtgtgaactggcaggtcaaacaggaagaacgatgggcattgctgggtcctaacggggcaggaaaatccaccctgctgagcctggtaaacggcgataatccccaggcttatgccaataaaataattttatttgacaggcagaggggaagcggcgaaagcatctgggatattaaaaagaagatcggctttgtttcagcggaactgttccagtatttccccaccgataattcctgcctgcaggtagttgaatcagggttttatgacactcttggcctattccgccgcagcggatcagaacaggcagaaatttccaggcgctggatgcgcctgctggagattgaaaattctgctaaaagtattacgt

SEQ ID NO: 174153 - DNA, 488 bp, Arabidopsis thaliana landsberg
  unsure (1)..(488): unsure at all n locations
gcagggcgctcagctcgcccatatggacaaggtcgcgccggaactgctcgatcgaagcgaagccgccctgcactgcaaggactggctctatctcaatctcaccggcatccgcgccaccgaccnnnnnnnnnnnnnnnnnnnnnnnnnnnnnnnnnnnacgcgccaatacgacagcgtcgtcatcgatgcgcttggcctcgatcgtcgccgcaatcttctgcctgagatcatcgacggcacggaagtcagccatcccctgacggcggaggccgccaaggcctgcggactgcttgcaggaacgcccgtttgcctcggctatgtcgacatggtgatgacggcgcttggcgccggtgtgcgcagcagcgggcgcaatgccgcctgctcgacgatcggctccaccggcgtccacatgcgcgccaaagcggtggaagacgttcatctcaacagcgaaggcaccggctatgtcatcgccctgccgatccccggca

SEQ ID NO: 174154 - DNA, 525 bp, Arabidopsis thaliana landsberg; identical to SEQ ID NO: 65206

SEQ ID NO: 174155 - DNA, 529 bp, Arabidopsis thaliana landsberg
actacagttttctctgactccaacacgtctgatcctaagaagttaggatctaccgaatctgatcattgcacatggtgtggaaaaagtatacaaggaagttggtcctatcgctgttctatatgcaacttttgtttggatctatcttgctctcaaaacattccacttctcctcgtcccgaacccgaagagtcatcagcatccactcgtcttctaccggcgaccactcttgactccatgtgatgcttgtgggttggtcaatatgttggatccaagctatgcttgttttcaatgtaattacatggtccatcaaagttgcatcaacttaccacgagtcataaagatcacgcgtcaccagcatcgtctttttcacacaccttgcctccaatctaagatttcactatgccgggtatgctatcaaaaagttgacaccaactacggccaatattcttgctaccacgaggtttgctcttatgtagtgcattcgaaatgtgcaacgaatgagaacgtatgggatgcgaaagaacacgaat

SEQ ID NO: 174156 - DNA, 546 bp, Arabidopsis thaliana landsberg
  unsure (1)..(546): unsure at all n locations
gcgacggggggtggtcgacctaccttgccgaccgctcacccggcgagtttttttttttctatgtgcagccgtcaagcgggggccggccgtccggcgacccggacacgccgatgatcatgatcggtcccggtaccggtatagcacccttccgcggcttcctgcaggaacgtcgcgcgctcggccacaccggccccaactggctgttcttcggggaacggcacgccgaannnnnnnnnnnnnnnnnnnacgagatcgagcggatgcgtgacgacgggttgctcaccgagctggatctggcgttctcgcgggaccaacgcgacaaggtctacgtgcagcacctgatgcgcaatcggggggcccagctgtggcactggctgcaggacggcgcgcaactgtacgtctgcggtaaccccgaccccatggccaaggacgtacatcgcaccctctgcgatatcgccgccgaacacggtaaccttcgacccggacgccgggacgggctacgttcattcgctcagcgacgaacagcgctaccaacgggacgtctac

SEQ ID NO: 174157 - DNA, 343 bp, Arabidopsis thaliana landsberg
  unsure (1)..(343): unsure at all n locations
gcaaaagaagggattggcagataacatcgatgtgttttgagaacgcaattatttctaggtggaagaaatgcaaaacatcctttggaaaggtaaaaaagtagggctgatccccaaagtgcacgtcaatcggttttccattatgggtgaagtaaaagcagcggttgaattgggagcgctttccgttgatcacctggaaaaatcgaacgacaaggatatcgcggtactcaaaggaagcggatgcatgccgacgttccttacgggctgcccacatttcacccgtattccatgcggatatgaaagaanatttataaaggaaggattgccggtagcactacctacggag

SEQ ID NO: 174158 - DNA, 296 bp, Arabidopsis thaliana landsberg
ggttagagttggaggttaattcagagttggtggtaggtctattcacaacagagaatagttatttgcatatgttgtcggtcctaatacaccaccatgctatgactctttatccatggactgtatagtcaatatttgttatatgtataaaaagattaaccgtctagccggcggattaactaactatgtattttctttatgagcttagttatgatacatgaattgtgtgtccggattttacacacccgattttgttggaagatataaaacatacctttgaaatctatgtatgtaagaga

SEQ ID NO: 174159 - DNA, 237 bp, Arabidopsis thaliana landsberg
ccgataaatcctttattaacacttactttcatttatttacattttctaaccaatttgaaatgtcttctatctttttttctattttttgttctttgtgtgtgttattggggatatagaaactagatgatttggtgggtcaagtctgcaaagcttacaaaggaaaaactccactcccaaaagactgtagttccgctgccttgtccgagaggaaaatgtcgaatgttgaattctcctatg

SEQ ID NO: 174160 - DNA, 577 bp, Arabidopsis thaliana landsberg
atgagttcctcaggagaagaacgaggtgttgttgttgccgagtccgagccgccaagagggaatagaagccgatttgcttttgcttgtgcaatcttagcctccatgacttctatcatccttggttatggttggtcttctaatcattctctaacgatcaaatttcagatttggtttggtttaacggtttagataatcatcctcacattttatggatgttgcagatattggagtgatgagtggagctgcaattttcataaaagacgatttgaagctgtctgatgtacaacttgagattcttatgggaattctaaacatctactctctgatcggttcaggagcagctggtagaacttctgattggatcggaagacgatatacaatagtgttggcaggattcttcttcttttgcggagccctactaatgggctttgccacaaactaccctttcataatggttggccgttttgtagccggtatcggtgttggttatgctatgatgattgcgcctgtttacaccgcagaagtccgtcccgcctcttcccgaggctcccttacctctttccctgaggttcaatat

SEQ ID NO: 174161 - DNA, 249 bp, Arabidopsis thaliana landsberg
  unsure (1)..(249): unsure at all n locations
tcacgaccatctctcgaacaancatctcctcaaaacgatgtgtttgtgatgacaaggtgcagccagagggaagaagttaacattcctgatggctcctctaagaagatggcctagaagaaagaatatgtcttcttcaagaaagctcgaaagctcttcgatattgacgttacacttgactctgatgttcctcaagaaggttccagaatcagcgttgtggtttaccgtttcgccacgaaacagccaaatcaa

SEQ ID NO: 174162 - DNA, 456 bp, Arabidopsis thaliana landsberg
tccaataattcataaggttgtgaggttttgactttatgaatgattgtattatctaggaattagtagttctgaagaaatgctggcgcgcacggtattggggcttggctgtgcaacatggtaggtcattcatccattcttaagacaaaaagtttatattctgaaccagagtgaatattatcataatattctttgtatcttcggtcaacatggcatatacttgtggtagtgatcaatcgaatttacagatatttgcttttcctatggtgtgcttctgtaggcatttgtgcggatatagctccatccaggcaagagcactggtcatagttggctcctcttccatttgagcttgtctcttcagcagcgcagaaggcgaaggagttatcccgggataaagcctcgtctattgtctgctataaattaaaaaaaatctttgcttgccgttgttgtaaatttttt

SEQ ID NO: 174163 - DNA, 338 bp, Arabidopsis thaliana landsberg
  unsure (1)..(338): unsure at all n locations
atgaaagcctctctccttcagaagcnnnnnnnnnnnnnnnnnnnnnnngaagaactcgcgcacgaactgggtgacgccagcgtcatttccgacaacgaaaaattccgtcgcctgtcgcaggaatacgcacagctcggtcacgtggccgagaactacaccgtgcatcgagacgcgacgcatgcactcgccgatctcgaggcactgcagcgcgacagcgaccctgaaatgcgggcgatggccgatgccgagtggccggacgtgcgcgctcgcatcgatgcgctggaagccgaactgcagggttttctcgtgcccaaggatccgctcgacaacaccatgtg

SEQ ID NO: 174164 - DNA, 227 bp, Arabidopsis thaliana landsberg
tttaatctgaaaacagacgacgaaactccatttacttacgaacaaaaaacggaaaagggaccagagggatggggcaaaataaatccgcactggaaagtttgtaacaccggaagatatcaatccccgatcgatcttactaacgaaagagtcagtcttattcatgatcaagcatggacaagacaatataaaccagctccggctgtaattacaaacagaggccatgacat

SEQ ID NO: 174165 - DNA, 237 bp, Arabidopsis thaliana landsberg
attaatttatagagatttattacatataataaagtgtcacaataatgagattagtgggctactaatgttagttttctcaaccattgtattcagtttgctgtgttgcggactcttaaagaaaaaacaaggcgttacaatggagcgtatatgaatactaatgcattcaatccttagaatggacctacgcagttcagctctactcggatgcattttcaaattggaaatgaattcatccaa

SEQ ID NO: 174166 - DNA, 302 bp, Arabidopsis thaliana landsberg
ctgccaagttaaagatcttcttagtaagggtcacattcgcgagagtctcagcccttgggcctttccggctctcctcatacctaagaaagatgggacatggcgtatgtgtgtggatagccgcgcctttaacaagatcacagtccgctaccgttttcctattccccgactcgacggtctggtggatcaaattggtaaagcttatattttttcaaaaatcgatttgacgagtggctaccattaagtacagatccgccccgatgatgagtggaaaactgcctttaagacacgtgaaggcatttttg

SEQ ID NO: 174167 - DNA, 334 bp, Arabidopsis thaliana landsberg
tacaagaacgtgttaaatcaccatccaaaagcaaaaggagattgcagaagccgaagcccggcaaagtcaaccaaagcaggtcctgcacactgcttcgtgtcattcaccctacataccagaatatgtgggtaatcatcccgcagcttctgttgcttcggctagtcagccacaagtttcttggccacaacttccacctccgtcgccactacaacctgcctactcacgaggtcagcagccagaagggagccaacagacccatcagcagcgagatcttagggaggggtccgaagctcgcacagttaatagtactgtgccggaatcaaaacacaaatat

SEQ ID NO: 174168 - DNA, 661 bp, Arabidopsis thaliana landsberg; identical to SEQ ID NO: 67552

SEQ ID NO: 174169 - DNA, 1490 bp, Arabidopsis thaliana landsberg
ttacaagagatagttacagagttgaaaatgctagacggacctaatgctagcggttatcacatggcggacgatggtaccctgttattcaacggaagaattatggtaccagatcgaggaaacttacgacaagagatccttcgtatggcgcactcgtctacactgagtattcatccgggcagtaccaaaatgtataaggacatacgccgatattatcattggccaggaatgaagaaatcggtagctaaatgggtaagtcagtgtgattcttgtcagcgaataaagattgatcctcaggttccaggtggactgctttagagcttattagttccaatgtggaaatgggaatcgatctctatggacttcatcaatggattacctacaaggaaggggcagaggaacgatttagtttgggttattgttgatcgattaaccaagctgactcattttataccagtgaggagcatcgatcaagctccaaatctagcggagaggtataaaaagaagtgatcaagctccacggtataccagccaatctcgtgtcagatcgagatccgaagttttcggtaattttttggcaagatctccagaaggccctaggaacggatgtccacatgagtacggcgtttcaccccgagaccgacggacaaactgagcggacaattcgaaccattgaagacttgattcgaatccgtcccttagaatggggaagaagttgggaggagaatctaccattcatcgaattttcttaaaacaacagctaccattcaagtattggtatgtcaccattcgaagctgtgtatggaagaccttgtagaaccccgctcaactggatggaagaagaaagaaccaaattcgatcaatggatagttgatgaggtggcagagaaaatccagttcatacgcgacaacatgaagaaggcacaagatcggcagaaaaagtacgcggatcggaaaagacgagaagtagagtttcaagtaggagatatggtctacttaaaggtcacaactcaaaaggggaaggatcgattcggaaaaatagggaagctggcagtacgttatattggtcctcatcaaattgtgagtcgagttggtgaggttgcatataagttagatatgccagagatcatgcgacttaacaaggtgtttcatgtgtctcaattaaaagacatgtaccaaatcctgatgttgtaatttctgaaccgatacccgaattgaagactaacctcacttatccggaggggccactcgagatcggagaacggcacattcgaaagttaaagcaacggttaattcctcaagttcaagtattttggggaaaacaaaaccgacggtaactacatgggaggatgaagaaaagttccgggcaaaatatcctcgactagtcgatgctgaggaagaagatgacaatgaagccggtccatccaatactcagggaattcgggacgaattcctataaggaggggcgaatgtagtaccccgcgcattcacccc

SEQ ID NO: 174170 - DNA, 568 bp, Arabidopsis thaliana landsberg; identical to SEQ ID NO: 19059
  unsure (1)..(568): unsure at all n locations

SEQ ID NO: 174171 - DNA, 550 bp, Arabidopsis thaliana landsberg; identical to SEQ ID NO: 19602

SEQ ID NO: 174172 - DNA, 845 bp, Arabidopsis thaliana landsberg
cagaactgtcatcagtacttagaagcaattccgaaagagcattggactcaagcctattgccctgcaaaattgtataatgtgatgagtagtaacattgctgaagctcttaatggcgctctagctaagatattggaactgcctattgtgacaatggttgatggaatccgaggaaagctgatgcgttggttctgtgtaagacgtgcaaaagcagctaagatgactgatacaatcacacctgcaacaaacaagctaatttttgagcacaatgtcgactctgcaggtttggctgtgagtcaagttttggcttggtcttaccacgtgcatgtatcagatgaactgtcatactatgtggatcttgagaagaaaagctgcagttgtttacaatttcagaagcttttaattccctgttgccatgctcttgctgcggctaggatcaacaatgtgcatattccaacgcttgttggcgagccttatatggtagagctgtttggaaaacagtatgagcaatttatttaccctgtgccaaaccaggctgatgaagatattcctgctgttgttgaagatactcagtttgtgccaccttctgtgagagttggtcctgggcgccgcaggaaaagaagaatcccttcatcaggcaagagatttggggtaatgttatgtcatatctgcttatttacatacagtttgcatataaacaataagattggtcatgcgaagaaagtttttgttcatctcagggttctaaaagacagaggcttggccgaaacaagtgctcattgtgttctcaaagtggtcataacagggccatttgcgactctgttggatgaaaaggtatgcaaattaac

SEQ ID NO: 174173 - DNA, 1597 bp, Arabidopsis thaliana landsberg
aggcaattctataagccatgtgtgtcgttcactcaaaatttttatgaacactttgtctttatcaaaacagggcggcttttaacaagataaaacatgaaacgatgtaaacatgtaaattattcaaatgtgaaatcaatccatatcttatcaaattgattcatacacacacacaaagtttgcctaatactcaatgatgagtggatctcataaattcatagactcatagtcatataaaaacgtggttctcataatcatagaaacaaaggatttcaaaaataaaataaaaaaagttcatgcggctactacatggaaaagccacaactctttaaaaagacaacatcaattgatacgacatgacaaaacacagaaactcttcctcgtggtgcaggttgctagatttgcacagaacttggaacataagagcacgcaagtggaaagcaatatttgtgtacagactcaccgagatccactggtttgatgtatccatcttctccaacgatgtaagctgtgttacgagtggggttaagtatactctcgcctttatcaaaaagcaccacgagtttgttctcttcgtcaacgaagaaagtaccagatgcagcctcgagtggtcttatcctacccattggaaaaatagcttgctccacgacactgcattaggctcaatcttattactaatccatatccccgtccacgttatatcccatcgctgatataacaccgcaagtttctcttctctaacactagatagagtcccttatattagtatagccattagcttcaacgtaaattggtataggcagaagcggcccaaatctctctcttgtaaaatcaaaatagattatgtgattcttgttacattcggagctccttttattagcacaccaataactatttcccttaagagaaacgctaggggaagatcaatatatacgccaacgtggaatgacatcaagagttgtccaatcacccgagttaacatcatagatttcataccaaaaaactgtgtttcgggtgtattgtagaaataatctaaaatcctcaacagcataactataactgcacttgtcatgtccgtctctgagatcaatccaccttgtttgccccaactacggatattccaaaccacgatcctcttaacttcttccaatttgcataaaattaaaccttcatagtggtattataagatatgctgacttgactgtgaagaaaactaaggttatctgtgacctcctgatgtttatacctataatgtgtatatcaatgggttatgcaagctgaacaatatccaaggcgctataaagatgatgtcttctatgaaaaagctaggttctgagcctaatgtagttacatacaatatattgataaaaggattggtttaagctggagatctgagtcgagctaagactctatggaaagagatggagagacgaattgagtttagacgaggttgtttgtgctcactgtttattggaataagcatttaacatgagttcaagaatttcggaagatctgccttgactgaactcacaccatcacattgttgacattcctttcctggatccttagccgtctccacagcttattgttggaacttttt

SEQ ID NO: 174174 - DNA, 511 bp, Arabidopsis thaliana landsberg; identical to SEQ ID NO: 12939

SEQ ID NO: 174175 - DNA, 190 bp, Arabidopsis thaliana landsberg
gaagacagcgtttgagatgttcgaggtggaaaaaggatcaggctgcataacaccaaagggtttgcaaaagatgcttgtgaagttaggggaatcaagaacgtacgagaagtgtgaagccatgataaaatattacgatatagatggtaatggagttcttgattttcatgagtttcgtcaaatgatgacggtt

SEQ ID NO: 174176 - DNA, 180 bp, Arabidopsis thaliana landsberg
  unsure (1)..(180): unsure at all n locations
atgtttaggataggtttgcatgcatgttgcatatntgtgttgatttcaggtgatttggagctgttgacgagctaactggaagaagcggacctgatcatgtcaaaccactcgacctagaagcttcaagacctcaacagaccactctaccccctggtcgaatagaggacatcaccacttcac

SEQ ID NO: 174177 - DNA, 287 bp, Arabidopsis thaliana landsberg
  unsure (1)..(287): unsure at all n locations
atgacgtcccgttctctttgcgtgtcatttatcttgcttgtctccacattcgttacgcccgnactccaactcagcaccatccaggttcttcttgttcctcactttctggcccaccaagtaacgagaactgcttctatcccttgtacatttgtttttctcagacactcatgtagatgcaacaggcaacactgtccctacacggtgcttgtcatgaccaggtgtacctgtccggactcgccaagagatcagatcagcatcctttttcgcgatgcgccggccaacaacgt

SEQ ID NO: 174178 - DNA, 380 bp, Arabidopsis thaliana landsberg; identical to SEQ ID NO: 3162

SEQ ID NO: 174179 - DNA, 121 bp, Arabidopsis thaliana landsberg
actgccatgtaatcataagtaccatagcgaatgcattgtaccgtggctcaaagtaaggaacacatgtcctgtttgtcgttatgagttgcctacagatgatgcagagtatgagcagaggaag

SEQ ID NO: 174180 - DNA, 910 bp, Arabidopsis thaliana landsberg
aaaaaggtggaagtgattgttccatcatcactaccagacgacgtcatagaggaaatcttcataagacttccagtgaaagaactaatccgactcaagttttctcttccacaagaatggagattgaggatcgagtctcatggtttcggcccacgattccacatatataacccgaaactgcaccccatgtttatccttttcgtaaaatacatcttcaagtgtttatacatttactccaagtctggtttcactttgtgttttactattctgctttatcttggtttacctttcctagtgcttttgggtgtcgatgttcttactaggtcatttataaatagatgtctctttcagtgttaagagatcagacctattttgaatagtagaaagagaacatgtttgcttggatattcttgcgagacttttgaacaaatgtttccatcgcattgttgtttccgaagaaacatcatttcttaaaaggaaattgaactcgttcagacactgacatggtttcagacaatctgtttggattcaacttctcttctaccctctactcttcttaatctatttttttttatggcatttcaccagtcacgctcacacatttgtgaaatggtgctcgaacttggatttacctgagtacaatagttacaacaccattggcttcaattggagctgctggctctagaagtcgatcccttagtcttcccgcctaagctctttgaacttgaggttcgatcatattcatatgcaccatgtgagctcgcatccaatagctcattctccagcgctcgatatagtttatcgtgtcaatgttcattcatagtaatagtatgttattagcttctttcatcacgcagagccaactaattcaatgcatacgttcttaagcatcctcagcactaagtttcggtgt

SEQ ID NO: 174181 - DNA, 255 bp, Arabidopsis thaliana landsberg
gctctaacgacataagatcattatgctcctcggcgataacctcaacgattttacaaaggcatttgaaaagggcagcatatagcagcgtttccaggaaacagacaatgcccgcaccgaatggggcaaacggtttattgtacttcccaacgccacctatggcgaatgggaaagcgccctcaccggctatcgccgcggactcaccgctccccggaaagattccgtttattaccagcttttgaaagggttttagcccgg

SEQ ID NO: 174182 - DNA, 521 bp, Arabidopsis thaliana landsberg; identical to SEQ ID NO: 57358

SEQ ID NO: 174183 - DNA, 825 bp, Arabidopsis thaliana landsberg
tctgatgcagatttattgaagcagtgtttggttttggattcttttgggggattggagacaagcgaagatgatttctaggtcgtacacgaatctgttagacttggcatcagggaatttccctgtcatgggaagagagcgtaggcggcttcctagggtaatgactgttcctggtaatgtctctgagtttgatgaagatcaagcgtatagtgtgtcttccgataatccttcttcggtttcctctgatcgaatgatcattgtggctaaccggctcccattgaaggcggagaaacgaaatggaagctggagttttagttgggatcaagattctctgtatttgcagctcaaggacgggttgcctgaggatatggagaccctatatcccggatctttgagcgttgatgttgattcaaataaacaagacaatgtggcgcagatactgttggccaaatttaaatgtgttcctacgtttttcccacgtgatttgcaatcaaagtttaaagacggtttttgcaaaagacagatatggccgctttttccctacaagcttccgttgtccgctgatcatggtggaagatttgataggtctctttgggaggcttatgtagcgactaccaagctcttcttccacaaagtaattgaggttattaacccagatgatgattttgtctggattcatgacaaccatgtgatggtcttaccaccttttatgagaaggcggttcacccggataaggatgggatttttccttcacagtcccgaaccctcaaatgagatataccggtctcttcctgttcgggaggagatacttaggcgttctaacacggc

SEQ ID NO: 174184 - DNA, 196 bp, Arabidopsis thaliana landsberg
aaaaaaattctctctatgtgttatgtttcagccctccatcttaaaaccatacataatcctccattgtaatgatgaacaggctctgcctgcttcattaaaatctgtgattccttcaatggttaatacattgctaagctcgggtttaaaagtgagcgtggatctggatgagttaaacaagaacgaagctcttctcagc

SEQ ID NO: 174185 - DNA, 808 bp, Arabidopsis thaliana landsberg
tttatttggaaatcaatcctccatggcagggatctagttaaaaaggggctccgtttctgcataggggacggtagtttagtggatgcttgggtggatccctacttacctacttacccacctcgacctcctcttcaaagtgacaacgctccacaacaggttctagtgcaacacatgatgaatcaatccagaacgggatgggatgtcgccaagatacaagagtggatagacccgcaagacgtggagacaattctcaacataacactttgttcgacagcccatcaagatctcataggatggcactacacaagacatggtttctatacagtgaaatcggggtattggctggcaacacatgctcaggaaggcgaacaagtgcttcctccccctggaaatgttgaattaaaacaagctcactggaaaatcaaaaccgcaccaaaaatcaaacacttcttttggtgcctactctccaatgctctacctacaggtgcaacgctgaaataccgacacataactaatgactccacttgtgtgagatgttgcaggatgcaaaggaatggcaagacgcagaagatcatattcagaagcttacaaaggttcccgcagcaattacgccataacatgtcagcgatgatcactggactaaaatgcaactatgatgccacttatatcaaagatttgccaagcacagcgggctgaataatgcgagacgacagaggaacttatctgggagcagggctggtgataggatcaattacaaatagttcactagagagcgagtttcaagcattagtaatggcaatgcaacact

SEQ ID NO: 174186 - DNA, 422 bp, Arabidopsis thaliana landsberg
atctcttgacctgagcgggaaccccattaagacagtgggatcaggtgtgtcgtctaagttcctgcttttgtagtcttcgagaaaatcatgaaagttgcatttctcttacatgcttttcttggatggtacagaagcttaatatcttacttcacaaagaatccggattctcgtttagccgatctgaatttggagaactgtgagctatcatgttgtggagttattgagtttcttgataccctgtcgatgctggagaaacctttaaagttcctgtctgttgcagataatgccctcggaaggtattcataaagttacaaactctttatcactttataccgttatgatgtttgtctgttttcttattattcttgttctttagaaaaattgcagaggctgaagtaaactcttacacaatctccatcgag

SEQ ID NO: 174187 - DNA, 713 bp, Arabidopsis thaliana landsberg
  unsure (1)..(713): unsure at all n locations
tccgtattgtgttgagggatagaagaatcagaagggtgatgggtgataaatttgtgattggaagtacttttttcacaagtattgagttcaaagaagctattttagaggtgacattgaaacatgggcataatgtggttcaagatagatgggagaaggagaagatttcattcaagtgcggtatgggtggcaaatgtaattggagggtgtattgtgcttatgattcagacaagcaaatgtttgtgatcaagacatcatgtacgcatcatagttgctcacctaatgggaaatgtgagatcttaaagagtccggtaattgctaggttgttcttggacaagctgaggatagatgagaagtttatgcctatggatattcagctatatatcaaagagcgttggaaattggtgtctacaatcccacaatgccaaagaggaagacttcttgctctgaaaatgcttaagaaggagtttgaggaacaatttgctcatattcgaggatatgttgaagagattcattctcaaaacccaaattctgttgccttcattgatacatatccaaatgagaagggtgaagatgtgttcaataggttttatgtatgctntaacatactaaaaatacaatgggctggttcttgtagacctgttatagggctagatggtacattcttgaaagttgctgtgaaaggagttctattgactgcagttggtcacgatgca

SEQ ID NO: 174188 - DNA, 438 bp, Arabidopsis thaliana landsberg
tcgtgtcacctacctgttgagctcgagtatatagccatgtgggcagttaatctcatgaactttgacattaaaactacagaggagaagcggttgatcaaactgaacgatctaaacgagattcgcttagaagcttatgagagttccaaaatctacaaggagcgaaccaaatcttttcatgtcaaaaagataattttaatagattttaaggttggtgatcaagtgctgctgttcaactctcgcctgaggctttttccaggcaagctcaaatcgagatggtctggtcctttctctgttactgtagtccgaccttatggtgctatcattctagttgggaagaatggagacttcgcagtcaatgggcagaggctcaagaagtacatggcagatcaatttattccagaaggaacttttgttcctttggaggagcctgtaaaagcc

SEQ ID NO: 174189 - DNA, 589 bp, Arabidopsis thaliana landsberg; identical to SEQ ID NO: 80665

SEQ ID NO: 174190 - DNA, 862 bp, Arabidopsis thaliana landsberg
  unsure (1)..(862): unsure at all n locations
atttttcccaaagtttaggaattttttaataaagttaacatttcatttgctgtggtttattttcaaggataaaatgctgttaaatattggtcgaggcttcttggggtttggggttggtctcattagttatgtggtaattaactttatcatctgttttgaaaacaaattatttgttacttttataaagtgttgatatagtaatttcgttttacaccatttgatttgatcaaaataaataggttcctgtatatatagcagaaattacgcccaaagcttttcgtggaggatttttttttcccaatcaagtaagaatgaacccctcacatcaaacagcttataatttcagaatatttaatttattattgttatcttgcgtttgaacttgcagcttctacaaagttttgnnnnnnnnnnnnnnnnnnnnnnnngaaacttttttcattggagaacattagctcttttaagtaactatattttttctctaaatgaactatatctcaaatcataacaaaattatagtatgtatactttaatcacattatttaacttattcttaaattttcaatctatgactaggtgcaatcccatgtggtatccaaatgatatgtttattttttattcctgaatcacctagatggctggtaattcacacacttaaagtttgttttttatttgtttaattggtaatattatatttaaaaggtacagtctacatattaatgttcatcttaggctatgtatggtagagaacgagagcttgaggttactttgaagaggctaagaggagaaaatggtgatattctcgaagagcagctgaatcagagtttattgtttgtccgaaatactactactacttgctaca

SEQ ID NO: 174191 - DNA, 721 bp, Arabidopsis thaliana landsberg
gtgacggtgtttgatgttagttttaatgagcttgttggtccgttgccggagagtgttggtggtatggtggaggttgagcagttgaatgttgctcataatttgttatctgggaagattccggcgagtatttgtcagcttcctaagcttgagaatttcacttatagttataatttctttactggtgaagctcctgtgtgtttgaggttgtctgagtttgatgatcggagaaattgtttgcccggaagacctgctcagagatcttcacggcaatgttcagctttcttgtcacggccttcggtggattgtggatcttttggttgtggtcgttctgttgttaaaccgtctccacctattgtagcattaccgccgcctcctccgccatcgcctccgttacctccacctgtttactctcctccgccgtcacctcctgtcttctctcctccaccgtcaccccctctatactctcctcccccaccaccccctgtctactctcctcccccaccaccccctgtctactctcctcccccaccaccgccaccgccgcctcctccaccaccagtctactctcctcctccgccgcctcctccaccaccgccgccaccaccagtctactctcctcctccacctccaccgcctccacctcctcccccaccagtatactctccccctcctccaccacctccacctccgcctcctccaccaccagtctactctcctctcc

SEQ ID NO: 174192 - DNA, 425 bp, Arabidopsis thaliana landsberg
gagtttggtttcagcccttcgggtcgctaaaaggtcccttagattattcatcggcatcagcttggcatccaaacggtgtaacatttgccgcaggaaaccaagacaagacctgtcgtatttgggacacaaggaaactctcggaatcagtcgctgtcctaaaaggtatccttggagccgtacggtccattaggttcacatctaacggacggtacgttgccatggccgagccagcagatttcgttcatatctatgactcaaaatcaggatacaaaaaggagcaagagattgatttctttggagagatttctgggatatcgtttagcccagatactgaatctctcttcatcggtgtttgggacaggacctatgcaagtctcttggagtatggtcgaaccagagactactcgtatctcgattcattactt

SEQ ID NO: 174193 - DNA, 555 bp, Arabidopsis thaliana landsberg
atgctgctccggtcatttcgcaccgtcgagcttctccgccgaatctccacttcttcagtctctggatatcgaacttctccttcacttttacaacggtgcaatggcttccaaagctatttaccacacagagtaacaacaacagagagtcctttcccttcacacatctctcgattctgttcttctcagagcgcgaattcgcaaaatgagaatcgacacacgactctaccatcaccggtttcttcacggagggttaataacagaaagatttcacggcggaggaaggcgggaaaatcattatcaatctcgccggcggcggatgcggttgatttggcgttagactcagtggtgaagatcttcactgtttctacaagtcctagttactttcttccttggcagaataagtctcaacgagaatctatgggctctggtaatacttagtctctttggaattgcttcaagtgtgattttggtgataattagattgaattttctgtttggtgttgatttaggatttgtgatttctggaaggaagattataacgaatgcgcatgtcgt

SEQ ID NO: 174194 - DNA, 1350 bp, Arabidopsis thaliana landsberg; identical to SEQ ID NO: 30262
  unsure (1)..(1350): unsure at all n locations

SEQ ID NO: 174195 - DNA, 212 bp, Arabidopsis thaliana landsberg
cacgtgacatttgtgaggaggtgctagaagatataaagaaatatggtaatactttaaaatacacatacgctaacggtttttcgtacccggaatgtggtgacgtaagcactcctaaatgcgcggagatgtgttacatgagatcgagactcttcaataatctttgcaaccaatgttacatctggttgtgtgctaaacggattagccagatcctg

SEQ ID NO: 174196 - DNA, 364 bp, Arabidopsis thaliana landsberg
  unsure (1)..(364): unsure at all n locations
cgctgttgccgaactgtctccagatggtcggcccgatgctgatcgatcttggcaccgaagagcagaagcgcaagcatctgccgccgatcctcgccggcgacgtctactggacgcaaggctactccgagccgaacgccggttccgatctcgcctcgctgcaatgcgcggcggtgtccgannnnnnnnnnnnnnnnnnnnnnnnnnnnnnnnnnnggaccacgctggcgcatcacgccaaccgcatgttcatgctggtgcgcaccgacaagaccggcaagaagcaggagggcatcaccttcctgctgctggagcgcaccgattaaccaagcatggacatccgcccgatcatcggcctcgatggctt

SEQ ID NO: 174197 - DNA, 200 bp, Arabidopsis thaliana landsberg
ttggccaaatggcggttgacttggatagcaggtttcgatcttttcgcaatgacattattgttattgcactcacttggtggaagatcgttaggtatcatactggccccaaacacgtgaagatccaaaattattcgaccatatcagatgtgactgtcgaacccaatatcgaagaaatgcaagagataaaaatggtcctcgat

SEQ ID NO: 174198 - DNA, 408 bp, Arabidopsis thaliana landsberg
tatcagaaaaagaaattatttagggatattaaccattatttatgggatgagccttctatatacaagaaaggcgtatatggtttattcagaagatgcatagttgaagaaaaagtccaaggagtcctagaacattgacatggctctgcttatgaaggacattttgcaaccttcaaaactgttcagaagatactgcaagttgggctctaatggccaaccatgttcaagaatgttcatgagtttatagccgaaggataagaaatatcaccagaaaaaatgagatgccaaagaatcctatactcgagtttgagatgtttgatgtctgggggattgacttcatggaacctttaacccatcttcttagggaaataagtatatcttggtcgttgtagactatgtctccaagaggat

SEQ ID NO: 174199 - DNA, 330 bp, Arabidopsis thaliana landsberg
caattgatcgaacgagattcgttttcgtgaattgcaagattataggaagcatagagaccttatgcaagcgttgtcttctccaagacatatatgtctagagttatttatcttgatgggtggaatgacatgggaaatcacaaaacacaaaggttattaaacattgatcacaatgaacagattaatcggagtgtgtattactgacttaattgagttgattttttaggactgtgtattacggagagcatcggtgctatgtatcattacccaatcaccaaagtggaagcagctcctttcaccaacatctcttttatcgatagagagcagtggttt

SEQ ID NO: 174200 - DNA, 2439 bp, Arabidopsis thaliana landsberg
ttaattattcttctatttttagtgaaaacaaaagtttacgattcaatatttagcctataatcaattttaaaagatgtatattataaaaataaactctacaatttcttaaactgtgttatatttagatgtcatatagatttggatgaaaccattttaatttgataaaggtcaatctgattaaagaattaacttttgaaaataataatacgggaaacatatataatattatagtataatagcattcttatgcatgttatcttagtgacttttttattttgtattagtgatttttttaccatccaccaatgaattaactcgtttaatatatatatatatattttttaaaacataaagaccaatgagcaggtttgaagggttcttttcctcgaaagatcgtaggattaatcaacacattatattcaaacgcagctgtaatttgcaattgcagaaagtgatagctataagtcatcaaaaacataaacttcattttcttttgacaaaaataatctcaacctcaatactaatcctcaattttcccatcaagtagcttccgtacagctagctgtacactcatagatttttatattttaaatgttaattaattcaatggttactttcaagtttagaccaatattaaatatttactttaaccttcatccaaacgtcactaacaacgtgttggaatgttacttcactaagtcggcgttcaagtagtggagaagctcgtaacgagaatttagctttttacatatctcataaattagtttgagattcgtctccgtgcaatgatctatcttggtaccaaaagaaattcttacaataattaatgaagattaagcttactatacataagaaacaaaatctgacatatccatttgtgagtattcgggtgaaaaatacttaataaagaaaacacctgtcatgcaccaaaaacgtcatattcatacacaaaaacgatactatttcatttgaccaaaatttaaatttattaaataaaccattattgtccccctctatcacaatccccccaaatcaaatcatgctatatataatctcatttccttgacattatttgtcattcagaatacttttatctcatattcccaacacttgttcaagcatatataagtcaatatcatcattacagcataacatggtgaaacaagaactcaagatccaagttactacttcctcatcatcactctctcattcttcatcttcttcttcttcttcaacgtcggcactacgtcatcaatcttgtaagaacaagataaagaagtataaaggtgtgaggatgcgaagttggggatcatgggttactgaaattagggcgccaaatcaaaagacaagaatctggttaggttcttactccaccgcagaagcagctgctagggcttacgacgctgctctcttgtgtcttaagggacctaaagctaatctcaacttccctaacatcaccactacttctccttttcttatgaacatcgacgaaaagacccttttgtccccaaaatcaatccaaaaggtcgccgctcaagccgctaactcctcttctgaccattttacccctccgtccgatgaaaatgatcatgatcatgatgacggactcgataaccatccatctgcttcttcttcagctgcatcttcaccaccagatgatgatcatcataatgatgacgatggtgatttggtatcgttgatggaatctttcgtggattacaacgaacacgtgtctctgatggatccatcgctgtatgaatttggacataatgagatcttcttcaccaacggagatccgtttgattattctccacagttacatagctcaaaggcaacgatggatgacttctacgacgatgttgatactccgctgtggagtttcagttaatccaacggtccatattattatactacgaaacacttttaattcacattatttcatttaatttattctttcaattcatattattcgtccttgttgtttcgttatgtattaaatatacacacactaatttaagaagatcacatggactagaggtttttttgtcacgtcttcactttttttcatgtgtttttttcttttcttttcaattttattacaaatcttgtaattcactgattatttaaggcccaatatggtagacgcctagacggagatagtgaaaagagcccaattaatatactaaaggcctaataataacaacaacacacacgcatgatcttgtactagctttacttcttactacatacatacacttgggcttgtacttgaaccgttaccactagacatcatccccctaagactataaccaaacgtaaaagcaaggttaatcaactagctacacttctaagttctaacaagtaacaactatgattaaaaactctagtgagctaacacttactaacaaaacacaatttcacttttgggcctatttcgtc

SEQ ID NO: 174201 - DNA, 2009 bp, Arabidopsis thaliana landsberg
  unsure (1)..(2009): unsure at all n locations
aagaagcgggcgtcacaaaagacgccttggtcacaaaaaaaggtatgcctgaaaccattacctggaggattttgggacgtccctgcagaaaacctccagcgacgaccggagcgaccccaccgttgcttcggcacactcacggagctcgtcccaagactgctcctcccgttcgtcgtcaagaacgaagaagggatctgaggcctcacgggtccggaaccggagcaactggcgccgaccctgggagtccgccgcacagtgacaaggctgcgctcggcgggacggatcgcgtttccgcgcccccctcctccgaggcaccgagcgccgacgcctcggccatctcagcattggcagcaacaggtcgctccccgactgggacggcagcggcttcagtaacaacaggcgccagcaccggcggcacgtccggtgggctcggggccacgtccacgtcagtcgcctcctccagcacgatggctgcctcggcagaagagccggcctcgggaactcgctccacggcgactggtgccgccagagccccccgctgtggagcgccttgcgagaaggccagctgaacagcaaggcccggctcgacactggctgcggaagccgacgccgtcttaagggccttctggggagccagatcggtcaggccatggcttcgcttgctgaggaggaaaggaaaatcgcggtcgggacatacgaatgaaaaacnnnnnnnnnnnnnnnnnnnnnnnnnnacccgctccgggccatgatcaaccgtgcctgaggggaggtctctcggatctcgacccccgaagacactgccgaggtccacctcgccgccagcttcggcatctccctcgccttgggcaccttggacgcccgtgagacggactgcccgggcgttgccacggcgacctgagggtcaccctcctgcgctgccggcgtgggcgacggctcccgagaaacagacgcctcgacctgactccccggggtcacctcgacttccctggccgaggggtcaagtaccccctcggtctgcccccgctcctcgggccgggacctcgacgtcccgactccgggaactgatggcgtcagcccgctcgggggctggcttgacgactcctggccaaaccccaagtcggggctgaggccaaggcgggcggccatgtcgtcctcctcgtcatcaccttcatcatcgtcgtcgtcgtcaggcgtttccggcgacggctccctcgggagcccctccctctcctgccggcgacggagcttttccaaggcgtctcgagcacgcctccgctcgcgggcccgggccttctccgcgtccttcttcttcttcttctcgctcgcggcgactcgccgcgctgctcggtccaccgcgtcctgcgggacccgtggcagggaaggcttgtgccaccccacctcctggagaaggggggaaatcccgaccgtaagaaccaggggcaacccgacgcaagaagaaggaaggagcggacactcaccagagtcacgcacccttggtcagggcgcatcaagggctgggagaaggcgtgggggtccggcttccccaacgcgacggacacccgccattggagggcgtcgaagggaagaggatcaggggacatccgcgagccctcccagtcagcctccggggtcatctcccaaacggacagccgtccgtccgccaagggaagcaccctccgacggtggatggcggcaatcactcccgcagcagtgagtccccccttccgcaacgcctccaaggcctggagaaggggttcgaggttcttctgtctttcgtgcggggtcccatggcgccaagcttcggtggcagtggtgactactcgctgggagaacggcgggagcaactcgccgtcattccggaggtaaaaccacncgcgctgccaccccttgttcgaggacgcgaggatggcaggaatatacagcgacgcccgcgactgcctcagcaggagggtgcaccgccggcccgcaccgctgcacggactttcctctcccccgtcggcgaggca

SEQ ID NO: 174202 - DNA, 1525 bp, Arabidopsis thaliana landsberg
  unsure (1)..(1525): unsure at all n locations
ctgaatccaagaagaaccggcacaagatgaaaagttgtagattttcgtggaggaattaaaaacattggatggacggaatgctagtggctaccatctggctgatgatggcaccttattacttaatgggagaattactgtgcctgaccgtaaggattacgacaagaaattttgaaagtggcacatacttctttgttgagcattcatccgggaagtacaaaaatgtacaaggatataaggaagtattaccattggcctaggatgaagagatcagtggcaaaatgggtaagccaatgtgattcatgccaaagagttaaggtggaacatcaagtaccagcatgtttattgcgtaacctaccaattcctgcatagaactaggagtcaatctcaatggatttcatcactggattaccaacaagaccatgacgtagcaatgatgctatatgggtagtagtagatcgcttgaccaagatggctcatttggtatcaatgaaaagtacggatcgggcacctatcttggcagaaaagtatatcgatgaaatcttatgactccatggggtacctgctaatatagtatccgctcgagatcctaagttctcatctatattttggcaagacctccaacgttgtttagggagcgatgttcatatgagcgcggcattccatccggagactaacgggcaaactgaaaggaccatccgaaccatagaagatatgattcaactttgtgcactagagtgggctggtgattgggaagacgcatgcctttggttgagttttcttacaatatcatctatcactcgagcatcggtatgtcgccatttgatgcaatgtatggaaggccatgtcgatctcctctttgttggactgaagtaggatagaggatgagttttaataatcggttgatcaatgagattgcggagtcaattcagttcatccgagacattatcaagaaagctcaagatcgacagagaaagtatgctgaccgaaagaggcgtgaagtgtaatttcaagaaggcaacatggtttatcttaaggtaactgcgtttaaagggaaagatcgttttggaaaagttgtaaggctcgtagtaagatttattggtccatacaaaattgagaacagaatcggggaggtagcctaccgtttgtttatgccagaagaaatgcgattacataaagtttttcatgtgtcgcaactaaggaagcacgttccggatcctaatgctatcatacccgagccgatacaagagttgaaaacgaatctcacctttcccgaaatccctcttggtactggtgaaagaagaatgcggagataaagaatagaaggattctacaaattcaagtgttctggggaaggcaaaatcgtaaggttattacttgggcaaatgaggaaaagttcctcggacaaaatatccannnnnnnnnnnnnnnnnnnnnnnngaggatgaagccggaccgtctaatccttctagaatttgggacgaattctattaagggggggggagaatgtagtgacccgcgtaaggac

SEQ ID NO: 174203 - DNA, 762 bp, Arabidopsis thaliana landsberg
cagcagtttgtgttcaatgtatctagtagtcgtaagagaaagagctaatctaaaagttatgttcacagacgggttgtgctgatgtttgcactgctacaagaaatgactgagtaagtgttagggaaagaaaggagacgtttagtggacgagtagtagatgtcctcccaaagaatcttttgtaaggctaaaagttggagatttactagtcataacccgagaaggatcgctcgatgaaccatctgtaactgttccaggagctcataggttaacttgtccttccggttatttgtttgattcagtcaagcctggtgaaaccattggttttgatgatggaaaaatatggggagtcataaaaggaacaagtccttcagaggtaattgtctccataactcatgcacgtccaaaaggtacaaaactaggatcagagaagtccattaacataccgcagagcgatatccatttcaaaggcttaacatcaaaagatattaaagatcttgattatgtagcttcacatgctgatatggttggtatttctttcatacgtgatgtccatgatataaccgttcttcgacaagagttgaagaaaaggaaactagatgatcttggtattgttttaaagattgaaacgaaaagtggattcaagaatttgtccttgattcttttagaagcaatgaagtgttcgaatcctttaggaattatgatagctagaggtgatcttgcagtggaatgtggatgggagagattggctaatatgcaggaaga

SEQ ID NO: 174204 - DNA, 257 bp, Arabidopsis thaliana landsberg
atcacttgtgggaaaactctgattccgttattccttgtgaaattttgccggagagtttgaaatctaggggcgggggaagattaccggtaatgagagataaagtgagattcaagatggaacaacgagattggagtagtggtggtgatacgagattggagcggtcgcgggacaatatcaatggcgaatctggccgtgatcttgaggttaagaagaaaattagagaaggatacacttactgtgccggcgagtggccgttt

SEQ ID NO: 174205 - DNA, 300 bp, Arabidopsis thaliana landsberg
ttgcccgcggacagtacaaagccagccagtgaccgcgttaccttgttgcgtgtggatgaagcttcggaaacgcagcgcattgataactacctggcaaaaatgctcaaaggtgtgcccaaaagccatgtctatcgcattctgcgtagcggggaagtcagggtcaataaaaaaagggtgagtgccgaataccgcttgcaactggatgatgaagtccgggtgccgccgatccggattgcagaaagcgcacccaggccaggcttgcccgaggttaaagcacggctggcggaatgtgtgatttat

SEQ ID NO: 174206 - DNA, 755 bp, Arabidopsis thaliana landsberg
gctgttgaatctcatgagcacaaggcgtgatgcacgccatatgttagtaacttccttgccaaagaattcaaaaaagcttcagagctgaccataagaagaagcactaatgatatgtatgaagctactataggtaacgagtttctcataggatatgcttaagtgagaggacttgcacttgtcagaaatggcaaatctgtggcattccttgtgagcatgcttatggagtcatgttaaacaagaagcaagaggttgaagattatgtgtgtcactggtttcggacacccatgtggaagaaaaattacacagacggcctatttccgcagagaggtcctgcattttggccatcgacagaacatcctgatgtgcatgcaccaccaccaccaccacagcctgggagaaagaaaggaaaagagactaaaaaagacaagaagagaaaaaagggaaagaatgagactcctactaagatggcaccaaaacaaatgaaaagggtaatgcattgtggtatttgtaatgcagctggtcacaactcaaggttccacaagaagaaaaagtcttcagtacaggttagccttttggttatgttttgcattgcattaaaacgtgtattaagcctataaaatagtttgactcttgttttgctttaaaatgtgtattaggcctttgaaggactgatgtctcaaggcagtctaggccctagcactcatggcactcaaggcagccaagtggaaccgtctcaaggagttgtgatgtctcaa

SEQ ID NO: 174207 - DNA, 277 bp, Arabidopsis thaliana landsberg; identical to SEQ ID NO: 3020
  unsure (1)..(277): unsure at all n locations

SEQ ID NO: 174208 - DNA, 121 bp, Arabidopsis thaliana landsberg
  unsure (1)..(121): unsure at all n locations
gcttttgggcctccacannnnnnnnnnnnnnnnnnnnnnnnnnnnnnnnnnnnnnnnnnnnntctaccacccgagcatgctacaataatggatttttcgagattgtatgaagtgttcaata

SEQ ID NO: 174209 - DNA, 160 bp, Arabidopsis thaliana landsberg
tttttggcgggaaaattacaggtttacgcttttggcgggaaaatcatgggtttacgtttttggcggaaaaatcacgggtttatgttttttggtggaaaaatcacgagtttactttttttcaattacattgcttgtatatttaagaaatttggaaaatatt

SEQ ID NO: 174210 - DNA, 386 bp, Arabidopsis thaliana landsberg
aaaacagacgtagggggaagttctcacgttgatataactatgatcctcctggatgatttacctttggatcttctcgacatgattctcttcagattataaccccaagctatggcaatgatactatgtacaaacaaatctttcaaatcgtatttaactgacccaagattaggacctcagtatccttcgtgggtcagacccactttgattaacatttggagctctaacaaatctctcatcttctgccaacctttggtctattcatgtgatgatatgtcactaggaaacaaagcatagctcattaacgatcgatgttacattttcggctcatgctccggacttcttctactatacatttggcacattctcatcgtaaatcccttgacaaa

SEQ ID NO: 174211 - DNA, 395 bp, Arabidopsis thaliana landsberg
  unsure (1)..(395): unsure at all n locations
atgtttgtggatgcaatgcaagattgttctgtttcattgatttagtaagagagctcttgtattgatttctgttgaagttttgtggtgaacctttccaaccactcaacgaggaggaagtagctctagtcaatagtgccttgtctaagagaaacaggtttttttctttctttcagaattagcttatcatgtgatttgacttgattgagaatttaaccacttgtgttgctnnnnnnnnnnnnnnnnnnnnnnnnnnnnnnnnataaaaactccaatattgacatctctggagaaactttacaatgcctaaggccgaatcaatggcttaacgatgatgtaggttaagtcaagagttccttatgtgttttgtttgcaggaatcgtgtttgattttcgtct

SEQ ID NO: 174212 - DNA, 347 bp, Arabidopsis thaliana landsberg
atggatgggtcagctggtccaagagatggaggagctatgaagcctgtgattttgagagtttgtgttgctattgtattatcagcaactggtttgattttggctaggtttgtgtctcggaatgaaaataacgaggtaacttcttctacaagtaatccacagtcttcttcatcacctatcagagaaaacgacgaggaacaagaagcagagagtccgaatcatcagaagcaagagattctcaccttaaaatccaaattctatgagcttcaaaagaatgaatactagatggagtttcctttcgagcggttttgtaacttgaaagatcacgatgtcatgcttattgagcctaa

SEQ ID NO: 174213 - DNA, 1209 bp, Arabidopsis thaliana landsberg
atgcaaattgcacgtagtgttaacaaaatgtgggagaccattgaaccagggatcgacgatggatataagaatactatggctcggggtctcatctttcaatccataccggaatcgttaaccctacaagtcggaactcttgcaacagcaaagttggtgtgggattcgataaaaactcgatatgtaggagcggatagagtcaaagaagctaggttacaaaccttgatggcagaatttgagaagatgaagatgaaagaaagtgagaaaattgatgtttttgcgggaagacttgcagaattagcaacaaggtctgatgcgttgggaagcaatattgagacatctaagctcgtgaagaagtttcttaatgctttaccactgagaaagtatattgatatcattgcttcactagagcaagttcttgatctcaacaacacaagcttcgaagacattgttggacgtatcaaggtatacgaagaaagagtttgggatggagaagaacaagaagatgatcaagggaagctaatgtatgcaaatactgacacacaagatagctggtatgcaagtagaggaaaagaaaaaagaggaggttttaatggacgtggaagaggccggggaagaggatcccgagatacatctaaagtaacttgttatcgatgtgacaaactcggacactatgcgtcaaactgcccggataggttacttaaacttcaagaagctcaaacaaatgaagaagacgaaacccaagaagctgacaggctcatgatgcatgagatagtgtacttgaatgaaaaaagcgttaaaccaagtgtgttcgaaacagaactagatggtgacaatgtttggtatcttgataatggggctagtaatcacatgacgggtaatcgagcatatttctctaagattgatgagagtatcacagggaaagttagatttggtgatgattcttgcatagatattaaaggaaaaggttcgatactttttatgagtaagaacggcgagaagaaagtcttagcagaggtctatttcataccggatttaaagagtaacatcattagtctcggacaagcaactgaggcgggatgtaatattagaatgaaagaaaattatttaactctgtatgatcgagatggaaagctattggtaaaggcaatgaggtcgaagaatcgcttgtacaaggtcataatggaagtcaaagcttctaagtgcttctcc

SEQ ID NO: 174214 - DNA, 274 bp, Arabidopsis thaliana landsberg
aagtcatgccctttgattgtattaccaatgtagatacgcacccccaggagaccgttttgtgagtgataggtatggaatgcctgaacatcatcttgagaatgaatatcgcgggcgagagagaagctatgacagggacagatacgcaagggatacaagtgacagatatggagatatgggaccgatacgcgatgagggaagaccctacagaagcagaccaggtccttatgaccgtcctagccgtcctggaggcagaccttcatcatatgaacgttgg

SEQ ID NO: 174215 - DNA, 309 bp, Arabidopsis thaliana landsberg
gcaagaacacaggggggaaagggtaatgaattagaacgagatcgccctaagacagaatctatatggaacgcgcaacgcgcttatttgtgtccaaggtcctggatatataactgctcgagacattattttaccgcccgctgtggaaatcattgataatacacagcatatagctaccttaacagaaccaatagatttgtgtattgaattaaaaattgagaggaatcgcggatatagtctaaaaatgtcaaataactttgaagacagaagttatcctatcgatgctgtattcatgcctgttgaaaagtccca

SEQ ID NO: 174216 - DNA, 210 bp, Arabidopsis thaliana landsberg
atgggtaacggactaaccaacactggcttgaatgccattcttgacggttgtcctcatctggaagaacaccttgatgtacgcaagtgtttcaacattaaccttgtcgggaatcttgaaaagcgatgtatgaagaggatcaaagagttgagacggccccatgactcaactgcggattacccgtatagtatcagtgtgtcaatggtggttcag

SEQ ID NO: 174217 - DNA, 572 bp, Arabidopsis thaliana landsberg
  unsure (1)..(572): unsure at all n locations
atgtgtttgggagttacaataatgttgttgcaggctaacagagggcttggactctctgcccatattatcgatcactgtaatcttatcctcaagttccctgaaggcactaacagtacttgggtatgtttacacttgtctggtttctttttgagatttcattggttttattgtgatcaagttttttacacttgcattcttatctttcaatgacagtacaatgcacaatttaaagtttttgaagcattggagttcaagtataatgtttgtgaggcagttctcttatgggagcaggtttgtgcttctttctttctctgattagtttttcttgttttagaacttctcgcaattctaatgttnnnnnnnnnnnnnnnnnnnnnatatgactacagtattgacaagagaatacctcgatgtacgccctgatgggtggttggactacgcagctatgagaattgcacagttgtatgattctaaacgtttttgtctaatggtttgcttgtgttggttgatctttctagttgaaactcttgatcttttgggtttcaggggagcttgatagtgttataatcgta

SEQ ID NO: 174218 - DNA, 457 bp, Arabidopsis thaliana landsberg
gcggatcaaagatagaggactggtgatcaaaggttgggcgccgcaagttttcatcctctcacacgcatccattggagggtttttgactcactgtggatggaactcgacactagaaggaattactgcaggagttccattattgacatggcctttgtttgctgaacaattcttgaatgagaagttagttgtgcatatactaaaagcagggttaaagataggagtagagaaattgatgaaatatggaaaagaagagcagataggagtgatggtgagcagagaatgtgtgagaaaagctgtggatcagctaatgggtgatagtgaagaagcacaagagagaagaagaaaagtgacagaacttagtgacttggcaaataaggctttgaaaaaaggaggatcttcagattctaatatcacattgctcattcaagatattatggagcaatcacaaaatcaattt

SEQ ID NO: 174219 - DNA, 501 bp, Arabidopsis thaliana landsberg; identical to SEQ ID NO: 77701

SEQ ID NO: 174220 - DNA, 260 bp, Arabidopsis thaliana landsberg
gagcgccgatacctgatccgggcgttcaccagggcgttcgccatacctccgcatcgttacgtgaccgggcgacggctcgacctcgctaggcgcaggctgctcgacggtgagccgcctgccgcggtcgccgtggcgaccggcttctacgaccaggcgcacttccatcgccatttccggcggttgctgagcacttcgccgggaagttaccaagcatcgatcgcgtaagcgcccaccgcgtgccaatgccgctgttcgggcgg

SEQ ID NO: 174221 - DNA, 585 bp, Arabidopsis thaliana landsberg
gtgttaatgtacactccatgaaatcagacgatcgcttagctcattacgacataatcatctttaatttttctcatgcagggtttggtttttgatgagcttgtttcagatcttatatatcaaaagtttgatatttggaaattcataacaagatcttggattcctgatacatccatatatgtttggaaccactttcatatatatacttttaaaaatatatatgtataatatttattatgattatatatatatatattattcatatgaatgtatattcaacatttgagtgtgcaattcacaggaaacgcaataaggtatttggaggatttatggagagtgcaagagagatgatgaaagacgaagatggagagattcatatcactctaaacacactaaacccatttaacaaatgggatttaaaggctctagctgaagaaaagggtttgcgtttaatccagagaatgcaattcattaaatgggcattcccaagttcctccaacaaaagagcaagtggaagtaattgtgattttatatatcctatcggatcagctatcacttacatgtttaagaaatagctgattctcaaat

SEQ ID NO: 174222 - DNA, 880 bp, Arabidopsis thaliana landsberg
tggctttcaaactggttgccggccgcttcttttccttgatgccattccatttaagtctaggtatcatgagattttgttaacagcttctgccttggatggagatgattgcgtgcttccagtggcattagcccttgtcgatgtggaaactgatgaaacgtgggcgttggtttctggaacaattaaaggtagctttgtccagtttacggcctcttacctttgtctccgaccgagagaaaggactagtgacttctgtgttggagattttcgataatgcccatcatggttattctattcattacttgatggaggattttatgagaagcctgagaggtccgtttcttggagatgggaaaccatcgttaacatactatttactggctgcagcacgtgctgatcgacttgatgggtttaaggtttacactgagcaaataagacgagtgtctcctagagcttatgattgggtaatgcagattgaatcaaagcattgggcctgtgccttgtttgaaggtgaaccgtacagccatattacgtcagatgtggcagagatctactctaagtggattgaagaaattcaggaaacttccatcgtccagaaacttgtggcatttgtgaataaaattgtggagttggtaaacagtagccaagagaagtcaaaaccgtggttcagccaacttgtgccatctaaggaggaaagtctagtggaagaatgcaagaaagcaggctcgctaaaagttttcttttgttcagacacgctttttgaggttcatgatgggtctgttcagcttgtggacatcagtaaccaaacctgcagctgtttcggatggaacccacaggccttccttgccagcacgcgattgctgtgttaaacacaaaaggaaga

SEQ ID NO: 174223 - DNA, 579 bp, Arabidopsis thaliana landsberg
agttagtattggctcaatttatatacattattgaaaaacaaaagcaagttttggaacgggtttgatgtatgaatgcaatctttacatgtcaaaatagacggtccaccaaatgtcctatccaaataatgtcatttggaatttactgattatcatcattgacaggtgatgattgcattgcgattaattcggggacgtctaacatccacatttccggtatagattgcggaccaggccatgggataaggttaaccaaattaaaaatgtactacaaaatgttatctatgttttacatatatatagataaaccatgtatattgtaaaatgtatagcataggaagcttgggaaaagatggagagacagctacagtggagaatgtatgtgtccaaaactgtaactttagaggaactatgaatggagctcggatcaaaacttggcaggtacttttgaattttcttattaaactctcatgtttcagtcaccttacatgtgtttctttttcttgttcttttaaataagttctggttatatatacatagggcggatcgggttacgcgagaatgattactttcaatgaaatt

SEQ ID NO: 174224 - DNA, 240 bp, Arabidopsis thaliana landsberg
atggtgaagttgactttcataattctggaaaatagtcatatcacattcgcttctcttcccactggaggaaatgatctcaaacgcatccgcttcaggtattttaacaactcaaaacaatctctatatcttcatgacattcaaagctggaacatgagataaaaactaaccattacttgtgtcatgttttgaaagccgagagatgtacaataagtggcaagctcaacggtggtgaagacttta

SEQ ID NO: 174225 - DNA, 278 bp, Arabidopsis thaliana landsberg
ctcttttggcagaagccatggcgcttcatctagcccaacaaaatgccttagaacccggttttaggaagtcaccttcgcttcagatttgcaaacgctgatcaaagttatttactcagaatccttcccaaagaatctctacgtgattttccaagatgttcttgctctttcgtttaatttcgatcaaatttcttttcacttcatttttagagaaaaaaacggttgtgcatatgcatatgcaaaatctgcattaaattatgcacttattgtaccaacttatg

SEQ ID NO: 174226 - DNA, 509 bp, Arabidopsis thaliana landsberg
atgagcttcttgggaaacgagtatacaaggtatctgtctcatcagcagcaacaacaaccagtgtctcctcaccacgagtgtaagtgatgggaacacctcagcggttggaggaaatcaccgttcctttgcacctcagacgccaaccagtcagaaccttcctccaaatggtgcttctactcaaccggaaaatcagcagcctgcaccttctgtcaatcctactaatcctctagctgtcaggctcaacaacatgacaatataagagttgcttgaaagttctgggcgtgcgtctttgcccagattagaccctaagcgtccgccgggaacattctggtaagtataagtgaaagttttggtttaagctatgttattactgcatgacttgtatctgtctgattgaatatatgcttgtaggttcggccatgactattcagttgcagccattgtccggagtcatactttcaaagagatttgaaatctcctcatgctattggttcgcagacaccagtgac

SEQ ID NO: 174227 - DNA, 332 bp, Arabidopsis thaliana landsberg
  unsure (1)..(332): unsure at all n locations
tatgataggagtctccggtgtactgggtgtggttttaatatgcgctattttgggtgctactgtacaaaatgtctttatttgaagatggtgatggtgcagacccattgagtgctgttttccctggtccagctgtagttgtttgtgcaagggtctcggctagccgcttttggtggcgtctcttagtggtcgctttgtccaattagcgttggttgcntttctttttgttatttgttccgctccctcgtttatataatcccccccccgnngttgttggtttggctttgggtaaaagggaatttgtnttggtttgtgagggaacccgtcaccccccc

SEQ ID NO: 174228 - DNA, 1288 bp, Arabidopsis thaliana landsberg
  unsure (1)..(1288): unsure at all n locations
atgagaatcttagcatggaattgccaaggggtgggtgcgaaaactacaacccgttgactggaagacatgtgtcgtatgtactccttgcgcaccttcaagatctacaggtgtcgttagggtttgattgtttacaaactgttgaacctataggtaacagtggtggtcttgctcttgtattctcgaaactatccggttaagtttatctttgtatgtgatcgcttgattgatattgaaacggttatagatggaaatcgcgtgtttattatttttatttatggggattcgggagttcaataccaagaattggtttgggagcgtttaactcgtattggtattcttcggtctgagccatggtttatgattggtgacttcattgagatcatttgatataatgaaaaatgaggaggaaaacggagatctgaatccttctttctcccctttcgatgtatgatcgaaaattgtgggaagattgattttccctctatagggagtttattttcttggatagggaaaaagagtagtggatcgggtggccgaaatcgacgtaaccttattcaatgtcgtttagagagagttatgggaaatgaagaatggcatagcatctnnnnnnnnnnnnnnnnnnnnnnnnacaattgaggggtttcgatcatagaccccttctagcatccattcataataaatctcatcgtccttataaatactttatctttgataaacgttggatagatacactaggattcaaagattttgttaaagaaggatgggctttaccctctcgtggagagggcgttccaatattccaaaagattaggaattgtagacaaactatttctatttggaaaaaatccaatagaacaatttcgagaagctcattcttgaactacattcttagcttgaactaccatacgaagatgagattttttctattgaagacttacttgccctaaaatggaagctctgtcaggcttacatagacgaggaggttttttggaagcataaaagtagggagatatggctcctacttggggacaaaaacacaaaatattttcatgcttctacgaaacaaacaagggctagaaataaaattctaggcttacttaaccaagatggcctatgggtggataatgagttggggatcgaacacttagcagaggattacttcaagactcttttttctacgacaaatcctcgagtttttgactcagttctccggtaagtccccgtgttagtgaccgaagaaatgagccgaacactcacaaaaacgatctctctagacgaagttaaacgt

SEQ ID NO: 174229 - DNA, 274 bp, Arabidopsis thaliana landsberg
ccaccttcaatcgcaaccggaaatgcaccttcaccggattacagagtcgagattctctccgaatctctaccatttatccaaaaattccgaggtaaaaccatagttgtcaaatacggcggcgcagcaatgacttcgccggaacttaaatcctccgtcgtaagcgatctcgtgctcctcgcgtgtgtcggtcttcgtccgatcctcgttcacggtggtggtcctgacaacaaccgttacctgaaacaactcaacatcccagctgagtttcgtgacg

SEQ ID NO: 174230 - DNA, 729 bp, Arabidopsis thaliana landsberg; identical to SEQ ID NO: 14048

SEQ ID NO: 174231 - DNA, 595 bp, Arabidopsis thaliana landsberg
atgaaaacgatctcaatcttcttcgtcatcatcttaatgtcatcttctcacgcagaagacgatgtactctgtctcaaaggctttaaatcatcactcaaagatccttcaaatcaactcaacacatggtctttccctaattcatcatcgtcgatttgcaaactcaccggagtttcttgctggaacgctaaagagaatcgaattctctctcttcagcttcaatcaatgcaactctctggtcaaatccctgaatctcttaaactatgtcggagtttacaatctttagatctttcctttaatgatttctccggtttgattccttcacatataggttcggggcgtccctatcttgtaactttagatccttcaggcaacacactatccggtttgacaccgtatcagaccgttgtctgtaaattcttaatcaggtcagctctaaaccagaccaagtaaaccggatcgattccgtctgaattaacccggttaaaccgtgtccaccgactttctggacctgatgctgatctcgctggtcagattcatggcgagcgatctcattacgcagaagatggcttcgcgcggtaatggcggactctacggt

SEQ ID NO: 174232 - DNA, 1397 bp, Arabidopsis thaliana landsberg
ggtaattgtcaagcgggcaaacttaatgttgcacaaaaggttttcaataggatggttgattgtggtgtgtctcctgatattgttacctacaacatcttgttagattgtctatgtaataacgggaagatagagaaagcattagtgatggtagaggatctgcaaaagagtgaaatggatgttgatattattacatataatatcatcattcaagggttgtgtagaactgataagttgaaagaggcttggtgtttatttcgtagcctcactcgcaaaggagtgaagcctgatgctatagcatacattacaatgatatcaggcttgtgcaggaaaggcctacggcgtgaagcggacaagctgtgtagaagaatgaaagaagatgggtttatgccaagtgaacgcatatatgatgagacacttagagatcactacacaagcttatcagctgaactcatcaaagcagctcatgagtaaagcggtctgcgaagatgcttatgacagtataagcaaggtcatcgatatgattatgatgggaaactggacaaactttatagccatttgttgatttgctctaggaaagttaaaaggtctgatgggaaaagaagatctagcgcatagataggttgcagtgttcattttgttgtatctttcataagcacaattttgttgcatttacaaacttatactgattaagattctgtaatctgtatatgctttgtatgggataaacccaagtcacaaaataaggaattttttaacctccattttgtgttaaaatttcttatacgaccaagtgtttgaaatgttgccatcatgcaaagtgtaatcctttttctgtattccatatatttgcatacaaatcaggccaactatttgaccaaaaaataacattccaaagtggtccttaatttacattttgacatagagtctccatcactctactggtaagctcgaatcatcccagctcactcgagcactgctcatatgccaaatcaccagaagcaccggccggattccaccatttcttccctttccagcttattcttctcttctttgaccactctataattatctcttccctgccaataaaaatgttatatgcaaaaagatggaatgggtctcaggactcgaaaataaagagttcgaaaaaaatctaaatgtaacaacacctagttgcaaccgagatggtgccaaataaatgctattatacactatcaaaatctaacctatctttctttaacaatacaaatatttactctttgattagtattcccagctctttcacacagctgatacaaaatatctacagaataatagtaagtagaaacaatccctccttatgcaataaggtatctcaaaaaagaaatggctgacctgaatctgcccatgccgaattttcg

SEQ ID NO: 174233 - DNA, 504 bp, Arabidopsis thaliana landsberg
atggcgtctcggagagtcttatcatctcttctccgttcatcttccggtagatctgccgccaaattaggcaaccgtaaccccaggcttccttctccttcacccgcgcgtcacgccgctccatgtagctacctcctcggccgcgtcgccgagtacgcgacctcttcacctgcaagctcagctgcgccatcttctgctcctgctaaggatgaggggaagaagacctatgattacggtggcaaaggtgcgatcgggcgtgtttgccaggtcattggtgccattgtcgatgtgagatctgaggatcaggaaggattgccaccaatcaaaacatctctcgaggtgcaggatcaccccacaaggctagtgcttgaggtgtctcatcacatgggtcagaatgtcgtcaggaccatcgctatggatggttctgagggtataaatcgtaaaaggaaagtcctcaacactggcgctccaatcactgtaagtagcttctatgtccagatccttcta

SEQ ID NO: 174234 - DNA, 413 bp, Arabidopsis thaliana landsberg
gctggtttagctggaactacaaacaagactgtcaagcttcctaagaacttcactttgcttggtcccggcccctggttacacttgcggtcctgccaaaatcgtgccctctaccgtttttctcacaactgacaaacggcgaaaaacacaagctttgagtaagcaatcaatcaaaaaccttaacttgttccatcatcgaaatctaaacatcaatttcaaacttatgtttctgcagtgacatggaatgttacctgcacatactcacagtttttagcaagaaagcatccaagctgttgtgtctccttctcttctttctacaacgacaccataactccttgcccgtcttgtgcctgtggctgcgagaacaaaaagagctgcgtcaagtgagtaacaaatcattgaaatccaaactcttt

SEQ ID NO: 174235 - DNA, 505 bp, Arabidopsis thaliana landsberg
  unsure (1)..(505): unsure at all n locations
acgcgtttcttgttttcttcttttctgtgtttcatgtctatgccttggcaaaaaaggagcagaaaacagaaggagcttatcaacttgtctgttctggactttggaaaacttgaacgcacaaaccaaaaaactcagaaatttgcaatggctgacagagtcatcagagctgatgcagaaggagttttgagagatgtggatgggcaagcctacaatgaagttggtcagagattggatgatcatggacttatcctacatgagaacgccaatgaggatcaagcggcctcaatgcgcaattagcttcaagagatgcagcagggctcggtgttgggcgacaccaactgggtgtcgaacgacacaacagaggtgtcgatcgacaccaacaccagattccttcagctattcctccagctgcggaaccacgtcgtactcttggggatttcaacaggccagacctgttctatgctaatcgtttagcgattgtacccccanccattccagaggaacg

SEQ ID NO: 174236 - DNA, 985 bp, Arabidopsis thaliana landsberg; identical to SEQ ID NO: 18489

SEQ ID NO: 174237 - DNA, 458 bp, Arabidopsis thaliana landsberg; identical to SEQ ID NO: 67819

SEQ ID NO: 174238 - DNA, 508 bp, Arabidopsis thaliana landsberg
cttctgcagaaaaaagctgaagaggttaaaccgtatttaaatggacgatcgatgtatcttgttggtcagtttctatgtctcatcctttgtttcagtattgtttagcttctcttgcattttggtagttgaacagtttcctcgtgaatgcgttaggtatgatgggttccgggaaaacgactgtaggcaagattatggcaagatcgcttggttatacattctttgattggtatattgtctgcccattttcaactggatgttggttcaactttagctgatcttaaacattgttttgtaaatgtgccagtgacactttgatcgagcaggctatgaagggaacttctgtagctgagatatttgagcatttcggtgagagtgtcttcagagaaaaagaggttggttttatgcacttcttcccctaagtcttattgtagtctagctgctaatttcaccacatgctttattcttagactgaagcgttagagaaactctctttgatgtaccacccttt

SEQ ID NO: 174239 - DNA, 820 bp, Arabidopsis thaliana landsberg
tgaattgaatatttcgctggctagccttagagtagaaaatgaaaatttgattgctaaggctaaagattttgatgtttgcaatactactatttccgaccttagaaccaagaatgatatattacatgctaaggttgttgaattaaaatcttgcaaaccctctacatctaatgttgagcatgtttctatttgtactagatgtagagatattgatgttaatgctattcatgatcacatggctttaattaaataacaaaatgatcatatagcattattagatgctaaaattgccgagcatgacttagaaaatgaaaagtttaaatttgctagaagtatgctctataatgggagacaccctggcatcaaggatggcattggctaccaaaggggagacaatgtcaaacttactgcccctcctagaaatttgtctaactttgttaagggcaaggctcccatgcctcaggataacgagggttacattttgtaccctgccagttatcccgagagcaaaattaggagaactcattctaggaagtctcactctggccctaaccatgcttttatgtataagggtgagacatctagttctaggcaaccaacccgtgctaagttgcctaagaaaactcctactgcatcaaatgaacatagtctttcatttaaaacttttgatgcatcttatgttttgactaacaaatccggcaaagtagttgccaagtttgttgggtacaaacacaagggctccaagacttgtgtttgggtacccaaagttcttgtttctaatgccaaaggacccaaaaccgtttgggtacctaaagtcaagaac

SEQ ID NO: 174240 - DNA, 588 bp, Arabidopsis thaliana landsberg
aacagggcctggaccgttcctttcaagttttctacgtttttcttaaaggagtcatgtcggggagtattacaatcttttaaggggtatatgcatagaaattaagtagacaatcaaatatgtattataaactcttttttttgctattagaaagtcaactacatatgtaactaatatatatattttaaaaatataggacgagtttttagcgggagtgaacgcaggagcgatcacaatgatatgggcgatgacagagctagccagacatccaagagtgatgaagaaacttcaacaagagattcgagaaatactcggagacaacaaagaaaaaatcacggaacaagatctcgaaaaggttcactacttgaaacttgtgatcgaagaaacattcagattacatcctccagctcctctctggctacctagagagacaatgtctgacttaaagattcaaggctacaatattcccaagaacacgatgatcgagatcaatacttattcaataggacgcgatcctaattgctgggaaaaacctaacgatttcaaccccgagagatttatcgatagccctgtcgaatataagggtcaaca

SEQ ID NO: 174241 - DNA, 1128 bp, Arabidopsis thaliana landsberg
  unsure (1)..(1128): unsure at all n locations
cttgaagggtgcacaagtcttgaatctcttcgagatgcgaatttgatgtctttgaaaactctcaccctcagcaactgctcaaacttcaaggaatttccattgattccagaaagtttagaagctttatacttggacgggacgtcgataagtcaacttcctgacaacgtggggaacctcaaaagacttgtcttattgaatatgaaggactgcaaattgctggagactatccctacctgtgttggtgagctgaaagctcttcaaaaacttgtactttcaggttgttctaagctcaaggaatttccagaaatcaacaagagctcttcaaaaattttacttctagatgggacatccatcaaaacgatgccgcagttaccctcagtacagtatttatgcttaagcagaaatgatcatctcatctaccttccagctggcatcaatcaagtttctcagttaacacggctggatttgaagtattgtacgaagcttacatatgttccagagttgccaccaactctccagtacttagatgcacatggctgtagctcactgaagaatgttgcaaaaccactggcccgtatcatgtcaaccgttcagaaccattgcactttcaatttcaccaactgtggtaacctggagcaagctacaaaggaggaaatcacatcgtatgctcaaaggaaatgtcagttgttgtcagatgcacgtaaacactacaatgaggtttctctcaatattctaactctatctcctgtcgctctctgtacctgtctctgattcttatatttcaggaaactccacaatgatgattttctttataatttgtcagggttcagaggctttgttcagcacttgctttcctggatgtgaggtgccttcgtggtttggtcatgaagcggttggatctctgttgcaacgaaaacttctcccacattggcatgacaagaggctttctggaatagctctatgtgctgtagtctcatttcctgacagccaagatcaactcagctgcttctcggtgacatgcacctttaaaataaaagctgaagacaagtcttgggtcccctctacttgcccggtaggaacttggactagagagggaaacaagaaagacangattgagtcggatcatgt

SEQ ID NO: 174242 - DNA, 703 bp, Arabidopsis thaliana landsberg
atgataggcaagtcaaaattaggaatcactcaaaataaatttcttcgattgattctcttttttctaatgtacaagattctgtgtaactcaactgttgtttcttttgcttttcttttgatgtgtttgtgtaagatcagacatagccgttaacttcacaggttagttgaggcatttccacaaacactttgtgaacatgtccttctctgatcaatttattgcacagaccatattaattctttagtctaattgaaacagatgggatgttcaaaggactttaccatggcaagaactgtcatgttccggatattgccactgtcttgaaccgggcttggtctgctggagtcgatagaatcatagttgagtcactccttattgattctttttgtttgaatgattacaagtgatagactttgagtaattcagattccagttttcctgaataggtaactggtgggtcattggaagaatcaagagaagctcttgcaattgcagagactgatggtttgtttgttttatagatctttttttcagaaagtttttagtcttttagaagtttttgattgatgtacattttttgcaggtaggctgttttgcactgttggtgttcatccaactagatgcaatgtcagtttttttgctttacatactcgagagtttcttgaaatctaaattataatcttctgtttggatagatctttaatgt

SEQ ID NO: 174243 - DNA, 701 bp, Arabidopsis thaliana landsberg; identical to SEQ ID NO: 39253

SEQ ID NO: 174244 - DNA, 501 bp, Arabidopsis thaliana landsberg; identical to SEQ ID NO: 80150

SEQ ID NO: 174245 - DNA, 447 bp, Arabidopsis thaliana landsberg
caactggcccaatggtttaaattcttgaactggtttgagtttcatttgtgcagttgaaagagtgaaaactagaattggtgaagcatggggagtctgctcacacaagaagatcttggctggctctgcggtgacagcgttttggaacttgacgagcataagaacccgaatatttgcaggtaatttacctaaccaatggttgacagagtatttggtttgccttgtatcaaaatataacatatacgtctttcatgttctgcagtttttatcatcctggtgatatttcggtataggagacaaaatctacagctaactcccgaggaagttgagcctgttgagaatgagcaagaagaagaaacactcccgcaggaagaagaaacagttccacaagaagaagaacagacacagccatcagaagagcgagctttagtggtggtggttgcagaaact

SEQ ID NO: 174246 - DNA, 1256 bp, Arabidopsis thaliana landsberg
gtacaaagaagcaactttaattaagaacacacaaattaacaataaaaaccacaaacaaatgaacatagagttagtgaagaagaacaaaaacctaaaactaaatcaaaagagacgacgaagtatacaaagaaaaataatcaaaacacaaaagtgactcaagagaggcaaagatcaaaattagcactaacaaagtcgaagaacaagcttgagacatagttcgaagtgagaactaacactaacgtatgataagacagagacaaagaacaagatacaatttaacataataatcgaataggaagaaggagacaacatcatacatgtgatcgatttctcgacatagcttgagagaatgaacgtaatggatttagagattccattttgaaattagtgtcgaacaaagggaaaaaggtgtgtagagagagtggaactgataacgataggttaggtctattatgggtctgattgctaaccactttttaagaaaataatgagcatgaacaatgttgttccttattgttcctcttttttttcaccatttagcaatatttttttttttaaattgtaacatgtggatctcatattattcctaatcattccttattttttaaagaatcgtagaagaaaattgtttcttcccaaatttgatgaagaataaacaggaaaacaattaaacatttatgaattaaaaaattaaattacactcatattcgtttaatatttaatttagaaaataatttatttattttttaatttttgttattatttgttctatactttggttatcatttacagtaacatttgttctatttttcgggaaaaatgtcaattaatcccccaacttttaaaaaatggccattttatacactaacttcgtatgcagccgattaaaacatgaactaaacgttgactaacttttcaaaatgattattcgttgaccaggccaaaatagacatgccgttatcagtcattagcggaacttctaacgtccgttatcatccgttaacgactttattagtcaagttttaaattgtggccattttaaacatcgactttatatgtggccattttaaacatgaagtaagcgttgactaccatttaaaacatgagaaattcgttgaccaagccaaaataaacatgttgtcatcattcattaaaagaacttataacattcattatcacttgttaacgactctattagaaccctaaaaagactttattttgagaataatcaaaagaaaatcgagattgtttgctaa

SEQ ID NO: 174247 - DNA, 559 bp, Arabidopsis thaliana landsberg
  unsure (1)..(559): unsure at all n locations
aaaggagggggggggggggaaatcaccccccccccccccccccacaaaaaaaaaagtggggggggggccccccccttttttttttattttttttcccgcgggggggggaaaaaaaaaaaaaaaaaaagggggccccccccggggggggttttttttttaaaaaaaaaaaacccccgggttttaaacccgaatcttttaataaaaggggccttctggaaacggaacaaagggggggccctccccccccccccaaaaggtggggttatcccccccaacagcacacccccgttttttttaccccccagtttgggccccccccacccccnnnnnnnnnnnnnnnnnnnnnnnnnnnnnnnnnnnnnnnnnnnnnnnnnnnnnnnnnnnnnnnnnnnnnnnnnnnnnnnnnnnnnnnnnnnnnnnnnnnnnnnnnnnnnnnnnnnnnnnnnnnnnnnnnnnnnnnnnnnnnnnnnnnnnnnnnnnnnnnnnnnnnnnnnnnnnnnnnnnnnnnnnnnnnnnnnnnnnnnnnnnnnnnnnnnnnnnnnnnnnnnnnnntattgtc

SEQ ID NO: 174248 - DNA, 1414 bp, Arabidopsis thaliana landsberg
  unsure (1)..(1414): unsure at all n locations
ctcgagcacaggacggagctagtacctccgcgtgggagggtagtctaccccaaatccacctcctgttcctcccacactggccgaggcgattgcggtattagtgaatgcgacacgtgataatactcgctttctgagagaaatggcgggccaacagctccagcagcaaggtgggcagggttatcaacagggccccgcgaaacttcttacctagacttctcagagacacgtccgcccttgtttgttaaagctgaagatccgttggaagccgatgaatggcttcgagtgattgaacaaaaattcggacttctacgttgttcggagacccagaagcctttatttgcagcccagcaattacgcggacctgccagcacttggtggggaaatttcgtggccgttcaactggccaatcatcaaataacctgggaagaattcaaagtggccttccgcgagcattatatacccgaaggtgttctacatatgaagcaagaagagttcatgaagctaaagcaaggaggggatactgtcaaccagtatctcaataagtttaatcacctgtcgcaatatgcaatcgatcaagtgaacactgatctgaaaaagaagaattgctttatgagaggattaaatgatcgattgcaaaggaagatggctacttgcattgacttgacttatggaagagctgtcagcacacccctatcttttgaagcaaaatatgcaggttccggaaagaacaaggaatttggtggtgagaagtctagtcagggctcggtgaagaagcaacggttcgtcatccggccttccaaccagaatcgttctttttctcgtccaccctccttcccttttaagcagccagtctttattcgtcccaacaatgcccccactgcatcaaatcagccggtgccccaggcacttgattccctgctttacccagctcgtcgactggatgtttcaattgtggcaaatctgggcattttatcaaggattgtccttatccaaagccggacccagtcaannnnnnnnnnnnnnnnnnnnaattcatctcaagccaagggaagtactatgggcaagaatactaaaaagacgggacggatttattatactcaagtggccacaacaccgaaaggcgaaccagttatgatgggtacgtttctcgtggccaatcaccctgccgttatcctttttgattctagcgcttcacatacattcataagcaaaaagtttgtggagcaatattgcattacataccatgaatcaagggaagggtttgtaattcattcgtccgggggataaatatttactaaagtggtggcttaccatgtgcccgtaacattggctgaacgggactttcctacaaacatgattgttctaaaaggccaagacatagatgtaattttgggcatgaattggttagtctagc

SEQ ID NO: 174249 - DNA, 328 bp, Arabidopsis thaliana landsberg
gcgcacctatcagatggatccgggcaatacagacgaagcgttgcgcgaggtcgctctcgatctcgaagaaggcgccgacatggtcatggtgaagccgggccttccgtatctcgacgtcgtgcgccgcgtctcggagacgttcgaggttccgacgttcgcctatcaagtgtcgggcgaatacgcgatgcttgccggggcgttcgaaaagggctggctcgacgaagacaagacggtgctcgaaagcctgctggcgttcaaacgggcaggcgccgctggcgtgctgacgtacttcgcgccaaaggcggcccgcctgctcccagcgaaggcc

SEQ ID NO: 174250 - DNA, 422 bp, Arabidopsis thaliana landsberg
gatgtgatcgtgatccgccagaaggacgggtcgatcgaggcgttcctcaacagctgtacccatcgcggcatccggatctgccgcgccgatcgcggcaatgcgcgcgctttcgcctgcagctatcacgtctggtctttttccccgtccggcgcgctctccggggtgccgctggaaaccgaggcctatttcggcgaactcgaccgcaccaagttcggcctgatcccggtgacgaaagtggccgagtataagggcctggtgttcggctgctgggatgccaattcgcccagcctcgatgactatctgggcgatgccaagtttttcctcgatgtctggctggatgccacgccaggcggatcggctctgcacggcgagacgcagaagatggtgctgggcaccaactggaagctgccagtcgagaacgt

SEQ ID NO: 174251 - DNA, 588 bp, Arabidopsis thaliana landsberg
ccaaactaatattatcgactccagtaacacaaaactttttatgtttgaaagtacaaagatcgggttaatagacttgtgttggtggccactcttgtagccactatgactttcactgcagggtttacactaccagggggttacaatggttctgttcccaactttggaatggcaacattggccaagaaaacagcgttccaagtgtttctggtattcgacaccttggcgatgtactgttctatcataacaatagttgctctcatttgggcgcaattgggcgatctttctcttatcatgaaagctttcaaccttgcgttgccacttctcggacttgcgcttacatccatgtcaatagcttttatggctggcacgtatgctgcagtaagccacctccctttgcttgcgtatttcatattgggcatcggcttgatcttcctcttggttttgctgctgatcattattccatatgtgtccccacattctcctacccaaccctttcttagacacatcttttactacccctatttccttatgcttttggtcgctggtgacaacagaaacaagtactaaagctatccgcggtaaatcact

SEQ ID NO: 174252 - DNA, 413 bp, Arabidopsis thaliana landsberg
  unsure (1)..(413): unsure at all n locations
atgccaaagaaaaagaaaaagaaacttcatcgtggggtggtcacaagctcttctaagttcgcagcagtctgtgctcgtgctgcatcctttgtctcttctggtgttcgggatgggtcttccggtgccgcctccgtctttggtgtctttggtaatttggacttctcagatcatgtgtcttgtggggttgtgttggaggctgatggtattagtgttaagcgtcccttcaagttctataattttctgttgaataatgaggagtttttgaatgttgttatggaaaattggtattcaactaacgtggttgggtctcacatgttcagggtttctaaaaagctgaaagccctcaagaagcctattaaagacttcagnnnnnnnnnnnnnnnnnnnnnngagctgcgtacaaaagaggctca

SEQ ID NO: 174253 - DNA, 1828 bp, Arabidopsis thaliana landsberg
tgttcagttcaattccccttaaacactaacatgtcaatgcagctatagggggtgtcaatccagtccactgttattgctagcaatcaagatgtgtatagaaacaactaagtcaagccagattataatgatggtgggtttctagtaacaatcctaaatcaagattcgaataacagaaatgagaacttaagagccctactcgatcattgggccgagtagaacaaacatgcaacaaatttcagaactaaaatgcaaataaaaggtgacaaacatgcaacaggtgaataaaagtgtaatcacggggtgaatacaaataaatctaagaagaatagaagtcctaaggatggattcattgataagggcaactctagggttcatcaggtggctaacaggcgaaaggcaaatagcgtagacaatagattcaaaaccgggtcaatccactctcgtgatagagtccctcataactctaccacttcctaatctcaactctcgttgatgaaacatagttgagcaggctttaagcaacaatctaccaaagtcaataagcagtctaaacatccaatctcttgggctagaatctacaaatctctggaattcgtagatcaggcatccatttgaacgtcttttggacgctggatacctatggtctaattcccatattagccagcgaaaactgcataggagccaacgaatccagaagggatctaacctaatcgtaaccacctgactaacctagagattaccctaatctaatccatcctcaagaaccctaatcactactcaaggaacataactaagacactataagaaaataggcgatttgcgagggaaatttgcgatggcaaatacgactcacaaattgctacagctttgcgagatgtttgcgaggtcaacgagcttccacgcaaatccgtcgcaaactttgcgagggataattctgttgcaaaattgcgaggggtttgcgaggagtttgcgtggacagcaggattcgtcgcaaagtcgtcgcaaaattgcgaggcaattacgggtacaaagaagacacgcaaaatgcaacgtttttgcaacggaactactaggtcttggcgggttaaatgagcacgtttgaaataatcttacctaactagttggttggtgcatttccctcgcaaattcctagcaataaagctcagttcctagcaaatccctcgcaatccgccttgcaattccctcgcaaattttttttggacatctataaataaccaacgtaacatgtaagaaatcataactcaaatcacaacaacatttacttacaaacaaacatatttattctaaaaaaaatattatttacgaaaataataatgtcttggggtggagagcatgagatttacacattacgaagttggatgtacaatcatagagatcaagcgaccggtgaggtgatgagagagtattatgaaggactgcgcggtttcatgtatcaagcgacaaacgaaccatttgctcgtgagaacggcacaatattatgtccatgtcgtaagtgtatcaatgtgaaaatatttgaaatttaatgtagtgaataagcatctttataatagaggatttatgccaaactactatgtttggttacgtcatggagagggttgtagagatagagcaggaactagtaatacaaattatggtgtcgagtatcctagtaattttaataatgatgcgaattatggtcagcaagtacctgatcaatttggttatgggtataaccaggaaaatagagttcatgatatggttacaaatacatttcatgaaactattgctgcatttcatgaacctattgttgcatttcaaccaactcctg

SEQ ID NO: 174254 - DNA, 757 bp, Arabidopsis thaliana landsberg
gatgaaatcaaagtatcaggggactttattagctgcgacttctgtggatggggacgacgaagtgtttcctctggcttttgcagtggttgatgcggagacggatgataactgggaatggttcttgcttcagctgagatctctgctgtccacgccttgctatataactttcgttgctgatcgacagaagaatctgcaggaatcgatcccaaaagtgtttgagaagtcgtttcacgcgtattgtttgcggtatttgactgacgagctcatcaaagacttgaaaggaccattctctcatgagatcaagcggttaatcgttgacgacttttactctgcagcttacgctccgagagcagattcattcgagaggcatgttgagaacatcaaaggcctctcacctgaagcttatgattggattgtgcaaaaaagccagcctgatcattgggcgaacgcttacttccgtggtgctaggtacaaccacatgacttcacactcaggcgaaccgttctttagctgggcttccgacgccaacgatctaccaataactcaaatggttgatgtgatccgtggaaaaataatgggattgatccatgtgagacggattagtgccaacgaagccaatggaaatttgactccctccatggaagtaaagctagagaaggagagtctaagagcgcaaacggttcacgtagcaccatcagcagataacaacttgttccaagtccgtggagagacgtatgagctcgtgaacatggctgag

SEQ ID NO: 174255 - DNA, 504 bp, Arabidopsis thaliana landsberg; identical to SEQ ID NO: 18650
  unsure (1)..(504): unsure at all n locations

SEQ ID NO: 174256 - DNA, 269 bp, Arabidopsis thaliana landsberg
ttcagaagatgctgaaaaacataaatggtccaaaagtatttgcattttgccatccgtagtctccgggaaaaggattgtgtgaaattacttgtacgggagagattgtgttttcgccatccgggggctctctacaccctttctacattttcttctacaatatcgagagaaagacttatacaagagtccaaatcaagggatttaaaaagtatgctgattgcgttcacacttttctagactttgtagaggatatgaagttgatttaagtgtgt

SEQ ID NO: 174257 - DNA, 1380 bp, Arabidopsis thaliana landsberg
  unsure (1)..(1380): unsure at all n locations
aggaactctttccgggttcattgtagcacttctgatatttatttaaggtaattagttgactttgtttaagagaatgagtgagagttttctgtcattaatcaacatggcatcaattttcttatacataaattattgtacttttggtagtatataaacatcgttattcatgattaaataggataaaagcacaagttgcaactatcaccgcacaacatgttttgttttaatcaattttcaacatctttttttttttttgttatttattatcaaactatcatatcgttatacaatttttttaaacatgtaaacaaaaatgattcgtgtatgaaataaatgtagtttccattgagattagatttgtgtgtgtcagctatttttttctatttaaatctcttaacaaataacaaggattgatttgcttaattatgctgcctaatgcaatttatttgcaggtatgatgatgactcctatgatcgtgtctggtatccattcttcagctcttcgtttagttatataaccactagtctcaatataaacaattcagatacatttgagataccataatctgcactcaaaagtgctgccacgcctagaaacgctggtgcaccacttaatcataacttggaaaccaagaccctctaacgctgaagtttacttctatcttcatttcgctgagatacaaacccttgcagccaatgagacgagggaattcgacattgttttcaaaggaaactttaattattcagcttttagtcctcccaagttagagctacttactataaccttttcagcagtacaatgccctgaagggtactgcttcttgcggctagaaagaacgaagaaatcaactcttccgcctttacttaatgctattgaggctttcagtatcattgagtttccatttgcggaaactaaccaaagtgatggtaggtcacagaagttccactattttaattgattacttgatgttaagcctttttttttcttttctttttttttgcnnnnnnnnnnnnnnnnnnnnncacttatataattgtctaattttcacatcatccaattttcatgtcagttgcggtaatcaagaatatcaaagatacttataggctaactaaaattagttggcaaggcgatccatgtgttccaccagacatttcctgggaacatctaaaatgctactacaaagagaaagaaatttccactccaccaagagtaacgtccttgtaagtttaattaaaaacacaacaaagtaattaacactctttaaatggttatctaacatttgaagtgattttatgatattattattaggaacttgtcatcacagggattgaccgggagcatactaccaagtataaaaaatctgacacaacttcaagaatt

SEQ ID NO: 174258 - DNA, 581 bp, Arabidopsis thaliana landsberg
  unsure (1)..(581): unsure at all n locations
ttctccaatcttccgttcacatgctcatctgccaggttctaattaaatctctcatctctntgtttcttatgcctcaagtaacttaaaggtaggtttcttgtcccagaagtaaactaactaacctcttaaaacagttgatcattggaatcatcctagcaaaggacttgggcgtaacgggaacactcgggaggccacaagccctagtagtggtgatctttgtgtgcgtttacgtgatgggatttgcatggtcatggggacctttgggatggctaattcctagcgagacgtttcctctagaaacacgtagcgcaggattcgctgttgcagtctcatgcaacatgttcttcacttttgtaatcgctcaagccttcctatcgatgctttgcgggatgagatctggaatattcttcttcttcagcggttggatcattgtgatgggactgtttgcgtttttcttcataccagagacaaaaggaatcgccattgatgacatgagggagagtgtgtggaagccacattggttctggaaaaggtatatgcttccagaggacgaccaccatgacatagagaagagaaatact

SEQ ID NO: 174259 - DNA, 285 bp, Arabidopsis thaliana landsberg
tatcagatggaagaagcggttcgagcctcgttggaggagaccaataatattagtttgaggcccgcaagcaagctcgtggtcaagtctttagccaggaagatatacaagatgaccactagttctactggtgaaatgtgcataatttgtttggaagagtttagtgaaggaagaagagttgttactttaccttgtggacatgactttgacgatgagtgtgtcctaaagtggtttgagaccaatcacagttgccccctctgtcgtttcaagttgccatatcaatgaact

SEQ ID NO: 174260 - DNA, 168 bp, Arabidopsis thaliana landsberg
  unsure (1)..(168): unsure at all n locations
aagcgtttagttctagagattgaaatactctgatagtctnttagctctttctatttttgaaagtgtaagagcttctggtagacaaagcaagcgggaaaaagttggtgtccaaatctattttgtaatcatttgatgatcaacaccgaaaaatgttgcccatgtttttcg

SEQ ID NO: 174261 - DNA, 526 bp, Arabidopsis thaliana landsberg; identical to SEQ ID NO: 14176

SEQ ID NO: 174262 - DNA, 332 bp, Arabidopsis thaliana landsberg
actaaaatattccaacttgtttaatgcaattttcgacgcttttctgtgggcaatggagaaagagggagtgaaaggtttacctttggtggtgtcgaagaccgggtggccctctgccgggaatggaggcatgacgacaccggctcttcaatatacgtacattggtaactttgtgaagcatgttgcaagtggtaaaggaacgcctaagaggccaaatagtagaattgatgcgtatatatttgagacgtacaatgagaaccagaagccagttggaatctatcagcattttgggttatacgatccttactgagacgacgcccatgtacacgctcttc

SEQ ID NO: 174263 - DNA, 410 bp, Arabidopsis thaliana landsberg
acctttagcagcaacagcgattctcagcggccaagcaacgcttcaagtgctagtagcgattcgtcatcaccaatctacccattatctccatggaaccaaacttactacccaagcaacgacaacacgacgtcgttttcatctgttactcaatcaccatggaaccaaacttactctccgtaccacaaatctccatggatttaccaaaccaggaacagtgatttcgaggatgatcctgataacggtttgatcggtacggtcgtgagacaagaaggacacgtgtactctctcgctgcttcaggtgatcttcttttcaccggttctgattccaagaacattcgggtttggaaagatcttaacgatttctccgggtttaaatccacaagcggttttgttaaagccattgtagtaac

SEQ ID NO: 174264 - DNA, 336 bp, Arabidopsis thaliana landsberg; identical to SEQ ID NO: 68506

SEQ ID NO: 174265 - DNA, 130 bp, Arabidopsis thaliana landsberg; identical to SEQ ID NO: 77924

SEQ ID NO: 174266 - DNA, 616 bp, Arabidopsis thaliana landsberg
  unsure (1)..(616): unsure at all n locations
gtgtgatagactctccnatggtttcaagtaccaatgtggggatattaagttagatgtattgtgtggttcaatttctgaaccatttgtccatctgagccatcctcatcatcctttatattacattccattagtgggtcgaaaacagtgcaatggttgcaaccgttggtcatctcttctgcttacgtgcattgaaagtggttgtggatttttggtatgcttcagttgtgccactttaccacaattggtaaagcatagagtagacgatcatccactctcactatgctatggcgaaacggcaagtggcaaatactggtgtgacatttgtgagaaagaagcgaatccaaagagatggttctacatgtgtaaacagcaccgagctagtttgcatacacaatgcgtgctgggagactttgcagggctgatgccaagaagcatactaacgtattcccacagattatatgaggtggtgcgcaataatagtatgtctcgtccactttgcagagcgtgtgagttgcattgtatgtaccctatcatcttgaagatgcttggaacatcagattgatacatttgctctttaaattgcatagatggtttctggtatccaaagaacataagg

SEQ ID NO: 174267 - DNA, 310 bp, Arabidopsis thaliana landsberg
  unsure (1)..(310): unsure at all n locations
ctcgccaacgcacagcacagacccgcgcagcagccagatccgccggcatcacctgcacgaggatcgcatcggccgcgccatcaagcgcgcactcaaagccgcccgcatcgacaaacgcgccacggcccacacccnnnnnnnnnnnnnnnnnnnnnnnnnnnnnnnnnnnnnnnnnnnnnnnnnnnnnnnnnnnnnnnnnnnnnnnnnnnnnnnnnnnnnnnnnnnnnnnnnnnnnnnnnnnnnnnnnnnnnnnnnnnnnnnnnnnnnnnnnnnnnnnnnnnnnnaggtgtcggcatgatcgagcccaccg

SEQ ID NO: 174268 - DNA, 297 bp, Arabidopsis thaliana landsberg
accctcctccacgcctttggcaccgcatccgtcgccgtggagaaagattctgacgatccgtacctagatttccggcagtctatgcttcaaatgatactagagaaccagatttactcgaaagatgaacttagagagcttcttcaatgtttcctcagcctcaattctcactatcatcacggcatcatcgtccgtgccttctcggaaatatgggaagacgtttcctccgccgctgcttccgccgtcgaagcgtcccctctcatcacccgtcatgtgtcacgtgcgtcacgtgattactat

SEQ ID NO: 174269 - DNA, 1190 bp, Arabidopsis thaliana landsberg
ctctctctttccctctatggcttaactctttagggaaatacctagcaggagggaatggaaaatatcaccaaaacttttcagtacggaggagttgattggctttgcgaaccatgggtaggtgcaggctccttggggattggccggggagagaatccgctcaagtttgctcttcctcttcttctccttcagatttctgtcttttccatattttccgtatcttttcagtttctcctccggccttttggaaaatttgcattcctcactcagatgctggtatacgtttccatgtctaatcatctataattggaaactttatagtggaaaaatatggactagtcgtctcaaaaacatgtatagccatgcccataatggtgtaaatgtgacttaatatttattagtgaatttgtttgcaggctgggatctgcttaggaccgtccgttataggacgtaacaaacagtacatggctacattcttctacgcgagaagcgtgtacataatcgaatccttcgaggccatatgttttctcttcatttgctacatcacaacatgtcaagtagacactaggatgataaagagagtaggcaagttagcattcataaacggcatcttacttttcctcatacctttcgtatggggccaattcgcggccatcttgatctccaagaggctcaaaagcgggcctgcggggatccctcccgtggagttccaccatgtagcgatcgtccagtccacaatgttttttcaggtggtttacggagtcttgtcgagcttaaagatgttgaacactgagccagggaggttagcacttgcatccatgatggtgcatgactgcctctcttggtgttttttcatgcttaacatcgccattaaacttaatgttgacttacccaataaaaatcgcgctgctttcttgtccgtcttacaggtacccaagttgacaaataatttcttaattaatctacaaattttgctttggaacatcttccaattttcttactatagaaagataattgactgtgtaaattcctacaaaaatagacaaactaactaagatcctaataaaatgcatgaatccaataatatttacgtatagtataaacttgctttgatctatatatacgcttttttattaatgatataaagacggaaatgaatgcagatgataatgatattggtgatagcatatgtg

SEQ ID NO: 174270 - DNA, 564 bp, Arabidopsis thaliana landsberg
ggctcgttttaaccatccgagaggcgttacaatggatgacaaagggaacgtttatgtcgctgatactttgaatcttgccatccgaaagattggtgattcaggtatacaagttttctataggttttacttacatcagcactcaaaaactgaaatggttgcttgttgttgaaaaatataattaaactgagaagaattgtgttcttaagagtctgaaacatttttgttacaggtgttactacgatagctgggggaaaatcaaatatagctgggtatagagatgggccaagtgaggatgcaaagttctcaaatgattttgatgtcgtatatgttcggcctacctgctcgttgctggtcatcgatagaggaaatgcggctcttcgccaaatctctctcagtgaagaggactgtgactatcaagatgatagctcaatctctctaactggtaagaagtcaaaaacacctcttcccactacatagatcattttgcatacactcagtttaagggtggatttgagagtgttaacagaagatcattgcgtgcttacattcggtgcagatatactc

SEQ ID NO: 174271 - DNA, 461 bp, Arabidopsis thaliana landsberg
agatgtatcgctggcggccgtacgaccggcggatcgcccccgtcgaggcctccattcgccacctgttgatgggcgaaggtaagctaaacagggaaaaaacgttttgttatactgaaaatgcttaatcttaccacttctcaggtttccacaacttccaccacgccttcccttgggactacagtgcgagcgaactgggccccctggacgtcttcaaccccgccaccgccttcatcgacctttttgccaagatgggcctcgcatacgacctgaagaaggcgaacaccagtctggtggagcggaagttagtggttcatggcgagcgaaaatcgcttggccccgatgggaagagcagctactacaagaatcgagtggacatggccacggagtggattggcgggctgatttccattctcagtccaatgttgatgatccggtggctgatggcggctatctgcagttga

SEQ ID NO: 174272 - DNA, 374 bp, Arabidopsis thaliana landsberg
ttttgctgataaatcacaaagagagatcagcaatgaggagcttgaggttgagaacagttgttcttgctacaatagtcgtttgtctatcggtcctcctatctcccaccggtacgtaaaatcaagatctctaactacatagatacacaagtttttgttataaatgtatgtggctgttcgtgtcgacagaagtggatggaagctgtgacttcccattaggtgcttgtactcctttccgtgattgcaaggagagttgcatcaagttcaaaacgagggctggacagactttttttgatggcaagtgccgtccaagggataggccgagcgtgtggacggcttgtttctgctgctattatgatagtatcggtgctcaataa

SEQ ID NO: 174273 - DNA, 658 bp, Arabidopsis thaliana landsberg
gagctttttcgatctacatactgctgcatgttctccaatttatcacagagttatcaagtcaacaaacatattactagatgagaaataccgagccaaagtatctgattttggaacttcaagatcagtttccatagatcatactcattggacaacggtaatatcgggtacagtcgggtatgtggatccagaatactacggttctagccactttactgagaaaagtgatgtttatagttttggggttgtcctagtagagcttattactggagagaagcctgttataaccctttcagagactcaagaaataacagggttggcagattatttcagacttgcaatgagagagaaccgactctttgagatcatcgatgctcgaataagaaacgattgcaagctggaacaggtgattgcagtggcaaatctagcattgaggtgtctgaaaaagacagggaagacacggccagatatgagagaagtttctacagctttggagaggatttgttcagctccagaggattttcaggtgcaaattcaaattgatgaagaagatgtaaccacgaagttatttagaggctattctggaagcacggagactgcacgatcagtgtgaggtaatgtacacagtaatttgatggtcaaatacatttgatgtcttttg

SEQ ID NO: 174274 - DNA, 375 bp, Arabidopsis thaliana landsberg
gaggcgtggcaaccgctgggagagcgagagggagttcaatgacccgaacagatcggctgctgcccgaggggttcgacttcaccgaccccgcactgatcgccgagcggatcccgcaccaggagttcgccctactgcgcaagacggagcccatctggtggaacgctcagccgttcggcatctccggctaccccgatgagggctattgggtggtcaccaaacatgccgacgtgcgcgaggtatcgctgcatgaccagacgttcttctcgcacgagaacacctcgctgatccgaacgaacaccaccagcaacccggaggtccacgaagcctaccgcgataacgtgatgctgttcctcgacggcccgaacacgcgaaatt

SEQ ID NO: 174275 - DNA, 1102 bp, Arabidopsis thaliana landsberg; identical to SEQ ID NO: 11294

SEQ ID NO: 174276 - DNA, 537 bp, Arabidopsis thaliana landsberg; identical to SEQ ID NO: 19868
  unsure (1)..(537): unsure at all n locations

SEQ ID NO: 174277 - DNA, 1036 bp, Arabidopsis thaliana landsberg
gtctagatagttgataataatactctgttttattttgtaaaggcaatggagattgatctactctcactggattctgtcgcgagatttgctgaggctttcaacgctcggttaggacctttgcatgttctgattaacaatgctgggatgtttgctatgggaggttggttttattgccgttttagctataagcattgagtttccccttctgttgtttcctgtatctattttcatcatctctttgttatgatctcaaagtcatacttgtgaaccaatcatcatcatcatcaatattccaacttgatggacccaattggtgagaactggcatgttctttcatagcaactctgtccaatgggtctcctttttaaatgattggttgtcagatgctacattttctgcagtatgtgttgaggaaaagtaaccttaaaatgctctgttctctgatttgtgcagaggcgcaaaaattctcagaggaaggatatgagcagcacatgcaagtgaatcatttagctccagcgctgctttcagtacttcttttgccgtctctgatccgaggctctcctagccgaatcattaatgtgaattccgttgtaagttctctatgatcactgatactgcaggctccaagtctgtattctctagtttatattctctttggtatgagtaatcatgttgacaggttgatttgtttgtgtattctgtaacttgaaaacctctggtcttgtcaattggttgcagaatatgtagataactgatatagatctctctaaatcactgaactacatatgcatattgtattaacacagtcttggtatagagaaacgatacaaccatagcttgttgaaagtttcaaccccaaatacgcttccatgactgcactatgtcattactcatttcagaagaattctgtgcctggctgtttatgaaaactgaaacagtttatatttattgtccctgattattactttttcatgcaagataataagttgtgggattcacttttgtagatgcatagtgtcggttttgtggcccggac

SEQ ID NO: 174278 - DNA, 489 bp, Arabidopsis thaliana landsberg
atggccaacgaaggaagtgaccctttacttcaatacatgattagcccgagattgaaaaaacctccacagctgctgtttccattaccagaagacaacgaagttgcgattccgatgccgatgacaccgtcggagttcaaagagcgtttaatcttcggacccttttcatgttcgccgcgagattcgtctcacttcatcgattccatgaaacaaccgtcaccgtcgtcttcttcaaccgccgttaataatcctttctccgattcctcaaccctagatcctctgcttccaccaccaccaccacaaccagagccatggttgtccgatcaaacttcgagtcactgtcaaggccacgctcttcaccgatccaaaacagcaccagcaatggctgtaatcaatgatcttcatcacccaattcgtcaaaaagatcctacagagacgtcacgatctgtagtaagacaagcttttggctctctcgttgtgtatctctctcta

SEQ ID NO: 174279 - DNA, 690 bp, Arabidopsis thaliana landsberg
aacaccgcataaatcatagtgcaaagtacttatgaattaatactcttttgtatgttgttttaagagtttatttgatattataatgtaggatcaaatctttatttctggctagcgatcattccaatcactgtaagaactatttttccacttcatgtttctatgtttttgtttttccttagaaagtgagtcttatatcataacaaatttccactttggtttgcatccctttcttttgaacagcttgttcttttggttggtgcaaagttgcaacatgtcatcgcaactttagcattggagaacgctggtataacagaatatgcttctggtataaagctgagacctcgcgatgaacttttttggttcaagaaaccagaattactcttatcccttatccacttcattcagtttcaggtctgtataattctttgaaaactctatcagtcacaaaggaatttcttattttgtaataacatatatatgtgctttctgtgtcctacagaatgcttttgaactggcttctttcttctggttttgggtaagtttttgtctttctatcatctttttgccatatatgcaagataagaaatacatatagtatactcttacgctttaaagatatgttcatatattggcataatctattcttgtttcttcagtggcaagttggatacaattacatgattcctaagg

SEQ ID NO: 174280 - DNA, 643 bp, Arabidopsis thaliana landsberg
  unsure (1)..(643): unsure at all n locations
ttcttcttctctgtttcaggcggttcattcgcgccgctcaagcgtctgataaggtgagatttacattgatacatttcactagtcatcctcagcatttcaaataacttggaatcagtaaactgattttgttggtttacaggttcctctcattgaaatggagtacttagccaactatttcgcggaactaactctcacagaatatactttcctaaggttccttccatccctaattgccgcttcagcggttttcttagcaagatggacactcgaccaatctaaccatccttgggtgagtgagctcatatttctcattatgaatgtttttacctcattgaaacaatttttggtgatgtgaatgttattgcttacagaacaaaactctacaacactatacaagatatgaaacatccgctctaaaaaacgcggtacttgcaatgnnnnnnnnnnnnnnnnnnnnnnnnggaagcactcttatcgctatacgcaccaaatacaaccaacaaaaggtataataataaattcaatctaagaaagtggacactgaatctgaatttggtctctctcactctatatgaatatttgacagtttaaaagagtggcaacattaacatctcctgaacgtgtgaacacactcttctcaaga

SEQ ID NO: 174281 - DNA, 450 bp, Arabidopsis thaliana landsberg; identical to SEQ ID NO: 7768

SEQ ID NO: 174282 - DNA, 772 bp, Arabidopsis thaliana landsberg
attagtcagttttgtaactgattactgcaataaacttattggagataagtacaagtcaacactaactcaggttctgctcatacataagagctggagatcagaaaggttccaagataatcagcttatggttgaggttttaagaataatcaaagccattgagcagaatctggatgtatggatgaaagcgtatccggatcaaacgcttgcgcatttcttcggtatgaataatcactggcatttatacaagaacttaaagggtacaaatattggggatcatttaggagattcgtggctgaaagaacatgatcagtacaaagagtattacgccactgtcttccttagagacagttggggtaagcttccaagccacttgagccgagaagggctgatacttttctcgggtggacatgccacggctcgtgatcttgtcaagaagagattgaaagcattcaatgatgcgtttgatgagatgtataagaagcaagcatcatgggtcttaccagagaaagatttaagggatagagtttgccagcagatagttcaggctattgtgccggtttacagaagctatatgcaaaactatgggccattggttgagaaagacgcgagttcaagcaagtatgtgagatacactgtggtagctttggagaagatactcagttctctttacatgcctaagcccatgagatatggaagcttcaaaggaacaccgccaagtgagaaattcaagaatgatgttgaccttaggcgtactacttctgcagttgtctga

SEQ ID NO: 174283 - DNA, 1146 bp, Arabidopsis thaliana landsberg
gaagaggaacttgtaagccttacttcaaaataaaaatgattttcaggataactggctttgatagagtttctagcttctcttttttccacacattaagttacatctaccactacaaataaccctgcttgtgtatttccctccttgcaggcccttctgtatgcagatccttttgatgttgaagcacagaggaaaattgaagctgcaattcgtcaggttaattgttcttacttatgtaacatgtactggactcttgtattactttagtggcaaataactcttttgtgattcctggatgcaatctttcactttggttagtttcttatgttctcctaatttgattgttaccttttcgtgtcatttctgacttttggtactatcttgattgatatatttgaacagaaaggaattgatgagaactgggaagctgcccttgaacataatcctgaaggttttgctcgggtggtatgtatgcttgtgttttagtttatgcttctgaaattccttaacctttttttgtataaagtcttgatttcttttgtttttatcacttccttagataatgctctatgtggatatggaggtcaacggcgtacctttgaaggtagaattttgcaaccagattataccctcgtttcaccttactatctgttctcaatttttcttggtctctcagtgcgcttagaggcgttatcgagcactccttagatcatcttttttgttctaaacctatatttacaccatctccaggctttcgttgatagtggtgcacagtcgacaattatatccaagagttgtgctgagagatgcgggtaacttccatgtttatatcctgtggtccttcttgtaacatagaatgatggaaaatttcacaagtcttgatgactacttactttcagattgctgagacttatggaccaacgctacaaaggtattgcccatggtgttggccaaacagagatattgggccgcattcatgttgctcctatcaaggtaaacaccgtcaatctttttctgacaaggttttcacctttgcttttctgtttcattattctttgcataagaaactgaaaatctcgaactttgcagattggaaacaacttttacccttgttcattcgtggtgctggactcacctaacatggaattt

SEQ ID NO: 174284 - DNA, 861 bp, Arabidopsis thaliana landsberg
actttacggaaagaccttaggtttcaagtaggtttttaagttttatgaaacagagaaacatatacgtgttcgtgaaggagaagacgtgaaggtaacttggactataaagtgtatagtgttagcgaaaaggtgaagcagaataaataaagtgttatgcgttatcaagtctacctaatataactagctagggatttctactcttgttttcataatcgatctacggacatttctcggaacgtggtcaagattcatgagtcttctgttttttatgtctctgttcaatttggtttagagattagtatgcttatttcatgtggtttgtggaggctttttttgtcgtcgctgcaatttgctaatcgcatgtaaacaacgatattagcagcaatcacaaacatcagagacaaattgagcctaaacgtagagaatggatatgatctgaaaccaactatatgtttctgaatcagcaaccctataataatctttaaataacgatcaatggaaagtaaattggcatgtttttttatctaattggtacataaagtgattttcgttgttgttgtgttgatttgcaatttcggagtgtcctcgtgtatatatgtacatatagccgtcaacattttgcaggaagaaacagagaggttaggtcatcaacgttgccaaggcttgttgttgccacaccgtcgtggccatgtacaaaccaagagttgcggtgtcgtcaccgtgaaggagaagaggagtttggtagagcaaccggaggagattgtcgctgcacctgagacaccacgccaaggagaaagtgagcataataatccactaaagcgaaagaaagcgattggttgcgtgggagagaaagctgagatg

SEQ ID NO: 174285 - DNA, 3270 bp, Arabidopsis thaliana landsberg
cacatattgtcatcctttcccttgtgttccgtaaagtctcagcaggagtactgaagagggatgggttggctttgcgtctcgtcctcaatgttctgcgtctgaaatcagccacgcctgagtgctctgatttcgggattgaagtgtttggttcaccttctcacaacggttgagtccattatggtgaacgaaggctctgattcctacaacatcttactgaattttgtaactcattcagacggaaaggtaaattacaaatttacccgtgttgatgatttggtctgcatcagactttgacgatcttcttctattaaatccaggtaagaaagctagcaagctcctgtctccgtgatgtcctgcagaaatcccatggaacaaaggcctggcaatcagtcagtggagctattacagaaatgttccagaactatttagacctcgcccataaatcggaagtgggttctaccgaaggagccagaggggcaaagcaagtgctttacattcttagcactctaaaagaatgcttggccttgatgtcaaaaaagcacattgctactctgattgagggatttaaggtgctgatgattcttcgcgatccatacattacaaggccagtgatagactctttaaatgcagtttgtctcaatccaacctccgaggttccggttgaggcgctgctcgaagtgttatctcttgcggctggactgttctcgggacatgaaacatctgctgatgccatgacctttacagcacgtttactgaaagttgggatgactaggagttttaccctaaacagagatctttgtgtggttaaacttcctagtgtgttcaatggtctgaatggtatgctgttgtatttgcaccttcctgcttttcgggtttccgaatttctcaaacatactgctttctttttaatgtaatttatcctactgttgacataatctatgtgcttcttttggcagatattattgcatctgaacacgaggaggctatctttgcagcaactgatgcgttgaagagtttgatattttcatgtattgacgaaagcttgatcagagaaggtgtcaacgaaatccggaattcaaacttgaatgtaaggaagcctagtccaacagtcatcgaaaagctgtgtgcaacagttgagagcttgcttgattacaagtaccatgcagtctgggatatggcttttcaagtagtttcagcaatgtttgataaattaggtaattattatttttatcctgagttttcatttgtttcttcttgttgaagattatctgcttaatgttcatgtgctaattctttcacgcaattttcaggtgaacattctgcatattttatgaggaacaccctccagggtttatctgatatgcaagatttacctgatgaaggatttccttaccggaagcaggtaactgtactatacttgtccttgagctgaatgatcatctgctgcattctagtttagggtacaaatacttcagatagtgatgtcatttttactctcttatcttggcataatcattgaccacgcagtattttgtctccattgtttcttgacatagaatgtcaataacaattagatatatggcgagttgttctaagaaatgaaatgatttgagcatatgcaactatgtcaatagatattagggtgtgttgattttatattgaagtttgaaaatgcttgatcttttggctacagttcttgtgtaaacctttttctgctttttatttgacttagtggtggatcatgctgttggtacagcaattggatacacgaaatatctattctgttacttagacgtgctctcactttttttagtctgaaatgaatgattgtacgatatatgatgatgcaacatgtcactgtattagaccttgcttttgttagtcacgttccataatttcctgactgtttatttttctgatattatctttattggcgatctccagttgcatgagtgtgtaggatcagcccttggtgctatgggacctgaaacatttttaagcattgtgcgtttaaaccttgaagctaatgatctgtctgaggtaaaagtttggctcttcccaatcttgaagcagtacacagttggaggacgcctaagtttcttcacagaggctatttttagcatggtcgaaacaatgagccacaaagctcaaaaggtaatttttattatttcccgctatttgatgatgtatgcattctttattgttctttaattttgctatttgtttgtgatggcagctcaagctacaaggtcttcctgtagcatccaggagtgtggattctctcgtatattcattatgggctttgttaccttcattctgtaattatcccgtggatactgtggagagttttgccgatctggggcgaatattatgtggagttcttcaaacacaggctgagacccgtggaattatatgtgccagtttgaatattctgattcaacaaaataaggaagttgttgaggggaaagaagtacgtactaatgatgctagtcctgctatgcaacgagctactgctcgttatgattcacagcatgcggcagctaatttaaaagttctgcggttatgtgctcctaaattattggatgttttgtcaaggatatttcatgaatgtagcaaagatgatggcggttctcttcaggtaattaagaaccttagatggctggcagggtattcgattaccttacatcgttaaatgtcaccagaactttttcatctttgtgttgtattctcgtgtaactggtcgatgtccctcactaattagatatagttcactaagtcagagcttgtcacagtatttgataactttcgttgtcttactttcagtctgcgataggtaacttagcttccatagcggagaaaaagactgtttcaaagctacttttcaagactctgcaagagcttttagaagctaccaaaactgccattgcacaagatgaaagtcctgttagtgggatggatgtggataacaccgcagacaaaaattcttcttccaacttaaggtactgttactccgatttgtgtttctagttgcttagttaaattgaccctataatctgctattcatttcagggcaaggttgtttgatctgttagtttcactcttaccgggtttggatggtcaagaagtagataccatattcagttctctgaagcctgcaatgcaggtttgtaaaatgatcttttgtattgaatgatttattattctgggttctggcgtggctgcgatttatccgcctataggaagatgagtttttcttaaattttgtgcacc

SEQ ID NO: 174286 - DNA, 712 bp, Arabidopsis thaliana landsberg
tgactttgtggagaaggtctatggaacacaagttgtaaatgtgaaggatgtggaagatatgctgaagtcaatggaagatgagtgtgatggacatcagttgcgggtggctgtcttactctttttatgcgcgatagtaagagggaggagaaggtttggtagcatacattcatttattctgaagatagtgaatgacttggaataggtaaaaaagtttcctagcgggcgaaatacttttgaagacactatggaaaagatcgttcacttgatgaagaagcgattagatgggaaagtgggaattgagtatttgtttccagggttcatcattcctctgaaggtaaaattttgtttttcttcttcaataattagtatatctgttttgaatgatttaagatatattactgtgtaaaatgtgtataggttttggcgtttgaatgcattcctgagatgtctaaacaatttcaaaaaaatgtaataggcgcaaaggatggatgtccattgatatgaaaaagaaatttgaagataatggaatgacagattttcaacttcaagaagtaaacaaagcgcttggaacaacataggtaagaactagttaggtaatcaatagtattttggattagtaaaacatgtggtaacctctgttttcttgttctttgttggacatcattagtaatctacaaccatcagcgggtgaggaagctcttttgcgtacatc

SEQ ID NO: 174287 - DNA, 1001 bp, Arabidopsis thaliana landsberg
tcttttattttgttagggataatgaagcgaacatgatcatttattttgcaagggatgtttcatataaacttaatgctacaccatcaaaggattttgaagatatggtgggactagaagctcacttgaagaaaatccagtctttgttacgtttagattataaggatgaagctctgataattggaatctctggtcctgcgggcattggtaagagtaccattgctagagctttggagagccgactctctgataggtttcaacttacatgttttatggatcttagaggaagcgagaatagtggtcttcacgattacggtcagcagttgcgtttacaagaacaacttcttgcaaaggttttgaatcaagatggtacgaggatatgccatttaggagtgttacaacaaaggctaagcgacctgagagtgcttatcattcttgatgatgtgagtgatgtcaagcaattagaggctttggctaatgaaagtaattggtttggtcctggaagtaggattattgtgacaaccgaaaacaaagagcttttgaagcaacatggtatcaacaatacctactatgtaggatttccttctgatgaagaagctatcaagatcttatgtagatatgcttttagacagagctcttcacgtcatggttttaaaaagcttacaagaagtgtaacagagctttgtggtaagctcccgttgggtctacgtgtggtgggttcatctttacatgggaagaatgaggaagaatgggaatatgtaatacggaggctagaaactatcattgatcgagatatcgaacaagtactaagagtcggttatgagagtttacatgagaatgaacaatcattatttctccacattgcaatcttcttcaactatgaagatggtgatcttgtgaaagccacgctccctgaaaatgacttggatatcgaacaaaagttgaatatcctagtaaacaaatctctcatatatatatctacggaggggagagtcgaaaagcac

SEQ ID NO: 174288 - DNA, 1307 bp, Arabidopsis thaliana landsberg
gccaagatcccgatctccatctatgttttcttagaagaagaagatgaagaacacgccgacatccctttgctccggtcagtgagtgagagagtcagtcagaaaaagagacaacttgttctgttgaaaagcggtggcagaaccagcgagactatatccggtttggaccagtttaattagactttatgaccaatttaattcctttcaaaggtcaatttgctgaataacttaattatggaatctaattggattaataacactttttgcgtaaataatattttgtcaaaaataaagtgaaaatattttcagacacaaaggaaaagaataacaacatatatgtatcagtgttaaaaaaaaaaaaaacatatatgtatccttttattattttggtcatatgtatcaccattaagaaaaaattaccttttaaatataaaatgaaaaaatttcaaatcaccaaagaaattttgaccaaatccacaacataatttaattttttttttttaaaacatgtaggatttttgtgtgcaaataacagatcaaatggaatggaactctttctaacgatttaggataattttgagagaaaaaaatcagaaaactttagatatgaatttgaaaccaaaccctaaacttagaatacacacaatttcctcactgccttatcctaaacaacaagctatcatgactaaaaatatatagctgtttaaatctttaggttgtcacctgaaaatcaccattttggacaaaacccttggaacttgtttcttgtaagaatcaacatgagctcagaagaagatgtgattagtctcatcagcgttcttggtctcgctgttttcatcggtctctgcatcttgctcgttgcccccatcccaacctcagctatcattcttgtaatctacgccatcatcgattgcattctccgcccattcttatgaccatatctcgacctagatctagaaatcggagtgcaaagaggccatcaacgtgctagagtcgttccctaccacgcgttcatcccgactggtgttcggttaccagatttcgagagaaaaaaaaagcgcgggctgaaacaaagcgcgatcgaaaccctactaccgaagttgcttgttggacaaggcacccatgaggaggatgaagaaaagtcactagaatcaagagaatgcgcgatttgtctcagtggttatgtcgttaatgaagaatgcagagtatttcctgtttgcagacatatctatcatgcgctctgtatcggcgcttggcttaagaatcatttcacatgtcctactggtcgtaaagatgtaccagaatcatga

SEQ ID NO: 174289 - DNA, 581 bp, Arabidopsis thaliana landsberg
aaacttaaggctgaatgttctgagcattctaaagttttgttggagctggatatggctaagtctcaggttcaggtgcttaagaagaaactgaacatcaatacacaacaacacgtagcgcagatcttgtcgcttaaacaacgagtggcgaggctgcaagaagaagaaatcaaggctgtgttacctgatcttgaagctgataagatgatgcagaggttaagggatttggaaagtgagatcaacgcgcttacggatactaacacgagattacagtttgagaatttcgaactttctgagaagctggagtctgttcaaatcattgcaaattcaacactggaggaaccagaggaggtataacctcaaatttttggacttcctacaaaatattgaatgctgatttcaaaacgtttgtttgttacagattgagacattacgcgaagattgtaaccgattgaggagtgagaatgtagagttaacccagcatgtcgagcagcttcaaggagatcgatgtaaaaaccttgagcagctcgtttatctcagatggataaatgcctgcccaagatatgagctaaggacttaccagc

SEQ ID NO: 174290 - DNA, 469 bp, Arabidopsis thaliana landsberg
atgcaccaactcaatccttctgaaattagtgaaatcatcaagggcagcatcgacagcctcgatgtgagctcccaagcccgtaacgaaggtaccgttgtttcggtatccgtcggtatcgtacggatccacggtctggcccacgtcatgtacggcgaaatgatcgagttccgtggcagcgtattcggcatggccctgaacctggagcaagactcggtaggtgcagtgatcctgggtgcatatgacaccctcgcagaaggcatgagcgccaagtgcaccggtcgcatcctgaaagttccggtcggcaaaggcctgatgggccgagtcgtcgacgctctgggtaacccgatcgatggcaaaggtcctctgaccacccccgaaaccgacgcggtcgaaaaggtcgctccaggcgtgatctggcgtaagtcggtagaccagcctgtacagactggctacaagtccgtcgacttta

SEQ ID NO: 174291 - DNA, 516 bp, Arabidopsis thaliana landsberg; identical to SEQ ID NO: 65436

SEQ ID NO: 174292 - DNA, 450 bp, Arabidopsis thaliana landsberg
atgggagcagacgcaatccaaacgaatggtcaccatcaagccaagttaaccggcggtgaagagatccaacggctgagatgttttgtgaagaactacgaatggggcaaactcggaccggagtcattggtggcgagactccaagaggctaatacaggacaacgagtcgattcggagattccttacgctgagttttggatgggtactcatgagtctggaccgagtcatgttgaattcgggtcgggtcatggcgtgtctgataaatgtatagttacattgaaatcgtgggttttggataatccgaatttactcgggtctaaagtccgggacaaatggggttgtgatctttccttccttttcaaggtaatgatcaatttctctgttttttactctgtttgaaaacgttaccatttaactaatctttctgaataacaaattgattttatgtgttct

SEQ ID NO: 174293 - DNA, 1349 bp, Arabidopsis thaliana landsberg
atgcagatcagcggaagaagcgttcaagctgttcgaaacgtcttcgagatctcgagtctccaagtcaaacgatctttaatctttttcggcagtgattcatgttttaaccggagctcacaagtatacgctcgccagatgtttgataaaaagcctcatagaacgtctgaaacgccacagtgagccgagtaacatgtctcatagacttttcaatgctctggaagatattcagagtccaaaattcagtatcggagtgtttagtctattgattatggagtttctggagatgggtttgtttgaagaagctctttgggtgagtcgagagatgaaatgttcaccggattcaaaagcttgtctttcgattttgaatggcttggttagaaggagacggtttgattcagtttgggttgattaccaacttatgatctctcgtgggttggtccctgatgtccacatttactttgttttgtttcaatgctgtttcaagcaaggtctttactccaagaaagagaaacttcttgatgaaatgacgtcgttagggatcaagccgaatgtttatatctataccatatatatccttgatctctgtagggataataagatggaggaagcggagaaaatgttcgagttgatgaagaaacatggtgttcttccaaacttgtatacttacagtgcaatgattgatggttactgcaagaccggtaacgtgagacaagcttacggattgtataaggagattcttgttgctgaattgctgccaaatgttgttgttttcggtacattggtcgatggattttgcaaagctcgcgaattggtaactgcgaggagccttttcgtgcatatggtgaagtttggggttgatcctaatttatatgtttataactgtttaattcatggacattgcaaatcagggaacatgttggaagcagtgggattactttctgagatggaaagtttgaatctttcgcctgatgtattcacttacactatacttatcaacgggctatgtattgaagatcaggtagcagaagcaaatcgattatttcagaagatgaagaatgagagaatttttccgagctctgcgacttacaactcgctgattcatgggtattgtaaagaatacaatatggagcaagctctggatttgtgctctgagatgacagcaagtggtgtagaacccaacatcataaccttttctactttgatcgatggttactgcaatgtgagagacataaaagctgcaatgggcttgtacttcgagatgaccatcaaaggtatagttcctgatgttgtgacctacacagctttgattgatgcacatttcaaggaggccaacatgaaagaagcactca

SEQ ID NO: 174294 - DNA, 759 bp, Arabidopsis thaliana landsberg; identical to SEQ ID NO: 10897

SEQ ID NO: 174295 - DNA, 672 bp, Arabidopsis thaliana landsberg
gacttcctggtgttctcttattttaccagactcttatgttgatcaagagatcaaagattacggaggtgagttttatgttaatactgttgttagtgattgctttaacacagtctatgtttcgtagttctctgtgtgttctgttttgtgtcataatcgatcaagactaagcttagaactagaattttcatatatctactctcaattaagcacaaaatctcaggcgttgttaatgttaagactgtggagtgtggaagtagaatccgtttcctgcactcaactagacataagactcttctgtgtcacttttgtgtgttccatgagttgttccctgtagagaagccaaaacattttgattccagccttaagtgtcatctttgacaccgatctttagtctgtttgtttgatagagaagctgtttgtttgatagctgaagctcgagggtcaaatctttaaactagcgtctctgttttggtttacttgttaagttcactgcgtaatcaaactcttcttctaacgtattgtgcagctgagctgtttgtgaatggagaaatagttcaacgtcctccagagagacagagaaagatcattgagttaacgacccagagaaccaatgataaaccaaagtaccacgacaagaccagatatgtccgaagaagagagaacatgcgttga

SEQ ID NO: 174296 - DNA, 1020 bp, Arabidopsis thaliana landsberg
ttccgttaaccgatagagttgacccgcaaagagatactagagcaggtggagatggtggtttcggatcttgggttgacccggtgttgtaacagtgttatcggaggcgggttgatccgagcaatttcgggtggggaaaggaaacgggtaagtattggacaagaaatgctagtgaatccgagtttgttgcttcttgatgagccaacgtcggggcttgattctaccacggcggctcgtatagtcgccaccttgagatcgctggctcgtggcggccggacggtggtgacgacgattcatcagccgtcgagtaggctttatcggatgttcgataaagtgttggttttatcggaagggtgtcctatttatagtggagattcgggtcgggtcatggaatattttggttcgattgggtatcaacccggatccagtttcgttaacccggctgatttcgtgcttgatcttgctaacggtaagtattaaatcttttttagttatcgtctacaattcatacacgcatactatcggaaatgaaactgagttataacacgactacgccactagtacaaaccgttgcatgtcccggtccatggtaggtacagaacctattcgaaattcatttatgtttttagtttgaaagggaaaaaagttttgaaacagctaacttcgggtgtaaagttagactctttctttttgtttggtcgtgcatcatgagatatgtgacaacgacaattctatcccattctttgtatatttattacaaggtttgtgttaatagtgggataaatcatgtgtttatatgttgcttttgactatatagcatacaagttttgttgtttaaaatttttttttgaataaatgtttgcaggaattacttcggatacaaaacaatatgatcaaatcgaaactaatggaagattagatcggcttgaagaacaaaactcaatgaaacaatcgttaatatcgtcatacaaaaagaatttgtatccacctttgaaagaagaagtgtctagaacgtgtccacaa

SEQ ID NO: 174297 - DNA, 368 bp, Arabidopsis thaliana landsberg; identical to SEQ ID NO: 73445

SEQ ID NO: 174298 - DNA, 1392 bp, Arabidopsis thaliana landsberg
  unsure (1)..(1392): unsure at all n locations
atggtgtggtttcagtgcgatgattgtggcgagagtctgaagaagccaaggctaccgagacacatgagtatgtgcactgccactaaggtacactaaaattgaaactctctgatgattctcttcttctcttaacctctctctgatgattattttcgaatcttctgaccatcacagttttcttgcattgactgtggaaacatgtttgggcaagttagtgttcactatcataatcaatgcatcaccgaagctgtaagtatttatttgccaattttgatcaatcttatgatgctaatcactaatgggttaagttttttagatttagttacgtttttttcttggtaaataggagaaatatggtccaatggtgcgatctaatggagaaagttcgaaacaaaagcacgatttcgatataaatgccgagttgttcaacagtcaatggttttgtaggtactttacacacatcgttagccttccttccattgtctgttaatggaggctttgttccaaacttagtcttgtttgtgtgtgttctcttgtggtgaggtacttaatattttctatttgcagcttatgtaatgcaactatgacctgcgagcaggattattttgcgcatgtctatgggaagaaacaccaagagaaagcaaatgaggttgctgatatggactactcgaaacaacaatctgaacatccagcagttgacaagaacaatttaacacaacaacccgacttagatatatatgtcgggttatcaaacgactatccatggttctgtaggtaggtaatcttacattgtttaggacattattgggtaaacctagctcaaaatgtattgttgtttgtgtgttctcttgcggtgagattttatgaagacatgcattaaatatgatttatttcgttccagcttgtgtgacataaacgctaccagcgagcagactttgttagcacatgccaatggcaagaaacaccgagtgaaagttgaacgttttgatgctgaacaacagaaacgacaatcaacacaacattccacggtggataagaaggactactcaaaacaacagatcgaagtcgatatannnnnnnnnnnnnnnnnnnnnnnnnnnnnnnnnnnnnnntaatctcttgatcacatatttcaccttttcactaccattttctatatcacgttagaagaacggatatgcgcttttgatgtgagattagtgatctgttaattatggaataattgaggaggattgtctacaatttttaggagtataataatgatcgtttagaaaaaacctatctatttaactntggatttgtcaatgactcattgaaactctgtgtccttagtaagagtgttcacaaaatctacatgccacctgagttaggtagttcgtactaggataattc

SEQ ID NO: 174299 - DNA, 634 bp, Arabidopsis thaliana landsberg
ctaccaaagcatatttgaatgtgatggttgccaccgattaggttgtgggtttgtgtacagatgcagtaaaagaaaatgtgtctttcgactagacgtgaggtgcgcttctcttccggatccttttattcatgactgtcatccacatgatctcttcttcaacttgaccaaaggtaattgcatagggtgtggttctgatgagtgttcatcctatttcctagagtgtattaaatgcaactcctttttgggtataagatgtgcgtctttgccttttgaggcacactacaaacacgataggcatccactcattctttgccgtgatgaagatacatcaagtggcctctactggtgtgagatttgtgaatcagaattagatccaaaaacatggttttatacatgtgatttttgtacgatcactctccatgtcaactgtttactcggaaaagatatgtacatgaagccccaatacatcttcaaaataggttatcgtcatcgtaaagttgaaattgctcgcaatgatggtaactctcggctcttttgcactagatgtaaacgtcattgtatgcagaatttgatatacaagaggataggtagagaccaaagctattgtactctgaaatgctttggagctaggctt

SEQ ID NO: 174300 - DNA, 136 bp, Arabidopsis thaliana landsberg
cagtcgaggaggaagaccagggagcccaaggaggagaacgtcacccttggacccactgtccgtgaaggagagtatgtctttggtgtcgctcacatctttgcatccttcaatgacaccttcattgtaagtatcatat

SEQ ID NO: 174301 - DNA, 265 bp, Arabidopsis thaliana landsberg; identical to SEQ ID NO: 49260

SEQ ID NO: 174302 - DNA, 457 bp, Arabidopsis thaliana landsberg
catgtgatttgtgcagataagcgtcgtgctggtattgtcttcaaacagcttgaacaactggagctatccatatgcagtgataattggacaaagttagttatatggttgctccaaaattctcccaatctgcgagttctcaatcttgacgctgatgtaagtctcttcattgactatttttgctaaaagctttctatggtgtaatcttgagtctgagtctctctgtctctctctcacccccacgcagagtgattatgaacgttatgaggagtatgaacaggataactggaagaatatacaaagatctgttcctaaatgtttgaagagcagtctcaaaactttggagtttgcagggtacacggcaaggccagaagagagggatttcttgagttttatcttcaaaaaagctcgttgcttgaagacttcatcaatctcgcattgaccacaacataagaaactt

SEQ ID NO: 174303 - DNA, 1133 bp, Arabidopsis thaliana landsberg
acactccgagcattgcctttgattcagggagttctacctttattgatacgcgtagctcttaaagactatgatcctgagatgggcaatagcttccgtgaatttgtagcagggcttgaggaaacggcaaagaagcatcactcaattgactcgacactggagctagattatgggattccatatgctcccacaaaaaccgaaagaatggagatcagaccggaaagccctgcagatagcgttagaggaaacgagaatgcattgccaaatcctcaggatataaataaagaaaccacagatgccaccaataatcagtcacagagagagcaggttggcgattcggtaagccaaaaaaaatattttcttggggagacaaaaacttctttcgtttctcaacagtttggatgatcacaaaacgcaggtagaagaagcaaaacctaaggaaacagattccacagaggcttcccaggagaaactacaggtagctgctaatggacaatattcaagcagttcttcagactttgagacacagcaaaggaaaataattgagctttgggcagcatgcaatgtaccactggttcacagaacctacttctttttgctcttcaaaggtgatccttcagactatgtttatatggaagttgaacttcgaaggctatcttttctgaagcagacgatatctaatgacacggaaacttcaaggtatttttctgcaacacctttttaacgagtctcatcaatatcaatcatatactcataagtatgctaaccaattcctttggtgtctaatcaggatgcaaacagtgaaggcactcacacgcgagaaggaatggatttccaaacaattaccaaagaagtttccatggaaccaaagaatagggctttaccaaaaatggggcgtggaggtgaactcaaagcagagaagcctgcaagtggcgcacaagctgtggaccaacacccaagatatggaccacataaaagaaagtgcttctcttgtggctaagctgcttggatttgttgagccaagtcgaatgccgaaggaaatgtttggcctcagcttgttacctagaaccgaaaacgtaaaatcatctggctggagatttaccaaatcattctctgctatacgcttgaccagatga

SEQ ID NO: 174304 - DNA, 738 bp, Arabidopsis thaliana landsberg
tcataagattatctccccagcatcatatccaataatcacatttgtccattctcctcgcctactgctgtcttggagtccctctcgcacgccattgggattttcttaatattgctttctctatttatagcttgaatgtttctttgtagaaaggatctctgtttatgcaatttgtatgttgactattgtttgctctctctattgtttctccttcgtaaatattgttctgttttgaataatttatactttctacttatcaggaactgtgtttatgcctccgaagtgggccttaggctaccaccaatgccgttggagttatatgtctgacaagcgagtagccgaggtcagtgtttttgttcatattttggctttggttgttgagtaaagctaatgaggggaatgtcactttatattcagtatttaaacttttgagcttccctgtcatgcttttcatcattgtgctgatgattgcagatcgctcaaacatttcgcgacaagaaaattccttctgacgtgatatggatggatattgactacatggatggtttccgttgtttcacattcgacaaggcatgttttttcttaaagatcattccaagtggattttattaacagtgcttaccatggtttgcatagacgccttagaagttttgtattgacattataagacatttttttgaatactttgtttaggagcgttttccggatccaagtgctttggccaaagatctccatagtaat

SEQ ID NO: 174305 - DNA, 1695 bp, Arabidopsis thaliana landsberg
  unsure (1)..(1695): unsure at all n locations
gtgaccagtatccttcacagcatccaagagcaagagaatatgcttacctcaagtctgccccatgtataaagagccgtggttcatcaaaagtacagcagcgagaacaaaacaatcttcagttagtgtctgaacgcttacaaagtgatctaacctcaaacaaggaagttcagttgaaacaagatggtgattcagatgtaaatcgccatggtcatgaaagcgaaagaaatcatgtacatgggatcactgataagtcagctgtcacggatgtaaaacttggtgtgggaggtaagtttgatgagaagaagatttcggttgaatctcaaaacccacattcagtttcagatgtagggtgtannnnnnnnnnnnnnnnnnnnnnnggttgtttaggagggaaggaccaaaatgctgcaaccaataggttaagtctctctgttgagcttttgagttctggatctctcgttgttaaaaagctgtggtgcagtaaacaggccatatacccaaaaggtgatgaattgagaattttgtatgagctttatactttagtatttttttttttatgtcttctgagacttttgcttttgattgtatgttacagggttcaagagccgtgttaagttcttaagtgtgcttgacccaacaaacctaaccaactacatctcagaggttctggatgcagggcttcttggtccattgttcagggtacactaactacgtagtggtttcgagaatataactgaatatctatttatcatgcagaacacatgaaggtggtaagttactgatcaatcagtattatttccaggtctcagtagaagattaccccactgagaatttctccaatgtatctgctgaaaagtgctggcaaatggtgacacaaaggctcaaactggaaatcatcaagaaatgtgatcaaccagttagctctttgacctctttacaacctttggagagtataaatgcgcttgaaatgtttggatttctctccccgcacgtaattaaggtgacaatcaatttctcatgcatagccataaaactatgatatcctgaatcttcttgcggtggaaagtttttttttttttttttttcttctactttgctggatgagagaagctcccatcttctgtttcagtccccttgagcatctctcttactcgcctacatgaccaaatttccatatgtactttttagcgttttggactgaaagttgaccattgtgcacaggtggttgaggctcttgatccaaagcatcaattggaggagtattggaaccaaaaagcagtgaaactgtttggtgctgaaccaataaaggaaggagaaaaggatgatacagagaaaggaggggcttcagatccctctttggaccgggacacaaggcttctgcgtggactgttgaagaaggcgacacctgaagaattagtaatgatgcatggacttctgtgtggtgagactcgcaacaccgagctcaaggaagagctctctactttggttgataagatggagataagtccttaaggaggagcaagcagataaacacactaacaccctttgaagttgattgtgtttgttgttcctttggttataaactgtatcagtagagaaatctagagaggcaatacaaaagtagacaaaagggttacttcgttgacatgtctttcctttttaccaaaaaagggtttaggattaatgattgtatta

SEQ ID NO: 174306 - DNA, 563 bp, Arabidopsis thaliana landsberg
ctggtctaaaaatgggttttcagaaagcctttaaaagattttaaacaaatcttgatcaataggcagatgaaatgaagggaaaagaaaatgcccaaggacatggcaaataaaaaggttatgaacatcactgtgtggaattcacatgttcctcgttttgatatctgacggggtcttatatgtttttaggttgatgagatgaaggcaattgagaagatcaaggcaaaacgtgagcgaaagagactagaacccgaggtgagacttctaaagccatctcagacattatctaatgggaactctaataaggtttcatagaaattcttttacaattcatctcatggattcaatgtttcagcttgaactagctctgattgttgaggaaatgcaagagttacgttccctaagaattgaaaaactaaagaagcaaggtatgtcaataacctgatgtggtacaatgcgttctgataccagagactgacttaagtaaatgggttatatgtacactatgcaggacatttccttcccgaagaagatgacaagtttttcgagagtgttcgtgctgcagt

SEQ ID NO: 174307 - DNA, 576 bp, Arabidopsis thaliana landsberg
atgtcagtcgtcggagcgattaaccccgtacctattgcacccaccactcgccgccgtgttggcgattctctagacgttatctccgaacgaccctcgaattcatctgattactgcaatacaattaaccaacccatcgttggatcaacagatttagacggaggagatgcgactggtcaagactcgtcaccatcttcggaaagctctgcctcatctactggatctcattaccatcacgatcactaccaccgattttacagtcatccggtgattcgttaccttctcctccgaaaattctggattccgttttatggtggtgcatcgacggttgtgattggtcaagggtttagatcggggagaaacgtgggtcgtcggatcttgggtcttctaatgttgcttgtggttgcgtctgtgttccttagagtctaccttatgggtggtgtccgcgtggtggatcacgctcgtttgaaggagtttgttgttgttagaacgcttcgtgatgattggtcaatggctcaacgtgaagttgcagagaaccaagcttcttctcagccaatgcgtgttctcgaaaagcttccc

SEQ ID NO: 174308 - DNA, 826 bp, Arabidopsis thaliana landsberg
atgaggaaagcacagggctactcctactctgtaatcgcatcggtgttggtgttactgtgtgtggtggtgtctcgaatcgaatgcagcagccaagtgcacgccctgagccgtctttacctgtctaagcgaggggttggtggttcgtccaccatggacacaagccatttcaaggcggttaaggatttgaaaccgtcttcgctgcggagtgctgctaatcaggaggggttaagaaagagagatctgatacggagattgcccggacagcctcccgttagtttcgatcagtacggcggctatgttaccgtcaacgaatccgccgggcgttcctttttctactatttcgtggaagcctctaagtctaaagattcttctcctctgcttctctggctcaacggcggtacgtttccactgtccacacgcatacgtatatatatttcttttatcttggtttgcatctttagttaggggcactgcattatgggtttatatctgtacatcttatatctgagtacaaagatgaacaagaatgttagtttgatcgatcgaggctgtctttttctcagtgcttattaatctatcatatgctatatgattttcagaatttaataattgtgaggaccataccatatttatgccttataggtctgctaattttctttttcttttataatttttaaatcaaattatcggaactaattattatttgcgcaacaatagtagtgaataatagggaaaagatccacaaccccaatcgaaaactcaactgagaaaagaaaaagaaaaatgatttgccttttttcaaaaatggcacatgctgaggatttct

SEQ ID NO: 174309 - DNA, 821 bp, Arabidopsis thaliana landsberg; identical to SEQ ID NO: 34141

SEQ ID NO: 174310 - DNA, 2208 bp, Arabidopsis thaliana landsberg
atggtgagaacaagattggcgatatctgttgttcttgtgtcgacattgttgttgttgaatgtgaaagcgaagagcgttgatccttacaaggtacggtttgtgattcatcttgttttctttccattcacaagtcttttgattggggccggaaataatgattacttttgattgtcccctttctcattgaagtttgggctgacaaatttgtgggtgttatagaaaagaaggatttttgatatattaggttttgctcagtagtttttgctattgattataaacattattaactaatgaatgcatcttcaggttcttggagtatctaaggatgcaaagcagcgtgaaatccagaaagctttccacaagtaagcacccttcgtttctagtcgctgattaagctaataattcgaatgatgatcaacaaatagtttactcatgtagcttgtgattttttttggcaggcaatctctgaaatatcatccagataaaaacaaagataagggtgctcaggagaagtttgctgagattaataatggtaggtatcaaatttccctaggagatgtgtcctgtaatcgaatcttttagtatattataagattattcttgttctatggccatgtgtttgtggcacaaattgaatttttgttgatctggctttgacaagtttaaacccttatctatgtgtaacagcgtatgagatcttatctgatgaagagaagaggaaaaactatgatctttatggagatgagaaaggacagcctggatttgattcggggtttcccggaggtaatggtgggtattcttactcctcaagtggtggtggtttcaactttggagggcctggtggttggcaaaatatgggcggtgggggaggttccaaatcgttttctttctcgtttggcggtcctagtgaaagctcctttggttttggtatggatgatatcttttccatgttttcgggcggtagttctaaaggaaaggagcagtttggtggctttggtagctcatcgaatgctgaatctaaatcaaagagcagtactgtagcagctatcaaaaccataaactctcaggtctataagaaggacgttgtggaccaagggatgacttggcttttgttgtcgtatcttccatctcagaggggaagccagtaccatgaatccatcatagaggaagttgctgagtcgttgcaaggagctttaaaggtaaaacatatgcttgtcaagttagttgattttgggttttctgtttcgttcttaaaagaagaagtgtagtttcttttgttgtttacgtgatttaactttatgtttacaggttgggcgattaaattgtgaaacagaatcctctctttgcaaacaactaggcatagttcctcgtagggctccaaggatgtttgtttattcatacacatcaagtggcaaagctaccttagcagaatatactgaagagcttgttgcaaagaaggtgaaaagcttctgccaggaacatctaccgagattctcaaaaaagattgatctgaatacattcgatgtatctgccgttagctcacaaaagactcctaaagttttgcttctgtcaacaaagaaagacactcctgtcatctggcgggttctaagtggcttgtacaatggacgatttgtcttttacaacacagaggtttgttatattttggctttaatttccacttacatcactattcctacaattattgttactgcgagagtctgatggtcgtagaaattatggggtggttccctggtccacgtttaatgacgagtcagcaaatttgaacttaattattagaattccttagacatgaaatctttttagctaaagtatttttttctcatgatcttgtaggtccatgatacttctgatccaaagatacaaaagttgggggtagacaagtttccggcaatagttggttggttatcgaatggggagaagcaagtcttgaaaacaggtatcactgtgaaaaatctgaaatcagctgtccaggaacttggtaaattgcttgaaggattagagaagaagaacaagaaggtctcttctaagagtcaggcgggccaagcccctaacgagtcctcagaaaagatacctcttctgtcaagaccaaattttgactccatttgtggggagaacactcctgtttgtatcattggtgccttcagatcgtcaaatggtaaagagaagctgcagtcaataatgtccaag

SEQ ID NO: 174311 - DNA, 625 bp, Arabidopsis thaliana landsberg
gtagttgaattagattcaatagtcgtttttcgttttgctgaatcgatgttattctgaattttagttgaaatttcttaaaaactgtagctggtgtttcctctgcagttgatataatctcagcgattgaatttgataattctggaaaccatcttgctactggggaccgtggaggacgtgttgttcttttcgagagaaccgataccaataatgtatgtccactttaccttgtaatcgtttttctgatatgggatttggatcattttggttatatgttgttgttgcatgctgtggattacagagcagtggaaccagaagagagcttgaagaagctgattatccactgaggcatccagagtttcgttataaaacagagtttcagagtcatgaccctgaggtatttgatttactctgttttcttcttactcagctatttggctataccttttatctgtcttttcatgctctatccttgtttaccagtttgattacctcaagagtttggagatagaggagaaaattaacaaaattagatggtgtcaaacagcaaatggagctctttttctcctctcgaccaatgataaaaccatcaagttttgaaggtaaaacttatcatttgttgttgcct

SEQ ID NO: 174312 - DNA, 608 bp, Arabidopsis thaliana landsberg
atcatggaagaatcatcaaaccaacaaatcctcaactccgagacccgacccgacccgattcaaaaaccaccggaatcaccagccaccaaactctcattcccgagacttttcctctggtttgatcaatcaaatcgcatcaaaactctgctttcatggtccatcttcttcctcctcgccgtcatcgtcccaatgatctcacacttcgtgctaatctgcgccgattgcgatttcaaacaccgtcgtccttacgacggtttagtgcagctttcgttatcgatcttcgccggaatctcgttcgttagtctctcagattggtccaagaaatatggaatccgaaggtttctcttcttcgataagcttaaagatgttagcgataaagttaggatcggatacgaagctaaaatccaggtaaattaaacgtatcgactaattatagtattagtaatctaatttcatgattaagaatcgtaatttttggaattaaaattggtaactagtggaagaagatgcgattgtaaagaacccgttatttcagttttctttcaaaatcggttcatcagtcggttcaatttggagagattgaatcatatttggttacgtctcggttc

SEQ ID NO: 174313 - DNA, 309 bp, Arabidopsis thaliana landsberg
gtatcaccggtgccactgctggtggccttgtgcgctattcttctgctacgcgccgtggcgcgccaggcccaggtcatgccattcctgttcacgctggccctggtattcctgagctatgccggtttcggcatcagcctgtggcccaacatcgtgccgcccgacatctcgatctgggcggctgcctcgccgccgcagagccagggattcacgctggtgggtgcgctcttcatcatcccgctcatactcggttatacgatctgggcctactacgtgttccgcggcaaggtgaggcacggcgagggctatcac

SEQ ID NO: 174314 - DNA, 730 bp, Arabidopsis thaliana landsberg
atgtgtaaatccgaaggagaagatttgcaaggtttctatccagttagacctgaatgtcaaccagatgttacaaggtcccgttttatatcaagggtaccgttcttcatctcaatcacctgttcatgtcttgatgaattgatgatgcattaggctcttgtttgtttgattgtgtgtttgcagctgatgcgatgcttcctcttcatatgttatttgtcaggctgagaaagactctaagtgctagaagatggcacgctgcctttactgaagatggccatttggatatggaaaaagtgcttagacgtatacagcgcggagtgagtctactttcttttcctgatcttgtttctatctatatgctctttttgttgttgttcacttggtttctttgctagggaattcatccttccatcaaaggcgctgtttgggagtttttgttaggatgctacgatccagacagcacttttgaggaaaggaacatactgaggaatcgcagaaggtactatagaattggttgatcatttactagttttgtagatgcacgtcatggctaactttaaatgttattgatcatctaagggagcagtacggtgcatggaaagaagaatgtaagaaaatggttcctgtcattggtagtggcaagtacgtcacaatggcagtcgttaaagaaaatgggaacccaatagacgaatcttctgtagaaaaccaaggatggatcgtgaaaaacactgtt

SEQ ID NO: 174315 - DNA, 686 bp, Arabidopsis thaliana landsberg
ggaagaaaccaagaaaagagaggaattcgcacccaagttgattcctttaggaataagcgttatggtggtgatagagaaaggggattcaatagtcggattcaaggaaagagtagcgaggcgtcatttcgtggtaagaaagagacaagctttagtagagatagagaagactacaagggtttaaggaaacgggaagatcttcttgaagacgaaagtagtgatgaggatgtcaagagtttagtaatgggagatattggggatttgcttagtgaagatgatgaggaagaggaccaagattatgactttcttaagaagaaagctgtttctgcttttgggtttgataaggagaatgttatagaagcagataaaacaaggaatgcaaatgattcttatttgactaagacaaggtaaacaaacattgttgcaaatctagtttcttctgcgtgcttttgaattaatcgagtgtacatcaacctcagagttttgcttgattgtaaatcttgacctcttggtactgtctgattgagagttactcttttcggttaacagatttgatcactacccattgtctcccttatcgctaaaggcaattaaggatgctggatacgagacaatgactgttgttcaggaagctactctccctataattctcaaaggtatttgtttcttttatttatttattaaggtgc

SEQ ID NO: 174316 - DNA, 604 bp, Arabidopsis thaliana landsberg; identical to SEQ ID NO: 3028
  unsure (1)..(604): unsure at all n locations

SEQ ID NO: 174317 - DNA, 711 bp, Arabidopsis thaliana landsberg; identical to SEQ ID NO: 74619

SEQ ID NO: 174318 - DNA, 1259 bp, Arabidopsis thaliana landsberg
gatttcaaaaggagattgaagatgaaaatcgaagaagagaacctgagattcgaaggagattgaagctgggcttgatacagtcgcttcgctggctgaagattttacacagtcgaagtcggttaagggaagaggtttaagagacggcgaaagggttttaaacagtatctttgcgtttattacttttttttttgtcatcctttgcgtttattacttattggtatttagttcactttagtagtccttcttttctttttacgttttgaattgttacccaaacttcaaagttgattaatatttgccaataaccacaattggcttctaaggagagtgtattcaaattagaatttaagaagaggctcggtctagtttcaggcaaatgtctttggtttttttgctactttagtccttaatttcttattgttgttattgggtttgtggtactggtaggagtttactttttcaaaaataaagttaagggtttaatttttcaaaaataaagttaagggtttaaattcatgttgttaataaaggtcaggggtttaaaacattaaaaaatagttcaccgtatatttaggacaggtccagcttgtatgacgtactaactcagcttttcgtcggagatgaattcagtagaagcagtagagaagatcttgaactacagtttcgtgaacaagactcttctcaaggaagctataacacaaaaatctcctttactcgaccggcttgagttcttcggcgactctattcttgaggtcgccttcactaattacatccgccacacttaccctaacctcaaagtcaaggagttgcgtgacttgcgaactgcaaatgttagtaacgagaagttcgctcgtgtcgccgtcaatctcaatctccaccacttccttttactccagaatccttctctatttaaaaaggtatgtttctttattttcttgaatcattagaaacagagtgtcactgtcttgagtcaatgaatgatttgagtgatttaatattaggttaaagagttcgcagaggcggtgaggaaagaagatgatccagttctgtatggtggattagtgaagccccaaagattcttgctgacattgtagagtcaatagctgcagctgtttttattgatgtaaattatgatgtacaaagactctgggaggtctgtgtctacttgatgtggttttgtctttggctccaattctaggtttatgattctcaagtattaataaaaaaagagaggatattttgagatcttaggagttttt

SEQ ID NO: 174319 - DNA, 717 bp, Arabidopsis thaliana landsberg
attttatgatttttctatatagttgtggtgttaactgagagttttgtctctgttctagagtttgagaacttggagtcttgcgaacaagcgtactttaaggtaaatggcaaatggctgacaagtatgtatagtagagaagttgtgaaacgaattgtttagggggatttaaccaacttgttgatttgcagatggacaatgctctgatcgatgatagacggatacatgtggatttcagtcagagtgtgtccaaactttggtcacagttcaggcaaaaagactcccaaaagggcaaaggtaaatcttttttttttctcctccctatggaataagtgacctgctatagacgaaacaagtaatgaaatccttggcaaacatgaaacagggaatgggtgtttcaaatgcggctcgacggatcatattgccaaggactgtgtgggtggtccgtcttcaaagtttattgtaaaagatcaaaacagacagcacggaggaggtgaaggctatgagatggtgtttgagggtgatgtgcatgaaacccccaagcataatagtcatgagagggagaggagtgagaagattcagaggagaagtcctcatggtaatggggaaggcaaaagacagcacagagatgaacgtgatgatggtagaagacagcatgactcggaaagacgcacgagaactggagaggaaacacagagagagaaaagaaagagagagtag

SEQ ID NO: 174320 - DNA, 369 bp, Arabidopsis thaliana landsberg
ggcagctccttctttgaatcctcatgaattggtggctgcttattttcctcaaggaagagcagtgtctttaccaaatataggaacactgaatgtaatcttaatccatcatttagcagacaagcggtttcaaggaattctaacattcaaccgtttttcggtcctgttattgctacaaatgttcctcgtgtggttgaagtaggtgagtgttctagacaaggagagtttggagaaccagtaaacaagatggataagggagattcaacaaaaaggaagaatatgggaagtgctagaagtgatgaagaagaaagaactcatggagttgctgagcataaggatggaggtattcttaaacctccaaagaagcgctaa

SEQ ID NO: 174321 - DNA, 2544 bp, Arabidopsis thaliana landsberg
agttgagaatcatagagctaacaacttggcacaagatgcatcgggttatcggataaagagagggaaatttcacaaaactgaaaatctgataaccagtgcagagccaaattcccaggtcgcggaccgtccgcgtgttgacgccggaccgtccgaggttaccagaaaggttctcttaatcgattcggctgacaatgaagccgatacaagtgattggaggacacctatacttaattatttgcaaaatcccaatatcaggacagataagaacattcggcgaacaactttcaagtatgtcttgatgagtgatgaactttaccgccgaacagtcaatgacatcctgcttaagtgcttgggcccagatgatgctatattagccatggccgaagtacatgaaggaatttgtggtactcatcaaccggctccgaagatgaagtggttattgcgaaggtctgggttatattggcccaacatgatagctgattgtttcaagtactacaaagggtgccaagtatgtcagaaattcagcgacctagagttggttcccgcagccgaattacatcctatcattaaatcttgacctttcagaggatggggattggactttataggagagattcatcattcatcatcaaaagggcatcggttcgtgtaagttgccactaactactttaccaaatggactgaagtcgttgctctgaagaacatgacacactgggaggtaattgagtttgtaactaaacatattattcatagattcggtattccccagactttgactacagaccaggggcttctttttttgtcaaagaaggtacatgagtttgctgaattatatagaattaaattgctcaattcatctttgtattatgctcaggccaatggacaggccgagactattaataggacattgattaatttgataaaaaagaagatatctgataatcctaaacattggcataagattttgtctgaagctttatgggctcataggatatctaaacatagggctactcaagtatctccttttgagcttgtctatgggcaggaagcaatgttgcctgtagagataagtttaaatgttgtcaggttcgctagacagaatgatctaactgctactgattattataattcaatgatggataatattgatgaggtgaccgacaaaaggatgatagctttgggagcaatagaaaaggacaagatcatggtagccagagcctacaacaagaaggtcaaagcaaaatcatttcaagtaggggacctggtgtggaagaccattctgcctctaaggaataaagaccggaagttcgggaaatggtcaccaagctgggaaggtccttataaagtaaaacaggtgatgtctggcaacgcctatttactacaaacattacaaggcaaggacttacctaaggctttgaatgggcgtttcctcaaacagtaccatcctagtatgtggcaagatgcctaagagaaccgatgtaatcacatcgagttagttgcttttggtttgctcagctccaccaaaaggcaggggggcatatgttgagcaccaaattgagcaggcggacggtccggccctgaggccggacggtccacggtcctggacagtccgcgcatgtgggctggacgtgccgcgcatcgcagagcagtttagggtccgagttttgtgctatgtttgttggctatatccgcggaattagctcggaatccggtcgtgtaaaaggtccagcccccctcctctataaaaagagaggcctacgaccgatttgtaatcaacaatcgaatcaatacaacttctattcgcattttatcctaggagtagttctagtcttgtttaggtttagcctctcaatccccaaattctccgcctctcctcgactctacgtcgattagaggagtctaggtcggtctgcccgagcctagacaccacctaggatctctacttcccgacggggtcctcccgggagcgagatccaggcgccgccgacgatcttccgccgtccctgcgtacgcgcggaccgtccggccccagggcgcggaccgtccggccgtcaggcaggaaaccttagcccctgcgccaggccgcggaccgtccggccccaggtcgcggactgtccgcgcctgaccagagagcaccagccgctcctcgcaccagctcgtggaccgtccggcccctgtgccacggaccgtccgcccctccgcggagagcaccaccacggttcttttatagtgtttggcgctccgaaaaggcgtcaacacactttttggcgactccgctggggaaacaaatatagacgcatcaaatcggccctcaatggccagttcaagggatagctctgatatttccccaagcaacatcattgagccgacttgggaaaccttgccggctgatgaacagctccagtttgaggagcacaaggagcgtatgatccaggaggcaaaaacaaaattcttggccagcttcaaagtggacaggaacaacaaggtcgtccgacatcgggcgacggatccgcgtcgctccaacccacaccagatatccccaat

SEQ ID NO: 174322 - DNA, 2128 bp, Arabidopsis thaliana landsberg; identical to SEQ ID NO: 36768

SEQ ID NO: 174323 - DNA, 1068 bp, Arabidopsis thaliana landsberg; identical to SEQ ID NO: 26802

SEQ ID NO: 174324 - DNA, 642 bp, Arabidopsis thaliana landsberg
atgccgagccggagaagtgagtctgctattaggctaattacgtactctgaggagcttgtggatggaaaaccgttctttgctttttccaattgtcttcctgtgaaggctttaaaccgtgaacctgctggtcatgccttccattctgctgcgcttaaactgcatggttgtgcagaagaacccacagacgatgaaggtggtgataagaaagtgggagatgataaagagaaggaatatgttccttcattcaactcgtatgccaacaaaggaaagaagaagtctggtacccagcaacaagaccactatgcgttgttgggtttgagcaatgtaagatatcttgcgacggaagatcagattaggaaaagttatcgtgaagctgcgttgaagcatcatcctgataaactcgctagtctccttctgttagaggaaacagaagaagccaaggaggcaaaaaaagatgagattgaatctcgcttcaaagcgattcaagaagcatatgaggtattgatggacccatctagcagaagaatttttgactccactgatgagtttgatgacgaggtcccatcggattgcttaaagccagactttttcaaggtgtttggtccagcgtttaagagaaatgctaggtggtcagtacatcag

SEQ ID NO: 174325 - DNA, 797 bp, Arabidopsis thaliana landsberg
atgggaagaaatcttggttcggcatttagacaagagttggctaatcttgacaaagatccagattcccacaagactgcaatgagcaatttgagatcgattgtgaaagatttggatgcaaaggtggttcatgtttttgttgctcaactttctgatgtcaaagagattgggttggagtctggtggttacacagtatctctctttgaagaccttgctcgtgctcatggagtcaagattgctcctcatatagacattatcatgccggcgattataagaacattgagctccagtgaagggtctttacgtgttcaacaggcttgctcaagggcagtagctgctatggctagatatggaattgatcctacaacaccagaagataagaaaacgaatgtgattcattctctttgcaagccactctctgattctcttatagattcgcaacatcaacagcatcttgctttgggatctgctctttgcttgaagtcacttgtggattgcgataattggcgatctgcttctagtgaaatggttaataatgtttgtcaaagcttagctgttgctcttgaagctacttcaagtgaagctaagtctcatatggcacttgttatggcactttccaagcacaatccttttactgtcgaggcatatgcaaggctttttgtgaagtcgggtctgaggattctggatttaggtgttgttgagggagattctcagaaacggcttttagctatacaaatgctcaactttctgatgaagaatctgaatcccaagagtatttgttctgagctagagcttatatc

SEQ ID NO: 174326 - DNA, 532 bp, Arabidopsis thaliana landsberg; identical to SEQ ID NO: 77488

SEQ ID NO: 174327 - DNA, 918 bp, Arabidopsis thaliana landsberg
atcaaattatatacctcactggtttaagctttgattccaagaaaagggaaatgaattctaacaactggctcgcgttccctctatcaccaactcactcttctttgccgcctcacattcactcttcacaaaattctcatttcaatctaggtttggtcaacgacaatatcgacaacccttttcaaaaccaaggtatgtgcactcacatttatgtatatgtatgttcatattcaaggccttaatgcaattcttttattaaacatatactatttgctatgttaaaagcttttaaaaacgaagggttcaaatattaagacatgtaaaatcgaaagcatcattgcacatgttttaagattgttatgttcatatattttcttgttttttttacaaatttttgtttgtgttttcaccacaaaaataattaattatattctttctaattaggatggaatatgatcaatccacatggtggaggcggcgaaggtggagaggttccaaaagtggctgatttcttaggagtgagcaaatcgggggatcatcacaccgatcacaacctcgtaccttataacgacattcatcaaaccaacgcctccgactactactttcaaaccaatagcttgttacctacagtcgtcacttgtgcctctaatgctcctaataattatgagcttcaagagagtgcacacaatttgcaatctctcactctctctatgggaagtactggagctgccgctgcagaagtcgccactgtgaaagcctcgccggctgagactagtgccgataatagtagcagcactaccaacacaagtggaggagccatcgttgaggctacaccgagacggactttggaaacttttggacaacgaacctctatctatcgtggagttacaaggtgtttaagatgtctcaattttttcgcgt

SEQ ID NO: 174328 - DNA, 1129 bp, Arabidopsis thaliana landsberg
  unsure (1)..(1129): unsure at all n locations
cgtccttcagaagtgtgaattgaacgaattcacgatgaatcgtttgggtcataaatccgtggtttatcacggagatttacgtttgggggaacttgatgtgaaccatgtatcttcaagtcatgaatttcgattccctaacgatgagattcgaatccaccatctatctccggctggtgagagatgtcctccgctcgcgattcttcagacgattgcttcttttgccgttcgatgcaagcttgagtcatcggctccggtcaaatctcaagagttaatgcatctacacgcagtctgtttccatgaattgaaggtaggtttgagatttccgaaatgacatttagctgattttggatgttttccaattgttaggagtgattcactagtttgattttgtgaatacagactgcagtggttatgctcggagatgaggagattcatttagtggcgatgccgagtaaggagaagaagttcccgtgtttttggtgtttttcggttccttcaggtctttatgattcgtgcttaaggatgcttaatactcggtgtttgtctattgtgtttgatttggatgagactttgattgttgcaaatactatgaagtcatttgaggatagaatcgaggctcttaaatcttggatttcacgtgagatggatcctgtgaggattaatgggatgtcagcagaacttaaaaggtatatggatgataggatgctgctgaagcagtatattgataatgactatgcttttgataacggagttttgttaaaggctcaacctgaggaagtccgcccaacttctgatggacaagagaaagtttgtagacccgtgattagattgccggagaagaatactgtgcttactcggattaagccagaggttagaagattcatctctgttgtggctggatatttattcatttcatcttatttgatgctttggatttaccttctctggcatgtgataggataaggtcgcttaagtatatttgagtgatttagctntaatattgttggaactgaaaccaagttattgctgatgcagatccgngacactagtgtgcttgtaaaactgagaccagcatgggaggaggtaagaatttatttgacagccaaactaggaaacggttgaagttacg

SEQ ID NO: 174329 - DNA, 498 bp, Arabidopsis thaliana landsberg
ctcataaaatccatattggtaaatgatgcaacttccttattatatctgcaggtttcagaaagaaagaaatcaacatgtccactgtgcaagtccaatttcatcacaatcacaaagatagaagacgctgattcttccgatcaaaagatatactcacaaacagtccctgacttatcttcagcaaataacattcttgtagtactccctgaataagaagaacaaagacaaactctcaatccactggtaagccgagagtattgagctactacgcgatcttgttcttgatagcaacaacattctattgtgttttgtttttttctcctgcagactcgagcttcaggttgcagcagatgctacttgactgagccagaggagcttctgataagatgtcacctctgcaatttccggcgaatccactcctattgtttagacccttatctgcttccttgcccctgtaaccattgcaatgatcttcagataaagtaaaaccgtcgcaactac

SEQ ID NO: 174330 - DNA, 1324 bp, Arabidopsis thaliana landsberg
atgtgtttaaaacttatgataccagcaacgcccgttctcgtgcttcgggatattatccgatgggaatggcgtcaatctcaagcagtcctgattcgaaggaagttagagaaagagaagggattcctgagctagaagaagcaacagagcaagaagttatcaagcaagtgtatagacgtcccaagagaccaggattggagaaggttaaagaacacagagacgagcacaagcacaacgtttttcctgagaggaacattaacaaaagggaagttccaatgccagaacaagtcactgagagctcattggattcagagacaatttcgtctttttcaggaagtgatgtagaatcggagtttcactatgttaatggtggtgaaggaaagagtagcagcatcagttcaatcagtcatggggctgggacaaagagctcgagagaagtagaagaacagtatgggaggaaaaaaggagtgagctttgagttggaggaaacaacgagcacttcgtcttttgatgttgaatcttccaagataagtagcttatccagtttgtcgattcatgccactagggatctcagagaagttgttaaggagatcaagagtgagttcgagattgcttcttcttgtgggaaggaggttgctttgttacttgaagtcggcaagttgccttatcagcataaaaacaatggcgttaaaggtactgtgtcttaactcgtatgttttgctagccatgatcatgcattagtttacagctagaataaaactatctgcttttgtaacccatgcgtttaaattttgcaatgttatgtcatggttacaaagtaatgctgataaacttaagtttaatggttatttgatgaattgtaatatgaacagaaatgttgaaaaactctaaattccaatataatgggaaagtatcttaaattattgtggtttagactgatttgcttggtgttgaactatgaaccatgtattctgtccgcactgctttttagatgaaggtcttttttactgttttgtttggtggggttttaaatgaaaagttttgcttttcagttatcttatccaggatcatgtatctggtagcaccatccacacggtcatcgcactctcagcccagactatcaatacgtttaacatctagaactcgaaaaaaggcgaaatcatacaatggacaagatgttaatggaggcttcaatggaaacctctcatcaaccttagagaaactgtatgcgtgggaaaagaaactgtacaaggaagtcaaggtattaatatttttaatatttgatgcagctttgtgtttctgaatcactaatgggaatctatatcac

SEQ ID NO: 174331 - DNA, 1160 bp, Arabidopsis thaliana landsberg
ggtttgttggtaatctctcaaaatattacatgttcataaactttcaaacctatcagcgtagaacaagggctggaaaaaattacaaagggtggttcagtaaagacaatttttctggcatgtattggtttccttatgtaacattctattaaagaaacgaactttcaccctttgccacagcgtaagtcagatggtgaacatgaatcgagtagaagactcaagacacaattcctgattgaaatggaaggtttcgacagtggcagcgagcaaattctcctaataggtaaaaaactgggaacagtaaggtttgagttttgtgggttatatggggtttagtaactttattctgctaattttttttgtttgttaggagcaacaaatagaccgcaagagctcgatgaagcagcaagaagacgactaaccaagagactctacattcctcttccttcatctggtaaagaatgataaacaaactttttcatgtcattctctggttttcgtctaatatactctcttgacacgattctctgttttcgaattgaagaagcaagagcatggataatacagaatctcctaaagaaagatgggttgtttactctgtcggatgatgatatgaacatcatatgcaacctaacggaaggtaaattcatcataggaacttcagaaacacaataaatctctggatttttgatctttaaagtccaaagaacacaacccaaaaatgcaaatacacatttgcggccataaccaagctagcttttcattaaatttcactgcagggtactcgggatcagatatgaagaacctggtgaaagatgcaactatgggtccattaagagaagctctcaaacgaggcatagatataactaacctgactaaagatgacatgcgtctagtaactcttcaggtacatataatcaaaatgaagattttttgtggtatcatcatgtttcgggtcaaacttaaattgatgatatgcgaactctgtgaatacaaacatgtaaagctaaacgaattctttttgtttctgtcattgtttcatatatttggtcattatgcaggactttaaagacgcattgcaagaagtaaggccttctgtttctcagaacgaacttggaatctatgaaaattggaacaatcagtttggtagtttaagcctctaa

SEQ ID NO: 174332 - DNA, 1280 bp, Arabidopsis thaliana landsberg
aacagtttcagctttgctaaagatgttggaaaatataaaccctcatgttgcaaatttaggattgcccgtgatagattcaacatagagaaagaaaagacaaattttcatatgaggattatatctaaccgcgagacagatggaagctgaagttgctgcattgatacctggagatttcgacgacaatctagataaaagagatatagttctacaaatgaagtctggaaagttaaggaaaatacatgaatgtcacgtttcatatctagctcttcagtatccattgttatttccaaaaggagaggatgggtataggcttggaataaaaaaaactcctaccaaaacttcaaaaggaaagaagaagcaggaagatgttagtatgaggcagtggtttgactaccgtttacaagagagaaaagatgagaagcacatcctccttcgctcaaaacgtttacttcaacaatttatagttgacgcttttacaatgatagagtctaatcggctaagatttatcaaaaaaaatcagacgaagctgcgcagtaccaacaagcaggcagttcaagatgcttctgatgctggagataatgatctttctaataaaggaaaaagtgttattattcctccatctttcaccggtggtccaccttatatgcagcagaactacttagatgcaatgggtacctgtaaacatttcggatttcccgacctgtttataaccctcacatgtaatactaagtggccagagatcacaagatttgtaaaagagcggaagttgaatggtgaggacaggccggatatcatttgcaggatttataaaatgaaactcgacaacttgatggatgatctaacaaagaatcatatctttggcaaaaccaaatcaggtactacattatttcaaatttagttacatatatttcatgaattttaacttacaagtgacaactcataattattatgttgaaacagctatgtatacagtagaatttcaaaaaagacgtcttccacatgctcacataattgtttggatggatcctagatacaagtttcctacagttgatcacgttgagaagattatttttgctgaaatttcagataaagaaaaagatccagagctatatcaagctgtctcggaatgtatgattcatggaccatccagattggttaatcctaattcgtcatgcatggaaaatggtacatgttccaagtattatccaaagaaccatgttgagaacacgtctcttgacaatgaaggttatccaatatataggcgcaaagatacggtgttt

SEQ ID NO: 174333 - DNA, 667 bp, Arabidopsis thaliana landsberg
aatgctaattctaatcaaggtacaattcttgatgatattgaattagctttcaagattgattaaattttcatgaaaaagtgtcaaagttttaattatgaatgtttgtggagaagtacaacatcatttgcgtgtgaatgaggatgtccgccggatattgctgctttatttatacaagttactgttccttagtaaacctgacgacataaaaggatctaaccaagatcgatttcatgtaaaaacaatgcaataaagattcgtttttgtagatatgaaatgggagctacgctttataatcaacaacatgttatactaaaaggggataaaaacaaatctcatgtttatattttggtgatcttataatcattaataaaaaaattagggttggaggtgagtcaacacttaccaccggaggttaactcaccggcgatattccggtgcgttagagtgagctcaatagaagaggatgaagatgatcaagcatatgcttaccaaacggctgtgaacattggaggccatatcttcaaaggcattctctatgaccaaggaccagaacatcaagataatcatcaccttaacctacttgcttccactgcaaccaccaccaatgtggaggagaccgccactaagactgtcaccggtaacaataataatggattaatgcttgatc

SEQ ID NO: 174334 - DNA, 535 bp, Arabidopsis thaliana landsberg
cacattcaatccaacacttttcctatacagagccgctgtcaaagcactcgatgattgaattgaggtattcctattcccataacgaaaacacatccatcaacaggacttatcgctttgataatgccagcggtaaattctcgaggttcgacagcttgtacagtaactcttacgagtatgtagccaattcaaacaatgccaacctgagctaccggtaccagggaaccaagttcaatttcaatatgggtacaggcctgcagttcatgagcctggtcagcaacaacaccaccaagaatgtgatcgttgaccgcagctatgtgaattttacgcctaccataaacttcacctataacttcaaccgcacgcgtgcgctgcgtttattctacaatggccgtaccgggcagcccagtactgcgcaattgcagcctatacttaccacatcggattccatcagtttccagcagggtaaccctaacctgaggccgcagtttacgcacagcctgcgtatgctgtataactcattcgatccgttcaccca

SEQ ID NO: 174335 - DNA, 500 bp, Arabidopsis thaliana landsberg
  unsure (1)..(500): unsure at all n locations
attgcttctatagccatagggctaaacttcatttcggcaattcaagaaacgctctgattacaccgtaccttcaattactccaaatatcttacaagcatgctttgactttgtgagcctcgattggaactgattgttcaaccaatagtcgtgttttacagtgactcatcaaggtttggtttacgtcgacccttcatagccgctggcactatcctcctctcaccattgtggtactacttatcggctatgcaatcgacgttggcgttttgataggtgattattgaccaatccatatgtattttactcattggtttatgtagcttaatccttagacatcgctgacatcatgttcaacgtccgtgtagggccttctagttgatgcagaagcgggaaatgctaagagaacacacgttgaataccagcttttataaaaatggcncgaaaaaaagacaaacatgcttcaattctctagtaattagaaagattgtaaatcaaatgcatgc

SEQ ID NO: 174336 - DNA, 1679 bp, Arabidopsis thaliana landsberg
gtgtttttatgtacaatcaaaatcagcaagtaattgggtataaagattcgtctcgggaaatatataggtcgttgatcaggctacgttagttttgtttggcaccgttctcttaacaggaaatatatttccacagtgctccggaggtgtaaaaaggtactcactatatgtatagagaggatgaccgcactatccaacacgtcctccacttgttcctgccggtgtatgagcagacatgctctttcgtaaatgcctaggctcatctataatagttccggcaataagttcctatggtgggcatacctactatttaatatcaagttctaggtaatcaatgtaaaactagcaatcagaataacgaagatgaagaactctaagaataatcgtaaggaattttcgatctactaatccatctaaatccctattgagactccctaaacccaacaaggtgattactcagacatgataaaagaaacacaaatcataatctaaatagtttgcattgatgaattagaaatagtgtaaaaggagttcagaatcctctctgtagggattggatttttctctcaaaatgtatatcaatcaccaaaacaaaacttaacaaaaccgaagtctaacaatgaccttaagaacctaattaattgtctaaaacacgtcttgggcctaaatattaacttctaggcctttttggggcgaaactgagcccgtgcaaatttcgtacagtttcgtgcaaacttcgtgcaaaactcgtgacgaacccgtgtcgaccgacacaaatctgttatcgatcgaaactacattcaagactggttttctgctccgtttttgctccaaagtgtcccataatcgcttgataacccccagaacgtacgagacctgtaaatacaccaaaaacactccaaaagcactataaagcactatagagactctataaaaacaatcctaaatcatagataaaataggtaaaaatagggatatatcatcgatcgatacatcagggtgtcgatcgacaccaattactcttgacgactctgttttgcctttgtcaagtggaatcgacaatttcgcgaaggaggaggaaattattcccgatagtgtcgatcgacacaccccctgtcgatcgacacccagctcattcagataatgtgcaaattccagctgaaaccaagtcagcaaatcggcgaattcctttccccaagagtcctaaaaagttaagacaagccttacatgatgtcagatgcaagcctatgattgataagctgattgttgagatgcctctagttgaagcaattcatctctctcccacaataagaaggtatgtcaagacaatggtcactaagaatttgacgaaagaatgtagtgttatgatgatttcagagcagggcagcgacatcattcaggaacgaatcccaagaaagctacgtgatcctggaacttttgtacttagtgtcaccatcaatcacgatcctttccaagaactttatgtgatctcggttctagtgtgaatctgatgcctcgttcagttgctacctttatcactcttgtgttggtagatcgttctacccggattccagatggaattcttattgatgttcccgggatgattggaaagagcatgattcctatagacttcgtagtcttgccttatgagaaggaacctaaggatccattaatctttggga

SEQ ID NO: 174337 - DNA, 1853 bp, Arabidopsis thaliana landsberg
gtttaaaagcccagcatcgaaactaatgaaggatttcctgaccttccccattatcctgttgacgcgcgacctcggtgacgtctttccaggtacgacgacgagctcggaagatcgcctctataactccttggaactcgacgggaaaatccggactaggcctgtatcgatctgcaacaagaaaaagctatgagaatctagtcgggatcgacatatctttaccctatctatttaaaagaaatttaccaggaaactccgtccacatccttttcctccccgagaacggacgctcatacgactcgaggtcgaccctgacgtagaagtaatattcttcccagttcttgaagttactgattttaggaccgggaagaaagttatgctttgggcggttgttcaccacccaatagccgggcgaccttatagctttcaacgtcgtcatttcttcgaaacaacggacgtttactaggtaaccttcttcagcaccgaaggtcagagcggcaacaaaattacagatcgccgccggagtaagctgggagaacgccatacgacgacgattcagaaaggagatgatcagagacggaatgtgaaaccaggagtgacattgtctgaagtaggcttcatacatgcagacgtaccctcgagggggattccatggacgctcattttctccgggaatcatgtaagtgagcgggcgatctccggagccacacaaggcaaatacttccgcgactgactcagttgttgaaagggtctttttcgcggtgatctcggtgttccagctaaccactgggtcgaggtcaaattcaacatgatcctcatgaagtaatcgcgcattaacttcagcctctgtatactgcggctgcgtgttataagcatcctccaggtcgatgagtgggtcgaactgagctaagaaatccaccggatcttcaggagcagcgagatgtccaccggaaccttcccgatctggctcatcaagcaacgtcggaatctcgatccggttagatcgactagactgagcttcgttacttggattcccggttaaccgagagtttcggcgaactaatgatacttcgctctcggaggaagaagaggacggagagacaagaacaaccttacccattgccggaaaaatcgataaagaatcgagagtacaaaataattcgcagaggagagagcgagagctaccttagattcttcttgcaagcggcggaaaatgatttcccgagggtttaatctaatataaatagaggcgattgggcgacaaacctacgaggtcatcattaaacctacgagacgcttcggttcctgagcttcacgcgcgcgtacagacgcggcgatttgacacgtgtcagatacgttcgaaatacgaatcgattcggaaatgatcactttgtactgaacctcgctttactgtcatctggctcaaaagggtttctcattctcaatctcaagccctctaactttcttctcagtgataacgacaaggccatcctcggggatgttgggatcccttatctccttcttagtatccctttaccaagttctgatatgacagagagacttggaactccaaactatatggcaccagaacagtggcaaccggatgtcagaggtcccatgtcctttgagactgattcttggggatttggttgcagcattgttgaaatgctgactggtgtacaaccttggtctgggagatctgccgatgaaatatatgatttggtggtgagaaagcaagaaaagcttagtatccccagtagcataccgcctcctctcgagaacctacttcggggttgctttatgtatgatcttcgaagccgaccttcgatgactgacatcttactcgtcttaaagag

SEQ ID NO: 174338 - DNA, 1231 bp, Arabidopsis thaliana landsberg; identical to SEQ ID NO: 57708

SEQ ID NO: 174339 - DNA, 1278 bp, Arabidopsis thaliana landsberg
atggaagggaaggtgttcttgggtcacaacctgatatgggtgatgctactgatggggcagttacatggatacaaaagttgtattgatgaagaaaagaacgctttgttcgagctcaggaactacatgatctcaagaactgaagaaggccaatccgactctgttctccctgctgggcccaataatacaacgagcgattgctgccgatggaagggcgttgcgtgcaatcgtgtaagcggacgggtgaccgatatttcctttggtggactgagcctaaaagataattctctcctaaatatttctttgttgcatccctttgaagatgttcgaagtttgaacttatcaagctccagatgcagtggcttgtttgatgatgtggaaggtataccatactgattactttaaaacatttttctgttgcatgctcactttgatattttccatgtgtggactaattcttatttcattgttttaatacaagaaagtccatatcttctgataatacagtgcttagcttttctctgtctctgcatttacttgctgagaaatgttgcattttgcaatgacatcaaacgttcacttacattctagtcccatttgcatagagttcctctctcactatctccatttgcatgcaacattgctcagcatgtaagtgaactatgttattttcatatactttgttaacaagattcttgtttgcaggttataaaagcctccgaaaattaagaaagttggagattctggatttggcttcaaataaattcaacaacagtatatttcattttcttggtgccgctacatcactcacaactctgtttctgaggtccaacttcatggatggcccttttcctgctaaaggtacctcttcattcttaactaagtcgatatccagcatgacctttctattgatcattcttatattttttggactccctttcagaacttagagatttgacaaacttggaattactagacctgagtagaaacagatttaacggctccataccaatacaaggtaagttttttggaacggtttatgtcatccttgagttcatcatattcgtattcaaagttctttaaccctatatgtggttttgtctttgtggtagagttatctagcctaaggaagctgaaagctctagatctaagtggaaatgaattttctggctcattggaattgcagggcaagttcttcactaatctttaacttttccatcaagagtggtgcattcacgtatattaagtgaaaacttctgcattcggtcattgcagggctct

SEQ ID NO: 174340 - DNA, 1022 bp, Arabidopsis thaliana landsberg
ctgttgcttggctattgtacttaatctggttagctatctcgtttcgtgaacccgcacgtgagcctgaagagattcatacttcacaagaatctacctctggtatggaactaaagagaaataggtctgttttttactatattcttatctgattagagcaaatcttttgtggtgaagctgatcaagatggaaatatagagaaaggtcttaaaaaaccgctgttgcttgcatcggaagaaacagagtatgatgaagaagatgacggtgatggaagcgaagaatcttctgatgattcccgtaaaccagctaactcctttgtagctgcttacaaactgctcactccttcagtaaaggtaaccaaaacttaatttctctctataaaaagtccatttacttaaatctcgaatgttcaaattttcttttattgcttttaggttcaattgttgatatacttcatgcttaagtatgcaatggagattctactatcagaatcaagtgttgtaaccacatattacttcggatggtccatgagttctgtttccatcttcttgttctgtctcggtctaaccgttctaccggttaacctcgttgttggaagctatataagcaacatgtttgaagatcggtaaagatccttgtatatgttagtttcttgcttttttcgcctttcgggttacctaaagatgtgaatttctcattacaggcaaattctgttggcgtcagagattatggtttgtattggaatagttctcagcttccatgtagtaatcccttacactgtcccacaatacgttatctcaggatttatcatgtttgtttctgctgaagttcttgaaggtaaaaaaagattgatgaatctttttcaagatcaacacttttatgaatcttttacgtacttgaaggtaaaagattgaaaagttctctcttaatcatttgaaaacatgtttttttggcggggattttgtaggtgtgaacttatcgttactatcgagagtgatgtcatcgaggctgtcccgcgggactta

SEQ ID NO: 174341 - DNA, 707 bp, Arabidopsis thaliana landsberg; identical to SEQ ID NO: 40058

SEQ ID NO: 174342 - DNA, 258 bp, Arabidopsis thaliana landsberg
tgcagattcatgggatattaaacgcagtgggttggggaattttgtttccgatagagcaataatagccaggtacatgagagtatttgaatcggccgatccggctcggttttacctccacgtttcttgtcaattctctgcttatgtcatcggtgttgccggttgggctaccggacttaagctcggtaacgagtccgagggtattcgcttctccgcccaccgtaacatcggcattgcctcttcacccttgccaccattcag

SEQ ID NO: 174343 - DNA, 1379 bp, Arabidopsis thaliana landsberg
gacatggataatccaagtttccataatttgtgcattacgtttttttcctttgaggcccataaacaacattatgttgaatgcgtatgtcacgctgagttcaaaaacctttttcttccctcttttccaaaatcaaaacgcgatttcatggcctccagcaatgattccgatcggaacctatggtacatgacccgcaaggatgcacaattgaagcttccacggatgacccaaggcaaaaacaagactccggcgccaatccaaatcaccgccgagcagatacttagagaagcgcgagagaggcaagaggctgagttccgtccgtctaatcagacaatcactgactcagctgagctttccgactacagactccgacgtcggaaggagttcgaagaccagattcgccgtgcgagattgaacacccaagtttgggtcagatatgcgcagtgggaagagtcgcagatggatttggagcgtgctcgaagcgtgtgggaacgagccttagaaggagaaaattaccggaaccacacgctctgggtcaagtacgccgattttgagatgaagaacaagtctgtcaacgaagcgaggaacgtttgggatcgtgctgtttcgctcctccctcgagtggaccagctttggtacaagtttattcacatggaagagaaacttggtaatattgccggcgctagacagatactcgagcgttggattcattgttcacctgatcaacaagcttggctctgctttattaaattcgaacttaagtataatgaaatcgaatgtgctagatcgatatacgagagatttgttctttgtcatccgaaggtttctgcttatattcgatatgcaaagtttgagatgaagcatggtcaagttgagcttgctatgaaagtgttcgaacgcgccaagaaggagcttgcagacgatgaagaagctgagattctctttgtggcgttcgctgaatttgaagaacaatacaagtttgctcttgatcagattcctaaaggaagagctgaaaatttgtacagcaagtttgtggcgtttgagaaacagaatggggataaggaagggattgaggatgccattattgggaagaggaggtgtcagtatgaagatgaagtgaggaagaaccctttgaactatgattcgtggttcgatttcgttaggttagaagagactgttgggaacaaagataggataagagaaatctatgagagggctgttgctaatgttccacctcccgaagcccaagagaaacgatactggcaaagatacatatatctctggtgagtttttttctatccatatcctttttatagatttcggtagtaacttcttatgttgatcatggtttgcataaaaaggttaagcttagattcgttaga

SEQ ID NO: 174344 - DNA, 1039 bp, Arabidopsis thaliana landsberg
catcctcatcttcagccttacatcagtatggtttatatgaagctagagagccccataagaagcacttttccacttcaattttctgagagggacgctacattgaaggaaagaaggcgttcatcattcagcaacgacaggagattgaatccgagtgtctctgatacagaagcaggttctgtttcttcttcaggaaaagcatctcctacaccaatgtttaatggaagaaaagtgtcagaagtaactgtgggagtcgtcagagaagaaattgttcctcaacggcaagaggaagccaagaagcaatcaggtgcagccagaacaccaagagtggctgggacctcagctaaagcaagcacgccgcgtactgtttttaaacatgaactagtaaggaagaaaaacttaaagctttatgtatttgagatacaatcagggagtgatctgactatatatgttctgtgctgtgtacagatgaaggtatcgaatcctacagagaggagaaggagtgttttcctgccgttggtcgtggaaaatccttacacttatgaatcagatattacagctctttgttccctaaattcaccggatgtttctgtaaacactccaagattcgacaagatcgctgaattccctgaagatatcttccaaaaccaaaacagagagacagcgtcaagaagagaagtagctaggcactctttttcttctcctccttgtccgcctcatggtgaggacaattccaacggttcgatcacaaaggacaagtgtactgtacagaaaaggtcagtttcggaggtaaaacagagaaggttcgacacgtcatcgtatcagcagcgtgcggaggctctggagggactgctggagttcagtgcaaagcttttgcagcaggaacggtacgatgagctcggggttctgcttaaaccctttggagccgagagggtgtcatcgagggagacggccatctggttgaccaagagcttcaaagaagcttccgtgtagatgaagcaaccataacaaacgctctatctcttcttctcttggcttgctt

SEQ ID NO: 174345 - DNA, 397 bp, Arabidopsis thaliana landsberg
cattgtctcattctcataaagataaacacctctcgccaaaactaacagtttatatatagactgtggccagaaagagcaagttatatatagacatactcacgaggatgtcaatgtagtacattgtgttccctcaagtcatttatttaagacacctctttcacaaagaaagacaatagaagaagaatgaatctacgttaacggacaggatcatggagaagaaggtggctttggtgatggctgtgatgttgcatatgtccgtgttggtatctgccgaggaaacaccaaccatcggacagaggatagactcagccgcaaccgactttaccaaagtcttcgatgaacatgcccgtcctgtcgtggactccgtctcctctaccgtcaaagccgtctaccactg

SEQ ID NO: 174346 - DNA, 345 bp, Arabidopsis thaliana landsberg
ttcattgagccgagatggctagcatacgaagagatcatcaacgaacggttcgccatgttgggtgcagctggagctattgctccagagattctaggaaaggccggtcttattccagcagagactgctcttccttggttccaaactggtgtgattccacctacagggacatacagctactggatagacaattacacactctttgttctcgagatggctctgatgggattcactgagcaccggaggttacagggactagtcaccggtgtgggaccttaccagaaccttcttgaccatttggcggatcccgtcaacaacaacgtcttgaccagcctcaagttccattga

SEQ ID NO: 174347 - DNA, 571 bp, Arabidopsis thaliana landsberg
  unsure (1)..(571): unsure at all n locations
attatgtgaactgaccatctctttctggtatttttagatttctgaagatttgcttgggaattgtttgtacaagccggatgagttggtaagttaatatcaatgtatctcgttagtttcgaatggtttagggtttggtntggttcatatttcttacattagcttatttatctcctctgttttttgaatttgtatcagttagcgtctttattcaacaaaaatttggattcgttcaattccataatgaggaagatgctgactatgtaagtagtgttactattttcctttatgtgaggagttttttttatagacttcttttgggtacaatgattaacaaatttcagttttttttttgtgtgtgtaggcaattaaggtttttaacatgattaagctctatggggagcctatacgtgttaaaaaggtattaaatcgtatcttataaatttgattattttgtgagttttgattctaacagatttggtttcttgatggaaattgtattaggcatctcaagataagaagagcttggatgttggtgctaacctaaatcttgaaaaccttgatcctgtaagta

SEQ ID NO: 174348 - DNA, 1690 bp, Arabidopsis thaliana landsberg
aataatcttaaaactagagaataaatttaaaaccgccccgcgtgtttcgatatccttgacaaataccatatgaagctgaatcctaccaagtatacgttcagagtaacatctagcttattcttgggatacatagtcactagcaaggaatcgaagcaaacccaaatcagataagtgcaataatcaaactaccgacattctagaataaaagagaagtccataggctgacgggtcgcattgcagctctgaatcgctttatcgcccgatcaacggacaaatgccttctgttctacaagcttctatgcggcaataaggacttctattgggatgagaagtgtgagaccccttccaagaacctaaagcctatctcatgagaggggcgatcttggccaaacccaaggtcgaagagacattgtatctctatgtcccggtgtcaagttcggccatgagtggggtattagtaaggaacgatcaaggtaatgaaaaaccaatcttctacaccagcaaagccctgaatgacgccgagacaagatatccaacgctggagaagctagcattggcagttatgacggcagcacgaaagctccagccttacttccagtcgcattccatagtggtttttaccgatcaaccactttggacagtgctgcacagcccaaaccagtccaggcgaattgcgaagtgggcaatcgaactgagcgagtacaatgtggagtatcgctccaggtcgagtctcaaatcacatgtcttagcgatttcatgattgaattgtccctagatgtaatcgatgaggtccttgaagaaaattggatactctatgcaaatggcttctcgtcgctgcagggttctggtctcggaattctactccagtccccaactagagaagtgctcgagcaatcgctccgacttcagttcaaagcatccaacaatgagggagagtacgaggctctcttagcagtacttcgcctcgccaagggaatcagagccaaacggataaaagctttcagcgactcgcaacacatagtaagccaatttagcagggaatttgaagcttaaagtggacaaatgcgagcttaccttttgttggtcgaagacctgtccaagcaattcgacaagatcgaattgataaaaataccctggagtgacaactcgtcagcggatgccttagccgcttttgcttcaaacacaaatcttgatctaagacgcacgatccttgtcgagagcataagcaaaccgagcatcaacctcccagttcgacctgcatcattgtcaaacccataacaactatggacatagatgccgagacatccgacaagccggatattaaagtagacccgcagcctactaattggagagatcccatcaaactctacattgctgatggcgaaattccggcagatcggtgggaagctcgtcgcctaaaggcaaaggcgcgaccaaggcgttcctcacatgcgtaaacaaagaggaagccgccataatcatgaaggaaacgcacgaaggggacggagggaatcattctggtggacgagctctagcgctcaaaatcaagaaggatggtcactactataacgtccctgaatcatcatatggtcagacaagccataggcgacccagttacgctataatgaagatgatcgaccacaacttattagagattccagatgaatttggttccttaaccaaattataa

SEQ ID NO: 174349 - DNA, 1544 bp, Arabidopsis thaliana landsberg
aggaacaacccctctggtatgagagttcctaccatcattattggaatggatgtatctcatggttctcctggacagtctgatcatataccatccattgccgcggtaacattgtttttttttttctttttcactttcttgtgttgtatttttatgtaagctactgatatctttggaatgcataggttgtgagctccagagagtggccactgatctcaaaatacagggcttgtgtgcgtacacagtcgcctaaagttgaaatgatcgatagcctctttaaacccgtctctgacaaagatgatcaaggtatcatgaggtaatactatatattactggactattttgtaactcgtattaattagccctgcttttatgtaacagtatatgatttttaagattcaatgatgtgtttacagagagctcttgcttgactttcactcaagttctggaaagaaaccgaatcacattatcattttcaggtatgcatgtataatttttaggcatgcatgtagtttaatacaatttttctaactcttaactacaccaatacatgcagggatggtgtcagtgaatctcagtttaaccaagttcttaatattgaactggatcagatgatgcaagtaagtattttggttttaccatttttaagctcttaaatacttagcctatgtttgaccattttggagtttaaggtttaacttttgttacattattaggcatgcaagttcttggatcagaagtgggatcccaagtttacactgatcatagctcagaaaaaccaccacacgaagttcttccaaaccgaaagccctaataatgttcttccaggtaaacagttgcagatatttttttgtgttttgtttgtttgttagtgttgttgaaatgacttgaaacctgttctctatttacccgcaggaacaataattgacagcaacatctgtcaccaacacaacaacgatttctatctttgtgctcatgctggaaagattgtaagtgataagtatatatattattatgctcgaatcctttatgaatcgaacaaaaacttgatacacttttcgatgtgttagggaactacaaggccaacacattaccatgtgctctacgacgagattggatttgacacagatcaactccaagaacttgtgcattcactatcctatgtgtaagcagcacatcacttcaaacttttttttacctgatacattaaatctctgtattgaatttagccattaatctcttaattctttgctttattacttgtagctaccagcggagcacaactgccatctctcttggtaattcttttggcatttgatatctcagctttatgtgtagaatttgaaaaattgacacaacttgattattatgcagttgcgccgatatgttatgctcatttggcggctgcacagatggcaactgcaatgaagtttgaggacatgtctgagacttcatcgagccacggcgggatcaccacagctggagcagtccctgtgcctcccatgccgaagctgaacaccaacgttgctagttcaatgttcttttgc

SEQ ID NO: 174350 - DNA, 807 bp, Arabidopsis thaliana landsberg; identical to SEQ ID NO: 69457

SEQ ID NO: 174351 - DNA, 742 bp, Arabidopsis thaliana landsberg
  unsure (1)..(742): unsure at all n locations
atgggaaatacttctgatgacgacaagatcctcagctatgaagatgttgtcctcaggagatcagatttggacatcctaaacggacccatttttctaaacgatcgtgttatcgagttctaccttagcttcttatccacggttcacagttccactaccatctcgctaatccctccctccattgctttctggatctcaaactgcccggacaccgaatacctcaaagatttcatgaaaccacttaatttgcgcgacaaagacctcctgatactccctgtaaacgacaattcaaatgtcgaggtagcagaaggcggattacattggagcttactcgtgtactacaaagaggccaacacgtttgtccatcacgatagctacatgggagnnnnnnnnnnnnnnnnnnnnnnnnnnnnnnnnncggtttctccgtttgtgtctaatggagatgcatcatacaaggaatgcactgatacaccacagcaaaagaatgggtacgactgcggtgttttccttcttgctaccgctcgggtaatatgtgaatggttcagctctggaggaatgaagaaccgggatgagctgtggtttgctaatgtgaaggagactgtaccagatctggttaaccatctgagagaagagattttggcgctgatcaagaagttgatgtctgagagtgtgagtaagtgagagatggttattgaacgtggttagatattccggttggatgatttaactgttttccggaact

SEQ ID NO: 174352 - DNA, 974 bp, Arabidopsis thaliana landsberg
atttggctgttcaagtagaaagatttaaggattgaaggaagaatcactgtaagttaacattttttctattgcagacacttttttttagctatggattatgtgatattgaagcatgataagcatgaattgttgatattcctcactttgtttattggaaatcgatttggttatgttaactttaggagagcttcaatgcattaggactgtcaatatctctgtattatagtctctgtttgattgtggaagttgagccatagaaacgaaaatgatttgttgacattgatagttgtgttctgttactacagaacaaagcactggttatagccagtcaatagaaacttgtttgattcttgaggttagtccacgatggatcctgactcatactgcatctgtattgatatgcttgtacgcctttcgagttaatattgaagctgttcgtaggttgagtaatgagtagatgataatttagagaacttgagatgtatgatctcattggcttcaaaattggaactgtctccttgaacttgtatgttgctagtttcagtttgtatttgcaatacttaagattcaagcttttcttaggttaattctattctaattcggagaagtttgagatttgtggtgttgtctttctcattggtactgcagaaaccgctagttcaatggaagctaaaggactcatatgcggcctcccagctaagaacgttataccaaggctcagacaacagccacaacagcaggcaaataacaatcaacaaaaaaaggtggatgatgaactgaaggagataacagagctagagtttaggcagtcttgtcctcaccttggctacttaatatggatcgaactagaggaagaagacattgatccactctacaagcaatggttcagaaacatgaaaaaggatgcacacaacaacactgctaagaaacgcccaagagaggaaagaggagagtcaaggcgcaggaatccatga

SEQ ID NO: 174353 - DNA, 532 bp, Arabidopsis thaliana landsberg; identical to SEQ ID NO: 80812

SEQ ID NO: 174354 - DNA, 952 bp, Arabidopsis thaliana landsberg
tcttttctcttcatgaaagatgcatccgctatagtaagttcattctaattggtagcagtatataatttcttgtaccctcattgattctgcagcatttttgtggcaactaattagatagacaatgctccaccttctgaggagcttgagatcacactcgcaaggtatagaaattacagatgcagatattcttaactgggcgaataggaaagtgaatacaggtggccgatctagtcaggctgatagcttcagggtaagtgttagccaagtacgcatgtgattcatggagactcatcgtcagcatcataatagtttgatggttgcttttttctgatattaggacaagcatctgtctagtggaatgttctttctggaacttcttagtgcggtagagccaagagttgtcaactggagcctcgttaccaatggagaaacaggtaaaaactatgatgttacaacttcattgctgggtccttattctccggtgttaagtcatatttttgattgtctgtaccgtttttgtttgtttgtaattggcacttaaacagaggaggataagaagttgaatgccacatacatcatcagtgttgcacgaaagcttggatgttccatattcttgttgcctgaagatatcatagaggtagagacatatatatggtattgaaacagacttgagtgcttcttcggtttttctgagtcagtaaacttgtgtggtggatacaggtgaaccagaagatgatgcttatcttggcagccagcatcatgtactggagcctccaacaacaatcagacacagagtctactgtctcagaagacgccactgatgatggcgacgcaaactctgtagcgggtgaaatctccaatttgtccattgatggagcttccgagtccagtcccactgtccaagatcaagaattgctgacgaaggcagacaatgatgaggatgaggttgatg

SEQ ID NO: 174355 - DNA, 509 bp, Arabidopsis thaliana landsberg
  unsure (1)..(509): unsure at all n locations
agaagaagttctatagaaagaagatggacgaggcgcacattggcaaggaatgagacttggactgcacttcatccgactccaacgacgaaggacttgccacctctgccttcaacaagtcttctctcttccccaacgagcgacacacatgccttatggctaacgaaaagaaggtacgtacacgtgacactcctaagtacacttcaagtgacgaggaatatgatgatgatgtagattataacaatcttttnnnnnnnnnnnnnnnnnnnnnnnnnnnnaaattaatgaattatttgatgcctttaattaaaaggataggttgatagaaaagcaagaagatttgctttatgaggaacatgataaagttgtagaaatcgaaacatctattgctttagaagtagataagaatgaaaggcttgtgtgtgatttatcttcatgtcatgctactatttctagcctaaaaatgcaaataatgatttaaatggtagaatagaaaagttgaatgcctctag

SEQ ID NO: 174356 - DNA, 1965 bp, Arabidopsis thaliana landsberg; identical to SEQ ID NO: 64544

SEQ ID NO: 174357 - DNA, 906 bp, Arabidopsis thaliana landsberg
atgagtatcggattaacagagtttgtgacgaataaactagcagctgagcatcctcaggtgataccaatctcagtgttcatcgccattctctgtctatgtttagttatcggccacttgcttgaagagaatcgatgggttaatgaatctattaccgccattttagtagtaagtttcttcaaaatttcttcttttttttgttttagctaaagttttgagcttttctgctcttaaagaacaattttatcactatttttgattggttttgttgcaagtagggagcagcatcaggaacagtgatcttacttattagtaaaggaaaaagttcacatattttggtgtttgatgaagaactcttcttcatttaccttcttcctccaataatcttcaatgctgggtaagcttactatggttttggttactatgttgtggttaatgggttagattacactatgatggtgattgactgaagattttttggtttgttgtggcaggttccaagttaagaaaaagaagttttttcacaactttttaaccatcatgtcctttggtgtgattggagttttcatctccactgtcattatctcgtttggtaaaaaatatttcattaatctttgaatgacttgactatatgatttaaagttgattatctcggagttgttaccatctctatttttgttgtttttataatgtgaaccagggacttggtggctgtttcccaagttgggatttaaggggttgagtgctagagactatcttggtaagatttttcactgatctatgtttcttttcatttcttgttgagatggttattacttatcagtttgcgagagtgaatgctttcttgttttgattcagccataggaacgattttctcatcaactgatactgtttgcactctacaggttc

SEQ ID NO: 174358 - DNA, 602 bp, Arabidopsis thaliana landsberg; identical to SEQ ID NO: 46792

SEQ ID NO: 174359 - DNA, 1244 bp, Arabidopsis thaliana landsberg; identical to SEQ ID NO: 53106

SEQ ID NO: 174360 - DNA, 805 bp, Arabidopsis thaliana landsberg
agacgatcgagggggagctcagtcgattcatgcttaaccaaggagaggagccacaagccatgtacaaccggctcaagaccttggtgaatcaagtgcgcaacctcgggagcacaaaatgggatgaccatgaaatggtcaaggttattctaagatcactcgtttttcttaatcctacacaagttcaattaattcgtggtgatcctagatacaagctaatgtagtaatgtctcccaaggaggttatagacacctcgccagctttgcatcgatgatcaaaggctccaaacaaatcatcgagcgaggcgccacctcaatacccaaggtgcaacccgttgccttcaaagcaacggaggagaggaaagaagagtctacgtcaagtaggctccccatcgatgcctccaagctcgacaacgaggaaatggcactcatcatcaagacgttccgccaaatcctcaagcaaaggaggggaaagattacaagccctactccaagaaagtttgctacaagtgtggtaagcccggtcattttattgcaaaatgtcctatgtcaagtgatagtgacaggggcgacgacaagaagggaagaaggaaagaaaagaagtactacaagaagaagggcgcgatgcccacgtgtgtcgggaatgggactccgatgagagctccaccgagtcctcctccgacgaggacgccgcaaacatcgccatcaacaagggcctcctcttccccaacgtcgaccacaagtgcctcatggcaaaggacggcaaaaagaaggtaaaatctagagcctccactaaatatgcaacatct

SEQ ID NO: 174361 - DNA, 313 bp, Arabidopsis thaliana landsberg
atgaactcactcgccattagagtctccaaggttctcagatcctcttcaatatctcctttaggtaattcttctttcgtatcacctaaatattctgcctttttctcagaagactatcatttgtttcttcttgtgttactttgatgtgtagcaataagtgctgagagaggctctaagtcgttgttctctactggtcctatcgatgaaggtgtagaagaagattttgaagaaaatgttacagaaaggcctgagcttcaacctcatggagttgatcctcgtaaaggttggggatttcgcggtgttcatagggtaaaaa

SEQ ID NO: 174362 - DNA, 1241 bp, Arabidopsis thaliana landsberg
atgggatcacaaacctgttcttgttgatgttactcaggacaaagactttttcagaggacagttcaggtttgataagagatgggttgaagacctttcctttttgcatatgcttacggctgcttggaatgcagattcttcaggtgtgtcttcttccattactcacggtattgaagattgtcaataggcgatacaagactggaagaagaaattttggtctagttcagagaagggaattagaagattgagggaatcattaagattacaagatgaatcttcttgtccgagttttgctagaattagacaacttaagggacagcttgctgtcgcatttcgagaggaagaggttttctggcgtcaaaagagtagagaagaatggcttcatgatggagataggaacacagaatttttccattcttcagtgaactctactcgtgtcaaggacacgggacatagtcttgttgatgatcaaggaattgaccatttttcagagatagaaaaggggggtgttcctgttgagttctttacaagacttttcacatcttcgcatccttcaaaacatatagagttctttgacacatttgaaccacgaatttctactgcaatgaatacagacttatgtcgacttatctctgaggatgaaattcgtgatgcagccttctctattaatagtgacagtgcgcctggacccgatgggctcacaggtttcttcttcaaaaagtattgggaccttataaagcatcaggttattcatgagatacaaggtttcttcacttctggtattttccctgtggactggaatcatacaaatctgtgtttgattcctaagattgaggcaccaaatcggatgactgattttagaccaattagtctttgctctgtgctctataagatagtgtctaaaatccttgttaacagattgaaaagacatctgcctcatattatttcaccaactcaggcagcttttgtttcagagaggatgatttcggataatattctgatagctcatgaggttgttcatagccttaattcacatcaggaattttcagcatcttctatgttacttaagacagatatgtccaaggcttatgataggttagaatggacctttctaagtagtatcttaagagcaatgggtttctcttccatatggatatcttggataatgggatgtgtaacttcagtgacttattcagtactaattaatggacaaccttttggtttaatcaaacctgagagaggta

SEQ ID NO: 174363 - DNA, 532 bp, Arabidopsis thaliana landsberg
atgtacttcggtccgagtgagtatacaaagccattcaagattacaacaaagtgttatcttcataaggcagtcggattattggagactcatcttaaagagtctgagttgaagtggtttttggagcacccacaattcaaacacttcttccacatgcataaggatccaaatcataaggtgatgggtatgtggctgttatttcttcgtacagcatgtttagataagaagaaggaagtatggtttattgtcaatggcgtaccgatccggtattctctcgaagaatttccactcatgtcaggattatactgccataattatcccaaacccttggacagcttgagctgtaccacttttgctggcaagatgtttggacccggagcaacagttcagtatcttgatgtggagaataagttattgtctatgaaaaaaccttctgatgctcgtctgagggtagctgtgctatatttcttatgtagtgtaatcgttggaaagggtaagacaggaccaaacgaaccaaatgtggagaagttcttcc

SEQ ID NO: 174364 - DNA, 1612 bp, Arabidopsis thaliana landsberg; identical to SEQ ID NO: 1189

SEQ ID NO: 174365 - DNA, 549 bp, Arabidopsis thaliana landsberg; identical to SEQ ID NO: 67416
  unsure (1)..(549): unsure at all n locations

SEQ ID NO: 174366 - DNA, 451 bp, Arabidopsis thaliana landsberg; identical to SEQ ID NO: 81289

SEQ ID NO: 174367 - DNA, 519 bp, Arabidopsis thaliana landsberg; identical to SEQ ID NO: 23961

SEQ ID NO: 174368 - DNA, 492 bp, Arabidopsis thaliana landsberg; identical to SEQ ID NO: 55182
  unsure (1)..(492): unsure at all n locations

SEQ ID NO: 174369 - DNA, 534 bp, Arabidopsis thaliana landsberg
gttatatatgtattgattgacatgaattttgggtttgtagatggaaaggagaatcgcttcgagagagtattaagcgacacgagcactttcttgctcttcagcttggcatccaaccaggacaaaaggtttgttaaaccttaaccgaacacttgaaaatggacccttcgccatcgccatcagatgctcattgccattatgtttctgagtaggtactggatgtaggatgtggaattggtggaccgttgagggaaattgcaagattcaggtaaaatgactacacataccaaaagcgcacacacactcttttcatcatgtgcttctgctatacatgagttttgaaatagattttatggttaggaacatagttgttcaattatgaagtgtgtttgtgtttgctctgttgcagcaattcagctgttaccgggctcaacaataacgaataccagatcaccagaggcaaggtaacgtatctacatttgtgaaagatgatgcattcctgctatgtccattataattcatattggcgtctttctc

SEQ ID NO: 174370 - DNA, 1331 bp, Arabidopsis thaliana landsberg
atgccttcgattcctctccctccacgtctgttagcttttggcgaagaacctcgcggcgagaaagttgatgtttattagaagatgaatactcaatgcggtatcttcaacgccctcgacaatggtgaactgtagtacctttctcgatctctttttggtcgcctgttaaagtttcctaaccaacctgccttgtccactagctttggaattttcattttgggtagacagttggaggtggcgaagccaaacaaaatttgggtgttatttgcgggtattcctattcgtttttctttgagagaatttaatatcgttattggattaccccatgggaagtattcgagcttgaagatgaagaagaagaaaggcacgacggagaagacgatcccattttacagtaagttgtttgggcttgaagaagatgttaccgtggactgggttagtatgatgttgaagagaaagaatgtctcaaattccggtatgaggatctgatgtgcttgcttagctatcgtcgacggtttccttgtcgttacctctcattatcctaaaattgtttaggcgcacgctaaaatggctaacaacgtgggtgcatttcttgcttatccctggggctgttccactttcgagatgatgattaagtcaataaaagagagggaaattgaacaattagcaagtacgtgtttcgttgttcaggggttgttgtacgctcgacaattggttatcttacaggcagctcaatctattcaagaagggcttgtaattgatgagacaattgagtctgacacatgaaggcgcagaagacgatgttgaagaggcccctcgagagtccgtcgctttcaagctcgagaatgctaaggtgttggatgcaaaatgttctgtaatactcttatcgattaaacttgttatcgtttaacatcgttgatggcgataactgtgttgttattcactaagtattttctatttaatcaagttattcacgtcttatattattatgttcgttatctcttgcagattcgtgttgctaccattatttgtcatgatcttatgatggatccggaggaagatttgttgtggtctgatgatgaggaagatgagagggtcagtaatattctaatgttggctagtgagggtctaattttcaagaatgacatgtttggtggtggatgtttcccattccagatgcaattggcatctaaaagacataagcgggatgttaaatcaaatgttagtcgcaataggaaagccataccatccaagaaccctggtggggttaggaccaaacatcaaagacccatcacagaggaaggtagtagtccaagggtggtttctatggactc

SEQ ID NO: 174371 - DNA, 572 bp, Arabidopsis thaliana landsberg; identical to SEQ ID NO: 31881

SEQ ID NO: 174372 - DNA, 2523 bp, Arabidopsis thaliana landsberg
gtttaacgaaagacccttctgttgctggcactgtccgcaacatctttgaaagagatttcaaagaaccacatgctaattggacaatgacaccgcaaccagtgatcactcgttggtttgaaacgtttgcggtaagtgcaatatgtcttgttttctagtgttaatttattgacttaactgttttgttttgtatttggctgttgtgtcaagatgatgtgattatgttttcttgtgttaatatattgactttgttttgtagcaagtatactgatataacccgatttttactgattttatctatgttttaggtataggattttgagttttggtgttatttctcgagtctttttagtttcttttcaggtattttatgcaatgggacaacaatggagataaggagacattttggagcaaaagctaaggaaaaggaagataaggacgattttggttctggaattagcgaggagtgtcgatcgacacactcttggtgtcgatcgacaccagtttcggcccagcaaaaaccctagacgctttcgagtttacaagagctcaagtttgccctagaagatttcactatttgcattattagtccgtggacgtttttagggtctatatatattgtttttagacctaagtttcttttatcaagtcttttatcaagcttttgcaaaaccatgttactgagagacataagctattcatcgattgttttcagagtttcattcagatcttaatcccctcccgagatcccttctttccccttctctatttactgcgtttatgctttcacacttaatcatgttgtttgcttcatccaatatgtctgagtagtctgcttgttaggaatagggtttctcattagggatttatatgggtagtatattgccccctttgttaggttatctgtaaaattcttcatctttaattatgcctaatgctagatcaagagtaattaactagattttgaatccagacaatagatatgcctgccataggtatctgtagttggatcaattatttgatgagtctggtttataggtgtgtaataagaatcggcctatctactaagatgaacaattgaactcgttaagaatgcatatttaggttgatagtttctcggtttctcaggttattagtagctatagatatacagagtctcgcggcacgcccaccggttattccataattagagtttgagtttaagaatggttcgatagcaaccttgctttgattagatctactaaccaatagtttcatgagaataccctgttcctagctctttattaaatcgtttacaatacaatcaatctgttgtctttttcactttgttctcttttattttcactcataccctgctagcttaatctcgagtattaactcagtgtttgaacaaaagaactccatgacttcgagcataaaatactgcaattgatctcttatttgagagagtagttctaggtaatttataccatatcaacgcccttatgttggacgtccatgggcgaacgaatgtgattcggtccagggattgtggacgagacgaatgaaaagatgaagtttcttaaggtcaagttaaaaggaagctcaggaccgacataaaagttatacggataaacgtcggaaagagttagaatttggagtaggagatctggtgtatctaaaggcggtgacttacaaagggaacaaacgcttttttaagaggaaaaagcttagtccaagatacgtggggccatacaaggtgctcgaacggattggggcagtggcctacaagctagatctaccaccaaagttagaggcgtttcataaggtttttcacgtatcgcaacttaagaagtgcctaagcgaacgagattacccggtggaagattttcccgccgaattagaaggaaacttgacgatgaaagcaaaacctattggaatcgtggatagattggagaaagggactcggaagaaaatcgtgaaaatggtaacagatgtgtgaaattgcggagatagagaagaagatacttgggaaactgaaaacaagatgagggcagatttcccggagtggttcaaagagatgggtaaaaaggaacttgggtcggattctgggacgaatcctattcaaggggggagacttgtagcgtccgcgatcctcgataggatcgtcggatgagacttggtccgagggagaaggtggaacctcgggcaagtccaaaattgggctttactacagctcaatataagctcgaccagttatagagaagctcggccagctcaaggttagctcagccagctcgaggggaagctcgaccagctcgagggagtgtcagtcagctccgccagctcgaccaagctaggaagggagtgaggaagttgggccaacggttggccaggcagttggacagttggacggttggacggttgtgcggttgggcggttaggcggtcaaactgttacccctcttcaccaaaagtcacccaggaacggttatgggccagaaggtgccttttcgggtgggaacagttaccactcgaatccctataa

SEQ ID NO: 174373 - DNA, 377 bp, Arabidopsis thaliana landsberg
tttctgatctttgttttgtattccttaagcaccatccaataactaattacttgtcttttggttgtagaattctgtaagatatgattttgaggcaatgactaagaacgctaagcagtacgacatatggggtccttcccaaaccaaggaaaaagagagttcaaaggtgaccttatatctctagcttagtttaatagagatccgatgctttgaattcagatgttcaagttccaacatatgtgttttgtttttttgtttttttgcagcctacttataacattgatggatcttcttacaagatctcgcgcactccgtttgagcctattgggagaccttgcaatccgcttggccctatcgcgagacctgtgagagataccaag

SEQ ID NO: 174374 - DNA, 515 bp, Arabidopsis thaliana landsberg
  unsure (1)..(515): unsure at all n locations
cgcgcgctttccgagaaggagcgccgccagcgcgccgagaaagcggccgagcgcgagcgccaaacgcgcatcgccgtcgaggcgctggccgagggcctgcagaagcttgcnnnnnnnnnnnnnnnnnnnnnnnnnnnnnnnnnnnnnnnnngctcgctcgacgaggtccgccacgatttcaacgcttcggtcgagaagctgcaatcggcgctgcgctcggtcggcagcaatgccaatgccatccaggccggctcggcggaaatccgcgccgcctccgacgaccttgccaagcgcaccgagcagcaggccgcctccgtggaggagaccgccgccgcgctggaggagatcaccacctcgctcaaggacgccaccaagcgggccgaggatgccggccagctcgtcgagcgcacccgcgcgggggcggagaagtccgccgaggtcgtgcgccgcgccgtcgaaaagataaacgggatcgagacctcctcgcgcgagatctccaacatcatcggggtcat

SEQ ID NO: 174375 - DNA, 408 bp, Arabidopsis thaliana landsberg
atggaggagaagaaactaaatttagatgctccattcctatccgtgaggcgagttccgactaaacctgatgatccaaacgaatcagagaacaccaagaagaagacgatgacgacgagaaggagaaaaatcaaaggttcgtgtcaagaaacagagaatgaaactctgattcgattattacaagaccagagtttcgagcatgtaatggaaccatcttcagttcctttcaaatgggaacaaacacctggaaagccaaaggatcaacaaaccctaatcgaagaatcggacctaatcaaagctatggaaatggtttcttcaaccgcaagtttctcttttaattgcagttcaagtggagtaagtgagttcgagaataatggagatggcgacagatcgagtaatgtttcgagagat

SEQ ID NO: 174376 - DNA, 300 bp, Arabidopsis thaliana landsberg
  unsure (1)..(300): unsure at all n locations
gtgtcgcgatcgctccgacgcgcaccgcgttgacggagatctccggcgcgtcggtgctgtttctcggcggcggggcacgtgctggcgggaccctggccgtcgatggcgtcagcctggccgtcgaggccggggagatctggggcctggtgggtgagtccggctcgggcaagagcaccctgggacggntcgccctgggcctcgagcccagctggaccaccggggacgtaagcctgctgggtaccgacctgcangccgcgagccggcggcaggtgaagtagttgcggcagcaggtgggggtga

SEQ ID NO: 174377 - DNA, 745 bp, Arabidopsis thaliana landsberg
atatttttttcttaacttgcacaatttttttcactcaattttatatccagaatatagcatggatatcacccttcatatttgcctgcagtgtttcattgtgagcacagtcaatgctttgcagacgccaatgatcaatgcaagtatggtaggattcttgtttttgcatttggtgtctactcgtgttaccctttattttattttttcttatgtcttcaaggacaggttttatgtgacaggcactatggaggaattaactacccggttggtggagttggtgggattgccaagtctttggcagaagggcttgttgatcaaggcagtgaaatacaatacaaggctaatgtaaaaagtataatacttgatcatggaaaggcagtaagtttctgtatgagtcttgttgaagttttatttttttcattaaccctttgaaattcctttttggttatgaaaatcgttttattttctggaccttaattttcaggttggtgtaaggctagcagatggaagagaatttttcgctaagacgataatttcaaatgctacaagatgggatacgtttggtaagagaaaacaatgacttatgtaactgtcgaatagcttcctaaagaaaaagaatattttacaaatcttgttttgtaagtgtacttaaaacttgtattttgctgtgctttagggaagctgttaaaaggagaaaagcttcctaaagaagaagaaaatttccagaaagtgtacgtcaaggctccat

SEQ ID NO: 174378 - DNA, 367 bp, Arabidopsis thaliana landsberg
gttccatataactttactatgttaccagaaacaactccaatgttaacattcaggtttgcttgcatggaaatcgatacaactgtgtagcttatgaaaacaatagatgggtcagatatcttcgttctgagatagaggtataaagcttttagtcttttagacatttttgtatgtggaattgtgacttctttacctgagtgaggctatgtcgcttctccaggttattggagactgggagaatgttgtcagcatttgtttaaagaatatccgtccacagattctgtttttcgaaaacgtaaggccctttcgactgcgtacttgctcatgttttgcttttattatgtgtgttttctctcaattccacctactt

SEQ ID NO: 174379 - DNA, 1741 bp, Arabidopsis thaliana landsberg
agaaattatggtaaaatcactggcgatgtcgatgccggtgtatgcaatgtcttgcttcaaattaccattgaatatcgtttcggagattgaagctctcttaatgaatttctggtgggaaaagaatgcaaagaaaaagggaataccatggatagcttggaagagattacaatactcgaaaaaggaaggtggtttagggtttagagatttggctaaattcaatgatgctttacttgcaaaacaagtatggcggatcattaacaacccaaattctttatttgcccgaataataaaagcaagatactatagagaagactctattcttgacgctaaaaggcagagatatcaatcttacagatggacttctatgcttgcgggtttggatgtaattaaaaaaggaagcagattcattgtcggagatggcaaaaccattcgaatcagtcaagataattttgttgcgtcgcccctccatgacctctcaacgtcgtcactcctacgttggataccacggtggatacgttaatctcaactcatggttcgcataggtattggaacgtacatctcatttctcagcttgttagtcccgacgaccaccgttttgttatgaaccatcatctttccaggacagtgcatcaagataagatagtttggaattactctccttctggggattatacagttaagtccgggtattggtttctctttaatgacccaacgaatactcaagttagaccagcggtgccttatggttcagtgaaaattaagaacaagctctggaaactccactattattccaaaaatcaagtacatgctttggcgtacaatttcaaaagcattaccaacacgctcgcgacttctcactcgaggaatggacatcgatccacactgccccagatgcccaactgaagaagagacgataaaccatgtattatttacgtgtccttatgctgcgtcgatttggagtctatcaaacttcccttggttaccgggtcatactttctctcaagacacagaggagaatatttctttccttatcaactcgttttcaagcaatactcttaatacagagcaaaggttagccccattttggctcatatggaggttatggaaagcacgcaataatcttgtgtttaataagttcaatgaaagttgctcaagggttgtgacacaaactgaagcagaagtcaatgaatggttacaagatgtgaaccgaagagaggaagcttccgatttaacacgatcatcacagagggcaaacgtgcggtggaagaaaccggtgtttcctttagtaaagtgcaatttcgatgcgggtttcatgggtaataatactcatagtacaggagggtggatcatacgtgatcatgcgggattagcgaaggcttggggatcatcaatagtccaaaacgttaccactgctttggaagcggagacaaaagcgttattaatcgcaatgcaacaagcatgggtacgagggtataagtgtgttaagttcgtaggtgattgtgagatccttatcaaggcaatcaatggtgcaaattctagatgtgaaataaccagtcttctccaagatgtggatttttgggcatcaagattttctaatgtggttttcacattcaccaatagactttgtaataatactgctcacctcttagcttctccactttattcgtgttacaggtttcaatcgaattctggttatcagccactttggctcaagaactcttttcgtaaagatttactcata

SEQ ID NO: 174380 - DNA, 1237 bp, Arabidopsis thaliana landsberg
agttgtaccttttccattgaccagaacgcagtcgttccagagtttgactatggcaaatttgcacaagcttcccacttcttcgtctgcgaaattgaatacggcttcagcagtgccctgtgtattccaggtgcatctgtgtattccaggtgcatctgttcattggtatgacaagccaggttagatttttgttttcttacagttttcttgtggtatgttgctagtttttgtgaactattttgattactcacaaagcctgtacgattaacttcttattgttagaaatgagaaagcagagaaagatgggtcacatcactcttgttgggcagtctatgggcgttttggaacaaaggttacaatgcatattaagtgagcaaagccaccaactacacggtcagtttccatagcatcatttggtatctatattccattggcttttaatttctgaatgccttcaaacttatatcaccaaaatctgttgtatataaccgttttcatgattgttgaacacttgaacccttcatgaatcttcaaagtatctatctgactgaatttgtggtgcttgttgtttaccacattgcagagacacctcgtgttagtatcatcatgggttcagacacggatcttcctgttatgaaggacgctgccaaaattctggacctgtttggtgtgacacatgaggtaaatattaagatctgctcgaataattgaattttggcacgacttacatgaatgaattataatccactgaagacagacagaagaaaccttaagtttgtaatttggtaaaactaactgtgaagaagctcaaacatatactgtgcatcttgaatggtccgatatggtatcatttgcttacaggtaaagatagtttctgctcatcgcaccccagagatgatgtatacatatgcaacctcagctcatagtcgaggcgttcaagtcatcattgcaggtgctggtggtgctgctcacttaccaggtatgtctttaacatgcatgaactcatcttgtcacctcccacaagattgttactataaaataatggattttcttggaaattaggtatggttgcttcactcactcctttgcctgtgattggtgtccctgtccaagctacccctttggatggagttgattcacttctctccatcgttcaggtacactttcattgattttcttgcagcacttgaaaactatgtaggtctgcttttcttaaacctttccatgtatccgtttttgt

SEQ ID NO: 174381 - DNA, 356 bp, Arabidopsis thaliana landsberg
atgtccgttcttacagaagatttggtagaagatatactttctagggttccagcgacatctctagttcgattacgatctacttgcaaacagtggaacgcaatattaaatgatcgtagattcatcaagaagcactttgatacagcagaaaaggagtatttggatatgttgttaaggagtcttagggtttcttcgatgagtgtcaatctccatggacttcatgacaacattgatccttctatagagctaaagcgtgaacttaacctaaaaggtctcctttgtaattcaggtaaagtcgagagttttgaagtctttcactgtaacgggatattgctattcaccaacactaacactataga

SEQ ID NO: 174382 - DNA, 951 bp, Arabidopsis thaliana landsberg
atggaagaacagaaaattcaagagaagagcctcgctcacggcgctgcaccaccgttgacggcggttgagagattcttgaacggccaaaagcacgaagccttgtgcttcaagaaacaagaacgttttatagaccgaccgatcgtgaagacgacaagggcgattgagattagaaatgaaaacaaagagaacatgatgtttggtccgaggaaggagaaaaacttggccgttattggagaaatcgtcgttaaaggtgcagctaaagattatacttgcaaggatataacaaagaagcaaccatacaagaatatcatcaaagggcaatggacagccgatgaagacaggtatatatatatactatatattataattatatatatgtagatcttcatgcttctacataatactgtgtttgcattatatatgatatatattttattttatttttgtcaaaaaaatgagtataatcattatatatatgtatataggaagttgataaagttggtgatgcaacatggagagaggaaatgggcagtaatctcggagaagcttgagggaagagcaggcaagcaatgtcgtgagagatggcataatcatctccgtcctgatatcaaggttttcatatagatctgtattcttacacttaaaacttcggatatatatgtaaacatatttgttgttttggttttgtagaaagatagttggagtgaagaagaagagagacttcttgtggaagcacacaccagaatcgggaataagtgggcagagatcgctaaactcatacaagggcgaaccgaaaactcgatcaagaaccattggaatgcgacaaaacgacgccaaaactcaaaacgcaaacataagcgttcaaaaaacgcggatagtaacagcgatattgatgatctctctccatccgctaaaaggccgcgcattctcgaagactatattaaaaacatc

SEQ ID NO: 174383 - DNA, 384 bp, Arabidopsis thaliana landsberg
  unsure (1)..(384): unsure at all n locations
cgtgaatcggttcgctggcacaagactggtcaaaccaaaccggtgatgctcaatggaatccagaagggattcaagaagatcatggtgctctacaagagcgcgagaaagggattcaaacccgagaaatnnnnnnnnnnnnnnnnnnnnnnnnntttgggaactgaagaaggcgagattggggaatatgttgtctctaagatcacatatcagcaaccaaagcaacaggagaaaaccatcgatgagagtgagagttctggggttcgaggtggccctagcacaccgaaaactagtactattacacaagttagacctgtgatttctgttgatgaggatgaaatagcttttgatgatgattctaagatggttcttgattcatatgccgag

SEQ ID NO: 174384 - DNA, 1171 bp, Arabidopsis thaliana landsberg; identical to SEQ ID NO: 26624
  unsure (1)..(1171): unsure at all n locations

SEQ ID NO: 174385 - DNA, 380 bp, Arabidopsis thaliana landsberg; identical to SEQ ID NO: 58783

SEQ ID NO: 174386 - DNA, 753 bp, Arabidopsis thaliana landsberg
cgtcgaccaaataaatttgaagtttatttacttacagccatgttggtttattatttacaaaataacctttatttaaaaactacaaactatatatatgcatcgatatttaggagaatcttaatgttattaatcattataacttcactatatatcatcttcctctcctttcttcactgcatccttcgccgatggtcgatttaccatcgtttttgtcgactgtccatcgatcacaataggcccaccgtttgtgatgctcatttttggcatatccggagatttcgtcttcatggagataaattcagggggtttgtacttcctgacgtctggtagggtcggaggcttcattagaggaagcattggagtgatcttatgggccactgtgtctaaatggtaaccgagaaatctggctgaatctggttaaattgatgaatccggctgaattgtttagcgagttttggctgaatctgactaaagatctttgaattcaaaagttaatggctgaatcttgatgaatcatgatcgtcgcttgggaggaacacacttctgctgctgcgttacacttttcagatcaccattcacactctatggcgagaaaggaatactcgaagacatggagagaaggaacctatcacagcattggctcttggaaaaaccgtcgacaaaaatattcgcaatcggatcatcgttcttcagaaaaaaggaaatccaaaatatgatgatttatttgtgttttggctttccactaggttctaa

SEQ ID NO: 174387 - DNA, 629 bp, Arabidopsis thaliana landsberg; identical to SEQ ID NO: 66434

SEQ ID NO: 174388 - DNA, 1424 bp, Arabidopsis thaliana landsberg
atggctttggatgaccaaatgacgagaccaagaagggagcaaattgctgcaaggcagcgcgaagaggtatagattatcaatgtgtttattgctgctctggttactgatttctattttgacataatattaatattcctgcctttagttgtcttagtcttaaatctatctatgcatctcagattgtaaacttattagactcgagtctctttaattagagtttaatatattgtttcaagactcggattttatctatatttagaattttatagaaggtatggcttatgaactatttaatgatcggaagaatttgagactcaataccgaagttcaaagacgagtggacaaaacagcaaagatggttcggatgtattgcttgatgaactcacgagggtaatgatcagagtacatgaagctgcaatgactcatgccctattttttcaaaagcaaaaaccatattcattcagataatcccgctagggactcattgtgcagcatagacatactatggagaacaggtgaagaagttggctacaacgttgtgccgaaagagagcttttcgtatgatgattaaggcaaagatgatcctataatacgagatctggatactctaccctaacaatttacaagggacgacaatttgatgtataataaagtttgtttatcagctcaggagtgacaatatgcaaaacttttggcttgggataaagatgctaaatttgtgttgatgaagagaagtggtaaaattgtagaattttatgtctattagtttgtgttcactttaggtgtttaagtgtgcttattgaggtacgtagaattaaaaaaatgtttcataccagtcaaaaagaaacctatgtgtccgataatttgaaatttgtgattcagttaattaggtaaccaacatggtaactgttacatcattaacgaggaaccatatctcatgttcagaaccgcccgaataccgtaattggatctccctttgtattttatgttatcggtttcaactataacacttttagcttaagatggttatgattaattatagtgaaagcaaggttacgtgcgaatttatgggtactttgtggcctcacacttaatttaaacataggatggttatgattaattctaagaattcttaagttgtggttctctaatagtcgatgtggttcactaataatcgaacacatacactatgttataccttcttcgtcccgatatctctagaattttatttttgaaatacattggtataattagatttggtgtaaatggtgttagaagagttcataatcacatcaaaaacttgtccaatgcaaaacatcaagaagaagaagaaacaatcaaatcttgtaattcttttgacaaaaaaagaaagatttggttgagacttgaaatttgaaaataggtatttgttacacctagcattg

SEQ ID NO: 174389 - DNA, 461 bp, Arabidopsis thaliana landsberg
accctggaacatgaggcactgcttacgtcaaagcggccgcttgctgacgccggtaaccctgctgtgtgttatcggcctggtaatggcaatgcgccccgctccttccgccctggaacgcgtacagacgcgtggtgagctggtggtggccacccgcccctccctgaccaccgtgtacgacgcccccgatggccccaccggcatggaatacaagctggccaagggtttcgccgatcgtcttggcgtgaaactgcgcctgctgccgctggacagcctcgccgccgtcaaatacgcggtgcgccatggccaggcggattttgccgccgccggcctgatggccgtcgcgccatcggcggagccgtcgctggaagagcccctgcgcttcaccacgccaaatcagaaagtggacacgctggtgctgtatcgcctgggcacccggcagccgcaggacatcaacgacctga

SEQ ID NO: 174390 - DNA, 784 bp, Arabidopsis thaliana landsberg
actcggatcattttaatggtattcgtcccgaacactcaggcaccatggcatgttcccggtttatgtgtgcctcttgaggtaagtcacatgttttatcattgttacattttcgtaattgaagctaacaattaaatttgcatgtattttgtgtaggttttattttttgaggtcattccatcacttagggaaagattcatagaagaaaaagagggtgcatatgccggttgtccaaggatgtgcaaagtgcatttcaagaggaccgagatgaaagggtttgcgcttgagcaaattaacaatgtactgggtactagtgaggttagtattttatagtattcctaaagaaaatatgattttatttatttctaatattcattgtttattatttccatagatcattgagagtataattagagagaaggatgaagaagtacctcttttcgctgaaatcaagggagtagaggctgattttgataagcacgatgttgtagttgatagttggatgaggcgtcttggtcaagggcgtgaaattagattttaagaggtgtacaacgaatatgtgcaggcccgaatggaagccccaaatgaagaggaagttcccacagctgttggaccgggacacccgacgttagttgatgtaatggagaacctccaagccaacaatgacaagctgaatgaagctttggtggcgcttatggaaatggaggaaaaacaagcaacgttcaaagcatttatgaatgagatgaaagctaaggtaaatctgggtgatatcggatatactgtacca

SEQ ID NO: 174391 - DNA, 955 bp, Arabidopsis thaliana landsberg
acatcatccattatattgggtcataatattcaaaatgaattgatatctcttttggctcataaagttcaattttctattaagaatgtcataaaagaggccaaaatatttctcaatcattcttgattgtatcccggatgtaagcaagaacaaatgactttaatagtatgatgtgtaagaatggtagatagaaaagtgaaagtagaagaatactttttagagtttcttctcgtagatgatacatccggattaggtctttttgaaagaataatttatgcgctaaaatctctagatcttgatgttagaaatgtgagagatcaaagttatgataatgagtctaatatgaaaggaaagcatcaaagggttaaaagagattgcttgacattaactcaaaagcattatatatgccttgtgcttgtcatagtctaaatcttttagtaagtgatatggctcattcttgtgtgaaagctatttcttttttggagcattgcaacgaataatatatgtattattttctagctctacaaaaaggtggaaaattttgcttgatcatgttccttacttaactatgaaatcattttcttatattcgatgggaaagtcgaataaaaagtgtcaaagctattaggtttcaagctcctcaagtgagattagctttaattgatctatatgaatcatgtggtgatgccataacaaaagtgaaacggaaagtttagtgaattcacttgagaattatgagtttttacttggtatgactatatggtatgaaattttgtttgtcataaacaaggtaagcaagagtttacaatccaaatctatatgcattgatagtgctgtaaaacatttcgaaggtataatcttatattttaaaaagtatagagatgaagggtttagtgcttctttgaaagtagctcaaggtcttgcccatgatatgaatgttgatcctatattttcaagta

SEQ ID NO: 174392 - DNA, 716 bp, Arabidopsis thaliana landsberg
acaagctgaaaatgaacgcgcgaagatgaagatgaatgctaaagttgaaactcaagggcagaacccaacagaaagtgtctctcaaccatgtcaaagagctaagcgggtacgtaaaaaacagagagctttgtgttggcatgcatttacatccgtaggaatagaggaagatggaaaagaaagggctagatgtcaccattgtggtattaagttggtagtagaaaagtcatatggaacatcagctatgaaccgccatctaacacattgccccgaaagacctcagcctgaaactagacctaagtatgatcataaagttgatcgagagatgacttctgagataataatatatcatgatatgccttttcgatatgttgaatatgaaaaggtgagggctagagataaatttttaagagccgggctgtaagcctatatgtagacaaacagttgcactcgatgtgtttaagaggtttgagatagagaaagctaagttgatagatgttttcgctaaacacaacggtcgggtgtgtttaacagcagatttatggtcgtctcgaagtacagtgacaggatatatttgtgtaacttcgcactatattgatgaatcatggaggctgaacaataagatattagctttttgtgatcttaagcctccacacaatggtgaggaaatagctaagagagtttatgagtgcttgaaagaatggggtttggagaaaaag

SEQ ID NO: 174393 - DNA, 1315 bp, Arabidopsis thaliana landsberg
ggggttgttgacaaaaaaatttcgtgaagttgatccaggaagctgaggatggaacacttgaccttaactattgtgcagttgttttggaggtatgctaaatgtatcttaatatttaagttaaaaatgtatgtctcaactcgtagaagatctaattaagaacgtggactaaaaagatcactcacctttataacccttgccttaactgtttgatatctccctagttatcttcatcagcttgttaggatctcctcttatgtgcttacgtgttcctgcgatccctcttaacaggtacaaaaaagaaggatatatgatattacaaatgtccttgaaggaattggattgatagagaaaactacaaagaatcatatccgctggaagtaagtacacaaattttttctttcttggatacattgcagcgtatatagcttgagttcgtctgactttgtgtatgcgctattgatgcaggggtgctgacaatcttggacaaaaggacctgggagatcaaatttctaggcttaaggttcattgtgacaagcattttcacgtgttttctttgtcgtagaacttactgctatgcaaataatctgtcaaattcatgatttcattatttttctgtcttatagtttatttcacacagttattttcaaattccccattactgaccggttacatatctacgtattttcagtcagaagtagagagtatgcaatctgaggaaagcaggttggatgatcttataaggttggttgcttgtgttcttatattatgtttggagacttatccattgttcctttcccacatggtttgaagatcatcatgttatgtatctccagggaacgacaagaagctctcagatccttggaggaagatgactactgtagaaggtattcgtcagtttatttgagtttcatctttttgtatatacacgagagtgttgctaagatcaatgatggaaataaacaggtacatgtttatgacggaggaagatataacgagtctcccacggtttcaggtcctccccaactagttcttgaaaatcatcttatgttttcctcagttatttaacatactaaactggtagtccttatacagaaccagacattactagcaattaaagctcctacagctagttacatcgaagttccagatcctgatgaggtgagcgtttttaatgctttcatatttgctgtacagttgtaatataatgtgtcacaaagtaaagcatctgtttttgttcacgatagatgagttttccgcaacagtaccggatggtgattaggagtagaatggggccgattgatgtctatcttttaag

SEQ ID NO: 174394 - DNA, 774 bp, Arabidopsis thaliana landsberg
cgggatcgagtcgaacgagccctccgtcttcttcacggcgtttcctgtcctaccagttcagaatcttcggaccacgcgaagaaaaaagaagataaagagagacgcttggcggaagagaaacgccttgcgaatgcaggattgatttcgccgcgggtagcctctcccgatgcgactcaagtccgggatgttgctcccaaagttgtaggcccggttgacccgacgccttctgaagttcaagaggtcaatcctactgctgttgggcctttgcccgaggcgattgttgcgctgcctgcgagcgacaaggcggcgggtaagcgtgttcggacggatgattcatcgtccaagaagaaaagcaagaagaaggaggcctcgagtgccaaggcgggaaaagagctccccatctttgaggaccgggtagcctctgcaaacctcctcagggtgtgtgtcggtcctttgcttcctcctccggatactcttctggaatctcggaagtatggtgaaacggcatctcactttctgcgggtatgagcttcgttgcttataacttattctggtgttgtcattgtaaatctaacttctcttttccagcgtgtcgcttcgatgaaccggatggtacattcgtatgattcggctatgcgagagcaacatggaggtgctggtaaattagccgaagcggagtctcggattcaggccatcgagcgagagaagaacgaggcgctctccgaagctgctgctgcgaagcttgaaagggaagaggtcgagaggatggcctac

SEQ ID NO: 174395 - DNA, 330 bp, Arabidopsis thaliana landsberg
ctcaatctcgcttaaccacaaacttctactcaaaaacatgcccaagattcctcgacatcatccgtgacacaatcacaaacaaacaaatcacaaatccaaccaccgcagccgccgttatccgtctcttcttccacgactgtttccctaacggctgcgacgcctccgtcctcatctcctccaccgccttcaacaccgcagaacgtgactcttccatcaacctctcactccctggagacggtttcgacgtcattgtccgagccaaaacagctcttgaactcgcttgtccctaacacagttacttagtcggacatcctctggacttctagatcg

SEQ ID NO: 174396 - DNA, 487 bp, Arabidopsis thaliana landsberg
  unsure (1)..(487): unsure at all n locations
ctcatctggatggcttacagcggttgactggtctcgcgctttctgcgacgtatcagtgtctatgatgccaacgganaaaaactcagtgctattccaattctcaatcagtccgtttttgatgaagctgccgcatcagatgccagacgtgccgcaggattaccgcagcgatcggtggaaggcattccctatctagtgaaagacaatatcaaagtcaaaggcatgacaatcgccaacggatcgcccgcctttgagaatctcattgcaaatgaagacgcggcatgcgtgcagatcctccgggatgctggcgcggtcctcctcgggcggaccaacatgccagccatggcatatggtggtatgcaacgcggagtctggggacgtgccgagagtccttataacagtaattacctggcccgcgcgtatgcttctggctcatcgaatgaaaataaagtcgccacaacagcaaacttctgcacattctctctgggac

SEQ ID NO: 174397 - DNA, 1705 bp, Arabidopsis thaliana landsberg
tattgcatcgacagagtagcgaaacatatatcccatagttggaaaaggtcacctatcagtcgattatacgtgcatgaaatggttgtctctgcataaaaaggtatatagactcagtttatttttattctagccttgccgtgtagttatagtctgttaaatcacatttttcgcttataaataagcttcatccttcctgtctgcaagagaagatcttgccttgcaacgcttgtattggtaataggaactgggtaggacatgttttagcactggatgtggcttctggtcagctgaaatggaaaataagtgactgtcatcccgggtgagtatagaactctaactgtcttcttctttaccattcttttattggaccatacttgaaagcaaactgatctatttgtaaaaatattggcattctgtgatttggttatgcgctagatagttgatctttctgcaggtctctgtgaaatttcctctctgaagctggttttagacatattaatacgtgtttcctgtcttgtgcagtggtgttaatgctgtttcatcttcagcaaaggcatcttgcatatacagcggtggggcagatgggatggtttgtcagatcgatccccacagtggaaatctgatcagaaagttcaaagcttcaacaaaaacagtttcttctttatgtgtttcaccaggtatgtccttccgtttgatctaaatagaaaaaactggtttcttcaagtacgttttgagtacccttaaaaaagcaacatgaatatggggaactttcagttaaaatgcttaagagtagaacagacatgtatacctgctgatgacgtttttttccttccaaattgtagatggaaaaatattagtcactgcatctactcagttgaagacttttaactgctctgatctcaagaagatacagaagtttactggtcatcctgtgagtacctgtactgtttgtcagcattattttttatcgaccaggttttattgttaggatgctgcctctatgtcacacattcgaaggttattaacagtttttcatgttatatagggggttgtgcgttgtgtggcttttaccgaggatgggaagtatgtcctctcatccgcagtcggggaaagatatattgcagtttggaaaacagatggtgcaaagaagcagtcagctagctgtgttcttgccttagagcaccctcctgtcttcgtggatagttggggtgaaacaaatgaaaaagggttatacgttttagcaatttcagaaataggtgtctgttatttttggtatgggtcaaatgttgaggaactatgcaatgcaacgcctacaaaagtcgcattagcaactgcagattcttccctcaaaccttacaagagctcattgcctttaatctttgctgccaaattacaaggcattttgaagcctggttctgcacatgcatttattgcatccggattgcttgtgaaaccttcattccagaaaatggtgttgcagcttggcaatgacttggtgctgaatgcctctaaggatgggatccttctccctatcactcagtcagtttccaagtccagcaagaggcaaggcgtgcagaataaaggtatcttctatgggctataccttttactaaatcatgaaacttccaacaaagtaaacaaattgattaggctgttttagtttatatggtcattgtattacgagagcaaattgactaatttagct

SEQ ID NO: 174398 - DNA, 175 bp, Arabidopsis thaliana landsberg
caccatctgcagccaagtcaccggaaacttcggcaacttcgccatcttcggatgagacaccgtcatgactgcaccttctccttcatcttctggcacaaacatcgtctcagttcctgcactcaccattgttttcgttattgtttcttctgtcgcttacatttcggccttttctaat

SEQ ID NO: 174399 - DNA, 581 bp, Arabidopsis thaliana landsberg
atgatgaacacttcgaatgggatgatctctgggccttcttcttcgtcagcttcggcggcgaatcctcagtctccgggaatcaaaacgtatttcaagacgcctgaaggaaagtacaagctccactacgagaagacgcatccctctgggcttcttcactacactcatggcaaaaccgttactcaggtgaagatttgattcgttttctttggtgtttatttttgaattgaaagtttaatccaatctgatttctttgcacttgtgattgctattacgaaattgctattaggttttgtgtaagaatatcaaatgcacatttcatttttatgttttgaaagtggtttctgagaatggatttgtgaaattttggtgtcaggttactctagctcaccttaaggataaacctgctccatcgacaccaactgggacctcgtcaagttccacagctagtagcggtttccggtcagcaacagcaaggttattgggtggtgggaatggtaaccgtgcgcttagtaatgttggaggtaatggaggggctaaaaatgtgggtgcaagttcaaggattggggaatcattcctgagag

SEQ ID NO: 174400 - DNA, 488 bp, Arabidopsis thaliana landsberg
ttcacacattggcaatgtcatcaaaggtgcaaacataatggtagacgagatggacttcacttcagtccccgcaagtcacagtctcgactagtggccttgttcctcagctgaagcgttttctccgtgagtcaaattgcgctttggcagtcagtctgaatgcaacaactgatgaggttttttcatgctctctttaagccagtcatcattcatgaggtatgatctgacctcattgaaccgtgcaggtcagaaactggattatgcctataaacaggaaatacaagttatctttgctccttgagacgctcagagaaggactcagttcaaggcataagtacaaagtgttgtttgaatatgtaatgctcgcaggagtcaatgacaggtaagtgataattcagtagagaccgctattaagctctctgtttctcaatttaagtctcctcggttaaaaatggttcaattctgaaaccatcatgaactagaaactcttt

SEQ ID NO: 174401 - DNA, 834 bp, Arabidopsis thaliana landsberg
taaaacctggtcaaatcttaaccaaccaacttgagaagaacgagaggtctacaggagctactcggttggtacaaataccttcttcatattgttctattgtaccacattacctaatttctggttggttccgaagtatacggactcagccaacacaatgatccgtcctccaacatgtttgtccgtaacaaggaggatttgttttggtgtaatgccccaaacatgactgtagctcgagcgaaagccatcgggcacgcctacaatgggaaactatatgtcatgggaggttgcagggatgatgaatccgtgaattggggtgaggtttttgacccaaagactcaaacttgggaagctttacctgaccctggctctgagctccgtttttcttcaattagaaaaatagatgtgttccaagaaaagctttacgttagcagcaacgagaagatagactctgtttatgatccaaaagaaggtaaatggaatgttgcagaaaaaacacctgtgcaatgtatggtaaataatgtatggtgttattgtgataaacagagctgctgatggtatgacaaaaatagtaaaaaatggagagtggtaaaaggtttagatatgttgaccaagaatcttggttgtggaatgattgaaatagctaactatggtggaaaactcttaatcttatgggacaaggttggtctttctcaagacaaagatatttggtgtgcggtgattgcgcttgaaaaacgtgatggtgttgatgaagtttgggggaaaattgagtgggctagtatcgtgcttacggttcctagctcatacgttttcttgtatagtctactaaataggatt

SEQ ID NO: 174402 - DNA, 1125 bp, Arabidopsis thaliana landsberg
gtatgggaagatgtatgtggtccaaacccccagggagggatggggctgaaatcttttattgaggctaatagagtttgttgttttaaactcgtctggggcatcacttcagcttcttctctttgggtggattggattaaaggtggacttctttggaatggctctttttggtctataaagcataacgcacaatctggctcttagatgtggagaaaacttctccaatatcgacaacaaacaacacaattctgttttgtggaagtaagaagtggtctgcagacctctttctggtttgataagtggtgttcactaggaccattgcacagtctcttggggcaccgtttggacttcaatctacatccactgtaatcgatgctcttcgctttcaccagcgtagactccatcacgctgaaaacctaaacaaggttgagctcaaactagatcgctttagaaacagagttctctgctccgagaacgatgttgctctttggcgtggcttaggagacaagtttcgacccaaattctccgctaaagaaacttgggctcaacaaaggtctccaagtcctctgcagctttggtttacaggtatctggttcaagaactcaacccccagtccgtgcgaaactcgcgaccaccttttcttctcatgtcccttctccaatcgggtgtgggagaaactaactaattggcttctcatgtcccatctactcgcttcctcatccgttatgtgtttcaggctacaagttactctatttggggtgaacgcaacggtaaaaggcatggcgacctaccacacactttggaccacctcatcaagctcattgatcgaacagtacacaatctattaagcaacataacccacctcggctctaacaaacatcatgagggattctgttagcaacgcgatggtctagttcttcttattttctttttcagaaacttttcagattaaggttgcatatattgtaaacaaggtttttttttaaaattaattttgcatttagtaaaaaaagaaaaaacaagtctgttgatgataaattagaaattacaatcaatttatcaagaattaaatcaagaattctttggaggctaaatcaagaagtaagcctctaatcagtaacaaagtgg

SEQ ID NO: 174403 - DNA, 1066 bp, Arabidopsis thaliana landsberg; identical to SEQ ID NO: 19221

SEQ ID NO: 174404 - DNA, 522 bp, Arabidopsis thaliana landsberg; identical to SEQ ID NO: 72394
  unsure (1)..(522): unsure at all n locations

SEQ ID NO: 174405 - DNA, 586 bp, Arabidopsis thaliana landsberg
tatgaaatctattattggtgaaaagttgttttgtctttttgtttttacatttctgctggatcaaatattcatttgtagtttcattgttgcgttaattgtttcaggagcaaatcaaggatcaagttgtgaacatgtaaatgcctttatcttttgaatagttaatccatgtcttaaattcaataatataaagcaaatcttaatttttaatctgtagagcattaagaaggcatgttggaatcctccatgtgaaagttgtgaaggctgtggttcaaaggaaaaaagttcagatgggcatgataaatccatacgtgcaaatcgagctctctgaagataaaatttcatctaagaagacaactgttaaacacaagaatttgaaccctgaatggaatgaggaattcaaattctcggtcagagatcccaagactcaggttctagaattcaatgtgtatggctgggaaaaggtaaaaagctatccaaaagggtgacaagtgacatggagtaggagatatatgtaattttttttttttttgcaacgcagattgggaagcacgataagatgggtatgaatgtattagctttaaagacg

SEQ ID NO: 174406 - DNA, 408 bp, Arabidopsis thaliana landsberg
cctagactccgcctctaagagtagctccaccaccactgaaccatgctgaatttgaagctgcttatcctcaccttgcaacagctacgaatgaacaaaacaggtatgttggggaatccagcactgtctgacaaacttgtcttcggatttgaacaccctaatgccaagaagagagccacagttcttatatgatagaatgcactttgaagtcagtcaatcttcaaaaagacatgaagttcaagatttaagaaggggtacagaggggatgagaaatcaacctcaacatgattacgcgcaaagaactggagggattctaaacctccgaagaaacgctaagcactcaactaacttctgtcagaattttttggtttgaagactacgggttacaatgaaagcagcttaaaggtttga

SEQ ID NO: 174407 - DNA, 1472 bp, Arabidopsis thaliana landsberg
taactcatcacggctaactcacatgagctttggtttacatttggaggccagctgttgcgattttcgctagacgagtttaaacaagttacaggtctctactatggccctttccctgatagaaatccatatgtaaaaaccaatcgtctccgcggagtggttctatgtatttggaaatgttgctcagtcatcataagaacttcactattaagcatattgtcaagcttttgaaatctgataggcagatcctggggtggcgtaggtcgcgacttgtgttaattgttattatggaaggtattataatatgtgggacgtaacctatccgcccatcagtcccgattgttgagattgttaagagttttggacttcttcttgagctacctgtggggtagacattcatttgagaggacattaaggatggtaaaagttggggaaaatgtacgcaaccagtttgacattacaaagaaactgaagcaacgttctcttgtgatgcatggttttccagtagccctttaaattgttcattttccagtcagttccacagcttttggcgtatgtacctagagctgctgatgtctcataatttttggtaagggacatagatattctattgtagctgaagacgtttcaaccatatagcatacttgcctttaagaatactgaagcggtaaataatattacgtacgtaatgtctgtcgtatcctctacgatacttgccgttgagaatactgatgcggtaaataatattacgtacgtaatgtttgaactaaatatcctttttcaatgttcctcaaccgtcaattttctttcagacatttacaccctctacaccttggttggcagaattgtgagtttctgttacactactgcatctatatgttattaggctatatcttgaacactatttctaacttctctgaatgcctttggtttattctgttatttttccttctctctgttggactgagtaaagtaaacttttaccatacactgaacatttactattcatgtagcatatggatgtcacagggtttttacctttctacacacaagattgtcgttttggacagcttgcttacaaagcttctaacgtccgagtactctcggtttttacaagcaactaatccagaggcttatctttgggatcctcttttacaaagctgcgttgagggtacagttggtgatcgcactaaaaagactgtctagtatgcagatattgatacaatttacacacccctatgaattggggagacacacattgggttgccttggtcatatacctcacctactgtcacattgatatcttagatccattactccggtgcacgtacaatcacattgtaaccgcttacatggccccttttgttcaactgctactttatttaatcaagtgatcatgcgatccttttgatgcgactccttgtggtcaaaaagaattttcctacgctcgtcttgaaggcatccctctgaactcc

SEQ ID NO: 174408 - DNA, 416 bp, Arabidopsis thaliana landsberg
cgacgccgagctggacgagaagttccgggactgcgtcttctactcgggcaccggctgggacgcggacgccatcctcggtgccctgcgccgcctgccgcaagcgcccagcgttagcggactcgtgccgctgggggaatagccatggcgcaagcggatagcggcgttcagtcgcgggacggcgccgccggacccagagccctggaaatctccggggtgtcgaagtcagacggcagagtgcccgtcctgactgacatcgacctcacggtcaaccgcggccaggtactgggcctgctcggctcgaacggagacgggaaatcgacactgctgaacatcatcgccggcagcgttccctccagttccgggacgatcagcttcgacggccagacggttccggacgccagctactgcgtgagcga

SEQ ID NO: 174409 - DNA, 425 bp, Arabidopsis thaliana landsberg
  unsure (1)..(425): unsure at all n locations
tgacgggcagccgcaccgccctgcagtgcctggccgtcgaacaccccggacgaaagctttaaaaaacggggcccggtgctgccgctgccggacggttataccggacacgtccgcgacccgaaggtgtggcaacacgacggggagtggtacatggtgctgggtgcgcaagacgtgcaaaagcacggcaaagtgctgctgttcacatccagtaacttacagcgctggcagccttgcggcgagattgccggtcacggcgtcaacgggctgtcggacgcgggctatatgtgggagtgcccggatctgtttgccctcgacgggacgcacgttttgatctgctgtccgcaagggctggcgcacgagccgcatcgctatctcaacacctatccggcgacctggatgagcggggcgtttgnnctatcagcgcg

SEQ ID NO: 174410 - DNA, 710 bp, Arabidopsis thaliana landsberg; identical to SEQ ID NO: 14217

SEQ ID NO: 174411 - DNA, 594 bp, Arabidopsis thaliana landsberg
  unsure (1)..(594): unsure at all n locations
gtgagttatggtctcagagaaatggactctctcttattgatatgttttcnttagttgattattcctgaagtttgattttgtaggggacaagcagagaaagagtttagagtagaggtagatgctataggtcatgtgcgtcacaagaacttggtacgtcttctaggatactgcattgaaggcacaaacaggtataaatatattgaatcttttgtcttatatagagagaaaaaagaagccaacttatgtgagtttgttgctattaggatattggtttatgagtatatgaacaatgggaaccttgaagaatggcttcacggagcaatgaaacatcatggatatctaacttgggaagctcgaatgaaagttctcactggaacatccaaggcgtaattgagcaaaacatttacatttctttttggtgtttcacatatgttctgctgaatgtaagttttgttttcatgtgcagtcttgcatatctacacgaagcaatcgaaccaaaagtggtgcatagagacatcaagtcgagcaacatcttgatcgatgatagattcaatgcaaagatttctgattttggccttgccaagttgcttggag

SEQ ID NO: 174412 - DNA, 289 bp, Arabidopsis thaliana landsberg
  unsure (1)..(289): unsure at all n locations
cgaccacgcatgaggtatcgacgaatgctgcgacgcttccggcaactcgacgttttcggcgcaaggccgttcgccggcaacccgctggccgtggtgctggattccgagggacttcctggcgaggaaatgctgcgcatcgcgcgctggatgaatttgtcggagacggcctttctgctgncgccggctttcgatggcgccgactatcgcgtgcgcattttcacgacgcaacgcgagctgtcgttcgcgggccatccgaccctgggcagctgccacgcctggctcggtgccg

SEQ ID NO: 174413 - DNA, 1428 bp, Arabidopsis thaliana landsberg; identical to SEQ ID NO: 10870

SEQ ID NO: 174414 - DNA, 450 bp, Arabidopsis thaliana landsberg
acaacaccgcggtgagggactcacctttgatatccccgccggcagcacggtgaccaataccggtctcaacatcaccggcatcatttacggcaacaacggcttcaccaagaccggcaacggcatcctgcaggtcagcgcgaacaacttcacgaacgtttatgatgggtacaccggcatcaacaaggacgcctcgttgtttggccagatcaaagtcaacggaggcatcctatacgttggcaatacgcgcgccctcggcgccttcggtgcgggcaacgaaacggttgtcgcggccggcgccaccgtcgatctgcgcaacaacgcgacgaatctgaatgatgacagcagcccggaccgcgagcgtttcaagatccagggaaccggcttcaacaacaccggcgccttgcgcaacagcaccggcacgggccagctttcttacctgatcatggacgg

SEQ ID NO: 174415 - DNA, 379 bp, Arabidopsis thaliana landsberg
atgaatatggatttggatcaagcgattcaagagatgtcaatcaaggatgatgaacctctggttttgtcgaaccaagcgcagttttgttcgattgaaaggaatgattgtagtatcttgggaaggtttctgaatccttctcctcaacggatgtctaattggatattagacatgcctagaatttggagactatattcaacagttcgtggtgttgctttatcacaagaaaggtttcaattcttcttcaaatcagaggatgatttaattgaaatcttaaaaaccggagtttggactcaggatgaatggtgtgttgtgatggatcgttggatagagaaaccgacggaagagtatctaatgtttcttccggtttggattcggctga

SEQ ID NO: 174416 - DNA, 397 bp, Arabidopsis thaliana landsberg
atggaagcaaaaggggcagcacagtggagctctatcctagttccatccgttcaagagatggttaaggagaagacgatcacgaccgttcctcctaggtacgtccggtctgatcaagacaaaactgaagtcgatgatgattttgatgtgaaaattgagatcccaatcatcgatatgaagcgtttgtgttcttcaaccaccatggattctgaggttgagaaactcgacttcgcttgcaaagagtggggatttttccaggtaaattctccaactacaaatataactcttctataaagcagcccatcgcgtctttctttattaacataatatacgtcacatggagcttatattagtttttactatttttgattgaggaaaataggcagataaaatcgtttct

SEQ ID NO: 174417 - DNA, 1388 bp, Arabidopsis thaliana landsberg
atgatcgggatgctcggtccgcggtattcgaagacaagctctcgaggcatcttggagcccgcctcgggacgatttgccaagttttatgcccgaggcgtttcgaggtcgggtcgggggaccactgctcatctcgtgttctcgacatcgcctaggtaaggattcttgacgagacctccgaggtgttttgtggtccggttcgggataattcatcgatggttcccgaggcggaggtgtggtcggctcgctatcctgggtgaaatccgaccccaacagtttcccccccagttcactgacttagcagaaagatgagcttcatgaatggatttcccgagctgactgttcgcccttctagttcagtcgcttcatcttcccggacggtcaaacttccgttacgtgccgccgactatttttgagaagtggaaaacgtttctcgcttattcccgaggatcacgcgggtgtttccttctgccgagcccacgcgcttaaacgcgttttaattgtttgttgcggacccgacgcgcttccaaaaactctatatatacggcgagccattcctttgggagttcatttgaagttttcgacgaaaaaaaacgaggtttgcttccttctctctgatcttgatatttctatcgttctttcttttccggtgacgtccgctattcttttgttatttatgattttttcggtttagaaattcttgttttctggtcgtttctcatctcattgatcgtccctgagccaaaaatgagttccagtcagtctctttcgttcccgagcgcttctctcgttgattccagcgactaaaatcatccagacgaccttcccccatctacaaacggagagcagtttggacgtcctctgaagatgatgttgtgtcttcttcgagtgccccggagcagatgacctctttcacggctcgggaagatatcaatgccgatattgctagggaactggatttgcccgatgatcccaagccgactctcgtccggaggtcccttgccctgatggctgacgaagccgggacatccaactggcgagacgtgcctgagcccttaatgccgacgataaagattgaggactttctttatttcggcccgaatgagacggaagatattctgtgtctcaacgagcatagggcttttgagaaagccgagaagaagaagaagaagaagagtaagaggacgatagtgccggatccccttggctcaacattatgcaccgagcggtccctttaggatctgagggcccgattcggtcttggtgaggtcaccttgcgtgtgccgagccccgatccgcgagccgataatccccccgtgggcttctaaaatctgtatgagggattcttttacggttgttttttgtggttgccagtccggagtgtggttttc

SEQ ID NO: 174418 - DNA, 1028 bp, Arabidopsis thaliana landsberg
tgggtcagagactccttacagtaactgctttcttactggagaaggacttgggcgctacaaggtcatcgggggtcgatgattcaacgacatgcgttttcttcctcttgatggaaacaacattgcgagtactctacaactcctctccactgttggtctgctccctactgttacagagatcaactcttatgtgcatgaggttgtcatggagttctatgcaaaccttcccgatggtgaagaaggtgataatcttgcctactcagttttcgtcagacgaaacatgtatgaattctccctggctatcatcaaccgaatgtttcagctccctaatccttcctatccgctgggtggtgtgtctgagattcaagttcctgagtccatggatgaagttgcgattgctctgtcaaacggcaaagccaactcctggaagatgctcacttctcggctgttatctcctgagctagctctgctcaacaagatctgctgtcacaattggagtcccactgtgaaccgttctgttctgaagccggagaggatgactctgctttacatggtggccaaagctctaccgttcaacttcggcaatctcatctttgatgaaaatttgggcgtgttcgaatgtagatgcgaacccctcctctactcttcgtcttgtgcttccgaacctgattgatcaaatgctgcgctttcagcgcattgtccgctctgatgaaggagataccacttcgtctgcaccattgaagttcaccatgtaagcgaaacctgttcctgtgctacagtctgacagtccaaccttggatgcagctctggagaccctcattgcatctctcacaatgatgcgtgttcgtctggcaggtaagcctctctcattcaacttacactctgttatcttttgagaatggttttttatatgagtgtgcactcaagcagggggagagtattctgatgtgtcgtactctgttccggatgatgtgggagatgagaatgtggaggaagaggacgatgatgatgagttagatgacagcacttaa

SEQ ID NO: 174419 - DNA, 471 bp, Arabidopsis thaliana landsberg; identical to SEQ ID NO: 32893

SEQ ID NO: 174420 - DNA, 532 bp, Arabidopsis thaliana landsberg
caccgtacttcttttattgcccttccagctttcttacgggcagcagctttccaccgctcccacaaacaccgcggcactggaccatatttgtccgccatcctggtggacgggtatgaaaaaccctttcctgcaggtgctttttcatggcaaaaacatcggaaaagacaaagtttccatcgcttacccgggcgtccggatcatccaggtacaccgggtagaaaaccccgactatctttttgtcgacctgcacattggcaaaaatgcaaggccgggtcatatcgcctttacgctccgccccgaaagcgggaagaaactgacctaccagtttcctctccaaaagaaaaatccccaggacggcatcaccagagccctgggcgtcagtcccagcgatcttatttacctgctgatgccggaccggttttccaatggagacaccaccaatgaccgggtagccggcatgccagaccagtccctggacctgcatgcgctgaacacaaaccatgggggagacctgcagggggtcatgaaccac

SEQ ID NO: 174421 - DNA, 355 bp, Arabidopsis thaliana landsberg
  unsure (1)..(355): unsure at all n locations
atgcattcacggggcagaagnnnnnnnnnnnnnnnnnnnnnnnnnnnnnnactcttttgttcatattcgacgaccacgccgccggatgcgccgttgcagttcccgcagactctggcggggctccgggcgcggctggcggaggagtcgccgtcgctgtcggacttcctcgcgttaaaatcggagagcacgtactcggcggaggtcgggactaagaannnnnnnnnnnnnnnnnnnnnnnnnnnnnnggaggccgttcccggcggcgagaagtacgtgcagatcaagaagaagctcctggaattgaagcttcacacggatcgcgaggaggcttggtgccctaattcgggggagtgct

SEQ ID NO: 174422 - DNA, 423 bp, Arabidopsis thaliana landsberg
atggcgatctacttcattctctatacacttctcacgatcatcttcgccgtatctctgagtttatttctttccgtgatcaatgcaagaaagagcagaaaacgtgcggtaggattcttccatccgtacacgaacgacggtggcggcggcgagagagtgctctggtgcgccgttaaagccattcaagaggaaaatcccgatcttgactgtgtcatcttcaccggagatcatgactcttcttctgatagcttagctcgtcgcgccgttgatcgattcggtgttcaccttcagtctcctcctaaggtcccattactcctaaagtttaaatttttatcaatttgaattggttctaataacacagaacctctcagatttgagggcaagtttcaattttgcaatttgggttagttttgatgcaaaacttta

SEQ ID NO: 174423 - DNA, 300 bp, Arabidopsis thaliana landsberg
  unsure (1)..(300): unsure at all n locations
acgctgcgcctaacgtccgataacgagcttcaaaggctggtaaaaatcctcagggaaaacnccgggatganaattgagattggcggacataccgataacaaagggtctgatgcttttaatctgcagctttccaacgacagggccagggcggtggccgattttatcctgtcaaaaggcattgccggggaccggatcacttacaaagggtatggcgaaacaaaaccggtagccaacaatgacaccgaggaaggcgcgcagctcaaccgcagggtggaattcaccatccgttaatcagcggcc

SEQ ID NO: 174424 - DNA, 281 bp, Arabidopsis thaliana landsberg
atggtgacgagtatgcagagcgtacaactcaacaatggcagagatgtaccgatccttggtctgggcacgtctcgcatgaaaacgccggaggagacggtcgaggtggtgaagacagcgctctccgacggctaccgactcatcgacaccgcgaaaatgtacgggaacgaagagccggtgggccgtggtatccgcgagcgcggacgctccgcgcggagagatcgttgtgacgaagaaactgtggccagatgacttcgcacacgccgcagacgagtgccgcgcgt

SEQ ID NO: 174425 - DNA, 847 bp, Arabidopsis thaliana landsberg; identical to SEQ ID NO: 49072

SEQ ID NO: 174426 - DNA, 1244 bp, Arabidopsis thaliana landsberg; identical to SEQ ID NO: 10093

SEQ ID NO: 174427 - DNA, 471 bp, Arabidopsis thaliana landsberg
atggtggagaatttgtttccttctcgatttcaatttcatcttcagagacttgacccgaagcgtcgtcttacttctctccatgcttctcacaaaacactcttcacatttctctggatcactgcctttggttccgtctttctatggcagcgaacggcttacatcgaaggcggctctggaactggtcctgtcggaggaaagttcacaattttcggtaagatcaaaccgattcagccaattccccgattgagacctgtggtgtttgatttgaaggattttggaggtgttggagatgggtttacgcttaacactgaagcattcgagagagctgtgatttcaatctctaagcttgggggaagtagcggcggaggtcagctgaatgtgccgcctggacggtggcttacggcgccgtttaatctcactagccatatgactctgtttctcgcagaggattccgagattcttggtgttgag

SEQ ID NO: 174428 - DNA, 829 bp, Arabidopsis thaliana landsberg; identical to SEQ ID NO: 15220

SEQ ID NO: 174429 - DNA, 461 bp, Arabidopsis thaliana landsberg
acttcagccaaagaacaggacttctagctcaaattgaggattcgcagttgactcgaatccaatctaacgatggtgatgctgtttactgggagaccacgatcaattcgtctctagacgactacaaacaggtggaagggatcatgattgctcactctggacgctctgttgttaccctcttcagatttggggaagttgctatgagccacactaggacaaagatggaggaaagatggaccattgaagaagtcgctttcaatgttcctggtctgtctctagattgctttatcccacccgctgatcttcggtctggttcgttaactgaagcctgcgagtactcgggtcaagaggagaaagggaagagctcactagcgttggcttcaacaacagctcatagagctaaagttgcagccttggagaaaggaagcttcgacaatgatcctgtttggcatattgatgtctga

SEQ ID NO: 174430 - DNA, 728 bp, Arabidopsis thaliana landsberg
tcatgccggcatcatgagttcggaaaagcatttggacggcatcgccctggtattttcatcgccagcgtggcgggaccatgcaccaaattcctggttctcggcctgctgctgacgactgccgaacgccgtagccgctgggccatgcacgaacgcgccagactttacgggctggtcgaactgatcggctactggtcgatgctcaatgtgctggtggtggcggtcgtcgcggcgctggtcaagttccagttgctgagcgacatcgagccgcgcatcggcatccttttcttcggcatggtggtcattctcaccatgctctcggccatgcatttcgatccccgcctgatctgggacagtgaggaacaatgagcgacacacccgaacacgcatccactcccggcgatccgctggtcacccgccgccgctggagaatatcgctggtatggctggtgccggccgtggccgccctgatcgggctgtcgatgctgctgcacgcgtggctgtcggccgggccggagatcaccatcgcgttccgcaccgccaccgggctggaagccggcaagacaccggtcaagtacaaggacgtgacggtaggcgcggtatccgatatcgcgctgagcgacgacggctctcacgtgatcgtcacggtgtcgctggccaagagctcagcgggcctgacacgcaaggacacgcgcttctgggtcgtgcgtccgcgcatcggcatcggcggc

SEQ ID NO: 174431 - DNA, 881 bp, Arabidopsis thaliana landsberg; identical to SEQ ID NO: 2941

SEQ ID NO: 174432 - DNA, 309 bp, Arabidopsis thaliana landsberg; identical to SEQ ID NO: 71571

SEQ ID NO: 174433 - DNA, 1233 bp, Arabidopsis thaliana landsberg; identical to SEQ ID NO: 35234

SEQ ID NO: 174434 - DNA, 951 bp, Arabidopsis thaliana landsberg
  unsure (1)..(951): unsure at all n locations
tagtaaaagaacacgtgacattgacaaaatgaacacgtggcaaatttatctcacatccaaaacgttggcgtatactagtcgctcttcagtcttcgtcattcgacgccgtcgccgcgtggattattctcnnnnnnnnnnnnnnnnnnnncctgaaaacagacaccacttgattcatacaggtaaatacataatcttttctgatcaagtagatttgtgtatttgtttatgtgcacaataatataatgttcatcaactgtttgacgaaatgcctcaatgaagcgttttaggattagatcagttgattttcgtcagctggttaattttttttcttttatgcgatgggaatgtagttcttctgctacggtctgggttagattcaacatgacgatcagaattatcaatcgtcaatccagattctgctgtaagagttttctgtctgcgaggctgtatagttcaagcgaacaagtgagagatgttgcggatgtggcgaagaacatatctaaagtattgatgtcttctccgcaattggtgcttgactcggctttagatcaaagtgggttaagggtttcacaagaagttgtagaagatgttttaaatagattcaggaatgctggtttgttgacatacaggttcttccaatggtctgagaagcaacggcattacgagcatagtgttcgtgcgtaccacatgatgattgagtctacggcgaagataaggcagtacaagctcatgtgggatcttatcaatgcaatgaggaagaagaagatgctaaatgtagagactttttgtatcgtgatgaggaagtatgcgagggcgcagaaagtggatgaggcgatttacgcgtttaatgtgatggagaagtatgatttgccgccgaatcttgtggcgttcaacgggttgttgagtgcgttgtgtaaatccaagaatgtgaggaaagcacaggaagttttc

SEQ ID NO: 174435 - DNA, 646 bp, Arabidopsis thaliana landsberg; identical to SEQ ID NO: 53739

SEQ ID NO: 174436 - DNA, 1010 bp, Arabidopsis thaliana landsberg
  unsure (1)..(1010): unsure at all n locations
aaaaaacaaaacaaaaaaagcatttaatttttctttcttgctttcattttcttcttgtttctaccgatcgaagatcttcattgaaaagagagaagagctcatggcgtctcccacagagaacagtaatcgatctagtagtagcaaaaaaccccatcttttgaaaccttgtctcacctccattaatgaatctcaagctcatctttgtcagaaacgctcagctccttctcctgacttagaagctctttccacgagtgttactttctggggatggaggtatccacacaacaagttcaactcttgggctagaaaaatgtcagctttacacgaacccatttggagaaaagctgggatttttgaagcaattttagcatccacttacaaaatccttaagaacacagatcttgttatgggtattgctgagaaatggtgtcctgacaccaacaccttcgttttctcttggggtgaagcaaccataacacttgaagatgttatggtgcttttaggtttctctgttttgggttcacctgtttttgctactctggatagctcaggaaaggagataatggcgaaactggggaaagaatggctgaagattaagaaagataaaggaacatttgtaacccaaatagcatggatagagagattcatggacagtggtgatgagcttgagcatttagctttccttgtcttgtggcttagctacttcgtgtttccaacacgctattatcatatctatgaagctatttggccaattgctattcatctttcaaacggtaccaagatggctcttgctcctgctgttcttgcacacttgtatgcagacctaagtctcttgaaaaatcacattacagctttaagcgaatcgcctattaaggtcgaaattgatctgagttctttgtgtaagctggtcaatgtttggatttgggagagattcagggcaccccactcaaaacccaatctgttgttaaaagaaaagcatagattggctctttggaatgncctgaaacaga

SEQ ID NO: 174437 - DNA, 1048 bp, Arabidopsis thaliana landsberg
ggaatggttgattgcgattggtctaacttaccggaggagctcctccacatgatcgccctcctattattctgcgtagtcgaactgaaacgtttcaggagcatttgcagatcttggcgctcctctacttcgggcgtgaacaggaacaatcctttccctagtcgccctcgcatccacttcgatcccatcgaccctagcgaaaccctatcatccgatgattcctacattagcagacccggtgcgtttctctcacgcgccgcctttttccgagtcactgtctcctcctcctcgagcaagggctggatgatcaaatcagacatggacatcaactccgggagattccgtctcctcaacgttctctcacgttacccgttgcgtctttattccgagagcatcgatcttttggagttcactgtctccgagattcgagaagcctacacggttcttaacactgccaagggaagatcagcaactaaaggataccaaagaagtgctcctgtcaaagtcaaggaaggagaatgtcatcgtgatggagttctcggaattggtcgggatgggaatatcaactactgggatggaaatgtcttgtcggaacttaaacaaatgggtgatcatttctccgacattatagttcacaaaggagtaacttatgtcttggattcaaagggcaatgtttggctgataaagtccgatcttgagatctctaggtttggaacttcactcgatgaaaacatcactgatggctgttggggagacttgagatttgtggaaggctgtggagagctttatattgtggagcgccttccgaaaaatacccgaaagagaaaagctggggacttttttcacaactcacgaacggttggtttcaaggcttacacgatggatgaggaattagcaaaatggatagaaattaagaccttgggagacaatgcgtttttgatgggtaccgatacttgtttctcggttttggctcatgagttttacgcatgcctaccaaactctatttactacaccgagaatacatggcctaaggtgtgcaagctagacgatg

SEQ ID NO: 174438 - DNA, 871 bp, Arabidopsis thaliana landsberg
aaaagttggcgattttgggttggctcgtgtgttgtttgatgcctagaatggtcgttgtcacgcttctataagctccacacacgtcttgaaaggctccattggctatattcccccaggttagtttattaattttccaatctcataagtaacagaaaaattattaaatttagtgtcattttaattaatttgcgattagtgctctcaacatagttctgatccaaaaatagaattattattatataaaaagctattaatatgtatatgatttggagcatgtaatatttcacatattactaatatagggtctagattattgttttgcacattttgttcaattagtttgagtctttgagatggtcttgattaggtaagttaagtcaactatatagattttttttttcaagactatttttgttttgaaaaaaaaaaactgttttgattagtgtattgtaatatttttagaaaacctaatgacctttttaaaaataatcgattgttaaaaagtagaaaaattgatctaatttcattaaagtctgtttcgttttaacaaaaaaaaaaagcactaatccaagattcaataacctcatgctagtatggtatcatatttgatgaattatgtggtacatggcagagtatgggcttggagaaaagccatcacaagcaggagatgtgtatagctttggagtggtgttgttagagctttttagtgggaaaagcccaatggacgagagcttcgaaggagatcatagtttggtaaaatggataacttatgggtttcaaaataatgcaattatggaagtgaatgaccctaaacttaaaggactcatggacaatattggtggtgcacaacatcatacaaaaattgattgcc

SEQ ID NO: 174439 - DNA, 528 bp, Arabidopsis thaliana landsberg; identical to SEQ ID NO: 53758

SEQ ID NO: 174440 - DNA, 512 bp, Arabidopsis thaliana landsberg
gcgagacttctgcgcctgccgagaaatctcactgacggggtggaccgacggcgagtttcgccagatggccatcttcagtggctgcgactacctcgatagcatcgccaatatggggctcaagacggcgtaccggatgatccgaaagtacaaaaccccggaacgagtcgtcaagatgctccagtttgatggtaaacatcgagtatctgaaaactacctggcggcattcaaacaagctgaactcaccttcatctaccagcgggtgtactgtccaacgaagaagcagcttgtccttctgacagatgcggttcaggatcttgacatcgagaacttgcccttcatcggtgcggacctagagagctcgctagctcaagcgattgctgtcggagacgtcaaccctatcacgaaggagcctatcgtggttgcgcccgtccccggaaggccaagagatttccatcatgcttggcaaacggcaaaccagagtctgcctgccagcaagccgatcgactcgtgct

SEQ ID NO: 174441 - DNA, 847 bp, Arabidopsis thaliana landsberg
gcgcacttaacccacccgccgatattgtcaagcccgactggatgaaaagctatatttatatgaatcagtctcaagccatgcagtgagcggagtcatagttcaggaagatcgtggtgagcaaaagcaaatttatataagcaaatcattgaccgatccagagactcgatacacaacgatgtgctaatcgaggtgctaactttgtaaatatgatatatgaggtatgtccatacttcctgtcgcatccaatcgaggtgctagtaatcgaggacgcttggcgaattgggcagtggaacttaaggaatatgatatagagttcaaaaaccgggtgagtatgaaaactcaagttttggctgttttctgacagagttaacagatgctaagtatcactgagcaacccgaaatcaaacatggaagcttcacgtagatgggtcatcatcaaaacaagggtccatattggggatcagactagagtcacccacctcaaagattcttgagcaatcattttctctattatttagtgcctcaaaataatgaatcggagtatgaagacgtaattgctggacttcggttggcacatgggatcgaggctgaagaggtaattgcttactgcgattcgcagttagtgattaacctgttcaatgaagaattacgaagccaaggatgcgagaatggaggcatatctcgaggtagtcaaaggcttatccaaaaactttaaagtgtttgagctagtacatattccacgaggagaaagcacaactatagaggcgcttgcagcgttagattcaactttggattcagatttaaaaagggttatttgagtggagtgcaattcagaaaaggagtatta

SEQ ID NO: 174442 - DNA, 486 bp, Arabidopsis thaliana landsberg; identical to SEQ ID NO: 75708

SEQ ID NO: 174443 - DNA, 1344 bp, Arabidopsis thaliana landsberg
  unsure (1)..(1344): unsure at all n locations
atggcgacagtgagtggaaggagacgcaaaaggaagatacaattaagcaagcttttcacattaacaggtgctgaagcttgtttcaagcctgaccattcgaaaattggacgatctggtttctctcgtgtggttttctgcaaccaacctgattcccctgaagctgaatcaaggaattactgtgacaattatgtgaggaccactaagtatactctcgccactttcctccctaaatcattgtttgagcagttcaggagagttgccaatttctacttccttgttgttgggatcttgtcttttactcctctggcgccatataccgctgtgagcgccattgttccgctgacgttcgtcattctcgctactatgtttaaagagggtgtagaagattggcgccggaaacagcaggtactttgactgattgattttgtctgagtggttgttgtttgattagagtttgattagatgatcttaataggatggtctgtgtctagacattgtttgataacttgttacgaaatctggagttctatgttggattaagctacattacacagaactggattaagctaaattgttacgaatagttgtcttgcttctgcattcggttggatcactttattattcatttgttgatcgaaaaacttctcattatttggaaattttcattcttttaggatattgaagtgaataacagaaaagttagagtgcaccgaggcaatgggaattttgatcttagggaatggaagacactaagagttggggatatattgaaggtagagaaaaacgagttttttccggcagaccttgtcctgctttcttctagctacgaggatgctgtttgctatgtagagacaatgaaccttgacggggaaacaaatctgaaacttaaacaaggactagaagtaacatnnnnnnnnnnnnnnnnnnnnnnntcagggattttgaggcttttatcaaatgtgaggacccgaatgctaacttatactcgtttgttggtactatggaccttaagggagaaaagtaccctctctcaccacagcagcttcttctgaggggctcaaaactcaggaacacagactacatctatggggttgttatcttcacaggacctgatacaaaagttgtccagaattcaacagatcccccttctaagagaagcatgatcgagaggaagatggataagattatatacctgatgttccttatggtattttcattagcattttttggttcagttttatttggaatatggacgagagatgatttccagaatggcgtgatgaaaagatggtatctgaaaccggatgattccagcatcttctttacccaaagagggcgccaatg

SEQ ID NO: 174444 - DNA, 388 bp, Arabidopsis thaliana landsberg
gagctattccgtcgatcgaccgctggcggtgccttgcccgtttcataaactcgatgcattagccgtaggcgctgctatccggcctctgtccgcaagcaacggctctggacaagtcttggtcagcggtggtggcttcaagtacactccgtgttctcacggcagaagacaggcgaatacgaatgaggagaggatggagtgtgaagaggtgatagattcactcgtgcgcaccccttcagcgaaacaacgtgcaacctatgatggctacgccattgccgttcacgggcttgtcaagcgctacggcgactttactgccgttaacggtgtcagcctaagcgtccggccaaaaaaggtcttcggcattcacgggccgaacggagccggcaagaca

SEQ ID NO: 174445 - DNA, 240 bp, Arabidopsis thaliana landsberg
ggtccgggatgaagctgttcgcctcgggccttgagcgcgtcacgacccggcttaagctgcttaagccggcgcccgtgcgggatatcccgattctcatcgggggcgccggcgagaagcgaacgcttccgctcgtgggccgttacgcctccatctggcacagttccctgggcctggcggagttccgtcgcaggatggtcattgtgggaaagcgcgcgatcgagtcaataaacccccgcggct

SEQ ID NO: 174446 - DNA, 714 bp, Arabidopsis thaliana landsberg; identical to SEQ ID NO: 25518

SEQ ID NO: 174447 - DNA, 452 bp, Arabidopsis thaliana landsberg
  unsure (1)..(452): unsure at all n locations
tggactttccatccattcattctgaaaaccaaaaagatatacaccgttttgatatggtgcagagttctagcattcttagttgtaagttcctgccttaatagttatcgctagaactataatttaagcttgttgagattactttgtcttgttaatattgaagtttattgatgtttctgttttcaggcctgccagtttctccgtgttataactttctattcaactcagcttcctggccctaactatcactgccgtgaggtaaatcaactgagatacgtacatacacaatgtctcatctgtctaatcggttaagcttaattttgcgcacttttttctatagggctctaaagtttctaggttgccatggcccaaaagcgctcttgaggttctcgagataaccgngagtctactacatatttctctttccccagtcctagattgtgttacaggcattt

SEQ ID NO: 174448 - DNA, 1551 bp, Arabidopsis thaliana landsberg
ttttgcattccggtggatctattggatcgatattggtgtgggaacgtcacgatggtgaggacattgtagttgttggaatgcttagaggtcacacagagtctgttctatgcctcgcggttgtttcggacatactttgtagtggctcagcagataagacagtgaggttgtggaaatgttcagccaaggattattcatgcttggctatgttagagggacatttaggtccggttaagtgcttgacaggggcatttcgtgattcgcgtaaagcagatgaggcttcttatcatatttatagtggaggactagactctcaagttaaggtttggcaggttttggtgccggcctaataaaatagttacttaattatttcatttggattgttttctttcctatattgatgagtttatgagtttttgtatgagttcatcttttgggataatatgtgaattagtgtgtaatatgtgatgtactatgttcgttggatagaaaaagagggcttctatcacatcataatattgccattcccctgtttttttggtccaatttcggacaatacaattgcggacaatttggtatcaatataatctattaaaaccaagtaggtaacatctttgttaaagaaatatattctattggagcaaatagcgtataaaatatacataaaggaagacaagtagtttgtctaatcttgtattatttcattcaaaagtattttaaagaataattaagggtaaaagccatctctttatggaatttgctttagacaaaagtagtagagtttacatataaaaaatctgttattgttattcgttccttgtggttgtggaacatgcacccaaccatatgaggctaaaaagtagaaaactcaagctttttcgttttaggttgataaattactacccatattggaaattgcgtattaaatgtgaagttttatttcactttacggctcgtaaaatacatgatcgtacacaacatgcatgcatgcaaaatgaccaaaacaatgacccgaagtgtacgtgatctctattttataacatcatatacgggtataagaaactagattttgtatcggataccataattcaaatacctgacgatttcaactaaaaagacaaaaacgtttattaaacacaagatagacaattggaggccacacgagcaggaaaggaataaaacgtagtaaagaaagtatagattgtgggaaaatgatgtcatacaatataatgtgactataacctactctccttttgttcaacactgtgtcttcttttaggattctttaaattttgacataaaacaaataaattagatatggataagttaggtatccaagtcattatcaacatttccaagattatcattggtaatttgacctctagataaaacatcatttttcttcgtatggatacaagtagagcagtcacaaagagattagagacttgaataatttgctgacagcactaacatttttctaatttctcaaagttagaacaaattatgttactaattgccagcgacaattatataggatatacaaccgaagaatga

SEQ ID NO: 174449 - DNA, 446 bp, Arabidopsis thaliana landsberg
cgtgccgcgccgctccgacctgccgtcgggggaaaaaggcctgggcgaagccctggcaatcagcaagggcgtcaatttcgccaaggacctgggcaacctgccgggcaacctctgcaccccgacctatctggcggaacaggcggtgaagctgtccgagcaatatcccatcaccaccaaggtgctcgaagaatccgacatggaacagctgggcatgggctcgctgctgtcggtggccaaaggcagccgccaacccgccaagctgatcatcatggaatacctgcatggccccaaggacgaaaagccgatcgccctcgtcggcaagggcctgaccttcgacgccggcggcatttcgatcaagcccgccgcgaagatggacgaaatgaaattcgacatgtgcggcggcgcgtccgtcttcggcaccatcaaggccatcgccgaactcaagc

SEQ ID NO: 174450 - DNA, 279 bp, Arabidopsis thaliana landsberg
atgacaagcttgcacaaaaccctcttcacacaaaatcccactactttagatcaacgtaagttctttttttctttcccttaattgattacgttaatcggtcaaattaatagtggatgtgtgattttgttagtcatgatgtgccacacgggaagagacaattcatggaaaaaactagaaaacatagacgaagaaggtccatcgacggtggcacgtgaagtgaggacggcgttaccaccggagacgccaacggagatgatggaggtcttggggagaccaccg

SEQ ID NO: 174451 - DNA, 424 bp, Arabidopsis thaliana landsberg
tcaatgaaagtgctgcgaaaagaataaagaggacaaccgactcagacattgtacagattgagaaggacgttgagcagattgtgttgttggatgatgaagaacaagaagctgttctggataagacggaatctgaaactccagtcgtggttactacgaaaagtcttgttggtaatcgaaacagttcagatgcgagtttgccaattactcccttcaggtcagatgaaatcaagaaccgtcaagctagaatcgaaatatcgatgaaagacacctgtatcaacggtgatcattcagcgaatggaggtccagaaagtggattagagcattgtgtgaagatcataagacaactcgagtgttcaggacatataaataagaatttcagacagaagtttctgacttggtatagcgtgagagcaacgcactatag

SEQ ID NO: 174452 - DNA, 952 bp, Arabidopsis thaliana landsberg
gccgcctgtggtaacggcgttacggaagagtcttagtttgggaaaccttgatgctcttctcgctaacgatgattgtaacggtagcggtgatcctatcgccgccgttgatgataccggttatcattccgatggtcagattcattccaagaagggtaaaactgctcatgagaagaaaaagggtacgtaatcttctaatctcatcaatttgataatctaaattcaatgaaattaataagaataaatcaaattcagggaagccatggacggaagaagaacatcgtaatttcttaatcggtttaaacaaactcggaaaaggagattggagaggcattgcaaagagtttcgtgtcgacaagaacaccaacacaagtcgcaagtcatgctcagaaatattttattaggttaaacgttaacgacaagagaaaaagacgtgctattctctttgacatctatctcgaagatcaggttcttatttaccttgtttctcaagtaatccattgagtcaattgatttgtctagggctattttttaatttagggtttaattgttttttcattaaacagaaggagaaagagaggaactctcaagatgcttcaacaaagactccacctaaacaaccaataaccggaattcaacaaccggtagtacaaggtcatactcaaaccgagatttcgaacaggtttcagaatttatcaatggagtatatgccaatctaccaacccataccaccttactacaactttccacctattatgtaccatccaaattatccaatgtactatgccaaccctcaagtaccggttaggtttgttcatccttctggtatacctgttccaagacatataccgattggtttgcctctgtctcaaccgagtgaagcttctaatatgacaaataaagacggtttgggatcttcatatcggtttgcctccacaagctactggagcttctga

SEQ ID NO: 174453 - DNA, 803 bp, Arabidopsis thaliana landsberg
gcaagtgctctttttatgacaggaattgttgatatgtgtaggcacttgcacgaggcatgttcaccgtctatggacaatgatgcataagaacatcaagtcttctaacattgtctagacgcagatctcaaccctcgtctctcagattacggcctctcaaaattctaccttgtgagcattaagttctctttaattttgtagaaatttggatttagttatgacaattaatatattatatggtgtgacagagaacgagtcaaaatctagcagaaggatacaatgcaccagaagccagggacccttctgcttatagaccaaagagtgacgtctacagctttggcgtcgtcatgttagagcttctcaccggtcgagttccatttgacgggtcagtttcattttatagcaatagggttaacaattaggttgagctatcgattccgtgttaaatacatgtacttttttttctgctttaagaaaaattggtttttctgttggcttgtgatataaacagagagaagccaaggccggagagatcgttggtacggtgggcgacaccacaacttcacgacatagatgcattgtcgaatatagcggatccagctctgcacggactttacccaccaaaatcattgtcaagattcgccgacattatcgcattatgtgttcaggtggaaccggagttccgaccaccgatgtcagaagttgtggaggcgcttgtacggatggttcaacggtcaagtatgaagcttaaagatgatctttcatcgtcttatcgagcccacgacgattatgattactagagttaa

SEQ ID NO: 174454 - DNA, 456 bp, Arabidopsis thaliana landsberg
cgacaccggcgctatcgaccgccccatctaacccctcttgcacagcgcaacggccacggcgtaaaaatatatcgtggagcgatattcttttcacactttcaggttagcttaaggcttcgaccagactctggtcgcacccacaaacctccatctagggaaccgcctccgggcggcgctatcctttgcaaccagccttgcgccggctcgcacaggcatgtggacaatgcctggtcgccctcacgctcgccctcgtcgcaacccccgtccaggccgcgccggccgaacggttcgcggccatcgtcgtggacgccgaaaccggcgagacgctctacgcgcgacacgcggacgccaaacgctacccggcgtccctgaccaaggtcatgaccctcttcctggccttcgacgccatcgacgcgggtcgcgtgcgcctgaacgatcccgtgcgcatctctcccc

SEQ ID NO: 174455 - DNA, 393 bp, Arabidopsis thaliana landsberg
ggaagtggaggtggaggtggaggtggtggcggtggaggtcgaataagtggtggaagttcacctcgcagacacgtgcagagggctagatcgagtgatgatgggaaagaggatattgaacatacaggtatcttgagacttagaggattaccgttctcagcaggaaaggaagacatacttgacttcttcaaagatttcgagctgtctgaagactttgttcatgttactgttaatggtgaagggagacccactggggaagcttttgtggagtttaggaatgcagaagattcacgagctgcaatggttaaggataggaagacgcttggcagccgttacatagaattgtttccttcatcggttgaggagttagaggaggcactatcaagaggaagatga

SEQ ID NO: 174456 - DNA, 565 bp, Arabidopsis thaliana landsberg
aactcggcagctcgagttggacggcactcccgcgaggttggtgggtcctattggcaagggcgttgccacgatctcgtcgctgttcaatgtgacgcgcatttacaattcgatcggcagtgtggccgccatgcggtgcgtgacttgttgtcgagcaactccacgccgagtaacgagcacaggtcgggcattgcaatggcgcgcgactatgcacaccgcagaagggtctttggaaagctgctcgctggttcgcttcttcacagactgtgcgaacccacttcaccactcgctgacctgcttttgtgcaagatcaaccgcttcacttgtccactctctccgcgttggaggtgacctaccgtggtaatctcttcttcactctggacgctgtggtcctccttggcaaaggtattcgcctcgcgaatcgaagctttcacatctgcttatgcgtggtagtcgaatgtgcaaaggcgacagcagaggaggaggagcgtttgcgcactctgactcccctcatcaaactctacacagcgaaagctggagtgtccgttgtctcaggtgacttccgcag

SEQ ID NO: 174457 - DNA, 531 bp, Arabidopsis thaliana landsberg
  unsure (1)..(531): unsure at all n locations
tcactcatctgccgtctccctccttacatccagactctggtcggctgcatgggcctggccacaagcttcnccgcgatgcctcgacacccacataccccnagtcctgggtcttccccngctgtctcgataccaaacatgcctagtcaaaacctgacagtcgttcggattccattgcggcgggccaagcatcactttggcacagcaaccgcccgaggaaaccgtccttcaacgaggatgcagaccaggcggggatcgttgacatgccagcctttgcaaagagggcgccaacaagcgtgaagcagaagccaggagagcctactgctgcagatagcgctcttggagatcctcaggtattctattttggagtctttgacggacatggaggagttcagtgctcccatttcctacgggatgagttacatggctatattgaagaagccgcgtctgaatttggcctccagagcagcctgcggcgaaagaaccctaagaacgtacccagaaagccagtgaccaagaaacaggccctcgatg

SEQ ID NO: 174458 - DNA, 519 bp, Arabidopsis thaliana landsberg
actccgacaatgaaggactcgccgccactgccttcaacaagtcatccctcttccccaacgagcgtcacacttcctcatggcaagagagaagaaggtaatcactcgtaatgatgtcacttatgattcttctagtgacgatgagtctagtgatgatgaaatagattactatagtttgttcaagggattggatagaaataaaattgataaaatcaatgaattgattgatgccttgaatgaaaaggataggcttttagaaaagcaagatgatttgttgtatgatgagcatgataagtttgtagaggcacaaaaatcctatgctttagaagttaaaagaaatgaagtactttctagtgaattatcttcttgtcatgaaaacattgctactttaaagagtgttaataatgacttaaatgctaaactagaagtagctagtaaatcaacatcttgtgtagaacatgttgtgatttgcactaggtgtaaaggttttgacattgatgcgtgtagtgaacacctagcttc

SEQ ID NO: 174459 - DNA, 1184 bp, Arabidopsis thaliana landsberg
gacgattgtggtataatcgtcttagtgagtacttgataaaagaaggctataaaaatgaccctgttagtccatgcatctttataaaaagatttgagaaaggatttgttataattgcagtttatgttcatgatttaaatattatgggaactcctgaagagatttccttcacagcagaatatttaaagaaagaattcgagatgaaagatcttggaaaaacaaaattttgtttgggactacaaatcgaacacctaaagaatggaattctggtgcatcaaaagacatatacagaaaatgttctcaaaagattatatatggatggagcacaccccttgagtagcccgatggttgtaagatcacttgatgtggataaagatccattccgccctcgggaaagcaatgaagaagttcttagtcttgaagtaccatacttaagtgcagtaggagcactgatgtatcttgctagtcatacaagacctgatatatcatttgcggtgaatttattagcaaggtttagctcatgcccaactcgaaggcattggaatgaattaaacgtatacttcgttaccttcaaggtacaaaagacatgggtctgttttttcctaaccaatccaaggaagatttaattggttttgtagatgcaggaaacttatctgatctccataatggtagatcgcaaacagaatatgtcttcacatgcagggatactgctatttcttggcgctctatgaagcaaactattgcagtcacatcttccaatcatggagagattttaacaattcatgaagctagccgcgagtgtgtatggctaagatccatagttcaccatatacaagaagactgtggtatgtatgcggagaaaaagactccaacaattatgtacgaagacaatgcaacatgcatcgcataactcaaagacggatacatcaaaggcgatagaacaaagcacatcctaccaaaatgcttcttcacacacgatctacaaaagagcggcgatgtacgagttctacagatccgttcgaatgataacctgactgacttattcaccaaggcgctacctactactactttcaagaagttagtctatcgtttcggattacaccgtctcaaagatctcgacgaatatactcataagggggagtaattgtgtgttgcactctttttcccttaaccatggtttttcatgg

SEQ ID NO: 174460 - DNA, 426 bp, Arabidopsis thaliana landsberg
  unsure (1)..(426): unsure at all n locations
ctcatcagtcacnctctccagatactcaaactcctgtatttatatcaggctgagcaatgaatctcatttcgttgcttgatcatgtgccgccatgtaattttcttgtcagcaggtgaacaaagtcaaagcaagtggagtcaagaaacaggcctccagattagatggatgcgtccccttcctatacgagtgcaaacgagtaagttgtaactcaacagcgtctctagtggaagcgaccaccacaggagctgccatcctcaacagggttcagcaatatgaggcagaaccaatgatcgagattcgatcgcaagacggtcattctttacaaatcctagatgagagtttggatttctatcaaatacaacagcagctaggagagccagcatcgagtaaatagtctaagggatacaaaacagccccagcgagatt

SEQ ID NO: 174461 - DNA, 185 bp, Arabidopsis thaliana landsberg
atgttcgccggaatcgtccagggcgtggccaccatagaggccatcgaagacaaggaagggctgcgcacattcgggctgcgtttcccccaggggttcggcaaggatctggccgtgggcgcgagcgtgtcggtggatggcgtgtgcctaacagtaacacgcgctcctcgtcgcctgattcagccagt

SEQ ID NO: 174462 - DNA, 785 bp, Arabidopsis thaliana landsberg
accaagaactgcttccacagcttcttgagcttgttcaagggtatgccataacatctttcttgtttcctgaaaacatatgtttctctttgactgacaatggcattttacagattagctcagatgtggaaagtgatggcagagtgtcaccagatacagaagcgaacattggacgaagccaaactattacttgcaaccacaccttctaaccgtcacaagaagcaacaacagacttcactaccagagatcaactctcaaagattagctcgatcagcattgcatctcgtggttcagcttcgaaactggagagcctgcttccaagcatggatcacatcacaaagatcctacatactctctttaaccgggtggttactcagatgtttcagatgtgaccctgacccagagaaagtcacattaacgtcttgtcctcacccaatttatgaagtctgcatccaatggtcaaggctactcaacggattaaacgagaagccagtactagacaaactcgacttctttgcctcagggatgggtgcaatctatgctcggcaactaaaggaagacacgtctccggtaacagattcttcgaggaagtactcaagaccagagagcatggagcttgttgaagctgagaaagtggaagaagagaagataatgactgcagagaaactagctgagattgcagttaaagtactctgccatggaatgtcagttgcagtgagctcactcgccgagttatccattagctcagccgatgaacactcgaagctagttacccatcgagagagaac

SEQ ID NO: 174463 - DNA, 509 bp, Arabidopsis thaliana landsberg
  unsure (1)..(509): unsure at all n locations
gacaccattttcctcagccattttctttgcctttttactaacaagatccaggatgccgctgttgcagtcggtacgtaaaagtccataccatcactacacgcagctaaccgttatagccgccggcctcaacctcacggagccctgctccacgggcatcggaggcgacatgtttatcctcttctgggacgccaaaaacaaacaagtcaaggccatgaacggctccggccgcgcgggcgccaagtacacgctcaaccacgtccgctccaagctcggcctccaggacggcgacgtcggccccatccccaagaacagccccctctccatcaccgtcccgggtgccgcagccggctgggtcgacannnnnnnnnnnnnnnnnnnnnnnnnnnnnnnnnnnnnnnnnnnnnnnnnnnnnnnnnnnnnnnnnnnnnnnncgggattaccagtctccgagtgcgccgggtaaagcgtccgtataacctcaccattcctcatatccccccctctgtcct

SEQ ID NO: 174464 - DNA, 592 bp, Arabidopsis thaliana landsberg
  unsure (1)..(592): unsure at all n locations
aagggttgtaatccatggaaaggtgggtttgtgcctgacaatgtagctttcaaagaatctggggtaaatgcaggcggttggcanacatgtagagtgagtgagacaaagcaaatanattgggatgtgaaacgagccagtgatggttggggtaggcaaaatgacaatgcagctttgagagaatatggggcaaatgcaggtgattggcaaagacgtagagggtgtgagggaaatcaaagaaactgggacgcaaaacgaacgggtgatggttggggtaggcaaaataaggaaagagttgactcatatggctaccattctaactacaaaaactcatggcctagaagagatgattatcagaacaggaaggtcaatttctcaactaagtaaaccaaatgatccattgttttttgttatgtttttttatttttttgtgtttgaagtcttagcttgttatggtctgtgcaggcagtgtagttttagcttagcctttgacttccatgttaacacaaaaggcatggttttgtgtttacaattcagaattagcatatgtagagtatataggagtaccctttatgatgataatgtctcatacata

SEQ ID NO: 174465 - DNA, 1276 bp, Arabidopsis thaliana landsberg
atgccgaacaaacccaggaggcggaggcgatcggtcatcgatacaatgtccgatgttaaattcaatcaactacactgtatgggccataaggatgaaaagtacgcttaaggtccataaggtctgggacacgataaagaacaactcaactgatatagagaaaaatgatatggcctcctcctcgttgttccaatctatacccgaagctctttctacaagttggtgaactaaacacggcgaagaaagtatgggactacaataaaacaaagaatgttggagcaaagagagtcaaagaggcccgactacaaacgttaatagcccaatttgattgtattattatgaaagactctgaaacaatcaacaattttggagaaagactctgtgtcatctcatcaaaatcggcagctttaggagtcaatatcgaagaatcaatcctagttaagaagttcttaaagagtctacgttgcaagaagtacattcaaaatcgtggcatccttagaacatgtcctagacccgaatgctacaagtttcgaagacatcttgggacgtttgaaagtgtataaagaacgaataattgacgaaaaagaaacaaaacaggaaggtcaaggcaaacttatgtatgcaaacttggaggttcaaacgaatcagtacaaccgagattataacaatgattatataaaggaagaggtcgaggaggaagctcgttaaggtcgtttcattagttccaacggaggaagagacacttcaaaggtaacatgttatcagtgtgataagttaggtcactttgcctctaattgtcatgatcgactacttaagttacaagaagctcaacagaataatgacacacaaaatgcaaacgatcttatgatgcatgaggtggttttcttaagcgaaaagaattgcaaaacaagtgattatgaaacaaacaacgatgatgagaacatttggtatcttgataacggggtaagtaatcacatgaccggtgaccaaatgtattttttgatgattcacaactcaatcaaagaaaaagtaaggtttggtgacgacctatgcatagacatgaaataaaaagggtcaatatcattcattgacatgaacggagaatctcgagttatgagcgacatgtactttatttcaaacttgcggagtaacatcatcagtggaaagtccgcttttttatatccaaccaaagtatcagtgttcaatttataccctacagtttgctctgtgctaatatatgcctaagcgtttacataattcaaaattcatacattaactt

SEQ ID NO: 174466 - DNA, 624 bp, Arabidopsis thaliana landsberg
agggaggagtttcaaaggcatagaaggcagagccaaaggggttcaagctgggtttagccaaggagagccaaaccggtaagaaacttcattcttgctctagagaaaagaaacagagtagtagtaggtctttgaaaaggggtcagagcttcaagaaaagtggtaggattggtcgttgttgggatgcgaatgtgcatagagcaacttgttcttcgtgtctcaaaaacacaaagttcacagaggatctgatgttcacttctcctcatatcttgaaagtctgtccttatacgtattgttcactcaacgcgcattttcactgccaattcccacctcttttaagctttatatccgaaaggagacgctccttgaagtcccatgcaagtggtgaatgtgatgatggttgtgtggaaatctatgttgatgagaagaaagaaaatagaagcactcgagaaactgatatcaaagtaatcgattcggaggctgagaatatagaggtggaattgggagaggttaaagatttagattctgagagtgcagagatagtgagcttactagaaggtgaaggcagtgggtcatgtaactttgcagtttttgaacaaacaacaaattttagtgaggatcgggagc

SEQ ID NO: 174467 - DNA, 411 bp, Arabidopsis thaliana landsberg
  unsure (1)..(411): unsure at all n locations
atgttgttccgatttcttcaaacactggctcggttctgccgcttcttgctcatttcggttcttgggttccgtttttctcctttgcttcttcttggttacgtaaaactgcaagacgaaaataagcacaacagggagtcagcacttgcatcagggactgacgcaaaacaaccagaagcggcagaaaacgtgacatcttcttccattgattttgcggtaaattcagtggtgaaggtcttcaccgtctatagcatgcctagcgttttgcaaccttggcggaattggccgcagcaagaatccggcggctctggtatttgatgtttatccataattcttatcaactcttttaagagtcgcgcgcataagtattttcctaactgatcctngnaactgatgtangacttgtaatctcgg

SEQ ID NO: 174468 - DNA, 756 bp, Arabidopsis thaliana landsberg
gcgcgatttactggaaccatggacttaattcttcgtttagctcgaatctatcgtctcctagattaagtttacagactaatggagttgtttcgatcttcgaatcaaatcttcttggaggagctgaaatcgtttatagtggcgattacggtgatagcaatacgtttaggttcttgaagttagatgatgatgggaatttgagaatctacagttctgctagtagaaacagtggacctgtgaatgctcattggtctgctgttgatcagtgtcttgtttatggatattgtggaaactttgggatttgtagttacaatgatactaatccgatttgttcgtgtccgtctcgtaactttgattttgttgatgtgaatgatagaagaaagggatgtaaaaggaaagtggagctaagtgattgctctggcaatacaaccatgcttgatttggttcatacgaggttgtttacttatgaaaacgatccgaactcggagagtttctttgcgggtagttcgccttgtagagctaattgtcttagtagtgttttgtgtcttgcttctgtttccatgtctgatgggtctggaaattgttggcagaaacatcctggttccttctttactgggtaccagtggccatcggttccgagtacttcttatgttaaagtgtgtggtccagtggtggctaacacactcgaaagagcaacaaaaggcgacgataacaactcgaaagtgcatttgtggattgtcgcggttgctgtcatagctc

SEQ ID NO: 174469 - DNA, 1526 bp, Arabidopsis thaliana landsberg
  unsure (1)..(1526): unsure at all n locations
atggagacttctcaaaaggtgattactacggtgatacttaaaggagggaactacttaacttggtcaagaacaacaaaaacggtgttgtgtggtcgtgggctttggagccatgtaatttcatctcgagctccaaaggaagccaaagaagaaggagatgaagaaggaacggaagttctatctcccgaggaagagaaatggttccaagaagatcaagcggtccttgctcttcttcaaaactctcttgaaacctctattctagaaggatactcgtattgtgaaacggcaaaagagttgtgggatacactcaagaatgtgtatggaaacgaatctaacttgacccgggtgtttgaagtgaaaaaggcgatcaatgagctaagtcaagaagatctagaattcaccaaacactttgctaagtttagatcgttgtggtctgaacttgaaagcttgagaccgggaactcttgacccgagggttctccacgaaaggcgtgagcaagataaagtgttcggacttcttctcaccttaaatccgggttacaatgacctaatcaagcacttacttagatcggagaagttaccaagtcttgatgaggtatgctctaaaatccaaaaggaacaaggttcaaccggattgtttggtggaaaaagtgaactcatcacggctaacaaaggagtgtacaagaatgaagatagaaagatgctgacatgtgaccattgtaagaagaagggtcacaccaaagataagtgttggttattacacccacatctcaagcccgccaagttcaaagactcaagagcccatatctctcaagaagctcatgaggagcaaagtcaatccgggtcatccaagggagagacatccacaatatcatccggagattatgtgaggaagtcggacttggaagctctcatcaagtctatcgtctctcttaaagaatccggtatcaccttcttctcacaaaaacctagtagttcaattgttatagattcgggtgcttctcatcatatgattagtaattctaatcttcttaacaacatagaaccagctctaggacatgttattattgctaatggtgacaaggttccaattgaaggcatagggaatttacgactgtttaataaagattcaaaagctttctttatgcctaagtttacttctaacctcttatccgtaaaaagaacaactaaagacctaaattgctatgctatttttgggcctaatgatgtatattttcaggatattgagnnnnnnnnnnnnnnnnnnnnnnnnnnnnnaaaaggagaactctatgttcttgaagatgtgttaccaaactcttctagttgtttctcttctaaatcgcatttaggcatttctttcaatgttttgtggcatgctaggataggtcatccacatactcgagctcttaaacttatgttaccaaatatgtcttttgatcatacaagttgtgaagcttgtattcttggtaaacattgcaaatcggtttttcctaaatctcttactatttatgagaaatgtttgatcta

SEQ ID NO: 174470 - DNA, 755 bp, Arabidopsis thaliana landsberg; identical to SEQ ID NO: 21666

SEQ ID NO: 174471 - DNA, 572 bp, Arabidopsis thaliana landsberg
caaaaataattgaatcattttacgaaaaccaaaaaatgtgggcattcatacaaaccatctcatggattagaacgggagaagtatttttcttaacttcaaaagtatttaaatgtgttttatctttgtatctttcattgtttgatcatttaaccaacttaaaatttatttcggttatacaatttattagactaaacatgaggttttagtatggaaattgttcctaatgttgtgttacaattcatggagcaggggacaggtatctaaaaccaatggtagcatgggaaccagaagtaacattcatgagaagggaatctggagatgaatgcttagtattagcaagcgatgggctttgggatgtactctcgagtcagctagcttgtgacatagctaggttttgtctccgcgaagaaactccctcgagccttgatttaaatagaatggctcaagaagacgacaatgacggagaacaaaatccttcaaggagtgtattggctgcaacgttgctaacgcggttggctttgggtagacaaagcagtgataatataagtgtggtcgtcattcatctcaagaat

SEQ ID NO: 174472 - DNA, 367 bp, Arabidopsis thaliana landsberg
tcaaacctgatgtttcacattcactgccatgattaaaggatttgtcagtgaaggaaaattagatgaagccataacgtggtacaaggaaatcgagaagaatggttgtcgcccgttgaaatttgtctttaactcattgcttcctgcaatatgtaaggcgggcgatttagagtctgcttatgagctctgcaaggaaatatttgctaagcgtctgctagtcgatgaggctgtcctgcaggaggtagttgatgcattggtgaaagggtccaagcaagacgaagctgaagagattgtcgagctagcaaagacgaatgactatttgcagtgcaagcttcgtgtctttcccaaagagtagttaattggcaaggct

SEQ ID NO: 174473 - DNA, 541 bp, Arabidopsis thaliana landsberg
  unsure (1)..(541): unsure at all n locations
gagnnnnnnnnnnnnnnnnnnnnnnnnnnnnnnnnnnnnnnnnnnnnnnnnnnnnnnnnnnnnnnnnnnnnnnnnnnnnnnnnnnnnnnnnnnnnnnnnnnnnnnnnnnnnnnnnnnnnnnnnnnnnnnnnnnnnnnnnnnnnnnnnnnnnnnnnnnnnnnnnnnnnnnnnnnnnnnnnnnnnnnnnnnnnnnnnnnnnnnnnnnnnnnnnnnnnnnnnnnnnnnnnnnnnnnnnnnnnnnnnnnnnnnnnnnnnnnnnnnnnnnnnnnnnnnnnnnnnnnnnnnnnnnnnnnnnnnnnnnnnnnnnnnnnnnnnnnnnnnnnnnnnnnnnnnnnnnnnnnnnnnnnnnnnnnnnnnnnnnnnnnnnnnnnnnnnnnnnnnnnnnnnnnnnnnnnnnnnnnnnnnnnnnnnnnnnnncgaaaagtgtcaggctggagatgggagtgccgagccttacattgtttcacaccacactcttcttgcccatgccgctgcagtaaagaaaaatcgaaaatgtgaaaaaacttcgcatgatggccaa

SEQ ID NO: 174474 - DNA, 1755 bp, Arabidopsis thaliana landsberg
  unsure (1)..(1755): unsure at all n locations
ttttcgggatggcggccgtggtagtgagttgcatttttaaatgttataatactcatgatgatgatcagggtcaggagaacaacaacgatgggcatgtcagcatcaccatcaaggaacgtgtcggtataaagccttacgttctacgatcgatccctatcgtagacttcaataccaaagacttcaaatacgtcctcgaatgcgtcgtttgtctctcagagctagccgatggagacaaagctagggttttgccgagctgtgatcactggtttcacgttgaatgtatagactcctggctgcaatcaaactccacttgtcctatatgtagaaagagagtttgtttgaagcagtcaagaacgagaccagaacttggcggccgcgacaagagttttaaccaaaaccacgaccaaacatccgaacatcatgagttttcgacagatcctccgacgaacacagtcacggcaattattgaagatggtggttgcggcgaagcaaacgaaggtcaaccagaattaacggcggtggtgatagacattccggcgaaagagatataaatcaggcccatgctaggcattatgggcccattatatgataatatactgtccatgtattaagctaccgtgacatcactaaaaagtgataaataaattatttttttggtacaagacttatgatatacactaatatactatggtagtagtatatctcaacttgcaagaaagatactaggaacgactgatactgtgaatgtcgcgatgaatgtttttcttttaataaatgtataaatcttgtagtagtaacttttttttagaaacaattacatttcccaacgctctctactgacacaatttaaatagataaactgtgtatgtgcagcagcacgttcaaagcgtgaagacaaacaaatctatcaaccaaacaaagtgacctttataaagaataattggcagaggttttattacaacagacaatttttcataaaagtagtgtggaaataggtatcttcaaaaaattagttgtgagaatataaattttgttcactactaatattttaaattctaaacaatttgatacaacatacatcaaaggggttatttaattattgcaaaaaatgtcttgaaattttaagtagtctgtaattaacctaaaagtaaatgttcataccaaatatgatatttttgttatttataaacttatggtagtttttatatttattatttatttttaaaattgcctctctcttttttttggacatcagtctctcgattactgcattggatgccctgtatttgcaacttgttgatagaaaggattacgcaagttgttgctgtcaacaaaaagagattatgcaagttgttatgtttaatatacccgttacacaatttatcactttttccgtaaaataagttccccgccttaaattagctactctagataatgaaagattaatgataaagaaggaatcaaattattcacatgattgtaacatcaacttttgatatattagaaaaaaaaacacagaaaagatcgccaaaaaaagaagaaaaaaaaaatgaaagaaagcatgtgatgattaccagtttactgtatgcttttctaaacgagggaacaaacttcattcataactatttgtagcattttatcctatatggctataattcaataatgtactngtatccgatacttggatttaggatacaatctctcttatttcattttctagatttgggccattaaactaccgacactgaaataaac

SEQ ID NO: 174475 - DNA, 1573 bp, Arabidopsis thaliana landsberg
tttagtgtttccaaggagatatttttacactaagaggcagaaagatgcaaatgtcgatgaccaagtataggcacatttgatttgaattcttctatgtgatgtgttcttcatttgtctagtaaccatggaagatgaagaacaaatgttttgttgatgttctgtttttatctatgttaacattgttaagttgttctttgttgctttttggtgattcatgaagtccatatctttaattctttctcttgtgcagattgttctgaacaaagtgttaattgtgggcacaaagacgcacacttacatcggtaaaccggttgtcaccaatctactttacatgctgtagtggaaaatcaagtaaagtcaatacacaacacgacatggtttttcattggttttgtcgtcttcatttctttggctatagatattgggttttagacttgaaagatgttctggaaacttgacagcgagatctttccatggacataaagatcatcttctagttgtcttgctgtttgatgggaaattgtttccaaagttgactgcttgcaggtttgttaccttccggctctgtcttagtaaattggttataactttcaaaccgtaaatctaaaccgtgatccgctttttcctgcagtttcgtatgactgttgttgatattcccaccaaattgtttaattttctgggttgatttgccactccgtttatggtttgaatcaagacagacggaaactagagtgaaggcgaaggcaatgcaaaaagagccggtgtagagaacgattggcaagaagagatgaaacaaacagcaaagcttttgatgtcgacaaaagtacctagttaattgatctttctttattttctgaaattaagtttttagtgatttgtttttgaatctgaagactgtaaaatacaaatggtattcaacacttgcaatgtccattgttacatgttatggtttaatttcttgtgcaccatgttatgagcctgcactattcatccatttcttttgtaccatgttttgagcatgcactattcctccatgtaaccaaataagattaatattatgcaacttcgaagcaaaccgaacctcacaagtcgatttatcatattctactatacctacaaaactcagagattttatggatatttgaaatcaagttcgttatcgagagatgcatctacaattgaaaggtgatttgcttgagcatatatgcaaaaaaaattgcaacaatcgacagaacaattgatcgttattccgatttttgttttgcacatctattttaaaatgtttcaaaataatgtatgtttaatattttatgatttgcaaataattattaagttatatgaaataaataattttaaaataataatattttttcagagaacctacataagaaagactaccattagagtatgaaaaacaaaaaaaaatacacaaaaactctcttgtaacatttttggaaatttaatcataaaaaaatggagagagcccatagagaggctctcaatgaggctctctccattggagatgctctaagtaatctgaacgatttgtatgatgaaagataagctcacaacc

SEQ ID NO: 174476 - DNA, 1611 bp, Arabidopsis thaliana landsberg
gtcgtcgtcaagcggcgtcagagaaagtctctctctagtgtctaactgaaaaaaatgcaatctggcggcgatttcagcaacggtttccacggagaccatcaccgcgagcttgaattggaagacaagcaaggccccagtctcagctcttttggccgagccaagaagcgcagtcacgccggagctcgtgaccctcgaggcggtctcgccaatgtgcttagggtttctgaccagcttggcgagcacaagtcattggagacttcggaatcttctcctccgccttgtactgacttcgacgttgcctattttcattcctatgctcacgttgggattcacgaagagatgatctaggtactttctttcgcattcttcttgtaatttagggttgaatttctctttggtttagggtgggtatgtatgtaattgctctgttgctctattatatcatcaatttaggatttttcacttctttgcggaatgttcttggttgatataggatcgggcaaggacagaaacttatagggaagccataatgcagcatcagagcttaatcgaaggcaaggtaatactctcgttactgtaatttctcaactatggtcttaaatcttcacaattgatatttgaacaagattcaaattgggactgttgtttacttttagcttagcctgtgtgtataacgtggtagtttattgttttgtttgaaaacctaatgctgcattgaatgcttgtaacaggtcgtggtggacgttggctgtggaactggcatcctttcaatcttctgtgctcaagcaggtgcaaaacgggtatgagttagttacatctgtagttctgtacacaaactttttatattgatgttgattgtttctctgtgtctgttgtttatatattccataagaccacgggggtaaaccaacactgttaatgttttcttacaaaacttcattatgcttacaggtatatgctgtagatgcaagtgatattgctgtccaggtattattccagctgttcgtttcttttcttttttttaatccagtaatttgaagattaggattgctacccttctatcttctgcattttcgtgaactgatgaggctgaccatttttttaattcataaactgtaaatggctcgggggattttataatttcaccagaacatgttttcttatgtaaaattgaaacttggaatagagaaggagttctttgatataatgtgttgcattttccctttggtgggagtttgtttagggtatgatgactgtttttcttattgtctaaagtgaggccctagattgaaatgttcacagttaagttgacccaggcttcgtttatatcaattagttttaatctaaaatcttagtctctgaattgcttcatggtttgattacctttgacgtcagttaaatcaatgaagaaaaccctgcaaatgtttctgatatttttggtcctgtgaagctgagagaatttataacgaatctggtgctttagctctgcatgtggttttcatttggtttttgttccctataaaaataaaagtggtttgtgaaatcttagtttgttgaaaggattccactcactctttttttttgtgaacaccaccagaaaaaggaagttgt

SEQ ID NO: 174477 - DNA, 328 bp, Arabidopsis thaliana landsberg
tcttccaagattggtcaaagatctttactcagccttgctttatttcatcttttcaccacaagaaggttgtagaagctcgcttttctcggcgacagatcctcagattccaaaccattaccaaaagctaaaaaccaatgagaaatctgtttgcacattattcatatctctaaattgcaaactcacgaattgttctgaagaagctcaaaacgttgaaacagctaacagagtttgggaaaagacattagagttgatcggtcttccttctgatacagtggaaaggcttgtggagggagaagtggtcaagtgtcgttatcgaactcattaattc

SEQ ID NO: 174478 - DNA, 682 bp, Arabidopsis thaliana landsberg
  unsure (1)..(682): unsure at all n locations
ccctcaattaaactagaanttatcaaacgggaaaaatcttgtgacgggatttgtcaagcgtgatcgtagaaaatatgaccccgagtactgtaaccccgagtactggagggtactaaggttaacaacaggcgaaatttctcattttctctgcccaagttgcgaaggtgataatcatgaagaatatgagaaggctccacttgaggtcaaacaccctcttcatccaaaacattctcttcagcttatcttggaaaactcgtggggatgtcgaaaaaagaaatgctattgttgtgatgaaatactcctatggatattttattactgctgggtttgcgattgtggtatgaacatagcttgtgtggagaaactaccgctcttatcaatacaccatccgaagtggcatgaacatacactttctctgtttccaatactcatatccttaacttgcaacgtatgtgccttggagcatttcaactgtcctttctatatatgttccccatgtgactttgtggttcatcaaagttgtatcaccttaccacgtgttataaggatatctcgccatctccaccgtatctcctttactccttcatttgaacaaggagattggtcttgtggtgtatgtcgcaaaaagatcgacaatgattgtgggggttattcttgcgtaaacagccgtggttcgtttgtg

SEQ ID NO: 174479 - DNA, 934 bp, Arabidopsis thaliana landsberg
  unsure (1)..(934): unsure at all n locations
atccatttagcgtcaagcaagatgcaaacgggtcagtatacttctctcatttacaaagaaacttcaaacgttcattgttagtattaacatcagaggggtcactgaaggttactcatcataatggcacggactgggtattgaacattgatgttccagctaacacatgtgatttttacggtgtatgtggaccttttggattgtgtgtaatgtccattcctccaaagtgtaaatgctttaaaggctttgtaccacaattcagtgaggaatggaaaagaggaaattggactggtggttgtgtgaggcgtactgaactacattgtcaaggaaactctactgggagacatgtaaacgtcttccatcctgttgccaacataaaacctccagacttttacgaatttgtgtcctccgggagtgcagaagaatgctaccaaagttgcctccacaattgttcatgcttggcctttgcttatattaatggaatagggtgcttaatttggaaccaggagctaatggatgtaatgcaattctctgtgggaggagagcttctttctatacgtcttgcaagttctgaaatgggtatgccatacaaaaataacatcaaacttctttgtcatttacaacttttacttcattttcactgattagcattgcttatttgtttattttttgtcttatatatctcaggtggaaaccagcgcaagaagaccattattgctagtattgttagcatttctctttttnnnnnnnnnnnnnnnnnnnnnnntggtttctggagatacagattgaaacataatggtaacatattgttgactttactgtgagcttttgcttgatggttaaatacctaaatgttaagcactaacacatgaattcttgaaactcgaatcaacaattgtatcgaaggtttctttacaaggtgcatggaggaatggtt

SEQ ID NO: 174480 - DNA, 724 bp, Arabidopsis thaliana landsberg
tctatccgttaagagaagaagaagattaaaaattcattccagggatttaattaagagagaagttgtgtttgaaacagagtgactctgttccaggggttattcttggaaggaatgaaacacacctctgcttcaatggctacagctatgcctaatctctgccctgctttcatttttgtcattgcttgggctgctgggtaaatcttttacttttgtgttaatctaatctgtttagtgtttgaagattagagctttcattaatgtgttatttgaataaattgtaattgttaaggatggagaaagtgaagctaagttgtatgtatagtagagttacgatgggagggacagtgttgtgtgtgatgggagctctcattatgagcttaatgcacagtactaccgctactttaagctcggttaagactatacctattgtccctgacgaagtcgttgtggacaaggacaagatcttaggttgcctctatctcccccttgccatttgcggcttgtcctctagtattgcccttcaggtttcgccttataccccttcttagccctagagctatcatatatccggtggagctaattaatctgattctttgcttgagaaatcactttgatcgacctaatttggcatccatactagccgagtttccggcgcctataataaagttctcgatggtatctttgatgggtgggatcaaccaacaatactttgcagtatgctctt

SEQ ID NO: 174481 - DNA, 569 bp, Arabidopsis thaliana landsberg
aaaaatagaattaaaaaaaacaaagtagaaaatgaataaaaacatataattgtaatgataataataaatataaacatacacatgagtaataagaacattaatagatatatatatgatgaaagtcctatcgtatataaagagtacgagtggcaaatgaattagtacaaggcaatggaaaaagagcaagattcgcaatgatcatatcagtgacacaatcgttaatcattggaataatcatttcggtgctcatatattttctgcttgaccaaatcggttggatgttctcttcaagtgaaactgtcctaaaagcagtcaataatctctctattcttttatcctttgcgattcttctcaacagtgtccaaccggttctctccggtacgctacataaacaaattgatttggattttttttctttgttaacccaatataaacgtgttcaacggttgtgtggtgacttttgattttgcttaggtgttgcggttggttcgggttggcaatcaccactggcccctataaatttgggatgctactattacattgaaacttccacttggaattgtcatggc

SEQ ID NO: 174482 - DNA, 585 bp, Arabidopsis thaliana landsberg
gacatcaaagctgcaaatgttatgttggatgcagagttcaatgaaaggttgggagattttggtatgtccaggttatatgacagaggggctgatccaagcacaacagctgcagtgggaactgttggttacatggcacctgagcttacaacaatgggagcttctactggaactgatgtgtacgcgtttggtgttttcttgcttgaagtaacttgtgggaggagacctgtggaacccggcttacctgaagcaaaacgttttctgatcaaatgggttagtgaatgctggaaaaggtcttctttgattgatgctagagatccaaggttgacagaattctcatcccaggaagtcgagaaggttctgaaactcggtttgctatgtgcaaaccttgctccagattcaagaccggccatggaacaagtggtgcaatacttaaatggaaacctagctttacccgagttttggcccaattctccagggattggagttctgtctccaatggcgctttccccagcaccactcgtgatcccttcactatcattttcgtcttcctcctccaacaactctatgtttattactcactcagtc

SEQ ID NO: 174483 - DNA, 257 bp, Arabidopsis thaliana landsberg
ttattttgcacacttaggcatttaggatcatcttgcatacacattgcatgttttggtgtgttttcaagtgcagaaggagcttaaaaggattctactcgaccctctactctatccaactaggagagaagcagcagggcatgctactcgacccattcactcgatccaggcagccatagaggaggcagcagacactactcgatcctctactcgaccaagtactcgatcacgggcaccggattctacaagacttgttgatc

SEQ ID NO: 174484 - DNA, 684 bp, Arabidopsis thaliana landsberg
ggagttgaatgaagctaaaggtttattcgaggaacttgtggaagaagagaagtctttgcaagagttagtggaatctcttatagcagcattaaagaatgtgaagatggagcatgatgaagttgaagcgaaggttgctgaaattgaatctgtggctggagatcttcatctgaagcttagcagaagtaagagtgagctagaacaatgtgttgcagaggaatctaaagcaaaggctgctttggaagatatgatgttaaccatcaatcagatatcttctgagactgaagctgctcgacgagaagctgagggaatgagaaacaaagctaaggagttaatgaaggaagcagaatctgcgcatctggctcttgaagactcagagctacatctaagggtcgcgttagatgaagccgaagaagcgaaagctgccgagacaaaggcgcttgaacagataaagtcaatgtctgaaaaaaccaacgctgcacgtaattcgacttcatctgagtctggatctcagagcatcacactgtctcaagaggagttcaaatcactgagcaagagagctgaggtattcgataagctagcagaaatgaaagtggctgctgcattggatcaggtggaagcagtgagagctagcgaaaacgagacactgaagaagttagagacaacacaagaagagattaagaagct

SEQ ID NO: 174485 - DNA, 242 bp, Arabidopsis thaliana landsberg
ttattttgcatacttaggcatttaggatcatcttgcatacacattgcatgttttggtgtgttttcaggtgcagaaggagctcaaaaggattcaactcgaccttctactctatccaaccaggagggaagcagcaaagcattgtactcgacccactcactcgatccaggcagccacatcggaggcagcaattcactcgaccctcttacacgatccttgcagcctcataagaagcagtagatcga

SEQ ID NO: 174486 - DNA, 675 bp, Arabidopsis thaliana landsberg
aataaaaactctagaatacgtaaaggatcttgacgcatcagcacaacttatggctcccgatgaccctaagagaaaggacaaagagaagaatgctactaagatctttcaaagtcatatacacatcacgccttatgtgatacatgttttcattgaggtaacatttacggtaaataattatttttaagaattttcacttctttctaattttttattaacctttcttttttctcccgttgaaggtttaaaaaaaaaagtatccgaatattgagtttatcgttgctgctcacagcttgtatatttggctaataataaagataaaagcgtttatgcggttctcactattaacattgacctcataccatttagatgttgaagagtaagttctttaatacacttatcaattattattattttaaagttttttctcatgtagacataacattaatttttactaccactttaaacttttgtgtgatcacaaattattttcgccagtaaagactttgaattgctcgaactcgaaatgatagacttattgaagcggtttcatagtagcaagaaaaataaagacaacgaaaaagaaactaaagaagaagcaaaaccttacgatttttcagaattcacagacgataattttctggagatgtgcattctttgcgattgtgactattttaa

SEQ ID NO: 174487 - DNA, 163 bp, Arabidopsis thaliana landsberg
atgagagattcaacaacggcgatgtccgatcttccccgaaatttggaagaggaagtgctctctagggtcccgttagcatctcttagagcagtgcgaactaattaatcgaatatggttgcctcgctcttgacataataatggtttgatcattaatttgtatgtc

SEQ ID NO: 174488 - DNA, 594 bp, Arabidopsis thaliana landsberg
gttacaacacaccaggtctgggtccggttatctaacatcccggtgactctgtatcaccgaccaattctaatgagtattgtgcgggggttggaaaaccgattaaagttgacttgactaccttaaactatgagagagctaggtttgcaagggtttgtgttgaagtggacctaaggaagccgctcaaggggacaattatgatcaatggagagaggtatggggtgtcatatgaagggttggcgaacatttgttctatgtgtggactgtacggccacttagttcattcatgtccacggaaacctagagaggaggagcgtgtggtgccaacaaatcatccagcagaggggtcgcaagttggtcgggaggcgcaggtggatgatggttttacggtggtgagaaatgggaagaaaccagcgaaagctggtgcggcgatggcagggaggagggagacggtgaagggacgtaatcttcgggatatcacaaaaggaaaggatttagagaatattgtgtcttcgaacagttttggtagtttggaggcagatatggcagattccgtgaatcatgcgagtggagtgattacggaagcaaataaggaaa

SEQ ID NO: 174489 - DNA, 2059 bp, Arabidopsis thaliana landsberg
gcttgatttacttgatgatgactttggtggagcaacatggctaagaagtggcatcagtataactcttctttgacagcagaagaaaccacattagatgcttctggttgacaagtagtatcttctgcaatggcttctgtagcaagaatctccctatacaaatcagcatcgattttgctaccatcgatccatccatgttgcttgaagaacacctgagcaatgttgttgccaccaaatatcattgtcctaaactgctcagggctccatgagtctaaattcgtcgatatataccaataaaaacaaaagtgtcgcatctagagagttgagaaagtaaattccccatagttctatctaaatcctcctctatacgcaattagtttctttgaattttgtttgttatcttcttcttttcttttcctttgttaaaggttattcataattaaaggagtgtttttttttttgaactaaaggagtgttgtacaaccatgaccctagcctagagtcatagactcatagtgcaagagagattgaacattactcaaggtatgttccactcttgtcgcatatcacaactttccaacataactcgagatataaactacaccatgcggaccatgcttgcaactgcccaaacccaagacgctttcggtcaaactcagacaggttaaacttaggattatgttatgagatgtctaaatcaacactattattacagatccttcaaacagaatatgacatcaaaataattaaaagctaacatatttacgtaccccattcaatatcttagtcaacaagccaattctatcatcaaaagaaaaagaaaagaaaaaaagaagaagctaaagaacaaagttaaagtcacataaaaagaacaaaaaagtaaggagataaataataatcagagcaaattagcttctcatgtaccagcaagaatctctattatctattataaaatatcaagttttggtacattccacatctataaactacattcatcacatatataaacaaattcttatctctttgatgctacgaaatggattatcatatatgaatgaatacacttatcaatgtaacacaatctttgattaatccctcaaggattttatttttcttttgtctttcctctttcatggagtctgatccaaatcctagtgcttggaatcaatacataaacccaagagattgtactcaaggcttatgttccacattttgtcctcaatggtggacttacatcaacttctctccaccaccaatttcttatgaacaattcctaaacgatggcgttgcatcaaaccccaatccctcccctcttgtcattgctatttttggaatatttgcaactgcctttctcttggcagcttactacactcttgtctcaaagtattgcgccaacgacaccaccaatgaagctgcctcagaatccggaagatcggatataattctcgatgttaactcgccggaaagaggagaccaagacgatccttttgctcttgagtcttcaaccgccggcttagatgatactctcataaaaaagatcggtttcttcaagttaaaaaagcatcaaaacggtttcaagatcaacggtacggattgttcaatatgtcttggagagtttaacgaagacgagagcttaaggttattacctaaatgcaaccacacctttcatgtcgtttgtatcgatcggtggctcaaatctcactcaaactgtccgctttgtcgggctaagatcatcgtccctaccactcaacaacctgaacatcatgttgtggtgatgaatcttgatcggtttacgagcaatgttggatcagcagaaggaaatgtagtcgttgatgatcatcgtgaagaggttagtgtttcgattagttctcatcatccaagttggttctcggccgcggatattgttgtgcggataagcagggacggagaagaggaagagggaaattatgatcttgaaaatggaaacagagagaaacttgtagacttgaaaagatcattctcaagtggtggcttggttcttgggactcaaggaaggactagaagatccctaaacatatgtcct

SEQ ID NO: 174490 - DNA, 452 bp, Arabidopsis thaliana landsberg
atggcaacgttagagagaatggactggtacgacatcgcgcgcaccacgaactggacgccgaaatacgttcaggaggacgaactatttccccccgagctttcgggagcgatgggcatcccgctggaaaagtgggagacgtatgacgagcccttcaagcagagctatccggaatatgtgaaggtgcaacgcgaaaaggatgccggggcgtattcggtcaaggccgcgctggagcgctccaagctctacgagaatgctgaccctggctggatcagcgtgctgaaggcgcactacggtgctatcgcgcgcgaggaataccacgcgtcccagtcggaagcccgtatggcgcgtttcggcaaggcgccgggccagcgcaacatgaaaacactcggcatgatggacgagatccgtcatggccagctccagctgttcttgccacacgaacatatgtgaag

SEQ ID NO: 174491 - DNA, 536 bp, Arabidopsis thaliana landsberg; identical to SEQ ID NO: 41351
  unsure (1)..(536): unsure at all n locations

SEQ ID NO: 174492 - DNA, 1732 bp, Arabidopsis thaliana landsberg
tggagagagcaagaagcttttgtgttgcttgaagtttggggagataggtttttgcaattgggtagaaggagtttgaggaacgaggattggaatgaagtagctgagaaagtgagtgaggagctaaggatggagaaatctgagacgcaatgtaggagaatgattgatgacttgaagaggaagtatagaaaagagaagattaaggttgagaaatcaggtttaggttcaagtaaatggtcgtttttcaataagttggatatgttgctttgtgtttcgcccaagtcggatttaggtttagcttgtggtgttgattcaggtgagtttgtgtttatgaacactaaggtttatttagataagtctaatgggtttgatgagatgatggatagtcctggtgattctgaagaggaggaggatgaggatgatgaggttgagtacgagaggaagaaggttaatgacgctgcttcgtataagatgttggcggattctgttgagaagtttgggaaggtttatgagaagatggagaagagtaagaaagagcaaatgaaggagttggagaagatgagagctgattttcagagagatttggagttgcagaagaagcagattgttgatagagctcagagtgagattgctaggttacgtgaagaggaggagaatcatcatggtggtggtgatgatgatgagagtgaagatgaagaaatggagaatgattctgatgttaatctcagtgatgagtaagttataaactatgtaggtttgtgttgtttgtagatgcaacaaaatatgttctgtttttttttttggttttagggaattcagaacttaagtcttataagttttgtaatttgtgtttggtctttgcaactttagtcgaggttatttgcagtttatcttgaaacttaaattaatccataaacatatttccttcttaatatactgtttgtgagtatttctcttgaccaatctcatgaacatacatatattatataccatagctaaaccgacagatacatatataatcttgttataatcgaggaaacaattttttgatatataagcatttttcaagaggaataaacatcagagaagcaaaagacttaacgagcttcagatagtgttatgtcatagccatttatttgggaacacagtaagaggatttgatctcatgccataagcaaaacaaagtgtcgtagtcatcttcgccaatgggggcattgttgtgggcgactcgagaaatacccaccaatgacttgagccagtcttcatgcagacttgagaactcagatcttagctcacttgacttgaagttttccccaattgatctcttcatggcttgagcagcacctgatgctgtttcaaccacttggtttggtattccagccatgagtgccacttgaagtccgtagctctcaggacaagctccctcggttaaacggtacaagaacactaggtcttgatcacaaccacgtggttgataatcagatcttgatttgaatgcgcaagccatgtgtttcgaggtgacacgtgggtgagacgcgaattccttggtgagagggtggtaatgtgttgcaaagagcatccgacattgaactttctctaccaggtgacgaaaaacctgatataaatcaataagtttcagcaaaatgaattgcatgtttttgttgatcaacaagtataagttgaaggagaagagcaggttaccgagtatgcaatggcgtatccatcgaaagtacta

SEQ ID NO: 174493 - DNA, 1223 bp, Arabidopsis thaliana landsberg; identical to SEQ ID NO: 13048

SEQ ID NO: 174494 - DNA, 512 bp, Arabidopsis thaliana landsberg
  unsure (1)..(512): unsure at all n locations
gacgaactcaatgccatcgttggtttaccaaagaagctcgcgaaagagactaatgatgagggactcaaatcggcgcttagtgtttgcgcagatgtgttcgacctcgcggttgattcagttancgatactatttcctccttggatgacgtaattagtggcgggaagaagaatttgaattcgtcaacgatcggcgatctcataacgtggcttagctccgccgtaacagatatcgggacgtgtggcgacacgcttgatgaagataactacaactcaccaatcccacagaagcttaaatccgccatggttaattccacagagttcacaagcaacagcttagccatcgtcgcgcaggttctcaaaaaaccaagcaagtctaggatcccggttcaggggagacggctacttaactcgaattcgtttccaaattcgcttaccccaggagtgaggcggttacttcaagagaagaaaaaaacgcctcatgttacggtggcggcggatggctccggcggtgt

SEQ ID NO: 174495 - DNA, 413 bp, Arabidopsis thaliana landsberg
  unsure (1)..(413): unsure at all n locations
ccgggtcctcctggagagggcgtgggagtgccgacaaaacttcgagggtcacgaagacgctcgagtgtgctctagaaaggcgcattagcgccgacaaaacatcgagggtcgcaacctcggtcaagacttcnnnnnnnnnnnnnnnnnnnnnnnnnnnnnnnnnnnnnnnnnnnnnnnnnnnccattggccggcgtggctacgccgcgctggcatatcacctccgtgcggcgacctggccatccaagttccggccacacctgccggagaagtacgacggtacgacaaatccgtcggaattcttgcaggtttacgtcaccgccattacgcagccagtggagacaccaccgtaatggcgacatacttccatgttgccttgtctgggccagcccggacttggctcatgaacctttcc

SEQ ID NO: 174496 - DNA, 1003 bp, Arabidopsis thaliana landsberg; identical to SEQ ID NO: 7019
  unsure (1)..(1003): unsure at all n locations

SEQ ID NO: 174497 - DNA, 481 bp, Arabidopsis thaliana landsberg; identical to SEQ ID NO: 38760

SEQ ID NO: 174498 - DNA, 480 bp, Arabidopsis thaliana landsberg
  unsure (1)..(480): unsure at all n locations
caatagtatctcggttccgagacgacatcgttagaggaaagcaaagcgttagggagccaactaacctcatcgactacaactcggtgagaagtgctgaatctaagccttggaagagggagaccaacgatgtctcgatggaagagtactgtgagctcttcaggcgacacaatttcgtcggaacgaggtacccgcatcctgagacaatggtggagcttggtatctctgatgatatcgagtatctctacgaacagaccagtctgttcgtgctgatgaaccgtgcctacaacgcgttcaaggaagaaacgnatccagtttctgtcctctttgcaggtggagatattctctaagaggtcgagtaagacagaaagagacttcggacttccccacctgaccttcactatccatggtaaagaataagtcttcactatcaagcagctagagtctctcttcgggtttcacaccgggtggcacggccaccag

SEQ ID NO: 174499 - DNA, 705 bp, Arabidopsis thaliana landsberg
gtgacgaggccatcttcggatgggactttattttggccgtttagggaagagagagcgtttgcgtcagctgaggagtatggcggcggaggtggttgcatgtggccaccgaggtcttactcatgcagcttttgcgggagagagttcaagtcggcgcaagcactaggcggtcatatgaacgttcatcgaagagaccgagctcgactcaaacaacaatcattatcaccttcatcaactgaccaagccacacctcctgaatgtgatcgtcaacaacaagttcttgatgtgggatcaaaggttcttgttcaagaagaaacaagaaagcctaacggaaccaagagggagataagtgatgtttgtaataacaacgttttagaaagttctatgaaaagatatgaacatgacaatggtgaagtcaagactgacttatcggtcggtctactgagtactgagtttgatcctcggaagaagcaactaatcaacggatcatcttcgtcatggaagagggcaaagacggatgtgtcaagatttccaatgatgttagggttggtcattggaatttccgagatcaacggccatcatgaggagttggatcttgagctaaggctaggagctgatccgcctaaggttaactagcttaagtaattaaaaagtaataatagttaatgtgactgccaaaaagaagaagttaaactgtctctaatctca

SEQ ID NO: 174500 - DNA, 900 bp, Arabidopsis thaliana landsberg
atgtaagagtaaaggaagaaagaggaagatgaatgattgtgttggatcacttctagtactgatgatgaatccattgaatctgaagaagaagaataccaattagatgaagaggagctatcaaaatcatagtttttattccactatatgttcagatttggagtaagattttcaaaataaatgtcttaaccattctttttattatctgttattattttgtctaggaaatgccggttagacataacttagacgtgatgcacgtggagagaaatgttgccgctagccttgtctctacaatgctacattgtgggaagtcaaaggatggaattaatgctcgaaaagatctgcaactgctcgatattaggagggatttccatccccaagcacgtggaaaaagaacctaccttcctacagctcctaggtctttgtccaaaacagcgcttatttgacttcagaggtccgaatggctactgttctaatatttccaaatgtgtgaagatagaagattctacggttaaaggacttaaatcacatgattatcatgtgttgatgcaacaacttcttcaggttgcaattagaggtataagatgaattatgttagcttaactcttgcataatttgctacgttgtttttaatcttcaatgttatctacttacaggtttattacctaaaggtgtcggatagctattggacgcttctgtctttcttcaacaaactgtgtccgcgagttattgacagagagacagtttctataatggagaatgaaattgtggaaactatctccatgtttgagaggttcttccctccaggtttcttcgatataatggcgcatttgacagtctacttagacaaggaagcatagcttatgatgaccaattcattttcgttggatatgccctttt

SEQ ID NO: 174501 - DNA, 1254 bp, Arabidopsis thaliana landsberg
  unsure (1)..(1254): unsure at all n locations
aaaaattcaagaaacttaaaagcctagcggaataagaaaccggtgcaagcatacaatttttagggacggataggggaggagaatttacatcgcaggaactcaaaattttttgtgataatacgggtgtaaagagacatcntccccgccccttatacacctcaacagaacgctattgttgaaagaaggaatataattttaatggagatggcacaagcatcctgaagcatatgcatgtaccaaactatctttgggaagaggcgatacgatatttgacatatcttttgaatctaatagccataagaggctctcaaggatagaactccgtatgaagtactctgagaaaagaaaccaaacatcagttatcttcagatctttgggtgtagcggatatgcaaagacagaaaagctacatttgaggaagctagatgatagatcacatatgcgtgtacacttaggaacatagccggggtcgaaagcttaccggatgctcgatccaccaacccaaaaggtcgtggtaagtagagacgttttttttgacaaaacaaaaggttgaatgacactaactcaaaaaaatacaagatgaagagttttaatttcatatttggagagtttggaaatcgtggtattcaaagtactagacaaagtgtcgaagtggaacagatcgatgaagaatattctgaaaatattgaagatacaagcttagatgccgataaagaacaagatgataatatttcggtagtgacacagagaatgataagtcgataaagaacaagaggaaaatattccggtagtgacacatggaggtgaaacagagaattataagtctcaagaacaatcggttgttcagttaagaagaacagagagacaagtctctatgcctaagtatcttaaaaattatgtgttgctagccgaagaggaaggagaaagactgttgttatgtttgaataatgagtgtagagatttctatgaagtaaaggaatcaaaagaatggatgcttgcttgggaggatgaattttggtccatcgaaaaaaatgaaacatgggatcttgttgatcttccggttggtgcaaaacttaagagaaactcgacagaagcatctacaagtacaaggcccgactcgtcgcaaaaggatatgtgcaacgttatacatagaagatatcatttcatacccacgtgtgttgagagtagtcaagtggaagttaaacatatccctgggaatgagcagaaggcaggcattttaacaaagactctggaa

SEQ ID NO: 174502 - DNA, 598 bp, Arabidopsis thaliana landsberg
atcgttatttgaatcttgctgggtctgcatcaccggtggcgtccccgcaaagatcggatccaccggccgccaggacggctcctgtgtacaaggacggcgggcaggtcgtcgatggtgagttctccatggccgtggtccaggccaataacctattggaggaccatagccaggttgaatccgggccgcttagcacatcggagcctggactgcaaggcaccttcgtcggggtctacgatgggcacggtggcccggagacagcgcgttacatcaatgaccatctcttcaaccacttgaggagtaaggcctctaccgctgttgaagttcatgctttagatcaaacagtagcaatcaagctatgctatcggatttacaatcgatacatctgatattcagatatgcaagctgtgcatatgagttaacgttgattgctctcaagtaaagatgtttgccatttcagtggtacttgaatgtatgtgtgcattgcatagaacgttgttctatgtatattaacatggaaaagtgcgcgcaaattagaaagcaattatgtttagataaaggccaaagttatcctaatttcgatcttggtataattgggaat

SEQ ID NO: 174503 - DNA, 1611 bp, Arabidopsis thaliana landsberg; identical to SEQ ID NO: 981

SEQ ID NO: 174504 - DNA, 692 bp, Arabidopsis thaliana landsberg
atgcaagaaaatctctatgccaaccttttagttcaacaaagtcgatattttcatgccacttacaagtatcgttgtcatttagcgtcaactcaaaaagttgaggtgtagtataagaaaaattggccaaaagtcaccggtacaagtttttgaggtagtgaacctccatcagttagatattgacatagattagtcttttaaaagtatatattttgtacaaaaaatgtttgtaaatttgatgtaagaaaagaataatcaaactctaaaagaaaagatacaaattataatgaatacatggataataaagaaaaaagtcacataaaactgatatacaaaaatcatgggttttggttttgattccttgttctttcatttgaaaatttctcaattataagaaatttatatcaattatgatagttgccattttttaatagtgcattctttatctaaaatatcagttactctaacacatcaaaactaaacaccaacgaactcatgttgtaggatacgaggtcaacttaccccagttatatttgatatgtaattatatgaacagtcaataatagattagtgactgagtgagactactgagcattaggttttggttcagtttggttaaggagaaacccaattacatgcggttgggtatttatttatttggaaacattattatgtaattgcgataatgttttggc

SEQ ID NO: 174505 - DNA, 474 bp, Arabidopsis thaliana landsberg; identical to SEQ ID NO: 71679

SEQ ID NO: 174506 - DNA, 424 bp, Arabidopsis thaliana landsberg
gcatagagccatcaagaaggtgtgtcttatagaatatggcggaaaagtaactgttttttaccataccgatcttgaagacaagggtacagtgaatttatgggttctagaagatgtcaggacaaaggagtggttggcgaaaactctggttttgcaaccttgtccgctgcatttggtcaagaacgttagattggattggagttaaaaggtataactcaaagtggcaaggttataatgacaccagattatttgtttgatatgttgtacattctttgttgtgatctgcaaagtaatgatattagagagattaaaatcaaaggtatacattaccattatgttcctaagaagggtgaatttgtgcctactcaatttagtttgatgtttatggatcagagatcagagtgagagcgtcatgtacttaaagact

SEQ ID NO: 174507 - DNA, 399 bp, Arabidopsis thaliana landsberg
cgtgacttatctgcaccacacagtcaagtccaccagaggtttcgtcaagctaatgatcgaacaaatgaaactcgctggatgggatatttcatcagctgctaattcgatccatcccggtgtgttctactacaagcaagaccacaagtgtttcactttcgaacactttgtctccaatgtgatgttcgaagcgtttcatctaccgtacttctcaacttcaagcgagtcaagaagctacaagaagaagaaacagagcaatgcagatagagaaatgttctttgaaaggtttaaagaactcaggtcgatgaaagcgaaagattatctaaccgcgaggcctaaatcaagattcgctaggttctgtcgagccaagtacttgcagcttatacatccaaagatggagca

SEQ ID NO: 174508 - DNA, 159 bp, Arabidopsis thaliana landsberg
agaacacgacaaaccgcccgaccaagaggacgagcaggagcaacaggacaaaaagagaccacgcgaccacaaggacgagcagaggacaaaaccccaacacaaaaccacgggaccacgagggggggcgcccgaaacacaaccaccagacgaacaaaagac

SEQ ID NO: 174509 - DNA, 590 bp, Arabidopsis thaliana landsberg; identical to SEQ ID NO: 13286
  unsure (1)..(590): unsure at all n locations

SEQ ID NO: 174510 - DNA, 882 bp, Arabidopsis thaliana landsberg; identical to SEQ ID NO: 51434
  unsure (1)..(882): unsure at all n locations

SEQ ID NO: 174511 - DNA, 186 bp, Arabidopsis thaliana landsberg
caacgcccgttacgttgagtgtcagaagaatcatgccgctaatattggcggctactctgttgacggttgccgggagtttatggcaagcggcggatatgatgctttgacgtgtgctgcctgtggctgtcaccggaattttcaccggagggaagttgacacggatggtgcttgtgagtattctactcc

SEQ ID NO: 174512 - DNA, 368 bp, Arabidopsis thaliana landsberg
tgcccagtatgatattttaagtatgatgacacgagtctcagcgtttgggttttacagcaagtgactgcttatggagtgcccaatatgtcgtatttcctgaagtcggtggcctaaagcagtaagacctttaccatgctgttgttttggatatcgaccatttcacttatggtggtcggtatcggctttatgaatatcatagtggtcatggtcgcggaaagatccccctatatcattttcaggaaagcggtggggagaccccgctgggtgatcctttccctattttaagctatgtccgtggtcgttaaagttaaaaacggtctgttcccattgtccgttgggacggcgtgatcccggaaacccggtcgccc

SEQ ID NO: 174513 - DNA, 390 bp, Arabidopsis thaliana landsberg; identical to SEQ ID NO: 19109

SEQ ID NO: 174514 - DNA, 639 bp, Arabidopsis thaliana landsberg
acgccttataagccaggctctgttgcttgggctgctttgctcggggcttgttggaaacacaaaaacatggctcttgcagagagagcagctaatgagcttatggtgatgcaaccattagctgccacgccatatgtgatgctagcaaacatgtatgcagatgccaggaaatgggaagagatggcctcggtgaggaaatcaatgagggggaaaaggataaggaagaaaccgggatgtagttggatcgaagtgaagaagaaaaagcatgtattcgtcgcagaagattggtctcatccgatgatacgagaagtgaatgaatatctagaggagatgatgaagaagatgaagaaagttgggtatgtgatggataagaaatgggcaatggtaaaagaggatgaagcaggcgaaggggacgaagaaatgcggttaggacatcacagcgagaagctagcggtggcttttgggttgatgtcgactagagatggagaagaattagttgtagttaagaatttgaggatatgtggggattgtcacaatgctatcaagtttatgtctgcggttgcaggtagagagatcattgtaagagataaccttcggtttcattgcttcaaagatggcaagtgttcatgtggggattattgg

SEQ ID NO: 174515 - DNA, 465 bp, Arabidopsis thaliana landsberg
acagtggctgccagggcgctcactcctctacgcatcgatgggcctgcaatctgagacctacccacgggtgctcgggattctgcgcgacctggtcggcgggggtgtgctgcagttgccctccagcgtcaaggacctcaccagcgaaaccagccgggccgacatcgagcgctatgtgcagtccccgggtgtgccgtcggtcgagcgcgtcaagctcttcaagctcgcctgggacatcctcggatcggaattcggtgggcggcatcagcagtacgaaatgttctatgccggcgcgcccttcgtggtgaagggcgtctatgcctatcgcaactacgactacgacggcgcggtccagtcggtccagcagttcctggacagctattcagtcgatgtcgcggacatccagcactgacaaggagataacgccatggccaaaccagaactcgagttcttccccgtcaccgacgt

SEQ ID NO: 174516 - DNA, 603 bp, Arabidopsis thaliana landsberg
tatcttaaatgctatttcattggtgagaactactaaatgtcagttgcaaaaggttagagacgatggatgggatgcttttatagctgaagttagttctttagcgagaaaaataacactggaatgcttaaactggaggaagaatttgttgattctagaagaccaaggaaaaagaccggtataaccaacttgcatcactataaggtggattgtttctacactgtcttagatatgcaacttcaaaagtttaatgaccgctttgatgaggtgaattctgaactacttatttgcatgtcatctttgagtccgatagattcttttcgtcagtttgataagtccatgctcgtgagattgaccgagttttatccagatgactttagttttgtggagcgtagatctcttgatcatcaacttgagatctaccttgataatgtgaaaaacgatgaaaggtttacagatttaaagtgtcttggtgatcttgctcgtgtgatggtagagacaagaaagcatctttcacatcctttggtatatcgtcttctaaaggtatctttgattcttcctgttgcaacggcaactgtcgaaagatgtttttccgcgatgaatgtc

SEQ ID NO: 174517 - DNA, 649 bp, Arabidopsis thaliana landsberg
acttaaccttcagggttccataacagttcttttgctctatccatggcgtaagatgatggaccttttcaaagtttgatccttttttcatatctgatcaaaggagagttttgggtttgatttctaattgttaaagttttaatctttttatttgggtttgtgttcgattatgtggatggctactcaatcaaattctgggttcgattctttgagttctatgatgagtcgtcacgctattaatttccaatctaacacttcttcggagatgactccaatgagtccgtacttggggatgaatatgaatatgatcaatgttggttctcctggttttcttcaaaccgggaattcttcgaatggttccgattcgggttctggtctaaagcttgatacttccatggttagtgaatggtcaaatgaagaacaatacatattggatgctggtcttgaaaagagagtctttcttgttttgtgatttcttaacattaatgaggatatgaagatagctttttgttctgtggaattcgatatgatctgattctgtgttctttcgagatataaggatatgccaagtattgatatgtatattcaaattggaaacactttacctgataaaagtattcgagatattgctccgcggagtacgtggctgagg

SEQ ID NO: 174518 - DNA, 222 bp, Arabidopsis thaliana landsberg
gagcattgcccatatagtggatctgcctcaaagccaagtcattttactgttcttattcgtgctattcctcagtctcctgaccagtcctacagcgagacagtgagcaaatactttacaaattactatgcaccaagctatgtgtcgcacctaatggtctaccgtgatggcttcattcacagactgatggtatgtgttttgatttaatcttgcaacatgctgact

SEQ ID NO: 174519 - DNA, 527 bp, Arabidopsis thaliana landsberg
tctccatcatgctattagttcatttgataaaaggtttgagcaatatcaagcatatgaacatatgtttggtttttggtttgattctaatagattgaaattaaatgtgtgaagatgtagatttaaagtctcattgtagtgttttagaaaaaagtttgagaagtggttatatactagacatcgatggagatgatttatttcttgaactaaaatttcttaaggagcttttgccaaatgaaaatatggaagcaagtgatgtattaaattaaattgtacaatttgatagttttccatatactatgattgcatatagaattttactaacggttccaattaccgttgcttttgcagaaaggagtttttctaaactcaagctattaaagtcatatctaaggacatctatgtcacaagggagattgaatggattagctttgatggcaatcgagaatgggtttttgaaagaactagatgtagaaagtttagctgatgattttgcttctgatcattcaaatagaccgacattattcact

SEQ ID NO: 174520 - DNA, 730 bp, Arabidopsis thaliana landsberg
agaacagaacttatccatctagcttcccgctgtttgcgccctgaaccagacgagaggccaagcataaagtttcttatgtcagctctttcaagacttgagaaaagagctgagttatggcccaacgtcaaagaagaaaacatccctgtaagtcattactacattaaatcttccaaggtttcgggttctgcaggctttcttatgtgtacatgggacttaataatgacagactccatcatacactgaacctgcaacaaaggagccattgcccttgacccctttcggagaagcatgctggagagtggatctaagtggtatgcacgaactactcgagaaactcgggtatggagaggatgatgtggtggtcacaaatgaggtacattatatttttgagaaacatatctcttttgacacatctcaatatctcatcatgaggaaaaaaatattgctgcagttctcattccaaatgtggacgggtcaaatgcaagagaatatggattacaagaagcacggagatgccgcatttcgtgctaaagattttgaaaccgcaatcgaattctacacagaggtatcattttgaatcatcaagaaaccgtcatcttttaccagcagaaaatacaatagatatagatatatgaattttttccgtatgtacagttcatgagtggagcaccagtggtatcaccaacagtattagccagacggtgtctatgttacctaatgagtgatatgt

SEQ ID NO: 174521 - DNA, 983 bp, Arabidopsis thaliana landsberg
aatggagcggtgacgtcatcaatggcggcgaagtttgcgtttttcccgccaaatccgtcgtcgtacggcgtagaagtggtggaaggaaagctgaggctgattggtgtagagaacgtgaaagagaatgttgaagtattgaagctgaagacgaagagaggtaatcaggtggttgcggcgtatattaagaatcctacagcttcacttacgcttctttattctcatggtaacgccgcggatcttggtcagatgttcgagcttttctccgagcttagccttcatcttcgtgttaacttaattgggtaattagtttgttaactcttcttgcttggagtttgattgattttaagacaagatttgaaagctgtttttcatggattaggacaagttggtttttgttttgtcggaaattttctaaaagtagaaattaaaacatttgattgtctagaatcaaactgttggatctgttgtggttttggtggagcttaaagaaccaaatattggagctaaattgcctcaaaaacagatactttaggaatcgagattctatatattttgtctttggtgcatagcgttggattgatataagtgagtaattgagaaagattgtgttaatggatctgttgtggttttggtgaattttgatgaacttgtagagcttaaagaaccgatattggagctgaatcgcctcgaaaaccgacacaaataggaatcgacatattcgatatgtatcgcctttagtcagtagcataggattgatataaagtgagatccattggattgatttctgcaatttttggtagataaaaattcgagcaatcttgaagctgttctcattagggcaagtttttgttttatcggttagtgtaggctcatcttgaggttgtagatagttagaaacaaaggagaatcatgagtagtaattgagaatgaatttagaacccgcctcttagttcttagatcagacgtaagtgagatagaaagga

SEQ ID NO: 174522 - DNA, 814 bp, Arabidopsis thaliana landsberg; identical to SEQ ID NO: 53346

SEQ ID NO: 174523 - DNA, 1706 bp, Arabidopsis thaliana landsberg
taacgtaaattcattacagtttttgggtcaacgtactccttcgtgtaggtcatctcatctgcttgttgtgctccattccagtctttctaacgctaccgtgaggatgggaatgtctaatgcgactgctttttggattaatgttaagctttattacttctgaatgaatatagcttcgacagatttaaaacgggaatgaaatacaaccaaagtagtttcacactttttggattcagttttctatagtaccatttgcaaacatatacgtgtgtgggctgccatatcaactatagacccgtgaacccaatcatgcatcaaagaatatcagtgaactcatttccaaagctaataaatattttcatatatctttaaataaagtgcaaatcatggattagagtactagctagaaaagtcttgcgtatgaaaaacagtgtatgtatcatcaatatcgtgtaatctgctacttggatcatccaacgtcaataaaagtgaacgcgtgattttataacaatttacctttttttatcatttgtccctaaaaagacggctaaaatgatgttgaaattgttgttttgatatgtaatgatgaattttgtcttcgccggtctatatgcacttaaaagacaattatgactataaaatgatgaaaggatatcgtatttgttggtttaagatgttacaaaattttaataatgggaaaggaaatgagggtaaagaagaaaaaaaaaaaagactatgattcttaggattctctttcattgaaaagccttgcgcttgtgcgtttccttttcactatgtgaagtaagacccaccacatttttgtgaagaaaatttcactcttttcctcttgatgtaaacgcgtagacagacacgtgcgacatttctgcactatacgttttggggggtaggaggaaaagaaatcaaaactttaaagaagaagattttgtattggagaaaaataaagagagaacctattttgacgaacggctacgatacacaccaggtaggttgatattaatatataaccttttcatactactagtcttacccttcttcgtgtggaggtagagagagagagagagagagggagagtgaaagagaggagagaaagcgagagatgaattcttatgagacgaaaggcttaagtttcgaatccccaagctttattgaatggcttaaacctcaatcttctactacttcttctaaatctgtgttatatcgtgggaagacaagagatgctatatcaagatcaaatcaccaccagagtcagatgaacatgttggaacgatctctattcttgtaccaaccacaagaaccactcaacacgtctattcaatgcttgccttttttaaacaagctcatggaaaataatagtcaagcctcggatatcaaagaagagaataaggatgatgtggttaccctccaaatcggatttcctaaataccaccgtggtagctcggaggatggctctgatataactttcgatcatcagaagaaacccatcaagagagagataatagaagatggtgtggtgatgatgaagaagaggaggaagatgaagtttgatgaggagataattgattctgatgtggaagtatgtgggaagaggttttggataccaagtccggctcagattcatgtcggtccaatgcaatttgcttgctctatttgcagcaaaacattcaataggtacaataacatgcaggtac

SEQ ID NO: 174524 - DNA, 111 bp, Arabidopsis thaliana landsberg
atgcaacctcctatgccgccggccaaggctgcgtccctcacaacatcgctagatgctaaaaccaagggaaggagtttgttatcttcctgcagctactgttatatgcctacg

SEQ ID NO: 174525 - DNA, 1457 bp, Arabidopsis thaliana landsberg
aaatcctttagtcatgaaacctcatgtgtcggaacactgcaacaaaatggacgggtagaacgaaaacaccgacatctccttaatgtagctagagccatcatgtttgaaggacatcttcctatcgaattttggggagagtgtgctctcgcggctgcgtatttgatcaatagaacgccttctatgattttgcgtggaaaaacaccttacgaagttctttacggcgtaacgccatcctatgatcatctgcgtgtaataggatgtgtgtgtcatattcgaaatcgagatcacgatggagacaagtttgcaagtcgaagtagaaaatgtgttttcattggctatccgtatgggcagaaagggtggcgagtttatgatatagaaaaaggaatttttcccgtttcacggaatgtgatctttcgtgaagatatcttggcttacagtggtgaagaaggatcatagtttttggtggaagaaactgacccctttgtgaatgaataccgatattagctcatattttgacaacaaactcaactcccatacgaaaccaacctcacaaatcaaagaaggtttcaaaggagaagtcgactcttcctccaactgagataagtgaagcacgtgatgttattgaacgtgatgaagttgaaacacgtgatgaagttgaaacacgtgctgaaattgaaacaaatgattaaagatcatggagataatgtcgtcgagagagaacatggacaaaacgaagatgaagctgccgctgaaacagatcacgaagccaatattgaaacagaacatgatcaagataatctacctattgctatccgaaaaagtgttagagaaaagactcaaccacttcgtctcaaggattatgatacaacgttggtttgtttcacttctggttgtgtttatccaattaaagatgtgatgtccgatagtcgtttttcggtgcaacacaaagcttttctagttgctattacaacaggacgtgaacctaaaaatttctcagaagcaatgagagatccacattggacagaagcagttggaaaagaaatcgggtcacttgaatcaaacaagacatggacacttgaggatttgccgcaaggtaagaaggcaataggatgtcaatgggtgtttaggattaaacatcgctctaatggatcaatcgaacgctataaagcaagactggttgttttagggaatcgacaaattgagggtgttgattacggtgaaacgtttgctccagttgtgaaaatgacaacagttagatcttttttatcaatcgtttcagctcgaaattgggaagtgcatcagatggatgtgcacaacgcgtttcttcacggcgatctcgaagaggaagtttacatgaagcttcctcccgggttctctaagcaaaccgacggaaaggtatgtcgattacgcaagtcgttatacggattgaagcaagcaccacgttgttaagctagcga

SEQ ID NO: 174526 - DNA, 233 bp, Arabidopsis thaliana landsberg
atggaaagtcttcacaatgattttgggggttttgataaagaaactgatgttggttttttaccgaattgtgatgtagctgttgatcttaggtcttctaaagtgtgtggcattggactattgaacgtcaaagcacaacatgtgttttacccttttgagagagataaattcagatgtcgttatgatttactactgggcttctgtcttcaagggttggagctattttacagcaaatt

SEQ ID NO: 174527 - DNA, 843 bp, Arabidopsis thaliana landsberg; identical to SEQ ID NO: 6628

SEQ ID NO: 174528 - DNA, 379 bp, Arabidopsis thaliana landsberg
  unsure (1)..(379): unsure at all n locations
cggggacgcgtgggtgcgcatcaagtcatacgaggactccatgntttcgctcaaggccagcaagttcctggaggaggtcttcaccatggacaatgtctcctaccccatcatcatcgaccagaagtactgccccaacaacatctgcgtcaagtccggcgcctccaaggtggccgtcaacgacgtcgtcttcaagaacatccacggcacctccaacacgccggaggccatcacgctcaactgcgccaacaacctgccatgccagggcgtgcagctcgtcaacgtcgacatcaagtacaatggatccggcaacaagaccatggccgtctgcaagaacgccatcgggaagtccatcggcttggcaaaagagctcgcctgcatc

SEQ ID NO: 174529 - DNA, 404 bp, Arabidopsis thaliana landsberg
ggacccggaccggagctaggaatagtagtgctgagcatcacattcttgaagatatttttttttctgttcacgttgaaaacttgacacttccttcccgacccaagctgtcagatgctgctcctaatacccttggtaccgcttgcttagcattacactatgctaatgtcatcatcgtgatagagagatttgttgcgtctcctcacttgataggagatgatgcaagagacgacctttacaacatgttaccggcgagcgtgagaacatcgcttagagaaaggctaaaaccttactcgaaaaacttgagttctttcacagtttatgatccaggcctatcaagagaatggacagacgccatggcgggtatcttggaatggttgggtccattacctcaccacatgataaaa

SEQ ID NO: 174530 - DNA, 1747 bp, Arabidopsis thaliana landsberg
ctagcatttgtggctaagggttagagacattgccttgtgggaaataaaaatcgctgaaaagagaaaggctttagagtagtataagtggttccgctgcgtaagctcggttagtgtagttatgcatgcatgcttaatattgattgggttcattacacttttccaagagtaattggttgatttcttgtcaagtatactcaatcgagtatattcgaatcttgcattgattgtctgatgcatgattgtttgttgattgcatgcatttgattattattttgggtttctgggtggggaatattgcatgtttaggggagcctggactcactaagcgattggtgctcatccctcactctattttgcaggtaaccatagtgagaaaccttagaggggagcacgaacgtaaggaagccggtgtagagttcgttgcctttgtaaagatatttttttaaaaatatatgttgtatgacttgattgtggcattaggccttggctagccgaacacaattgtattttgagatattttaagattaataaaatgagttttttagaaatccttgtgtatctctaatattagtcttgtcctgactaacacaacttacggacatggtacgggttgaaaagccttaggccatgttcgagaggaacgatgttcacggatgaactgaccttggtaccggatgtgttctgggaactcggtcagatcgtctacgggcatcacacgtaacgcttccggattcgttcttagttctataacggtttgagagtattacagatggcattgaatatctttgcataaaatctaagaggcaatacctattggaagaattgccaatgttatctttcggattatattgcacaaaaataaatataatcacaacaaatgttatagtaaactctcgagtttactagtacatttaagacatgacatgaaagatttggacatcctagttcagtcatgacgcaaaagtttttgcaaagttctaataaccatccattgaaaagccaaaaaatattcaaatctgatgagttttcatgtaacgcatgttctcaaggaaaactcataacaaggccatcaccaactaaaattgggaatgaatcgccattattcttaaatagaatacattgtgacataggtggctttatccaccattcgtgtgggccatttcgttactttatggtaatgattgacgcatctagtagatggtcacatgtgtgtctattgacaatacaaaattcgactttcgcaaaatttatttcccaaataatcaggtggaaagcataaatccatgattatgtaataaagaaagttaggcttgataacgccggtgagttcacttcataagcctttaatgattattgtatgtcaatgagaatctatattgagcatccggtccctcatgctcatacacaaaatggcatggctgaatctttaattaaacggctgcaactcattgcaagaccattaatattgagaataaaactctcaatttctgtatgcggtttcgctatattgtatgctgcgacattggttcagatttgaccaagcgcgtataataaatattctcctttacaattaacgtctagccaagatccaaacgtagcctatcttcgtgtttttaggtgtgcggtttatgttcctattgctccaccacaaagaacaaaaatagggccacaatggagatcgagtatattcgtcggttatgtatcacccactatgtttcggtatcctgatccgctaactgatcatatg

SEQ ID NO: 174531 - DNA, 389 bp, Arabidopsis thaliana landsberg
tatgaggtaggttcgctgttgatgatcgatagtttcggcgccttcatgaccgggctgatcattttttcgggattggtggtcaatgtattctcctatatctattttcaggaaaaagaggaagggccgaaggagtattatgtgctgcttttcctgtgcacgctgggcgcgtgtgtgctggcgctgagcgagcatttcgtttcgctcttcctgggactcgaaatccttacgataggcttgtacgcgctcattgcctacctgcgcacgcggaaccatagcattgaggcggggatcaaataccttgtgctggcggcgttttcgtcggctttcctgcttttatgaaaaagccctggtgtatttgcaaacgggtacgatgtcgtttgcgggaaggc

SEQ ID NO: 174532 - DNA, 131 bp, Arabidopsis thaliana landsberg
atgggaataaggttcatattgatggtgaacaagcaaggccagactagtcttgctcagtactacgaatggctcactctcgaggaacgtcgcgctctcgaaggcgaaatcgtccgtaaatgcctacgcgcgca

SEQ ID NO: 174533 - DNA, 393 bp, Arabidopsis thaliana landsberg
tggattaagggcttcggatcacaaagaggctaaatgttgtagattgttaaagacgtgagattcacagtgactcaagcggtggagcctatggagaagagcatcacaaagttcaatgagaaactgcacaagatctcccagaacattaagaaacacgacacggaaaagagaagagtgaaggacgatagttgcatgtcatcatcacccagtcggagagtgattcgagggattgatgatccgcttctaaatgggagttttagcgatagtggagttacaagaaccaaaaagcacaggcgtaaatcgggatacactagcgcagagagcgggggagagagcagtagtgatcaagcttatggtggatttgaagtcaggggccgcagatggatcaccaaagat

SEQ ID NO: 174534 - DNA, 549 bp, Arabidopsis thaliana landsberg
ccatctttttgcatacaacaggatagacgtgaagaattcccttctgtgcatatcaatatcgtaagttgtaaataagtctctgctaaacattgtatccaagcttgagagttaattatttaatacctcttttgcagaggattcattttcaagaggattcattttcaagagcattcattttcgtcatttgaaaaataaaagtcaatacaattttacaatttgttaattttaaaataattaatgtttctttttctactcaccactacattcctgatgtgcatgaataattgttactttcatgtatcagtcaatttggtcatggatccatttatctttcatgttccatatcatgtttcacagtatcagcctaatggtgaacaagtgttcaagaccccaatccataatcaggtacatcataccattccaaatacatatactttatttttacattgtttttgcataagtattataaatacaccacaatgtaagcacccgtttcaaatatccttaatggaacatgggatgaagtgctgtccttctgttcaactactg

SEQ ID NO: 174535 - DNA, 1258 bp, Arabidopsis thaliana landsberg
ctgcaccatttacatcaccgcaagtccaaacaaagaaatcgtttcctactgaacaattgggtcgaggattgagggttagaacacattcagtaaaattgaaggaattcgtgattgagactggaaatccaaaaacaaagaagaacaagtccacatctgagtatctgattgccaattacgttgactgtgagcgtttctctgacttacataaagcatacatggctgcaattactcaaggcgtagaggcaaaatcgtttaaaaaggcaatggaagacgatagattgaaaggggcaatgggttcataaattgattctcaggaaagaaatcattcgtggaccatagaggatttgcctaaagggaaaaaggcaataggatgtaaatgggttcacaagctcaaatacaaatctgatggcaccttggagagacataaagccaaactagttgctcttggaaacaaacaagttgaaggagtagactatggataaacttttgcgccggtagctaaaatgggaaccgtgagattgttcttagatacggcagttaagaacaagtgggatgttcaccagaaggacgtctacaatgtgtttcttcacggcgaccttgaagaagaaatttatatgaagctaccatcagggtttaaagcaaccgatccgaacaaggtatgcagacttcgaaagtctatttatggattgaagcagagtccgaggtcctggtttgccaaattgtctacggcgttaaaaaatttgaatttgagcaaaatctctcagattattcattgttcaccaaggatgcaaatggagagtcacttcacgttttagtgtatgtcgacgatctcacttaaggtcatgaatgattttaaagattacttgttgtcgtgctttcacatgaaggacttaggccaattaaaatacttcctgggaattgaagtagcaagaaactctaccggtatgtatctttgttaaagaaagtacgcattggacattatctcagatgttggactacttggtgcgaaacctgtagcgtttcctttggaaacaaacaatgacttgtcattgtcgaagtccgcgtttttaaacgaccctgaaccttagagatgattggtgggtagattgatatacttggctgtgactcgacccgatttagcgttcttttttcactttcttgccctgtttatgcaaaggccgagagaagatcattagggagcagccttgcgggtggttcgatatttgaaaaacaatcctggtcagggtatattgtgcct

SEQ ID NO: 174536 - DNA, 431 bp, Arabidopsis thaliana landsberg; identical to SEQ ID NO: 49705

SEQ ID NO: 174537 - DNA, 377 bp, Arabidopsis thaliana landsberg
attgcccaacctcttggaaaggccagtatacgcgaggctctgcaaaaccaaccattgttttagaggcagtcgcatcacaagatctctggatatggcacgcatttttttggacctccaggtaccttaaacgatatcaatattcttgatcgatcaccagtttttgatgaaattttacaaggtcgagctccaaatttgcgttacaaagtcaacgtcaacagacgagagtataatttggcttactatctcacatatggtatatatccgaaatggacgacttttatccaatctattcgacttccacaaggtcgaaaatcatctttatttgcatcataacaagaaaccgtccgtaaagatgtcgagcgtgcatttggagtatt

SEQ ID NO: 174538 - DNA, 544 bp, Arabidopsis thaliana landsberg
tttttctcttatccagtatgatgtgtgtcaatcttgattaggtttatgcctctcctctttctcaacttcttatcaaaggttgaaggttgaagcaatgatggatatgaaggagagaatggtgaaggaacttaagcttatcacatctattgggaacttacagcagtggatagctatccacataagcgattttgatcacgcaatctttcatcaaatagatgagaaagagtgtcttacgccaacgacaattgaggtttctgaggataaacgaggtctacagaatcttgatgagcttttgtgggcttttgaagagatatgtgtagctggtgggcaaggttctgttgtcttattcacaacaagtctacgaggagtgagaaagactttcgaaggtagcagaagagtgagattcctgctagagaatcataaggcatcgttgagagaaagagatgtttggatggattgtgagtacaaatcacagtatgtcgagagtgcttggggagcgagaaaaacctaatagactcttcataaagtgtaagtaccttgttgg

SEQ ID NO: 174539 - DNA, 483 bp, Arabidopsis thaliana landsberg
gctgagttgttgactgggttggaaaactccattccaactcactgcctaagagagcctaagcagcccaaaaagccttctatgatgaaaggagaatcaagctcaagggtagagactaagggagacctattgaatattgattctattgctagagagcttatggagcttgggaaggagtatgaagctcaagaggacatcattgacaagttggacctcaagatggaagaactaaactatactatcttggagcttaaggaaatgattaaggggtatccaagtcccgaagtagaggaatactttgaggaacctgattcaggagaaggagactagactacagatgagaaacaggcttactttgagaaaagatctaatgaatactctactctccagctatctagagaaaatgaagagtatgattcagactttgaggattcagcaagtgaagatgaggacttcttagttcctctcctcaatctcttctctacc

SEQ ID NO: 174540 - DNA, 387 bp, Arabidopsis thaliana landsberg
tcaaaacaggttcgttattccaataggttgatactcataaataggttaagccaattatctgatcctttgatatgtcagatactttctcatcttcccataaaggaggttgtcacgacaagcgttttatccactagatggaagaagatctggcttagtgttcctagtttggaattgatatattcgatattcccaaatttcaatacctttaggagttttggtgataggtttttcgattccactagggtttcatgtatacacaatcttaagttatattttgatgaacatgatgcatgttatcttacatcatggatcaatgcctttgttacacgtaacatccaacgactatatgtccgtcgtgttcgtgggaattattttcatgagcgggcc

SEQ ID NO: 174541 - DNA, 211 bp, Arabidopsis thaliana landsberg
ctatcattacaagaaaacaggtaaacgacgactataatcagcgacaacaaacgtagtcataacattatacgactatttggcgacggatttacgactcgcatgcgacaacacgaaaaattgtagttacatagtcgttgttttacgactatcgtatgcagtcggcaaagagtcggcaaataacgactatttgacgattatattatggaaggga

SEQ ID NO: 174542 - DNA, 1288 bp, Arabidopsis thaliana landsberg
tcggttgccaacattttttaccccagggagtctacaggcaccatgtctaacacggacatgaagatgatagatttcgcgcttccagggattctccgccgtacaaagggaaagaatgtcttgagaggcgatctcaacaacgcaccaccagtaatgcctctgttgatccacctgtgtggatacaggaagtgggcgttgacaaacggcaagaagaaggtgagaggagcattatgcgtgggtggcgttgtgacgccaattctggaaatttgtggagtaccgctcaaggagccagggttagcacggagaatgatggacttggatcacttgcgccgatgtgagtttgacatggttggcaactttcaccgctataggtctgagcattcattgattagaatcgccaacattcttctcccctgcattgacgctactaggattctcgagggaaggaacattgatttcaagcctgcgcttgaagatctttatttcgagggcagtccgccaactgaggagattagtcacaccgaaggagctacaacagaagatgttgatgagacagatgatatagatgaggcggagtttgacacaagcatgtatcatttcagtgagcatatacctcgagcgagggatagcaagagtttgagcgaagctcacaggaacaacaacaagctgcagaagtggtgcaagaaacaggataagttactcgccaaatgcctcatggctatcaagtttctgaaggacaagatcagctgctcctcttccactacagctattccgcagggacagctccctcaggacatgccctcgaggagatatgacgcgcctgagccaagtcggcacgagcctgagcctagagagcgggagattccgcatgtccctgtgaggtattcatcattcaagcctcatgaatctgggaggaagaggaggaccacactcactgaatctagcagcagaagtagacgacttatgcagtctcatagtttacgcgaccgcggtgctggccgcaacagaagaagagaggtcgagtatcctcagagcggtgctggtcgccacagagctgatgaggtcgagtacccaccctctggagctgatacggaacatggcggttcgtccatagcctgggagcaatcacaggcagccattgacgaccaactttgctcattcttcgactgaggaaagcgcctcacttcaccattgtattatatcatctcttgtaatttgttctttattttgtttatgtgattggatttgtcctgagtactctcttccaagtttattcacacaatgtactgtg

SEQ ID NO: 174543 - DNA, 1228 bp, Arabidopsis thaliana landsberg
ccagttccacgtgcattattatgtcatagattttaatgcttacctctctttgtgatgaatcttctgaagtttattttgaaattttgtttaggctgtttcaggctgagcttgctagagaaatgggttacactgctgctaggtttgggcatgttatgttccctgagaatgtatatgaacctgccttgaagtgcgctgagctgttattagatggagtgggaaaaggtttctaaacttgctctgtcacattgtttaattttcaaacattgggggatggttaattattttatgcatgcaggctgggcttctcgagtatacttctcggataatggatccacagcaatcgaaattgccttgaagatggcatttcgtaagttttgtgtcgatcataatttttgcgaggctacagaagaggaaaagcatattgtggttaaggtacaattatcttgctaatgctcaatgatactttgacacttcgttgtacctggtattgaacatttgttttccactttgctgcttactaatatgcaatgcaagttcctagctgatcatcatttttcatatgcaagagtatcttcatctatctaattttgtcatttgcggtaaaggttctaatgcgaaaatttgatgtgtgttatatcttaggtcatagctcttcgggggtcttaccatggagatactttaggagcaatggaagcacaagcaccatcaccttatacaggctttctccagcagccgtggtagggaaccttttcatttgtttgccatttctggagaattttgtttccaacattcatcttctgatttaaccattcttggatcatttgcatctcctgcactaattcatcatttgcatagcaacaaacccttagtgttgcttagatgggttgtcatcccttagggataaatcagccctttttcacatcttcccaaattgtcttgagcaagcattctttatcatgttattcagcttgtcctttagttaggctcaaatctatttttggattgtaggtatactggaagaggcttgtttctggatcctcctactgtctttctctccaatggatcctggaaaatctccctccctgaaaagtttttctgaaatagccccagaatatggaagtaaatagcatcctttcccatctctctgatatcctccggtacatttcctttagatgcatgatttagtattcccaaactcttacagccttcaccagccgtgagagatttt

SEQ ID NO: 174544 - DNA, 538 bp, Arabidopsis thaliana landsberg
aaaaagagaactcattccttattataaatgttgacatatatagtttttaatacaaatatggttcaggttatcaatgagtcgcttagaatcataagcacagcaccaacagttcttagagtacttgaacatgacttccaagttggtgattatacaattccagctggttggacctttatgggatatcctcatatccatttcaattcagaaaaatacgaagacccttacgcatttaatccatggcgctgggaggtgactataatttcatattcatcattttacttattcactccatttacactaatcaaagctataggttgtgttaaaaacttttaataaattaaaattttcagggaaaggatttgggcgcgatcgtctccaagactttcattcccttcggtgcaggtcgtagactttgtgtaggggctgagtttgctaagatgcagatggctgtttttatccatcatttgtttagatacaggttctcaccttgataaaatgtgatatactctagtctttttttactacattcaaagttctt

SEQ ID NO: 174545 - DNA, 877 bp, Arabidopsis thaliana landsberg
cggtaactgtgtgtcatccttccccctggggagatcatctagtgccgagaggcctcgggcaggatcgcgaagtgggtggtggaaatcatgggcgaaacgatctcgttcgcccctcggaaggccatcaagtcccaagtgttggcggattccgtggccgaatgggtcgacacccaactgccaacgaccccgatccaaccggagctctggaccatgtttttcgacgggtcgctgatgaagacgggggccggcgcgggcctgctcttcatctcgcccctcggaaagcacttgcgctacgtgtgcgcctccacttcccggcgtccaacaatgtggccgagtacgaagctctggtcaacggattgcggatcgccatcgagctaggggtcagacgcctcgacgctcgcggtgattcgcagctcgtcatcgaccaagtcatgaagaactcccactgccgcgacccgaagatggaggcctactgcgatgaggttcggcgcctggaagacaagttctacgggctcgagctcaaccacatcgctcggcgctacaacgagactgtggacgagctggctaaaatagcctcggggcgaacgacggttcccccggacgtcttctcccgggatactgcatcaaccctccgtcaagatcgacgacacgcccgagcctgaggcaccctcggccgagcccgaggcaccctcggcccagcccgaggcaccctcggatcattccgaggcaccctcggctcggcccgaggtatcctcggttcaacccgaggtaccctcagcccccgagggcgagacgctgcacgtcgagggggagcaaagcgtggtcacgcctgatcaaaactggcagaccacgtacctgcaatatctcggggatactg

SEQ ID NO: 174546 - DNA, 366 bp, Arabidopsis thaliana landsberg
ttttccatgttgtgttgagcaggtagtgtttgtttctccggcaccttcacatccacatatttacagcaatggacatatttgtttaggtattgcttgctatctcttggttaatgtctgcatatgcttatattttgtttgatcacattctaagagttctattacccccaagacttgcataatcttaccttgtctaattagttttaagatatgtaacgtagaattcaaataattttgacatgttatgagttttctggcaaaacgagaaagttaaaattgctcagtttgaagatacgttggtgaccctatggtgtttatattgtattccttgtgtgtagatactttttactcagtctgtgtgatactcaa

SEQ ID NO: 174547 - DNA, 507 bp, Arabidopsis thaliana landsberg
tcataaccgcgctgcgatcctactacaggatcactactagattgcgcatccaacgtctccggtaaccacgatgttcaggaactttgtggtccaacatgtgcttacactgtatgactcgcgttgcattcacaacatcgccgttaatctttatggtcagtgcattgagctatcgtttaagaagtatggaagctacatcgtggagaagcttttggaggtggaggagtcaatggttgtggtggttgtggagcttttgggttgcgatggagacaggttgatgaggctggcgaggaatgaatttgggaatttcgtggtggtcaaggctctgagattcaccaagatgtctaggatggatctgttttggggtttggtgcagaagctcatgccttttatccgtctcttgcgtagatctcacggaagcaacattgcaaacatcttggactcatttaggcttcgttgctgattataactctgtgtttatttttcaaaccagcttacaatagtttaatt

SEQ ID NO: 174548 - DNA, 271 bp, Arabidopsis thaliana landsberg
ttattcaccatcaactacattatttccaggagtctatcacatgatggctctaataccacatgatagactcctggacgtggatctatgctccaaggacacactttgttggttttgaaatggaaatgatgtagttgatggtgaataatggattgatgtcgaacaaagcggcggaagacgacaaacggggatgacgacgagatcgagtggatgcagcggaatgaaagggggaacgagttgtacttccaaaagtgataaaagactcttagactct

SEQ ID NO: 174549 - DNA, 697 bp, Arabidopsis thaliana landsberg
tctacctccatgactatcctccattagaaaaaaattactcagttaacacaattatttttgcttcctcatattaacgccctataaaatgaccttaaggtatttgtatttttaacatgtttctatacatcccgtcttatttactaatattagctttggacaaatgccagtggatccgctaataattactgatgataatgtagaccaaagttgagcacagtgggatgatgaggtgaaagacatgaaagtttcatatatgtttgagttgataatgaaatctcatcaattcaaaaaagtgaatggccaggaggtgatgacacattaccattcatctcaatctcaaagaagaagctttctattgttcacaaaaggcacattgtcgattgtaagaagaaacaactgaaaaagaaatcaaatacaagtcaactatgggtgtagtctaagcttcccaaaccaaagcattggtattcgactcatacaaagtcagaactcaagctacctgatgatgagaagtccagtctcctcgttgaactataaaacaaggtggcaaagctatcaaagcgtgtaaatgactgtgtacaagtcgaatacctatgctttgatttgtattttacgctctagaaaacactcttctagatttgctgaatgttcttctagatcaaggcgaatgctgctgcgtgaagtaaaatacagaagccac

SEQ ID NO: 174550 - DNA, 411 bp, Arabidopsis thaliana landsberg
ttctacaggtttaggtataatttttatgcgttctccgaatgcataagttatttttggagaaaactcaatgtgtttttgggatgtgcgtgttcaattgttataaccgataaagggttttaatgatttggtcttgagttggttgaattgggacatatatccttggaagcatgacgttagtcagaatatatgaatcatgctattttaggttaagtagaaatctataagggtggtatcatttatgatttatgcagttatttatgtctcttggataagttggttatatacctctcatattgttttaagtatttttgatcattttgtggcgtcatatatggaccccttaacggtcttgggcagcgtcagcgggaaaagtgagaggaatggattgtttttttgatagtgttgtatact

SEQ ID NO: 174551 - DNA, 1607 bp, Arabidopsis thaliana landsberg; identical to SEQ ID NO: 19144
  unsure (1)..(1607): unsure at all n locations

SEQ ID NO: 174552 - DNA, 138 bp, Arabidopsis thaliana landsberg
atgacctcgtacaagctgtttttgagagtcataagcaagagaagaacatgggtctgtctgtttcttgtagtttacgcggtccttttgtcttcttcaagaaattcgttgaattcgatagtgaattggtacggagagaat

SEQ ID NO: 174553 - DNA, 263 bp, Arabidopsis thaliana landsberg
ttatctgaatgctttttagactttcttcagggttctttattaaaccatttgaatcaggttattgattagatttggttgaagtttttcagattctttgcaatggtcctgggacctgtattcctctgtgtgtgatcgcctttttattcaaggtatacacacttcggaaatattttatcaagattctttgcagttctttcctctacattttggatgaccttgaatggacttgtgaccaaaaacagaggatgtgttttgtttattct

SEQ ID NO: 174554 - DNA, 482 bp, Arabidopsis thaliana landsberg
gagcaacatgagtactttactcaagctgattataagcagcaaatcgagtttgagcaacatattgatcaatcggagcatgagaccagcgaacaagagcaagctcattgtaaagaaggtgctgaccaaggagtagatgagatagctgaagttcacaagaagctcggtgtgcttgaagagcttaggaaccttcacagcaaaacaatgaaggtttcaagaagaagatgagaacaatgaagaagtcgctgaagagtatggctgctcaactcaaggacttccagagcaagccaaggccaacgtctcccactcccgaagtaagaagaagcggttcaacgagctcagctgcatggagagctgaaaggatcgatcaactctgagcttcatcttttgagcctcgggaagtgatctccgagttgagagagccaaggagtaggcagagacgagcttccacacgctcgaccggacaaaacgagcaaaaccctccc

SEQ ID NO: 174555 - DNA, 430 bp, Arabidopsis thaliana landsberg
  unsure (1)..(430): unsure at all n locations
gttgtctcatagagggttttggtaagaaaaataagcaaactnttaggcccaatacataagcccaatccgaagcccatctcactcagtcttcgaaagcttttttaatcggctacaaaccaaaacagacctgaagcatgtcgtcgggatctctgcaatttcaagtgagttctttgccgtcttctctatacaaagtgaggagctttatttttcttctttattggtggatctcaagtcaaccccctttctttcgttgaaggtgctagaatacaatgtaagtggaggtgagaccctaatcaccaattctcacacacatttgcttcttctcttttactggtaaactgaatcagggtctctctgtagtggaaagcttcaaacttgtgaagcaaggaaaagactttaacgagaaagtggttttcctctctctaaattt

SEQ ID NO: 174556 - DNA, 702 bp, Arabidopsis thaliana landsberg
accccgggtaaaatttggacaacaccattctccaaaaagatttttactaaatttgttcaaaaggaaacttagtgtgcaagtgtcatataagactgcaggcagagataaataaaataaggtgcaacatgttctattttcttatatttctattttcttatatattcatgttagagaagatgaatccttgtacggttttatatgttgaaagtggatgataaacgaaagttttggtacttcttcacattaggggtttctattgaagactttctagtcatggggaaagtaataattttggatgaaacccatccttaagacaatatatgatggagtgctaattattactacagctccggatcgagatcatcaccattatctgattgcttttggcgtaattgaaggtaagaaagatgtcagttgaacttggttttacaaaaacaaaaaatcaaattgcttatgctagattgtcctgaaattgtattttattttaatataaaccaaaatctcatcaaaacaatagctatggtctatctgttgtctcaccatgggtattgtatttatcatttgtcttagaatgtgaaacaaaggatttgcacatattgcacatattgaacaactgaacatatatgaagtgagatttaatagtgaataaacgcgatggaagagaagaaaatagaagatatggagatacaaaatcaaagctat

SEQ ID NO: 174557 - DNA, 2428 bp, Arabidopsis thaliana landsberg
  unsure (1)..(2428): unsure at all n locations
cgtcgggcatttgaccggcatacttggtccgtcgagtatcgctgtgtggtctaccagcatagtcgcggggtctacccggaccgctgggaggcgacttgcttggtgcgctgcccggaggacagtctccagggtgcagaggcctgttcagagcactattctatctctgagcgggactcagctgaggcagccatgcaagatgctgcacggcgtgccgtttcgcactactgctcggttttcggtggggcagctgacggtcttgacctgaagtattacccccgccgtccatctggcagcacaggaggcgtgattgtctcacctgtcggtgagggcaatcctaggttgagcagcacagtcaacctagccgccgtgctaaacacggagctggaccatgcattagacgagctgagtagggctcgtgctgagatcgcccagttgcgggctgagcgcgcggaacgtcgtcacttggatggtggttcccccgctcccgttgggactcagcacccgtaccgctcacctcagcgtggacaccagtcttatggcaatcccgactgcaagaccaagataactctagaaccatagatcgttagagttggatcttgtaattaatacgaaatatatacatagaagcttcagtcttagcgttagtctcggtcttagttagtcttagttagacagggtagtttgctatatcctgtgcatttatgtttgtcatgatgaaccatgtttggtttggatctttgtaatgactgtcaccagagtgtgggtacccctgcattttggtttacctattatgttaatagagttagttatatagttgggaaaccctttcattccactttcctttctatctgagaagctgtgtggtctgtgttggagatcagtgaagatgctcatctgttcagtgctgttgaataattctattctcttttcttatgctgcaagacttgccagatcagttctgatgtgtggttgcattctgtagatgtcagagaacaggcgcagaggaggaaggcgtgctcagcaggagcgagccggtcaacaagatgaggcgccccagcagcagcagctgccgcccccgcccccgatgtcgatcgagcagatgtttctgatgcaaactcaggcagttcaagccatcggtcagactttggccgccattcagcagcagcagcagcaacagcagcaagcaccaccccagcctcagatgcccagagacaagcgtgctgaattcatgagaggtcatccaccaacgttcgctcactcttctgaccccatggatgctgaagactggctgcgcactgtggagcgggagttgcataccgctcagtgcgatgacagggagaaagtcctgtatggtccccgtctgttgagaggagcagcccagtcatggcgggagtcttacctcgccacccatgcccaccctgacgccatcacctgggaagagttcagaggaagctttcgtcagtaccatgtccctgcaggtctgatgacagtgaagaaggaggagttcctggccctcaagcaagggccattgcctgtcagtgagtaccgagacaggtttctgcaattgtctcgctatgctcctgaagatgtcaacactgacgccaagcgacagtatcgtttcctgagaggcttggttgaccctctgcagtacaaactgatgaatcacaccttccccaccnnnnnnnnnnnnnnnnntagagcaatcatgacagagaagaagtacaagaagatggaggatcgcaagcgcaagattggtggggctcagcctagaagcagcaatcgcccccgtttctcgggcaacccacctcagtagttcaagcagaatcagcgtccgcccttgcagcagttttagaggcagtacccccagcatcagcagcagaatcgacaaaacagtcagtcaggaggaagtcagttctagaggcagaatcagcaggcacctcgtcttcttgccccagcaacccaacagaacagtcaagcagccctagttcaaggcagaggccgagcatgtttccactatggagagcaagtccattgggtgatgcaatgtccgaagaaggcagcccagtagcagtcaagccctagtgccccagcaaagcagaatgtaccccaacctggagcaggcaaccgctcccagccacgctacaaccatgggagactgaaccacttggaggctgaagcagttcaggaaacccacggcatgatagtaggtatgtttctagttgactcccatattgcagaagtgttatttgatactggagcaacacattcatttattactgcatcatgggtagaagcacataatcttccgataactatcatgtcaacacccatccaaattgattcagccggtggtaggatccgagctgatagtgtttgcttgaatgtaagtgtggaaataagggggataaattttccccactaatctcta

SEQ ID NO: 174558 - DNA, 563 bp, Arabidopsis thaliana landsberg
  unsure (1)..(563): unsure at all n locations
tcattaattattttatctactaacctttttattacatttttcatatttttaacttagtntgtggattcctatttatattcatttgaaggtgggtaagtgcaaaaacagtntgcactgttttggcaattgatacagattggctgtggtactatttttgttgtcgtgctcacaacaagaaggttgtcaaagaggaagttatcaaacttgaagatgtcaagctacctcagaagccaagattttggtgtgaaatatgcaatggttttgcaaaaatctgtcgtagccaagttagtctttgtgaaatctttatattgaatgtattatgaattataatttggtgtttagaagctaataatcctatctaacttttaggttttggttacatttccatattatggacaaaaccggtgaagctagatgcatgttattcgatagtcatgcaaaggaaattcttggtactactgcccctgaattgcttgatggttcatttgatgagttatattgccttttttaaaataaactctttcatcaaaatgactacgttcatgttatactaatctatattt

SEQ ID NO: 174559 - DNA, 244 bp, Arabidopsis thaliana landsberg
  unsure (1)..(244): unsure at all n locations
accccaacctctcttaccgcagcactaacgttgctaatccacatgatcaagtgtatcctccacagcaacaacaaggtcaaaacaaaccttttgttccctataatcaaggttttgttccaagcagcaatttcaggggaactaccaacagcaaccaccaccggggtttgcattcaacaannnnnnnnnnnnnnnnnnnnnnnnnnnnacatgaaacaaatgctacaatagcagctacagggacaag

SEQ ID NO: 174560 - DNA, 265 bp, Arabidopsis thaliana landsberg
aagatcaagaagagccaaataaggctcctttcaacgacacgtttcgtcggaaaatgtatcagtttcggaagaaccgaagacaagcgtttcagaagcaacagagagattacaggattcaagaagagagtcagcagcgagtgaagaaccaaaacgaagcgttttgggatcaccacggcagtgtctgatcctcacgcgctgtaactcggagccagcgagactcgttcccgagatgggttatcgacagaacccaaggttgggatttacg

SEQ ID NO: 174561 - DNA, 757 bp, Arabidopsis thaliana landsberg
caaaggattgtagtgttcttaagaggcatttaacggagctatgtgcaagtagagatctcgcaaatttcaatattaaggattttatcacaaaataccatgaagcaagagccacctgcgaaaaccaagctctactgaggccgaggtaacctaacgacgaagagtcgagaagttcaaaagggaaaatacacgtaatacttgaaggatccaaactttgtcaggattcagtcagtgccattaagatgtataggcaaaacgttttgttgaaagaaagcttgagcgaagaggtaaacatcccgcacactttaatttccttcgaagaggaagaaacctgccacctcgaaagacgttatgatgatgatttggtcattaccttggatatcggtaactttgaagtctcaagaattcttattgatacaggaagcttggtggacccaatatacttaagcactctagagagaatgggaataagtcgggctgatatagtaggactgctattaccactagttgcttttacaacaatacagccatatctctcgggacaatcaagctacctatcttagccggaagagtatagaaaatcgtggagttttatgtaggtcaaattaatcctaagacactcttatataaaaaggtcagttgcagcacttagggatcgaattcacaaagttctcgaatcatgcaatatactaatggctaacgaattaagctaagtaaaatagtacaaaaaataaaaagaaacaaaagtaagcaatagcag

SEQ ID NO: 174562 - DNA, 579 bp, Arabidopsis thaliana landsberg
aggacgaatcctgatgcgttgatccaagcagagatcgcagacagagaacgtgaccttaaaaactccactaagcttcctatcttgcacggtgttccggttcttctcaaggattccatatctaccaaggacaagcttaacaccacggctggctcgtttgccttgcttggttcggtcgtggctcgagacgcgggtgttgttaaaagactgagagaatctggtgctgtgatcttgggcaaagccagtttaagtgaatgggctcattttcgatctttctccatcccagatggttggagcgcacgtggcctccaaggaaaggttactttcttcattcatgacattcatttctctataactatttggtaaaccaaacatcttacaaaaagattctaatgctgcagaatccatatgttttatcagcaaatccgtctgggtcaagtagtggatcagctatatctgtaacagccagtcttgtggcagtgtcactagggactgaaactgatggttccattctgtctccagcaagtcagaactctgtggtcgagaataaactgagtattgggttcaggagccgagctgggg

SEQ ID NO: 174563 - DNA, 384 bp, Arabidopsis thaliana landsberg
atggagaaatgtggactagtagttgcatcagccatttttaacgaccatgacaagataagacaaccagtgggacttggagttaagaccttagaaaccgtttgcttctacatgttcatcgtcgataaaaccttaaattctctcttccaccacaatgtcatcctgaaaaacaatccaagtgattatagagttggtgcatggagaatcatcaaaatttcgaaatccgaaaatctataccttaatccggctatgaacggggttataccaaagtatctaattcatagattgtttcccaactcaaagttcagtatatgggtcgatgcgaaaattcagctcatgattgatccgctacttctaattcattcaatgttagtaggtgcctgaagt

SEQ ID NO: 174564 - DNA, 1807 bp, Arabidopsis thaliana landsberg; identical to SEQ ID NO: 19667

SEQ ID NO: 174565 - DNA, 514 bp, Arabidopsis thaliana landsberg
actcatcgcagtcatcaactctgtctcactctattgccgtgtaggactctgcttttcatggcaagctctcgcctactttgtgctcgtaatctggatcattgtcctaatggctaactcttttgtacttttcttgagctctctcgcgcctaactacattgctggaacatcttcagtgaccattcttcttgcggctttcttcttgttctctggttacttcatctctaaagagagtcttcccaagtactggctcttcatgtacttcttctcaatgtacaagtatgcgttggacgcacttttgataaatgagtactcgtgtctgctcaacaagcgcctggtctggtttgaggaagctcctgtgaaaagctgcttagttactgcaggtgacgtgttagacaagaatgggcttcatgagagacagaggtggattaatgttaatatgttgacagggtccttcgtacaaaatcgagatcagtgttttcttgttatgctaaacagggtctcaggctccaaaaga

SEQ ID NO: 174566 - DNA, 187 bp, Arabidopsis thaliana landsberg
atggtgtctttgattaacattgtgtccgtagtgtttcttttatttacaacattctaccactttggtgaggctagaatcattaatgtgggaggatcattagacgcatggaaggttccagaatctcccaaccactctctcaaccattgggctgagtccgtccggttccaagtcggagagctctttgttc

SEQ ID NO: 174567 - DNA, 185 bp, Arabidopsis thaliana landsberg
aagagacatttgagacacttgaagagcaaatagttctgatggatagacaaaagtatgtgaaagaaagatagattgacttattgagacagagtctaaggattcttggaagcaagacgaaaaagaagacaggatcattcgcatcaatgaatctgttgatattgaacaccaaatgtgtcgaatgtaca

SEQ ID NO: 174568 - DNA, 657 bp, Arabidopsis thaliana landsberg; identical to SEQ ID NO: 45106

SEQ ID NO: 174569 - DNA, 582 bp, Arabidopsis thaliana landsberg; identical to SEQ ID NO: 271

SEQ ID NO: 174570 - DNA, 737 bp, Arabidopsis thaliana landsberg
gcgtggaagagctaaattttagaagtatatcgatgcaatgaaatagttacaaaagagattaataaattttttattcatctactctaatatattaatagacatatcctgctttcgtctacctaattccttgactttaagtctagaattcgacactaaacaaattaggcattaattgtaaggtatggttataaatgcatgtcgagtaaaaagcaattttatatcatgacgtgtttaattctctaggtgaactttctgtgggtcacaagaaaagacgtggaggagataattggagaaggattcaacgatagaataagagagagtgggatgatagtgagagattgggtggaccaatgggagatattgtcacatgaaagtgtcaaaggatttttgagccattgtgggtggaactcagcacaagagagcatatgtgtcggggtcccattgttggcttggccgatgatggccgagcaaccgctcaatgcgaagatggttgtggaggagataaaggtgggagtaagagttgaaacggaagatgggagtgtaaaaggttttgtgacaagagaggaactaagtggaaaggtatcgaaatacaaaaacatatgttgagtttagaattatgtgacgagttagggttttgtttttgtcttctaagtggtaataagtatttttatttcacagattaaagaactgatggaaggagaaacggggaaaaccgcaagaaagaatgtaaaagaata

SEQ ID NO: 174571 - DNA, 437 bp, Arabidopsis thaliana landsberg
ggtggacattcgggatcttcctttataggctcctccatgggaccaccccgttcaaggggcagggaaacagagccacgttgcacaatgtggtgggtcagccgctgaagttcccggataccccgcatgtgagctcagcggcacgtgatctcatccgcggactactagtgaaggatccacacagaaggatcgcttacacgaggggggccacagagataaagcaacaccctttctttgaaggagtgaattgggctctagttcgtagtgctgccccacctcacattccagaccccgtggacttgggaccgtacgcggccgctagaggtaagaccaagagccatggaggtggtgatcactgtaactcaatgaagccggagcctctggtcgcctgtgctgctggtcccacggatgatacggcgtatatagatttcgagtacttt

SEQ ID NO: 174572 - DNA, 1435 bp, Arabidopsis thaliana landsberg; identical to SEQ ID NO: 9173

SEQ ID NO: 174573 - DNA, 584 bp, Arabidopsis thaliana landsberg; identical to SEQ ID NO: 67352

SEQ ID NO: 174574 - DNA, 547 bp, Arabidopsis thaliana landsberg
tccattgctcagcaacgcacgtgaactgggaagaataatggacccgaggcttgaagatcagtactcagagaccggagcacgaaaggcagcaactctagcttatcaatgcctaaggtaccgaccaaagacaaggccagacattagcactgttgtctccgttctccaagacatcaaagattacaaagatgatattcccattgggatattcacttacaccgttcctaccaagccacgccgggaagttaaagagacaagtcttcaaaactttgacaagccacgccgtgaaactaaagtgacaagtcttcaaaacttcgacaaaacacgccgtgaagttaaagatacaagtcttcaaaacttcgacaaaacacgccgtgaagttaaagagacaagtcttcaaaacttcgacaaaacacgccgtgaagttaaagagacaagtcttcaaaacttcgacaagcctcgcaacgtttccgcgactgattaacatcaaaagttcaggtcgcccgcacacacggcaagaaaccaccggagaactttagaaaagatatat

SEQ ID NO: 174575 - DNA, 507 bp, Arabidopsis thaliana landsberg
  unsure (1)..(507): unsure at all n locations
atcctcgaaagctactataagaaacagagcaaaggagttttctcactcgatttccctgagaaaccaccgnnnnnnnnnnnnnnnnnnnnnnnnnnnnnnnnnnnnnaaaacatgaacacagaattcggtacgaagctattcgaagtcgaattcggatcgagattagagatcgtgtttcagggaacgagtttcttaaacatcgagaatcatcctttacatgtacacggacacaatttcttcgtagtgggaagaggatttgggaattttgacccggagaaggatccgaaaaggtacaacttggtggatccgccggagaggaatacttttgcagtgccgacgggaggatgggcggcgattaggataaatgcggataatccaggagtttggtttattcactgtcatctagaacaacatacttcgtggggtttagcaatggggtttatcgtcaaagatggacctcttccttcacaaactctgcttcctcctcctcatgatcttcatcagtgt

SEQ ID NO: 174576 - DNA, 746 bp, Arabidopsis thaliana landsberg; identical to SEQ ID NO: 21651
  unsure (1)..(746): unsure at all n locations

SEQ ID NO: 174577 - DNA, 162 bp, Arabidopsis thaliana landsberg
gtggcggcggatgcggaggagaagacggtggtggtggagagttatgtggtggatgtgccggaaggaaatagtgaggaggaaacgacgtcttttgctgatacaatcgttgggtttaatcttaagtcattggctaagctctcggagagggtggctcatctaaag

SEQ ID NO: 174578 - DNA, 240 bp, Arabidopsis thaliana landsberg
ttattttgcacacttaggtatttgggatcatcttgcatacattgcatgttttggtgtgttttcaggtgtagaaggagcttacaaggaatctactcaaccctctacactatcaaaccaagaggaaagcagcagagcaattcatttgaccccttttctcgatccaggaagccacagaggaggcaacaaacactactcgaccccctactcgatcctctactcgaccagttactcgatcagggg

SEQ ID NO: 174579 - DNA, 241 bp, Arabidopsis thaliana landsberg
atgcacactcgttccaaaggaattgtgcccctacttcctttaagagacaacattgattggatagctcatgagttacaagaaatcaaagaaaaagcagactgcgatcagcaaaaccatttgttattaatcaactgaacagacgagtcgagatacacgatccaccttaatgttgatcaattaagaaacatcgtgggctcttgatgccctaagaaattttcaccaatgacaagggattgtgcct

SEQ ID NO: 174580 - DNA, 414 bp, Arabidopsis thaliana landsberg; identical to SEQ ID NO: 70269
  unsure (1)..(414): unsure at all n locations

SEQ ID NO: 174581 - DNA, 1214 bp, Arabidopsis thaliana landsberg
ggttttcgtcttttgcaggacgacttcatttgataaaatctgttctatctagtatcactagcttttggtaatccatcttcagggtgccaagtaagtgtattaaggaacttgaaagtctcctctctgctttcttgtcgtctggtccagatttaagcacacgaaaggcaaaaattgcttggttggaggtttgtaaaccaataaaagaaggcgggccagatctatgcttattatctgaaacaaacaccgtgagcataatgaaacttatatggagacttgtttgagctaaagattctctctaggctaactgggtccgagtcaacttgctggaaaataagtcgttatggttagttcgtggaagtagtaacatgggctcctggatgtggaagaagatcctaaagtatagagacaaggctactcctctacaaaaaatggaggtacgctcaggtttagaaacatctttttggtgggatatttggagctctatggggagactggttgatatttttggtcctcgtggttgtattgattgaggtattagttcttcaagctcggtggctgctgctctttcaacgcatcgtcgtcgtcatcattgtaatgaagcataaaacaaggttgaggaggagatggcttccctgaatgcttgttctactcaacgggtcgggatatctgtttttggaaatggcacaatggtgcttttaaacactctggtcagttcaaaagatattttacatgcaattcgagtttcttatcctatttgggaagcgtacaggggagtatggttgcccatctacactgccagagactcatccctaacaaggatagcatttcgcaatcgcctagctacgggagaaaaattagtaaagtggaataatgatgctaatgggggttgttctttctgcgacgaggctatggaaactagagagcacattttcttctcttgtccatattcatcagcagtgtggtcagcccttacaaaagatttgcttggtcaactctttacaacaagctaggaatcaatgactgccctactcacggatccaccaagaccaaaagtccatatgttttgtcttgaggtatgtttttcagctgtctattcacaccttatggagagaaaggaatggaaggcgacatggggcatcgccaatcccatcatctaagctagcaaaactgatcgataagaacgttcagaatagacttagcactttgataacatc

SEQ ID NO: 174582 - DNA, 1365 bp, Arabidopsis thaliana landsberg
ttggcgaaggaagatccgactcttgttcttgtgcttctccgaggtcaaccaattgcataaaacgacacaagaaagaagcacaggagcttttggaaaaggaaattaaccgtgctttctctacatgggaatttgatcaaatgggtgaagaaatagtgttaaagtcgtggacggccaaagaagagcgaaggtttgaagctcttgtgaaaaagaatcctttgtcaagtagtgatggattttgggaatttgcttctaatgccttcccccaaaaaagtaagaaggatctgctcagttactactacaatgttttcctcatcaaacgcatgagattgcttaagtcttccgctgctaaccatatcgatagcgatgatgaccactatgacgatttcttagcaggatgaaggccttgttgataatagtaaatccgtaaccattgcagagtttctcgtgcttacaggtatttcactcttttgttctacatgtaaatcgctctaccatgttcttgattccaagtgattcaagaaccggtttcctctaagtttctttgtcataggatcttttagaagagatccttgtagggccaaattaaatgtgagttgtcatgcgtagctttttttcttttcttcgtgaaccttaaagatttgtttcactcacgaaacagttctacaatatttcgaatctggaacctttaatattgttaagttttcttaggatatttgacttaaaagtcccaaggcttcaaagattctctagtaatattttcctagtttttgatctttcttttttctttcaaattcaaagagagaacctagtggggtaggctagcattgttttggtttcatattcattttaatcaattatatttttgaacaaaaagaaaaacaaattattagttttcataaaaactaaatgtgaaaagaagttttggtgggcaataaatccgaaccaaaattcatcaatccgaatccgaatcgaatttgtaataacttgaatggcttagaattttttattttgtattattcgagtcgaatgtgatttgtgttttattgagttttgagggttacaaaatcgaccggtaaacaaaaaaaacttacaaaatcgactggttaggcataagagaaaatatcaaattggttataccgagttacaaaattcaaaaaactgaaaagatatctccggtgaagaatccggcgaagagagggccatcgtcaagctgatgaaccaaaaataacagtagattttggaaaatattttaaaatcaataattgaataacataaaaaaaattattgtaacacaaatcacttaaaatgcgactgaatgcacctttttatcaaaattctacaaaagaaaaaacaagaatgtattga

SEQ ID NO: 174583 - DNA, 214 bp, Arabidopsis thaliana landsberg
tgaagagatccccctgtccgggcggatcgttgccgtcttcgatgtctgggatacgctcacccacgatcgcccgtatcgagcggcctgggagatcgagcgggcgctggaggagatcctcggcggggcgggcacgcacttcgatccccgggtggtcgaggcattcgtctcgctcgaccacgatgcgttcagcgcgccgcagccgaccgctggcatc

SEQ ID NO: 174584 - DNA, 1666 bp, Arabidopsis thaliana landsberg
  unsure (1)..(1666): unsure at all n locations
ggggggggcttgggaaggagcagaaattgctgntcctagagaggctttgcaagcagtgtcaaattcatgtgtcgaaagactagttaaagcattggtgatgaggagtaatgcttcactagtagttcttgtcatgaagttacattagcttgctgcattaagttgattcttgtatggctttgctatccctctctagaatagattgatgagttgactctcttggaagccatgttggggacattctctctgataagatctgaagcggagccaagctgctagaagggactcggctggagcttgagtgaccgaagaaatttgcaaacaaagtgccactatcacggattcatcaaagaattaattcatgaatgcattctttaaatcagtccagttggttattgaaccttgttctagttgacgcagccatgatgttcctctactttcgagagagtgtgggaagagtttgcaaagaaggtaatcagctggtacacctgctgctttgattaaggacactaagtcttcgaagacttccagatgatctagtggtgattcattagaatgtcctcgaaactctcctcgtgaaacaagagtatagtaggcatggtgaatagcaaagtcttctcttgcaaaaggaggtaggcggatcgctgatagattggagtagaaaagatcaactctgttgaagtcacctatggtagctggtctgttctgtagatggtgaatagcaaagtcttctcttgcaaaaggaggtagctggatcgctgatagattggagtagaaaagatcagctctgttgaagtcgcctatggtagctggtttgttctgcagatggtgtcgatcgacacctagttggtgtcggtcgacactatcgtcgaaatttgccagcagtttgttacgttccatcttgtagttcccttgtcacaagaaaaagaagcaagaaaacgcgtgagtaacaaaataaagaaaataaacacttaggctaaattctacacttagtctaatggtgaatcacagagaacttcggcaacggcgatataagtcaaattaatcctaagaccactctctcaaataaagaggtcagttgcagcacttagggataaaattcacaaagttctcagatcacgcagtaaactaatgactatcgaattaagctaagtaaaatagtaataaaaataaaaagaaacaaaaagtaagcaatagcagattttaaggttgtacgacaagataataaaagcgttaggcttatggtattctcatgaaacaaatgattagtagatcgattaatagctaggtttttatcgcaccaatctcgaactcaaactatgatattagaaaaacaagtggtgttccgcgaaactcttggcctagagctaaaaattaccggagaagccgagaatccttaagttcacctacgtaactaaaccagagcccttctatgagcctacctattctttcttaaatccttaagttcatctatgatagttctgataacatgtacctatggcaggtatacctattgtctaatatcaagttcgagttagttactctaaaactagcattaagaacattcaacatgaagaatcctacagataaccttgcaagggagcaatctactaaatcatctaaatccataatgagaaaccctaaccctaacaagaaaactactctaaca

SEQ ID NO: 174585 - DNA, 292 bp, Arabidopsis thaliana landsberg
caaaaatttagagcttaacatgaccaagtctctcaacagattcgagaaaatctactgccacatgattgagcctaggatgaaaaccgtcagtgagattttcgagtgcagggaatcacttacgccgatgagaaatgcgtttaatggaacgttcattgtcgccggaggttatacaagagaagacggaaacaaggcggtggcagagggaagaacagattttgtagcgtacggaagattgttcttagctaatcctgatttgcctaaaaggtttgagctcaatgctccgctgaataag

SEQ ID NO: 174586 - DNA, 398 bp, Arabidopsis thaliana landsberg
  unsure (1)..(398): unsure at all n locations
atggatcatgtaagcagtctgccagacgaggttctttatcatatattgtccttccttaccacaaaggaagctgcattgacttcgattttcagcaaaagatggcgcaatctgtttacgtttgtacctaatcttgatattgatgactctgtcgttctccatccccaagagggtaaggaggataggtacgaaattcaaaagagcttcatgaaatttgttgatagagtattggctttgcagggtaattctcccattaagaaactctccctcaagttgagaactggctttgattccaccgagtggatggttggataagtaatgccttggctcgtggtgttaccgaantcgatctgctaatcatttgtatacagcagattactatctgctgtcttcaaaatatt

SEQ ID NO: 174587 - DNA, 649 bp, Arabidopsis thaliana landsberg
gtttcccaagaatcaagagacatgcctgccttttgcttacatcgttcttcgtcagagtcctagacatgatcagcctagggttatagccgttttccttcgccatctctctcattaaccactccggcggtggtggtggtggtgtcgtcggatcgcgggaaggtggtatctctgtagtgacgacgcgagaaggtggtgaatctatgacgtgcgtatcgaacctgtaaagccttttcttttcatagagaatcgtcgaacaagaaaccatctgtgttgaaatctgaatctatgccttctcttcccttgaactcgcaaagcccgaccgccttctctatagaaaaatcattcatcaaagcaaagtcatcttctaagaatgtcctggacttgcgggtcatgatgagcttcttaggtgttttttgctctttaactatttctccagtctcttctgcagcttcaataggtaccttcagttggtatcatatttggtataaacctttgttacattctattttagatgattgctgatttcatttatctgttttgtgtaggatggtgtgatacttggggctgatacacgggcaactgaagggcctattgttgctgatacaaactgtgggaagattcactacatggcaccaaacatttactgttg

SEQ ID NO: 174588 - DNA, 639 bp, Arabidopsis thaliana landsberg
gctgtcgcctcgatgaaccgaatggtgcattcgtacgattcggccatgaggaataacattgaggcgaacaacaggttggccaaagtagatgctcgaattcaagctgccgagtgagaaagagacgaggcgctctcccaagccaccgccgcgaagatggagaaggaggaggccgagagggaggccttcgtgaacaaggcaaatgccatcaagatggccgagctcaatttgagggcggattctgaggttgttcgtttcaaacgcatgctagccgaggcgagggggctccgcgatagcgaagtggctcaggcttctcaaacggctagacgcgagacatcgaaggtttttatcgccaaactcaaagccccggaggagaaggtgtcgctccttgacaggatcagtgaccagtttatgaacttatcccaagcgcgacgtaatgcgcaactgatcaaggcacttgaggaaggtggggtattggcaactgagaaggaccaggttaaggaatggctgaaagacttcgccaataccgaggtcgatttcaccaattttatcacctagctgaaagaggaactcaaggctcctactcccgaccccacttctttaagtccgggcggccacagatcggttgagactcttgccgac
